United States Patent Application Publication US 2022/0213167 A1 - sequence listing, part 32

SEQ ID NO: 677612 - protein, 13 aa, Homo sapiens
  CDR3 for beta chain variable domain of TCR clone 338806 (TRBV12-4, TRBJ2-5)
CASSPGTEETQYF

SEQ ID NO: 677613 - protein, 14 aa, Homo sapiens
  CDR3 for alpha chain variable domain of TCR clone 338807 (TRAV29/DV5, TRAJ49)
CAASLSNTGNQFYF

SEQ ID NO: 677614 - protein, 17 aa, Homo sapiens
  CDR3 for beta chain variable domain of TCR clone 338807 (TRBV7-7, TRBJ2-2)
CASSSVPAGGEIGELFF

SEQ ID NO: 677615 - protein, 14 aa, Homo sapiens
  CDR3 for alpha chain variable domain of TCR clone 338808 (TRAV13-1, TRAJ35)
CAASKGGFGNVLHC

SEQ ID NO: 677616 - protein, 13 aa, Homo sapiens
  CDR3 for beta chain variable domain of TCR clone 338808 (TRBV7-3, TRBJ1-1)
CASSQDWWAKAFF

SEQ ID NO: 677617 - protein, 11 aa, Homo sapiens
  CDR3 for alpha chain variable domain of TCR clone 338809 (TRAV2, TRAJ33)
CAVESNYQLIW

SEQ ID NO: 677618 - protein, 15 aa, Homo sapiens
  CDR3 for beta chain variable domain of TCR clone 338809 (TRBV19, TRBJ1-1)
CASTPGQIQDTEAFF

SEQ ID NO: 677619 - protein, 12 aa, Homo sapiens
  CDR3 for alpha chain variable domain of TCR clone 338810 (TRAV8-6, TRAJ57)
CAVQGGSEKLVF

SEQ ID NO: 677620 - protein, 14 aa, Homo sapiens
  CDR3 for beta chain variable domain of TCR clone 338810 (TRBV12-5, TRBJ2-5)
CASGSRTHQETQYF

SEQ ID NO: 677621 - protein, 13 aa, Homo sapiens
  CDR3 for alpha chain variable domain of TCR clone 338811 (TRAV12-1, TRAJ33)
CGDAPDSNYQLIL

SEQ ID NO: 677622 - protein, 15 aa, Homo sapiens
  CDR3 for beta chain variable domain of TCR clone 338811 (TRBV4-3, TRBJ2-1)
CASSQESAIYNEQFF

SEQ ID NO: 677623 - protein, 14 aa, Homo sapiens
  CDR3 for alpha chain variable domain of TCR clone 338812 (TRAV35, TRAJ33)
CAGSSRDSNYKLIW

SEQ ID NO: 677624 - protein, 15 aa, Homo sapiens
  CDR3 for beta chain variable domain of TCR clone 338812 (TRBV20-1, TRBJ2-7)
CSAESGTSGAYEQYF

SEQ ID NO: 677625 - protein, 12 aa, Homo sapiens
  CDR3 for alpha chain variable domain of TCR clone 338813 (TRAV12-3, TRAJ17)
CAMTLTGNKLTF

SEQ ID NO: 677626 - protein, 15 aa, Homo sapiens
  CDR3 for beta chain variable domain of TCR clone 338813 (TRBV29-1, TRBJ2-6)
CSFTGGRTGANVLTF

SEQ ID NO: 677627 - protein, 18 aa, Homo sapiens
  CDR3 for alpha chain variable domain of TCR clone 338814 (TRAV21, TRAJ52)
CAVRPSPAGGTSYGKLTF

SEQ ID NO: 677628 - protein, 15 aa, Homo sapiens
  CDR3 for beta chain variable domain of TCR clone 338814 (TRBV27, TRBJ2-3)
CASSLGLAATDTQYF

SEQ ID NO: 677629 - protein, 14 aa, Homo sapiens
  CDR3 for alpha chain variable domain of TCR clone 338815 (TRAV34, TRAJ44)
CGADGTGTASKLTF

SEQ ID NO: 677630 - protein, 13 aa, Homo sapiens
  CDR3 for beta chain variable domain of TCR clone 338815 (TRBV7-7, TRBJ2-3)
CASSLSRADTQYF

SEQ ID NO: 677631 - protein, 16 aa, Homo sapiens
  CDR3 for alpha chain variable domain of TCR clone 338816 (TRAV30, TRAJ24)
CGTEIVDANSWGKFQF

SEQ ID NO: 677632 - protein, 12 aa, Homo sapiens
  CDR3 for beta chain variable domain of TCR clone 338816 (TRBV2, TRBJ2-7)
CASTYRTDEQYF

SEQ ID NO: 677633 - protein, 15 aa, Homo sapiens
  CDR3 for alpha chain variable domain of TCR clone 338817 (TRAV3, TRAJ17)
CAVRDTRAAGNKLTF

SEQ ID NO: 677634 - protein, 14 aa, Homo sapiens
  CDR3 for beta chain variable domain of TCR clone 338817 (TRBV6-3, TRBJ1-1)
CASSNLLPGAEAVF

SEQ ID NO: 677635 - protein, 12 aa, Homo sapiens
  CDR3 for alpha chain variable domain of TCR clone 338818 (TRAV16, TRAJ10)
CSRTGGGNILTF

SEQ ID NO: 677636 - protein, 13 aa, Homo sapiens
  CDR3 for beta chain variable domain of TCR clone 338818 (TRBV20-1, TRBJ2-7)
CSADPGATYEQYF

SEQ ID NO: 677637 - protein, 14 aa, Homo sapiens
  CDR3 for alpha chain variable domain of TCR clone 338819 (TRAV26-1, TRAJ39)
CIVFTNNAGNMLTF

SEQ ID NO: 677638 - protein, 11 aa, Homo sapiens
  CDR3 for beta chain variable domain of TCR clone 338819 (TRBV11-2, TRBJ2-2)
CASSLPGELFF

SEQ ID NO: 677639 - protein, 14 aa, Homo sapiens
  CDR3 for alpha chain variable domain of TCR clone 338820 (TRAV1-2, TRAJ16)
CAVNRFSDGQKLLF

SEQ ID NO: 677640 - protein, 11 aa, Homo sapiens
  CDR3 for beta chain variable domain of TCR clone 338820 (TRBV29-1, TRBJ2-5)
CSEDRTGTQFF

SEQ ID NO: 677641 - protein, 11 aa, Homo sapiens
  CDR3 for alpha chain variable domain of TCR clone 338821 (TRAV1-1, TRAJ3)
CAVRSASKIIF

SEQ ID NO: 677642 - protein, 11 aa, Homo sapiens
  CDR3 for beta chain variable domain of TCR clone 338821 (TRBV12-4, TRBJ2-3)
CASTATDTQYF

SEQ ID NO: 677643 - protein, 10 aa, Homo sapiens
  CDR3 for alpha chain variable domain of TCR clone 338822 (TRAV3, TRAJ30)
CAVSAIEIIF

SEQ ID NO: 677644 - protein, 14 aa, Homo sapiens
  CDR3 for beta chain variable domain of TCR clone 338822 (TRBV15, TRBJ2-3)
CATRSGTSTDTQYF

SEQ ID NO: 677645 - protein, 12 aa, Homo sapiens
  CDR3 for alpha chain variable domain of TCR clone 338823 (TRAV12-3, TRAJ17)
CAMTLTGNKLTF

SEQ ID NO: 677646 - protein, 14 aa, Homo sapiens
  CDR3 for beta chain variable domain of TCR clone 338823 (TRBV7-2, TRBJ2-7)
CASSPKTGFYEQYF

SEQ ID NO: 677647 - protein, 15 aa, Homo sapiens
  CDR3 for alpha chain variable domain of TCR clone 338824 (TRAV3, TRAJ12)
CAVRDIRDSSYKLIF

SEQ ID NO: 677648 - protein, 17 aa, Homo sapiens
  CDR3 for beta chain variable domain of TCR clone 338824 (TRBV13, TRBJ2-3)
CASSLSRVAGGRNTQYF

SEQ ID NO: 677649 - protein, 13 aa, Homo sapiens
  CDR3 for alpha chain variable domain of TCR clone 338825 (TRAV23/DV6, TRAJ58)
CSASEIGGSRLTF

SEQ ID NO: 677650 - protein, 15 aa, Homo sapiens
  CDR3 for beta chain variable domain of TCR clone 338825 (TRBV19, TRBJ1-1)
CASTSGQIQNTEAFF

SEQ ID NO: 677651 - protein, 13 aa, Homo sapiens
  CDR3 for alpha chain variable domain of TCR clone 338826 (TRAV21, TRAJ57)
CAVTQGGSEKLVF

SEQ ID NO: 677652 - protein, 16 aa, Homo sapiens
  CDR3 for beta chain variable domain of TCR clone 338826 (TRBV29-1, TRBJ2-7)
CSGEEAEDGTAYEQYF

SEQ ID NO: 677653 - protein, 14 aa, Homo sapiens
  CDR3 for alpha chain variable domain of TCR clone 338827 (TRAV9-2, TRAJ39)
CAPYIYNAGNMLTF

SEQ ID NO: 677654 - protein, 16 aa, Homo sapiens
  CDR3 for beta chain variable domain of TCR clone 338827 (TRBV4-1, TRBJ2-4)
CASSLLRGTAKNIQYF

SEQ ID NO: 677655 - protein, 14 aa, Homo sapiens
  CDR3 for alpha chain variable domain of TCR clone 338828 (TRAV12-1, TRAJ17)
CVVNYKDAGNKLTF

SEQ ID NO: 677656 - protein, 15 aa, Homo sapiens
  CDR3 for beta chain variable domain of TCR clone 338828 (TRBV7-2, TRBJ2-1)
CASTHGTGIYNEQFF

SEQ ID NO: 677657 - protein, 13 aa, Homo sapiens
  CDR3 for alpha chain variable domain of TCR clone 338829 (TRAV38-1, TRAJ42)
CARGGGSQGNLIF

SEQ ID NO: 677658 - protein, 14 aa, Homo sapiens
  CDR3 for beta chain variable domain of TCR clone 338829 (TRBV6-1, TRBJ1-3)
CASVQGGGGNTIYF

SEQ ID NO: 677659 - protein, 13 aa, Homo sapiens
  CDR3 for alpha chain variable domain of TCR clone 338830 (TRAV30, TRAJ24)
CGTVTDSWGKLQF

SEQ ID NO: 677660 - protein, 16 aa, Homo sapiens
  CDR3 for beta chain variable domain of TCR clone 338830 (TRBV7-3, TRBJ2-2)
CASSLKRGALSGELFF

SEQ ID NO: 677661 - protein, 12 aa, Homo sapiens
  CDR3 for alpha chain variable domain of TCR clone 338831 (TRAV16, TRAJ26)
CALRSYGQNFVF

SEQ ID NO: 677662 - protein, 12 aa, Homo sapiens
  CDR3 for beta chain variable domain of TCR clone 338831 (TRBV5-1, TRBJ1-2)
CASSQDTYGYTF

SEQ ID NO: 677663 - protein, 17 aa, Homo sapiens
  CDR3 for alpha chain variable domain of TCR clone 338832 (TRAV13-1, TRAJ28)
CAASPPYSGAVSYQLTF

SEQ ID NO: 677664 - protein, 12 aa, Homo sapiens
  CDR3 for beta chain variable domain of TCR clone 338832 (TRBV11-2, TRBJ2-2)
CASSLPTGELFF

SEQ ID NO: 677665 - protein, 13 aa, Homo sapiens
  CDR3 for alpha chain variable domain of TCR clone 338833 (TRAV13-1, TRAJ39)
CSKYSNAGNMLTF

SEQ ID NO: 677666 - protein, 14 aa, Homo sapiens
  CDR3 for beta chain variable domain of TCR clone 338833 (TRBV15, TRBJ2-4)
CATEGGQGANMQYF

SEQ ID NO: 677667 - protein, 14 aa, Homo sapiens
  CDR3 for alpha chain variable domain of TCR clone 338834 (TRAV16, TRAJ32)
CALKSGGATNKLIF

SEQ ID NO: 677668 - protein, 17 aa, Homo sapiens
  CDR3 for beta chain variable domain of TCR clone 338834 (TRBV20-1, TRBJ2-1)
CSASSSGLVGSYNEQFF

SEQ ID NO: 677669 - protein, 13 aa, Homo sapiens
  CDR3 for alpha chain variable domain of TCR clone 338835 (TRAV3, TRAJ20)
CAVRDTPRYKLSF

SEQ ID NO: 677670 - protein, 13 aa, Homo sapiens
  CDR3 for beta chain variable domain of TCR clone 338835 (TRBV20-1, TRBJ2-7)
CSARSGHPYEQYF

SEQ ID NO: 677671 - protein, 13 aa, Homo sapiens
  CDR3 for alpha chain variable domain of TCR clone 338836 (TRAV12-1, TRAJ20)
CVVNRETDYKLSF

SEQ ID NO: 677672 - protein, 15 aa, Homo sapiens
  CDR3 for beta chain variable domain of TCR clone 338836 (TRBV14, TRBJ2-1)
CASSLGLAGVTEQFF

SEQ ID NO: 677673 - protein, 12 aa, Homo sapiens
  CDR3 for alpha chain variable domain of TCR clone 338837 (TRAV29/DV5, TRAJ49)
CAATDTGNQFYF

SEQ ID NO: 677674 - protein, 14 aa, Homo sapiens
  CDR3 for beta chain variable domain of TCR clone 338837 (TRBV7-9, TRBJ1-1)
CASTPLQSYTEAFF

SEQ ID NO: 677675 - protein, 16 aa, Homo sapiens
  CDR3 for alpha chain variable domain of TCR clone 338838 (TRAV21, TRAJ52)
CAVTNAGGTSYGKLTF

SEQ ID NO: 677676 - protein, 14 aa, Homo sapiens
  CDR3 for beta chain variable domain of TCR clone 338838 (TRBV12-5, TRBJ2-5)
CASGSRTHQETQYF

SEQ ID NO: 677677 - protein, 12 aa, Homo sapiens
  CDR3 for alpha chain variable domain of TCR clone 338839 (TRAV21, TRAJ23)
CAVMLQGGKLIF

SEQ ID NO: 677678 - protein, 14 aa, Homo sapiens
  CDR3 for beta chain variable domain of TCR clone 338839 (TRBV7-9, TRBJ1-4)
CAITECEANEKLFF

SEQ ID NO: 677679 - protein, 13 aa, Homo sapiens
  CDR3 for alpha chain variable domain of TCR clone 338840 (TRAV2, TRAJ40)
CAVVTSGTYKYIF

SEQ ID NO: 677680 - protein, 15 aa, Homo sapiens
  CDR3 for beta chain variable domain of TCR clone 338840 (TRBV19, TRBJ2-5)
CASSIGGGPRETQYF

SEQ ID NO: 677681 - protein, 11 aa, Homo sapiens
  CDR3 for alpha chain variable domain of TCR clone 338841 (TRAV23/DV6, TRAJ48)
CAPRWGEKLNF

SEQ ID NO: 677682 - protein, 13 aa, Homo sapiens
  CDR3 for beta chain variable domain of TCR clone 338841 (TRBV12-4, TRBJ2-5)
CASSPGTEETQYF

SEQ ID NO: 677683 - protein, 13 aa, Homo sapiens
  CDR3 for alpha chain variable domain of TCR clone 338842 (TRAV2, TRAJ40)
CALVTSGTYKCIF

SEQ ID NO: 677684 - protein, 14 aa, Homo sapiens
  CDR3 for beta chain variable domain of TCR clone 338842 (TRBV19, TRBJ2-1)
CASPTFVLSGEQFF

SEQ ID NO: 677685 - protein, 13 aa, Homo sapiens
  CDR3 for alpha chain variable domain of TCR clone 338843 (TRAV1-2, TRAJ12)
CAVSMDSSYKLIF

SEQ ID NO: 677686 - protein, 17 aa, Homo sapiens
  CDR3 for beta chain variable domain of TCR clone 338843 (TRBV5-1, TRBJ2-5)
CASSLLGLAANQETQYF

SEQ ID NO: 677687 - protein, 14 aa, Homo sapiens
  CDR3 for alpha chain variable domain of TCR clone 338844 (TRAV12-3, TRAJ29)
CAMSPYSGNTPLVF

SEQ ID NO: 677688 - protein, 12 aa, Homo sapiens
  CDR3 for beta chain variable domain of TCR clone 338844 (TRBV12-4, TRBJ2-7)
CASSLGGYEQYF

SEQ ID NO: 677689 - protein, 15 aa, Homo sapiens
  CDR3 for alpha chain variable domain of TCR clone 338845 (TRAV12-3, TRAJ6)
CAMSATTGGSYIPTF

SEQ ID NO: 677690 - protein, 14 aa, Homo sapiens
  CDR3 for beta chain variable domain of TCR clone 338845 (TRBV29-1, TRBJ2-5)
CSVETSGSGETQYF

SEQ ID NO: 677691 - protein, 11 aa, Homo sapiens
  CDR3 for alpha chain variable domain of TCR clone 338846 (TRAV26-1, TRAJ37)
CIVRVGRKLIF

SEQ ID NO: 677692 - protein, 16 aa, Homo sapiens
  CDR3 for beta chain variable domain of TCR clone 338846 (TRBV7-3, TRBJ2-6)
CASSRTLAGGANVLTF

SEQ ID NO: 677693 - protein, 14 aa, Homo sapiens
  CDR3 for alpha chain variable domain of TCR clone 338847 (TRAV8-4, TRAJ34)
CAVSDPGDTDKLIF

SEQ ID NO: 677694 - protein, 16 aa, Homo sapiens
  CDR3 for beta chain variable domain of TCR clone 338847 (TRBV12-4, TRBJ1-5)
CASSRPVGGSNQPQHF

SEQ ID NO: 677695 - protein, 14 aa, Homo sapiens
  CDR3 for alpha chain variable domain of TCR clone 338848 (TRAV8-2, TRAJ4)
CVVSPSGGYNKLMF

SEQ ID NO: 677696 - protein, 15 aa, Homo sapiens
  CDR3 for beta chain variable domain of TCR clone 338848 (TRBV4-1, TRBJ1-4)
CANSDTGGTNEKLFF

SEQ ID NO: 677697 - protein, 11 aa, Homo sapiens
  CDR3 for alpha chain variable domain of TCR clone 338849 (TRAV12-1, TRAJ37)
CMVNTPGKLIF

SEQ ID NO: 677698 - protein, 13 aa, Homo sapiens
  CDR3 for beta chain variable domain of TCR clone 338849 (TRBV12-4, TRBJ1-5)
CDSSPDRAQPQHF

SEQ ID NO: 677699 - protein, 17 aa, Homo sapiens
  CDR3 for alpha chain variable domain of TCR clone 338850 (TRAV20, TRAJ42)
CAVQAWGYGGSQGNLIF

SEQ ID NO: 677700 - protein, 16 aa, Homo sapiens
  CDR3 for beta chain variable domain of TCR clone 338850 (TRBV29-1, TRBJ2-5)
CSVEGLSGDYQETQYF

SEQ ID NO: 677701 - protein, 11 aa, Homo sapiens
  CDR3 for alpha chain variable domain of TCR clone 338851 (TRAV12-2, TRAJ13)
CAARFYQKVTF

SEQ ID NO: 677702 - protein, 14 aa, Homo sapiens
  CDR3 for beta chain variable domain of TCR clone 338851 (TRBV7-9, TRBJ2-3)
CASSPTDSTDTQYF

SEQ ID NO: 677703 - protein, 14 aa, Homo sapiens
  CDR3 for alpha chain variable domain of TCR clone 338852 (TRAV13-1, TRAJ36)
CAAIYQTGSNNLFF

SEQ ID NO: 677704 - protein, 15 aa, Homo sapiens
  CDR3 for beta chain variable domain of TCR clone 338852 (TRBV5-1, TRBJ1-1)
CASSPLGGSNTEAFF

SEQ ID NO: 677705 - protein, 13 aa, Homo sapiens
  CDR3 for alpha chain variable domain of TCR clone 338853 (TRAV2, TRAJ40)
CAVVTSGTYKYIF

SEQ ID NO: 677706 - protein, 14 aa, Homo sapiens
  CDR3 for beta chain variable domain of TCR clone 338853 (TRBV20-1, TRBJ2-7)
CSAPELAGVGEQYF

SEQ ID NO: 677707 - protein, 14 aa, Homo sapiens
  CDR3 for alpha chain variable domain of TCR clone 338854 (TRAV17, TRAJ57)
CATDPQGGSERLVF

SEQ ID NO: 677708 - protein, 18 aa, Homo sapiens
  CDR3 for beta chain variable domain of TCR clone 338854 (TRBV6-6, TRBJ1-3)
CASSYSKWDSISGNTMYF

SEQ ID NO: 677709 - protein, 15 aa, Homo sapiens
  CDR3 for alpha chain variable domain of TCR clone 338855 (TRAV3, TRAJ5)
CAVRDRKTGRRALTF

SEQ ID NO: 677710 - protein, 14 aa, Homo sapiens
  CDR3 for beta chain variable domain of TCR clone 338855 (TRBV11-2, TRBJ2-5)
CASSRTGGIETQYF

SEQ ID NO: 677711 - protein, 14 aa, Homo sapiens
  CDR3 for alpha chain variable domain of TCR clone 338856 (TRAV23/DV6, TRAJ4)
CAARSAGGYNKLIF

SEQ ID NO: 677712 - protein, 13 aa, Homo sapiens
  CDR3 for beta chain variable domain of TCR clone 338856 (TRBV7-9, TRBJ1-2)
CASSLKQNYGYTF

SEQ ID NO: 677713 - protein, 14 aa, Homo sapiens
  CDR3 for alpha chain variable domain of TCR clone 338857 (TRAV17, TRAJ32)
CATDPGGATNKLIF

SEQ ID NO: 677714 - protein, 18 aa, Homo sapiens
  CDR3 for beta chain variable domain of TCR clone 338857 (TRBV11-2, TRBJ2-3)
CASSLGGASRGAPNTQYF

SEQ ID NO: 677715 - protein, 14 aa, Homo sapiens
  CDR3 for alpha chain variable domain of TCR clone 338858 (TRAV16, TRAJ15)
CTLSGPQVGTALIF

SEQ ID NO: 677716 - protein, 12 aa, Homo sapiens
  CDR3 for beta chain variable domain of TCR clone 338858 (TRBV18, TRBJ2-5)
CASSPSKETQYF

SEQ ID NO: 677717 - protein, 18 aa, Homo sapiens
  CDR3 for alpha chain variable domain of TCR clone 338859 (TRAV12-3, TRAJ52)
CAMRVGGAGGTSYGKLTF

SEQ ID NO: 677718 - protein, 14 aa, Homo sapiens
  CDR3 for beta chain variable domain of TCR clone 338859 (TRBV7-2, TRBJ2-7)
CASRSQGAAYEQYF

SEQ ID NO: 677719 - protein, 14 aa, Homo sapiens
  CDR3 for alpha chain variable domain of TCR clone 338860 (TRAV12-3, TRAJ21)
CAMEGQQGFNKFYF

SEQ ID NO: 677720 - protein, 16 aa, Homo sapiens
  CDR3 for beta chain variable domain of TCR clone 338860 (TRBV19, TRBJ2-1)
CASSKAGPSSYNEQFF

SEQ ID NO: 677721 - protein, 19 aa, Homo sapiens
  CDR3 for alpha chain variable domain of TCR clone 338861 (TRAV26-1, TRAJ52)
CIVGAHRNAGGTSYGKLTF

SEQ ID NO: 677722 - protein, 15 aa, Homo sapiens
  CDR3 for beta chain variable domain of TCR clone 338861 (TRBV12-4, TRBJ2-5)
CASSPPTGLQETQYF

SEQ ID NO: 677723 - protein, 13 aa, Homo sapiens
  CDR3 for alpha chain variable domain of TCR clone 338862 (TRAV1-2, TRAJ9)
CAALNTGGFKTIF

SEQ ID NO: 677724 - protein, 17 aa, Homo sapiens
  CDR3 for beta chain variable domain of TCR clone 338862 (TRBV24-1, TRBJ2-1)
CATSDVSTSGTYNEQFF

SEQ ID NO: 677725 - protein, 15 aa, Homo sapiens
  CDR3 for alpha chain variable domain of TCR clone 338863 (TRAV3, TRAJ30)
CAVRDRVERGDKIIF

SEQ ID NO: 677726 - protein, 13 aa, Homo sapiens
  CDR3 for beta chain variable domain of TCR clone 338863 (TRBV29-1, TRBJ2-5)
CSSCSSRRETQYF

SEQ ID NO: 677727 - protein, 15 aa, Homo sapiens
  CDR3 for alpha chain variable domain of TCR clone 338864 (TRAV4, TRAJ29)
CLVGATLIHETHLLS

SEQ ID NO: 677728 - protein, 14 aa, Homo sapiens
  CDR3 for beta chain variable domain of TCR clone 338864 (TRBV5-1, TRBJ2-3)
CASSFPGNTDTQYF

SEQ ID NO: 677729 - protein, 14 aa, Homo sapiens
  CDR3 for alpha chain variable domain of TCR clone 338865 (TRAV12-3, TRAJ20)
CAMSARRGDYKLSF

SEQ ID NO: 677730 - protein, 16 aa, Homo sapiens
  CDR3 for beta chain variable domain of TCR clone 338865 (TRBV7-8, TRBJ2-5)
CASSFGGQPAQETQYF

SEQ ID NO: 677731 - protein, 13 aa, Homo sapiens
  CDR3 for alpha chain variable domain of TCR clone 338866 (TRAV36/DV7, TRAJ53)
CAHSGGSNYKLTF

SEQ ID NO: 677732 - protein, 16 aa, Homo sapiens
  CDR3 for beta chain variable domain of TCR clone 338866 (TRBV7-2, TRBJ2-2)
CASSLAGGGNTGELFF

SEQ ID NO: 677733 - protein, 16 aa, Homo sapiens
  CDR3 for alpha chain variable domain of TCR clone 338867 (TRAV17, TRAJ28)
RATASVSGAGSYQLTF

SEQ ID NO: 677734 - protein, 13 aa, Homo sapiens
  CDR3 for beta chain variable domain of TCR clone 338867 (TRBV7-9, TRBJ1-2)
CASSLKQNYGYTF

SEQ ID NO: 677735 - protein, 13 aa, Homo sapiens
  CDR3 for alpha chain variable domain of TCR clone 338868 (TRAV1-1, TRAJ9)
CAAKNTGGFKTIF

SEQ ID NO: 677736 - protein, 14 aa, Homo sapiens
  CDR3 for beta chain variable domain of TCR clone 338868 (TRBV24-1, TRBJ1-2)
CATSGRGSGAGYTF

SEQ ID NO: 677737 - protein, 12 aa, Homo sapiens
  CDR3 for alpha chain variable domain of TCR clone 338869 (TRAV12-3, TRAJ17)
RAMTLTGNKLTF

SEQ ID NO: 677738 - protein, 16 aa, Homo sapiens
  CDR3 for beta chain variable domain of TCR clone 338869 (TRBV7-3, TRBJ2-1)
CASSLEGYRSYNEQFF

SEQ ID NO: 677739 - protein, 11 aa, Homo sapiens
  CDR3 for alpha chain variable domain of TCR clone 338870 (TRAV1-2, TRAJ20)
CAVSNDYKRSF

SEQ ID NO: 677740 - protein, 16 aa, Homo sapiens
  CDR3 for beta chain variable domain of TCR clone 338870 (TRBV29-1, TRBJ2-6)
CSVEDITYSGANVLTF

SEQ ID NO: 677741 - protein, 13 aa, Homo sapiens
  CDR3 for alpha chain variable domain of TCR clone 338871 (TRAV21, TRAJ20)
CAVGLSVDYKLSF

SEQ ID NO: 677742 - protein, 16 aa, Homo sapiens
  CDR3 for beta chain variable domain of TCR clone 338871 (TRBV19, TRBJ2-1)
CASSKAGPSSYNEQFF

SEQ ID NO: 677743 - protein, 15 aa, Homo sapiens
  CDR3 for alpha chain variable domain of TCR clone 338872 (TRAV13-1, TRAJ17)
CAASIERAAGNKLTF

SEQ ID NO: 677744 - protein, 15 aa, Homo sapiens
  CDR3 for beta chain variable domain of TCR clone 338872 (TRBV7-2, TRBJ1-2)
CASSLAPDRGLGYTF

SEQ ID NO: 677745 - protein, 11 aa, Homo sapiens
  CDR3 for alpha chain variable domain of TCR clone 338873 (TRAV17, TRAJ43)
CATPRSNDMRF

SEQ ID NO: 677746 - protein, 13 aa, Homo sapiens
  CDR3 for beta chain variable domain of TCR clone 338873 (TRBV12-4, TRBJ2-2)
CASSITGSGELFF

SEQ ID NO: 677747 - protein, 14 aa, Homo sapiens
  CDR3 for alpha chain variable domain of TCR clone 338874 (TRAV1-2, TRAJ16)
CAVNRFSDGQKLLF

SEQ ID NO: 677748 - protein, 13 aa, Homo sapiens
  CDR3 for beta chain variable domain of TCR clone 338874 (TRBV27, TRBJ2-7)
CASSFVSSYEQYF

SEQ ID NO: 677749 - protein, 15 aa, Homo sapiens
  CDR3 for alpha chain variable domain of TCR clone 338875 (TRAV27, TRAJ38)
CAARRNAGNNRKLLW

SEQ ID NO: 677750 - protein, 13 aa, Homo sapiens
  CDR3 for beta chain variable domain of TCR clone 338875 (TRBV12-5, TRBJ2-3)
RASGDRQSDTQYF

SEQ ID NO: 677751 - protein, 11 aa, Homo sapiens
  CDR3 for alpha chain variable domain of TCR clone 338876 (TRAV1-2, TRAJ40)
CAVPGTYKYIF

SEQ ID NO: 677752 - protein, 11 aa, Homo sapiens
  CDR3 for beta chain variable domain of TCR clone 338876 (TRBV29-1, TRBJ2-5)
CSEDRTGTQCF

SEQ ID NO: 677753 - protein, 15 aa, Homo sapiens
  CDR3 for alpha chain variable domain of TCR clone 338877 (TRAV2, TRAJ8)
CAVEVMNTGFQKLVF

SEQ ID NO: 677754 - protein, 13 aa, Homo sapiens
  CDR3 for beta chain variable domain of TCR clone 338877 (TRBV7-9, TRBJ1-2)
CASSLKKNYGYTF

SEQ ID NO: 677755 - protein, 14 aa, Homo sapiens
  CDR3 for alpha chain variable domain of TCR clone 338878 (TRAV26-1, TRAJ49)
CIVRVATGGNQFYF

SEQ ID NO: 677756 - protein, 16 aa, Homo sapiens
  CDR3 for beta chain variable domain of TCR clone 338878 (TRBV6-6, TRBJ1-6)
CASSFHGPGRGSPLHF

SEQ ID NO: 677757 - protein, 15 aa, Homo sapiens
  CDR3 for alpha chain variable domain of TCR clone 338879 (TRAV3, TRAJ20)
CAVRDSRSSDYKPSF

SEQ ID NO: 677758 - protein, 14 aa, Homo sapiens
  CDR3 for beta chain variable domain of TCR clone 338879 (TRBV20-1, TRBJ2-7)
CSARRGNGIYEQYF

SEQ ID NO: 677759 - protein, 14 aa, Homo sapiens
  CDR3 for alpha chain variable domain of TCR clone 338880 (TRAV12-2, TRAJ3)
CAVKGYSSTSKIIF

SEQ ID NO: 677760 - protein, 14 aa, Homo sapiens
  CDR3 for beta chain variable domain of TCR clone 338880 (TRBV6-3, TRBJ1-2)
CPSSEGGGSYGYTF

SEQ ID NO: 677761 - protein, 11 aa, Homo sapiens
  CDR3 for alpha chain variable domain of TCR clone 338881 (TRAV17, TRAJ9)
CATTGGFQTIF

SEQ ID NO: 677762 - protein, 14 aa, Homo sapiens
  CDR3 for beta chain variable domain of TCR clone 338881 (TRBV7-9, TRBJ2-2)
CASSGLAVTGELFF

SEQ ID NO: 677763 - protein, 15 aa, Homo sapiens
  CDR3 for alpha chain variable domain of TCR clone 338882 (TRAV26-1, TRAJ29)
CIVRVEGSGNTPLVF

SEQ ID NO: 677764 - protein, 14 aa, Homo sapiens
  CDR3 for beta chain variable domain of TCR clone 338882 (TRBV28, TRBJ2-7)
CASKPGPDLYEQYF

SEQ ID NO: 677765 - protein, 13 aa, Homo sapiens
  CDR3 for alpha chain variable domain of TCR clone 338883 (TRAV2, TRAJ40)
CAVVTSGTYKYIF

SEQ ID NO: 677766 - protein, 14 aa, Homo sapiens
  CDR3 for beta chain variable domain of TCR clone 338883 (TRBV2, TRBJ2-3)
CASSEGQNTDTQYF

SEQ ID NO: 677767 - protein, 18 aa, Homo sapiens
  CDR3 for alpha chain variable domain of TCR clone 338884 (TRAV12-3, TRAJ52)
CALSRTNAGGTSYGKLTF

SEQ ID NO: 677768 - protein, 15 aa, Homo sapiens
  CDR3 for beta chain variable domain of TCR clone 338884 (TRBV19, TRBJ1-2)
CASSVGQVLNYGYTF

SEQ ID NO: 677769 - protein, 14 aa, Homo sapiens
  CDR3 for alpha chain variable domain of TCR clone 338885 (TRAV8-4, TRAJ5)
CAVSADTGRRALTF

SEQ ID NO: 677770 - protein, 14 aa, Homo sapiens
  CDR3 for beta chain variable domain of TCR clone 338885 (TRBV19, TRBJ2-1)
CASPTFVLSGEQFF

SEQ ID NO: 677771 - protein, 13 aa, Homo sapiens
  CDR3 for alpha chain variable domain of TCR clone 338886 (TRAV22, TRAJ29)
CAVGGSGNTPLVF

SEQ ID NO: 677772 - protein, 13 aa, Homo sapiens
  CDR3 for beta chain variable domain of TCR clone 338886 (TRBV4-2, TRBJ1-1)
CASSQAVNTEAFF

SEQ ID NO: 677773 - protein, 14 aa, Homo sapiens
  CDR3 for alpha chain variable domain of TCR clone 338887 (TRAV12-2, TRAJ3)
CAVNGYSIASKIIF

SEQ ID NO: 677774 - protein, 16 aa, Homo sapiens
  CDR3 for beta chain variable domain of TCR clone 338887 (TRBV4-2, TRBJ2-2)
CASSQDPSGREGELFF

SEQ ID NO: 677775 - protein, 17 aa, Homo sapiens
  CDR3 for alpha chain variable domain of TCR clone 338888 (TRAV3, TRAJ6)
CAVRDGPRAGGSYIPTF

SEQ ID NO: 677776 - protein, 20 aa, Homo sapiens
  CDR3 for beta chain variable domain of TCR clone 338888 (TRBV28, TRBJ2-1)
WASTPIGRSPGLAGGNEQLF

SEQ ID NO: 677777 - protein, 16 aa, Homo sapiens
  CDR3 for alpha chain variable domain of TCR clone 338889 (TRAV12-2, TRAJ28)
CAVITDSGAGSYQLTF

SEQ ID NO: 677778 - protein, 14 aa, Homo sapiens
  CDR3 for beta chain variable domain of TCR clone 338889 (TRBV25-1, TRBJ1-1)
CGSTHLGGNTEAFF

SEQ ID NO: 677779 - protein, 16 aa, Homo sapiens
  CDR3 for alpha chain variable domain of TCR clone 338890 (TRAV12-3, TRAJ53)
CAMSPGSGGSNYKLTF

SEQ ID NO: 677780 - protein, 13 aa, Homo sapiens
  CDR3 for beta chain variable domain of TCR clone 338890 (TRBV20-1, TRBJ1-1)
CSARGGGNTDAFF

SEQ ID NO: 677781 - protein, 12 aa, Homo sapiens
  CDR3 for alpha chain variable domain of TCR clone 338891 (TRAV12-3, TRAJ17)
CARTLTGNKLTF

SEQ ID NO: 677782 - protein, 19 aa, Homo sapiens
  CDR3 for beta chain variable domain of TCR clone 338891 (TRBV25-1, TRBJ2-2)
CAILVYRVDRGRKTGELFF

SEQ ID NO: 677783 - protein, 14 aa, Homo sapiens
  CDR3 for alpha chain variable domain of TCR clone 338892 (TRAV26-1, TRAJ21)
CISHTTSTNFTLDL

SEQ ID NO: 677784 - protein, 15 aa, Homo sapiens
  CDR3 for beta chain variable domain of TCR clone 338892 (TRBV20-1, TRBJ2-7)
CSARDRVSGMDEQYF

SEQ ID NO: 677785 - protein, 13 aa, Homo sapiens
  CDR3 for alpha chain variable domain of TCR clone 338893 (TRAV12-1, TRAJ49)
CVVILNTGNQFSF

SEQ ID NO: 677786 - protein, 13 aa, Homo sapiens
  CDR3 for beta chain variable domain of TCR clone 338893 (TRBV10-3, TRBJ2-7)
CASKLAVNYEQYF

SEQ ID NO: 677787 - protein, 14 aa, Homo sapiens
  CDR3 for alpha chain variable domain of TCR clone 338894 (TRAV12-1, TRAJ17)
CVVNYKAAGNKLTF

SEQ ID NO: 677788 - protein, 17 aa, Homo sapiens
  CDR3 for beta chain variable domain of TCR clone 338894 (TRBV7-8, TRBJ2-6)
CASSAGTGGAGANVLTF

SEQ ID NO: 677789 - protein, 13 aa, Homo sapiens
  CDR3 for alpha chain variable domain of TCR clone 338895 (TRAV13-1, TRAJ40)
CAAISPGTYKYIF

SEQ ID NO: 677790 - protein, 13 aa, Homo sapiens
  CDR3 for beta chain variable domain of TCR clone 338895 (TRBV10-3, TRBJ2-7)
CAIRARGPHEQYF

SEQ ID NO: 677791 - protein, 15 aa, Homo sapiens
  CDR3 for alpha chain variable domain of TCR clone 338896 (TRAV27, TRAJ45)
CAPVDSGGGADGLAF

SEQ ID NO: 677792 - protein, 15 aa, Homo sapiens
  CDR3 for beta chain variable domain of TCR clone 338896 (TRBV5-1, TRBJ1-1)
CASSVDRLGNTEAFF

SEQ ID NO: 677793 - protein, 17 aa, Homo sapiens
  CDR3 for alpha chain variable domain of TCR clone 338897 (TRAV8-4, TRAJ11)
CAVSDRGENSGYSTLTF

SEQ ID NO: 677794 - protein, 14 aa, Homo sapiens
  CDR3 for beta chain variable domain of TCR clone 338897 (TRBV20-1, TRBJ2-1)
CSPNDESSYNEQFF

SEQ ID NO: 677795 - protein, 14 aa, Homo sapiens
  CDR3 for alpha chain variable domain of TCR clone 338898 (TRAV1-2, TRAJ8)
CSVREDTGFQKLVF

SEQ ID NO: 677796 - protein, 13 aa, Homo sapiens
  CDR3 for beta chain variable domain of TCR clone 338898 (TRBV27, TRBJ1-1)
CASSLSIGAEAFF

SEQ ID NO: 677797 - protein, 14 aa, Homo sapiens
  CDR3 for alpha chain variable domain of TCR clone 338899 (TRAV14/DV4, TRAJ15)
CAMGRDQAGTALIF

SEQ ID NO: 677798 - protein, 11 aa, Homo sapiens
  CDR3 for beta chain variable domain of TCR clone 338899 (TRBV7-2, TRBJ2-7)
CASSSGLWQYF

SEQ ID NO: 677799 - protein, 14 aa, Homo sapiens
  CDR3 for alpha chain variable domain of TCR clone 338900 (TRAV2, TRAJ37)
CAVDFTSNTGKLIF

SEQ ID NO: 677800 - protein, 15 aa, Homo sapiens
  CDR3 for beta chain variable domain of TCR clone 338900 (TRBV25-1, TRBJ1-4)
CASSPGDSTNEKLFF

SEQ ID NO: 677801 - protein, 12 aa, Homo sapiens
  CDR3 for alpha chain variable domain of TCR clone 338901 (TRAV12-1, )
CVVNSWISRTLT

SEQ ID NO: 677802 - protein, 12 aa, Homo sapiens
  CDR3 for beta chain variable domain of TCR clone 338901 (TRBV5-7, TRBJ1-2)
CASSLVQNGYSF

SEQ ID NO: 677803 - protein, 15 aa, Homo sapiens
  CDR3 for alpha chain variable domain of TCR clone 338902 (TRAV29/DV5, TRAJ29)
CSASERSSGNTPLVF

SEQ ID NO: 677804 - protein, 14 aa, Homo sapiens
  CDR3 for beta chain variable domain of TCR clone 338902 (TRBV7-2, TRBJ2-7)
CASSPKTSFYEQYF

SEQ ID NO: 677805 - protein, 14 aa, Homo sapiens
  CDR3 for alpha chain variable domain of TCR clone 338903 (TRAV4, TRAJ33)
CLVGDVQSNYQLIW

SEQ ID NO: 677806 - protein, 12 aa, Homo sapiens
  CDR3 for beta chain variable domain of TCR clone 338903 (TRBV28, TRBJ2-6)
CAIQAGANVLTF

SEQ ID NO: 677807 - protein, 16 aa, Homo sapiens
  CDR3 for alpha chain variable domain of TCR clone 338904 (TRAV3, TRAJ37)
CAVRVRGSGNTGKLIF

SEQ ID NO: 677808 - protein, 14 aa, Homo sapiens
  CDR3 for beta chain variable domain of TCR clone 338904 (TRBV4-1, TRBJ2-2)
CASSQAVNTGELFF

SEQ ID NO: 677809 - protein, 16 aa, Homo sapiens
  CDR3 for alpha chain variable domain of TCR clone 338905 (TRAV30, TRAJ24)
CGTEIVDANSWGKFQF

SEQ ID NO: 677810 - protein, 15 aa, Homo sapiens
  CDR3 for beta chain variable domain of TCR clone 338905 (TRBV5-1, TRBJ1-1)
CASSSTTGTNTEAFF

SEQ ID NO: 677811 - protein, 14 aa, Homo sapiens
  CDR3 for alpha chain variable domain of TCR clone 338906 (TRAV8-1, TRAJ5)
CAVSMDTGRRALTF

SEQ ID NO: 677812 - protein, 14 aa, Homo sapiens
  CDR3 for beta chain variable domain of TCR clone 338906 (TRBV7-2, TRBJ2-5)
CASSTGGELKTQYF

SEQ ID NO: 677813 - protein, 15 aa, Homo sapiens
  CDR3 for alpha chain variable domain of TCR clone 338907 (TRAV27, TRAJ38)
CAARRNAGNNRKLIW

SEQ ID NO: 677814 - protein, 13 aa, Homo sapiens
  CDR3 for beta chain variable domain of TCR clone 338907 (TRBV12-5, TRBJ2-3)
CASGDRQSDTQYF

SEQ ID NO: 677815 - protein, 14 aa, Homo sapiens
  CDR3 for alpha chain variable domain of TCR clone 338908 (TRAV1-2, TRAJ16)
CAVNRLSDGQKLLF

SEQ ID NO: 677816 - protein, 13 aa, Homo sapiens
  CDR3 for beta chain variable domain of TCR clone 338908 (TRBV4-1, TRBJ2-1)
CASSQAGGDEQFF

SEQ ID NO: 677817 - protein, 15 aa, Homo sapiens
  CDR3 for alpha chain variable domain of TCR clone 338909 (TRAV2, TRAJ9)
CALEDRGTGGFKTIF

SEQ ID NO: 677818 - protein, 19 aa, Homo sapiens
  CDR3 for beta chain variable domain of TCR clone 338909 (TRBV28, TRBJ2-7)
CASSYSGTSRLGWVYEQYF

SEQ ID NO: 677819 - protein, 13 aa, Homo sapiens
  CDR3 for alpha chain variable domain of TCR clone 338910 (TRAV1-2, TRAJ9)
CAVLDTGGFKTIF

SEQ ID NO: 677820 - protein, 12 aa, Homo sapiens
  CDR3 for beta chain variable domain of TCR clone 338910 (TRBV5-1, TRBJ2-3)
CASSLAADTQYF

SEQ ID NO: 677821 - protein, 19 aa, Homo sapiens
  CDR3 for alpha chain variable domain of TCR clone 338911 (TRAV1-2, TRAJ18)
CLFPLCCERRGSTLGRLYF

SEQ ID NO: 677822 - protein, 11 aa, Homo sapiens
  CDR3 for beta chain variable domain of TCR clone 338911 (TRBV13, TRBJ2-3)
CASGNADTQYF

SEQ ID NO: 677823 - protein, 16 aa, Homo sapiens
  CDR3 for alpha chain variable domain of TCR clone 338912 (TRAV8-3, TRAJ4)
CAVGARGSGGYNKLIF

SEQ ID NO: 677824 - protein, 18 aa, Homo sapiens
  CDR3 for beta chain variable domain of TCR clone 338912 (TRBV6-5, TRBJ1-1)
CASSYSAPGGTGGTESFF

SEQ ID NO: 677825 - protein, 14 aa, Homo sapiens
  CDR3 for alpha chain variable domain of TCR clone 338913 (TRAV13-1, TRAJ35)
CAASKGGFGNVLHC

SEQ ID NO: 677826 - protein, 16 aa, Homo sapiens
  CDR3 for beta chain variable domain of TCR clone 338913 (TRBV4-1, TRBJ2-1)
CASSQEAGQGSDEQFF

SEQ ID NO: 677827 - protein, 15 aa, Homo sapiens
  CDR3 for alpha chain variable domain of TCR clone 338914 (TRAV3, TRAJ20)
CAVRDIKLSDYKLSF

SEQ ID NO: 677828 - protein, 15 aa, Homo sapiens
  CDR3 for beta chain variable domain of TCR clone 338914 (TRBV2, TRBJ2-5)
CASTRDGGPQETQYF

SEQ ID NO: 677829 - protein, 15 aa, Homo sapiens
  CDR3 for alpha chain variable domain of TCR clone 338915 (TRAV25, TRAJ53)
CAATGGGGSNYKLTL

SEQ ID NO: 677830 - protein, 19 aa, Homo sapiens
  CDR3 for beta chain variable domain of TCR clone 338915 (TRBV7-8, TRBJ2-3)
CASSFLSRNWGGGTDTQYF

SEQ ID NO: 677831 - protein, 13 aa, Homo sapiens
  CDR3 for alpha chain variable domain of TCR clone 338916 (TRAV26-1, TRAJ40)
CIVRGTGTYKYIF

SEQ ID NO: 677832 - protein, 16 aa, Homo sapiens
  CDR3 for beta chain variable domain of TCR clone 338916 (TRBV20-1, TRBJ1-1)
SAVLDRTLSMNTEAFF

SEQ ID NO: 677833 - protein, 15 aa, Homo sapiens
  CDR3 for alpha chain variable domain of TCR clone 338917 (TRAV38-2/DV8, TRAJ31)
CAYRTETRNNARLMF

SEQ ID NO: 677834 - protein, 15 aa, Homo sapiens
  CDR3 for beta chain variable domain of TCR clone 338917 (TRBV4-1, TRBJ2-7)
CASSQNTGRLYEQYF

SEQ ID NO: 677835 - protein, 15 aa, Homo sapiens
  CDR3 for alpha chain variable domain of TCR clone 338918 (TRAV3, TRAJ5)
CAVRDRKTGRRALTF

SEQ ID NO: 677836 - protein, 15 aa, Homo sapiens
  CDR3 for beta chain variable domain of TCR clone 338918 (TRBV7-9, TRBJ2-2)
CASGPLGTFPGELFF

SEQ ID NO: 677837 - protein, 13 aa, Homo sapiens
  CDR3 for alpha chain variable domain of TCR clone 338919 (TRAV12-2, TRAJ34)
CAVRGYNTDKLIF

SEQ ID NO: 677838 - protein, 15 aa, Homo sapiens
  CDR3 for beta chain variable domain of TCR clone 338919 (TRBV28, TRBJ2-1)
CASRTGAGVVARQFF

SEQ ID NO: 677839 - protein, 16 aa, Homo sapiens
  CDR3 for alpha chain variable domain of TCR clone 338920 (TRAV30, TRAJ24)
CGTEIVDAASWGKFQF

SEQ ID NO: 677840 - protein, 14 aa, Homo sapiens
  CDR3 for beta chain variable domain of TCR clone 338920 (TRBV12-5, TRBJ2-5)
CAIGSRTHQETQYF

SEQ ID NO: 677841 - protein, 16 aa, Homo sapiens
  CDR3 for alpha chain variable domain of TCR clone 338921 (TRAV3, TRAJ18)
CAVRDGRGSTLGRLYF

SEQ ID NO: 677842 - protein, 13 aa, Homo sapiens
  CDR3 for beta chain variable domain of TCR clone 338921 (TRBV9, TRBJ2-1)
CASSVGQGGEQFF

SEQ ID NO: 677843 - protein, 14 aa, Homo sapiens
  CDR3 for alpha chain variable domain of TCR clone 338922 (TRAV2, TRAJ9)
CAVEDRSGGLKTIF

SEQ ID NO: 677844 - protein, 13 aa, Homo sapiens
  CDR3 for beta chain variable domain of TCR clone 338922 (TRBV27, TRBJ1-1)
CASSLSIGAEAFF

SEQ ID NO: 677845 - protein, 14 aa, Homo sapiens
  CDR3 for alpha chain variable domain of TCR clone 338923 (TRAV1-2, TRAJ16)
CAFNRISDGQKLLF

SEQ ID NO: 677846 - protein, 15 aa, Homo sapiens
  CDR3 for beta chain variable domain of TCR clone 338923 (TRBV7-9, TRBJ1-6)
CASSSPGRGNSPLHF

SEQ ID NO: 677847 - protein, 16 aa, Homo sapiens
  CDR3 for alpha chain variable domain of TCR clone 338924 (TRAV12-1, TRAJ45)
CVVIRYSGGGADGLTF

SEQ ID NO: 677848 - protein, 12 aa, Homo sapiens
  CDR3 for beta chain variable domain of TCR clone 338924 (TRBV6-5, TRBJ2-2)
CASRQITGELSF

SEQ ID NO: 677849 - protein, 14 aa, Homo sapiens
  CDR3 for alpha chain variable domain of TCR clone 338925 (TRAV1-2, TRAJ8)
CAVREDTGFQKLVF

SEQ ID NO: 677850 - protein, 12 aa, Homo sapiens
  CDR3 for beta chain variable domain of TCR clone 338925 (TRBV20-1, TRBJ1-2)
CSAPDQGPGYTF

SEQ ID NO: 677851 - protein, 12 aa, Homo sapiens
  CDR3 for alpha chain variable domain of TCR clone 338926 (TRAV27, TRAJ9)
CAGESGGFKTIF

SEQ ID NO: 677852 - protein, 18 aa, Homo sapiens
  CDR3 for beta chain variable domain of TCR clone 338926 (TRBV10-2, TRBJ2-2)
CISAPAAHRQADAGELFF

SEQ ID NO: 677853 - protein, 12 aa, Homo sapiens
  CDR3 for alpha chain variable domain of TCR clone 338927 (TRAV17, TRAJ48)
CALNFGNVKLTF

SEQ ID NO: 677854 - protein, 13 aa, Homo sapiens
  CDR3 for beta chain variable domain of TCR clone 338927 (TRBV6-5, TRBJ2-5)
CASSSPGGETQYF

SEQ ID NO: 677855 - protein, 18 aa, Homo sapiens
  CDR3 for alpha chain variable domain of TCR clone 338928 (TRAV17, TRAJ11)
CFLLLCYGRAIRIQHLTF

SEQ ID NO: 677856 - protein, 16 aa, Homo sapiens
  CDR3 for beta chain variable domain of TCR clone 338928 (TRBV14, TRBJ1-5)
CASSLSRVHSNQPQHF

SEQ ID NO: 677857 - protein, 15 aa, Homo sapiens
  CDR3 for alpha chain variable domain of TCR clone 338929 (TRAV20, TRAJ6)
CAVRLQSGGSYIPTF

SEQ ID NO: 677858 - protein, 16 aa, Homo sapiens
  CDR3 for beta chain variable domain of TCR clone 338929 (TRBV28, TRBJ2-7)
CASSLFFETGGPEQYF

SEQ ID NO: 677859 - protein, 15 aa, Homo sapiens
  CDR3 for alpha chain variable domain of TCR clone 338930 (TRAV1-2, TRAJ15)
CAVDVMGSARTALIF

SEQ ID NO: 677860 - protein, 13 aa, Homo sapiens
  CDR3 for beta chain variable domain of TCR clone 338930 (TRBV12-4, TRBJ2-1)
CASSSRAYNEQFF

SEQ ID NO: 677861 - protein, 15 aa, Homo sapiens
  CDR3 for alpha chain variable domain of TCR clone 338931 (TRAV3, TRAJ20)
CAVRDIKLSDYKLSF

SEQ ID NO: 677862 - protein, 18 aa, Homo sapiens
  CDR3 for beta chain variable domain of TCR clone 338931 (TRBV20-1, TRBJ2-5)
CSQTGDSGRLGGKETKYF

SEQ ID NO: 677863 - protein, 13 aa, Homo sapiens
  CDR3 for alpha chain variable domain of TCR clone 338932 (TRAV2, TRAJ20)
CAVEDPSEYKFSF

SEQ ID NO: 677864 - protein, 16 aa, Homo sapiens
  CDR3 for beta chain variable domain of TCR clone 338932 (TRBV25-1, TRBJ2-7)
CASSELTGGGIYEQYF

SEQ ID NO: 677865 - protein, 14 aa, Homo sapiens
  CDR3 for alpha chain variable domain of TCR clone 338933 (TRAV13-2, TRAJ29)
CAENIEPGNTPLLF

SEQ ID NO: 677866 - protein, 14 aa, Homo sapiens
  CDR3 for beta chain variable domain of TCR clone 338933 (TRBV19, TRBJ2-2)
CATTGHANTGELFF

SEQ ID NO: 677867 - protein, 15 aa, Homo sapiens
  CDR3 for alpha chain variable domain of TCR clone 338934 (TRAV27, TRAJ38)
CAARRNAGYNRKLIW

SEQ ID NO: 677868 - protein, 15 aa, Homo sapiens
  CDR3 for beta chain variable domain of TCR clone 338934 (TRBV11-2, TRBJ2-1)
CASSLGTSGLNEQFF

SEQ ID NO: 677869 - protein, 16 aa, Homo sapiens
  CDR3 for alpha chain variable domain of TCR clone 338935 (TRAV13-1, TRAJ48)
CAASIFGNFGNEKLTF

SEQ ID NO: 677870 - protein, 16 aa, Homo sapiens
  CDR3 for beta chain variable domain of TCR clone 338935 (TRBV18, TRBJ1-5)
CASSPYRVECNQPQHF

SEQ ID NO: 677871 - protein, 12 aa, Homo sapiens
  CDR3 for alpha chain variable domain of TCR clone 338936 (TRAV21, TRAJ15)
RAVNQAGTALIF

SEQ ID NO: 677872 - protein, 13 aa, Homo sapiens
  CDR3 for beta chain variable domain of TCR clone 338936 (TRBV11-2, TRBJ2-5)
CASSSTGEETQYF

SEQ ID NO: 677873 - protein, 14 aa, Homo sapiens
  CDR3 for alpha chain variable domain of TCR clone 338937 (TRAV12-2, TRAJ44)
CSVNPAGTASKLTF

SEQ ID NO: 677874 - protein, 15 aa, Homo sapiens
  CDR3 for beta chain variable domain of TCR clone 338937 (TRBV5-1, TRBJ2-1)
CASSPPRAPYNEQFF

SEQ ID NO: 677875 - protein, 12 aa, Homo sapiens
  CDR3 for alpha chain variable domain of TCR clone 338938 (TRAV12-3, TRAJ42)
CAPGGSQGNLIF

SEQ ID NO: 677876 - protein, 13 aa, Homo sapiens
  CDR3 for beta chain variable domain of TCR clone 338938 (TRBV5-7, TRBJ2-6)
CASISSGANVLTF

SEQ ID NO: 677877 - protein, 15 aa, Homo sapiens
  CDR3 for alpha chain variable domain of TCR clone 338939 (TRAV12-2, TRAJ53)
CAVNGGGGSNYRLTF

SEQ ID NO: 677878 - protein, 17 aa, Homo sapiens
  CDR3 for beta chain variable domain of TCR clone 338939 (TRBV7-3, TRBJ2-3)
CASSLMKRMRGADTQYF

SEQ ID NO: 677879 - protein, 14 aa, Homo sapiens
  CDR3 for alpha chain variable domain of TCR clone 338940 (TRAV1-2, TRAJ8)
CAVREDTGFQKLVF

SEQ ID NO: 677880 - protein, 17 aa, Homo sapiens
  CDR3 for beta chain variable domain of TCR clone 338940 (TRBV20-1, TRBJ2-1)
CSARDRRRASSYNEQFF

SEQ ID NO: 677881 - protein, 13 aa, Homo sapiens
  CDR3 for alpha chain variable domain of TCR clone 338941 (TRAV8-1, TRAJ39)
CAGLNNAGNMLTF

SEQ ID NO: 677882 - protein, 17 aa, Homo sapiens
  CDR3 for beta chain variable domain of TCR clone 338941 (TRBV19, TRBJ2-3)
CASSIDPAGGATDTQYF

SEQ ID NO: 677883 - protein, 11 aa, Homo sapiens
  CDR3 for alpha chain variable domain of TCR clone 338942 (TRAV13-1, TRAJ23)
CAASSRGKLIF

SEQ ID NO: 677884 - protein, 14 aa, Homo sapiens
  CDR3 for beta chain variable domain of TCR clone 338942 (TRBV7-9, TRBJ2-1)
CASSLGVADNEQFF

SEQ ID NO: 677885 - protein, 13 aa, Homo sapiens
  CDR3 for alpha chain variable domain of TCR clone 338943 (TRAV26-1, TRAJ40)
CFVRVESNDKIIF

SEQ ID NO: 677886 - protein, 15 aa, Homo sapiens
  CDR3 for beta chain variable domain of TCR clone 338943 (TRBV11-3, TRBJ2-3)
CASLKDGREGDTQYF

SEQ ID NO: 677887 - protein, 14 aa, Homo sapiens
  CDR3 for alpha chain variable domain of TCR clone 338944 (TRAV26-1, TRAJ22)
CIVRVYGSARQMTF

SEQ ID NO: 677888 - protein, 17 aa, Homo sapiens
  CDR3 for beta chain variable domain of TCR clone 338944 (TRBV7-3, TRBJ2-3)
WASSPGGLAGFGDTQYF

SEQ ID NO: 677889 - protein, 14 aa, Homo sapiens
  CDR3 for alpha chain variable domain of TCR clone 338945 (TRAV8-3, TRAJ44)
CAVEDTGTASKLTF

SEQ ID NO: 677890 - protein, 15 aa, Homo sapiens
  CDR3 for beta chain variable domain of TCR clone 338945 (TRBV7-2, TRBJ1-1)
CASSSPRGEETEAFF

SEQ ID NO: 677891 - protein, 14 aa, Homo sapiens
  CDR3 for alpha chain variable domain of TCR clone 338946 (TRAV21, TRAJ10)
CAVALTGGGNKLTF

SEQ ID NO: 677892 - protein, 13 aa, Homo sapiens
  CDR3 for beta chain variable domain of TCR clone 338946 (TRBV7-2, TRBJ1-6)
CASSLGANSPLHF

SEQ ID NO: 677893 - protein, 14 aa, Homo sapiens
  CDR3 for alpha chain variable domain of TCR clone 338947 (TRAV23/DV6, TRAJ57)
FAASNQGGSEKLVF

SEQ ID NO: 677894 - protein, 13 aa, Homo sapiens
  CDR3 for beta chain variable domain of TCR clone 338947 (TRBV11-2, TRBJ2-7)
CASSSYPSYEQYF

SEQ ID NO: 677895 - protein, 12 aa, Homo sapiens
  CDR3 for alpha chain variable domain of TCR clone 338948 (TRAV29/DV5, TRAJ15)
CASNQAGTALIF

SEQ ID NO: 677896 - protein, 13 aa, Homo sapiens
  CDR3 for beta chain variable domain of TCR clone 338948 (TRBV9, TRBJ2-1)
CASSPSGGNEQFF

SEQ ID NO: 677897 - protein, 19 aa, Homo sapiens
  CDR3 for alpha chain variable domain of TCR clone 338949 (TRAV38-1, TRAJ53)
CAFMKHGLESGGSNYKRTF

SEQ ID NO: 677898 - protein, 13 aa, Homo sapiens
  CDR3 for beta chain variable domain of TCR clone 338949 (TRBV19, TRBJ2-7)
CASSPRQSYEQYF

SEQ ID NO: 677899 - protein, 17 aa, Homo sapiens
  CDR3 for alpha chain variable domain of TCR clone 338950 (TRAV27, TRAJ52)
CAGAGWAGGTSYGKLTF

SEQ ID NO: 677900 - protein, 16 aa, Homo sapiens
  CDR3 for beta chain variable domain of TCR clone 338950 (TRBV19, TRBJ2-1)
CASSKAGPSSYDEQFF

SEQ ID NO: 677901 - protein, 16 aa, Homo sapiens
  CDR3 for alpha chain variable domain of TCR clone 338951 (TRAV23/DV6, TRAJ9)
CAASIGGNTGGFKTIF

SEQ ID NO: 677902 - protein, 17 aa, Homo sapiens
  CDR3 for beta chain variable domain of TCR clone 338951 (TRBV25-1, TRBJ2-3)
CASSGYGGGGNTDTQYF

SEQ ID NO: 677903 - protein, 13 aa, Homo sapiens
  CDR3 for alpha chain variable domain of TCR clone 338952 (TRAV8-4, TRAJ9)
CAVSETGGLKTIF

SEQ ID NO: 677904 - protein, 14 aa, Homo sapiens
  CDR3 for beta chain variable domain of TCR clone 338952 (TRBV18, TRBJ2-3)
CASSGLVDTDTQYF

SEQ ID NO: 677905 - protein, 15 aa, Homo sapiens
  CDR3 for alpha chain variable domain of TCR clone 338953 (TRAV26-1, TRAJ28)
CIVRVAGAGSYQLTF

SEQ ID NO: 677906 - protein, 19 aa, Homo sapiens
  CDR3 for beta chain variable domain of TCR clone 338953 (TRBV7-3, TRBJ2-7)
CASSLTGVAGGWPSYDQYF

SEQ ID NO: 677907 - protein, 15 aa, Homo sapiens
  CDR3 for alpha chain variable domain of TCR clone 338954 (TRAV17, TRAJ4)
CATGTWSGGYNKLIF

SEQ ID NO: 677908 - protein, 11 aa, Homo sapiens
  CDR3 for beta chain variable domain of TCR clone 338954 (TRBV3-1, TRBJ2-7)
CASTSLGEQYF

SEQ ID NO: 677909 - protein, 13 aa, Homo sapiens
  CDR3 for alpha chain variable domain of TCR clone 338955 (TRAV1-2, TRAJ12)
CAVSMDSSYKLIF

SEQ ID NO: 677910 - protein, 15 aa, Homo sapiens
  CDR3 for beta chain variable domain of TCR clone 338955 (TRBV27, TRBJ2-1)
CASSNGGGSSNEQFF

SEQ ID NO: 677911 - protein, 13 aa, Homo sapiens
  CDR3 for alpha chain variable domain of TCR clone 338956 (TRAV21, TRAJ37)
CAVSSGNTGKLIF

SEQ ID NO: 677912 - protein, 14 aa, Homo sapiens
  CDR3 for beta chain variable domain of TCR clone 338956 (TRBV18, TRBJ2-7)
CASSPRGGAYEQYF

SEQ ID NO: 677913 - protein, 12 aa, Homo sapiens
  CDR3 for alpha chain variable domain of TCR clone 338957 (TRAV8-3, TRAJ41)
CAVGALGYVLNF

SEQ ID NO: 677914 - protein, 16 aa, Homo sapiens
  CDR3 for beta chain variable domain of TCR clone 338957 (TRBV7-6, TRBJ2-3)
CASSDSRGEGTDTQYF

SEQ ID NO: 677915 - protein, 15 aa, Homo sapiens
  CDR3 for alpha chain variable domain of TCR clone 338958 (TRAV2, TRAJ15)
CAVGGPNQAGTALIF

SEQ ID NO: 677916 - protein, 13 aa, Homo sapiens
  CDR3 for beta chain variable domain of TCR clone 338958 (TRBV2, TRBJ1-5)
CATAGLGNQPQHF

SEQ ID NO: 677917 - protein, 18 aa, Homo sapiens
  CDR3 for alpha chain variable domain of TCR clone 338959 (TRAV12-3, TRAJ52)
CAMSRTTAGGTSYGKLTF

SEQ ID NO: 677918 - protein, 17 aa, Homo sapiens
  CDR3 for beta chain variable domain of TCR clone 338959 (TRBV7-3, TRBJ2-3)
CASSLMKRMRGADTQYF

SEQ ID NO: 677919 - protein, 17 aa, Homo sapiens
  CDR3 for alpha chain variable domain of TCR clone 338960 (TRAV38-1, TRAJ54)
CAFMKPTGLQGAQKRVF

SEQ ID NO: 677920 - protein, 14 aa, Homo sapiens
  CDR3 for beta chain variable domain of TCR clone 338960 (TRBV19, TRBJ2-7)
CASSIRLGDHEQYF

SEQ ID NO: 677921 - protein, 16 aa, Homo sapiens
  CDR3 for alpha chain variable domain of TCR clone 338961 (TRAV20, TRAJ10)
CAVLRGLTGGGNKLTF

SEQ ID NO: 677922 - protein, 14 aa, Homo sapiens
  CDR3 for beta chain variable domain of TCR clone 338961 (TRBV7-2, TRBJ2-3)
CASSQTGSSYTQYF

SEQ ID NO: 677923 - protein, 14 aa, Homo sapiens
  CDR3 for alpha chain variable domain of TCR clone 338962 (TRAV12-2, TRAJ40)
CAVKIPSGTYKYIF

SEQ ID NO: 677924 - protein, 16 aa, Homo sapiens
  CDR3 for beta chain variable domain of TCR clone 338962 (TRBV7-2, TRBJ2-3)
CASSAPWGRIADTQYF

SEQ ID NO: 677925 - protein, 12 aa, Homo sapiens
  CDR3 for alpha chain variable domain of TCR clone 338963 (TRAV30, TRAJ39)
CGRGNAGNMLTF

SEQ ID NO: 677926 - protein, 14 aa, Homo sapiens
  CDR3 for beta chain variable domain of TCR clone 338963 (TRBV18, TRBJ2-1)
CASSPQGRFNEQFF

SEQ ID NO: 677927 - protein, 13 aa, Homo sapiens
  CDR3 for alpha chain variable domain of TCR clone 338964 (TRAV13-2, TRAJ48)
CAEMDFGNEKLTF

SEQ ID NO: 677928 - protein, 15 aa, Homo sapiens
  CDR3 for beta chain variable domain of TCR clone 338964 (TRBV5-7, TRBJ1-2)
CAGSSPGQGNYGYTF

SEQ ID NO: 677929 - protein, 14 aa, Homo sapiens
  CDR3 for alpha chain variable domain of TCR clone 338965 (TRAV1-2, TRAJ16)
CAVNRFSDGQKLLF

SEQ ID NO: 677930 - protein, 18 aa, Homo sapiens
  CDR3 for beta chain variable domain of TCR clone 338965 (TRBV20-1, TRBJ2-3)
CSASGLAGRPGTTDTQYF

SEQ ID NO: 677931 - protein, 17 aa, Homo sapiens
  CDR3 for alpha chain variable domain of TCR clone 338966 (TRAV38-1, TRAJ45)
CSFMRSHSGGGADGLTF

SEQ ID NO: 677932 - protein, 15 aa, Homo sapiens
  CDR3 for beta chain variable domain of TCR clone 338966 (TRBV7-2, TRBJ2-3)
CASSLVVRGPDTQYF

SEQ ID NO: 677933 - protein, 16 aa, Homo sapiens
  CDR3 for alpha chain variable domain of TCR clone 338967 (TRAV16, TRAJ42)
CALSGLLGGSQGNLIL

SEQ ID NO: 677934 - protein, 15 aa, Homo sapiens
  CDR3 for beta chain variable domain of TCR clone 338967 (TRBV5-1, TRBJ2-1)
CASSPGGLAGNEQFF

SEQ ID NO: 677935 - protein, 16 aa, Homo sapiens
  CDR3 for alpha chain variable domain of TCR clone 338968 (TRAV16, TRAJ4)
CVLSRMFSGGYNKLIF

SEQ ID NO: 677936 - protein, 12 aa, Homo sapiens
  CDR3 for beta chain variable domain of TCR clone 338968 (TRBV11-2, TRBJ2-2)
CASSLGGGELFF

SEQ ID NO: 677937 - protein, 14 aa, Homo sapiens
  CDR3 for alpha chain variable domain of TCR clone 338969 (TRAV17, TRAJ22)
CATSPSGSARQLTF

SEQ ID NO: 677938 - protein, 15 aa, Homo sapiens
  CDR3 for beta chain variable domain of TCR clone 338969 (TRBV4-1, TRBJ2-5)
CASSQWDLYQETQYY

SEQ ID NO: 677939 - protein, 13 aa, Homo sapiens
  CDR3 for alpha chain variable domain of TCR clone 338970 (TRAV27, TRAJ49)
SAPRPYTGNQFYF

SEQ ID NO: 677940 - protein, 16 aa, Homo sapiens
  CDR3 for beta chain variable domain of TCR clone 338970 (TRBV4-1, TRBJ1-2)
CASSQDAGQVLYGYTF

SEQ ID NO: 677941 - protein, 23 aa, Homo sapiens
  CDR3 for alpha chain variable domain of TCR clone 338971 (TRAV26-1, TRAJ38)
CIADNAGNNHIQNPDPAVYQLRD

SEQ ID NO: 677942 - protein, 16 aa, Homo sapiens
  CDR3 for beta chain variable domain of TCR clone 338971 (TRBV7-9, TRBJ1-2)
CASSLGFSAGEDGYTF

SEQ ID NO: 677943 - protein, 15 aa, Homo sapiens
  CDR3 for alpha chain variable domain of TCR clone 338972 (TRAV38-1, TRAJ37)
CAFIHGSGNTGKLIF

SEQ ID NO: 677944 - protein, 15 aa, Homo sapiens
  CDR3 for beta chain variable domain of TCR clone 338972 (TRBV6-1, TRBJ2-3)
CASSERGGITDTQYF

SEQ ID NO: 677945 - protein, 17 aa, Homo sapiens
  CDR3 for alpha chain variable domain of TCR clone 338973 (TRAV3, TRAJ6)
CAVRDGRRAGGSYIPTF

SEQ ID NO: 677946 - protein, 14 aa, Homo sapiens
  CDR3 for beta chain variable domain of TCR clone 338973 (TRBV10-2, TRBJ1-5)
CASSSTGRNQPQHF

SEQ ID NO: 677947 - protein, 14 aa, Homo sapiens
  CDR3 for alpha chain variable domain of TCR clone 338974 (TRAV35, TRAJ22)
RAGLRPSSARQLTF

SEQ ID NO: 677948 - protein, 14 aa, Homo sapiens
  CDR3 for beta chain variable domain of TCR clone 338974 (TRBV4-1, TRBJ2-7)
CASSPVAGGDEQYF

SEQ ID NO: 677949 - protein, 14 aa, Homo sapiens
  CDR3 for alpha chain variable domain of TCR clone 338975 (TRAV3, TRAJ37)
CAVKESGDTGKLIF

SEQ ID NO: 677950 - protein, 14 aa, Homo sapiens
  CDR3 for beta chain variable domain of TCR clone 338975 (TRBV2, TRBJ1-5)
CASSENRGGQPQHF

SEQ ID NO: 677951 - protein, 14 aa, Homo sapiens
  CDR3 for alpha chain variable domain of TCR clone 338976 (TRAV17, TRAJ26)
CATDDHNYGQNFVF

SEQ ID NO: 677952 - protein, 11 aa, Homo sapiens
  CDR3 for beta chain variable domain of TCR clone 338976 (TRBV11-2, TRBJ2-2)
CASSLPGELFF

SEQ ID NO: 677953 - protein, 10 aa, Homo sapiens
  CDR3 for alpha chain variable domain of TCR clone 338977 (TRAV16, TRAJ26)
CAPEELWSEF

SEQ ID NO: 677954 - protein, 15 aa, Homo sapiens
  CDR3 for beta chain variable domain of TCR clone 338977 (TRBV7-2, TRBJ2-3)
CVSSLTGTSTDTQYF

SEQ ID NO: 677955 - protein, 14 aa, Homo sapiens
  CDR3 for alpha chain variable domain of TCR clone 338978 (TRAV19, TRAJ22)
CALSDSGSARQLTF

SEQ ID NO: 677956 - protein, 11 aa, Homo sapiens
  CDR3 for beta chain variable domain of TCR clone 338978 (TRBV29-1, TRBJ2-5)
CSEDRTGTQYF

SEQ ID NO: 677957 - protein, 12 aa, Homo sapiens
  CDR3 for alpha chain variable domain of TCR clone 338979 (TRAV17, TRAJ49)
CATVTTGNQFYF

SEQ ID NO: 677958 - protein, 11 aa, Homo sapiens
  CDR3 for beta chain variable domain of TCR clone 338979 (TRBV11-2, TRBJ2-6)
CASSLKPFLAL

SEQ ID NO: 677959 - protein, 12 aa, Homo sapiens
  CDR3 for alpha chain variable domain of TCR clone 338980 (TRAV38-1, TRAJ47)
CAFETYGNKLFF

SEQ ID NO: 677960 - protein, 15 aa, Homo sapiens
  CDR3 for beta chain variable domain of TCR clone 338980 (TRBV5-7, TRBJ2-7)
CASSGGRPVPYEQYF

SEQ ID NO: 677961 - protein, 14 aa, Homo sapiens
  CDR3 for alpha chain variable domain of TCR clone 338981 (TRAV1-2, TRAJ6)
CAVRSSGGSYIPTF

SEQ ID NO: 677962 - protein, 14 aa, Homo sapiens
  CDR3 for beta chain variable domain of TCR clone 338981 (TRBV5-4, TRBJ1-1)
CASSLDSRRDEAFF

SEQ ID NO: 677963 - protein, 14 aa, Homo sapiens
  CDR3 for alpha chain variable domain of TCR clone 338982 (TRAV3, TRAJ27)
CAVRDDTNAGKSTI

SEQ ID NO: 677964 - protein, 15 aa, Homo sapiens
  CDR3 for beta chain variable domain of TCR clone 338982 (TRBV7-7, TRBJ2-2)
CATSKLAKNTGELFF

SEQ ID NO: 677965 - protein, 16 aa, Homo sapiens
  CDR3 for alpha chain variable domain of TCR clone 338983 (TRAV3, TRAJ10)
CAVIDMRAGGGNKLTF

SEQ ID NO: 677966 - protein, 13 aa, Homo sapiens
  CDR3 for beta chain variable domain of TCR clone 338983 (TRBV7-9, TRBJ1-2)
CASSLKQNYGYTF

SEQ ID NO: 677967 - protein, 15 aa, Homo sapiens
  CDR3 for alpha chain variable domain of TCR clone 338984 (TRAV17, TRAJ23)
GATDAEDNQGGKLIF

SEQ ID NO: 677968 - protein, 12 aa, Homo sapiens
  CDR3 for beta chain variable domain of TCR clone 338984 (TRBV2, TRBJ2-1)
CAKREGYNEQFF

SEQ ID NO: 677969 - protein, 14 aa, Homo sapiens
  CDR3 for alpha chain variable domain of TCR clone 338985 (TRAV38-1, TRAJ27)
CAFIHNTNAGKPTF

SEQ ID NO: 677970 - protein, 12 aa, Homo sapiens
  CDR3 for beta chain variable domain of TCR clone 338985 (TRBV7-8, TRBJ2-7)
CASSLGDREQYF

SEQ ID NO: 677971 - protein, 15 aa, Homo sapiens
  CDR3 for alpha chain variable domain of TCR clone 338986 (TRAV26-1, TRAJ22)
CIVRVSFWFCKATDL

SEQ ID NO: 677972 - protein, 12 aa, Homo sapiens
  CDR3 for beta chain variable domain of TCR clone 338986 (TRBV11-2, TRBJ2-2)
CASSLGGGGLFF

SEQ ID NO: 677973 - protein, 14 aa, Homo sapiens
  CDR3 for alpha chain variable domain of TCR clone 338987 (TRAV12-2, TRAJ32)
CAHSESGATNKLIF

SEQ ID NO: 677974 - protein, 14 aa, Homo sapiens
  CDR3 for beta chain variable domain of TCR clone 338987 (TRBV4-2, TRBJ2-3)
CASRETRAPGRQYF

SEQ ID NO: 677975 - protein, 16 aa, Homo sapiens
  CDR3 for alpha chain variable domain of TCR clone 338988 (TRAV30, TRAJ24)
CGTEIVDADSWRKFQF

SEQ ID NO: 677976 - protein, 13 aa, Homo sapiens
  CDR3 for beta chain variable domain of TCR clone 338988 (TRBV11-2, TRBJ2-5)
CASSSTGEETQYF

SEQ ID NO: 677977 - protein, 15 aa, Homo sapiens
  CDR3 for alpha chain variable domain of TCR clone 338989 (TRAV17, TRAJ22)
CATVAPSGSARQLTF

SEQ ID NO: 677978 - protein, 15 aa, Homo sapiens
  CDR3 for beta chain variable domain of TCR clone 338989 (TRBV18, TRBJ1-1)
CASSPRQGENTEAFF

SEQ ID NO: 677979 - protein, 14 aa, Homo sapiens
  CDR3 for alpha chain variable domain of TCR clone 338990 (TRAV2, TRAJ37)
CAVDFTSNTGKPIF

SEQ ID NO: 677980 - protein, 17 aa, Homo sapiens
  CDR3 for beta chain variable domain of TCR clone 338990 (TRBV19, TRBJ2-7)
CASSISFYDSYPYEQYF

SEQ ID NO: 677981 - protein, 14 aa, Homo sapiens
  CDR3 for alpha chain variable domain of TCR clone 338991 (TRAV1-2, TRAJ16)
CAVNRFSDGQKLLF

SEQ ID NO: 677982 - protein, 14 aa, Homo sapiens
  CDR3 for beta chain variable domain of TCR clone 338991 (TRBV18, TRBJ1-1)
CASSQGQGNTEAFF

SEQ ID NO: 677983 - protein, 15 aa, Homo sapiens
  CDR3 for alpha chain variable domain of TCR clone 338992 (TRAV20, TRAJ6)
CAVRLQSGGSYIPTF

SEQ ID NO: 677984 - protein, 16 aa, Homo sapiens
  CDR3 for beta chain variable domain of TCR clone 338992 (TRBV12-4, TRBJ2-7)
CASSASGAGTSSTSGR

SEQ ID NO: 677985 - protein, 15 aa, Homo sapiens
  CDR3 for alpha chain variable domain of TCR clone 338993 (TRAV35, TRAJ23)
CAGQRGNNQGGKLIF

SEQ ID NO: 677986 - protein, 16 aa, Homo sapiens
  CDR3 for beta chain variable domain of TCR clone 338993 (TRBV27, TRBJ2-1)
CASSSRLAVNYNEQFF

SEQ ID NO: 677987 - protein, 12 aa, Homo sapiens
  CDR3 for alpha chain variable domain of TCR clone 338994 (TRAV12-3, TRAJ43)
CAISSNNNDMRF

SEQ ID NO: 677988 - protein, 17 aa, Homo sapiens
  CDR3 for beta chain variable domain of TCR clone 338994 (TRBV7-6, TRBJ2-5)
CASSSPQAGDPSETQYF

SEQ ID NO: 677989 - protein, 17 aa, Homo sapiens
  CDR3 for alpha chain variable domain of TCR clone 338995 (TRAV3, TRAJ7)
CAVRDMSPLEGTTDSLL

SEQ ID NO: 677990 - protein, 17 aa, Homo sapiens
  CDR3 for beta chain variable domain of TCR clone 338995 (TRBV15, TRBJ1-2)
YATSGREIDVVNYGYTF

SEQ ID NO: 677991 - protein, 17 aa, Homo sapiens
  CDR3 for alpha chain variable domain of TCR clone 338996 (TRAV3, TRAJ12)
CAVRDGGRMDSSYKLIF

SEQ ID NO: 677992 - protein, 13 aa, Homo sapiens
  CDR3 for beta chain variable domain of TCR clone 338996 (TRBV15, TRBJ1-6)
CATSGGLNSPRHF

SEQ ID NO: 677993 - protein, 12 aa, Homo sapiens
  CDR3 for alpha chain variable domain of TCR clone 338997 (TRAV8-3, TRAJ20)
CAVGANDYKLIF

SEQ ID NO: 677994 - protein, 16 aa, Homo sapiens
  CDR3 for beta chain variable domain of TCR clone 338997 (TRBV19, TRBJ2-2)
CASRSPGTGATGELFS

SEQ ID NO: 677995 - protein, 12 aa, Homo sapiens
  CDR3 for alpha chain variable domain of TCR clone 338998 (TRAV13-2, TRAJ23)
CAECHRGGKLIF

SEQ ID NO: 677996 - protein, 18 aa, Homo sapiens
  CDR3 for beta chain variable domain of TCR clone 338998 (TRBV11-2, TRBJ1-1)
CASSLRQGGNTRKLSLDK

SEQ ID NO: 677997 - protein, 14 aa, Homo sapiens
  CDR3 for alpha chain variable domain of TCR clone 338999 (TRAV17, TRAJ57)
CATDPQGGSEKLVF

SEQ ID NO: 677998 - protein, 15 aa, Homo sapiens
  CDR3 for beta chain variable domain of TCR clone 338999 (TRBV6-3, TRBJ1-5)
CASSPEVGFNQPQHF

SEQ ID NO: 677999 - protein, 10 aa, Homo sapiens
  CDR3 for alpha chain variable domain of TCR clone 339000 (TRAV29/DV5, TRAJ48)
CAAGGEKLTF

SEQ ID NO: 678000 - protein, 14 aa, Homo sapiens
  CDR3 for beta chain variable domain of TCR clone 339000 (TRBV7-9, TRBJ2-5)
CSSSLAPDQETQYF

SEQ ID NO: 678001 - protein, 14 aa, Homo sapiens
  CDR3 for alpha chain variable domain of TCR clone 339001 (TRAV12-2, TRAJ13)
CAVKNTGGYQKVIF

SEQ ID NO: 678002 - protein, 15 aa, Homo sapiens
  CDR3 for beta chain variable domain of TCR clone 339001 (TRBV27, TRBJ2-1)
CASSNGGGSSNEQFF

SEQ ID NO: 678003 - protein, 14 aa, Homo sapiens
  CDR3 for alpha chain variable domain of TCR clone 339002 (TRAV8-4, TRAJ8)
FAVSEDTGFQNLVF

SEQ ID NO: 678004 - protein, 16 aa, Homo sapiens
  CDR3 for beta chain variable domain of TCR clone 339002 (TRBV7-3, TRBJ2-1)
CASSKPLAGGYNEQFF

SEQ ID NO: 678005 - protein, 18 aa, Homo sapiens
  CDR3 for alpha chain variable domain of TCR clone 339003 (TRAV21, TRAJ52)
CAVRPSPAGGTSYGKLTF

SEQ ID NO: 678006 - protein, 14 aa, Homo sapiens
  CDR3 for beta chain variable domain of TCR clone 339003 (TRBV12-4, TRBJ2-3)
CASRSGLAGGTQYF

SEQ ID NO: 678007 - protein, 14 aa, Homo sapiens
  CDR3 for alpha chain variable domain of TCR clone 339004 (TRAV12-3, TRAJ58)
CAMSTETSGARLTF

SEQ ID NO: 678008 - protein, 15 aa, Homo sapiens
  CDR3 for beta chain variable domain of TCR clone 339004 (TRBV11-3, TRBJ1-1)
CASSLGGPGDTEAFF

SEQ ID NO: 678009 - protein, 18 aa, Homo sapiens
  CDR3 for alpha chain variable domain of TCR clone 339005 (TRAV29/DV5, TRAJ52)
CAAGFRGAGGTSYGKLTF

SEQ ID NO: 678010 - protein, 12 aa, Homo sapiens
  CDR3 for beta chain variable domain of TCR clone 339005 (TRBV14, TRBJ2-5)
CASSQLKETQYF

SEQ ID NO: 678011 - protein, 13 aa, Homo sapiens
  CDR3 for alpha chain variable domain of TCR clone 339006 (TRAV3, TRAJ21)
CAVREPAFNKFYF

SEQ ID NO: 678012 - protein, 14 aa, Homo sapiens
  CDR3 for beta chain variable domain of TCR clone 339006 (TRBV20-1, TRBJ1-1)
CSARAVNGYTEAFF

SEQ ID NO: 678013 - protein, 17 aa, Homo sapiens
  CDR3 for alpha chain variable domain of TCR clone 339007 (TRAV3, TRAJ6)
FAVRDGPRAGGSYIPTF

SEQ ID NO: 678014 - protein, 17 aa, Homo sapiens
  CDR3 for beta chain variable domain of TCR clone 339007 (TRBV20-1, TRBJ1-5)
CSASLSPGQGGNQPQHF

SEQ ID NO: 678015 - protein, 13 aa, Homo sapiens
  CDR3 for alpha chain variable domain of TCR clone 339008 (TRAV13-2, TRAJ48)
CAEMDFGNEKLTF

SEQ ID NO: 678016 - protein, 15 aa, Homo sapiens
  CDR3 for beta chain variable domain of TCR clone 339008 (TRBV11-2, TRBJ2-2)
CASSSDRVNAGELFF

SEQ ID NO: 678017 - protein, 12 aa, Homo sapiens
  CDR3 for alpha chain variable domain of TCR clone 339009 (TRAV13-2, TRAJ23)
CAERHRGGKLIF

SEQ ID NO: 678018 - protein, 15 aa, Homo sapiens
  CDR3 for beta chain variable domain of TCR clone 339009 (TRBV5-1, TRBJ2-3)
CASSVTSGSTDTQYF

SEQ ID NO: 678019 - protein, 13 aa, Homo sapiens
  CDR3 for alpha chain variable domain of TCR clone 339010 (TRAV12-1, TRAJ39)
CVVNYNAGNMLTF

SEQ ID NO: 678020 - protein, 14 aa, Homo sapiens
  CDR3 for beta chain variable domain of TCR clone 339010 (TRBV11-1, TRBJ2-3)
CASSPLGTTDTQYF

SEQ ID NO: 678021 - protein, 11 aa, Homo sapiens
  CDR3 for alpha chain variable domain of TCR clone 339011 (TRAV8-2, TRAJ26)
CVVTLLLGPEF

SEQ ID NO: 678022 - protein, 15 aa, Homo sapiens
  CDR3 for beta chain variable domain of TCR clone 339011 (TRBV11-2, TRBJ2-2)
CASSSDRVNAGELFF

SEQ ID NO: 678023 - protein, 16 aa, Homo sapiens
  CDR3 for alpha chain variable domain of TCR clone 339012 (TRAV36/DV7, TRAJ30)
CAVETYGLDRDDKIIF

SEQ ID NO: 678024 - protein, 13 aa, Homo sapiens
  CDR3 for beta chain variable domain of TCR clone 339012 (TRBV10-3, TRBJ2-7)
CAISEKGGYEQYF

SEQ ID NO: 678025 - protein, 14 aa, Homo sapiens
  CDR3 for alpha chain variable domain of TCR clone 339013 (TRAV8-3, TRAJ23)
CAVIIYNQGGKLIF

SEQ ID NO: 678026 - protein, 15 aa, Homo sapiens
  CDR3 for beta chain variable domain of TCR clone 339013 (TRBV18, TRBJ2-1)
CASSPPSAPYNEQFF

SEQ ID NO: 678027 - protein, 13 aa, Homo sapiens
  CDR3 for alpha chain variable domain of TCR clone 339014 (TRAV27, TRAJ3)
ASLRGSSASEIIF

SEQ ID NO: 678028 - protein, 15 aa, Homo sapiens
  CDR3 for beta chain variable domain of TCR clone 339014 (TRBV28, TRBJ1-3)
CASSMGWASGNTIYF

SEQ ID NO: 678029 - protein, 14 aa, Homo sapiens
  CDR3 for alpha chain variable domain of TCR clone 339015 (TRAV8-3, TRAJ6)
CAVGASGGSYIPTC

SEQ ID NO: 678030 - protein, 17 aa, Homo sapiens
  CDR3 for beta chain variable domain of TCR clone 339015 (TRBV18, TRBJ2-2)
CASSPSDPWQNTGELFF

SEQ ID NO: 678031 - protein, 19 aa, Homo sapiens
  CDR3 for alpha chain variable domain of TCR clone 339016 (TRAV1-1, TRAJ37)
CAVPSSGRYGPGNTGKLIF

SEQ ID NO: 678032 - protein, 14 aa, Homo sapiens
  CDR3 for beta chain variable domain of TCR clone 339016 (TRBV7-6, TRBJ2-7)
CASSLGDRGYEQYF

SEQ ID NO: 678033 - protein, 11 aa, Homo sapiens
  CDR3 for alpha chain variable domain of TCR clone 339017 (TRAV23/DV6, TRAJ56)
CAAPANSKLTF

SEQ ID NO: 678034 - protein, 14 aa, Homo sapiens
  CDR3 for beta chain variable domain of TCR clone 339017 (TRBV7-9, TRBJ2-1)
CASSPRDSLYEQFF

SEQ ID NO: 678035 - protein, 14 aa, Homo sapiens
  CDR3 for alpha chain variable domain of TCR clone 339018 (TRAV12-1, TRAJ45)
CVVNVGGGADGLTF

SEQ ID NO: 678036 - protein, 15 aa, Homo sapiens
  CDR3 for beta chain variable domain of TCR clone 339018 (TRBV28, TRBJ2-1)
CASSIIAGGRSEQFF

SEQ ID NO: 678037 - protein, 12 aa, Homo sapiens
  CDR3 for alpha chain variable domain of TCR clone 339019 (TRAV2, TRAJ43)
CAVEVDNNDMRF

SEQ ID NO: 678038 - protein, 16 aa, Homo sapiens
  CDR3 for beta chain variable domain of TCR clone 339019 (TRBV7-3, TRBJ2-3)
CASSLSGYRPEDTQYF

SEQ ID NO: 678039 - protein, 13 aa, Homo sapiens
  CDR3 for alpha chain variable domain of TCR clone 339020 (TRAV20, TRAJ49)
CAVQARTGNQFYL

SEQ ID NO: 678040 - protein, 13 aa, Homo sapiens
  CDR3 for beta chain variable domain of TCR clone 339020 (TRBV10-3, TRBJ2-7)
CASKLAVNYEQYF

SEQ ID NO: 678041 - protein, 16 aa, Homo sapiens
  CDR3 for alpha chain variable domain of TCR clone 339021 (TRAV3, TRAJ37)
CAVRPHGSGNTGKLIF

SEQ ID NO: 678042 - protein, 16 aa, Homo sapiens
  CDR3 for beta chain variable domain of TCR clone 339021 (TRBV7-9, TRBJ2-1)
CASSPVLASGTVEQFF

SEQ ID NO: 678043 - protein, 11 aa, Homo sapiens
  CDR3 for alpha chain variable domain of TCR clone 339022 (TRAV4, TRAJ31)
CVVGDNARLMF

SEQ ID NO: 678044 - protein, 16 aa, Homo sapiens
  CDR3 for beta chain variable domain of TCR clone 339022 (TRBV7-2, TRBJ2-5)
CASSSKWLSGQETQYF

SEQ ID NO: 678045 - protein, 15 aa, Homo sapiens
  CDR3 for alpha chain variable domain of TCR clone 339023 (TRAV27, TRAJ38)
CAARRNAGNNRKLLW

SEQ ID NO: 678046 - protein, 13 aa, Homo sapiens
  CDR3 for beta chain variable domain of TCR clone 339023 (TRBV12-5, TRBJ2-3)
CASGDRQSDTQYL

SEQ ID NO: 678047 - protein, 13 aa, Homo sapiens
  CDR3 for alpha chain variable domain of TCR clone 339024 (TRAV2, TRAJ40)
CAVVTSGTYNSIF

SEQ ID NO: 678048 - protein, 14 aa, Homo sapiens
  CDR3 for beta chain variable domain of TCR clone 339024 (TRBV20-1, TRBJ1-1)
CSAMGGTANTEAFF

SEQ ID NO: 678049 - protein, 16 aa, Homo sapiens
  CDR3 for alpha chain variable domain of TCR clone 339025 (TRAV16, TRAJ52)
CALSGVGGTSYEKLTF

SEQ ID NO: 678050 - protein, 14 aa, Homo sapiens
  CDR3 for beta chain variable domain of TCR clone 339025 (TRBV19, TRBJ1-2)
CASSLQGQAYDYTF

SEQ ID NO: 678051 - protein, 17 aa, Homo sapiens
  CDR3 for alpha chain variable domain of TCR clone 339026 (TRAV1-1, TRAJ11)
CAGYSTLPFGKGTMLLV

SEQ ID NO: 678052 - protein, 15 aa, Homo sapiens
  CDR3 for beta chain variable domain of TCR clone 339026 (TRBV6-5, TRBJ2-1)
CASRGDFDSYNEQFF

SEQ ID NO: 678053 - protein, 12 aa, Homo sapiens
  CDR3 for alpha chain variable domain of TCR clone 339027 (TRAV9-2, TRAJ24)
CAQTDSWGKLKF

SEQ ID NO: 678054 - protein, 13 aa, Homo sapiens
  CDR3 for beta chain variable domain of TCR clone 339027 (TRBV12-4, TRBJ2-1)
CASSFQGYNEQFF

SEQ ID NO: 678055 - protein, 13 aa, Homo sapiens
  CDR3 for alpha chain variable domain of TCR clone 339028 (TRAV12-1, TRAJ21)
CVVTLYHFNKFYF

SEQ ID NO: 678056 - protein, 20 aa, Homo sapiens
  CDR3 for beta chain variable domain of TCR clone 339028 (TRBV7-8, TRBJ2-1)
CASSLAHRLAGVRSYNEQFF

SEQ ID NO: 678057 - protein, 15 aa, Homo sapiens
  CDR3 for alpha chain variable domain of TCR clone 339029 (TRAV38-2/DV8, TRAJ47)
CAYGSAKGYGNKLVF

SEQ ID NO: 678058 - protein, 15 aa, Homo sapiens
  CDR3 for beta chain variable domain of TCR clone 339029 (TRBV6-6, TRBJ2-7)
CASSYSYGGSYEQYF

SEQ ID NO: 678059 - protein, 16 aa, Homo sapiens
  CDR3 for alpha chain variable domain of TCR clone 339030 (TRAV3, TRAJ10)
CVVRDMWAGGGNKLTF

SEQ ID NO: 678060 - protein, 15 aa, Homo sapiens
  CDR3 for beta chain variable domain of TCR clone 339030 (TRBV11-2, TRBJ1-6)
CACTGFGTAVSPLHF

SEQ ID NO: 678061 - protein, 15 aa, Homo sapiens
  CDR3 for alpha chain variable domain of TCR clone 339031 (TRAV3, TRAJ29)
CAVRAPLSGNTPLVF

SEQ ID NO: 678062 - protein, 13 aa, Homo sapiens
  CDR3 for beta chain variable domain of TCR clone 339031 (TRBV7-3, TRBJ1-1)
CASSQDWGAEAFF

SEQ ID NO: 678063 - protein, 13 aa, Homo sapiens
  CDR3 for alpha chain variable domain of TCR clone 339032 (TRAV13-1, TRAJ48)
CAAASFGNEKLTF

SEQ ID NO: 678064 - protein, 14 aa, Homo sapiens
  CDR3 for beta chain variable domain of TCR clone 339032 (TRBV18, TRBJ2-1)
CASSPETSETEQFF

SEQ ID NO: 678065 - protein, 14 aa, Homo sapiens
  CDR3 for alpha chain variable domain of TCR clone 339033 (TRAV1-2, TRAJ16)
CAVNRISDGQKLLF

SEQ ID NO: 678066 - protein, 16 aa, Homo sapiens
  CDR3 for beta chain variable domain of TCR clone 339033 (TRBV12-5, TRBJ2-5)
CASGPRTSGNQETQYF

SEQ ID NO: 678067 - protein, 15 aa, Homo sapiens
  CDR3 for alpha chain variable domain of TCR clone 339034 (TRAV17, TRAJ57)
CATGPSQGGSEKLVF

SEQ ID NO: 678068 - protein, 13 aa, Homo sapiens
  CDR3 for beta chain variable domain of TCR clone 339034 (TRBV2, TRBJ1-1)
CARNPTGGFHAFF

SEQ ID NO: 678069 - protein, 13 aa, Homo sapiens
  CDR3 for alpha chain variable domain of TCR clone 339035 (TRAV20, TRAJ34)
CAVRSYNTDKIIF

SEQ ID NO: 678070 - protein, 12 aa, Homo sapiens
  CDR3 for beta chain variable domain of TCR clone 339035 (TRBV11-2, TRBJ2-1)
CASSPGNNEQFF

SEQ ID NO: 678071 - protein, 17 aa, Homo sapiens
  CDR3 for alpha chain variable domain of TCR clone 339036 (TRAV3, TRAJ42)
CAVRDRDYGGSQGNLIC

SEQ ID NO: 678072 - protein, 14 aa, Homo sapiens
  CDR3 for beta chain variable domain of TCR clone 339036 (TRBV7-2, TRBJ2-5)
CASSPRGSSETQYF

SEQ ID NO: 678073 - protein, 13 aa, Homo sapiens
  CDR3 for alpha chain variable domain of TCR clone 339037 (TRAV21, TRAJ27)
CAALNTNAAKPTF

SEQ ID NO: 678074 - protein, 14 aa, Homo sapiens
  CDR3 for beta chain variable domain of TCR clone 339037 (TRBV27, TRBJ1-1)
CASSLLSGLSEAFF

SEQ ID NO: 678075 - protein, 14 aa, Homo sapiens
  CDR3 for alpha chain variable domain of TCR clone 339038 (TRAV8-1, TRAJ37)
CAVFGSSNTGKLIF

SEQ ID NO: 678076 - protein, 14 aa, Homo sapiens
  CDR3 for beta chain variable domain of TCR clone 339038 (TRBV7-2, TRBJ2-7)
CASSPKTSFYEQYF

SEQ ID NO: 678077 - protein, 14 aa, Homo sapiens
  CDR3 for alpha chain variable domain of TCR clone 339039 (TRAV12-2, TRAJ13)
CAVKKTGGYQKVTF

SEQ ID NO: 678078 - protein, 11 aa, Homo sapiens
  CDR3 for beta chain variable domain of TCR clone 339039 (TRBV5-6, TRBJ2-5)
CASSLERTQYF

SEQ ID NO: 678079 - protein, 13 aa, Homo sapiens
  CDR3 for alpha chain variable domain of TCR clone 339040 (TRAV35, TRAJ36)
CAGPRIGANNLFF

SEQ ID NO: 678080 - protein, 16 aa, Homo sapiens
  CDR3 for beta chain variable domain of TCR clone 339040 (TRBV7-3, TRBJ2-2)
CASSLKRGTLSGELFF

SEQ ID NO: 678081 - protein, 13 aa, Homo sapiens
  CDR3 for alpha chain variable domain of TCR clone 339041 (TRAV13-1, TRAJ39)
CEASIWAGDMLTF

SEQ ID NO: 678082 - protein, 15 aa, Homo sapiens
  CDR3 for beta chain variable domain of TCR clone 339041 (TRBV7-9, TRBJ1-1)
CASSLLEQGGTEAFF

SEQ ID NO: 678083 - protein, 13 aa, Homo sapiens
  CDR3 for alpha chain variable domain of TCR clone 339042 (TRAV12-1, TRAJ26)
CVVRRNYGQNFVF

SEQ ID NO: 678084 - protein, 15 aa, Homo sapiens
  CDR3 for beta chain variable domain of TCR clone 339042 (TRBV10-2, TRBJ2-6)
CASSEQGTGANVLTF

SEQ ID NO: 678085 - protein, 16 aa, Homo sapiens
  CDR3 for alpha chain variable domain of TCR clone 339043 (TRAV13-1, TRAJ45)
FAASWESGGGADGLTF

SEQ ID NO: 678086 - protein, 14 aa, Homo sapiens
  CDR3 for beta chain variable domain of TCR clone 339043 (TRBV12-4, TRBJ1-3)
CASGQTVSGNTIYF

SEQ ID NO: 678087 - protein, 14 aa, Homo sapiens
  CDR3 for alpha chain variable domain of TCR clone 339044 (TRAV26-1, TRAJ45)
CIVREGGGADGLTF

SEQ ID NO: 678088 - protein, 14 aa, Homo sapiens
  CDR3 for beta chain variable domain of TCR clone 339044 (TRBV2, TRBJ1-2)
CASNEETGPYGYTF

SEQ ID NO: 678089 - protein, 15 aa, Homo sapiens
  CDR3 for alpha chain variable domain of TCR clone 339045 (TRAV3, TRAJ42)
CSVRGGTGSQGNLIF

SEQ ID NO: 678090 - protein, 14 aa, Homo sapiens
  CDR3 for beta chain variable domain of TCR clone 339045 (TRBV19, TRBJ1-2)
CASSSLFARDVYTF

SEQ ID NO: 678091 - protein, 13 aa, Homo sapiens
  CDR3 for alpha chain variable domain of TCR clone 339046 (TRAV27, TRAJ11)
CAGARSGYSTLTF

SEQ ID NO: 678092 - protein, 16 aa, Homo sapiens
  CDR3 for beta chain variable domain of TCR clone 339046 (TRBV16, TRBJ2-7)
CASSRPAGGSSYEQYF

SEQ ID NO: 678093 - protein, 12 aa, Homo sapiens
  CDR3 for alpha chain variable domain of TCR clone 339047 (TRAV26-1, TRAJ36)
CIVRVRADNLFF

SEQ ID NO: 678094 - protein, 14 aa, Homo sapiens
  CDR3 for beta chain variable domain of TCR clone 339047 (TRBV7-2, TRBJ2-5)
CASGLVVGQETQYF

SEQ ID NO: 678095 - protein, 14 aa, Homo sapiens
  CDR3 for alpha chain variable domain of TCR clone 339048 (TRAV13-1, TRAJ35)
CAASKGGVGNVLHC

SEQ ID NO: 678096 - protein, 13 aa, Homo sapiens
  CDR3 for beta chain variable domain of TCR clone 339048 (TRBV7-3, TRBJ1-1)
CASSEDLGAEDFF

SEQ ID NO: 678097 - protein, 13 aa, Homo sapiens
  CDR3 for alpha chain variable domain of TCR clone 339049 (TRAV21, TRAJ27)
CAARPCNAGKSTF

SEQ ID NO: 678098 - protein, 14 aa, Homo sapiens
  CDR3 for beta chain variable domain of TCR clone 339049 (TRBV7-6, TRBJ2-3)
CASSLGRVTDTQYF

SEQ ID NO: 678099 - protein, 23 aa, Homo sapiens
  CDR3 for alpha chain variable domain of TCR clone 339050 (TRAV8-4, TRAJ38)
CARLNAGNNHIQNPDPAVNQLRD

SEQ ID NO: 678100 - protein, 14 aa, Homo sapiens
  CDR3 for beta chain variable domain of TCR clone 339050 (TRBV7-8, TRBJ2-3)
CASSLEAGTDTQYF

SEQ ID NO: 678101 - protein, 16 aa, Homo sapiens
  CDR3 for alpha chain variable domain of TCR clone 339051 (TRAV38-1, TRAJ42)
CAFMKLGGGSQGNLIF

SEQ ID NO: 678102 - protein, 16 aa, Homo sapiens
  CDR3 for beta chain variable domain of TCR clone 339051 (TRBV20-1, TRBJ1-4)
CSAPGQGLLTNEKLFV

SEQ ID NO: 678103 - protein, 16 aa, Homo sapiens
  CDR3 for alpha chain variable domain of TCR clone 339052 (TRAV21, TRAJ37)
CAFRTAGSSNTGTLIF

SEQ ID NO: 678104 - protein, 13 aa, Homo sapiens
  CDR3 for beta chain variable domain of TCR clone 339052 (TRBV7-9, TRBJ2-5)
CASLPSGRETQYF

SEQ ID NO: 678105 - protein, 13 aa, Homo sapiens
  CDR3 for alpha chain variable domain of TCR clone 339053 (TRAV27, TRAJ29)
RAGAHSGNTPLVF

SEQ ID NO: 678106 - protein, 18 aa, Homo sapiens
  CDR3 for beta chain variable domain of TCR clone 339053 (TRBV6-6, TRBJ1-3)
CASSYSKWDSISGNTIYF

SEQ ID NO: 678107 - protein, 11 aa, Homo sapiens
  CDR3 for alpha chain variable domain of TCR clone 339054 (TRAV2, TRAJ13)
CASGGYQKVTF

SEQ ID NO: 678108 - protein, 16 aa, Homo sapiens
  CDR3 for beta chain variable domain of TCR clone 339054 (TRBV6-3, TRBJ1-2)
CASSYSRRASNYGYTF

SEQ ID NO: 678109 - protein, 14 aa, Homo sapiens
  CDR3 for alpha chain variable domain of TCR clone 339055 (TRAV1-2, TRAJ16)
CAVNRFSDGQKLLF

SEQ ID NO: 678110 - protein, 16 aa, Homo sapiens
  CDR3 for beta chain variable domain of TCR clone 339055 (TRBV20-1, TRBJ1-2)
CSASMGQGVANYGYAF

SEQ ID NO: 678111 - protein, 17 aa, Homo sapiens
  CDR3 for alpha chain variable domain of TCR clone 339056 (TRAV3, TRAJ38)
CAVRDGLNAGNNRKLNW

SEQ ID NO: 678112 - protein, 13 aa, Homo sapiens
  CDR3 for beta chain variable domain of TCR clone 339056 (TRBV23-1, TRBJ1-4)
CASRGKFNEKLFF

SEQ ID NO: 678113 - protein, 13 aa, Homo sapiens
  CDR3 for alpha chain variable domain of TCR clone 339057 (TRAV12-3, TRAJ9)
CAMRNTGGFKTIF

SEQ ID NO: 678114 - protein, 16 aa, Homo sapiens
  CDR3 for beta chain variable domain of TCR clone 339057 (TRBV19, TRBJ2-1)
CASSIDGSFAYNEHFF

SEQ ID NO: 678115 - protein, 13 aa, Homo sapiens
  CDR3 for alpha chain variable domain of TCR clone 339058 (TRAV3, TRAJ21)
CAVREPDFNKFYF

SEQ ID NO: 678116 - protein, 20 aa, Homo sapiens
  CDR3 for beta chain variable domain of TCR clone 339058 (TRBV19, TRBJ2-7)
CASTQVAPESLRAVLRAGHQ

SEQ ID NO: 678117 - protein, 14 aa, Homo sapiens
  CDR3 for alpha chain variable domain of TCR clone 339059 (TRAV12-2, TRAJ44)
CAVNRAGTASKLTF

SEQ ID NO: 678118 - protein, 12 aa, Homo sapiens
  CDR3 for beta chain variable domain of TCR clone 339059 (TRBV19, TRBJ1-4)
CASNDWPGGLFF

SEQ ID NO: 678119 - protein, 16 aa, Homo sapiens
  CDR3 for alpha chain variable domain of TCR clone 339060 (TRAV3, TRAJ37)
CAVRGKGSGNTGKLLF

SEQ ID NO: 678120 - protein, 15 aa, Homo sapiens
  CDR3 for beta chain variable domain of TCR clone 339060 (TRBV7-9, TRBJ1-6)
CASSSPGRGNSPLHF

SEQ ID NO: 678121 - protein, 13 aa, Homo sapiens
  CDR3 for alpha chain variable domain of TCR clone 339061 (TRAV21, TRAJ45)
CAVMGGGADGLTL

SEQ ID NO: 678122 - protein, 14 aa, Homo sapiens
  CDR3 for beta chain variable domain of TCR clone 339061 (TRBV4-3, TRBJ1-4)
CASSPVQRNEKLFF

SEQ ID NO: 678123 - protein, 12 aa, Homo sapiens
  CDR3 for alpha chain variable domain of TCR clone 339062 (TRAV36/DV7, TRAJ40)
CAVGTGTYKYIF

SEQ ID NO: 678124 - protein, 17 aa, Homo sapiens
  CDR3 for beta chain variable domain of TCR clone 339062 (TRBV4-1, TRBJ2-2)
CASSHPHDGSKVGELFF

SEQ ID NO: 678125 - protein, 13 aa, Homo sapiens
  CDR3 for alpha chain variable domain of TCR clone 339063 (TRAV1-2, TRAJ9)
CAVLNTGGFKTIF

SEQ ID NO: 678126 - protein, 13 aa, Homo sapiens
  CDR3 for beta chain variable domain of TCR clone 339063 (TRBV19, TRBJ2-7)
CASRKVGGSEQYF

SEQ ID NO: 678127 - protein, 15 aa, Homo sapiens
  CDR3 for alpha chain variable domain of TCR clone 339064 (TRAV35, TRAJ50)
CAGQLRKTSYNKVIF

SEQ ID NO: 678128 - protein, 12 aa, Homo sapiens
  CDR3 for beta chain variable domain of TCR clone 339064 (TRBV5-1, TRBJ2-5)
CASSLGLETQYF

SEQ ID NO: 678129 - protein, 12 aa, Homo sapiens
  CDR3 for alpha chain variable domain of TCR clone 339065 (TRAV1-2, TRAJ9)
CAGYTGGFKTIF

SEQ ID NO: 678130 - protein, 15 aa, Homo sapiens
  CDR3 for beta chain variable domain of TCR clone 339065 (TRBV11-2, TRBJ2-1)
CASSLGPDSYNEQFF

SEQ ID NO: 678131 - protein, 13 aa, Homo sapiens
  CDR3 for alpha chain variable domain of TCR clone 339066 (TRAV12-3, TRAJ33)
CAMSVNSNYQLIW

SEQ ID NO: 678132 - protein, 14 aa, Homo sapiens
  CDR3 for beta chain variable domain of TCR clone 339066 (TRBV6-1, TRBJ1-3)
CASVQGGGGNTMYF

SEQ ID NO: 678133 - protein, 14 aa, Homo sapiens
  CDR3 for alpha chain variable domain of TCR clone 339067 (TRAV12-2, TRAJ40)
CAVKIPSGTYKYIF

SEQ ID NO: 678134 - protein, 14 aa, Homo sapiens
  CDR3 for beta chain variable domain of TCR clone 339067 (TRBV20-1, TRBJ1-1)
CSAQTRIGGTKAFF

SEQ ID NO: 678135 - protein, 13 aa, Homo sapiens
  CDR3 for alpha chain variable domain of TCR clone 339068 (TRAV8-1, TRAJ39)
CAGLNNAGNMLTF

SEQ ID NO: 678136 - protein, 13 aa, Homo sapiens
  CDR3 for beta chain variable domain of TCR clone 339068 (TRBV7-9, TRBJ1-2)
CASSLKQNYGYTF

SEQ ID NO: 678137 - protein, 16 aa, Homo sapiens
  CDR3 for alpha chain variable domain of TCR clone 339069 (TRAV3, TRAJ10)
CAVRDMRAGGGNKLTF

SEQ ID NO: 678138 - protein, 14 aa, Homo sapiens
  CDR3 for beta chain variable domain of TCR clone 339069 (TRBV5-1, TRBJ1-1)
CASSLVTGVTEAFF

SEQ ID NO: 678139 - protein, 14 aa, Homo sapiens
  CDR3 for alpha chain variable domain of TCR clone 339070 (TRAV2, TRAJ41)
CAVGTSNSEYALNF

SEQ ID NO: 678140 - protein, 13 aa, Homo sapiens
  CDR3 for beta chain variable domain of TCR clone 339070 (TRBV4-1, TRBJ2-1)
CASSQEVQYEQFF

SEQ ID NO: 678141 - protein, 14 aa, Homo sapiens
  CDR3 for alpha chain variable domain of TCR clone 339071 (TRAV12-3, TRAJ10)
SHLPLTGGGNKLTF

SEQ ID NO: 678142 - protein, 15 aa, Homo sapiens
  CDR3 for beta chain variable domain of TCR clone 339071 (TRBV28, TRBJ1-5)
CASSPPGQFNQPQHF

SEQ ID NO: 678143 - protein, 11 aa, Homo sapiens
  CDR3 for alpha chain variable domain of TCR clone 339072 (TRAV2, TRAJ13)
CASGGYQKVTF

SEQ ID NO: 678144 - protein, 15 aa, Homo sapiens
  CDR3 for beta chain variable domain of TCR clone 339072 (TRBV27, TRBJ1-5)
CASSSSGTGNQPQHF

SEQ ID NO: 678145 - protein, 10 aa, Homo sapiens
  CDR3 for alpha chain variable domain of TCR clone 339073 (TRAV30, TRAJ48)
CGIGNEKLTF

SEQ ID NO: 678146 - protein, 14 aa, Homo sapiens
  CDR3 for beta chain variable domain of TCR clone 339073 (TRBV7-6, TRBJ2-3)
CASSLAGGTDTQYF

SEQ ID NO: 678147 - protein, 16 aa, Homo sapiens
  CDR3 for alpha chain variable domain of TCR clone 339074 (TRAV12-3, TRAJ53)
CAMSPGSGGSNYKLTF

SEQ ID NO: 678148 - protein, 13 aa, Homo sapiens
  CDR3 for beta chain variable domain of TCR clone 339074 (TRBV11-3, TRBJ1-2)
CASSQRTSRGYTF

SEQ ID NO: 678149 - protein, 12 aa, Homo sapiens
  CDR3 for alpha chain variable domain of TCR clone 339075 (TRAV21, TRAJ33)
CAVQDSNYQLIL

SEQ ID NO: 678150 - protein, 14 aa, Homo sapiens
  CDR3 for beta chain variable domain of TCR clone 339075 (TRBV28, TRBJ2-1)
CASSPGEGGNEQFF

SEQ ID NO: 678151 - protein, 16 aa, Homo sapiens
  CDR3 for alpha chain variable domain of TCR clone 339076 (TRAV1-2, TRAJ10)
CAVGGVLTGGGNKLTF

SEQ ID NO: 678152 - protein, 17 aa, Homo sapiens
  CDR3 for beta chain variable domain of TCR clone 339076 (TRBV28, TRBJ2-5)
CASSTPEGDALQETQYF

SEQ ID NO: 678153 - protein, 13 aa, Homo sapiens
  CDR3 for alpha chain variable domain of TCR clone 339077 (TRAV12-2, TRAJ12)
CAVNWDSSYKLIF

SEQ ID NO: 678154 - protein, 11 aa, Homo sapiens
  CDR3 for beta chain variable domain of TCR clone 339077 (TRBV18, TRBJ2-5)
CASSPRETQYF

SEQ ID NO: 678155 - protein, 13 aa, Homo sapiens
  CDR3 for alpha chain variable domain of TCR clone 339078 (TRAV27, TRAJ29)
CRSAQGGSEKLVF

SEQ ID NO: 678156 - protein, 14 aa, Homo sapiens
  CDR3 for beta chain variable domain of TCR clone 339078 (TRBV18, TRBJ2-5)
CASSPGVSQETQYF

SEQ ID NO: 678157 - protein, 15 aa, Homo sapiens
  CDR3 for alpha chain variable domain of TCR clone 339079 (TRAV14/DV4, TRAJ39)
CAMRAVNNAGNMLTF

SEQ ID NO: 678158 - protein, 15 aa, Homo sapiens
  CDR3 for beta chain variable domain of TCR clone 339079 (TRBV5-7, TRBJ2-7)
CASSGGRPVPYEQYF

SEQ ID NO: 678159 - protein, 13 aa, Homo sapiens
  CDR3 for alpha chain variable domain of TCR clone 339080 (TRAV13-1, TRAJ39)
CAASIWAGNMLTF

SEQ ID NO: 678160 - protein, 15 aa, Homo sapiens
  CDR3 for beta chain variable domain of TCR clone 339080 (TRBV7-9, TRBJ1-1)
CASSLLEAGGTEAFF

SEQ ID NO: 678161 - protein, 14 aa, Homo sapiens
  CDR3 for alpha chain variable domain of TCR clone 339081 (TRAV30, TRAJ26)
CVTEIVSYGQNFVF

SEQ ID NO: 678162 - protein, 13 aa, Homo sapiens
  CDR3 for beta chain variable domain of TCR clone 339081 (TRBV7-3, TRBJ1-1)
CASSQDWGAEAFF

SEQ ID NO: 678163 - protein, 17 aa, Homo sapiens
  CDR3 for alpha chain variable domain of TCR clone 339082 (TRAV27, TRAJ42)
CAERVIYSGGSQGNLIF

SEQ ID NO: 678164 - protein, 14 aa, Homo sapiens
  CDR3 for beta chain variable domain of TCR clone 339082 (TRBV20-1, TRBJ2-1)
CSAQIGGSANEQVF

SEQ ID NO: 678165 - protein, 15 aa, Homo sapiens
  CDR3 for alpha chain variable domain of TCR clone 339083 (TRAV3, TRAJ22)
CAVRDRGGSARQLTF

SEQ ID NO: 678166 - protein, 16 aa, Homo sapiens
  CDR3 for beta chain variable domain of TCR clone 339083 (TRBV5-4, TRBJ2-3)
CASHQPGASGADTQYF

SEQ ID NO: 678167 - protein, 14 aa, Homo sapiens
  CDR3 for alpha chain variable domain of TCR clone 339084 (TRAV4, TRAJ26)
CLVGDQGYGQNFVF

SEQ ID NO: 678168 - protein, 16 aa, Homo sapiens
  CDR3 for beta chain variable domain of TCR clone 339084 (TRBV2, TRBJ2-1)
CASSVGRSLSYNEQFF

SEQ ID NO: 678169 - protein, 14 aa, Homo sapiens
  CDR3 for alpha chain variable domain of TCR clone 339085 (TRAV3, TRAJ17)
CAVRVAAAGNKLTF

SEQ ID NO: 678170 - protein, 16 aa, Homo sapiens
  CDR3 for beta chain variable domain of TCR clone 339085 (TRBV20-1, TRBJ1-2)
CSASMGQGVANYGYTF

SEQ ID NO: 678171 - protein, 17 aa, Homo sapiens
  CDR3 for alpha chain variable domain of TCR clone 339086 (TRAV3, TRAJ38)
CAVRDCTNAGNNRKLIW

SEQ ID NO: 678172 - protein, 13 aa, Homo sapiens
  CDR3 for beta chain variable domain of TCR clone 339086 (TRBV23-1, TRBJ1-4)
CASRGKFNEKLFF

SEQ ID NO: 678173 - protein, 15 aa, Homo sapiens
  CDR3 for alpha chain variable domain of TCR clone 339087 (TRAV4, TRAJ17)
CLGGDIGAAGNKLTF

SEQ ID NO: 678174 - protein, 14 aa, Homo sapiens
  CDR3 for beta chain variable domain of TCR clone 339087 (TRBV6-3, TRBJ2-7)
CASSYSVRVYEQYF

SEQ ID NO: 678175 - protein, 18 aa, Homo sapiens
  CDR3 for alpha chain variable domain of TCR clone 339088 (TRAV21, TRAJ52)
CAVRPSPAGGTSYGKLTF

SEQ ID NO: 678176 - protein, 14 aa, Homo sapiens
  CDR3 for beta chain variable domain of TCR clone 339088 (TRBV28, TRBJ2-1)
CASSLNGRNNEQFF

SEQ ID NO: 678177 - protein, 14 aa, Homo sapiens
  CDR3 for alpha chain variable domain of TCR clone 339089 (TRAV1-2, TRAJ8)
CAVRVDTGFQKLVF

SEQ ID NO: 678178 - protein, 14 aa, Homo sapiens
  CDR3 for beta chain variable domain of TCR clone 339089 (TRBV29-1, TRBJ2-5)
CSVETSGSGETQYF

SEQ ID NO: 678179 - protein, 13 aa, Homo sapiens
  CDR3 for alpha chain variable domain of TCR clone 339090 (TRAV14/DV4, TRAJ22)
CAMGDLSARQLTF

SEQ ID NO: 678180 - protein, 18 aa, Homo sapiens
  CDR3 for beta chain variable domain of TCR clone 339090 (TRBV19, TRBJ1-5)
CASSKGQVSIHSNQPQHF

SEQ ID NO: 678181 - protein, 12 aa, Homo sapiens
  CDR3 for alpha chain variable domain of TCR clone 339091 (TRAV2, TRAJ33)
CAVWGSNYQLIW

SEQ ID NO: 678182 - protein, 15 aa, Homo sapiens
  CDR3 for beta chain variable domain of TCR clone 339091 (TRBV27, TRBJ2-1)
CASSNGGGSSNEQFF

SEQ ID NO: 678183 - protein, 13 aa, Homo sapiens
  CDR3 for alpha chain variable domain of TCR clone 339092 (TRAV23/DV6, TRAJ27)
CAASKPMQANQHL

SEQ ID NO: 678184 - protein, 13 aa, Homo sapiens
  CDR3 for beta chain variable domain of TCR clone 339092 (TRBV10-3, TRBJ1-2)
CAISERDSYGYTF

SEQ ID NO: 678185 - protein, 13 aa, Homo sapiens
  CDR3 for alpha chain variable domain of TCR clone 339093 (TRAV2, TRAJ13)
CAVESGGYQKVTF

SEQ ID NO: 678186 - protein, 14 aa, Homo sapiens
  CDR3 for beta chain variable domain of TCR clone 339093 (TRBV7-3, TRBJ2-1)
CASSLAGGTNEQFF

SEQ ID NO: 678187 - protein, 12 aa, Homo sapiens
  CDR3 for alpha chain variable domain of TCR clone 339094 (TRAV8-4, TRAJ43)
CAVSVNNNDMRF

SEQ ID NO: 678188 - protein, 16 aa, Homo sapiens
  CDR3 for beta chain variable domain of TCR clone 339094 (TRBV7-2, TRBJ2-6)
CASGLAGRSGANVLTF

SEQ ID NO: 678189 - protein, 16 aa, Homo sapiens
  CDR3 for alpha chain variable domain of TCR clone 339095 (TRAV14/DV4, TRAJ53)
CAMREGGGGSNYKLTF

SEQ ID NO: 678190 - protein, 15 aa, Homo sapiens
  CDR3 for beta chain variable domain of TCR clone 339095 (TRBV6-1, TRBJ2-4)
CASSEAVWTINIQYF

SEQ ID NO: 678191 - protein, 14 aa, Homo sapiens
  CDR3 for alpha chain variable domain of TCR clone 339096 (TRAV8-2, TRAJ11)
CVVSEKSGYSTLTF

SEQ ID NO: 678192 - protein, 15 aa, Homo sapiens
  CDR3 for beta chain variable domain of TCR clone 339096 (TRBV20-1, TRBJ2-7)
CSARDRVSGMDEQYF

SEQ ID NO: 678193 - protein, 15 aa, Homo sapiens
  CDR3 for alpha chain variable domain of TCR clone 339097 (TRAV23/DV6, TRAJ37)
CAAGEGSSNTGKLIF

SEQ ID NO: 678194 - protein, 13 aa, Homo sapiens
  CDR3 for beta chain variable domain of TCR clone 339097 (TRBV19, TRBJ1-1)
CASSITGESEAFF

SEQ ID NO: 678195 - protein, 13 aa, Homo sapiens
  CDR3 for alpha chain variable domain of TCR clone 339098 (TRAV3, TRAJ20)
CCEAFCNDYKLSF

SEQ ID NO: 678196 - protein, 13 aa, Homo sapiens
  CDR3 for beta chain variable domain of TCR clone 339098 (TRBV12-4, TRBJ2-7)
CASSFVPTAEQYF

SEQ ID NO: 678197 - protein, 12 aa, Homo sapiens
  CDR3 for alpha chain variable domain of TCR clone 339099 (TRAV23/DV6, TRAJ32)
CSMPGATNKLIF

SEQ ID NO: 678198 - protein, 17 aa, Homo sapiens
  CDR3 for beta chain variable domain of TCR clone 339099 (TRBV13, TRBJ2-3)
CDSSSLGTSGLTDTQYF

SEQ ID NO: 678199 - protein, 13 aa, Homo sapiens
  CDR3 for alpha chain variable domain of TCR clone 339100 (TRAV14/DV4, TRAJ23)
CAMREVKGGKLIF

SEQ ID NO: 678200 - protein, 15 aa, Homo sapiens
  CDR3 for beta chain variable domain of TCR clone 339100 (TRBV9, TRBJ2-1)
CASSLAGSSYNEQFF

SEQ ID NO: 678201 - protein, 11 aa, Homo sapiens
  CDR3 for alpha chain variable domain of TCR clone 339101 (TRAV12-2, TRAJ43)
CASPIGIDMRF

SEQ ID NO: 678202 - protein, 13 aa, Homo sapiens
  CDR3 for beta chain variable domain of TCR clone 339101 (TRBV7-3, TRBJ1-2)
CASSLKRGYGYTF

SEQ ID NO: 678203 - protein, 13 aa, Homo sapiens
  CDR3 for alpha chain variable domain of TCR clone 339102 (TRAV13-1, TRAJ21)
CAASIYNFNKFYF

SEQ ID NO: 678204 - protein, 13 aa, Homo sapiens
  CDR3 for beta chain variable domain of TCR clone 339102 (TRBV27, TRBJ1-4)
CASSLMGDGKLFF

SEQ ID NO: 678205 - protein, 18 aa, Homo sapiens
  CDR3 for alpha chain variable domain of TCR clone 339103 (TRAV21, TRAJ52)
CAVRPSPAGGTSYEKLTF

SEQ ID NO: 678206 - protein, 15 aa, Homo sapiens
  CDR3 for beta chain variable domain of TCR clone 339103 (TRBV5-7, TRBJ2-7)
CASSLPGQVFYEQYF

SEQ ID NO: 678207 - protein, 15 aa, Homo sapiens
  CDR3 for alpha chain variable domain of TCR clone 339104 (TRAV8-6, TRAJ45)
CAVSEQGGGADGLTF

SEQ ID NO: 678208 - protein, 14 aa, Homo sapiens
  CDR3 for beta chain variable domain of TCR clone 339104 (TRBV28, TRBJ2-5)
CASRGSSFWEAQYF

SEQ ID NO: 678209 - protein, 13 aa, Homo sapiens
  CDR3 for alpha chain variable domain of TCR clone 339105 (TRAV12-1, TRAJ6)
CVVFPGGSYIPTF

SEQ ID NO: 678210 - protein, 14 aa, Homo sapiens
  CDR3 for beta chain variable domain of TCR clone 339105 (TRBV20-1, TRBJ1-3)
CSAIPTGAGNTIYF

SEQ ID NO: 678211 - protein, 16 aa, Homo sapiens
  CDR3 for alpha chain variable domain of TCR clone 339106 (TRAV8-3, TRAJ42)
CAVGEGNGGSQGNLIF

SEQ ID NO: 678212 - protein, 15 aa, Homo sapiens
  CDR3 for beta chain variable domain of TCR clone 339106 (TRBV6-1, TRBJ2-1)
CASSELRGQYNEQFF

SEQ ID NO: 678213 - protein, 13 aa, Homo sapiens
  CDR3 for alpha chain variable domain of TCR clone 339107 (TRAV3, TRAJ29)
CAVRDIIHTPLVF

SEQ ID NO: 678214 - protein, 14 aa, Homo sapiens
  CDR3 for beta chain variable domain of TCR clone 339107 (TRBV27, TRBJ2-1)
CASSATGGYNEQFF

SEQ ID NO: 678215 - protein, 15 aa, Homo sapiens
  CDR3 for alpha chain variable domain of TCR clone 339108 (TRAV1-2, )
CAVNRCSHGAPKLTS

SEQ ID NO: 678216 - protein, 15 aa, Homo sapiens
  CDR3 for beta chain variable domain of TCR clone 339108 (TRBV28, TRBJ2-1)
CASSIIAGGRSEQFF

SEQ ID NO: 678217 - protein, 14 aa, Homo sapiens
  CDR3 for alpha chain variable domain of TCR clone 339109 (TRAV1-2, TRAJ8)
CAVREDTGFQKLVF

SEQ ID NO: 678218 - protein, 15 aa, Homo sapiens
  CDR3 for beta chain variable domain of TCR clone 339109 (TRBV10-2, TRBJ2-6)
CASSEQGTGANALIF

SEQ ID NO: 678219 - protein, 14 aa, Homo sapiens
  CDR3 for alpha chain variable domain of TCR clone 339110 (TRAV1-2, TRAJ16)
CAVNRFSDDQKLLF

SEQ ID NO: 678220 - protein, 14 aa, Homo sapiens
  CDR3 for beta chain variable domain of TCR clone 339110 (TRBV9, TRBJ2-2)
CASSVGQGAGELFF

SEQ ID NO: 678221 - protein, 16 aa, Homo sapiens
  CDR3 for alpha chain variable domain of TCR clone 339111 (TRAV3, TRAJ37)
CAVRPHGSGNTGKLIL

SEQ ID NO: 678222 - protein, 15 aa, Homo sapiens
  CDR3 for beta chain variable domain of TCR clone 339111 (TRBV6-3, TRBJ2-7)
CASSSPGTVFYEQYF

SEQ ID NO: 678223 - protein, 14 aa, Homo sapiens
  CDR3 for alpha chain variable domain of TCR clone 339112 (TRAV1-2, TRAJ16)
CAVNRFSDGQKLLF

SEQ ID NO: 678224 - protein, 16 aa, Homo sapiens
  CDR3 for beta chain variable domain of TCR clone 339112 (TRBV11-2, TRBJ1-2)
CASSLDTGGADYGYTV

SEQ ID NO: 678225 - protein, 13 aa, Homo sapiens
  CDR3 for alpha chain variable domain of TCR clone 339113 (TRAV17, TRAJ5)
CAPMDTGRRVLTF

SEQ ID NO: 678226 - protein, 14 aa, Homo sapiens
  CDR3 for beta chain variable domain of TCR clone 339113 (TRBV29-1, TRBJ2-7)
CSVDQRQASYEQYF

SEQ ID NO: 678227 - protein, 12 aa, Homo sapiens
  CDR3 for alpha chain variable domain of TCR clone 339114 (TRAV17, TRAJ12)
CATLRSSYKLIF

SEQ ID NO: 678228 - protein, 16 aa, Homo sapiens
  CDR3 for beta chain variable domain of TCR clone 339114 (TRBV28, TRBJ2-7)
CASSSFFETGGPEQYF

SEQ ID NO: 678229 - protein, 13 aa, Homo sapiens
  CDR3 for alpha chain variable domain of TCR clone 339115 (TRAV12-3, TRAJ13)
CAMTSVGYQKVTF

SEQ ID NO: 678230 - protein, 13 aa, Homo sapiens
  CDR3 for beta chain variable domain of TCR clone 339115 (TRBV7-2, TRBJ2-2)
CASSLAVTGELFF

SEQ ID NO: 678231 - protein, 13 aa, Homo sapiens
  CDR3 for alpha chain variable domain of TCR clone 339116 (TRAV29/DV5, TRAJ28)
CAAERAGSYQLTF

SEQ ID NO: 678232 - protein, 15 aa, Homo sapiens
  CDR3 for beta chain variable domain of TCR clone 339116 (TRBV7-9, TRBJ1-4)
CASSARTGGNEKLFF

SEQ ID NO: 678233 - protein, 16 aa, Homo sapiens
  CDR3 for alpha chain variable domain of TCR clone 339117 (TRAV3, TRAJ10)
CAVRDMRAGGGNKLTY

SEQ ID NO: 678234 - protein, 14 aa, Homo sapiens
  CDR3 for beta chain variable domain of TCR clone 339117 (TRBV12-4, TRBJ1-4)
CASRMTGRSEKLFF

SEQ ID NO: 678235 - protein, 15 aa, Homo sapiens
  CDR3 for alpha chain variable domain of TCR clone 339118 (TRAV39, TRAJ32)
CAVDMEGGATNKLIF

SEQ ID NO: 678236 - protein, 17 aa, Homo sapiens
  CDR3 for beta chain variable domain of TCR clone 339118 (TRBV7-2, TRBJ1-4)
CASSFKAGPTTSEKLFF

SEQ ID NO: 678237 - protein, 22 aa, Homo sapiens
  CDR3 for alpha chain variable domain of TCR clone 339119 (TRAV2, TRAJ10)
ILQVREADAAVYYTGAGNKLTF

SEQ ID NO: 678238 - protein, 16 aa, Homo sapiens
  CDR3 for beta chain variable domain of TCR clone 339119 (TRBV29-1, TRBJ2-5)
CSVEGLAGDYQETQYF

SEQ ID NO: 678239 - protein, 12 aa, Homo sapiens
  CDR3 for alpha chain variable domain of TCR clone 339120 (TRAV8-3, TRAJ15)
CAVGAPLSALIF

SEQ ID NO: 678240 - protein, 15 aa, Homo sapiens
  CDR3 for beta chain variable domain of TCR clone 339120 (TRBV7-2, TRBJ2-1)
RASSSGLAGGNEQFF

SEQ ID NO: 678241 - protein, 13 aa, Homo sapiens
  CDR3 for alpha chain variable domain of TCR clone 339121 (TRAV26-1, TRAJ48)
CIVRVVGDEKLTF

SEQ ID NO: 678242 - protein, 15 aa, Homo sapiens
  CDR3 for beta chain variable domain of TCR clone 339121 (TRBV6-6, TRBJ2-5)
CASSPGGGLEETQYF

SEQ ID NO: 678243 - protein, 13 aa, Homo sapiens
  CDR3 for alpha chain variable domain of TCR clone 339122 (TRAV8-3, TRAJ4)
WVFYSGGHNKLIF

SEQ ID NO: 678244 - protein, 15 aa, Homo sapiens
  CDR3 for beta chain variable domain of TCR clone 339122 (TRBV11-2, TRBJ1-2)
CASSLEGVQRNDYSF

SEQ ID NO: 678245 - protein, 14 aa, Homo sapiens
  CDR3 for alpha chain variable domain of TCR clone 339123 (TRAV23/DV6, TRAJ24)
CSASLSDSWGKLQF

SEQ ID NO: 678246 - protein, 16 aa, Homo sapiens
  CDR3 for beta chain variable domain of TCR clone 339123 (TRBV7-9, TRBJ2-6)
CASSMKGPLRANVLTF

SEQ ID NO: 678247 - protein, 14 aa, Homo sapiens
  CDR3 for alpha chain variable domain of TCR clone 339124 (TRAV12-2, TRAJ13)
CAVKKTGGYQKVTF

SEQ ID NO: 678248 - protein, 16 aa, Homo sapiens
  CDR3 for beta chain variable domain of TCR clone 339124 (TRBV11-2, TRBJ2-7)
CASSLAPTGVNYEQYF

SEQ ID NO: 678249 - protein, 13 aa, Homo sapiens
  CDR3 for alpha chain variable domain of TCR clone 339125 (TRAV2, TRAJ15)
CAVASQAGTARIF

SEQ ID NO: 678250 - protein, 12 aa, Homo sapiens
  CDR3 for beta chain variable domain of TCR clone 339125 (TRBV24-1, TRBJ1-1)
CATSDSDRGAFF

SEQ ID NO: 678251 - protein, 12 aa, Homo sapiens
  CDR3 for alpha chain variable domain of TCR clone 339126 (TRAV2, TRAJ33)
CAFMDSNYQLIW

SEQ ID NO: 678252 - protein, 16 aa, Homo sapiens
  CDR3 for beta chain variable domain of TCR clone 339126 (TRBV2, TRBJ2-7)
CASSEPWTGSSYEQYF

SEQ ID NO: 678253 - protein, 14 aa, Homo sapiens
  CDR3 for alpha chain variable domain of TCR clone 339127 (TRAV17, TRAJ54)
CATDANQGAQKLVF

SEQ ID NO: 678254 - protein, 16 aa, Homo sapiens
  CDR3 for beta chain variable domain of TCR clone 339127 (TRBV19, TRBJ2-1)
CASSKAGPSSYNEQFF

SEQ ID NO: 678255 - protein, 17 aa, Homo sapiens
  CDR3 for alpha chain variable domain of TCR clone 339128 (TRAV3, TRAJ42)
CAVRDRDYGGSQGNLIF

SEQ ID NO: 678256 - protein, 12 aa, Homo sapiens
  CDR3 for beta chain variable domain of TCR clone 339128 (TRBV19, TRBJ2-3)
CATTSSTDTQYF

SEQ ID NO: 678257 - protein, 14 aa, Homo sapiens
  CDR3 for alpha chain variable domain of TCR clone 339129 (TRAV12-2, TRAJ40)
CAVKIPSGTYKYIF

SEQ ID NO: 678258 - protein, 18 aa, Homo sapiens
  CDR3 for beta chain variable domain of TCR clone 339129 (TRBV11-2, TRBJ2-3)
CASSLGGASRGAPNTQYL

SEQ ID NO: 678259 - protein, 15 aa, Homo sapiens
  CDR3 for alpha chain variable domain of TCR clone 339130 (TRAV12-2, TRAJ43)
CAFDMRFGGGTRLTV

SEQ ID NO: 678260 - protein, 18 aa, Homo sapiens
  CDR3 for beta chain variable domain of TCR clone 339130 (TRBV20-1, TRBJ2-3)
CSASGLAGGPGTTDTQYF

SEQ ID NO: 678261 - protein, 13 aa, Homo sapiens
  CDR3 for alpha chain variable domain of TCR clone 339131 (TRAV36/DV7, TRAJ37)
CAVFPSNTGKLIF

SEQ ID NO: 678262 - protein, 16 aa, Homo sapiens
  CDR3 for beta chain variable domain of TCR clone 339131 (TRBV3-1, TRBJ2-5)
CASSPGQFNGFGTQYF

SEQ ID NO: 678263 - protein, 14 aa, Homo sapiens
  CDR3 for alpha chain variable domain of TCR clone 339132 (TRAV1-2, TRAJ16)
CAVNRFSDGQKLLF

SEQ ID NO: 678264 - protein, 15 aa, Homo sapiens
  CDR3 for beta chain variable domain of TCR clone 339132 (TRBV9, TRBJ1-6)
CASSGAGTGASPLHF

SEQ ID NO: 678265 - protein, 12 aa, Homo sapiens
  CDR3 for alpha chain variable domain of TCR clone 339133 (TRAV12-3, TRAJ17)
CAMTLTGNKLTF

SEQ ID NO: 678266 - protein, 16 aa, Homo sapiens
  CDR3 for beta chain variable domain of TCR clone 339133 (TRBV29-1, TRBJ2-7)
CSVKDAEDGTAYEQYF

SEQ ID NO: 678267 - protein, 17 aa, Homo sapiens
  CDR3 for alpha chain variable domain of TCR clone 339134 (TRAV29/DV5, TRAJ10)
CSVLLGRATGGGNKLTF

SEQ ID NO: 678268 - protein, 14 aa, Homo sapiens
  CDR3 for beta chain variable domain of TCR clone 339134 (TRBV19, TRBJ2-5)
CASSMTGQQETQYF

SEQ ID NO: 678269 - protein, 15 aa, Homo sapiens
  CDR3 for alpha chain variable domain of TCR clone 339135 (TRAV8-3, TRAJ45)
CASSYSVGGADGLTF

SEQ ID NO: 678270 - protein, 12 aa, Homo sapiens
  CDR3 for beta chain variable domain of TCR clone 339135 (TRBV2, TRBJ1-5)
CASSENRTPQHF

SEQ ID NO: 678271 - protein, 13 aa, Homo sapiens
  CDR3 for alpha chain variable domain of TCR clone 339136 (TRAV27, TRAJ40)
CAGASSGTYKYIF

SEQ ID NO: 678272 - protein, 16 aa, Homo sapiens
  CDR3 for beta chain variable domain of TCR clone 339136 (TRBV10-3, TRBJ2-7)
CAISADFAGRPYEQYF

SEQ ID NO: 678273 - protein, 14 aa, Homo sapiens
  CDR3 for alpha chain variable domain of TCR clone 339137 (TRAV1-2, TRAJ16)
CAVNRFSDGQKLLF

SEQ ID NO: 678274 - protein, 17 aa, Homo sapiens
  CDR3 for beta chain variable domain of TCR clone 339137 (TRBV13, TRBJ2-3)
CGSSLSRVAGGRNTQYF

SEQ ID NO: 678275 - protein, 14 aa, Homo sapiens
  CDR3 for alpha chain variable domain of TCR clone 339138 (TRAV26-1, TRAJ39)
CIVRGSRAGNMLTF

SEQ ID NO: 678276 - protein, 17 aa, Homo sapiens
  CDR3 for beta chain variable domain of TCR clone 339138 (TRBV11-2, TRBJ2-1)
CASSLYPPGVEYNEQFF

SEQ ID NO: 678277 - protein, 18 aa, Homo sapiens
  CDR3 for alpha chain variable domain of TCR clone 339139 (TRAV3, TRAJ32)
CAVRDIRGYGGATNKLIF

SEQ ID NO: 678278 - protein, 15 aa, Homo sapiens
  CDR3 for beta chain variable domain of TCR clone 339139 (TRBV12-4, TRBJ2-2)
CASSLGVRHTGELFF

SEQ ID NO: 678279 - protein, 13 aa, Homo sapiens
  CDR3 for alpha chain variable domain of TCR clone 339140 (TRAV3, TRAJ37)
CALRGSNTGKLIF

SEQ ID NO: 678280 - protein, 15 aa, Homo sapiens
  CDR3 for beta chain variable domain of TCR clone 339140 (TRBV9, TRBJ1-6)
CASSVAGTWDSPLHF

SEQ ID NO: 678281 - protein, 15 aa, Homo sapiens
  CDR3 for alpha chain variable domain of TCR clone 339141 (TRAV12-2, TRAJ43)
CAFDMRFGAGTGLPV

SEQ ID NO: 678282 - protein, 15 aa, Homo sapiens
  CDR3 for beta chain variable domain of TCR clone 339141 (TRBV5-1, TRBJ2-3)
CASSVTSGSTDTQYF

SEQ ID NO: 678283 - protein, 18 aa, Homo sapiens
  CDR3 for alpha chain variable domain of TCR clone 339142 (TRAV21, TRAJ53)
CAVKGGENSGGSNYKLTF

SEQ ID NO: 678284 - protein, 15 aa, Homo sapiens
  CDR3 for beta chain variable domain of TCR clone 339142 (TRBV27, TRBJ1-6)
CASSFDRGLGSPLHF

SEQ ID NO: 678285 - protein, 14 aa, Homo sapiens
  CDR3 for alpha chain variable domain of TCR clone 339143 (TRAV2, TRAJ9)
CAVEDRSGGFKTIF

SEQ ID NO: 678286 - protein, 15 aa, Homo sapiens
  CDR3 for beta chain variable domain of TCR clone 339143 (TRBV4-1, TRBJ2-7)
CASSQNTGRLYEQYF

SEQ ID NO: 678287 - protein, 17 aa, Homo sapiens
  CDR3 for alpha chain variable domain of TCR clone 339144 (TRAV3, TRAJ6)
CAVRDGPRAGGSYIPTF

SEQ ID NO: 678288 - protein, 15 aa, Homo sapiens
  CDR3 for beta chain variable domain of TCR clone 339144 (TRBV13, TRBJ1-2)
CASSLGRQPGYGYTF

SEQ ID NO: 678289 - protein, 13 aa, Homo sapiens
  CDR3 for alpha chain variable domain of TCR clone 339145 (TRAV26-1, TRAJ24)
CIVGVDSWGKLQF

SEQ ID NO: 678290 - protein, 11 aa, Homo sapiens
  CDR3 for beta chain variable domain of TCR clone 339145 (TRBV19, TRBJ1-2)
CASSISSGYTF

SEQ ID NO: 678291 - protein, 13 aa, Homo sapiens
  CDR3 for alpha chain variable domain of TCR clone 339146 (TRAV3, TRAJ21)
CAVREPDFNKFYF

SEQ ID NO: 678292 - protein, 12 aa, Homo sapiens
  CDR3 for beta chain variable domain of TCR clone 339146 (TRBV5-1, TRBJ2-4)
LAGEWTKNNQYF

SEQ ID NO: 678293 - protein, 13 aa, Homo sapiens
  CDR3 for alpha chain variable domain of TCR clone 339147 (TRAV8-3, TRAJ43)
CAVVPYNNNDMRF

SEQ ID NO: 678294 - protein, 15 aa, Homo sapiens
  CDR3 for beta chain variable domain of TCR clone 339147 (TRBV18, TRBJ1-1)
CASSPRQGENTEAFF

SEQ ID NO: 678295 - protein, 14 aa, Homo sapiens
  CDR3 for alpha chain variable domain of TCR clone 339148 (TRAV12-1, TRAJ38)
CGELKAGNSRKLIW

SEQ ID NO: 678296 - protein, 12 aa, Homo sapiens
  CDR3 for beta chain variable domain of TCR clone 339148 (TRBV24-1, TRBJ1-1)
CATLYPDTEAFF

SEQ ID NO: 678297 - protein, 12 aa, Homo sapiens
  CDR3 for alpha chain variable domain of TCR clone 339149 (TRAV4, TRAJ26)
CLVGDYGQNFVF

SEQ ID NO: 678298 - protein, 12 aa, Homo sapiens
  CDR3 for beta chain variable domain of TCR clone 339149 (TRBV11-2, TRBJ2-2)
CPSSLGGGELFF

SEQ ID NO: 678299 - protein, 16 aa, Homo sapiens
  CDR3 for alpha chain variable domain of TCR clone 339150 (TRAV1-1, TRAJ12)
LLLRCERGDSSYKLIF

SEQ ID NO: 678300 - protein, 15 aa, Homo sapiens
  CDR3 for beta chain variable domain of TCR clone 339150 (TRBV18, TRBJ2-5)
CASTDRGPRQETQYF

SEQ ID NO: 678301 - protein, 16 aa, Homo sapiens
  CDR3 for alpha chain variable domain of TCR clone 339151 (TRAV20, TRAJ53)
CAVRRGIGGSNYKLTF

SEQ ID NO: 678302 - protein, 12 aa, Homo sapiens
  CDR3 for beta chain variable domain of TCR clone 339151 (TRBV29-1, TRBJ2-3)
CSVVLGADTQYF

SEQ ID NO: 678303 - protein, 12 aa, Homo sapiens
  CDR3 for alpha chain variable domain of TCR clone 339152 (TRAV1-2, TRAJ9)
CAGYTGGFKTIF

SEQ ID NO: 678304 - protein, 12 aa, Homo sapiens
  CDR3 for beta chain variable domain of TCR clone 339152 (TRBV5-1, TRBJ2-3)
CASSLAADTQYF

SEQ ID NO: 678305 - protein, 17 aa, Homo sapiens
  CDR3 for alpha chain variable domain of TCR clone 339153 (TRAV13-1, TRAJ52)
CAAGRNAGGTSFGKVTF

SEQ ID NO: 678306 - protein, 15 aa, Homo sapiens
  CDR3 for beta chain variable domain of TCR clone 339153 (TRBV6-3, TRBJ2-7)
CASSSPGTVFYEQYF

SEQ ID NO: 678307 - protein, 12 aa, Homo sapiens
  CDR3 for alpha chain variable domain of TCR clone 339154 (TRAV25, TRAJ33)
CAGPDSNYQLIW

SEQ ID NO: 678308 - protein, 20 aa, Homo sapiens
  CDR3 for beta chain variable domain of TCR clone 339154 (TRBV4-1, TRBJ2-2)
CASSQASPTGLASNTGELFF

SEQ ID NO: 678309 - protein, 19 aa, Homo sapiens
  CDR3 for alpha chain variable domain of TCR clone 339155 (TRAV26-1, TRAJ22)
CCVLLHRWVFSGSARQLTF

SEQ ID NO: 678310 - protein, 19 aa, Homo sapiens
  CDR3 for beta chain variable domain of TCR clone 339155 (TRBV19, TRBJ2-5)
CASSIGQVTDFCLGETQYF

SEQ ID NO: 678311 - protein, 13 aa, Homo sapiens
  CDR3 for alpha chain variable domain of TCR clone 339156 (TRAV36/DV7, TRAJ49)
CAVEANTGNQFYF

SEQ ID NO: 678312 - protein, 13 aa, Homo sapiens
  CDR3 for beta chain variable domain of TCR clone 339156 (TRBV10-3, TRBJ2-7)
CASKLAGNYEQYF

SEQ ID NO: 678313 - protein, 16 aa, Homo sapiens
  CDR3 for alpha chain variable domain of TCR clone 339157 (TRAV21, TRAJ52)
CAVTNAGGTSYGKLTF

SEQ ID NO: 678314 - protein, 11 aa, Homo sapiens
  CDR3 for beta chain variable domain of TCR clone 339157 (TRBV2, TRBJ1-1)
CASREGTEAVF

SEQ ID NO: 678315 - protein, 15 aa, Homo sapiens
  CDR3 for alpha chain variable domain of TCR clone 339158 (TRAV26-1, TRAJ29)
CIVRVEGSGNTPLVF

SEQ ID NO: 678316 - protein, 15 aa, Homo sapiens
  CDR3 for beta chain variable domain of TCR clone 339158 (TRBV28, TRBJ2-5)
CASSPGQGSIETQDF

SEQ ID NO: 678317 - protein, 12 aa, Homo sapiens
  CDR3 for alpha chain variable domain of TCR clone 339159 (TRAV13-2, TRAJ23)
CAERHRGGNLIF

SEQ ID NO: 678318 - protein, 12 aa, Homo sapiens
  CDR3 for beta chain variable domain of TCR clone 339159 (TRBV29-1, TRBJ2-3)
CSVTGGADTQYF

SEQ ID NO: 678319 - protein, 14 aa, Homo sapiens
  CDR3 for alpha chain variable domain of TCR clone 339160 (TRAV2, TRAJ9)
CAVEDRSGGFTTIF

SEQ ID NO: 678320 - protein, 17 aa, Homo sapiens
  CDR3 for beta chain variable domain of TCR clone 339160 (TRBV4-1, TRBJ2-7)
CASSRDPLWVRGGDQYF

SEQ ID NO: 678321 - protein, 16 aa, Homo sapiens
  CDR3 for alpha chain variable domain of TCR clone 339161 (TRAV30, TRAJ24)
CGTEMVDADSWGKFQF

SEQ ID NO: 678322 - protein, 16 aa, Homo sapiens
  CDR3 for beta chain variable domain of TCR clone 339161 (TRBV12-5, TRBJ2-5)
CASGPRTSGNQETQYF

SEQ ID NO: 678323 - protein, 14 aa, Homo sapiens
  CDR3 for alpha chain variable domain of TCR clone 339162 (TRAV2, TRAJ9)
CAVEERSGGFKTIF

SEQ ID NO: 678324 - protein, 19 aa, Homo sapiens
  CDR3 for beta chain variable domain of TCR clone 339162 (TRBV25-1, TRBJ2-2)
CAILVYRVDRGRKTGELFF

SEQ ID NO: 678325 - protein, 18 aa, Homo sapiens
  CDR3 for alpha chain variable domain of TCR clone 339163 (TRAV21, TRAJ45)
CCVGPQGGSGGGADGLTF

SEQ ID NO: 678326 - protein, 13 aa, Homo sapiens
  CDR3 for beta chain variable domain of TCR clone 339163 (TRBV4-1, TRBJ2-7)
LGVSRGDRHEQYF

SEQ ID NO: 678327 - protein, 16 aa, Homo sapiens
  CDR3 for alpha chain variable domain of TCR clone 339164 (TRAV27, TRAJ13)
CAGAKSDSGGYQKVTF

SEQ ID NO: 678328 - protein, 15 aa, Homo sapiens
  CDR3 for beta chain variable domain of TCR clone 339164 (TRBV3-1, TRBJ1-2)
CASSPTRLPEGGDTF

SEQ ID NO: 678329 - protein, 15 aa, Homo sapiens
  CDR3 for alpha chain variable domain of TCR clone 339165 (TRAV8-2, TRAJ40)
CVVLGTTSGTYKYIF

SEQ ID NO: 678330 - protein, 18 aa, Homo sapiens
  CDR3 for beta chain variable domain of TCR clone 339165 (TRBV12-4, TRBJ2-4)
CASSRTGAVDVAKNIQYF

SEQ ID NO: 678331 - protein, 13 aa, Homo sapiens
  CDR3 for alpha chain variable domain of TCR clone 339166 (TRAV13-1, TRAJ39)
CAASIWAGNMLTF

SEQ ID NO: 678332 - protein, 18 aa, Homo sapiens
  CDR3 for beta chain variable domain of TCR clone 339166 (TRBV7-9, TRBJ2-3)
CASSLETSRGRKADTQYF

SEQ ID NO: 678333 - protein, 14 aa, Homo sapiens
  CDR3 for alpha chain variable domain of TCR clone 339167 (TRAV17, TRAJ12)
CATDGVDSSYKLIF

SEQ ID NO: 678334 - protein, 15 aa, Homo sapiens
  CDR3 for beta chain variable domain of TCR clone 339167 (TRBV19, TRBJ2-1)
CASSSPGVPLDEQFF

SEQ ID NO: 678335 - protein, 12 aa, Homo sapiens
  CDR3 for alpha chain variable domain of TCR clone 339168 (TRAV13-1, TRAJ21)
CAAKECFNKFYF

SEQ ID NO: 678336 - protein, 15 aa, Homo sapiens
  CDR3 for beta chain variable domain of TCR clone 339168 (TRBV7-7, TRBJ2-5)
CASSQLERAEETQYF

SEQ ID NO: 678337 - protein, 16 aa, Homo sapiens
  CDR3 for alpha chain variable domain of TCR clone 339169 (TRAV26-1, TRAJ38)
CIVRPLNAGNNRKLIW

SEQ ID NO: 678338 - protein, 12 aa, Homo sapiens
  CDR3 for beta chain variable domain of TCR clone 339169 (TRBV5-1, TRBJ2-3)
CASSLAADTQYF

SEQ ID NO: 678339 - protein, 13 aa, Homo sapiens
  CDR3 for alpha chain variable domain of TCR clone 339170 (TRAV29/DV5, TRAJ31)
CAASRNNNARLMF

SEQ ID NO: 678340 - protein, 16 aa, Homo sapiens
  CDR3 for beta chain variable domain of TCR clone 339170 (TRBV20-1, TRBJ2-2)
CSASDMVAGLTGELFF

SEQ ID NO: 678341 - protein, 16 aa, Homo sapiens
  CDR3 for alpha chain variable domain of TCR clone 339171 (TRAV26-1, TRAJ37)
CIVRGDGSGNTVKLIF

SEQ ID NO: 678342 - protein, 16 aa, Homo sapiens
  CDR3 for beta chain variable domain of TCR clone 339171 (TRBV2, TRBJ2-1)
CASSVGGSLSYNEQFF

SEQ ID NO: 678343 - protein, 14 aa, Homo sapiens
  CDR3 for alpha chain variable domain of TCR clone 339172 (TRAV2, TRAJ9)
CAVEDRRGGFKTIF

SEQ ID NO: 678344 - protein, 17 aa, Homo sapiens
  CDR3 for beta chain variable domain of TCR clone 339172 (TRBV20-1, TRBJ2-7)
CSATRAGGVAGVEEQYF

SEQ ID NO: 678345 - protein, 15 aa, Homo sapiens
  CDR3 for alpha chain variable domain of TCR clone 339173 (TRAV9-2, TRAJ49)
CALSPPDHTGNQFYF

SEQ ID NO: 678346 - protein, 15 aa, Homo sapiens
  CDR3 for beta chain variable domain of TCR clone 339173 (TRBV12-4, TRBJ2-5)
CASSLGGQGRETQYF

SEQ ID NO: 678347 - protein, 16 aa, Homo sapiens
  CDR3 for alpha chain variable domain of TCR clone 339174 (TRAV1-2, TRAJ10)
CAVRGVLTGGGNKLTF

SEQ ID NO: 678348 - protein, 16 aa, Homo sapiens
  CDR3 for beta chain variable domain of TCR clone 339174 (TRBV29-1, TRBJ2-7)
CSVGVVGTSGSYEQYF

SEQ ID NO: 678349 - protein, 11 aa, Homo sapiens
  CDR3 for alpha chain variable domain of TCR clone 339175 (TRAV2, TRAJ4)
CAVGWYNKLIF

SEQ ID NO: 678350 - protein, 15 aa, Homo sapiens
  CDR3 for beta chain variable domain of TCR clone 339175 (TRBV7-3, TRBJ2-1)
CASSPTGGGEVEQFF

SEQ ID NO: 678351 - protein, 13 aa, Homo sapiens
  CDR3 for alpha chain variable domain of TCR clone 339176 (TRAV13-2, TRAJ53)
CAENMGSNYKLTV

SEQ ID NO: 678352 - protein, 13 aa, Homo sapiens
  CDR3 for beta chain variable domain of TCR clone 339176 (TRBV12-5, TRBJ2-3)
CASGDRQSDTQYF

SEQ ID NO: 678353 - protein, 13 aa, Homo sapiens
  CDR3 for alpha chain variable domain of TCR clone 339177 (TRAV27, TRAJ29)
CAGAHSGNTPLVF

SEQ ID NO: 678354 - protein, 14 aa, Homo sapiens
  CDR3 for beta chain variable domain of TCR clone 339177 (TRBV19, TRBJ2-1)
CVSPTFVLSGEQFF

SEQ ID NO: 678355 - protein, 15 aa, Homo sapiens
  CDR3 for alpha chain variable domain of TCR clone 339178 (TRAV26-1, TRAJ56)
CIVRVDNGANSKLTF

SEQ ID NO: 678356 - protein, 15 aa, Homo sapiens
  CDR3 for beta chain variable domain of TCR clone 339178 (TRBV20-1, TRBJ2-7)
CSARDPSEVGHEQYF

SEQ ID NO: 678357 - protein, 13 aa, Homo sapiens
  CDR3 for alpha chain variable domain of TCR clone 339179 (TRAV13-1, TRAJ21)
CAASIYNFNKFYF

SEQ ID NO: 678358 - protein, 14 aa, Homo sapiens
  CDR3 for beta chain variable domain of TCR clone 339179 (TRBV11-2, TRBJ2-3)
CASSSIASTDTQYF

SEQ ID NO: 678359 - protein, 13 aa, Homo sapiens
  CDR3 for alpha chain variable domain of TCR clone 339180 (TRAV8-3, TRAJ44)
CAVVPGTASKLTF

SEQ ID NO: 678360 - protein, 15 aa, Homo sapiens
  CDR3 for beta chain variable domain of TCR clone 339180 (TRBV5-1, TRBJ2-2)
CASSSQGGNTGELFF

SEQ ID NO: 678361 - protein, 14 aa, Homo sapiens
  CDR3 for alpha chain variable domain of TCR clone 339181 (TRAV13-1, TRAJ26)
CAASSAHYGQNFVF

SEQ ID NO: 678362 - protein, 17 aa, Homo sapiens
  CDR3 for beta chain variable domain of TCR clone 339181 (TRBV25-1, TRBJ2-5)
CASSRRGGRGGRETQYF

SEQ ID NO: 678363 - protein, 10 aa, Homo sapiens
  CDR3 for alpha chain variable domain of TCR clone 339182 (TRAV21, TRAJ26)
WSLYGQNFVF

SEQ ID NO: 678364 - protein, 18 aa, Homo sapiens
  CDR3 for beta chain variable domain of TCR clone 339182 (TRBV25-1, TRBJ2-2)
CASSGQIGGGPDTGELFV

SEQ ID NO: 678365 - protein, 12 aa, Homo sapiens
  CDR3 for alpha chain variable domain of TCR clone 339183 (TRAV12-2, TRAJ21)
CAVNRNFNKFYF

SEQ ID NO: 678366 - protein, 15 aa, Homo sapiens
  CDR3 for beta chain variable domain of TCR clone 339183 (TRBV5-1, TRBJ2-6)
CASSLDPSGANVLSF

SEQ ID NO: 678367 - protein, 12 aa, Homo sapiens
  CDR3 for alpha chain variable domain of TCR clone 339184 (TRAV12-3, TRAJ17)
CAMTLTGNKLTF

SEQ ID NO: 678368 - protein, 13 aa, Homo sapiens
  CDR3 for beta chain variable domain of TCR clone 339184 (TRBV5-1, TRBJ1-2)
CASSSTGVYGYNF

SEQ ID NO: 678369 - protein, 16 aa, Homo sapiens
  CDR3 for alpha chain variable domain of TCR clone 339185 (TRAV14/DV4, TRAJ54)
CAMREGRIQGAQKLVF

SEQ ID NO: 678370 - protein, 14 aa, Homo sapiens
  CDR3 for beta chain variable domain of TCR clone 339185 (TRBV5-1, TRBJ2-3)
CASRPLQGLGTQYF

SEQ ID NO: 678371 - protein, 15 aa, Homo sapiens
  CDR3 for alpha chain variable domain of TCR clone 339186 (TRAV8-3, TRAJ45)
CASSYSGGCADGLTF

SEQ ID NO: 678372 - protein, 13 aa, Homo sapiens
  CDR3 for beta chain variable domain of TCR clone 339186 (TRBV10-3, TRBJ2-7)
CASKLAVNYEQYF

SEQ ID NO: 678373 - protein, 12 aa, Homo sapiens
  CDR3 for alpha chain variable domain of TCR clone 339187 (TRAV29/DV5, TRAJ49)
CAATDTGNQFYF

SEQ ID NO: 678374 - protein, 13 aa, Homo sapiens
  CDR3 for beta chain variable domain of TCR clone 339187 (TRBV7-3, TRBJ1-1)
CASRQDWGAEAFF

SEQ ID NO: 678375 - protein, 12 aa, Homo sapiens
  CDR3 for alpha chain variable domain of TCR clone 339188 (TRAV17, TRAJ30)
CATDARDGKIIF

SEQ ID NO: 678376 - protein, 15 aa, Homo sapiens
  CDR3 for beta chain variable domain of TCR clone 339188 (TRBV4-1, TRBJ2-1)
CASSQGGELYNEQFF

SEQ ID NO: 678377 - protein, 14 aa, Homo sapiens
  CDR3 for alpha chain variable domain of TCR clone 339189 (TRAV17, TRAJ57)
CATDPQGGSEKLVF

SEQ ID NO: 678378 - protein, 18 aa, Homo sapiens
  CDR3 for beta chain variable domain of TCR clone 339189 (TRBV6-5, TRBJ2-6)
CASSYSGDMESGANVLTF

SEQ ID NO: 678379 - protein, 14 aa, Homo sapiens
  CDR3 for alpha chain variable domain of TCR clone 339190 (TRAV9-2, TRAJ6)
CALSDPGGSYIPTF

SEQ ID NO: 678380 - protein, 17 aa, Homo sapiens
  CDR3 for beta chain variable domain of TCR clone 339190 (TRBV13, TRBJ2-3)
CVSSLSRVAGGRNTQYF

SEQ ID NO: 678381 - protein, 16 aa, Homo sapiens
  CDR3 for alpha chain variable domain of TCR clone 339191 (TRAV16, TRAJ21)
CACGWATTSTNFTLVL

SEQ ID NO: 678382 - protein, 15 aa, Homo sapiens
  CDR3 for beta chain variable domain of TCR clone 339191 (TRBV19, TRBJ2-1)
CASSIQATSYNEQFF

SEQ ID NO: 678383 - protein, 15 aa, Homo sapiens
  CDR3 for alpha chain variable domain of TCR clone 339192 (TRAV8-3, TRAJ45)
CASSYSGGGADGLTF

SEQ ID NO: 678384 - protein, 13 aa, Homo sapiens
  CDR3 for beta chain variable domain of TCR clone 339192 (TRBV10-3, TRBJ2-7)
CASNLAVNDEQYF

SEQ ID NO: 678385 - protein, 11 aa, Homo sapiens
  CDR3 for alpha chain variable domain of TCR clone 339193 (TRAV12-1, TRAJ30)
CVVNGQDKDIF

SEQ ID NO: 678386 - protein, 15 aa, Homo sapiens
  CDR3 for beta chain variable domain of TCR clone 339193 (TRBV9, TRBJ1-6)
CASSVAGTGDSPLHF

SEQ ID NO: 678387 - protein, 12 aa, Homo sapiens
  CDR3 for alpha chain variable domain of TCR clone 339194 (TRAV21, TRAJ3)
CCFYSSASKIIF

SEQ ID NO: 678388 - protein, 12 aa, Homo sapiens
  CDR3 for beta chain variable domain of TCR clone 339194 (TRBV7-8, TRBJ2-7)
CASSLGDREQYF

SEQ ID NO: 678389 - protein, 11 aa, Homo sapiens
  CDR3 for alpha chain variable domain of TCR clone 339195 (TRAV35, TRAJ57)
GPQGGSEKLVF

SEQ ID NO: 678390 - protein, 16 aa, Homo sapiens
  CDR3 for beta chain variable domain of TCR clone 339195 (TRBV7-2, TRBJ1-5)
CASSWTGGPGNQHQHF

SEQ ID NO: 678391 - protein, 14 aa, Homo sapiens
  CDR3 for alpha chain variable domain of TCR clone 339196 (TRAV26-1, TRAJ38)
CIAVNAGNNRKLIW

SEQ ID NO: 678392 - protein, 15 aa, Homo sapiens
  CDR3 for beta chain variable domain of TCR clone 339196 (TRBV27, TRBJ2-1)
CASSNGGGSSNEQFF

SEQ ID NO: 678393 - protein, 15 aa, Homo sapiens
  CDR3 for alpha chain variable domain of TCR clone 339197 (TRAV17, TRAJ42)
CATDNYGGSQGNLIF

SEQ ID NO: 678394 - protein, 14 aa, Homo sapiens
  CDR3 for beta chain variable domain of TCR clone 339197 (TRBV19, TRBJ2-5)
CASSIEHAQETQYF

SEQ ID NO: 678395 - protein, 11 aa, Homo sapiens
  CDR3 for alpha chain variable domain of TCR clone 339198 (TRAV12-3, TRAJ43)
CAMSVSNDLRF

SEQ ID NO: 678396 - protein, 16 aa, Homo sapiens
  CDR3 for beta chain variable domain of TCR clone 339198 (TRBV2, TRBJ2-3)
CASSTSVEGVTDTQYF

SEQ ID NO: 678397 - protein, 17 aa, Homo sapiens
  CDR3 for alpha chain variable domain of TCR clone 339199 (TRAV3, TRAJ6)
CAVRDGPRAGGSYIPTC

SEQ ID NO: 678398 - protein, 15 aa, Homo sapiens
  CDR3 for beta chain variable domain of TCR clone 339199 (TRBV20-1, TRBJ1-1)
CSASWDRFLNTEAFF

SEQ ID NO: 678399 - protein, 17 aa, Homo sapiens
  CDR3 for alpha chain variable domain of TCR clone 339200 (TRAV2, TRAJ36)
CAVEDRGNWGKQPLLWD

SEQ ID NO: 678400 - protein, 14 aa, Homo sapiens
  CDR3 for beta chain variable domain of TCR clone 339200 (TRBV7-9, TRBJ2-5)
CASSLDTAQETQYV

SEQ ID NO: 678401 - protein, 11 aa, Homo sapiens
  CDR3 for alpha chain variable domain of TCR clone 339201 (TRAV2, TRAJ21)
CAVFNFYKFYF

SEQ ID NO: 678402 - protein, 14 aa, Homo sapiens
  CDR3 for beta chain variable domain of TCR clone 339201 (TRBV15, TRBJ2-3)
CATRSGTSTDTQYF

SEQ ID NO: 678403 - protein, 17 aa, Homo sapiens
  CDR3 for alpha chain variable domain of TCR clone 339202 (TRAV3, TRAJ42)
CAVRDRDYGGSQGNLIF

SEQ ID NO: 678404 - protein, 14 aa, Homo sapiens
  CDR3 for beta chain variable domain of TCR clone 339202 (TRBV7-7, TRBJ2-2)
CASSRDRSTGELFF

SEQ ID NO: 678405 - protein, 18 aa, Homo sapiens
  CDR3 for alpha chain variable domain of TCR clone 339203 (TRAV13-1, TRAJ52)
CAASKRSVGGTSYGKLTF

SEQ ID NO: 678406 - protein, 13 aa, Homo sapiens
  CDR3 for beta chain variable domain of TCR clone 339203 (TRBV12-4, TRBJ1-2)
CASSVRQGKGYTF

SEQ ID NO: 678407 - protein, 14 aa, Homo sapiens
  CDR3 for alpha chain variable domain of TCR clone 339204 (TRAV23/DV6, TRAJ4)
CAAPSSGGYKKLIF

SEQ ID NO: 678408 - protein, 16 aa, Homo sapiens
  CDR3 for beta chain variable domain of TCR clone 339204 (TRBV19, TRBJ1-1)
CASRFGGPVTGTEAFF

SEQ ID NO: 678409 - protein, 12 aa, Homo sapiens
  CDR3 for alpha chain variable domain of TCR clone 339205 (TRAV8-6, TRAJ43)
CAVSNNNNDMRF

SEQ ID NO: 678410 - protein, 15 aa, Homo sapiens
  CDR3 for beta chain variable domain of TCR clone 339205 (TRBV7-3, TRBJ2-3)
CANSLTSGVGDTQYF

SEQ ID NO: 678411 - protein, 12 aa, Homo sapiens
  CDR3 for alpha chain variable domain of TCR clone 339206 (TRAV3, TRAJ39)
CAVIEWSNMLTF

SEQ ID NO: 678412 - protein, 14 aa, Homo sapiens
  CDR3 for beta chain variable domain of TCR clone 339206 (TRBV7-8, TRBJ2-3)
CASSFPGGQDTQYF

SEQ ID NO: 678413 - protein, 11 aa, Homo sapiens
  CDR3 for alpha chain variable domain of TCR clone 339207 (TRAV1-2, TRAJ20)
CAVANDYKLSF

SEQ ID NO: 678414 - protein, 18 aa, Homo sapiens
  CDR3 for beta chain variable domain of TCR clone 339207 (TRBV20-1, TRBJ2-6)
CSAETTPTHGCGDNVLTF

SEQ ID NO: 678415 - protein, 12 aa, Homo sapiens
  CDR3 for alpha chain variable domain of TCR clone 339208 (TRAV12-2, TRAJ21)
CAFRYNFNKFYF

SEQ ID NO: 678416 - protein, 14 aa, Homo sapiens
  CDR3 for beta chain variable domain of TCR clone 339208 (TRBV28, TRBJ2-1)
CASSYYTAYNEQFF

SEQ ID NO: 678417 - protein, 15 aa, Homo sapiens
  CDR3 for alpha chain variable domain of TCR clone 339209 (TRAV23/DV6, TRAJ45)
CAASSAVGGADGLTF

SEQ ID NO: 678418 - protein, 16 aa, Homo sapiens
  CDR3 for beta chain variable domain of TCR clone 339209 (TRBV6-6, TRBJ2-5)
CASSYDWAGGSETQYF

SEQ ID NO: 678419 - protein, 12 aa, Homo sapiens
  CDR3 for alpha chain variable domain of TCR clone 339210 (TRAV1-1, TRAJ8)
CAGGTGFQKLVF

SEQ ID NO: 678420 - protein, 16 aa, Homo sapiens
  CDR3 for beta chain variable domain of TCR clone 339210 (TRBV12-5, TRBJ2-5)
CGSGPRTSGNQETQYF

SEQ ID NO: 678421 - protein, 11 aa, Homo sapiens
  CDR3 for alpha chain variable domain of TCR clone 339211 (TRAV30, TRAJ23)
CGTDIAGKLIF

SEQ ID NO: 678422 - protein, 16 aa, Homo sapiens
  CDR3 for beta chain variable domain of TCR clone 339211 (TRBV7-2, TRBJ2-7)
CASTSQAASGGYEQYF

SEQ ID NO: 678423 - protein, 15 aa, Homo sapiens
  CDR3 for alpha chain variable domain of TCR clone 339212 (TRAV1-2, TRAJ18)
CAVRGEAQPWGGYTL

SEQ ID NO: 678424 - protein, 19 aa, Homo sapiens
  CDR3 for beta chain variable domain of TCR clone 339212 (TRBV6-3, TRBJ1-2)
CASSYSKGRTGPPNYGYTF

SEQ ID NO: 678425 - protein, 19 aa, Homo sapiens
  CDR3 for alpha chain variable domain of TCR clone 339213 (TRAV3, TRAJ6)
CAVRDRNPSRSGGSYIPTF

SEQ ID NO: 678426 - protein, 15 aa, Homo sapiens
  CDR3 for beta chain variable domain of TCR clone 339213 (TRBV18, TRBJ2-7)
CASSPTFMVSYEQYF

SEQ ID NO: 678427 - protein, 17 aa, Homo sapiens
  CDR3 for alpha chain variable domain of TCR clone 339214 (TRAV12-2, TRAJ6)
CAPQGPPRAGASYIPTF

SEQ ID NO: 678428 - protein, 16 aa, Homo sapiens
  CDR3 for beta chain variable domain of TCR clone 339214 (TRBV19, TRBJ2-2)
CASSTARASNTGELFF

SEQ ID NO: 678429 - protein, 15 aa, Homo sapiens
  CDR3 for alpha chain variable domain of TCR clone 339215 (TRAV21, TRAJ13)
CAVRPTSGRYQKVTF

SEQ ID NO: 678430 - protein, 18 aa, Homo sapiens
  CDR3 for beta chain variable domain of TCR clone 339215 (TRBV11-3, TRBJ2-1)
CASSSYPGGRDSYNEQFF

SEQ ID NO: 678431 - protein, 14 aa, Homo sapiens
  CDR3 for alpha chain variable domain of TCR clone 339216 (TRAV26-2, TRAJ38)
CILYNAGNNRKLIW

SEQ ID NO: 678432 - protein, 12 aa, Homo sapiens
  CDR3 for beta chain variable domain of TCR clone 339216 (TRBV19, TRBJ2-7)
CASTSGTYEQYF

SEQ ID NO: 678433 - protein, 14 aa, Homo sapiens
  CDR3 for alpha chain variable domain of TCR clone 339217 (TRAV35, TRAJ33)
FAGSSQDSNYQLIW

SEQ ID NO: 678434 - protein, 15 aa, Homo sapiens
  CDR3 for beta chain variable domain of TCR clone 339217 (TRBV29-1, TRBJ2-7)
CSVEFFDRGSYEQYF

SEQ ID NO: 678435 - protein, 14 aa, Homo sapiens
  CDR3 for alpha chain variable domain of TCR clone 339218 (TRAV12-2, TRAJ17)
CAVLFKAAGNKLTF

SEQ ID NO: 678436 - protein, 14 aa, Homo sapiens
  CDR3 for beta chain variable domain of TCR clone 339218 (TRBV12-4, TRBJ1-6)
CASNLQGKGSPLHF

SEQ ID NO: 678437 - protein, 17 aa, Homo sapiens
  CDR3 for alpha chain variable domain of TCR clone 339219 (TRAV3, TRAJ42)
CAVRDRDYGGSQGNLIF

SEQ ID NO: 678438 - protein, 14 aa, Homo sapiens
  CDR3 for beta chain variable domain of TCR clone 339219 (TRBV25-1, TRBJ2-5)
CASSESTGRETQYF

SEQ ID NO: 678439 - protein, 15 aa, Homo sapiens
  CDR3 for alpha chain variable domain of TCR clone 339220 (TRAV2, TRAJ15)
CAVEDRNQAGTALLF

SEQ ID NO: 678440 - protein, 13 aa, Homo sapiens
  CDR3 for beta chain variable domain of TCR clone 339220 (TRBV10-3, TRBJ2-7)
CASKLAVNYEQYF

SEQ ID NO: 678441 - protein, 11 aa, Homo sapiens
  CDR3 for alpha chain variable domain of TCR clone 339221 (TRAV12-2, TRAJ33)
CSVTSNYQLIW

SEQ ID NO: 678442 - protein, 14 aa, Homo sapiens
  CDR3 for beta chain variable domain of TCR clone 339221 (TRBV12-4, TRBJ2-2)
CASNQGANTGELFF

SEQ ID NO: 678443 - protein, 14 aa, Homo sapiens
  CDR3 for alpha chain variable domain of TCR clone 339222 (TRAV4, TRAJ39)
CLVGPNNNAGNMLT

SEQ ID NO: 678444 - protein, 13 aa, Homo sapiens
  CDR3 for beta chain variable domain of TCR clone 339222 (TRBV11-2, TRBJ2-5)
CASSSTGEETQYF

SEQ ID NO: 678445 - protein, 17 aa, Homo sapiens
  CDR3 for alpha chain variable domain of TCR clone 339223 (TRAV3, TRAJ6)
CAVRDGPRAGGSYIPTF

SEQ ID NO: 678446 - protein, 15 aa, Homo sapiens
  CDR3 for beta chain variable domain of TCR clone 339223 (TRBV7-2, TRBJ2-2)
CASSPTGANTGELFF

SEQ ID NO: 678447 - protein, 15 aa, Homo sapiens
  CDR3 for alpha chain variable domain of TCR clone 339224 (TRAV2, TRAJ22)
CAVHSRGGSARQLTF

SEQ ID NO: 678448 - protein, 14 aa, Homo sapiens
  CDR3 for beta chain variable domain of TCR clone 339224 (TRBV7-6, TRBJ2-3)
CASSLGTVTDTQYF

SEQ ID NO: 678449 - protein, 13 aa, Homo sapiens
  CDR3 for alpha chain variable domain of TCR clone 339225 (TRAV13-1, TRAJ39)
CSKYSNAGNMLTF

SEQ ID NO: 678450 - protein, 16 aa, Homo sapiens
  CDR3 for beta chain variable domain of TCR clone 339225 (TRBV20-1, TRBJ1-4)
CSAAGQGLLTNEKLFF

SEQ ID NO: 678451 - protein, 15 aa, Homo sapiens
  CDR3 for alpha chain variable domain of TCR clone 339226 (TRAV36/DV7, TRAJ42)
CAVMNYGGSQGNLIF

SEQ ID NO: 678452 - protein, 15 aa, Homo sapiens
  CDR3 for beta chain variable domain of TCR clone 339226 (TRBV20-1, TRBJ2-7)
CSARDRVSGMDEQYF

SEQ ID NO: 678453 - protein, 12 aa, Homo sapiens
  CDR3 for alpha chain variable domain of TCR clone 339227 (TRAV13-1, TRAJ49)
CAASPMGNQFYF

SEQ ID NO: 678454 - protein, 13 aa, Homo sapiens
  CDR3 for beta chain variable domain of TCR clone 339227 (TRBV20-1, TRBJ2-2)
CSASAAGTGELFF

SEQ ID NO: 678455 - protein, 13 aa, Homo sapiens
  CDR3 for alpha chain variable domain of TCR clone 339228 (TRAV5, TRAJ30)
CAEIANRDYKIIF

SEQ ID NO: 678456 - protein, 14 aa, Homo sapiens
  CDR3 for beta chain variable domain of TCR clone 339228 (TRBV4-1, TRBJ2-2)
CASSQAVNTGELFF

SEQ ID NO: 678457 - protein, 16 aa, Homo sapiens
  CDR3 for alpha chain variable domain of TCR clone 339229 (TRAV13-2, TRAJ32)
CAENMNYGCATNKLIF

SEQ ID NO: 678458 - protein, 14 aa, Homo sapiens
  CDR3 for beta chain variable domain of TCR clone 339229 (TRBV15, TRBJ2-5)
CATSSTGYQETQYF

SEQ ID NO: 678459 - protein, 10 aa, Homo sapiens
  CDR3 for alpha chain variable domain of TCR clone 339230 (TRAV12-1, TRAJ20)
CAIYFQRLQA

SEQ ID NO: 678460 - protein, 15 aa, Homo sapiens
  CDR3 for beta chain variable domain of TCR clone 339230 (TRBV7-9, TRBJ1-6)
CASSSPGRGNSPLHF

SEQ ID NO: 678461 - protein, 14 aa, Homo sapiens
  CDR3 for alpha chain variable domain of TCR clone 339231 (TRAV8-3, TRAJ42)
CAVGAWGSQGNLIF

SEQ ID NO: 678462 - protein, 16 aa, Homo sapiens
  CDR3 for beta chain variable domain of TCR clone 339231 (TRBV7-2, TRBJ1-2)
CASSSNQDRRGHGYTF

SEQ ID NO: 678463 - protein, 16 aa, Homo sapiens
  CDR3 for alpha chain variable domain of TCR clone 339232 (TRAV1-2, TRAJ6)
CAVRDQGTGGSYIPTF

SEQ ID NO: 678464 - protein, 13 aa, Homo sapiens
  CDR3 for beta chain variable domain of TCR clone 339232 (TRBV28, TRBJ2-7)
GASTPGLAGEQYF

SEQ ID NO: 678465 - protein, 13 aa, Homo sapiens
  CDR3 for alpha chain variable domain of TCR clone 339233 (TRAV30, TRAJ49)
CGTESQPVTSSIL

SEQ ID NO: 678466 - protein, 15 aa, Homo sapiens
  CDR3 for beta chain variable domain of TCR clone 339233 (TRBV19, TRBJ1-2)
CASSVGQVLNYGYTF

SEQ ID NO: 678467 - protein, 13 aa, Homo sapiens
  CDR3 for alpha chain variable domain of TCR clone 339234 (TRAV13-2, TRAJ16)
CADARTDGKKLLF

SEQ ID NO: 678468 - protein, 15 aa, Homo sapiens
  CDR3 for beta chain variable domain of TCR clone 339234 (TRBV29-1, TRBJ2-1)
CSVEAPRGSPNEQFF

SEQ ID NO: 678469 - protein, 16 aa, Homo sapiens
  CDR3 for alpha chain variable domain of TCR clone 339235 (TRAV30, TRAJ24)
CGTEIVDADSWGKFQV

SEQ ID NO: 678470 - protein, 17 aa, Homo sapiens
  CDR3 for beta chain variable domain of TCR clone 339235 (TRBV28, TRBJ2-5)
CASSRQGGLAGAETQYF

SEQ ID NO: 678471 - protein, 15 aa, Homo sapiens
  CDR3 for alpha chain variable domain of TCR clone 339236 (TRAV26-2, TRAJ13)
CILRDLSGGYQKVTF

SEQ ID NO: 678472 - protein, 13 aa, Homo sapiens
  CDR3 for beta chain variable domain of TCR clone 339236 (TRBV11-2, TRBJ2-5)
CASSSTGEETQYF

SEQ ID NO: 678473 - protein, 16 aa, Homo sapiens
  CDR3 for alpha chain variable domain of TCR clone 339237 (TRAV26-2, TRAJ45)
CTTASPIGGGADGLTF

SEQ ID NO: 678474 - protein, 13 aa, Homo sapiens
  CDR3 for beta chain variable domain of TCR clone 339237 (TRBV7-6, TRBJ1-2)
CASSLVADYGYTF

SEQ ID NO: 678475 - protein, 16 aa, Homo sapiens
  CDR3 for alpha chain variable domain of TCR clone 339238 (TRAV12-3, TRAJ53)
CAMSPGSGGSNYKLAF

SEQ ID NO: 678476 - protein, 12 aa, Homo sapiens
  CDR3 for beta chain variable domain of TCR clone 339238 (TRBV12-4, TRBJ2-3)
CASSTLPDTQYF

SEQ ID NO: 678477 - protein, 15 aa, Homo sapiens
  CDR3 for alpha chain variable domain of TCR clone 339239 (TRAV21, TRAJ53)
CATLNSGGSNYKLTF

SEQ ID NO: 678478 - protein, 15 aa, Homo sapiens
  CDR3 for beta chain variable domain of TCR clone 339239 (TRBV5-1, TRBJ2-1)
CASSPPRAPYSEQFF

SEQ ID NO: 678479 - protein, 12 aa, Homo sapiens
  CDR3 for alpha chain variable domain of TCR clone 339240 (TRAV17, TRAJ58)
CGEETSGSRLTF

SEQ ID NO: 678480 - protein, 16 aa, Homo sapiens
  CDR3 for beta chain variable domain of TCR clone 339240 (TRBV10-3, TRBJ2-1)
CAIRGGGRGDYNEQFF

SEQ ID NO: 678481 - protein, 15 aa, Homo sapiens
  CDR3 for alpha chain variable domain of TCR clone 339241 (TRAV3, TRAJ3)
CAVRDGHSSASKIIF

SEQ ID NO: 678482 - protein, 10 aa, Homo sapiens
  CDR3 for beta chain variable domain of TCR clone 339241 (TRBV7-2, TRBJ2-7)
TGTLSYEQYF

SEQ ID NO: 678483 - protein, 14 aa, Homo sapiens
  CDR3 for alpha chain variable domain of TCR clone 339242 (TRAV12-2, TRAJ13)
CAVRKTGGYQKVTF

SEQ ID NO: 678484 - protein, 17 aa, Homo sapiens
  CDR3 for beta chain variable domain of TCR clone 339242 (TRBV20-1, TRBJ2-2)
CSASGSGQGGLTGELFF

SEQ ID NO: 678485 - protein, 13 aa, Homo sapiens
  CDR3 for alpha chain variable domain of TCR clone 339243 (TRAV20, TRAJ31)
CAVQACNNARLMF

SEQ ID NO: 678486 - protein, 15 aa, Homo sapiens
  CDR3 for beta chain variable domain of TCR clone 339243 (TRBV5-1, TRBJ2-3)
CASSVTSGSTDTQYF

SEQ ID NO: 678487 - protein, 13 aa, Homo sapiens
  CDR3 for alpha chain variable domain of TCR clone 339244 (TRAV29/DV5, TRAJ31)
CAASRNNNARLMF

SEQ ID NO: 678488 - protein, 19 aa, Homo sapiens
  CDR3 for beta chain variable domain of TCR clone 339244 (TRBV2, TRBJ2-2)
CASSHPGLAGGGNTGELFF

SEQ ID NO: 678489 - protein, 13 aa, Homo sapiens
  CDR3 for alpha chain variable domain of TCR clone 339245 (TRAV12-1, TRAJ6)
CVVYPGGSYIPTY

SEQ ID NO: 678490 - protein, 14 aa, Homo sapiens
  CDR3 for beta chain variable domain of TCR clone 339245 (TRBV7-9, TRBJ1-2)
CASSRQGANYGYTF

SEQ ID NO: 678491 - protein, 16 aa, Homo sapiens
  CDR3 for alpha chain variable domain of TCR clone 339246 (TRAV3, TRAJ37)
CAVRGKGSGNTGKLIF

SEQ ID NO: 678492 - protein, 14 aa, Homo sapiens
  CDR3 for beta chain variable domain of TCR clone 339246 (TRBV7-8, TRBJ2-3)
CASRLARGTDTQYF

SEQ ID NO: 678493 - protein, 15 aa, Homo sapiens
  CDR3 for alpha chain variable domain of TCR clone 339247 (TRAV21, TRAJ52)
CAVRGGGTSYGKLTF

SEQ ID NO: 678494 - protein, 12 aa, Homo sapiens
  CDR3 for beta chain variable domain of TCR clone 339247 (TRBV7-9, TRBJ2-7)
CASSIKREEQYF

SEQ ID NO: 678495 - protein, 10 aa, Homo sapiens
  CDR3 for alpha chain variable domain of TCR clone 339248 (TRAV38-2/DV8, TRAJ40)
CASGTYKYIF

SEQ ID NO: 678496 - protein, 14 aa, Homo sapiens
  CDR3 for beta chain variable domain of TCR clone 339248 (TRBV7-9, TRBJ2-1)
CASGPRDSLYEQFF

SEQ ID NO: 678497 - protein, 12 aa, Homo sapiens
  CDR3 for alpha chain variable domain of TCR clone 339249 (TRAV13-1, TRAJ20)
CAASRGDYKLSF

SEQ ID NO: 678498 - protein, 12 aa, Homo sapiens
  CDR3 for beta chain variable domain of TCR clone 339249 (TRBV24-1, TRBJ1-1)
CATSDSDRGAVF

SEQ ID NO: 678499 - protein, 17 aa, Homo sapiens
  CDR3 for alpha chain variable domain of TCR clone 339250 (TRAV3, TRAJ42)
CAVRDRDYGGSQGNLIC

SEQ ID NO: 678500 - protein, 14 aa, Homo sapiens
  CDR3 for beta chain variable domain of TCR clone 339250 (TRBV19, TRBJ2-2)
CTSSGQGIAGELFF

SEQ ID NO: 678501 - protein, 12 aa, Homo sapiens
  CDR3 for alpha chain variable domain of TCR clone 339251 (TRAV38-1, TRAJ47)
CAFETYGNKLVF

SEQ ID NO: 678502 - protein, 14 aa, Homo sapiens
  CDR3 for beta chain variable domain of TCR clone 339251 (TRBV18, TRBJ2-3)
CASSLGGGSDTQYF

SEQ ID NO: 678503 - protein, 15 aa, Homo sapiens
  CDR3 for alpha chain variable domain of TCR clone 339252 (TRAV21, TRAJ53)
CATLNSGGSNYKLAF

SEQ ID NO: 678504 - protein, 17 aa, Homo sapiens
  CDR3 for beta chain variable domain of TCR clone 339252 (TRBV20-1, TRBJ2-2)
CSASGSGQGGLTGELFF

SEQ ID NO: 678505 - protein, 12 aa, Homo sapiens
  CDR3 for alpha chain variable domain of TCR clone 339253 (TRAV16, TRAJ22)
CALEVSASQLTF

SEQ ID NO: 678506 - protein, 14 aa, Homo sapiens
  CDR3 for beta chain variable domain of TCR clone 339253 (TRBV11-2, TRBJ2-3)
CASSSIASTDTQDF

SEQ ID NO: 678507 - protein, 13 aa, Homo sapiens
  CDR3 for alpha chain variable domain of TCR clone 339254 (TRAV29/DV5, TRAJ31)
CASSRNNNARLMF

SEQ ID NO: 678508 - protein, 12 aa, Homo sapiens
  CDR3 for beta chain variable domain of TCR clone 339254 (TRBV14, TRBJ1-1)
CASSQLKGLAFF

SEQ ID NO: 678509 - protein, 12 aa, Homo sapiens
  CDR3 for alpha chain variable domain of TCR clone 339255 (TRAV12-3, TRAJ40)
CAVSSGTYKYIF

SEQ ID NO: 678510 - protein, 15 aa, Homo sapiens
  CDR3 for beta chain variable domain of TCR clone 339255 (TRBV7-9, TRBJ2-7)
CASSAGGGLTYEQYF

SEQ ID NO: 678511 - protein, 11 aa, Homo sapiens
  CDR3 for alpha chain variable domain of TCR clone 339256 (TRAV3, TRAJ21)
CAVGTFNKFYF

SEQ ID NO: 678512 - protein, 16 aa, Homo sapiens
  CDR3 for beta chain variable domain of TCR clone 339256 (TRBV19, TRBJ2-1)
CASSEAGPSSYNEQFF

SEQ ID NO: 678513 - protein, 14 aa, Homo sapiens
  CDR3 for alpha chain variable domain of TCR clone 339257 (TRAV3, TRAJ21)
CALGRGSTNFTLVL

SEQ ID NO: 678514 - protein, 14 aa, Homo sapiens
  CDR3 for beta chain variable domain of TCR clone 339257 (TRBV7-9, TRBJ2-4)
CASSLAMGGNIQYF

SEQ ID NO: 678515 - protein, 17 aa, Homo sapiens
  CDR3 for alpha chain variable domain of TCR clone 339258 (TRAV8-2, )
CVVNIQNPDPAVYQLRD

SEQ ID NO: 678516 - protein, 14 aa, Homo sapiens
  CDR3 for beta chain variable domain of TCR clone 339258 (TRBV7-9, TRBJ2-5)
CASSLVGGEETQYC

SEQ ID NO: 678517 - protein, 22 aa, Homo sapiens
  CDR3 for alpha chain variable domain of TCR clone 339259 (TRAV12-2, TRAJ53)
SPVIQPPTSVPPILSSNYKLTF

SEQ ID NO: 678518 - protein, 15 aa, Homo sapiens
  CDR3 for beta chain variable domain of TCR clone 339259 (TRBV7-2, TRBJ1-2)
CASSPRAGWNYGYTF

SEQ ID NO: 678519 - protein, 12 aa, Homo sapiens
  CDR3 for alpha chain variable domain of TCR clone 339260 (TRAV2, TRAJ33)
CAFMDSNYQLIW

SEQ ID NO: 678520 - protein, 18 aa, Homo sapiens
  CDR3 for beta chain variable domain of TCR clone 339260 (TRBV2, TRBJ2-7)
CASSEPWTDPPTSSTSGR

SEQ ID NO: 678521 - protein, 12 aa, Homo sapiens
  CDR3 for alpha chain variable domain of TCR clone 339261 (TRAV25, TRAJ17)
CAGEAAGNKLTF

SEQ ID NO: 678522 - protein, 14 aa, Homo sapiens
  CDR3 for beta chain variable domain of TCR clone 339261 (TRBV19, TRBJ2-1)
CASPTFVLSGEKFF

SEQ ID NO: 678523 - protein, 11 aa, Homo sapiens
  CDR3 for alpha chain variable domain of TCR clone 339262 (TRAV1-2, TRAJ20)
SAVANDYKLSF

SEQ ID NO: 678524 - protein, 15 aa, Homo sapiens
  CDR3 for beta chain variable domain of TCR clone 339262 (TRBV20-1, TRBJ2-7)
CSARDPVKGEGEQYF

SEQ ID NO: 678525 - protein, 16 aa, Homo sapiens
  CDR3 for alpha chain variable domain of TCR clone 339263 (TRAV3, TRAJ23)
CAVKIGIYNQGGKLIF

SEQ ID NO: 678526 - protein, 15 aa, Homo sapiens
  CDR3 for beta chain variable domain of TCR clone 339263 (TRBV19, TRBJ2-4)
CASRGPRRGENIQYF

SEQ ID NO: 678527 - protein, 14 aa, Homo sapiens
  CDR3 for alpha chain variable domain of TCR clone 339264 (TRAV12-3, TRAJ10)
SHLPLTGGGNKLTF

SEQ ID NO: 678528 - protein, 11 aa, Homo sapiens
  CDR3 for beta chain variable domain of TCR clone 339264 (TRBV11-2, TRBJ2-2)
CASSLPGELFF

SEQ ID NO: 678529 - protein, 14 aa, Homo sapiens
  CDR3 for alpha chain variable domain of TCR clone 339265 (TRAV17, TRAJ12)
CATDERDSSYKLIF

SEQ ID NO: 678530 - protein, 16 aa, Homo sapiens
  CDR3 for beta chain variable domain of TCR clone 339265 (TRBV11-2, TRBJ2-1)
CASSPRLAGVYNEQFF

SEQ ID NO: 678531 - protein, 10 aa, Homo sapiens
  CDR3 for alpha chain variable domain of TCR clone 339266 (TRAV12-2, TRAJ49)
CAVRRNQFYF

SEQ ID NO: 678532 - protein, 13 aa, Homo sapiens
  CDR3 for beta chain variable domain of TCR clone 339266 (TRBV7-9, TRBJ1-2)
CASSLKQNYGYTF

SEQ ID NO: 678533 - protein, 12 aa, Homo sapiens
  CDR3 for alpha chain variable domain of TCR clone 339267 (TRAV27, TRAJ13)
CAGAGGYQKVTY

SEQ ID NO: 678534 - protein, 15 aa, Homo sapiens
  CDR3 for beta chain variable domain of TCR clone 339267 (TRBV20-1, TRBJ2-6)
CSARDRGPGANVLTF

SEQ ID NO: 678535 - protein, 18 aa, Homo sapiens
  CDR3 for alpha chain variable domain of TCR clone 339268 (TRAV13-1, TRAJ52)
CAAKNPNAGGTRYGKLTF

SEQ ID NO: 678536 - protein, 17 aa, Homo sapiens
  CDR3 for beta chain variable domain of TCR clone 339268 (TRBV28, TRBJ2-5)
CASSTPEGDALQETQYF

SEQ ID NO: 678537 - protein, 15 aa, Homo sapiens
  CDR3 for alpha chain variable domain of TCR clone 339269 (TRAV23/DV6, )
CAADIQNPNPAVYQL

SEQ ID NO: 678538 - protein, 14 aa, Homo sapiens
  CDR3 for beta chain variable domain of TCR clone 339269 (TRBV5-7, TRBJ1-6)
CASSFAGHNSPLHF

SEQ ID NO: 678539 - protein, 14 aa, Homo sapiens
  CDR3 for alpha chain variable domain of TCR clone 339270 (TRAV12-2, TRAJ15)
CAPHTGQAGTALSL

SEQ ID NO: 678540 - protein, 17 aa, Homo sapiens
  CDR3 for beta chain variable domain of TCR clone 339270 (TRBV5-5, TRBJ1-2)
CASSLGSLDGQSEGYTF

SEQ ID NO: 678541 - protein, 13 aa, Homo sapiens
  CDR3 for alpha chain variable domain of TCR clone 339271 (TRAV12-1, TRAJ33)
CGDAPDSNYQLIW

SEQ ID NO: 678542 - protein, 16 aa, Homo sapiens
  CDR3 for beta chain variable domain of TCR clone 339271 (TRBV12-4, TRBJ1-5)
CASSRPVGGSNQPQHF

SEQ ID NO: 678543 - protein, 13 aa, Homo sapiens
  CDR3 for alpha chain variable domain of TCR clone 339272 (TRAV27, TRAJ49)
CAPRPYTGNQFYF

SEQ ID NO: 678544 - protein, 15 aa, Homo sapiens
  CDR3 for beta chain variable domain of TCR clone 339272 (TRBV7-9, TRBJ1-5)
CASSQGHQPNQPQHF

SEQ ID NO: 678545 - protein, 13 aa, Homo sapiens
  CDR3 for alpha chain variable domain of TCR clone 339273 (TRAV30, TRAJ20)
RGTEDRSDYKLSF

SEQ ID NO: 678546 - protein, 15 aa, Homo sapiens
  CDR3 for beta chain variable domain of TCR clone 339273 (TRBV2, TRBJ1-2)
CASTQVQDSNYGYTF

SEQ ID NO: 678547 - protein, 14 aa, Homo sapiens
  CDR3 for alpha chain variable domain of TCR clone 339274 (TRAV1-2, TRAJ8)
CAVREDTGFQKLVF

SEQ ID NO: 678548 - protein, 15 aa, Homo sapiens
  CDR3 for beta chain variable domain of TCR clone 339274 (TRBV19, TRBJ2-1)
CASSTGTSPYNEQFF

SEQ ID NO: 678549 - protein, 15 aa, Homo sapiens
  CDR3 for alpha chain variable domain of TCR clone 339275 (TRAV8-4, TRAJ3)
CAVTGESLVQQCFQD

SEQ ID NO: 678550 - protein, 16 aa, Homo sapiens
  CDR3 for beta chain variable domain of TCR clone 339275 (TRBV4-2, TRBJ1-1)
CASSQAGFGMNTEASF

SEQ ID NO: 678551 - protein, 14 aa, Homo sapiens
  CDR3 for alpha chain variable domain of TCR clone 339276 (TRAV13-1, TRAJ23)
CAASRLGRGGKLIF

SEQ ID NO: 678552 - protein, 14 aa, Homo sapiens
  CDR3 for beta chain variable domain of TCR clone 339276 (TRBV7-6, TRBJ2-3)
CASSLGTVTDTQYF

SEQ ID NO: 678553 - protein, 13 aa, Homo sapiens
  CDR3 for alpha chain variable domain of TCR clone 339277 (TRAV2, TRAJ21)
CAVEGSNFNKFYF

SEQ ID NO: 678554 - protein, 13 aa, Homo sapiens
  CDR3 for beta chain variable domain of TCR clone 339277 (TRBV10-3, TRBJ2-7)
CASKLAVNYEQYF

SEQ ID NO: 678555 - protein, 12 aa, Homo sapiens
  CDR3 for alpha chain variable domain of TCR clone 339278 (TRAV8-4, TRAJ43)
CAVSVKNNDMRF

SEQ ID NO: 678556 - protein, 14 aa, Homo sapiens
  CDR3 for beta chain variable domain of TCR clone 339278 (TRBV11-2, TRBJ1-2)
CASSLGTANYGYTF

SEQ ID NO: 678557 - protein, 12 aa, Homo sapiens
  CDR3 for alpha chain variable domain of TCR clone 339279 (TRAV12-3, TRAJ17)
CAMPLTGNKLTF

SEQ ID NO: 678558 - protein, 16 aa, Homo sapiens
  CDR3 for beta chain variable domain of TCR clone 339279 (TRBV19, TRBJ2-1)
CASSKAGPSSYNEHFF

SEQ ID NO: 678559 - protein, 14 aa, Homo sapiens
  CDR3 for alpha chain variable domain of TCR clone 339280 (TRAV13-1, TRAJ44)
CAAKATGTASKLTF

SEQ ID NO: 678560 - protein, 14 aa, Homo sapiens
  CDR3 for beta chain variable domain of TCR clone 339280 (TRBV25-1, TRBJ1-1)
CARTHLGGNTEAFF

SEQ ID NO: 678561 - protein, 16 aa, Homo sapiens
  CDR3 for alpha chain variable domain of TCR clone 339281 (TRAV30, TRAJ24)
CSTEIVDADSWGKFHF

SEQ ID NO: 678562 - protein, 14 aa, Homo sapiens
  CDR3 for beta chain variable domain of TCR clone 339281 (TRBV12-5, TRBJ2-5)
CASGSRTHQETQYF

SEQ ID NO: 678563 - protein, 14 aa, Homo sapiens
  CDR3 for alpha chain variable domain of TCR clone 339282 (TRAV1-2, TRAJ16)
CAVNRFSYGQKLLF

SEQ ID NO: 678564 - protein, 15 aa, Homo sapiens
  CDR3 for beta chain variable domain of TCR clone 339282 (TRBV20-1, TRBJ2-5)
CSAEGTGGLEETQYF

SEQ ID NO: 678565 - protein, 13 aa, Homo sapiens
  CDR3 for alpha chain variable domain of TCR clone 339283 (TRAV8-6, TRAJ49)
CAVFTNTGNQFYF

SEQ ID NO: 678566 - protein, 13 aa, Homo sapiens
  CDR3 for beta chain variable domain of TCR clone 339283 (TRBV7-9, TRBJ1-2)
CASSLKQNYGYTF

SEQ ID NO: 678567 - protein, 16 aa, Homo sapiens
  CDR3 for alpha chain variable domain of TCR clone 339284 (TRAV3, TRAJ21)
CAVRDIERGNFNKFYF

SEQ ID NO: 678568 - protein, 13 aa, Homo sapiens
  CDR3 for beta chain variable domain of TCR clone 339284 (TRBV6-5, TRBJ2-7)
CASSLTTGYEQYF

SEQ ID NO: 678569 - protein, 14 aa, Homo sapiens
  CDR3 for alpha chain variable domain of TCR clone 339285 (TRAV12-2, TRAJ40)
CAVKIPSGTYKYIF

SEQ ID NO: 678570 - protein, 16 aa, Homo sapiens
  CDR3 for beta chain variable domain of TCR clone 339285 (TRBV7-2, TRBJ2-7)
CASSLDLSGGAYEQYF

SEQ ID NO: 678571 - protein, 14 aa, Homo sapiens
  CDR3 for alpha chain variable domain of TCR clone 339286 (TRAV1-2, TRAJ8)
CAVREDTGFQKLVF

SEQ ID NO: 678572 - protein, 15 aa, Homo sapiens
  CDR3 for beta chain variable domain of TCR clone 339286 (TRBV5-1, TRBJ2-1)
CASTPPRAPYNEQFF

SEQ ID NO: 678573 - protein, 14 aa, Homo sapiens
  CDR3 for alpha chain variable domain of TCR clone 339287 (TRAV2, TRAJ9)
CAVEDRSGGFKTIF

SEQ ID NO: 678574 - protein, 14 aa, Homo sapiens
  CDR3 for beta chain variable domain of TCR clone 339287 (TRBV7-9, TRBJ2-1)
CASSIRQGWDEQFF

SEQ ID NO: 678575 - protein, 19 aa, Homo sapiens
  CDR3 for alpha chain variable domain of TCR clone 339288 (TRAV26-1, TRAJ52)
CIVRAHRNAGGTSYGKLTF

SEQ ID NO: 678576 - protein, 14 aa, Homo sapiens
  CDR3 for beta chain variable domain of TCR clone 339288 (TRBV19, TRBJ2-7)
CASTVQGRPYEQYF

SEQ ID NO: 678577 - protein, 17 aa, Homo sapiens
  CDR3 for alpha chain variable domain of TCR clone 339289 (TRAV26-1, TRAJ37)
CIVRVITVSSNTGKLIF

SEQ ID NO: 678578 - protein, 13 aa, Homo sapiens
  CDR3 for beta chain variable domain of TCR clone 339289 (TRBV27, TRBJ1-1)
CASSLSIGAEAFF

SEQ ID NO: 678579 - protein, 20 aa, Homo sapiens
  CDR3 for alpha chain variable domain of TCR clone 339290 (TRAV12-3, TRAJ41)
SLFIRDSQPSDSATPEALNF

SEQ ID NO: 678580 - protein, 15 aa, Homo sapiens
  CDR3 for beta chain variable domain of TCR clone 339290 (TRBV5-1, TRBJ2-7)
CASSLDLTSSYEQYC

SEQ ID NO: 678581 - protein, 13 aa, Homo sapiens
  CDR3 for alpha chain variable domain of TCR clone 339291 (TRAV20, TRAJ40)
CAVPFSGTYKYIF

SEQ ID NO: 678582 - protein, 13 aa, Homo sapiens
  CDR3 for beta chain variable domain of TCR clone 339291 (TRBV15, TRBJ2-5)
CATSQIGGETQYF

SEQ ID NO: 678583 - protein, 14 aa, Homo sapiens
  CDR3 for alpha chain variable domain of TCR clone 339292 (TRAV1-1, TRAJ27)
CAVIYNTNAGKSTF

SEQ ID NO: 678584 - protein, 13 aa, Homo sapiens
  CDR3 for beta chain variable domain of TCR clone 339292 (TRBV4-1, TRBJ2-1)
CASSQEVQYEQFF

SEQ ID NO: 678585 - protein, 16 aa, Homo sapiens
  CDR3 for alpha chain variable domain of TCR clone 339293 (TRAV26-2, TRAJ28)
CILRPYSGAGSYQLTF

SEQ ID NO: 678586 - protein, 15 aa, Homo sapiens
  CDR3 for beta chain variable domain of TCR clone 339293 (TRBV6-6, TRBJ2-7)
CASSYSYGGSYEQYF

SEQ ID NO: 678587 - protein, 15 aa, Homo sapiens
  CDR3 for alpha chain variable domain of TCR clone 339294 (TRAV3, TRAJ9)
CAVRARNTGGFKTIF

SEQ ID NO: 678588 - protein, 12 aa, Homo sapiens
  CDR3 for beta chain variable domain of TCR clone 339294 (TRBV29-1, TRBJ2-3)
CSVVLGADTQYF

SEQ ID NO: 678589 - protein, 17 aa, Homo sapiens
  CDR3 for alpha chain variable domain of TCR clone 339295 (TRAV3, TRAJ6)
CAVRAGPRAGGRYIPTF

SEQ ID NO: 678590 - protein, 20 aa, Homo sapiens
  CDR3 for beta chain variable domain of TCR clone 339295 (TRBV28, TRBJ2-1)
CASTPIGRSPGLAGGNEQFF

SEQ ID NO: 678591 - protein, 13 aa, Homo sapiens
  CDR3 for alpha chain variable domain of TCR clone 339296 (TRAV12-3, TRAJ33)
CAMSVNSNYQLIW

SEQ ID NO: 678592 - protein, 13 aa, Homo sapiens
  CDR3 for beta chain variable domain of TCR clone 339296 (TRBV7-2, TRBJ1-4)
CASSLAGLEKLFF

SEQ ID NO: 678593 - protein, 14 aa, Homo sapiens
  CDR3 for alpha chain variable domain of TCR clone 339297 (TRAV25, TRAJ52)
CAGEGGTSYGKLTF

SEQ ID NO: 678594 - protein, 14 aa, Homo sapiens
  CDR3 for beta chain variable domain of TCR clone 339297 (TRBV7-2, TRBJ1-5)
CASSTQGAGQPQHF

SEQ ID NO: 678595 - protein, 14 aa, Homo sapiens
  CDR3 for alpha chain variable domain of TCR clone 339298 (TRAV1-2, TRAJ8)
CAVREDTGFQKLVF

SEQ ID NO: 678596 - protein, 17 aa, Homo sapiens
  CDR3 for beta chain variable domain of TCR clone 339298 (TRBV6-5, TRBJ2-7)
SASRPAVGEVQHYEQYF

SEQ ID NO: 678597 - protein, 14 aa, Homo sapiens
  CDR3 for alpha chain variable domain of TCR clone 339299 (TRAV10, TRAJ32)
CGEPRGGATNKLIF

SEQ ID NO: 678598 - protein, 14 aa, Homo sapiens
  CDR3 for beta chain variable domain of TCR clone 339299 (TRBV5-4, TRBJ2-2)
RASRLDGGTGELFF

SEQ ID NO: 678599 - protein, 16 aa, Homo sapiens
  CDR3 for alpha chain variable domain of TCR clone 339300 (TRAV12-1, TRAJ48)
CVVNMRDNFGNEKVTF

SEQ ID NO: 678600 - protein, 16 aa, Homo sapiens
  CDR3 for beta chain variable domain of TCR clone 339300 (TRBV7-6, TRBJ2-1)
CASSSVVAGTYNEQFF

SEQ ID NO: 678601 - protein, 14 aa, Homo sapiens
  CDR3 for alpha chain variable domain of TCR clone 339301 (TRAV12-2, TRAJ44)
CAVNPAGTASKLTF

SEQ ID NO: 678602 - protein, 14 aa, Homo sapiens
  CDR3 for beta chain variable domain of TCR clone 339301 (TRBV7-9, TRBJ2-3)
CASSLEDGTDTQYF

SEQ ID NO: 678603 - protein, 15 aa, Homo sapiens
  CDR3 for alpha chain variable domain of TCR clone 339302 (TRAV1-1, TRAJ22)
CAVRVSSGSARQLTF

SEQ ID NO: 678604 - protein, 15 aa, Homo sapiens
  CDR3 for beta chain variable domain of TCR clone 339302 (TRBV20-1, TRBJ2-7)
CSARGRVSGMDEQYF

SEQ ID NO: 678605 - protein, 13 aa, Homo sapiens
  CDR3 for alpha chain variable domain of TCR clone 339303 (TRAV30, TRAJ16)
CGTFGGDGQKLLF

SEQ ID NO: 678606 - protein, 15 aa, Homo sapiens
  CDR3 for beta chain variable domain of TCR clone 339303 (TRBV11-1, TRBJ2-7)
CASSLNYGASYEQYF

SEQ ID NO: 678607 - protein, 18 aa, Homo sapiens
  CDR3 for alpha chain variable domain of TCR clone 339304 (TRAV21, TRAJ52)
CAVRPSPAGGTSYGKLTF

SEQ ID NO: 678608 - protein, 16 aa, Homo sapiens
  CDR3 for beta chain variable domain of TCR clone 339304 (TRBV7-3, TRBJ2-1)
CSSSLEGYRSYNEQFF

SEQ ID NO: 678609 - protein, 15 aa, Homo sapiens
  CDR3 for alpha chain variable domain of TCR clone 339305 (TRAV3, TRAJ3)
CAVRDRDSSASKIIF

SEQ ID NO: 678610 - protein, 14 aa, Homo sapiens
  CDR3 for beta chain variable domain of TCR clone 339305 (TRBV23-1, TRBJ2-5)
CASSFLRSQETQYF

SEQ ID NO: 678611 - protein, 14 aa, Homo sapiens
  CDR3 for alpha chain variable domain of TCR clone 339306 (TRAV12-2, TRAJ15)
CAPHTGQAGTALIF

SEQ ID NO: 678612 - protein, 17 aa, Homo sapiens
  CDR3 for beta chain variable domain of TCR clone 339306 (TRBV5-5, TRBJ1-2)
CASSLGSLNGQSEGYTF

SEQ ID NO: 678613 - protein, 14 aa, Homo sapiens
  CDR3 for alpha chain variable domain of TCR clone 339307 (TRAV23/DV6, TRAJ17)
CAASVQAAGNKLTF

SEQ ID NO: 678614 - protein, 12 aa, Homo sapiens
  CDR3 for beta chain variable domain of TCR clone 339307 (TRBV28, TRBJ2-3)
CASSLYRDTQYF

SEQ ID NO: 678615 - protein, 14 aa, Homo sapiens
  CDR3 for alpha chain variable domain of TCR clone 339308 (TRAV1-2, TRAJ16)
CAVNRFSDGQKLLF

SEQ ID NO: 678616 - protein, 11 aa, Homo sapiens
  CDR3 for beta chain variable domain of TCR clone 339308 (TRBV29-1, TRBJ2-5)
CSEGRTGTQYF

SEQ ID NO: 678617 - protein, 14 aa, Homo sapiens
  CDR3 for alpha chain variable domain of TCR clone 339309 (TRAV16, TRAJ13)
YALRRSGGYQKVTF

SEQ ID NO: 678618 - protein, 15 aa, Homo sapiens
  CDR3 for beta chain variable domain of TCR clone 339309 (TRBV6-1, TRBJ1-5)
CASSELREGNQPQHF

SEQ ID NO: 678619 - protein, 13 aa, Homo sapiens
  CDR3 for alpha chain variable domain of TCR clone 339310 (TRAV38-1, TRAJ42)
CARWGGSQGNLVF

SEQ ID NO: 678620 - protein, 16 aa, Homo sapiens
  CDR3 for beta chain variable domain of TCR clone 339310 (TRBV6-1, TRBJ1-3)
CASVQGGVETPYILER

SEQ ID NO: 678621 - protein, 13 aa, Homo sapiens
  CDR3 for alpha chain variable domain of TCR clone 339311 (TRAV12-2, TRAJ12)
CAVNWDSSYKLIF

SEQ ID NO: 678622 - protein, 13 aa, Homo sapiens
  CDR3 for beta chain variable domain of TCR clone 339311 (TRBV20-1, TRBJ2-5)
CSAREAFQETQYF

SEQ ID NO: 678623 - protein, 11 aa, Homo sapiens
  CDR3 for alpha chain variable domain of TCR clone 339312 (TRAV3, TRAJ21)
CAVGNVNKFYF

SEQ ID NO: 678624 - protein, 12 aa, Homo sapiens
  CDR3 for beta chain variable domain of TCR clone 339312 (TRBV12-4, TRBJ2-7)
CASSLGGYEQYF

SEQ ID NO: 678625 - protein, 14 aa, Homo sapiens
  CDR3 for alpha chain variable domain of TCR clone 339313 (TRAV26-1, TRAJ34)
CIVRFAYNTDKLIF

SEQ ID NO: 678626 - protein, 15 aa, Homo sapiens
  CDR3 for beta chain variable domain of TCR clone 339313 (TRBV20-1, TRBJ2-7)
CSARVPAAYFYEQYL

SEQ ID NO: 678627 - protein, 14 aa, Homo sapiens
  CDR3 for alpha chain variable domain of TCR clone 339314 (TRAV12-3, TRAJ10)
SHLPLTGGGNKLTF

SEQ ID NO: 678628 - protein, 15 aa, Homo sapiens
  CDR3 for beta chain variable domain of TCR clone 339314 (TRBV12-4, TRBJ2-5)
CASSLGGQGRETQYF

SEQ ID NO: 678629 - protein, 15 aa, Homo sapiens
  CDR3 for alpha chain variable domain of TCR clone 339315 (TRAV26-1, TRAJ42)
CIVRVKGGSQGNLIL

SEQ ID NO: 678630 - protein, 14 aa, Homo sapiens
  CDR3 for beta chain variable domain of TCR clone 339315 (TRBV19, TRBJ2-2)
CATTGHANTGELFF

SEQ ID NO: 678631 - protein, 11 aa, Homo sapiens
  CDR3 for alpha chain variable domain of TCR clone 339316 (TRAV8-6, TRAJ34)
CAVWNTDKLIF

SEQ ID NO: 678632 - protein, 16 aa, Homo sapiens
  CDR3 for beta chain variable domain of TCR clone 339316 (TRBV5-1, TRBJ2-7)
CASSYESTSSGGEQYF

SEQ ID NO: 678633 - protein, 14 aa, Homo sapiens
  CDR3 for alpha chain variable domain of TCR clone 339317 (TRAV22, TRAJ28)
CAVEPGAGSYQLTF

SEQ ID NO: 678634 - protein, 14 aa, Homo sapiens
  CDR3 for beta chain variable domain of TCR clone 339317 (TRBV7-9, TRBJ2-1)
CASSPRDSLYEQFF

SEQ ID NO: 678635 - protein, 15 aa, Homo sapiens
  CDR3 for alpha chain variable domain of TCR clone 339318 (TRAV17, TRAJ35)
CATAFVIGFGNVLHC

SEQ ID NO: 678636 - protein, 21 aa, Homo sapiens
  CDR3 for beta chain variable domain of TCR clone 339318 (TRBV11-2, TRBJ2-7)
CASSPLAGGAEVRAVLRAGHQ

SEQ ID NO: 678637 - protein, 16 aa, Homo sapiens
  CDR3 for alpha chain variable domain of TCR clone 339319 (TRAV3, TRAJ10)
CAVRDMRAVGGNKLTF

SEQ ID NO: 678638 - protein, 17 aa, Homo sapiens
  CDR3 for beta chain variable domain of TCR clone 339319 (TRBV28, TRBJ2-5)
CASSTPEGDALQETQYF

SEQ ID NO: 678639 - protein, 13 aa, Homo sapiens
  CDR3 for alpha chain variable domain of TCR clone 339320 (TRAV21, TRAJ27)
CAARPGNAGKSTF

SEQ ID NO: 678640 - protein, 15 aa, Homo sapiens
  CDR3 for beta chain variable domain of TCR clone 339320 (TRBV19, TRBJ2-1)
CASSSPGVPLDEQFF

SEQ ID NO: 678641 - protein, 15 aa, Homo sapiens
  CDR3 for alpha chain variable domain of TCR clone 339321 (TRAV38-2/DV8, TRAJ45)
CAYWDSGGGSDGLTF

SEQ ID NO: 678642 - protein, 16 aa, Homo sapiens
  CDR3 for beta chain variable domain of TCR clone 339321 (TRBV19, TRBJ1-1)
CASSPTRFWPGTEAFF

SEQ ID NO: 678643 - protein, 14 aa, Homo sapiens
  CDR3 for alpha chain variable domain of TCR clone 339322 (TRAV1-2, TRAJ24)
CAVLTTHSWGKFQF

SEQ ID NO: 678644 - protein, 21 aa, Homo sapiens
  CDR3 for beta chain variable domain of TCR clone 339322 (TRBV6-5, TRBJ1-3)
CASSYWEKIAQGMSSGNTIYF

SEQ ID NO: 678645 - protein, 12 aa, Homo sapiens
  CDR3 for alpha chain variable domain of TCR clone 339323 (TRAV8-3, TRAJ20)
CAVGGGDYKLSF

SEQ ID NO: 678646 - protein, 13 aa, Homo sapiens
  CDR3 for beta chain variable domain of TCR clone 339323 (TRBV28, TRBJ2-7)
CASSNSGNYEQYF

SEQ ID NO: 678647 - protein, 14 aa, Homo sapiens
  CDR3 for alpha chain variable domain of TCR clone 339324 (TRAV1-1, TRAJ31)
CAVRLTMPDSCLEM

SEQ ID NO: 678648 - protein, 13 aa, Homo sapiens
  CDR3 for beta chain variable domain of TCR clone 339324 (TRBV19, TRBJ1-5)
CASSGGRNQPQHF

SEQ ID NO: 678649 - protein, 15 aa, Homo sapiens
  CDR3 for alpha chain variable domain of TCR clone 339325 (TRAV4, TRAJ39)
RLVGPNNNAGNMLTF

SEQ ID NO: 678650 - protein, 15 aa, Homo sapiens
  CDR3 for beta chain variable domain of TCR clone 339325 (TRBV4-2, TRBJ1-2)
CASSQRTGGRDGYTF

SEQ ID NO: 678651 - protein, 17 aa, Homo sapiens
  CDR3 for alpha chain variable domain of TCR clone 339326 (TRAV3, TRAJ6)
CAVRDGPRAGGSYIPTI

SEQ ID NO: 678652 - protein, 14 aa, Homo sapiens
  CDR3 for beta chain variable domain of TCR clone 339326 (TRBV11-2, TRBJ2-3)
CASSRLARTDTQYF

SEQ ID NO: 678653 - protein, 10 aa, Homo sapiens
  CDR3 for alpha chain variable domain of TCR clone 339327 (TRAV30, TRAJ48)
CGIGNEKLTF

SEQ ID NO: 678654 - protein, 11 aa, Homo sapiens
  CDR3 for beta chain variable domain of TCR clone 339327 (TRBV7-8, TRBJ2-7)
CASSLPLEQYF

SEQ ID NO: 678655 - protein, 14 aa, Homo sapiens
  CDR3 for alpha chain variable domain of TCR clone 339328 (TRAV38-1, TRAJ40)
CALRPTSGTYKYIF

SEQ ID NO: 678656 - protein, 14 aa, Homo sapiens
  CDR3 for beta chain variable domain of TCR clone 339328 (TRBV19, TRBJ1-4)
CASSINRGGEKLFF

SEQ ID NO: 678657 - protein, 17 aa, Homo sapiens
  CDR3 for alpha chain variable domain of TCR clone 339329 (TRAV8-3, TRAJ50)
CAVGAVDTETSYDKGIF

SEQ ID NO: 678658 - protein, 13 aa, Homo sapiens
  CDR3 for beta chain variable domain of TCR clone 339329 (TRBV7-9, TRBJ2-2)
CASSSAGTGEPFF

SEQ ID NO: 678659 - protein, 12 aa, Homo sapiens
  CDR3 for alpha chain variable domain of TCR clone 339330 (TRAV16, TRAJ10)
CSRTGGGNKPTF

SEQ ID NO: 678660 - protein, 15 aa, Homo sapiens
  CDR3 for beta chain variable domain of TCR clone 339330 (TRBV6-3, TRBJ2-7)
CASSSPGTVFYGQYF

SEQ ID NO: 678661 - protein, 10 aa, Homo sapiens
  CDR3 for alpha chain variable domain of TCR clone 339331 (TRAV30, TRAJ48)
CGIGNEKLTF

SEQ ID NO: 678662 - protein, 13 aa, Homo sapiens
  CDR3 for beta chain variable domain of TCR clone 339331 (TRBV29-1, TRBJ2-7)
CSVGPSGGYEQYF

SEQ ID NO: 678663 - protein, 14 aa, Homo sapiens
  CDR3 for alpha chain variable domain of TCR clone 339332 (TRAV16, TRAJ15)
CALSFNQAGTALIF

SEQ ID NO: 678664 - protein, 19 aa, Homo sapiens
  CDR3 for beta chain variable domain of TCR clone 339332 (TRBV7-2, TRBJ2-3)
CASSFLSRNWGGGTDTQYF

SEQ ID NO: 678665 - protein, 13 aa, Homo sapiens
  CDR3 for alpha chain variable domain of TCR clone 339333 (TRAV12-3, TRAJ7)
CAMSASGNNRLAF

SEQ ID NO: 678666 - protein, 14 aa, Homo sapiens
  CDR3 for beta chain variable domain of TCR clone 339333 (TRBV13, TRBJ2-5)
WASSLGPRGETQYF

SEQ ID NO: 678667 - protein, 14 aa, Homo sapiens
  CDR3 for alpha chain variable domain of TCR clone 339334 (TRAV12-3, TRAJ29)
CAMILLSGNTPLVF

SEQ ID NO: 678668 - protein, 15 aa, Homo sapiens
  CDR3 for beta chain variable domain of TCR clone 339334 (TRBV12-4, TRBJ2-1)
CASSGSGGTLGEQFF

SEQ ID NO: 678669 - protein, 16 aa, Homo sapiens
  CDR3 for alpha chain variable domain of TCR clone 339335 (TRAV3, TRAJ37)
CAVRGKGAGNTGKLIF

SEQ ID NO: 678670 - protein, 15 aa, Homo sapiens
  CDR3 for beta chain variable domain of TCR clone 339335 (TRBV11-2, TRBJ2-2)
CASSSDRVHAGELFF

SEQ ID NO: 678671 - protein, 13 aa, Homo sapiens
  CDR3 for alpha chain variable domain of TCR clone 339336 (TRAV12-1, TRAJ26)
CVVRRNYGQNFVF

SEQ ID NO: 678672 - protein, 15 aa, Homo sapiens
  CDR3 for beta chain variable domain of TCR clone 339336 (TRBV19, TRBJ1-1)
CASTSGQIQNTEEFF

SEQ ID NO: 678673 - protein, 22 aa, Homo sapiens
  CDR3 for alpha chain variable domain of TCR clone 339337 (TRAV12-2, TRAJ53)
SPVIQPPTSVPPILSINYKLTF

SEQ ID NO: 678674 - protein, 13 aa, Homo sapiens
  CDR3 for beta chain variable domain of TCR clone 339337 (TRBV7-7, TRBJ2-3)
CASSLSRADTQYF

SEQ ID NO: 678675 - protein, 15 aa, Homo sapiens
  CDR3 for alpha chain variable domain of TCR clone 339338 (TRAV26-1, TRAJ24)
CIVPLTTYSWGKFQF

SEQ ID NO: 678676 - protein, 14 aa, Homo sapiens
  CDR3 for beta chain variable domain of TCR clone 339338 (TRBV10-3, TRBJ2-3)
CAISEKGLGDTQYF

SEQ ID NO: 678677 - protein, 13 aa, Homo sapiens
  CDR3 for alpha chain variable domain of TCR clone 339339 (TRAV21, TRAJ27)
CAARPGNAGKSTF

SEQ ID NO: 678678 - protein, 12 aa, Homo sapiens
  CDR3 for beta chain variable domain of TCR clone 339339 (TRBV11-2, TRBJ2-2)
CASSRGGGELFF

SEQ ID NO: 678679 - protein, 13 aa, Homo sapiens
  CDR3 for alpha chain variable domain of TCR clone 339340 (TRAV8-1, TRAJ13)
CAVCKGGYQKVTF

SEQ ID NO: 678680 - protein, 18 aa, Homo sapiens
  CDR3 for beta chain variable domain of TCR clone 339340 (TRBV11-2, TRBJ2-7)
CASSWRTVQTGQSYEQYF

SEQ ID NO: 678681 - protein, 13 aa, Homo sapiens
  CDR3 for alpha chain variable domain of TCR clone 339341 (TRAV8-3, TRAJ48)
CAVVRLGNEKLTF

SEQ ID NO: 678682 - protein, 16 aa, Homo sapiens
  CDR3 for beta chain variable domain of TCR clone 339341 (TRBV20-1, TRBJ2-5)
CSARDFASGIQETQYF

SEQ ID NO: 678683 - protein, 14 aa, Homo sapiens
  CDR3 for alpha chain variable domain of TCR clone 339342 (TRAV1-2, TRAJ16)
CAVNRVSDGQKLLF

SEQ ID NO: 678684 - protein, 14 aa, Homo sapiens
  CDR3 for beta chain variable domain of TCR clone 339342 (TRBV10-2, TRBJ1-5)
CASSSTGRNQPQHF

SEQ ID NO: 678685 - protein, 12 aa, Homo sapiens
  CDR3 for alpha chain variable domain of TCR clone 339343 (TRAV12-3, TRAJ17)
CAMTLTGNKLTF

SEQ ID NO: 678686 - protein, 14 aa, Homo sapiens
  CDR3 for beta chain variable domain of TCR clone 339343 (TRBV20-1, TRBJ2-3)
CSARGGTSTDTQCF

SEQ ID NO: 678687 - protein, 13 aa, Homo sapiens
  CDR3 for alpha chain variable domain of TCR clone 339344 (TRAV27, TRAJ8)
CAGGPTGFQKLVF

SEQ ID NO: 678688 - protein, 15 aa, Homo sapiens
  CDR3 for beta chain variable domain of TCR clone 339344 (TRBV6-1, TRBJ2-7)
CASSESMGDFYEQYV

SEQ ID NO: 678689 - protein, 15 aa, Homo sapiens
  CDR3 for alpha chain variable domain of TCR clone 339345 (TRAV12-2, TRAJ52)
CAVNAGGTSYGKLTF

SEQ ID NO: 678690 - protein, 13 aa, Homo sapiens
  CDR3 for beta chain variable domain of TCR clone 339345 (TRBV7-9, TRBJ2-7)
CASSFAGAYEQYF

SEQ ID NO: 678691 - protein, 15 aa, Homo sapiens
  CDR3 for alpha chain variable domain of TCR clone 339346 (TRAV12-1, TRAJ47)
CVVTNRLKGENKLVF

SEQ ID NO: 678692 - protein, 19 aa, Homo sapiens
  CDR3 for beta chain variable domain of TCR clone 339346 (TRBV20-1, TRBJ2-5)
CSARPRGLAGTSKSGTQYF

SEQ ID NO: 678693 - protein, 12 aa, Homo sapiens
  CDR3 for alpha chain variable domain of TCR clone 339347 (TRAV13-2, TRAJ23)
CAERHRGGKLIF

SEQ ID NO: 678694 - protein, 14 aa, Homo sapiens
  CDR3 for beta chain variable domain of TCR clone 339347 (TRBV15, TRBJ2-7)
CATSRVARGYEQYF

SEQ ID NO: 678695 - protein, 16 aa, Homo sapiens
  CDR3 for alpha chain variable domain of TCR clone 339348 (TRAV12-1, TRAJ43)
CVVNPHRFGAGTRLTV

SEQ ID NO: 678696 - protein, 16 aa, Homo sapiens
  CDR3 for beta chain variable domain of TCR clone 339348 (TRBV27, TRBJ2-2)
CASSATGGGDTGELFF

SEQ ID NO: 678697 - protein, 12 aa, Homo sapiens
  CDR3 for alpha chain variable domain of TCR clone 339349 (TRAV8-3, TRAJ41)
CAVALTGYALNF

SEQ ID NO: 678698 - protein, 17 aa, Homo sapiens
  CDR3 for beta chain variable domain of TCR clone 339349 (TRBV7-3, TRBJ2-2)
CASSLSGTSGGTGELFF

SEQ ID NO: 678699 - protein, 11 aa, Homo sapiens
  CDR3 for alpha chain variable domain of TCR clone 339350 (TRAV21, TRAJ31)
CAVRNNARPMF

SEQ ID NO: 678700 - protein, 17 aa, Homo sapiens
  CDR3 for beta chain variable domain of TCR clone 339350 (TRBV28, TRBJ1-5)
CASSLSWLVSSNRPQHF

SEQ ID NO: 678701 - protein, 13 aa, Homo sapiens
  CDR3 for alpha chain variable domain of TCR clone 339351 (TRAV17, TRAJ40)
CAGALGGTYKYIF

SEQ ID NO: 678702 - protein, 13 aa, Homo sapiens
  CDR3 for beta chain variable domain of TCR clone 339351 (TRBV12-5, TRBJ2-3)
CASGDRQSDTQYF

SEQ ID NO: 678703 - protein, 12 aa, Homo sapiens
  CDR3 for alpha chain variable domain of TCR clone 339352 (TRAV12-3, TRAJ41)
CAMSYSGYALNF

SEQ ID NO: 678704 - protein, 13 aa, Homo sapiens
  CDR3 for beta chain variable domain of TCR clone 339352 (TRBV7-3, TRBJ2-1)
CASNLDSYNEQFF

SEQ ID NO: 678705 - protein, 11 aa, Homo sapiens
  CDR3 for alpha chain variable domain of TCR clone 339353 (TRAV17, TRAJ9)
CATTGGFKTIF

SEQ ID NO: 678706 - protein, 14 aa, Homo sapiens
  CDR3 for beta chain variable domain of TCR clone 339353 (TRBV7-9, TRBJ2-2)
CASSGLADTGELYV

SEQ ID NO: 678707 - protein, 10 aa, Homo sapiens
  CDR3 for alpha chain variable domain of TCR clone 339354 (TRAV12-1, TRAJ41)
CVVPELKFRV

SEQ ID NO: 678708 - protein, 12 aa, Homo sapiens
  CDR3 for beta chain variable domain of TCR clone 339354 (TRBV14, TRBJ2-5)
CASSQLNETQYF

SEQ ID NO: 678709 - protein, 12 aa, Homo sapiens
  CDR3 for alpha chain variable domain of TCR clone 339355 (TRAV13-1, TRAJ53)
AASGGSNYKLTF

SEQ ID NO: 678710 - protein, 15 aa, Homo sapiens
  CDR3 for beta chain variable domain of TCR clone 339355 (TRBV6-1, TRBJ2-3)
CASSERGGITDTQYF

SEQ ID NO: 678711 - protein, 15 aa, Homo sapiens
  CDR3 for alpha chain variable domain of TCR clone 339356 (TRAV27, TRAJ38)
CAARRNAGNNRKLMW

SEQ ID NO: 678712 - protein, 15 aa, Homo sapiens
  CDR3 for beta chain variable domain of TCR clone 339356 (TRBV12-4, TRBJ2-5)
CASSPPTGLQETQYF

SEQ ID NO: 678713 - protein, 16 aa, Homo sapiens
  CDR3 for alpha chain variable domain of TCR clone 339357 (TRAV8-3, TRAJ10)
CAVGPILTGGGNKLTF

SEQ ID NO: 678714 - protein, 13 aa, Homo sapiens
  CDR3 for beta chain variable domain of TCR clone 339357 (TRBV7-2, TRBJ2-1)
CASSQAGGDEQFF

SEQ ID NO: 678715 - protein, 13 aa, Homo sapiens
  CDR3 for alpha chain variable domain of TCR clone 339358 (TRAV21, TRAJ20)
CAVGLRVDYKLSF

SEQ ID NO: 678716 - protein, 12 aa, Homo sapiens
  CDR3 for beta chain variable domain of TCR clone 339358 (TRBV14, TRBJ2-7)
CASSLYKDEQYF

SEQ ID NO: 678717 - protein, 14 aa, Homo sapiens
  CDR3 for alpha chain variable domain of TCR clone 339359 (TRAV13-2, TRAJ29)
CAENIEPGNTPLVF

SEQ ID NO: 678718 - protein, 17 aa, Homo sapiens
  CDR3 for beta chain variable domain of TCR clone 339359 (TRBV7-3, TRBJ2-3)
CASSLMKRMRGADTQYF

SEQ ID NO: 678719 - protein, 12 aa, Homo sapiens
  CDR3 for alpha chain variable domain of TCR clone 339360 (TRAV13-1, TRAJ49)
CAAPNTGNQFYF

SEQ ID NO: 678720 - protein, 17 aa, Homo sapiens
  CDR3 for beta chain variable domain of TCR clone 339360 (TRBV25-1, TRBJ2-7)
CASSDARVVFSSYEQFF

SEQ ID NO: 678721 - protein, 13 aa, Homo sapiens
  CDR3 for alpha chain variable domain of TCR clone 339361 (TRAV20, TRAJ49)
CAVQARTGNQFYF

SEQ ID NO: 678722 - protein, 14 aa, Homo sapiens
  CDR3 for beta chain variable domain of TCR clone 339361 (TRBV7-2, TRBJ2-7)
CASSPKTSFYEQYV

SEQ ID NO: 678723 - protein, 11 aa, Homo sapiens
  CDR3 for alpha chain variable domain of TCR clone 339362 (TRAV12-2, TRAJ43)
CAAYHNNDMRF

SEQ ID NO: 678724 - protein, 14 aa, Homo sapiens
  CDR3 for beta chain variable domain of TCR clone 339362 (TRBV7-8, TRBJ1-2)
CASSAGTAIYGYTF

SEQ ID NO: 678725 - protein, 16 aa, Homo sapiens
  CDR3 for alpha chain variable domain of TCR clone 339363 (TRAV16, TRAJ52)
CALSAAGGTSYGKLTF

SEQ ID NO: 678726 - protein, 17 aa, Homo sapiens
  CDR3 for beta chain variable domain of TCR clone 339363 (TRBV25-1, TRBJ2-1)
CASSAYGQGRGVYEQFF

SEQ ID NO: 678727 - protein, 12 aa, Homo sapiens
  CDR3 for alpha chain variable domain of TCR clone 339364 (TRAV13-1, TRAJ21)
CAAKEGFNKFYF

SEQ ID NO: 678728 - protein, 12 aa, Homo sapiens
  CDR3 for beta chain variable domain of TCR clone 339364 (TRBV19, TRBJ1-5)
CASSIAQQPQHF

SEQ ID NO: 678729 - protein, 12 aa, Homo sapiens
  CDR3 for alpha chain variable domain of TCR clone 339365 (TRAV26-2, TRAJ21)
CILKGNCNKFYF

SEQ ID NO: 678730 - protein, 14 aa, Homo sapiens
  CDR3 for beta chain variable domain of TCR clone 339365 (TRBV7-9, TRBJ1-1)
CASTPLQSYTEAFF

SEQ ID NO: 678731 - protein, 14 aa, Homo sapiens
  CDR3 for alpha chain variable domain of TCR clone 339366 (TRAV13-1, TRAJ35)
CAASKGGFGNVLHW

SEQ ID NO: 678732 - protein, 15 aa, Homo sapiens
  CDR3 for beta chain variable domain of TCR clone 339366 (TRBV20-1, TRBJ2-7)
CSARDRVSGMDEQYF

SEQ ID NO: 678733 - protein, 14 aa, Homo sapiens
  CDR3 for alpha chain variable domain of TCR clone 339367 (TRAV13-1, TRAJ35)
CAASKGGFGNVLHC

SEQ ID NO: 678734 - protein, 11 aa, Homo sapiens
  CDR3 for beta chain variable domain of TCR clone 339367 (TRBV6-3, TRBJ2-3)
CATGQADTQYF

SEQ ID NO: 678735 - protein, 11 aa, Homo sapiens
  CDR3 for alpha chain variable domain of TCR clone 339368 (TRAV1-2, TRAJ40)
CAVPGTYKYIF

SEQ ID NO: 678736 - protein, 13 aa, Homo sapiens
  CDR3 for beta chain variable domain of TCR clone 339368 (TRBV2, TRBJ1-1)
CASSEGGNTEAFF

SEQ ID NO: 678737 - protein, 12 aa, Homo sapiens
  CDR3 for alpha chain variable domain of TCR clone 339369 (TRAV8-3, TRAJ41)
CAVALSGYALNF

SEQ ID NO: 678738 - protein, 18 aa, Homo sapiens
  CDR3 for beta chain variable domain of TCR clone 339369 (TRBV20-1, TRBJ2-6)
CSAETIPTHGSGANVLTF

SEQ ID NO: 678739 - protein, 14 aa, Homo sapiens
  CDR3 for alpha chain variable domain of TCR clone 339370 (TRAV3, TRAJ9)
CAVRLNTGGFITIF

SEQ ID NO: 678740 - protein, 16 aa, Homo sapiens
  CDR3 for beta chain variable domain of TCR clone 339370 (TRBV12-5, TRBJ2-5)
CASGPRTSGNQETQYF

SEQ ID NO: 678741 - protein, 14 aa, Homo sapiens
  CDR3 for alpha chain variable domain of TCR clone 339371 (TRAV12-2, TRAJ45)
CAVYSGGGADGLTF

SEQ ID NO: 678742 - protein, 15 aa, Homo sapiens
  CDR3 for beta chain variable domain of TCR clone 339371 (TRBV29-1, TRBJ2-1)
CSGRDRKSSYNEQFF

SEQ ID NO: 678743 - protein, 11 aa, Homo sapiens
  CDR3 for alpha chain variable domain of TCR clone 339372 (TRAV2, TRAJ21)
CAVFIFNKFYF

SEQ ID NO: 678744 - protein, 14 aa, Homo sapiens
  CDR3 for beta chain variable domain of TCR clone 339372 (TRBV15, TRBJ2-3)
CATRSGTSTDTQYF

SEQ ID NO: 678745 - protein, 12 aa, Homo sapiens
  CDR3 for alpha chain variable domain of TCR clone 339373 (TRAV41, TRAJ58)
CAVETSGSRLTF

SEQ ID NO: 678746 - protein, 13 aa, Homo sapiens
  CDR3 for beta chain variable domain of TCR clone 339373 (TRBV7-2, TRBJ2-4)
CASSREHANIQYF

SEQ ID NO: 678747 - protein, 16 aa, Homo sapiens
  CDR3 for alpha chain variable domain of TCR clone 339374 (TRAV3, TRAJ18)
CAVRDGRGSTLGRLYF

SEQ ID NO: 678748 - protein, 15 aa, Homo sapiens
  CDR3 for beta chain variable domain of TCR clone 339374 (TRBV7-9, TRBJ1-6)
CASCSPGRGNSPLHF

SEQ ID NO: 678749 - protein, 14 aa, Homo sapiens
  CDR3 for alpha chain variable domain of TCR clone 339375 (TRAV29/DV5, TRAJ45)
CAASFRGGAAGITF

SEQ ID NO: 678750 - protein, 11 aa, Homo sapiens
  CDR3 for beta chain variable domain of TCR clone 339375 (TRBV11-2, TRBJ2-2)
CASSLPGELVF

SEQ ID NO: 678751 - protein, 16 aa, Homo sapiens
  CDR3 for alpha chain variable domain of TCR clone 339376 (TRAV12-2, TRAJ10)
CAVNRVLTGGGNKLTF

SEQ ID NO: 678752 - protein, 16 aa, Homo sapiens
  CDR3 for beta chain variable domain of TCR clone 339376 (TRBV12-5, TRBJ2-5)
CASGPRTSGNQEAQYF

SEQ ID NO: 678753 - protein, 14 aa, Homo sapiens
  CDR3 for alpha chain variable domain of TCR clone 339377 (TRAV13-1, TRAJ35)
CAASKGGLGNVLHC

SEQ ID NO: 678754 - protein, 13 aa, Homo sapiens
  CDR3 for beta chain variable domain of TCR clone 339377 (TRBV7-3, TRBJ1-1)
CASSQNWGAEAFF

SEQ ID NO: 678755 - protein, 14 aa, Homo sapiens
  CDR3 for alpha chain variable domain of TCR clone 339378 (TRAV17, TRAJ57)
CATDPHGGSEKLVF

SEQ ID NO: 678756 - protein, 20 aa, Homo sapiens
  CDR3 for beta chain variable domain of TCR clone 339378 (TRBV28, TRBJ2-1)
CASTPIGRSPGLAGGNEQFF

SEQ ID NO: 678757 - protein, 14 aa, Homo sapiens
  CDR3 for alpha chain variable domain of TCR clone 339379 (TRAV12-3, TRAJ10)
SHLPLTGGGNKLTF

SEQ ID NO: 678758 - protein, 14 aa, Homo sapiens
  CDR3 for beta chain variable domain of TCR clone 339379 (TRBV5-5, TRBJ2-2)
CASSLLGDTGELFF

SEQ ID NO: 678759 - protein, 13 aa, Homo sapiens
  CDR3 for alpha chain variable domain of TCR clone 339380 (TRAV3, TRAJ21)
CAVREPDFNNFYF

SEQ ID NO: 678760 - protein, 13 aa, Homo sapiens
  CDR3 for beta chain variable domain of TCR clone 339380 (TRBV9, TRBJ2-1)
CASSPSGGNEQFF

SEQ ID NO: 678761 - protein, 13 aa, Homo sapiens
  CDR3 for alpha chain variable domain of TCR clone 339381 (TRAV13-1, TRAJ5)
CAASDTGGEHLLL

SEQ ID NO: 678762 - protein, 12 aa, Homo sapiens
  CDR3 for beta chain variable domain of TCR clone 339381 (TRBV28, TRBJ2-3)
CASSLYRDTQYF

SEQ ID NO: 678763 - protein, 14 aa, Homo sapiens
  CDR3 for alpha chain variable domain of TCR clone 339382 (TRAV12-3, TRAJ10)
SHLPLTGGGNKLTF

SEQ ID NO: 678764 - protein, 15 aa, Homo sapiens
  CDR3 for beta chain variable domain of TCR clone 339382 (TRBV9, TRBJ2-5)
CASSVTSGSRETQYF

SEQ ID NO: 678765 - protein, 12 aa, Homo sapiens
  CDR3 for alpha chain variable domain of TCR clone 339383 (TRAV12-3, TRAJ17)
CAMTLTGNKLTF

SEQ ID NO: 678766 - protein, 12 aa, Homo sapiens
  CDR3 for beta chain variable domain of TCR clone 339383 (TRBV7-8, TRBJ2-1)
CASSLGHNEQFF

SEQ ID NO: 678767 - protein, 15 aa, Homo sapiens
  CDR3 for alpha chain variable domain of TCR clone 339384 (TRAV3, TRAJ5)
CAVRDRKTGRRALTF

SEQ ID NO: 678768 - protein, 15 aa, Homo sapiens
  CDR3 for beta chain variable domain of TCR clone 339384 (TRBV7-8, TRBJ2-1)
CASSLADSLYNEQCV

SEQ ID NO: 678769 - protein, 12 aa, Homo sapiens
  CDR3 for alpha chain variable domain of TCR clone 339385 (TRAV29/DV5, TRAJ49)
CAATDTGNQSYF

SEQ ID NO: 678770 - protein, 12 aa, Homo sapiens
  CDR3 for beta chain variable domain of TCR clone 339385 (TRBV12-4, TRBJ2-7)
CASSLGGYEQYF

SEQ ID NO: 678771 - protein, 18 aa, Homo sapiens
  CDR3 for alpha chain variable domain of TCR clone 339386 (TRAV21, TRAJ52)
CAVRPSPPGGTSYGKLTF

SEQ ID NO: 678772 - protein, 15 aa, Homo sapiens
  CDR3 for beta chain variable domain of TCR clone 339386 (TRBV7-9, TRBJ2-7)
CASSSSGLAVYEQYF

SEQ ID NO: 678773 - protein, 15 aa, Homo sapiens
  CDR3 for alpha chain variable domain of TCR clone 339387 (TRAV3, TRAJ47)
CAVRDIGEYGNKLVF

SEQ ID NO: 678774 - protein, 14 aa, Homo sapiens
  CDR3 for beta chain variable domain of TCR clone 339387 (TRBV13, TRBJ2-5)
CATSLERVGETQYF

SEQ ID NO: 678775 - protein, 15 aa, Homo sapiens
  CDR3 for alpha chain variable domain of TCR clone 339388 (TRAV2, TRAJ9)
CAVEDRGTGGFKTIF

SEQ ID NO: 678776 - protein, 15 aa, Homo sapiens
  CDR3 for beta chain variable domain of TCR clone 339388 (TRBV19, TRBJ1-1)
CASTPGQIQNTEAFF

SEQ ID NO: 678777 - protein, 13 aa, Homo sapiens
  CDR3 for alpha chain variable domain of TCR clone 339389 (TRAV12-1, TRAJ31)
CVVIPNNNARLMF

SEQ ID NO: 678778 - protein, 16 aa, Homo sapiens
  CDR3 for beta chain variable domain of TCR clone 339389 (TRBV4-1, TRBJ2-6)
CASSQDGGPGANVLTF

SEQ ID NO: 678779 - protein, 12 aa, Homo sapiens
  CDR3 for alpha chain variable domain of TCR clone 339390 (TRAV13-1, TRAJ53)
CSAGGSNYKLPF

SEQ ID NO: 678780 - protein, 13 aa, Homo sapiens
  CDR3 for beta chain variable domain of TCR clone 339390 (TRBV2, TRBJ1-5)
CATAGPGNQPQHF

SEQ ID NO: 678781 - protein, 17 aa, Homo sapiens
  CDR3 for alpha chain variable domain of TCR clone 339391 (TRAV26-1, TRAJ46)
IASSESEKKSSGDKLTF

SEQ ID NO: 678782 - protein, 16 aa, Homo sapiens
  CDR3 for beta chain variable domain of TCR clone 339391 (TRBV27, TRBJ2-2)
CASSFRRLVRTGELFF

SEQ ID NO: 678783 - protein, 14 aa, Homo sapiens
  CDR3 for alpha chain variable domain of TCR clone 339392 (TRAV27, TRAJ33)
CAGPDVDSNYQLIW

SEQ ID NO: 678784 - protein, 14 aa, Homo sapiens
  CDR3 for beta chain variable domain of TCR clone 339392 (TRBV18, TRBJ2-5)
CASSPGVSQETQYF

SEQ ID NO: 678785 - protein, 13 aa, Homo sapiens
  CDR3 for alpha chain variable domain of TCR clone 339393 (TRAV3, TRAJ20)
CAVRDWAAGKLSF

SEQ ID NO: 678786 - protein, 16 aa, Homo sapiens
  CDR3 for beta chain variable domain of TCR clone 339393 (TRBV27, TRBJ2-2)
CASSFRGLVRTGELFF

SEQ ID NO: 678787 - protein, 15 aa, Homo sapiens
  CDR3 for alpha chain variable domain of TCR clone 339394 (TRAV34, TRAJ38)
CGADFTPGNSRKLIW

SEQ ID NO: 678788 - protein, 14 aa, Homo sapiens
  CDR3 for beta chain variable domain of TCR clone 339394 (TRBV20-1, TRBJ2-1)
CSAQIGGSANEQFF

SEQ ID NO: 678789 - protein, 13 aa, Homo sapiens
  CDR3 for alpha chain variable domain of TCR clone 339395 (TRAV12-2, TRAJ10)
CAVPTGGGNKLTF

SEQ ID NO: 678790 - protein, 15 aa, Homo sapiens
  CDR3 for beta chain variable domain of TCR clone 339395 (TRBV4-1, TRBJ2-1)
CASSQDPGNYNEQFF

SEQ ID NO: 678791 - protein, 14 aa, Homo sapiens
  CDR3 for alpha chain variable domain of TCR clone 339396 (TRAV26-1, TRAJ38)
CIADNAGKNHKLIW

SEQ ID NO: 678792 - protein, 15 aa, Homo sapiens
  CDR3 for beta chain variable domain of TCR clone 339396 (TRBV4-1, TRBJ1-1)
CASSQEWGHYTEAFF

SEQ ID NO: 678793 - protein, 14 aa, Homo sapiens
  CDR3 for alpha chain variable domain of TCR clone 339397 (TRAV12-2, TRAJ13)
CAVKKTGGYQKVTF

SEQ ID NO: 678794 - protein, 15 aa, Homo sapiens
  CDR3 for beta chain variable domain of TCR clone 339397 (TRBV7-2, TRBJ2-7)
CASSTPGLTRGEQYF

SEQ ID NO: 678795 - protein, 14 aa, Homo sapiens
  CDR3 for alpha chain variable domain of TCR clone 339398 (TRAV16, TRAJ37)
CALDISGNTGKLIF

SEQ ID NO: 678796 - protein, 14 aa, Homo sapiens
  CDR3 for beta chain variable domain of TCR clone 339398 (TRBV7-6, TRBJ2-7)
CASSFRQGEDEQYF

SEQ ID NO: 678797 - protein, 19 aa, Homo sapiens
  CDR3 for alpha chain variable domain of TCR clone 339399 (TRAV17, TRAJ39)
CFLLLCYGRLGNAGNMLTF

SEQ ID NO: 678798 - protein, 16 aa, Homo sapiens
  CDR3 for beta chain variable domain of TCR clone 339399 (TRBV7-9, TRBJ1-2)
CASSLGFSSGEDGYSF

SEQ ID NO: 678799 - protein, 13 aa, Homo sapiens
  CDR3 for alpha chain variable domain of TCR clone 339400 (TRAV26-2, TRAJ43)
CILRAVNNNDMRF

SEQ ID NO: 678800 - protein, 19 aa, Homo sapiens
  CDR3 for beta chain variable domain of TCR clone 339400 (TRBV4-1, TRBJ2-5)
CASSQEGSGTSKRGETQYF

SEQ ID NO: 678801 - protein, 12 aa, Homo sapiens
  CDR3 for alpha chain variable domain of TCR clone 339401 (TRAV13-1, TRAJ27)
CAAHTKAGKSTF

SEQ ID NO: 678802 - protein, 14 aa, Homo sapiens
  CDR3 for beta chain variable domain of TCR clone 339401 (TRBV19, TRBJ2-2)
CASSGQGIAGELFF

SEQ ID NO: 678803 - protein, 14 aa, Homo sapiens
  CDR3 for alpha chain variable domain of TCR clone 339402 (TRAV35, TRAJ33)
CWPRGRDSNFQLIW

SEQ ID NO: 678804 - protein, 11 aa, Homo sapiens
  CDR3 for beta chain variable domain of TCR clone 339402 (TRBV10-3, TRBJ2-7)
CAISEGLEQYF

SEQ ID NO: 678805 - protein, 10 aa, Homo sapiens
  CDR3 for alpha chain variable domain of TCR clone 339403 (TRAV1-2, TRAJ31)
CVSEDARLML

SEQ ID NO: 678806 - protein, 14 aa, Homo sapiens
  CDR3 for beta chain variable domain of TCR clone 339403 (TRBV19, TRBJ2-1)
CASPTFVLSGEQFF

SEQ ID NO: 678807 - protein, 14 aa, Homo sapiens
  CDR3 for alpha chain variable domain of TCR clone 339404 (TRAV1-2, TRAJ8)
CAVREDTGVQKLVF

SEQ ID NO: 678808 - protein, 15 aa, Homo sapiens
  CDR3 for beta chain variable domain of TCR clone 339404 (TRBV15, TRBJ1-1)
CATSLQGGRNTEAFF

SEQ ID NO: 678809 - protein, 13 aa, Homo sapiens
  CDR3 for alpha chain variable domain of TCR clone 339405 (TRAV23/DV6, TRAJ58)
CAARGTSGSRLTF

SEQ ID NO: 678810 - protein, 14 aa, Homo sapiens
  CDR3 for beta chain variable domain of TCR clone 339405 (TRBV7-2, TRBJ2-7)
CASSPKTSFYEQYF

SEQ ID NO: 678811 - protein, 14 aa, Homo sapiens
  CDR3 for alpha chain variable domain of TCR clone 339406 (TRAV12-2, TRAJ13)
CAVKKTGGYQKVTF

SEQ ID NO: 678812 - protein, 13 aa, Homo sapiens
  CDR3 for beta chain variable domain of TCR clone 339406 (TRBV2, TRBJ2-3)
CASILAGGQGQYF

SEQ ID NO: 678813 - protein, 11 aa, Homo sapiens
  CDR3 for alpha chain variable domain of TCR clone 339407 (TRAV3, TRAJ17)
PRGAAGNKLTF

SEQ ID NO: 678814 - protein, 13 aa, Homo sapiens
  CDR3 for beta chain variable domain of TCR clone 339407 (TRBV7-9, TRBJ1-2)
CASSLKQNYGYTF

SEQ ID NO: 678815 - protein, 13 aa, Homo sapiens
  CDR3 for alpha chain variable domain of TCR clone 339408 (TRAV8-6, TRAJ5)
CAVLETGRRALTF

SEQ ID NO: 678816 - protein, 12 aa, Homo sapiens
  CDR3 for beta chain variable domain of TCR clone 339408 (TRBV7-9, TRBJ1-6)
CASSASESPLHF

SEQ ID NO: 678817 - protein, 13 aa, Homo sapiens
  CDR3 for alpha chain variable domain of TCR clone 339409 (TRAV21, TRAJ37)
CAVSSGNPGKLIF

SEQ ID NO: 678818 - protein, 13 aa, Homo sapiens
  CDR3 for beta chain variable domain of TCR clone 339409 (TRBV7-6, TRBJ2-3)
CASSLRSDNTQYF

SEQ ID NO: 678819 - protein, 15 aa, Homo sapiens
  CDR3 for alpha chain variable domain of TCR clone 339410 (TRAV13-1, TRAJ17)
RAASIERAAGNKLTF

SEQ ID NO: 678820 - protein, 12 aa, Homo sapiens
  CDR3 for beta chain variable domain of TCR clone 339410 (TRBV5-7, TRBJ1-1)
CASSLGRGKAFF

SEQ ID NO: 678821 - protein, 15 aa, Homo sapiens
  CDR3 for alpha chain variable domain of TCR clone 339411 (TRAV26-1, TRAJ44)
CIVRIGTGTASKLTF

SEQ ID NO: 678822 - protein, 14 aa, Homo sapiens
  CDR3 for beta chain variable domain of TCR clone 339411 (TRBV20-1, TRBJ2-2)
CSALYRGGTGELFF

SEQ ID NO: 678823 - protein, 12 aa, Homo sapiens
  CDR3 for alpha chain variable domain of TCR clone 339412 (TRAV35, TRAJ30)
CAGQLADDKSIF

SEQ ID NO: 678824 - protein, 17 aa, Homo sapiens
  CDR3 for beta chain variable domain of TCR clone 339412 (TRBV4-2, TRBJ2-5)
CASSPGRWRNFQETQYF

SEQ ID NO: 678825 - protein, 17 aa, Homo sapiens
  CDR3 for alpha chain variable domain of TCR clone 339413 (TRAV3, TRAJ6)
CAVRDGPRAGGSYIPTS

SEQ ID NO: 678826 - protein, 20 aa, Homo sapiens
  CDR3 for beta chain variable domain of TCR clone 339413 (TRBV28, TRBJ2-1)
CASTPIGRSPGLAGGNEQFF

SEQ ID NO: 678827 - protein, 14 aa, Homo sapiens
  CDR3 for alpha chain variable domain of TCR clone 339414 (TRAV26-1, TRAJ34)
CIVRVAYNTDKLIF

SEQ ID NO: 678828 - protein, 15 aa, Homo sapiens
  CDR3 for beta chain variable domain of TCR clone 339414 (TRBV20-1, TRBJ2-1)
CSARVPAAYFYEQYF

SEQ ID NO: 678829 - protein, 18 aa, Homo sapiens
  CDR3 for alpha chain variable domain of TCR clone 339415 (TRAV13-1, TRAJ52)
CAAKNPNAGGTSYVKLTF

SEQ ID NO: 678830 - protein, 14 aa, Homo sapiens
  CDR3 for beta chain variable domain of TCR clone 339415 (TRBV7-9, TRBJ2-1)
CASSLASGSNEQFF

SEQ ID NO: 678831 - protein, 11 aa, Homo sapiens
  CDR3 for alpha chain variable domain of TCR clone 339416 (TRAV23/DV6, TRAJ4)
APAGGYNKLIF

SEQ ID NO: 678832 - protein, 17 aa, Homo sapiens
  CDR3 for beta chain variable domain of TCR clone 339416 (TRBV20-1, TRBJ2-1)
CSASSSGLAGSYNEQFF

SEQ ID NO: 678833 - protein, 13 aa, Homo sapiens
  CDR3 for alpha chain variable domain of TCR clone 339417 (TRAV8-3, TRAJ36)
CAVGATGANNLFF

SEQ ID NO: 678834 - protein, 14 aa, Homo sapiens
  CDR3 for beta chain variable domain of TCR clone 339417 (TRBV7-2, TRBJ1-2)
CASSQTGSTYGYTF

SEQ ID NO: 678835 - protein, 16 aa, Homo sapiens
  CDR3 for alpha chain variable domain of TCR clone 339418 (TRAV12-1, TRAJ45)
CVVIRYSGGGADGLTF

SEQ ID NO: 678836 - protein, 12 aa, Homo sapiens
  CDR3 for beta chain variable domain of TCR clone 339418 (TRBV7-9, TRBJ2-7)
CASSFGSYEQYF

SEQ ID NO: 678837 - protein, 13 aa, Homo sapiens
  CDR3 for alpha chain variable domain of TCR clone 339419 (TRAV20, TRAJ21)
CAVEGYNFNKFYF

SEQ ID NO: 678838 - protein, 14 aa, Homo sapiens
  CDR3 for beta chain variable domain of TCR clone 339419 (TRBV12-5, TRBJ2-5)
CASGSRTHQESQYF

SEQ ID NO: 678839 - protein, 13 aa, Homo sapiens
  CDR3 for alpha chain variable domain of TCR clone 339420 (TRAV35, TRAJ36)
CAGPRIGANNLFF

SEQ ID NO: 678840 - protein, 17 aa, Homo sapiens
  CDR3 for beta chain variable domain of TCR clone 339420 (TRBV7-8, TRBJ2-6)
CASSAGTGGAGANVLTF

SEQ ID NO: 678841 - protein, 14 aa, Homo sapiens
  CDR3 for alpha chain variable domain of TCR clone 339421 (TRAV12-2, TRAJ24)
CAVTPADSWGKLRF

SEQ ID NO: 678842 - protein, 15 aa, Homo sapiens
  CDR3 for beta chain variable domain of TCR clone 339421 (TRBV15, TRBJ2-1)
CATSRPGQGLHEQFF

SEQ ID NO: 678843 - protein, 11 aa, Homo sapiens
  CDR3 for alpha chain variable domain of TCR clone 339422 (TRAV26-1, TRAJ37)
CIVRVGRKLIF

SEQ ID NO: 678844 - protein, 15 aa, Homo sapiens
  CDR3 for beta chain variable domain of TCR clone 339422 (TRBV20-1, TRBJ2-3)
CSATGTSGFTDTQYF

SEQ ID NO: 678845 - protein, 16 aa, Homo sapiens
  CDR3 for alpha chain variable domain of TCR clone 339423 (TRAV3, TRAJ10)
CAVRDMRAGGGNKRTF

SEQ ID NO: 678846 - protein, 14 aa, Homo sapiens
  CDR3 for beta chain variable domain of TCR clone 339423 (TRBV25-1, TRBJ1-1)
CASTHLGGNTEAFF

SEQ ID NO: 678847 - protein, 17 aa, Homo sapiens
  CDR3 for alpha chain variable domain of TCR clone 339424 (TRAV27, TRAJ26)
CAGARAPLDNYGRNFVF

SEQ ID NO: 678848 - protein, 15 aa, Homo sapiens
  CDR3 for beta chain variable domain of TCR clone 339424 (TRBV11-2, TRBJ2-5)
CASSPRSGGLETQYF

SEQ ID NO: 678849 - protein, 13 aa, Homo sapiens
  CDR3 for alpha chain variable domain of TCR clone 339425 (TRAV8-3, TRAJ48)
CCGCNFGHEKLTF

SEQ ID NO: 678850 - protein, 12 aa, Homo sapiens
  CDR3 for beta chain variable domain of TCR clone 339425 (TRBV7-2, TRBJ2-5)
CASSQYQETQYF

SEQ ID NO: 678851 - protein, 14 aa, Homo sapiens
  CDR3 for alpha chain variable domain of TCR clone 339426 (TRAV26-1, TRAJ40)
CIVRVARGTYKYIF

SEQ ID NO: 678852 - protein, 14 aa, Homo sapiens
  CDR3 for beta chain variable domain of TCR clone 339426 (TRBV25-1, TRBJ1-1)
CGSTHLGGNTEAFF

SEQ ID NO: 678853 - protein, 14 aa, Homo sapiens
  CDR3 for alpha chain variable domain of TCR clone 339427 (TRAV12-1, TRAJ17)
CVGNYKAAGNKLTF

SEQ ID NO: 678854 - protein, 17 aa, Homo sapiens
  CDR3 for beta chain variable domain of TCR clone 339427 (TRBV20-1, TRBJ2-1)
CSASFSGLAGSYNEQFF

SEQ ID NO: 678855 - protein, 23 aa, Homo sapiens
  CDR3 for alpha chain variable domain of TCR clone 339428 (TRAV26-1, TRAJ38)
CIADNAGNNHIQNPDPAVYQLRD

SEQ ID NO: 678856 - protein, 18 aa, Homo sapiens
  CDR3 for beta chain variable domain of TCR clone 339428 (TRBV20-1, TRBJ2-6)
CSAETTPTHGSGANVLTF

SEQ ID NO: 678857 - protein, 15 aa, Homo sapiens
  CDR3 for alpha chain variable domain of TCR clone 339429 (TRAV8-6, TRAJ11)
CAVNFMNSGYSTLTF

SEQ ID NO: 678858 - protein, 17 aa, Homo sapiens
  CDR3 for beta chain variable domain of TCR clone 339429 (TRBV6-1, TRBJ2-3)
CASSEALRLISTDTQYF

SEQ ID NO: 678859 - protein, 14 aa, Homo sapiens
  CDR3 for alpha chain variable domain of TCR clone 339430 (TRAV2, TRAJ9)
CAVEDRSGGFKTIF

SEQ ID NO: 678860 - protein, 13 aa, Homo sapiens
  CDR3 for beta chain variable domain of TCR clone 339430 (TRBV7-2, TRBJ1-5)
CASSLAPDQPQHF

SEQ ID NO: 678861 - protein, 14 aa, Homo sapiens
  CDR3 for alpha chain variable domain of TCR clone 339431 (TRAV23/DV6, TRAJ21)
CAAYKSGPRDQFYF

SEQ ID NO: 678862 - protein, 15 aa, Homo sapiens
  CDR3 for beta chain variable domain of TCR clone 339431 (TRBV5-4, TRBJ2-2)
CASSLTSRGTGELFF

SEQ ID NO: 678863 - protein, 20 aa, Homo sapiens
  CDR3 for alpha chain variable domain of TCR clone 339432 (TRAV8-3, TRAJ44)
LSTSVLWVRLYTGTASKLTF

SEQ ID NO: 678864 - protein, 16 aa, Homo sapiens
  CDR3 for beta chain variable domain of TCR clone 339432 (TRBV6-4, TRBJ1-2)
CASSEAIGDPNYGYTF

SEQ ID NO: 678865 - protein, 18 aa, Homo sapiens
  CDR3 for alpha chain variable domain of TCR clone 339433 (TRAV3, TRAJ32)
CAVRDIRGYGGATKKIIF

SEQ ID NO: 678866 - protein, 15 aa, Homo sapiens
  CDR3 for beta chain variable domain of TCR clone 339433 (TRBV12-4, TRBJ2-2)
CASSLGVRHTGELFF

SEQ ID NO: 678867 - protein, 15 aa, Homo sapiens
  CDR3 for alpha chain variable domain of TCR clone 339434 (TRAV21, TRAJ53)
CATFNSGGSNYKLTF

SEQ ID NO: 678868 - protein, 13 aa, Homo sapiens
  CDR3 for beta chain variable domain of TCR clone 339434 (TRBV7-9, TRBJ2-3)
CASSPGSTDTQYF

SEQ ID NO: 678869 - protein, 13 aa, Homo sapiens
  CDR3 for alpha chain variable domain of TCR clone 339435 (TRAV30, TRAJ39)
CGTEKNAGNMLTF

SEQ ID NO: 678870 - protein, 14 aa, Homo sapiens
  CDR3 for beta chain variable domain of TCR clone 339435 (TRBV19, TRBJ1-5)
CASRAPDSFLSQHF

SEQ ID NO: 678871 - protein, 14 aa, Homo sapiens
  CDR3 for alpha chain variable domain of TCR clone 339436 (TRAV4, TRAJ9)
CLVGSGTGGFQTIF

SEQ ID NO: 678872 - protein, 15 aa, Homo sapiens
  CDR3 for beta chain variable domain of TCR clone 339436 (TRBV7-2, TRBJ2-1)
CASSVASGRVNEQFF

SEQ ID NO: 678873 - protein, 12 aa, Homo sapiens
  CDR3 for alpha chain variable domain of TCR clone 339437 (TRAV16, TRAJ10)
CSRTGGGNKLTF

SEQ ID NO: 678874 - protein, 15 aa, Homo sapiens
  CDR3 for beta chain variable domain of TCR clone 339437 (TRBV19, TRBJ2-1)
CASSIQATSYNEQFF

SEQ ID NO: 678875 - protein, 12 aa, Homo sapiens
  CDR3 for alpha chain variable domain of TCR clone 339438 (TRAV13-1, TRAJ48)
CAANFGNENLTF

SEQ ID NO: 678876 - protein, 20 aa, Homo sapiens
  CDR3 for beta chain variable domain of TCR clone 339438 (TRBV3-1, TRBJ2-6)
CASSPRPGLVGGAGANVLTF

SEQ ID NO: 678877 - protein, 18 aa, Homo sapiens
  CDR3 for alpha chain variable domain of TCR clone 339439 (TRAV1-2, TRAJ18)
CAVRDMGDRGSTLGRLYF

SEQ ID NO: 678878 - protein, 13 aa, Homo sapiens
  CDR3 for beta chain variable domain of TCR clone 339439 (TRBV29-1, TRBJ1-2)
EANRDIANYGYTF

SEQ ID NO: 678879 - protein, 14 aa, Homo sapiens
  CDR3 for alpha chain variable domain of TCR clone 339440 (TRAV8-3, TRAJ44)
CAVEDTGTASKLTF

SEQ ID NO: 678880 - protein, 16 aa, Homo sapiens
  CDR3 for beta chain variable domain of TCR clone 339440 (TRBV7-3, TRBJ2-2)
CASSLKRGTLSGELFF

SEQ ID NO: 678881 - protein, 11 aa, Homo sapiens
  CDR3 for alpha chain variable domain of TCR clone 339441 (TRAV1-2, TRAJ11)
CAVRGYSTLTF

SEQ ID NO: 678882 - protein, 14 aa, Homo sapiens
  CDR3 for beta chain variable domain of TCR clone 339441 (TRBV11-2, TRBJ2-7)
CASSLGAGAYEQYF

SEQ ID NO: 678883 - protein, 11 aa, Homo sapiens
  CDR3 for alpha chain variable domain of TCR clone 339442 (TRAV16, TRAJ54)
CALSPSGSPEA

SEQ ID NO: 678884 - protein, 14 aa, Homo sapiens
  CDR3 for beta chain variable domain of TCR clone 339442 (TRBV7-9, TRBJ2-5)
CASSLDTAQETQYF

SEQ ID NO: 678885 - protein, 15 aa, Homo sapiens
  CDR3 for alpha chain variable domain of TCR clone 339443 (TRAV12-1, TRAJ45)
CVVLSGGGGADGLTS

SEQ ID NO: 678886 - protein, 16 aa, Homo sapiens
  CDR3 for beta chain variable domain of TCR clone 339443 (TRBV6-5, TRBJ2-1)
CASSETLAGHYNEQFF

SEQ ID NO: 678887 - protein, 12 aa, Homo sapiens
  CDR3 for alpha chain variable domain of TCR clone 339444 (TRAV8-3, TRAJ41)
CDVALSGYALNF

SEQ ID NO: 678888 - protein, 18 aa, Homo sapiens
  CDR3 for beta chain variable domain of TCR clone 339444 (TRBV20-1, TRBJ2-6)
CSAETTPTHGSGANVLTF

SEQ ID NO: 678889 - protein, 15 aa, Homo sapiens
  CDR3 for alpha chain variable domain of TCR clone 339445 (TRAV4, TRAJ39)
CLVGPNNNAGNMLTF

SEQ ID NO: 678890 - protein, 14 aa, Homo sapiens
  CDR3 for beta chain variable domain of TCR clone 339445 (TRBV7-9, TRBJ2-5)
CASSLVGGEETQYF

SEQ ID NO: 678891 - protein, 17 aa, Homo sapiens
  CDR3 for alpha chain variable domain of TCR clone 339446 (TRAV3, TRAJ6)
CAVRDGPRAGGSYIPTF

SEQ ID NO: 678892 - protein, 14 aa, Homo sapiens
  CDR3 for beta chain variable domain of TCR clone 339446 (TRBV28, TRBJ1-2)
CASSFRTRVHGYTF

SEQ ID NO: 678893 - protein, 13 aa, Homo sapiens
  CDR3 for alpha chain variable domain of TCR clone 339447 (TRAV8-3, TRAJ28)
CAVGAVGSYQLTF

SEQ ID NO: 678894 - protein, 15 aa, Homo sapiens
  CDR3 for beta chain variable domain of TCR clone 339447 (TRBV7-9, TRBJ1-5)
CASSQGHQPNQPQDF

SEQ ID NO: 678895 - protein, 13 aa, Homo sapiens
  CDR3 for alpha chain variable domain of TCR clone 339448 (TRAV27, TRAJ56)
CAGKPGANSKLTF

SEQ ID NO: 678896 - protein, 15 aa, Homo sapiens
  CDR3 for beta chain variable domain of TCR clone 339448 (TRBV6-1, TRBJ2-3)
CASSERWDSTYTQYF

SEQ ID NO: 678897 - protein, 13 aa, Homo sapiens
  CDR3 for alpha chain variable domain of TCR clone 339449 (TRAV27, TRAJ56)
CAGKPGANSKLTC

SEQ ID NO: 678898 - protein, 15 aa, Homo sapiens
  CDR3 for beta chain variable domain of TCR clone 339449 (TRBV6-1, TRBJ2-3)
CASSERWDSTDTQYF

SEQ ID NO: 678899 - protein, 12 aa, Homo sapiens
  CDR3 for alpha chain variable domain of TCR clone 339450 (TRAV12-1, TRAJ34)
CVVAGATDKFIF

SEQ ID NO: 678900 - protein, 12 aa, Homo sapiens
  CDR3 for beta chain variable domain of TCR clone 339450 (TRBV7-9, TRBJ1-1)
CASSLVRGEAFF

SEQ ID NO: 678901 - protein, 18 aa, Homo sapiens
  CDR3 for alpha chain variable domain of TCR clone 339451 (TRAV8-4, TRAJ52)
CSVTRANAGGTSYGKLPF

SEQ ID NO: 678902 - protein, 12 aa, Homo sapiens
  CDR3 for beta chain variable domain of TCR clone 339451 (TRBV11-2, TRBJ2-2)
CASSLPTGELFF

SEQ ID NO: 678903 - protein, 18 aa, Homo sapiens
  CDR3 for alpha chain variable domain of TCR clone 339452 (TRAV21, TRAJ52)
CAVRPSPAGGTSYGKLTF

SEQ ID NO: 678904 - protein, 14 aa, Homo sapiens
  CDR3 for beta chain variable domain of TCR clone 339452 (TRBV4-1, TRBJ2-2)
CASSQALNTGELFF

SEQ ID NO: 678905 - protein, 14 aa, Homo sapiens
  CDR3 for alpha chain variable domain of TCR clone 339453 (TRAV23/DV6, TRAJ27)
CAASRDTNAGKSTF

SEQ ID NO: 678906 - protein, 16 aa, Homo sapiens
  CDR3 for beta chain variable domain of TCR clone 339453 (TRBV7-3, TRBJ2-1)
CASSLEGYRSYNEQFF

SEQ ID NO: 678907 - protein, 12 aa, Homo sapiens
  CDR3 for alpha chain variable domain of TCR clone 339454 (TRAV13-1, TRAJ21)
CAAKEGFNKFYF

SEQ ID NO: 678908 - protein, 16 aa, Homo sapiens
  CDR3 for beta chain variable domain of TCR clone 339454 (TRBV5-1, TRBJ2-1)
CASSIRSGGSYNEQFF

SEQ ID NO: 678909 - protein, 15 aa, Homo sapiens
  CDR3 for alpha chain variable domain of TCR clone 339455 (TRAV13-1, TRAJ52)
CALRTGVTSYGKLTF

SEQ ID NO: 678910 - protein, 14 aa, Homo sapiens
  CDR3 for beta chain variable domain of TCR clone 339455 (TRBV20-1, TRBJ2-5)
CSASDSGSGETQYF

SEQ ID NO: 678911 - protein, 14 aa, Homo sapiens
  CDR3 for alpha chain variable domain of TCR clone 339456 (TRAV12-2, TRAJ36)
CAVKISTGANSLFF

SEQ ID NO: 678912 - protein, 14 aa, Homo sapiens
  CDR3 for beta chain variable domain of TCR clone 339456 (TRBV25-1, TRBJ1-2)
CASSDTTGVVGYTF

SEQ ID NO: 678913 - protein, 12 aa, Homo sapiens
  CDR3 for alpha chain variable domain of TCR clone 339457 (TRAV3, TRAJ31)
CAVIDGNARLMF

SEQ ID NO: 678914 - protein, 18 aa, Homo sapiens
  CDR3 for beta chain variable domain of TCR clone 339457 (TRBV7-2, TRBJ2-3)
CASSLKREGSGITDTQYF

SEQ ID NO: 678915 - protein, 14 aa, Homo sapiens
  CDR3 for alpha chain variable domain of TCR clone 339458 (TRAV13-1, TRAJ6)
CAASITGGSYILTF

SEQ ID NO: 678916 - protein, 14 aa, Homo sapiens
  CDR3 for beta chain variable domain of TCR clone 339458 (TRBV6-3, TRBJ2-1)
CASLHSAYYNEQFF

SEQ ID NO: 678917 - protein, 15 aa, Homo sapiens
  CDR3 for alpha chain variable domain of TCR clone 339459 (TRAV3, TRAJ22)
CAVRDRGGSERQLTF

SEQ ID NO: 678918 - protein, 15 aa, Homo sapiens
  CDR3 for beta chain variable domain of TCR clone 339459 (TRBV27, TRBJ2-1)
CASSNGGGSSNEQFF

SEQ ID NO: 678919 - protein, 18 aa, Homo sapiens
  CDR3 for alpha chain variable domain of TCR clone 339460 (TRAV26-1, TRAJ23)
CFVRVGLEVWNQGGKLIF

SEQ ID NO: 678920 - protein, 16 aa, Homo sapiens
  CDR3 for beta chain variable domain of TCR clone 339460 (TRBV12-4, TRBJ2-5)
CASSFFVRGRQETQYF

SEQ ID NO: 678921 - protein, 12 aa, Homo sapiens
  CDR3 for alpha chain variable domain of TCR clone 339461 (TRAV35, TRAJ53)
CAGLGSNYKLTF

SEQ ID NO: 678922 - protein, 15 aa, Homo sapiens
  CDR3 for beta chain variable domain of TCR clone 339461 (TRBV13, TRBJ2-5)
CASSLRPGRGETQYV

SEQ ID NO: 678923 - protein, 15 aa, Homo sapiens
  CDR3 for alpha chain variable domain of TCR clone 339462 (TRAV38-1, TRAJ37)
CAIIFGSGNTGKLIF

SEQ ID NO: 678924 - protein, 12 aa, Homo sapiens
  CDR3 for beta chain variable domain of TCR clone 339462 (TRBV7-9, TRBJ2-7)
CASSLEGYEQYF

SEQ ID NO: 678925 - protein, 16 aa, Homo sapiens
  CDR3 for alpha chain variable domain of TCR clone 339463 (TRAV30, TRAJ24)
CGTEIVDADSWGKFKY

SEQ ID NO: 678926 - protein, 14 aa, Homo sapiens
  CDR3 for beta chain variable domain of TCR clone 339463 (TRBV12-5, TRBJ2-5)
CASGSRTHQETQYF

SEQ ID NO: 678927 - protein, 10 aa, Homo sapiens
  CDR3 for alpha chain variable domain of TCR clone 339464 (TRAV17, TRAJ36)
CATVAGNLFF

SEQ ID NO: 678928 - protein, 15 aa, Homo sapiens
  CDR3 for beta chain variable domain of TCR clone 339464 (TRBV12-4, TRBJ2-5)
CASSPPTGLQETQYF

SEQ ID NO: 678929 - protein, 12 aa, Homo sapiens
  CDR3 for alpha chain variable domain of TCR clone 339465 (TRAV12-3, TRAJ20)
CAMVRGDYKLSF

SEQ ID NO: 678930 - protein, 15 aa, Homo sapiens
  CDR3 for beta chain variable domain of TCR clone 339465 (TRBV7-2, TRBJ2-2)
CASSTRTGYTGELFF

SEQ ID NO: 678931 - protein, 19 aa, Homo sapiens
  CDR3 for alpha chain variable domain of TCR clone 339466 (TRAV26-1, TRAJ29)
CCVLLHRQSRGIRKHTYVF

SEQ ID NO: 678932 - protein, 15 aa, Homo sapiens
  CDR3 for beta chain variable domain of TCR clone 339466 (TRBV7-9, TRBJ1-5)
CASSQGHQPNQPQHF

SEQ ID NO: 678933 - protein, 15 aa, Homo sapiens
  CDR3 for alpha chain variable domain of TCR clone 339467 (TRAV21, TRAJ24)
CAARSSTDSWGKLLF

SEQ ID NO: 678934 - protein, 13 aa, Homo sapiens
  CDR3 for beta chain variable domain of TCR clone 339467 (TRBV11-2, TRBJ2-5)
CASSSTGEETQYF

SEQ ID NO: 678935 - protein, 14 aa, Homo sapiens
  CDR3 for alpha chain variable domain of TCR clone 339468 (TRAV30, TRAJ33)
CGTVAPRSNYQLIW

SEQ ID NO: 678936 - protein, 16 aa, Homo sapiens
  CDR3 for beta chain variable domain of TCR clone 339468 (TRBV3-1, TRBJ2-5)
CASSPGQINGFGTQYF

SEQ ID NO: 678937 - protein, 11 aa, Homo sapiens
  CDR3 for alpha chain variable domain of TCR clone 339469 (TRAV12-2, TRAJ21)
CAVEGFNKFYF

SEQ ID NO: 678938 - protein, 15 aa, Homo sapiens
  CDR3 for beta chain variable domain of TCR clone 339469 (TRBV7-8, TRBJ2-7)
CASSLVQGPSGEQYF

SEQ ID NO: 678939 - protein, 14 aa, Homo sapiens
  CDR3 for alpha chain variable domain of TCR clone 339470 (TRAV9-2, TRAJ39)
CALYIYNAGNMLTF

SEQ ID NO: 678940 - protein, 13 aa, Homo sapiens
  CDR3 for beta chain variable domain of TCR clone 339470 (TRBV12-4, TRBJ2-1)
CASSHYTDNEQFF

SEQ ID NO: 678941 - protein, 15 aa, Homo sapiens
  CDR3 for alpha chain variable domain of TCR clone 339471 (TRAV12-1, TRAJ45)
CVVLSGGGGADGLTF

SEQ ID NO: 678942 - protein, 12 aa, Homo sapiens
  CDR3 for beta chain variable domain of TCR clone 339471 (TRBV12-5, TRBJ2-5)
CAGGQGVETQYF

SEQ ID NO: 678943 - protein, 13 aa, Homo sapiens
  CDR3 for alpha chain variable domain of TCR clone 339472 (TRAV2, TRAJ38)
CAYGAGNNRKLIW

SEQ ID NO: 678944 - protein, 13 aa, Homo sapiens
  CDR3 for beta chain variable domain of TCR clone 339472 (TRBV6-1, TRBJ1-6)
CASSSSWDSTLHF

SEQ ID NO: 678945 - protein, 12 aa, Homo sapiens
  CDR3 for alpha chain variable domain of TCR clone 339473 (TRAV12-2, TRAJ4)
GWPEGGYNKLIF

SEQ ID NO: 678946 - protein, 16 aa, Homo sapiens
  CDR3 for beta chain variable domain of TCR clone 339473 (TRBV6-1, TRBJ2-5)
CASSETLDRGAETQYF

SEQ ID NO: 678947 - protein, 14 aa, Homo sapiens
  CDR3 for alpha chain variable domain of TCR clone 339474 (TRAV1-2, TRAJ16)
CGVNRFSDGQKLLF

SEQ ID NO: 678948 - protein, 14 aa, Homo sapiens
  CDR3 for beta chain variable domain of TCR clone 339474 (TRBV7-2, TRBJ2-7)
CASSPKTSFYEQYF

SEQ ID NO: 678949 - protein, 15 aa, Homo sapiens
  CDR3 for alpha chain variable domain of TCR clone 339475 (TRAV21, TRAJ24)
CAARSSTDSWGKLQF

SEQ ID NO: 678950 - protein, 14 aa, Homo sapiens
  CDR3 for beta chain variable domain of TCR clone 339475 (TRBV11-2, TRBJ2-5)
CASSRTGGMETQYF

SEQ ID NO: 678951 - protein, 13 aa, Homo sapiens
  CDR3 for alpha chain variable domain of TCR clone 339476 (TRAV13-2, TRAJ48)
CAEMDFGNEKLTF

SEQ ID NO: 678952 - protein, 13 aa, Homo sapiens
  CDR3 for beta chain variable domain of TCR clone 339476 (TRBV4-1, TRBJ2-7)
CASSQGQAYEQYF

SEQ ID NO: 678953 - protein, 14 aa, Homo sapiens
  CDR3 for alpha chain variable domain of TCR clone 339477 (TRAV8-1, TRAJ34)
CAVNPSYNTDKLIF

SEQ ID NO: 678954 - protein, 16 aa, Homo sapiens
  CDR3 for beta chain variable domain of TCR clone 339477 (TRBV7-3, TRBJ2-2)
CASSLKRGTLSGELFF

SEQ ID NO: 678955 - protein, 20 aa, Homo sapiens
  CDR3 for alpha chain variable domain of TCR clone 339478 (TRAV4, TRAJ29)
CCVLLPRVCVPFSGNTPLVF

SEQ ID NO: 678956 - protein, 17 aa, Homo sapiens
  CDR3 for beta chain variable domain of TCR clone 339478 (TRBV25-1, TRBJ2-7)
CASSDARVVFSSYEQYF

SEQ ID NO: 678957 - protein, 12 aa, Homo sapiens
  CDR3 for alpha chain variable domain of TCR clone 339479 (TRAV2, TRAJ31)
CAAEDNNARLMF

SEQ ID NO: 678958 - protein, 14 aa, Homo sapiens
  CDR3 for beta chain variable domain of TCR clone 339479 (TRBV28, TRBJ1-5)
CASSRTGLNQPQHF

SEQ ID NO: 678959 - protein, 11 aa, Homo sapiens
  CDR3 for alpha chain variable domain of TCR clone 339480 (TRAV3, TRAJ21)
CAVGNFNKFYF

SEQ ID NO: 678960 - protein, 15 aa, Homo sapiens
  CDR3 for beta chain variable domain of TCR clone 339480 (TRBV25-1, TRBJ1-4)
CASSPGDTPNEKLFF

SEQ ID NO: 678961 - protein, 15 aa, Homo sapiens
  CDR3 for alpha chain variable domain of TCR clone 339481 (TRAV12-1, TRAJ11)
CVVNYGKVRIQHPHL

SEQ ID NO: 678962 - protein, 14 aa, Homo sapiens
  CDR3 for beta chain variable domain of TCR clone 339481 (TRBV2, TRBJ1-5)
CASSENRGGQPQHF

SEQ ID NO: 678963 - protein, 15 aa, Homo sapiens
  CDR3 for alpha chain variable domain of TCR clone 339482 (TRAV8-4, TRAJ6)
CAGSAPSGGSYIPTS

SEQ ID NO: 678964 - protein, 15 aa, Homo sapiens
  CDR3 for beta chain variable domain of TCR clone 339482 (TRBV7-3, TRBJ2-2)
CASKANGANTGELFF

SEQ ID NO: 678965 - protein, 20 aa, Homo sapiens
  CDR3 for alpha chain variable domain of TCR clone 339483 (TRAV12-3, TRAJ41)
SLFIRDSQPSDSATPEALNF

SEQ ID NO: 678966 - protein, 15 aa, Homo sapiens
  CDR3 for beta chain variable domain of TCR clone 339483 (TRBV12-4, TRBJ2-5)
CASSPPTGLQETQYF

SEQ ID NO: 678967 - protein, 18 aa, Homo sapiens
  CDR3 for alpha chain variable domain of TCR clone 339484 (TRAV21, TRAJ52)
CAVRPSPTGGTSYGKLTF

SEQ ID NO: 678968 - protein, 16 aa, Homo sapiens
  CDR3 for beta chain variable domain of TCR clone 339484 (TRBV7-3, TRBJ2-1)
CASSLEGYRSYNEQFF

SEQ ID NO: 678969 - protein, 16 aa, Homo sapiens
  CDR3 for alpha chain variable domain of TCR clone 339485 (TRAV1-2, TRAJ10)
CAVRGVLTGGGNKLTF

SEQ ID NO: 678970 - protein, 15 aa, Homo sapiens
  CDR3 for beta chain variable domain of TCR clone 339485 (TRBV19, TRBJ1-6)
CASSTQGAVGSPLHF

SEQ ID NO: 678971 - protein, 15 aa, Homo sapiens
  CDR3 for alpha chain variable domain of TCR clone 339486 (TRAV21, TRAJ32)
CAVRRYGGATNKLIF

SEQ ID NO: 678972 - protein, 15 aa, Homo sapiens
  CDR3 for beta chain variable domain of TCR clone 339486 (TRBV7-9, TRBJ2-7)
CASSPGGGLTYEQYF

SEQ ID NO: 678973 - protein, 12 aa, Homo sapiens
  CDR3 for alpha chain variable domain of TCR clone 339487 (TRAV8-3, TRAJ26)
CAGYNYGQNFVF

SEQ ID NO: 678974 - protein, 18 aa, Homo sapiens
  CDR3 for beta chain variable domain of TCR clone 339487 (TRBV12-4, TRBJ2-2)
CASSLVAGTRGRTGELFF

SEQ ID NO: 678975 - protein, 14 aa, Homo sapiens
  CDR3 for alpha chain variable domain of TCR clone 339488 (TRAV14/DV4, TRAJ54)
CAMREAPGAQKLVF

SEQ ID NO: 678976 - protein, 15 aa, Homo sapiens
  CDR3 for beta chain variable domain of TCR clone 339488 (TRBV5-1, TRBJ2-7)
CASSLNWGPAREQYF

SEQ ID NO: 678977 - protein, 15 aa, Homo sapiens
  CDR3 for alpha chain variable domain of TCR clone 339489 (TRAV26-1, TRAJ22)
CIVRVSFWFCQATDL

SEQ ID NO: 678978 - protein, 13 aa, Homo sapiens
  CDR3 for beta chain variable domain of TCR clone 339489 (TRBV7-9, TRBJ1-2)
CASSLKQNYGYSF

SEQ ID NO: 678979 - protein, 14 aa, Homo sapiens
  CDR3 for alpha chain variable domain of TCR clone 339490 (TRAV1-2, TRAJ16)
CAVNRFSDGQKLLF

SEQ ID NO: 678980 - protein, 15 aa, Homo sapiens
  CDR3 for beta chain variable domain of TCR clone 339490 (TRBV6-3, TRBJ2-1)
CASSYASDSYNEQFF

SEQ ID NO: 678981 - protein, 14 aa, Homo sapiens
  CDR3 for alpha chain variable domain of TCR clone 339491 (TRAV12-2, TRAJ40)
CAVKIPSGTYKYIF

SEQ ID NO: 678982 - protein, 13 aa, Homo sapiens
  CDR3 for beta chain variable domain of TCR clone 339491 (TRBV12-4, TRBJ2-5)
CASSFNRGETQYF

SEQ ID NO: 678983 - protein, 10 aa, Homo sapiens
  CDR3 for alpha chain variable domain of TCR clone 339492 (TRAV1-2, TRAJ23)
CAGQGGKLIF

SEQ ID NO: 678984 - protein, 12 aa, Homo sapiens
  CDR3 for beta chain variable domain of TCR clone 339492 (TRBV7-9, TRBJ2-7)
CASSIKREEQYF

SEQ ID NO: 678985 - protein, 13 aa, Homo sapiens
  CDR3 for alpha chain variable domain of TCR clone 339493 (TRAV17, TRAJ40)
CAGALGGTYKYIF

SEQ ID NO: 678986 - protein, 16 aa, Homo sapiens
  CDR3 for beta chain variable domain of TCR clone 339493 (TRBV7-2, TRBJ1-4)
CASSLAPGRRDEKLVF

SEQ ID NO: 678987 - protein, 13 aa, Homo sapiens
  CDR3 for alpha chain variable domain of TCR clone 339494 (TRAV3, TRAJ31)
CAVREGNNAILMF

SEQ ID NO: 678988 - protein, 15 aa, Homo sapiens
  CDR3 for beta chain variable domain of TCR clone 339494 (TRBV6-1, TRBJ1-1)
CASRTPGQLNTEAFF

SEQ ID NO: 678989 - protein, 12 aa, Homo sapiens
  CDR3 for alpha chain variable domain of TCR clone 339495 (TRAV12-3, TRAJ17)
CAMTLTGDKLTF

SEQ ID NO: 678990 - protein, 15 aa, Homo sapiens
  CDR3 for beta chain variable domain of TCR clone 339495 (TRBV20-1, TRBJ2-7)
CSARDWVSGMDEQYF

SEQ ID NO: 678991 - protein, 12 aa, Homo sapiens
  CDR3 for alpha chain variable domain of TCR clone 339496 (TRAV20, TRAJ49)
CSLSNTGNQFYF

SEQ ID NO: 678992 - protein, 13 aa, Homo sapiens
  CDR3 for beta chain variable domain of TCR clone 339496 (TRBV7-9, TRBJ1-2)
CASSLKQNYGYTF

SEQ ID NO: 678993 - protein, 12 aa, Homo sapiens
  CDR3 for alpha chain variable domain of TCR clone 339497 (TRAV13-1, TRAJ27)
CAAHTNAGKSTF

SEQ ID NO: 678994 - protein, 14 aa, Homo sapiens
  CDR3 for beta chain variable domain of TCR clone 339497 (TRBV19, TRBJ2-2)
CASSGQGNAGELFF

SEQ ID NO: 678995 - protein, 13 aa, Homo sapiens
  CDR3 for alpha chain variable domain of TCR clone 339498 (TRAV3, TRAJ30)
CAVRDRGDDKIIF

SEQ ID NO: 678996 - protein, 16 aa, Homo sapiens
  CDR3 for beta chain variable domain of TCR clone 339498 (TRBV7-3, TRBJ2-2)
CASSLKRETLSGELFF

SEQ ID NO: 678997 - protein, 15 aa, Homo sapiens
  CDR3 for alpha chain variable domain of TCR clone 339499 (TRAV25, TRAJ52)
CAGTSGGTSYGKLTF

SEQ ID NO: 678998 - protein, 13 aa, Homo sapiens
  CDR3 for beta chain variable domain of TCR clone 339499 (TRBV12-4, TRBJ1-1)
CASSPGTGFEAFF

SEQ ID NO: 678999 - protein, 18 aa, Homo sapiens
  CDR3 for alpha chain variable domain of TCR clone 339500 (TRAV8-4, TRAJ52)
CAVTRANAGGTSYGKLTF

SEQ ID NO: 679000 - protein, 15 aa, Homo sapiens
  CDR3 for beta chain variable domain of TCR clone 339500 (TRBV20-1, TRBJ1-1)
CSARGGGTLKLSLDE

SEQ ID NO: 679001 - protein, 16 aa, Homo sapiens
  CDR3 for alpha chain variable domain of TCR clone 339501 (TRAV30, TRAJ24)
CGTEIVDADSWGKVQF

SEQ ID NO: 679002 - protein, 16 aa, Homo sapiens
  CDR3 for beta chain variable domain of TCR clone 339501 (TRBV6-1, TRBJ2-1)
CASILRQGSSYNEQFF

SEQ ID NO: 679003 - protein, 14 aa, Homo sapiens
  CDR3 for alpha chain variable domain of TCR clone 339502 (TRAV14/DV4, TRAJ54)
CAMREAPGAQKLVF

SEQ ID NO: 679004 - protein, 16 aa, Homo sapiens
  CDR3 for beta chain variable domain of TCR clone 339502 (TRBV15, TRBJ2-3)
CATSRDLGIVTDTQYF

SEQ ID NO: 679005 - protein, 12 aa, Homo sapiens
  CDR3 for alpha chain variable domain of TCR clone 339503 (TRAV12-3, TRAJ21)
CAMFNNFNKFYF

SEQ ID NO: 679006 - protein, 16 aa, Homo sapiens
  CDR3 for beta chain variable domain of TCR clone 339503 (TRBV7-9, TRBJ1-2)
CASSLAPLSAAYGYTF

SEQ ID NO: 679007 - protein, 16 aa, Homo sapiens
  CDR3 for alpha chain variable domain of TCR clone 339504 (TRAV23/DV6, TRAJ30)
CAASMCADANRDDKII

SEQ ID NO: 679008 - protein, 12 aa, Homo sapiens
  CDR3 for beta chain variable domain of TCR clone 339504 (TRBV19, TRBJ2-3)
CATAQGGDTQYL

SEQ ID NO: 679009 - protein, 15 aa, Homo sapiens
  CDR3 for alpha chain variable domain of TCR clone 339505 (TRAV14/DV4, TRAJ10)
CAMRELTGGGNKLTF

SEQ ID NO: 679010 - protein, 13 aa, Homo sapiens
  CDR3 for beta chain variable domain of TCR clone 339505 (TRBV19, TRBJ2-7)
CASGPRQSYEQYF

SEQ ID NO: 679011 - protein, 10 aa, Homo sapiens
  CDR3 for alpha chain variable domain of TCR clone 339506 (TRAV30, TRAJ48)
CGIENEKLTF

SEQ ID NO: 679012 - protein, 12 aa, Homo sapiens
  CDR3 for beta chain variable domain of TCR clone 339506 (TRBV7-8, TRBJ2-7)
CASSLGDREQYF

SEQ ID NO: 679013 - protein, 13 aa, Homo sapiens
  CDR3 for alpha chain variable domain of TCR clone 339507 (TRAV2, TRAJ29)
CAVGPSGNTPLVF

SEQ ID NO: 679014 - protein, 13 aa, Homo sapiens
  CDR3 for beta chain variable domain of TCR clone 339507 (TRBV12-4, TRBJ2-2)
CASSITGSGELFF

SEQ ID NO: 679015 - protein, 15 aa, Homo sapiens
  CDR3 for alpha chain variable domain of TCR clone 339508 (TRAV8-2, TRAJ16)
CVVRDGFSDGQKLLF

SEQ ID NO: 679016 - protein, 12 aa, Homo sapiens
  CDR3 for beta chain variable domain of TCR clone 339508 (TRBV12-4, TRBJ2-7)
CASSLGGYEQYF

SEQ ID NO: 679017 - protein, 15 aa, Homo sapiens
  CDR3 for alpha chain variable domain of TCR clone 339509 (TRAV3, TRAJ22)
CAVRNRGGSARQLTF

SEQ ID NO: 679018 - protein, 16 aa, Homo sapiens
  CDR3 for beta chain variable domain of TCR clone 339509 (TRBV5-1, TRBJ1-1)
CASSSGGNSLNTEAFF

SEQ ID NO: 679019 - protein, 20 aa, Homo sapiens
  CDR3 for alpha chain variable domain of TCR clone 339510 (TRAV1-1, TRAJ39)
CLLLLRCESSAYNAGNMLTF

SEQ ID NO: 679020 - protein, 13 aa, Homo sapiens
  CDR3 for beta chain variable domain of TCR clone 339510 (TRBV12-4, TRBJ1-5)
CASSPDGAQPQHF

SEQ ID NO: 679021 - protein, 18 aa, Homo sapiens
  CDR3 for alpha chain variable domain of TCR clone 339511 (TRAV17, TRAJ28)
CATDPRRGGAELPTYFRE

SEQ ID NO: 679022 - protein, 16 aa, Homo sapiens
  CDR3 for beta chain variable domain of TCR clone 339511 (TRBV25-1, TRBJ1-1)
CASSGDRDRGRIEAFF

SEQ ID NO: 679023 - protein, 16 aa, Homo sapiens
  CDR3 for alpha chain variable domain of TCR clone 339512 (TRAV8-6, TRAJ58)
CAVSDHTENSGSRLTF

SEQ ID NO: 679024 - protein, 14 aa, Homo sapiens
  CDR3 for beta chain variable domain of TCR clone 339512 (TRBV7-2, TRBJ1-5)
CASSPRGGPQPQHF

SEQ ID NO: 679025 - protein, 22 aa, Homo sapiens
  CDR3 for alpha chain variable domain of TCR clone 339513 (TRAV21, TRAJ58)
SLVTQPPTSVLRRGRSGSRLTF

SEQ ID NO: 679026 - protein, 13 aa, Homo sapiens
  CDR3 for beta chain variable domain of TCR clone 339513 (TRBV7-2, TRBJ1-6)
CASSLKFDSPLHF

SEQ ID NO: 679027 - protein, 12 aa, Homo sapiens
  CDR3 for alpha chain variable domain of TCR clone 339514 (TRAV2, TRAJ9)
CAVGAGGFKTIF

SEQ ID NO: 679028 - protein, 15 aa, Homo sapiens
  CDR3 for beta chain variable domain of TCR clone 339514 (TRBV7-8, TRBJ2-5)
YASSDAAGSQETQYF

SEQ ID NO: 679029 - protein, 11 aa, Homo sapiens
  CDR3 for alpha chain variable domain of TCR clone 339515 (TRAV2, TRAJ13)
CASGGYQKVTF

SEQ ID NO: 679030 - protein, 17 aa, Homo sapiens
  CDR3 for beta chain variable domain of TCR clone 339515 (TRBV19, TRBJ2-6)
CASSTGQVFSGANVLTF

SEQ ID NO: 679031 - protein, 15 aa, Homo sapiens
  CDR3 for alpha chain variable domain of TCR clone 339516 (TRAV13-1, TRAJ17)
CAASIERAAGNKLTF

SEQ ID NO: 679032 - protein, 16 aa, Homo sapiens
  CDR3 for beta chain variable domain of TCR clone 339516 (TRBV5-7, TRBJ2-3)
CASSSLGGAITDTQYF

SEQ ID NO: 679033 - protein, 13 aa, Homo sapiens
  CDR3 for alpha chain variable domain of TCR clone 339517 (TRAV21, TRAJ26)
CAVIGNYGQNFVF

SEQ ID NO: 679034 - protein, 14 aa, Homo sapiens
  CDR3 for beta chain variable domain of TCR clone 339517 (TRBV19, TRBJ2-1)
CASGKSTQYNEQFF

SEQ ID NO: 679035 - protein, 14 aa, Homo sapiens
  CDR3 for alpha chain variable domain of TCR clone 339518 (TRAV26-1, TRAJ6)
CIVSPVGGSYIPTF

SEQ ID NO: 679036 - protein, 16 aa, Homo sapiens
  CDR3 for beta chain variable domain of TCR clone 339518 (TRBV4-1, TRBJ2-5)
CASSSGLARVLGTQYF

SEQ ID NO: 679037 - protein, 15 aa, Homo sapiens
  CDR3 for alpha chain variable domain of TCR clone 339519 (TRAV17, TRAJ48)
CATDETNSGNEKLTF

SEQ ID NO: 679038 - protein, 13 aa, Homo sapiens
  CDR3 for beta chain variable domain of TCR clone 339519 (TRBV12-4, TRBJ1-5)
CASSPDRAQPQHF

SEQ ID NO: 679039 - protein, 13 aa, Homo sapiens
  CDR3 for alpha chain variable domain of TCR clone 339520 (TRAV21, TRAJ27)
CAARPGNAGKSTF

SEQ ID NO: 679040 - protein, 15 aa, Homo sapiens
  CDR3 for beta chain variable domain of TCR clone 339520 (TRBV19, TRBJ2-4)
CASRGPRRGENMQYF

SEQ ID NO: 679041 - protein, 16 aa, Homo sapiens
  CDR3 for alpha chain variable domain of TCR clone 339521 (TRAV3, TRAJ10)
CAVRDMRAGGGNKLTF

SEQ ID NO: 679042 - protein, 14 aa, Homo sapiens
  CDR3 for beta chain variable domain of TCR clone 339521 (TRBV28, TRBJ2-4)
CASTQVTGVNIQYF

SEQ ID NO: 679043 - protein, 12 aa, Homo sapiens
  CDR3 for alpha chain variable domain of TCR clone 339522 (TRAV17, TRAJ57)
CATDGGSEKLGF

SEQ ID NO: 679044 - protein, 14 aa, Homo sapiens
  CDR3 for beta chain variable domain of TCR clone 339522 (TRBV20-1, TRBJ1-6)
CSARGTGYNSPLHF

SEQ ID NO: 679045 - protein, 12 aa, Homo sapiens
  CDR3 for alpha chain variable domain of TCR clone 339523 (TRAV8-1, TRAJ26)
CAVNNYGQNFVF

SEQ ID NO: 679046 - protein, 15 aa, Homo sapiens
  CDR3 for beta chain variable domain of TCR clone 339523 (TRBV20-1, TRBJ1-1)
CSASWDRFLNTESFF

SEQ ID NO: 679047 - protein, 17 aa, Homo sapiens
  CDR3 for alpha chain variable domain of TCR clone 339524 (TRAV13-1, TRAJ52)
CAAGRNAGGTSYGKLTF

SEQ ID NO: 679048 - protein, 13 aa, Homo sapiens
  CDR3 for beta chain variable domain of TCR clone 339524 (TRBV27, TRBJ1-1)
CASSLSIGVEAFF

SEQ ID NO: 679049 - protein, 15 aa, Homo sapiens
  CDR3 for alpha chain variable domain of TCR clone 339525 (TRAV21, TRAJ53)
CATLNSGGSNYKLTF

SEQ ID NO: 679050 - protein, 14 aa, Homo sapiens
  CDR3 for beta chain variable domain of TCR clone 339525 (TRBV7-9, TRBJ2-7)
CASSIGQGAGEQYF

SEQ ID NO: 679051 - protein, 11 aa, Homo sapiens
  CDR3 for alpha chain variable domain of TCR clone 339526 (TRAV17, TRAJ9)
CGFTGGFKTIF

SEQ ID NO: 679052 - protein, 15 aa, Homo sapiens
  CDR3 for beta chain variable domain of TCR clone 339526 (TRBV7-9, TRBJ1-5)
CASSQGHQPNQPQHF

SEQ ID NO: 679053 - protein, 14 aa, Homo sapiens
  CDR3 for alpha chain variable domain of TCR clone 339527 (TRAV2, TRAJ37)
CAVDFTSNTGKLIF

SEQ ID NO: 679054 - protein, 14 aa, Homo sapiens
  CDR3 for beta chain variable domain of TCR clone 339527 (TRBV19, TRBJ2-1)
CASPTFVLGGEQFF

SEQ ID NO: 679055 - protein, 17 aa, Homo sapiens
  CDR3 for alpha chain variable domain of TCR clone 339528 (TRAV38-1, TRAJ45)
CAFMKHYMGGGADGLTF

SEQ ID NO: 679056 - protein, 19 aa, Homo sapiens
  CDR3 for beta chain variable domain of TCR clone 339528 (TRBV6-1, TRBJ2-5)
CASSEQGLAVGLYQETQYF

SEQ ID NO: 679057 - protein, 15 aa, Homo sapiens
  CDR3 for alpha chain variable domain of TCR clone 339529 (TRAV8-3, TRAJ40)
CAVGPYTSGTYKYIF

SEQ ID NO: 679058 - protein, 16 aa, Homo sapiens
  CDR3 for beta chain variable domain of TCR clone 339529 (TRBV7-2, TRBJ2-7)
GASSLDPGGGSGGQYF

SEQ ID NO: 679059 - protein, 14 aa, Homo sapiens
  CDR3 for alpha chain variable domain of TCR clone 339530 (TRAV9-2, TRAJ39)
CALYIYNAGNMLTF

SEQ ID NO: 679060 - protein, 14 aa, Homo sapiens
  CDR3 for beta chain variable domain of TCR clone 339530 (TRBV6-1, TRBJ1-3)
CASLQGGGGNTIYF

SEQ ID NO: 679061 - protein, 12 aa, Homo sapiens
  CDR3 for alpha chain variable domain of TCR clone 339531 (TRAV12-3, TRAJ34)
CAMGYNTDKLLF

SEQ ID NO: 679062 - protein, 15 aa, Homo sapiens
  CDR3 for beta chain variable domain of TCR clone 339531 (TRBV28, TRBJ2-1)
CASSIIAGGRSEQFF

SEQ ID NO: 679063 - protein, 13 aa, Homo sapiens
  CDR3 for alpha chain variable domain of TCR clone 339532 (TRAV12-1, TRAJ7)
CVVNMRGNNRLAF

SEQ ID NO: 679064 - protein, 16 aa, Homo sapiens
  CDR3 for beta chain variable domain of TCR clone 339532 (TRBV25-1, TRBJ1-1)
CASSGDRDRGRIEAFF

SEQ ID NO: 679065 - protein, 19 aa, Homo sapiens
  CDR3 for alpha chain variable domain of TCR clone 339533 (TRAV1-2, TRAJ26)
CLLPLCCERPDNYGQNFVF

SEQ ID NO: 679066 - protein, 11 aa, Homo sapiens
  CDR3 for beta chain variable domain of TCR clone 339533 (TRBV12-4, TRBJ2-3)
CAGAATDTQYF

SEQ ID NO: 679067 - protein, 15 aa, Homo sapiens
  CDR3 for alpha chain variable domain of TCR clone 339534 (TRAV3, TRAJ22)
CAVRDRGGSARQLTF

SEQ ID NO: 679068 - protein, 13 aa, Homo sapiens
  CDR3 for beta chain variable domain of TCR clone 339534 (TRBV19, TRBJ1-1)
CASSFGRNTEAFF

SEQ ID NO: 679069 - protein, 23 aa, Homo sapiens
  CDR3 for alpha chain variable domain of TCR clone 339535 (TRAV30, TRAJ29)
PAQLLRNLLLWHRAFSGNTPLVF

SEQ ID NO: 679070 - protein, 15 aa, Homo sapiens
  CDR3 for beta chain variable domain of TCR clone 339535 (TRBV5-1, TRBJ2-2)
CASSLFGQDTGELFF

SEQ ID NO: 679071 - protein, 10 aa, Homo sapiens
  CDR3 for alpha chain variable domain of TCR clone 339536 (TRAV13-1, TRAJ27)
CAPLARQINL

SEQ ID NO: 679072 - protein, 16 aa, Homo sapiens
  CDR3 for beta chain variable domain of TCR clone 339536 (TRBV7-2, TRBJ1-2)
CASSSNQDRRGHGYTF

SEQ ID NO: 679073 - protein, 14 aa, Homo sapiens
  CDR3 for alpha chain variable domain of TCR clone 339537 (TRAV1-2, TRAJ16)
CAVNRFSDGQKLLF

SEQ ID NO: 679074 - protein, 16 aa, Homo sapiens
  CDR3 for beta chain variable domain of TCR clone 339537 (TRBV12-5, TRBJ2-5)
WASGPRTSGNQETQYF

SEQ ID NO: 679075 - protein, 15 aa, Homo sapiens
  CDR3 for alpha chain variable domain of TCR clone 339538 (TRAV3, TRAJ37)
CAVRDIPGDTGKLIF

SEQ ID NO: 679076 - protein, 14 aa, Homo sapiens
  CDR3 for beta chain variable domain of TCR clone 339538 (TRBV13, TRBJ2-3)
CASSLGARTDTQYF

SEQ ID NO: 679077 - protein, 14 aa, Homo sapiens
  CDR3 for alpha chain variable domain of TCR clone 339539 (TRAV12-1, TRAJ12)
CVVTRIDSSYKLIF

SEQ ID NO: 679078 - protein, 13 aa, Homo sapiens
  CDR3 for beta chain variable domain of TCR clone 339539 (TRBV20-1, TRBJ1-1)
CSARGGGNTEVFF

SEQ ID NO: 679079 - protein, 17 aa, Homo sapiens
  CDR3 for alpha chain variable domain of TCR clone 339540 (TRAV3, TRAJ6)
CAVRDGPRAGGSYIPTF

SEQ ID NO: 679080 - protein, 12 aa, Homo sapiens
  CDR3 for beta chain variable domain of TCR clone 339540 (TRBV28, TRBJ2-1)
CASSFRGNEQFF

SEQ ID NO: 679081 - protein, 15 aa, Homo sapiens
  CDR3 for alpha chain variable domain of TCR clone 339541 (TRAV17, TRAJ16)
CATALRFSDGQKLLF

SEQ ID NO: 679082 - protein, 15 aa, Homo sapiens
  CDR3 for beta chain variable domain of TCR clone 339541 (TRBV20-1, TRBJ1-1)
CSASRGVTGDTEAFF

SEQ ID NO: 679083 - protein, 14 aa, Homo sapiens
  CDR3 for alpha chain variable domain of TCR clone 339542 (TRAV35, TRAJ33)
CAGSSQDSNYQLIW

SEQ ID NO: 679084 - protein, 15 aa, Homo sapiens
  CDR3 for beta chain variable domain of TCR clone 339542 (TRBV20-1, TRBJ2-7)
CSAGYGTREAYEQYF

SEQ ID NO: 679085 - protein, 14 aa, Homo sapiens
  CDR3 for alpha chain variable domain of TCR clone 339543 (TRAV8-3, TRAJ39)
CAVGANNAGNTLTF

SEQ ID NO: 679086 - protein, 16 aa, Homo sapiens
  CDR3 for beta chain variable domain of TCR clone 339543 (TRBV12-5, TRBJ2-5)
CASGPRTSGNQETQYF

SEQ ID NO: 679087 - protein, 12 aa, Homo sapiens
  CDR3 for alpha chain variable domain of TCR clone 339544 (TRAV26-1, TRAJ43)
CIVRPRGDDMRF

SEQ ID NO: 679088 - protein, 14 aa, Homo sapiens
  CDR3 for beta chain variable domain of TCR clone 339544 (TRBV19, TRBJ1-4)
CASSMGRHNEKLFF

SEQ ID NO: 679089 - protein, 13 aa, Homo sapiens
  CDR3 for alpha chain variable domain of TCR clone 339545 (TRAV20, TRAJ48)
CAVQGVGNEKLTF

SEQ ID NO: 679090 - protein, 18 aa, Homo sapiens
  CDR3 for beta chain variable domain of TCR clone 339545 (TRBV2, TRBJ2-2)
CQQSTGTSGGGNPGELFF

SEQ ID NO: 679091 - protein, 16 aa, Homo sapiens
  CDR3 for alpha chain variable domain of TCR clone 339546 (TRAV30, TRAJ24)
CGTEIVDADSWGKFQF

SEQ ID NO: 679092 - protein, 13 aa, Homo sapiens
  CDR3 for beta chain variable domain of TCR clone 339546 (TRBV19, TRBJ1-1)
CASSVRDISEAFF

SEQ ID NO: 679093 - protein, 11 aa, Homo sapiens
  CDR3 for alpha chain variable domain of TCR clone 339547 (TRAV17, TRAJ43)
CATAVTGDMRF

SEQ ID NO: 679094 - protein, 14 aa, Homo sapiens
  CDR3 for beta chain variable domain of TCR clone 339547 (TRBV12-4, TRBJ1-1)
CASRPGQGRTEAFF

SEQ ID NO: 679095 - protein, 18 aa, Homo sapiens
  CDR3 for alpha chain variable domain of TCR clone 339548 (TRAV29/DV5, TRAJ52)
CAAGFRGAGGTSYGKLTF

SEQ ID NO: 679096 - protein, 13 aa, Homo sapiens
  CDR3 for beta chain variable domain of TCR clone 339548 (TRBV27, TRBJ2-1)
CASRTLGVGEQFF

SEQ ID NO: 679097 - protein, 15 aa, Homo sapiens
  CDR3 for alpha chain variable domain of TCR clone 339549 (TRAV16, TRAJ10)
CALEGLTGGGHKLTF

SEQ ID NO: 679098 - protein, 14 aa, Homo sapiens
  CDR3 for beta chain variable domain of TCR clone 339549 (TRBV7-6, TRBJ2-3)
CASSLGTVTDTQYF

SEQ ID NO: 679099 - protein, 16 aa, Homo sapiens
  CDR3 for alpha chain variable domain of TCR clone 339550 (TRAV8-2, TRAJ7)
CVVSEGPYYGNNRLAF

SEQ ID NO: 679100 - protein, 15 aa, Homo sapiens
  CDR3 for beta chain variable domain of TCR clone 339550 (TRBV27, TRBJ2-3)
RASSLGLAATDTQYF

SEQ ID NO: 679101 - protein, 11 aa, Homo sapiens
  CDR3 for alpha chain variable domain of TCR clone 339551 (TRAV21, TRAJ33)
CAVIRNYQLIW

SEQ ID NO: 679102 - protein, 12 aa, Homo sapiens
  CDR3 for beta chain variable domain of TCR clone 339551 (TRBV7-9, TRBJ2-7)
CASSLEGYEQYF

SEQ ID NO: 679103 - protein, 16 aa, Homo sapiens
  CDR3 for alpha chain variable domain of TCR clone 339552 (TRAV3, TRAJ37)
CAVRPHGSGNTGKLIF

SEQ ID NO: 679104 - protein, 15 aa, Homo sapiens
  CDR3 for beta chain variable domain of TCR clone 339552 (TRBV10-3, TRBJ2-3)
CAISLTCGGTDTQYF

SEQ ID NO: 679105 - protein, 14 aa, Homo sapiens
  CDR3 for alpha chain variable domain of TCR clone 339553 (TRAV35, TRAJ22)
CAGLRPGSARQLTF

SEQ ID NO: 679106 - protein, 14 aa, Homo sapiens
  CDR3 for beta chain variable domain of TCR clone 339553 (TRBV4-1, TRBJ2-7)
CASSPDAGGDEQYF

SEQ ID NO: 679107 - protein, 14 aa, Homo sapiens
  CDR3 for alpha chain variable domain of TCR clone 339554 (TRAV3, TRAJ8)
CAVSRNTGFQKLVF

SEQ ID NO: 679108 - protein, 13 aa, Homo sapiens
  CDR3 for beta chain variable domain of TCR clone 339554 (TRBV20-1, TRBJ2-5)
CSAREAFQETQYF

SEQ ID NO: 679109 - protein, 16 aa, Homo sapiens
  CDR3 for alpha chain variable domain of TCR clone 339555 (TRAV22, TRAJ45)
CAVERGKRGGADGLTF

SEQ ID NO: 679110 - protein, 13 aa, Homo sapiens
  CDR3 for beta chain variable domain of TCR clone 339555 (TRBV27, TRBJ1-1)
CASSLSIAAEDFF

SEQ ID NO: 679111 - protein, 12 aa, Homo sapiens
  CDR3 for alpha chain variable domain of TCR clone 339556 (TRAV4, TRAJ26)
CLVGDYGQNFAF

SEQ ID NO: 679112 - protein, 16 aa, Homo sapiens
  CDR3 for beta chain variable domain of TCR clone 339556 (TRBV7-2, TRBJ1-2)
CASSSNQDRRGHGHTF

SEQ ID NO: 679113 - protein, 12 aa, Homo sapiens
  CDR3 for alpha chain variable domain of TCR clone 339557 (TRAV17, TRAJ20)
CATDGDDYKLSF

SEQ ID NO: 679114 - protein, 14 aa, Homo sapiens
  CDR3 for beta chain variable domain of TCR clone 339557 (TRBV20-1, TRBJ1-1)
CSAQTRIGGTEAFF

SEQ ID NO: 679115 - protein, 14 aa, Homo sapiens
  CDR3 for alpha chain variable domain of TCR clone 339558 (TRAV12-1, TRAJ17)
CWVNYKAAGNKLTF

SEQ ID NO: 679116 - protein, 17 aa, Homo sapiens
  CDR3 for beta chain variable domain of TCR clone 339558 (TRBV20-1, TRBJ2-1)
CSASSSGLAGSYNEQFF

SEQ ID NO: 679117 - protein, 13 aa, Homo sapiens
  CDR3 for alpha chain variable domain of TCR clone 339559 (TRAV3, TRAJ21)
CAVREPDFNKFYF

SEQ ID NO: 679118 - protein, 15 aa, Homo sapiens
  CDR3 for beta chain variable domain of TCR clone 339559 (TRBV20-1, TRBJ1-1)
CSARGGGTLKLSLDK

SEQ ID NO: 679119 - protein, 10 aa, Homo sapiens
  CDR3 for alpha chain variable domain of TCR clone 339560 (TRAV1-2, TRAJ20)
CALNDYKLSF

SEQ ID NO: 679120 - protein, 16 aa, Homo sapiens
  CDR3 for beta chain variable domain of TCR clone 339560 (TRBV12-4, TRBJ2-5)
CASSFFVRGRQETQYF

SEQ ID NO: 679121 - protein, 12 aa, Homo sapiens
  CDR3 for alpha chain variable domain of TCR clone 339561 (TRAV13-1, TRAJ15)
CAASQAGTALIF

SEQ ID NO: 679122 - protein, 12 aa, Homo sapiens
  CDR3 for beta chain variable domain of TCR clone 339561 (TRBV11-2, TRBJ2-2)
CASSLGGGELFF

SEQ ID NO: 679123 - protein, 15 aa, Homo sapiens
  CDR3 for alpha chain variable domain of TCR clone 339562 (TRAV8-3, TRAJ11)
CAVGLLNSGYSTLTF

SEQ ID NO: 679124 - protein, 12 aa, Homo sapiens
  CDR3 for beta chain variable domain of TCR clone 339562 (TRBV5-7, TRBJ1-2)
CASSLVQNGYTF

SEQ ID NO: 679125 - protein, 13 aa, Homo sapiens
  CDR3 for alpha chain variable domain of TCR clone 339563 (TRAV9-2, TRAJ53)
CALSGGSNYKLTF

SEQ ID NO: 679126 - protein, 15 aa, Homo sapiens
  CDR3 for beta chain variable domain of TCR clone 339563 (TRBV24-1, TRBJ2-5)
CATSETTGAVGAQYF

SEQ ID NO: 679127 - protein, 13 aa, Homo sapiens
  CDR3 for alpha chain variable domain of TCR clone 339564 (TRAV1-1, TRAJ9)
CAAKSTGGFKTIF

SEQ ID NO: 679128 - protein, 13 aa, Homo sapiens
  CDR3 for beta chain variable domain of TCR clone 339564 (TRBV7-9, TRBJ1-2)
CASSLKQNYGYTF

SEQ ID NO: 679129 - protein, 13 aa, Homo sapiens
  CDR3 for alpha chain variable domain of TCR clone 339565 (TRAV12-2, TRAJ4)
CAVRSGGSNKLIF

SEQ ID NO: 679130 - protein, 15 aa, Homo sapiens
  CDR3 for beta chain variable domain of TCR clone 339565 (TRBV7-9, TRBJ1-5)
CASSQGHQPNQPQHF

SEQ ID NO: 679131 - protein, 14 aa, Homo sapiens
  CDR3 for alpha chain variable domain of TCR clone 339566 (TRAV2, TRAJ9)
CAVEDRSGGFKTIF

SEQ ID NO: 679132 - protein, 15 aa, Homo sapiens
  CDR3 for beta chain variable domain of TCR clone 339566 (TRBV10-3, TRBJ2-1)
GAIRNGTSGHNEQFF

SEQ ID NO: 679133 - protein, 13 aa, Homo sapiens
  CDR3 for alpha chain variable domain of TCR clone 339567 (TRAV16, TRAJ26)
CITVLCLVQNFVF

SEQ ID NO: 679134 - protein, 12 aa, Homo sapiens
  CDR3 for beta chain variable domain of TCR clone 339567 (TRBV11-2, TRBJ2-1)
CASSPGNNEQFF

SEQ ID NO: 679135 - protein, 12 aa, Homo sapiens
  CDR3 for alpha chain variable domain of TCR clone 339568 (TRAV8-3, TRAJ26)
CAGDNYGQNFVF

SEQ ID NO: 679136 - protein, 17 aa, Homo sapiens
  CDR3 for beta chain variable domain of TCR clone 339568 (TRBV11-2, TRBJ2-7)
CASSLAGAGVTLYEQYF

SEQ ID NO: 679137 - protein, 20 aa, Homo sapiens
  CDR3 for alpha chain variable domain of TCR clone 339569 (TRAV21, TRAJ30)
CAVRRRMTRSSFEKGHDFIF

SEQ ID NO: 679138 - protein, 15 aa, Homo sapiens
  CDR3 for beta chain variable domain of TCR clone 339569 (TRBV6-6, TRBJ2-7)
CASSYSYGGSYEQYF

SEQ ID NO: 679139 - protein, 14 aa, Homo sapiens
  CDR3 for alpha chain variable domain of TCR clone 339570 (TRAV2, TRAJ9)
CAVEDRSGGFKTIF

SEQ ID NO: 679140 - protein, 15 aa, Homo sapiens
  CDR3 for beta chain variable domain of TCR clone 339570 (TRBV19, TRBJ2-4)
CASRGPRRGENIQYF

SEQ ID NO: 679141 - protein, 13 aa, Homo sapiens
  CDR3 for alpha chain variable domain of TCR clone 339571 (TRAV12-2, TRAJ20)
CAVHPSNDYKLSF

SEQ ID NO: 679142 - protein, 15 aa, Homo sapiens
  CDR3 for beta chain variable domain of TCR clone 339571 (TRBV6-1, TRBJ2-5)
CASSEGWGIQETQYF

SEQ ID NO: 679143 - protein, 16 aa, Homo sapiens
  CDR3 for alpha chain variable domain of TCR clone 339572 (TRAV26-1, TRAJ53)
CIVRVALGGSNYKLPF

SEQ ID NO: 679144 - protein, 12 aa, Homo sapiens
  CDR3 for beta chain variable domain of TCR clone 339572 (TRBV7-9, TRBJ1-5)
CASSPQGQPQHF

SEQ ID NO: 679145 - protein, 14 aa, Homo sapiens
  CDR3 for alpha chain variable domain of TCR clone 339573 (TRAV12-3, TRAJ54)
CAMRGIQGAQQPVF

SEQ ID NO: 679146 - protein, 13 aa, Homo sapiens
  CDR3 for beta chain variable domain of TCR clone 339573 (TRBV19, TRBJ1-1)
CASSPSNGGEAFF

SEQ ID NO: 679147 - protein, 15 aa, Homo sapiens
  CDR3 for alpha chain variable domain of TCR clone 339574 (TRAV2, TRAJ11)
CAVGGRNSGYSTLTF

SEQ ID NO: 679148 - protein, 14 aa, Homo sapiens
  CDR3 for beta chain variable domain of TCR clone 339574 (TRBV20-1, TRBJ2-1)
CSAQIGRSANEHFF

SEQ ID NO: 679149 - protein, 14 aa, Homo sapiens
  CDR3 for alpha chain variable domain of TCR clone 339575 (TRAV23/DV6, TRAJ11)
CAASLESGYSTLTV

SEQ ID NO: 679150 - protein, 15 aa, Homo sapiens
  CDR3 for beta chain variable domain of TCR clone 339575 (TRBV28, TRBJ2-7)
CASSSPGTEPFEQYF

SEQ ID NO: 679151 - protein, 15 aa, Homo sapiens
  CDR3 for alpha chain variable domain of TCR clone 339576 (TRAV34, TRAJ38)
CGADFTPGNNRKLSW

SEQ ID NO: 679152 - protein, 16 aa, Homo sapiens
  CDR3 for beta chain variable domain of TCR clone 339576 (TRBV6-1, TRBJ2-3)
CASSEVIGQGTDTQYF

SEQ ID NO: 679153 - protein, 14 aa, Homo sapiens
  CDR3 for alpha chain variable domain of TCR clone 339577 (TRAV26-1, TRAJ38)
CIADNAGNNLKLIW

SEQ ID NO: 679154 - protein, 17 aa, Homo sapiens
  CDR3 for beta chain variable domain of TCR clone 339577 (TRBV13, TRBJ2-3)
CASSLSRVAGGRNTQYF

SEQ ID NO: 679155 - protein, 15 aa, Homo sapiens
  CDR3 for alpha chain variable domain of TCR clone 339578 (TRAV8-3, TRAJ27)
CAVGPSKTNAGKSTF

SEQ ID NO: 679156 - protein, 13 aa, Homo sapiens
  CDR3 for beta chain variable domain of TCR clone 339578 (TRBV20-1, TRBJ1-1)
CSAPLGGGTEAFF

SEQ ID NO: 679157 - protein, 11 aa, Homo sapiens
  CDR3 for alpha chain variable domain of TCR clone 339579 (TRAV13-2, TRAJ23)
CAESPRGKLIL

SEQ ID NO: 679158 - protein, 15 aa, Homo sapiens
  CDR3 for beta chain variable domain of TCR clone 339579 (TRBV28, TRBJ2-1)
CASSGLAEVDNEQFF

SEQ ID NO: 679159 - protein, 22 aa, Homo sapiens
  CDR3 for alpha chain variable domain of TCR clone 339580 (TRAV21, )
CAVRQDAGNNHIQNPDPAVYQL

SEQ ID NO: 679160 - protein, 16 aa, Homo sapiens
  CDR3 for beta chain variable domain of TCR clone 339580 (TRBV4-2, TRBJ1-1)
CASRPLDVGGDTEAFF

SEQ ID NO: 679161 - protein, 12 aa, Homo sapiens
  CDR3 for alpha chain variable domain of TCR clone 339581 (TRAV21, TRAJ33)
CAKMDSNYQLIW

SEQ ID NO: 679162 - protein, 15 aa, Homo sapiens
  CDR3 for beta chain variable domain of TCR clone 339581 (TRBV2, TRBJ1-3)
CASSISPRSGNTIYF

SEQ ID NO: 679163 - protein, 13 aa, Homo sapiens
  CDR3 for alpha chain variable domain of TCR clone 339582 (TRAV16, TRAJ9)
CALRATGGFKTIF

SEQ ID NO: 679164 - protein, 16 aa, Homo sapiens
  CDR3 for beta chain variable domain of TCR clone 339582 (TRBV5-1, TRBJ1-3)
CASSRSGEDSGNTKYF

SEQ ID NO: 679165 - protein, 12 aa, Homo sapiens
  CDR3 for alpha chain variable domain of TCR clone 339583 (TRAV12-3, TRAJ17)
CAMTLTGIKLTF

SEQ ID NO: 679166 - protein, 13 aa, Homo sapiens
  CDR3 for beta chain variable domain of TCR clone 339583 (TRBV19, TRBJ1-2)
CASSVPGQDGYTF

SEQ ID NO: 679167 - protein, 14 aa, Homo sapiens
  CDR3 for alpha chain variable domain of TCR clone 339584 (TRAV12-2, TRAJ40)
CAVKIPSGTYKYLF

SEQ ID NO: 679168 - protein, 13 aa, Homo sapiens
  CDR3 for beta chain variable domain of TCR clone 339584 (TRBV19, TRBJ2-5)
CASRDSRRETQYF

SEQ ID NO: 679169 - protein, 12 aa, Homo sapiens
  CDR3 for alpha chain variable domain of TCR clone 339585 (TRAV29/DV5, TRAJ49)
CAALNTGNQFYF

SEQ ID NO: 679170 - protein, 14 aa, Homo sapiens
  CDR3 for beta chain variable domain of TCR clone 339585 (TRBV13, TRBJ2-5)
CASSLERVGETQYF

SEQ ID NO: 679171 - protein, 12 aa, Homo sapiens
  CDR3 for alpha chain variable domain of TCR clone 339586 (TRAV12-2, TRAJ21)
CAPSDNFNKFYF

SEQ ID NO: 679172 - protein, 15 aa, Homo sapiens
  CDR3 for beta chain variable domain of TCR clone 339586 (TRBV11-2, TRBJ1-6)
CASTLRGTGNSPLHF

SEQ ID NO: 679173 - protein, 15 aa, Homo sapiens
  CDR3 for alpha chain variable domain of TCR clone 339587 (TRAV17, TRAJ16)
CATTFRFSDGQKLLF

SEQ ID NO: 679174 - protein, 15 aa, Homo sapiens
  CDR3 for beta chain variable domain of TCR clone 339587 (TRBV20-1, TRBJ1-1)
CSASRGVTGNTEAFF

SEQ ID NO: 679175 - protein, 16 aa, Homo sapiens
  CDR3 for alpha chain variable domain of TCR clone 339588 (TRAV3, TRAJ6)
CAVRDGMEGGSYIPTF

SEQ ID NO: 679176 - protein, 15 aa, Homo sapiens
  CDR3 for beta chain variable domain of TCR clone 339588 (TRBV9, TRBJ2-1)
CASSLAGSSYNEQFF

SEQ ID NO: 679177 - protein, 15 aa, Homo sapiens
  CDR3 for alpha chain variable domain of TCR clone 339589 (TRAV2, TRAJ15)
CAAGGPNQAGTALNF

SEQ ID NO: 679178 - protein, 13 aa, Homo sapiens
  CDR3 for beta chain variable domain of TCR clone 339589 (TRBV2, TRBJ1-5)
CATAGPGNQPQHF

SEQ ID NO: 679179 - protein, 13 aa, Homo sapiens
  CDR3 for alpha chain variable domain of TCR clone 339590 (TRAV12-3, TRAJ33)
CAMSLNSNYQVIW

SEQ ID NO: 679180 - protein, 13 aa, Homo sapiens
  CDR3 for beta chain variable domain of TCR clone 339590 (TRBV7-2, TRBJ2-2)
CASSLAVTGELFF

SEQ ID NO: 679181 - protein, 13 aa, Homo sapiens
  CDR3 for alpha chain variable domain of TCR clone 339591 (TRAV17, TRAJ26)
CATVDTYGQNFVF

SEQ ID NO: 679182 - protein, 16 aa, Homo sapiens
  CDR3 for beta chain variable domain of TCR clone 339591 (TRBV2, TRBJ2-1)
CASSVGGSLSYNEQFF

SEQ ID NO: 679183 - protein, 15 aa, Homo sapiens
  CDR3 for alpha chain variable domain of TCR clone 339592 (TRAV12-1, TRAJ44)
CVVDEYTGTASKLTF

SEQ ID NO: 679184 - protein, 14 aa, Homo sapiens
  CDR3 for beta chain variable domain of TCR clone 339592 (TRBV14, TRBJ2-1)
CASSRPGAGGEQFF

SEQ ID NO: 679185 - protein, 14 aa, Homo sapiens
  CDR3 for alpha chain variable domain of TCR clone 339593 (TRAV12-2, TRAJ45)
CAAHSGGGADGLTF

SEQ ID NO: 679186 - protein, 12 aa, Homo sapiens
  CDR3 for beta chain variable domain of TCR clone 339593 (TRBV11-2, TRBJ2-2)
CASSLGGGELFF

SEQ ID NO: 679187 - protein, 15 aa, Homo sapiens
  CDR3 for alpha chain variable domain of TCR clone 339594 (TRAV20, TRAJ23)
CAVQAVRNKGGKLIF

SEQ ID NO: 679188 - protein, 16 aa, Homo sapiens
  CDR3 for beta chain variable domain of TCR clone 339594 (TRBV27, TRBJ2-7)
CASSKQGRGWAYEQYF

SEQ ID NO: 679189 - protein, 14 aa, Homo sapiens
  CDR3 for alpha chain variable domain of TCR clone 339595 (TRAV1-2, TRAJ16)
CAVNRFSDGQKLLF

SEQ ID NO: 679190 - protein, 13 aa, Homo sapiens
  CDR3 for beta chain variable domain of TCR clone 339595 (TRBV4-1, TRBJ2-1)
CASSQAGRDEQFF

SEQ ID NO: 679191 - protein, 12 aa, Homo sapiens
  CDR3 for alpha chain variable domain of TCR clone 339596 (TRAV8-6, TRAJ33)
CAVTDSNYQVIW

SEQ ID NO: 679192 - protein, 15 aa, Homo sapiens
  CDR3 for beta chain variable domain of TCR clone 339596 (TRBV4-3, TRBJ1-2)
CASSRGQGRNYGYTF

SEQ ID NO: 679193 - protein, 15 aa, Homo sapiens
  CDR3 for alpha chain variable domain of TCR clone 339597 (TRAV2, TRAJ22)
CAVPSRGGSARQLTF

SEQ ID NO: 679194 - protein, 17 aa, Homo sapiens
  CDR3 for beta chain variable domain of TCR clone 339597 (TRBV5-1, TRBJ2-7)
CASSEPEGREASYEQYF

SEQ ID NO: 679195 - protein, 16 aa, Homo sapiens
  CDR3 for alpha chain variable domain of TCR clone 339598 (TRAV30, TRAJ24)
CGTEIVDADSWGKLQF

SEQ ID NO: 679196 - protein, 14 aa, Homo sapiens
  CDR3 for beta chain variable domain of TCR clone 339598 (TRBV12-5, TRBJ2-5)
CASGSRTHKETQYF

SEQ ID NO: 679197 - protein, 13 aa, Homo sapiens
  CDR3 for alpha chain variable domain of TCR clone 339599 (TRAV20, TRAJ29)
CAVQAVGNTPLVF

SEQ ID NO: 679198 - protein, 15 aa, Homo sapiens
  CDR3 for beta chain variable domain of TCR clone 339599 (TRBV10-2, TRBJ2-5)
CASRGSGGPQETQSF

SEQ ID NO: 679199 - protein, 16 aa, Homo sapiens
  CDR3 for alpha chain variable domain of TCR clone 339600 (TRAV3, TRAJ10)
CAVRDMRAGGGNKLTF

SEQ ID NO: 679200 - protein, 16 aa, Homo sapiens
  CDR3 for beta chain variable domain of TCR clone 339600 (TRBV19, TRBJ2-2)
CASSFPGQGFAGELFF

SEQ ID NO: 679201 - protein, 16 aa, Homo sapiens
  CDR3 for alpha chain variable domain of TCR clone 339601 (TRAV30, TRAJ24)
CGPEIVDADSWGQFQF

SEQ ID NO: 679202 - protein, 14 aa, Homo sapiens
  CDR3 for beta chain variable domain of TCR clone 339601 (TRBV12-5, TRBJ2-5)
CASGSRTQQETQYF

SEQ ID NO: 679203 - protein, 12 aa, Homo sapiens
  CDR3 for alpha chain variable domain of TCR clone 339602 (TRAV2, TRAJ9)
CAVGAGGFKTIF

SEQ ID NO: 679204 - protein, 14 aa, Homo sapiens
  CDR3 for beta chain variable domain of TCR clone 339602 (TRBV5-1, TRBJ2-5)
CASSLQGRKETQYF

SEQ ID NO: 679205 - protein, 14 aa, Homo sapiens
  CDR3 for alpha chain variable domain of TCR clone 339603 (TRAV26-1, TRAJ45)
CIEVTGGGADGLTF

SEQ ID NO: 679206 - protein, 13 aa, Homo sapiens
  CDR3 for beta chain variable domain of TCR clone 339603 (TRBV7-6, TRBJ1-2)
CASSLVADYGYTI

SEQ ID NO: 679207 - protein, 17 aa, Homo sapiens
  CDR3 for alpha chain variable domain of TCR clone 339604 (TRAV2, TRAJ22)
ILQVREADAAEQRQLTF

SEQ ID NO: 679208 - protein, 16 aa, Homo sapiens
  CDR3 for beta chain variable domain of TCR clone 339604 (TRBV2, TRBJ2-5)
CARSETQGVGEETQYF

SEQ ID NO: 679209 - protein, 14 aa, Homo sapiens
  CDR3 for alpha chain variable domain of TCR clone 339605 (TRAV12-3, TRAJ10)
SHLPLTGGGNKLTF

SEQ ID NO: 679210 - protein, 12 aa, Homo sapiens
  CDR3 for beta chain variable domain of TCR clone 339605 (TRBV7-3, TRBJ2-5)
CASSSPGGTQCF

SEQ ID NO: 679211 - protein, 13 aa, Homo sapiens
  CDR3 for alpha chain variable domain of TCR clone 339606 (TRAV8-6, TRAJ49)
WAVITNTGNQFYF

SEQ ID NO: 679212 - protein, 14 aa, Homo sapiens
  CDR3 for beta chain variable domain of TCR clone 339606 (TRBV5-1, TRBJ2-7)
CASSRGESLYEQYF

SEQ ID NO: 679213 - protein, 14 aa, Homo sapiens
  CDR3 for alpha chain variable domain of TCR clone 339607 (TRAV14/DV4, TRAJ20)
CAMRESLNDYKLSF

SEQ ID NO: 679214 - protein, 15 aa, Homo sapiens
  CDR3 for beta chain variable domain of TCR clone 339607 (TRBV7-9, TRBJ2-7)
CASSLARAEAYEQYF

SEQ ID NO: 679215 - protein, 15 aa, Homo sapiens
  CDR3 for alpha chain variable domain of TCR clone 339608 (TRAV8-3, TRAJ23)
CAVGDRYNQGGKLIF

SEQ ID NO: 679216 - protein, 17 aa, Homo sapiens
  CDR3 for beta chain variable domain of TCR clone 339608 (TRBV4-1, TRBJ1-4)
CASSHEGPRGVEEKLFF

SEQ ID NO: 679217 - protein, 10 aa, Homo sapiens
  CDR3 for alpha chain variable domain of TCR clone 339609 (TRAV1-2, TRAJ31)
CAFFDARLMF

SEQ ID NO: 679218 - protein, 15 aa, Homo sapiens
  CDR3 for beta chain variable domain of TCR clone 339609 (TRBV11-3, TRBJ2-7)
CASSLGRLSGYEQYF

SEQ ID NO: 679219 - protein, 14 aa, Homo sapiens
  CDR3 for alpha chain variable domain of TCR clone 339610 (TRAV29/DV5, TRAJ36)
CAARRKTGATNLFF

SEQ ID NO: 679220 - protein, 15 aa, Homo sapiens
  CDR3 for beta chain variable domain of TCR clone 339610 (TRBV7-2, TRBJ2-3)
CASSLRGGSTDTQYF

SEQ ID NO: 679221 - protein, 16 aa, Homo sapiens
  CDR3 for alpha chain variable domain of TCR clone 339611 (TRAV12-3, TRAJ10)
CAMKKGNTGGGNKPTF

SEQ ID NO: 679222 - protein, 12 aa, Homo sapiens
  CDR3 for beta chain variable domain of TCR clone 339611 (TRBV20-1, TRBJ2-7)
CSAITPTKEQYF

SEQ ID NO: 679223 - protein, 19 aa, Homo sapiens
  CDR3 for alpha chain variable domain of TCR clone 339612 (TRAV38-1, TRAJ37)
CGVFLCFHLWLCNTGKLIF

SEQ ID NO: 679224 - protein, 12 aa, Homo sapiens
  CDR3 for beta chain variable domain of TCR clone 339612 (TRBV7-9, TRBJ2-7)
CASSLEGYEQYF

SEQ ID NO: 679225 - protein, 16 aa, Homo sapiens
  CDR3 for alpha chain variable domain of TCR clone 339613 (TRAV30, TRAJ24)
CGTEIVDADSWGKFHF

SEQ ID NO: 679226 - protein, 14 aa, Homo sapiens
  CDR3 for beta chain variable domain of TCR clone 339613 (TRBV12-5, TRBJ2-5)
CASGSRTHQETRYF

SEQ ID NO: 679227 - protein, 11 aa, Homo sapiens
  CDR3 for alpha chain variable domain of TCR clone 339614 (TRAV3, TRAJ21)
CAAGNFNKFYF

SEQ ID NO: 679228 - protein, 12 aa, Homo sapiens
  CDR3 for beta chain variable domain of TCR clone 339614 (TRBV12-4, TRBJ2-7)
CASSLGGYEQYF

SEQ ID NO: 679229 - protein, 16 aa, Homo sapiens
  CDR3 for alpha chain variable domain of TCR clone 339615 (TRAV4, TRAJ22)
CLVGDLYSGSARQLTF

SEQ ID NO: 679230 - protein, 14 aa, Homo sapiens
  CDR3 for beta chain variable domain of TCR clone 339615 (TRBV20-1, TRBJ1-3)
CSASPTGAGNTIYF

SEQ ID NO: 679231 - protein, 14 aa, Homo sapiens
  CDR3 for alpha chain variable domain of TCR clone 339616 (TRAV13-2, TRAJ43)
CAEIPTYNNNDMRF

SEQ ID NO: 679232 - protein, 15 aa, Homo sapiens
  CDR3 for beta chain variable domain of TCR clone 339616 (TRBV7-6, TRBJ2-7)
CASSLGTISSYEQYF

SEQ ID NO: 679233 - protein, 16 aa, Homo sapiens
  CDR3 for alpha chain variable domain of TCR clone 339617 (TRAV17, TRAJ52)
CATGIIGGTSYGKLTF

SEQ ID NO: 679234 - protein, 12 aa, Homo sapiens
  CDR3 for beta chain variable domain of TCR clone 339617 (TRBV11-2, TRBJ2-2)
CASSLGGGELFF

SEQ ID NO: 679235 - protein, 17 aa, Homo sapiens
  CDR3 for alpha chain variable domain of TCR clone 339618 (TRAV4, TRAJ18)
CLVGAAGRGSTLGRLYF

SEQ ID NO: 679236 - protein, 17 aa, Homo sapiens
  CDR3 for beta chain variable domain of TCR clone 339618 (TRBV28, TRBJ2-2)
CASSLATGMGDAGELFF

SEQ ID NO: 679237 - protein, 11 aa, Homo sapiens
  CDR3 for alpha chain variable domain of TCR clone 339619 (TRAV1-1, TRAJ23)
CAVRQGGKLIF

SEQ ID NO: 679238 - protein, 20 aa, Homo sapiens
  CDR3 for beta chain variable domain of TCR clone 339619 (TRBV7-8, TRBJ2-2)
CASSHLFPGPTAHITGELFF

SEQ ID NO: 679239 - protein, 21 aa, Homo sapiens
  CDR3 for alpha chain variable domain of TCR clone 339620 (TRAV8-3, TRAJ6)
CAVGGEEATYLHLEEEPALLF

SEQ ID NO: 679240 - protein, 17 aa, Homo sapiens
  CDR3 for beta chain variable domain of TCR clone 339620 (TRBV7-2, TRBJ2-3)
CAGSLAGGLAGTAGQYF

SEQ ID NO: 679241 - protein, 18 aa, Homo sapiens
  CDR3 for alpha chain variable domain of TCR clone 339621 (TRAV9-2, TRAJ52)
CALSRHNAGGTSYGKLTF

SEQ ID NO: 679242 - protein, 17 aa, Homo sapiens
  CDR3 for beta chain variable domain of TCR clone 339621 (TRBV11-2, TRBJ2-6)
CASSQRDIFSGANVLTF

SEQ ID NO: 679243 - protein, 16 aa, Homo sapiens
  CDR3 for alpha chain variable domain of TCR clone 339622 (TRAV4, TRAJ18)
CCVLLIGGSTLGRLYF

SEQ ID NO: 679244 - protein, 14 aa, Homo sapiens
  CDR3 for beta chain variable domain of TCR clone 339622 (TRBV6-1, TRBJ2-1)
CASAKDGFYNEQFF

SEQ ID NO: 679245 - protein, 14 aa, Homo sapiens
  CDR3 for alpha chain variable domain of TCR clone 339623 (TRAV17, TRAJ57)
CATDPQGGSEKLVF

SEQ ID NO: 679246 - protein, 14 aa, Homo sapiens
  CDR3 for beta chain variable domain of TCR clone 339623 (TRBV4-2, TRBJ2-1)
CASGLDRAYNEQFF

SEQ ID NO: 679247 - protein, 14 aa, Homo sapiens
  CDR3 for alpha chain variable domain of TCR clone 339624 (TRAV17, TRAJ22)
CATSPSGSARQLTF

SEQ ID NO: 679248 - protein, 18 aa, Homo sapiens
  CDR3 for beta chain variable domain of TCR clone 339624 (TRBV28, TRBJ2-6)
CASSSRTGTHSGANVLTF

SEQ ID NO: 679249 - protein, 13 aa, Homo sapiens
  CDR3 for alpha chain variable domain of TCR clone 339625 (TRAV20, TRAJ7)
CAVLQGGNNRLAF

SEQ ID NO: 679250 - protein, 15 aa, Homo sapiens
  CDR3 for beta chain variable domain of TCR clone 339625 (TRBV13, TRBJ2-1)
CASSLLSGLNNEQFF

SEQ ID NO: 679251 - protein, 10 aa, Homo sapiens
  CDR3 for alpha chain variable domain of TCR clone 339626 (TRAV27, TRAJ58)
SETSGSRLTF

SEQ ID NO: 679252 - protein, 13 aa, Homo sapiens
  CDR3 for beta chain variable domain of TCR clone 339626 (TRBV7-7, TRBJ2-2)
CASSLTSAGELFF

SEQ ID NO: 679253 - protein, 13 aa, Homo sapiens
  CDR3 for alpha chain variable domain of TCR clone 339627 (TRAV2, TRAJ40)
CAVVTSGTYKYIF

SEQ ID NO: 679254 - protein, 15 aa, Homo sapiens
  CDR3 for beta chain variable domain of TCR clone 339627 (TRBV11-3, TRBJ2-1)
CASSLGDSSHNEQFF

SEQ ID NO: 679255 - protein, 14 aa, Homo sapiens
  CDR3 for alpha chain variable domain of TCR clone 339628 (TRAV12-1, TRAJ4)
CVGDFSGGYNKMIF

SEQ ID NO: 679256 - protein, 14 aa, Homo sapiens
  CDR3 for beta chain variable domain of TCR clone 339628 (TRBV4-2, TRBJ2-3)
CASRETRAPGMQYF

SEQ ID NO: 679257 - protein, 15 aa, Homo sapiens
  CDR3 for alpha chain variable domain of TCR clone 339629 (TRAV8-3, TRAJ27)
CAVCPSKTNTGNSTF

SEQ ID NO: 679258 - protein, 15 aa, Homo sapiens
  CDR3 for beta chain variable domain of TCR clone 339629 (TRBV7-2, TRBJ2-1)
CASSSGLAGGDEQFF

SEQ ID NO: 679259 - protein, 14 aa, Homo sapiens
  CDR3 for alpha chain variable domain of TCR clone 339630 (TRAV3, TRAJ7)
CAVREEEREQQTRF

SEQ ID NO: 679260 - protein, 15 aa, Homo sapiens
  CDR3 for beta chain variable domain of TCR clone 339630 (TRBV18, TRBJ2-1)
CASLPDRGRDNEQFF

SEQ ID NO: 679261 - protein, 13 aa, Homo sapiens
  CDR3 for alpha chain variable domain of TCR clone 339631 (TRAV12-1, TRAJ11)
CVVNRAGYSTLTF

SEQ ID NO: 679262 - protein, 16 aa, Homo sapiens
  CDR3 for beta chain variable domain of TCR clone 339631 (TRBV27, TRBJ2-2)
CASSLWPGGAPGELFF

SEQ ID NO: 679263 - protein, 10 aa, Homo sapiens
  CDR3 for alpha chain variable domain of TCR clone 339632 (TRAV30, TRAJ48)
CGIGNEKLTF

SEQ ID NO: 679264 - protein, 15 aa, Homo sapiens
  CDR3 for beta chain variable domain of TCR clone 339632 (TRBV7-9, TRBJ1-4)
CASSLAGAHGEKLFF

SEQ ID NO: 679265 - protein, 17 aa, Homo sapiens
  CDR3 for alpha chain variable domain of TCR clone 339633 (TRAV8-1, TRAJ43)
CAVTNDMRFGAGTRLTV

SEQ ID NO: 679266 - protein, 16 aa, Homo sapiens
  CDR3 for beta chain variable domain of TCR clone 339633 (TRBV7-8, TRBJ2-6)
CASRVGDSSGANVLTF

SEQ ID NO: 679267 - protein, 17 aa, Homo sapiens
  CDR3 for alpha chain variable domain of TCR clone 339634 (TRAV4, TRAJ18)
CLVGERSVGSTLGRLYF

SEQ ID NO: 679268 - protein, 12 aa, Homo sapiens
  CDR3 for beta chain variable domain of TCR clone 339634 (TRBV18, TRBJ2-7)
CASSLDSYEQYF

SEQ ID NO: 679269 - protein, 16 aa, Homo sapiens
  CDR3 for alpha chain variable domain of TCR clone 339635 (TRAV13-1, TRAJ48)
CAASIFGNFVNEKLTF

SEQ ID NO: 679270 - protein, 16 aa, Homo sapiens
  CDR3 for beta chain variable domain of TCR clone 339635 (TRBV18, TRBJ1-5)
CASSPYRVEGNQPQHF

SEQ ID NO: 679271 - protein, 14 aa, Homo sapiens
  CDR3 for alpha chain variable domain of TCR clone 339636 (TRAV1-2, TRAJ16)
CAVNRFSDGQKLLF

SEQ ID NO: 679272 - protein, 15 aa, Homo sapiens
  CDR3 for beta chain variable domain of TCR clone 339636 (TRBV5-1, TRBJ2-7)
CASSLNGGPAREHYF

SEQ ID NO: 679273 - protein, 15 aa, Homo sapiens
  CDR3 for alpha chain variable domain of TCR clone 339637 (TRAV12-1, TRAJ44)
CVVFVNTGTASRLTF

SEQ ID NO: 679274 - protein, 17 aa, Homo sapiens
  CDR3 for beta chain variable domain of TCR clone 339637 (TRBV7-8, TRBJ2-6)
CASSAGTGGAGANGLTF

SEQ ID NO: 679275 - protein, 13 aa, Homo sapiens
  CDR3 for alpha chain variable domain of TCR clone 339638 (TRAV3, TRAJ43)
CAVKARNNNDMRF

SEQ ID NO: 679276 - protein, 14 aa, Homo sapiens
  CDR3 for beta chain variable domain of TCR clone 339638 (TRBV7-9, TRBJ2-5)
CASSLDTAQETQYF

SEQ ID NO: 679277 - protein, 12 aa, Homo sapiens
  CDR3 for alpha chain variable domain of TCR clone 339639 (TRAV12-3, TRAJ17)
GAMTLTGNKLTF

SEQ ID NO: 679278 - protein, 15 aa, Homo sapiens
  CDR3 for beta chain variable domain of TCR clone 339639 (TRBV19, TRBJ2-1)
CASSILGEGRNEQFF

SEQ ID NO: 679279 - protein, 13 aa, Homo sapiens
  CDR3 for alpha chain variable domain of TCR clone 339640 (TRAV3, TRAJ20)
CCEAFCNDYKLSF

SEQ ID NO: 679280 - protein, 15 aa, Homo sapiens
  CDR3 for beta chain variable domain of TCR clone 339640 (TRBV7-2, TRBJ2-2)
CASASQGEPTGELFF

SEQ ID NO: 679281 - protein, 12 aa, Homo sapiens
  CDR3 for alpha chain variable domain of TCR clone 339641 (TRAV3, TRAJ43)
CAVRDPNNDMRF

SEQ ID NO: 679282 - protein, 13 aa, Homo sapiens
  CDR3 for beta chain variable domain of TCR clone 339641 (TRBV7-9, TRBJ2-1)
CASSLDVGNEQFF

SEQ ID NO: 679283 - protein, 14 aa, Homo sapiens
  CDR3 for alpha chain variable domain of TCR clone 339642 (TRAV12-2, TRAJ29)
CAVRRNSGNTPLVF

SEQ ID NO: 679284 - protein, 13 aa, Homo sapiens
  CDR3 for beta chain variable domain of TCR clone 339642 (TRBV12-4, TRBJ2-1)
CASSHYTDNEQFV

SEQ ID NO: 679285 - protein, 16 aa, Homo sapiens
  CDR3 for alpha chain variable domain of TCR clone 339643 (TRAV16, TRAJ4)
CITVLPFSGGYNKLIS

SEQ ID NO: 679286 - protein, 14 aa, Homo sapiens
  CDR3 for beta chain variable domain of TCR clone 339643 (TRBV19, TRBJ2-7)
CASSMGQGAIEQYF

SEQ ID NO: 679287 - protein, 12 aa, Homo sapiens
  CDR3 for alpha chain variable domain of TCR clone 339644 (TRAV13-1, TRAJ6)
CAAMGGSHIPTF

SEQ ID NO: 679288 - protein, 12 aa, Homo sapiens
  CDR3 for beta chain variable domain of TCR clone 339644 (TRBV5-4, TRBJ2-2)
CASIEQGGELFF

SEQ ID NO: 679289 - protein, 15 aa, Homo sapiens
  CDR3 for alpha chain variable domain of TCR clone 339645 (TRAV17, TRAJ40)
CATVSSTSGTYKYIF

SEQ ID NO: 679290 - protein, 11 aa, Homo sapiens
  CDR3 for beta chain variable domain of TCR clone 339645 (TRBV29-1, TRBJ2-5)
CSEDRTGTQYF

SEQ ID NO: 679291 - protein, 15 aa, Homo sapiens
  CDR3 for alpha chain variable domain of TCR clone 339646 (TRAV26-2, TRAJ53)
CIRGNSGGSNYKLTF

SEQ ID NO: 679292 - protein, 16 aa, Homo sapiens
  CDR3 for beta chain variable domain of TCR clone 339646 (TRBV12-4, TRBJ1-5)
CASSRPVGGSNQPQHF

SEQ ID NO: 679293 - protein, 13 aa, Homo sapiens
  CDR3 for alpha chain variable domain of TCR clone 339647 (TRAV3, TRAJ29)
CAVRDIIGTPLVF

SEQ ID NO: 679294 - protein, 14 aa, Homo sapiens
  CDR3 for beta chain variable domain of TCR clone 339647 (TRBV27, TRBJ2-1)
CASSATGVYNEQFF

SEQ ID NO: 679295 - protein, 14 aa, Homo sapiens
  CDR3 for alpha chain variable domain of TCR clone 339648 (TRAV30, TRAJ33)
CGTVAPRRNYQLIW

SEQ ID NO: 679296 - protein, 16 aa, Homo sapiens
  CDR3 for beta chain variable domain of TCR clone 339648 (TRBV3-1, TRBJ2-5)
CASSPGQFNGFGTQYF

SEQ ID NO: 679297 - protein, 14 aa, Homo sapiens
  CDR3 for alpha chain variable domain of TCR clone 339649 (TRAV16, TRAJ54)
CALSGLQGAQKLVF

SEQ ID NO: 679298 - protein, 14 aa, Homo sapiens
  CDR3 for beta chain variable domain of TCR clone 339649 (TRBV11-2, TRBJ2-5)
CASSRTGGIETQYF

SEQ ID NO: 679299 - protein, 16 aa, Homo sapiens
  CDR3 for alpha chain variable domain of TCR clone 339650 (TRAV3, TRAJ21)
CAVRDIERGNFNKFYF

SEQ ID NO: 679300 - protein, 13 aa, Homo sapiens
  CDR3 for beta chain variable domain of TCR clone 339650 (TRBV6-5, TRBJ2-7)
CTSSLMTGYEQYF

SEQ ID NO: 679301 - protein, 13 aa, Homo sapiens
  CDR3 for alpha chain variable domain of TCR clone 339651 (TRAV38-1, TRAJ42)
CARWGGSQGNLIF

SEQ ID NO: 679302 - protein, 17 aa, Homo sapiens
  CDR3 for beta chain variable domain of TCR clone 339651 (TRBV20-1, TRBJ2-1)
YSARDPLAGVWDNEQFF

SEQ ID NO: 679303 - protein, 17 aa, Homo sapiens
  CDR3 for alpha chain variable domain of TCR clone 339652 (TRAV13-1, TRAJ31)
CAPRDRLMFGDGAQLVV

SEQ ID NO: 679304 - protein, 12 aa, Homo sapiens
  CDR3 for beta chain variable domain of TCR clone 339652 (TRBV7-9, TRBJ2-7)
CASSLEGDEQYF

SEQ ID NO: 679305 - protein, 14 aa, Homo sapiens
  CDR3 for alpha chain variable domain of TCR clone 339653 (TRAV1-2, TRAJ16)
CAVNRFADGQKLLF

SEQ ID NO: 679306 - protein, 13 aa, Homo sapiens
  CDR3 for beta chain variable domain of TCR clone 339653 (TRBV11-2, TRBJ2-5)
CASSFSSQETQYF

SEQ ID NO: 679307 - protein, 12 aa, Homo sapiens
  CDR3 for alpha chain variable domain of TCR clone 339654 (TRAV12-2, TRAJ31)
CAVNTPDARLMF

SEQ ID NO: 679308 - protein, 17 aa, Homo sapiens
  CDR3 for beta chain variable domain of TCR clone 339654 (TRBV11-2, TRBJ2-1)
CASSLYPPGVEYNEQFF

SEQ ID NO: 679309 - protein, 15 aa, Homo sapiens
  CDR3 for alpha chain variable domain of TCR clone 339655 (TRAV8-3, TRAJ40)
CAAPSLGSGTYKYIF

SEQ ID NO: 679310 - protein, 16 aa, Homo sapiens
  CDR3 for beta chain variable domain of TCR clone 339655 (TRBV11-2, TRBJ1-1)
CASSLRQGGEHSKAFF

SEQ ID NO: 679311 - protein, 15 aa, Homo sapiens
  CDR3 for alpha chain variable domain of TCR clone 339656 (TRAV34, TRAJ38)
CGADFTPGNNRKRLW

SEQ ID NO: 679312 - protein, 16 aa, Homo sapiens
  CDR3 for beta chain variable domain of TCR clone 339656 (TRBV12-5, TRBJ2-5)
CASGPRTSGNQETQYF

SEQ ID NO: 679313 - protein, 16 aa, Homo sapiens
  CDR3 for alpha chain variable domain of TCR clone 339657 (TRAV16, TRAJ42)
CARKMNYGGSQGNLIF

SEQ ID NO: 679314 - protein, 17 aa, Homo sapiens
  CDR3 for beta chain variable domain of TCR clone 339657 (TRBV20-1, TRBJ2-7)
CSAREGGTVSTSSTSGR

SEQ ID NO: 679315 - protein, 13 aa, Homo sapiens
  CDR3 for alpha chain variable domain of TCR clone 339658 (TRAV26-1, TRAJ41)
CIVRINSGYALNF

SEQ ID NO: 679316 - protein, 13 aa, Homo sapiens
  CDR3 for beta chain variable domain of TCR clone 339658 (TRBV20-1, TRBJ1-5)
CSATAAGGPPQHF

SEQ ID NO: 679317 - protein, 18 aa, Homo sapiens
  CDR3 for alpha chain variable domain of TCR clone 339659 (TRAV21, TRAJ52)
CAVRPSPAGGTSYGKLTF

SEQ ID NO: 679318 - protein, 16 aa, Homo sapiens
  CDR3 for beta chain variable domain of TCR clone 339659 (TRBV7-2, TRBJ2-1)
CASTLDSGGSRNEQFF

SEQ ID NO: 679319 - protein, 14 aa, Homo sapiens
  CDR3 for alpha chain variable domain of TCR clone 339660 (TRAV8-4, TRAJ39)
CAVSEGNAGNMLTF

SEQ ID NO: 679320 - protein, 13 aa, Homo sapiens
  CDR3 for beta chain variable domain of TCR clone 339660 (TRBV7-9, TRBJ1-2)
CASSLKQNYGYTF

SEQ ID NO: 679321 - protein, 13 aa, Homo sapiens
  CDR3 for alpha chain variable domain of TCR clone 339661 (TRAV12-2, TRAJ50)
CAVIVTSYEKVIF

SEQ ID NO: 679322 - protein, 13 aa, Homo sapiens
  CDR3 for beta chain variable domain of TCR clone 339661 (TRBV7-3, TRBJ1-1)
CASSQDWGAEAFF

SEQ ID NO: 679323 - protein, 10 aa, Homo sapiens
  CDR3 for alpha chain variable domain of TCR clone 339662 (TRAV1-2, TRAJ20)
CAVTDYKLSF

SEQ ID NO: 679324 - protein, 15 aa, Homo sapiens
  CDR3 for beta chain variable domain of TCR clone 339662 (TRBV6-3, TRBJ2-7)
CSSSSPGTVFYEQYF

SEQ ID NO: 679325 - protein, 14 aa, Homo sapiens
  CDR3 for alpha chain variable domain of TCR clone 339663 (TRAV17, TRAJ57)
CAKDPQGGSEKLVF

SEQ ID NO: 679326 - protein, 14 aa, Homo sapiens
  CDR3 for beta chain variable domain of TCR clone 339663 (TRBV25-1, TRBJ1-1)
CASTHLGGNTEAFF

SEQ ID NO: 679327 - protein, 13 aa, Homo sapiens
  CDR3 for alpha chain variable domain of TCR clone 339664 (TRAV12-1, TRAJ29)
CVVVVSGNTPLVF

SEQ ID NO: 679328 - protein, 17 aa, Homo sapiens
  CDR3 for beta chain variable domain of TCR clone 339664 (TRBV11-2, TRBJ2-1)
CASSLYPPGVEYNERFF

SEQ ID NO: 679329 - protein, 10 aa, Homo sapiens
  CDR3 for alpha chain variable domain of TCR clone 339665 (TRAV36/DV7, TRAJ37)
SSSNTGKLIF

SEQ ID NO: 679330 - protein, 15 aa, Homo sapiens
  CDR3 for beta chain variable domain of TCR clone 339665 (TRBV20-1, TRBJ1-1)
CSARDPRGEYTEAFF

SEQ ID NO: 679331 - protein, 14 aa, Homo sapiens
  CDR3 for alpha chain variable domain of TCR clone 339666 (TRAV24, TRAJ42)
CAKNYGGSQGNLIF

SEQ ID NO: 679332 - protein, 15 aa, Homo sapiens
  CDR3 for beta chain variable domain of TCR clone 339666 (TRBV19, TRBJ1-5)
CASSIPGGAGQPQHF

SEQ ID NO: 679333 - protein, 16 aa, Homo sapiens
  CDR3 for alpha chain variable domain of TCR clone 339667 (TRAV3, TRAJ37)
CAVRPHGSGNTGKLIF

SEQ ID NO: 679334 - protein, 16 aa, Homo sapiens
  CDR3 for beta chain variable domain of TCR clone 339667 (TRBV10-3, TRBJ2-1)
CAIRGGGRGDYNEQFF

SEQ ID NO: 679335 - protein, 11 aa, Homo sapiens
  CDR3 for alpha chain variable domain of TCR clone 339668 (TRAV3, TRAJ21)
CVVGNFNKFYF

SEQ ID NO: 679336 - protein, 14 aa, Homo sapiens
  CDR3 for beta chain variable domain of TCR clone 339668 (TRBV19, TRBJ1-5)
CASSKMTGPQPQHF

SEQ ID NO: 679337 - protein, 16 aa, Homo sapiens
  CDR3 for alpha chain variable domain of TCR clone 339669 (TRAV30, TRAJ24)
CGTEIVDADSWVKFQF

SEQ ID NO: 679338 - protein, 17 aa, Homo sapiens
  CDR3 for beta chain variable domain of TCR clone 339669 (TRBV7-3, TRBJ2-3)
CASSLMKRMRGADTQYF

SEQ ID NO: 679339 - protein, 14 aa, Homo sapiens
  CDR3 for alpha chain variable domain of TCR clone 339670 (TRAV1-2, TRAJ8)
CAVREDTGFQKLAF

SEQ ID NO: 679340 - protein, 16 aa, Homo sapiens
  CDR3 for beta chain variable domain of TCR clone 339670 (TRBV7-6, TRBJ2-6)
CASSVPGLSGANVLTF

SEQ ID NO: 679341 - protein, 14 aa, Homo sapiens
  CDR3 for alpha chain variable domain of TCR clone 339671 (TRAV35, TRAJ53)
CSGNSGGSNYKLTF

SEQ ID NO: 679342 - protein, 15 aa, Homo sapiens
  CDR3 for beta chain variable domain of TCR clone 339671 (TRBV7-9, TRBJ2-1)
CASSLGWGRANEQFF

SEQ ID NO: 679343 - protein, 16 aa, Homo sapiens
  CDR3 for alpha chain variable domain of TCR clone 339672 (TRAV17, TRAJ35)
CAAAEGGIGFGNVLHC

SEQ ID NO: 679344 - protein, 16 aa, Homo sapiens
  CDR3 for beta chain variable domain of TCR clone 339672 (TRBV6-5, TRBJ2-7)
CASSSDPTSGFYEQYF

SEQ ID NO: 679345 - protein, 12 aa, Homo sapiens
  CDR3 for alpha chain variable domain of TCR clone 339673 (TRAV2, TRAJ24)
CAATDSWGKFQF

SEQ ID NO: 679346 - protein, 12 aa, Homo sapiens
  CDR3 for beta chain variable domain of TCR clone 339673 (TRBV7-9, TRBJ1-5)
CASSPQGQPQHF

SEQ ID NO: 679347 - protein, 11 aa, Homo sapiens
  CDR3 for alpha chain variable domain of TCR clone 339674 (TRAV2, TRAJ33)
CGVESNYQLIW

SEQ ID NO: 679348 - protein, 15 aa, Homo sapiens
  CDR3 for beta chain variable domain of TCR clone 339674 (TRBV19, TRBJ2-1)
CASSIQATSYNEQFF

SEQ ID NO: 679349 - protein, 16 aa, Homo sapiens
  CDR3 for alpha chain variable domain of TCR clone 339675 (TRAV26-1, TRAJ37)
CIVRGDGSGNTGKLSS

SEQ ID NO: 679350 - protein, 13 aa, Homo sapiens
  CDR3 for beta chain variable domain of TCR clone 339675 (TRBV4-1, TRBJ2-2)
CASSQENTGELFF

SEQ ID NO: 679351 - protein, 13 aa, Homo sapiens
  CDR3 for alpha chain variable domain of TCR clone 339676 (TRAV16, TRAJ48)
CSPLNFGNEKLTF

SEQ ID NO: 679352 - protein, 11 aa, Homo sapiens
  CDR3 for beta chain variable domain of TCR clone 339676 (TRBV7-9, TRBJ2-3)
CASSPTNTQYV

SEQ ID NO: 679353 - protein, 11 aa, Homo sapiens
  CDR3 for alpha chain variable domain of TCR clone 339677 (TRAV12-3, TRAJ26)
CAMSHGQNFVF

SEQ ID NO: 679354 - protein, 14 aa, Homo sapiens
  CDR3 for beta chain variable domain of TCR clone 339677 (TRBV7-2, TRBJ2-7)
CASSPKTSFYEQYF

SEQ ID NO: 679355 - protein, 13 aa, Homo sapiens
  CDR3 for alpha chain variable domain of TCR clone 339678 (TRAV36/DV7, TRAJ7)
CAVERYGNNRLAF

SEQ ID NO: 679356 - protein, 15 aa, Homo sapiens
  CDR3 for beta chain variable domain of TCR clone 339678 (TRBV6-3, TRBJ2-7)
CASSSPGTVFYEQYF

SEQ ID NO: 679357 - protein, 14 aa, Homo sapiens
  CDR3 for alpha chain variable domain of TCR clone 339679 (TRAV8-2, TRAJ37)
CVVSISGNTGKLIF

SEQ ID NO: 679358 - protein, 14 aa, Homo sapiens
  CDR3 for beta chain variable domain of TCR clone 339679 (TRBV7-9, TRBJ2-5)
CASSLVGGEETQYF

SEQ ID NO: 679359 - protein, 14 aa, Homo sapiens
  CDR3 for alpha chain variable domain of TCR clone 339680 (TRAV1-2, TRAJ8)
CAVREATGVQKLVF

SEQ ID NO: 679360 - protein, 14 aa, Homo sapiens
  CDR3 for beta chain variable domain of TCR clone 339680 (TRBV2, TRBJ2-1)
CASRTGSSYNEQFF

SEQ ID NO: 679361 - protein, 16 aa, Homo sapiens
  CDR3 for alpha chain variable domain of TCR clone 339681 (TRAV12-2, TRAJ32)
CAVHLGQGGATNKLIF

SEQ ID NO: 679362 - protein, 15 aa, Homo sapiens
  CDR3 for beta chain variable domain of TCR clone 339681 (TRBV20-1, TRBJ2-7)
CSARGPLAAGREQYF

SEQ ID NO: 679363 - protein, 11 aa, Homo sapiens
  CDR3 for alpha chain variable domain of TCR clone 339682 (TRAV21, TRAJ39)
LLVNAGNMLTF

SEQ ID NO: 679364 - protein, 14 aa, Homo sapiens
  CDR3 for beta chain variable domain of TCR clone 339682 (TRBV7-2, TRBJ1-2)
SASSQTGSTYGYTF

SEQ ID NO: 679365 - protein, 16 aa, Homo sapiens
  CDR3 for alpha chain variable domain of TCR clone 339683 (TRAV12-2, TRAJ40)
CAVIRGGTSGTYKYIF

SEQ ID NO: 679366 - protein, 14 aa, Homo sapiens
  CDR3 for beta chain variable domain of TCR clone 339683 (TRBV20-1, TRBJ2-5)
CSARAGRAGETQYF

SEQ ID NO: 679367 - protein, 12 aa, Homo sapiens
  CDR3 for alpha chain variable domain of TCR clone 339684 (TRAV8-3, TRAJ20)
CAVGANDYKLSF

SEQ ID NO: 679368 - protein, 13 aa, Homo sapiens
  CDR3 for beta chain variable domain of TCR clone 339684 (TRBV18, TRBJ1-1)
CASSGGRNTEAFF

SEQ ID NO: 679369 - protein, 15 aa, Homo sapiens
  CDR3 for alpha chain variable domain of TCR clone 339685 (TRAV12-2, TRAJ13)
CRESLGSVGYQKVTF

SEQ ID NO: 679370 - protein, 15 aa, Homo sapiens
  CDR3 for beta chain variable domain of TCR clone 339685 (TRBV6-5, TRBJ2-1)
CASRRAQLSYNEQFF

SEQ ID NO: 679371 - protein, 15 aa, Homo sapiens
  CDR3 for alpha chain variable domain of TCR clone 339686 (TRAV13-1, TRAJ44)
CAARRGGGTASKLTF

SEQ ID NO: 679372 - protein, 16 aa, Homo sapiens
  CDR3 for beta chain variable domain of TCR clone 339686 (TRBV29-1, TRBJ2-7)
CSVEVVGTSGSYEQYF

SEQ ID NO: 679373 - protein, 11 aa, Homo sapiens
  CDR3 for alpha chain variable domain of TCR clone 339687 (TRAV21, TRAJ11)
CAVNGYSTLTF

SEQ ID NO: 679374 - protein, 15 aa, Homo sapiens
  CDR3 for beta chain variable domain of TCR clone 339687 (TRBV19, TRBJ1-6)
CASSTQGAVGSPLHF

SEQ ID NO: 679375 - protein, 11 aa, Homo sapiens
  CDR3 for alpha chain variable domain of TCR clone 339688 (TRAV2, TRAJ13)
CASGGYQKVTF

SEQ ID NO: 679376 - protein, 13 aa, Homo sapiens
  CDR3 for beta chain variable domain of TCR clone 339688 (TRBV20-1, TRBJ1-1)
CNARGGGNTEAFF

SEQ ID NO: 679377 - protein, 12 aa, Homo sapiens
  CDR3 for alpha chain variable domain of TCR clone 339689 (TRAV4, TRAJ9)
CLVPTGGFKTIF

SEQ ID NO: 679378 - protein, 13 aa, Homo sapiens
  CDR3 for beta chain variable domain of TCR clone 339689 (TRBV10-3, TRBJ1-2)
CAISERDSYGYTF

SEQ ID NO: 679379 - protein, 11 aa, Homo sapiens
  CDR3 for alpha chain variable domain of TCR clone 339690 (TRAV13-1, TRAJ6)
CATLGSYIPTF

SEQ ID NO: 679380 - protein, 12 aa, Homo sapiens
  CDR3 for beta chain variable domain of TCR clone 339690 (TRBV11-2, TRBJ2-1)
CASSPRNNEQFF

SEQ ID NO: 679381 - protein, 14 aa, Homo sapiens
  CDR3 for alpha chain variable domain of TCR clone 339691 (TRAV8-1, TRAJ39)
CAVNASNAGNMLTF

SEQ ID NO: 679382 - protein, 15 aa, Homo sapiens
  CDR3 for beta chain variable domain of TCR clone 339691 (TRBV6-3, TRBJ2-7)
CASSSPGTVFYEQYF

SEQ ID NO: 679383 - protein, 13 aa, Homo sapiens
  CDR3 for alpha chain variable domain of TCR clone 339692 (TRAV26-1, TRAJ34)
CIVGGHNTDKLIF

SEQ ID NO: 679384 - protein, 15 aa, Homo sapiens
  CDR3 for beta chain variable domain of TCR clone 339692 (TRBV4-1, TRBJ2-7)
CASSQEWGPSYEQYF

SEQ ID NO: 679385 - protein, 16 aa, Homo sapiens
  CDR3 for alpha chain variable domain of TCR clone 339693 (TRAV12-1, TRAJ45)
CVVIRYSGGGADGLTF

SEQ ID NO: 679386 - protein, 14 aa, Homo sapiens
  CDR3 for beta chain variable domain of TCR clone 339693 (TRBV7-2, TRBJ1-1)
CASSFLTGTTEAFF

SEQ ID NO: 679387 - protein, 14 aa, Homo sapiens
  CDR3 for alpha chain variable domain of TCR clone 339694 (TRAV12-1, TRAJ13)
CVVTFSGGYQKVTF

SEQ ID NO: 679388 - protein, 13 aa, Homo sapiens
  CDR3 for beta chain variable domain of TCR clone 339694 (TRBV7-3, TRBJ1-1)
CASSQDWGAEAFF

SEQ ID NO: 679389 - protein, 14 aa, Homo sapiens
  CDR3 for alpha chain variable domain of TCR clone 339695 (TRAV13-1, TRAJ3)
CAAEGYSSASKIIF

SEQ ID NO: 679390 - protein, 13 aa, Homo sapiens
  CDR3 for beta chain variable domain of TCR clone 339695 (TRBV19, TRBJ2-5)
CQLVQRDPRDQYF

SEQ ID NO: 679391 - protein, 21 aa, Homo sapiens
  CDR3 for alpha chain variable domain of TCR clone 339696 (TRAV1-2, TRAJ37)
CLLPLCCERFHGSGNTGKLIF

SEQ ID NO: 679392 - protein, 14 aa, Homo sapiens
  CDR3 for beta chain variable domain of TCR clone 339696 (TRBV2, TRBJ2-5)
CASSEVLAQVTQYF

SEQ ID NO: 679393 - protein, 15 aa, Homo sapiens
  CDR3 for alpha chain variable domain of TCR clone 339697 (TRAV1-2, TRAJ12)
CAMIPEVDSSYKLIF

SEQ ID NO: 679394 - protein, 12 aa, Homo sapiens
  CDR3 for beta chain variable domain of TCR clone 339697 (TRBV12-4, TRBJ2-7)
CASSLGGYEQYF

SEQ ID NO: 679395 - protein, 16 aa, Homo sapiens
  CDR3 for alpha chain variable domain of TCR clone 339698 (TRAV30, TRAJ24)
CGTEIVDADSWGKFQS

SEQ ID NO: 679396 - protein, 15 aa, Homo sapiens
  CDR3 for beta chain variable domain of TCR clone 339698 (TRBV27, TRBJ2-1)
CASSNGGGSSNEQFF

SEQ ID NO: 679397 - protein, 15 aa, Homo sapiens
  CDR3 for alpha chain variable domain of TCR clone 339699 (TRAV14/DV4, TRAJ28)
CAKLFSGAGSYQLTF

SEQ ID NO: 679398 - protein, 14 aa, Homo sapiens
  CDR3 for beta chain variable domain of TCR clone 339699 (TRBV12-5, TRBJ2-5)
CASGSRTHQETQYF

SEQ ID NO: 679399 - protein, 12 aa, Homo sapiens
  CDR3 for alpha chain variable domain of TCR clone 339700 (TRAV21, TRAJ33)
CATMDSNYQLIW

SEQ ID NO: 679400 - protein, 14 aa, Homo sapiens
  CDR3 for beta chain variable domain of TCR clone 339700 (TRBV7-3, TRBJ1-1)
CASSLKGRNAEAFF

SEQ ID NO: 679401 - protein, 15 aa, Homo sapiens
  CDR3 for alpha chain variable domain of TCR clone 339701 (TRAV8-1, TRAJ6)
CAVNANPGGSYIPTF

SEQ ID NO: 679402 - protein, 17 aa, Homo sapiens
  CDR3 for beta chain variable domain of TCR clone 339701 (TRBV3-1, TRBJ2-2)
CASSQGPARTADRELFF

SEQ ID NO: 679403 - protein, 15 aa, Homo sapiens
  CDR3 for alpha chain variable domain of TCR clone 339702 (TRAV26-2, TRAJ26)
CILRDFDNYGQNCVF

SEQ ID NO: 679404 - protein, 14 aa, Homo sapiens
  CDR3 for beta chain variable domain of TCR clone 339702 (TRBV29-1, TRBJ2-5)
CSFWTPYAGETQYF

SEQ ID NO: 679405 - protein, 19 aa, Homo sapiens
  CDR3 for alpha chain variable domain of TCR clone 339703 (TRAV3, TRAJ6)
CASRDRNPSRSGGSYIPTF

SEQ ID NO: 679406 - protein, 15 aa, Homo sapiens
  CDR3 for beta chain variable domain of TCR clone 339703 (TRBV18, TRBJ2-7)
CASSPTFMDSYEQYF

SEQ ID NO: 679407 - protein, 13 aa, Homo sapiens
  CDR3 for alpha chain variable domain of TCR clone 339704 (TRAV27, TRAJ53)
CAGQGGSNYILTF

SEQ ID NO: 679408 - protein, 13 aa, Homo sapiens
  CDR3 for beta chain variable domain of TCR clone 339704 (TRBV29-1, TRBJ1-1)
CSVESGFGTEAFF

SEQ ID NO: 679409 - protein, 15 aa, Homo sapiens
  CDR3 for alpha chain variable domain of TCR clone 339705 (TRAV21, TRAJ53)
CATLNSGGCNYKLTF

SEQ ID NO: 679410 - protein, 13 aa, Homo sapiens
  CDR3 for beta chain variable domain of TCR clone 339705 (TRBV12-4, TRBJ2-7)
CASSFVPTAEQYF

SEQ ID NO: 679411 - protein, 12 aa, Homo sapiens
  CDR3 for alpha chain variable domain of TCR clone 339706 (TRAV17, TRAJ20)
CATYSNYYKLSF

SEQ ID NO: 679412 - protein, 11 aa, Homo sapiens
  CDR3 for beta chain variable domain of TCR clone 339706 (TRBV4-1, TRBJ2-2)
CASEHTGELFF

SEQ ID NO: 679413 - protein, 16 aa, Homo sapiens
  CDR3 for alpha chain variable domain of TCR clone 339707 (TRAV14/DV4, TRAJ15)
CAMREGHAQAGTALIF

SEQ ID NO: 679414 - protein, 12 aa, Homo sapiens
  CDR3 for beta chain variable domain of TCR clone 339707 (TRBV28, TRBJ2-6)
CAIQAGANVLTF

SEQ ID NO: 679415 - protein, 13 aa, Homo sapiens
  CDR3 for alpha chain variable domain of TCR clone 339708 (TRAV1-2, TRAJ9)
CAALNTGGFNTIF

SEQ ID NO: 679416 - protein, 13 aa, Homo sapiens
  CDR3 for beta chain variable domain of TCR clone 339708 (TRBV19, TRBJ1-2)
CASSVPGQDSYTF

SEQ ID NO: 679417 - protein, 14 aa, Homo sapiens
  CDR3 for alpha chain variable domain of TCR clone 339709 (TRAV12-3, TRAJ29)
CAMIWLSGNTPLVF

SEQ ID NO: 679418 - protein, 16 aa, Homo sapiens
  CDR3 for beta chain variable domain of TCR clone 339709 (TRBV28, TRBJ2-7)
CASSSGTSGRGYEQYF

SEQ ID NO: 679419 - protein, 15 aa, Homo sapiens
  CDR3 for alpha chain variable domain of TCR clone 339710 (TRAV8-3, TRAJ45)
CASSYSGGGADGLTF

SEQ ID NO: 679420 - protein, 12 aa, Homo sapiens
  CDR3 for beta chain variable domain of TCR clone 339710 (TRBV11-3, TRBJ2-3)
CASRPGTDTQYF

SEQ ID NO: 679421 - protein, 12 aa, Homo sapiens
  CDR3 for alpha chain variable domain of TCR clone 339711 (TRAV16, TRAJ22)
CALEVSAMQLTF

SEQ ID NO: 679422 - protein, 14 aa, Homo sapiens
  CDR3 for beta chain variable domain of TCR clone 339711 (TRBV11-2, TRBJ2-3)
CASSSIASTDTQYF

SEQ ID NO: 679423 - protein, 16 aa, Homo sapiens
  CDR3 for alpha chain variable domain of TCR clone 339712 (TRAV12-3, TRAJ53)
CAMSPGSGGSNYKLTF

SEQ ID NO: 679424 - protein, 16 aa, Homo sapiens
  CDR3 for beta chain variable domain of TCR clone 339712 (TRBV20-1, TRBJ2-2)
QCSGSGQGGLTGELFF

SEQ ID NO: 679425 - protein, 12 aa, Homo sapiens
  CDR3 for alpha chain variable domain of TCR clone 339713 (TRAV12-3, TRAJ17)
CAMTLTGHKLTF

SEQ ID NO: 679426 - protein, 15 aa, Homo sapiens
  CDR3 for beta chain variable domain of TCR clone 339713 (TRBV20-1, TRBJ2-7)
CSARDRVSGIDEQYF

SEQ ID NO: 679427 - protein, 16 aa, Homo sapiens
  CDR3 for alpha chain variable domain of TCR clone 339714 (TRAV23/DV6, TRAJ21)
CAASSGGGTTATNFTL

SEQ ID NO: 679428 - protein, 11 aa, Homo sapiens
  CDR3 for beta chain variable domain of TCR clone 339714 (TRBV7-8, TRBJ2-7)
CASSLSLEQYF

SEQ ID NO: 679429 - protein, 12 aa, Homo sapiens
  CDR3 for alpha chain variable domain of TCR clone 339715 (TRAV1-1, TRAJ8)
CAGGTGYQKLVF

SEQ ID NO: 679430 - protein, 16 aa, Homo sapiens
  CDR3 for beta chain variable domain of TCR clone 339715 (TRBV4-1, TRBJ2-1)
CASSQDWADTLNEQFF

SEQ ID NO: 679431 - protein, 12 aa, Homo sapiens
  CDR3 for alpha chain variable domain of TCR clone 339716 (TRAV2, TRAJ20)
CCEDPSEYKLSF

SEQ ID NO: 679432 - protein, 16 aa, Homo sapiens
  CDR3 for beta chain variable domain of TCR clone 339716 (TRBV25-1, TRBJ2-7)
CASSELTGGGIYEQYF

SEQ ID NO: 679433 - protein, 12 aa, Homo sapiens
  CDR3 for alpha chain variable domain of TCR clone 339717 (TRAV13-2, TRAJ39)
CAESRPGNMLTF

SEQ ID NO: 679434 - protein, 12 aa, Homo sapiens
  CDR3 for beta chain variable domain of TCR clone 339717 (TRBV12-4, TRBJ1-5)
CASSLGRQPQHF

SEQ ID NO: 679435 - protein, 14 aa, Homo sapiens
  CDR3 for alpha chain variable domain of TCR clone 339718 (TRAV5, TRAJ3)
CAERYDSSASKIIF

SEQ ID NO: 679436 - protein, 12 aa, Homo sapiens
  CDR3 for beta chain variable domain of TCR clone 339718 (TRBV11-2, TRBJ2-2)
CASSLGGGELFF

SEQ ID NO: 679437 - protein, 14 aa, Homo sapiens
  CDR3 for alpha chain variable domain of TCR clone 339719 (TRAV1-2, TRAJ8)
CAVREDTGFQKLVF

SEQ ID NO: 679438 - protein, 14 aa, Homo sapiens
  CDR3 for beta chain variable domain of TCR clone 339719 (TRBV7-2, TRBJ2-7)
CANSPKTSFYEQYF

SEQ ID NO: 679439 - protein, 15 aa, Homo sapiens
  CDR3 for alpha chain variable domain of TCR clone 339720 (TRAV23/DV6, TRAJ5)
CATSLMDTGRRALTF

SEQ ID NO: 679440 - protein, 12 aa, Homo sapiens
  CDR3 for beta chain variable domain of TCR clone 339720 (TRBV28, TRBJ2-3)
CASSGGPDTQYF

SEQ ID NO: 679441 - protein, 12 aa, Homo sapiens
  CDR3 for alpha chain variable domain of TCR clone 339721 (TRAV23/DV6, TRAJ30)
CAARKGDYKIIF

SEQ ID NO: 679442 - protein, 18 aa, Homo sapiens
  CDR3 for beta chain variable domain of TCR clone 339721 (TRBV10-3, TRBJ2-3)
CAISESRVGPMRGDTQYF

SEQ ID NO: 679443 - protein, 16 aa, Homo sapiens
  CDR3 for alpha chain variable domain of TCR clone 339722 (TRAV12-2, TRAJ6)
CAVRIQASGGSYIPTF

SEQ ID NO: 679444 - protein, 14 aa, Homo sapiens
  CDR3 for beta chain variable domain of TCR clone 339722 (TRBV2, TRBJ2-2)
CASSERRFTVELFF

SEQ ID NO: 679445 - protein, 12 aa, Homo sapiens
  CDR3 for alpha chain variable domain of TCR clone 339723 (TRAV13-1, TRAJ21)
CAAKEGFNKFYF

SEQ ID NO: 679446 - protein, 14 aa, Homo sapiens
  CDR3 for beta chain variable domain of TCR clone 339723 (TRBV25-1, TRBJ2-2)
CASSELGLPGELFF

SEQ ID NO: 679447 - protein, 15 aa, Homo sapiens
  CDR3 for alpha chain variable domain of TCR clone 339724 (TRAV3, TRAJ4)
CAVRDGTGGYNKLIF

SEQ ID NO: 679448 - protein, 15 aa, Homo sapiens
  CDR3 for beta chain variable domain of TCR clone 339724 (TRBV19, TRBJ1-2)
CASSVGQVLNYGYTF

SEQ ID NO: 679449 - protein, 11 aa, Homo sapiens
  CDR3 for alpha chain variable domain of TCR clone 339725 (TRAV2, TRAJ13)
CASGGYQKVSF

SEQ ID NO: 679450 - protein, 16 aa, Homo sapiens
  CDR3 for beta chain variable domain of TCR clone 339725 (TRBV6-1, TRBJ2-5)
CASSGTLDRGAETQYF

SEQ ID NO: 679451 - protein, 11 aa, Homo sapiens
  CDR3 for alpha chain variable domain of TCR clone 339726 (TRAV12-3, TRAJ27)
CAMANAGKSTF

SEQ ID NO: 679452 - protein, 14 aa, Homo sapiens
  CDR3 for beta chain variable domain of TCR clone 339726 (TRBV7-9, TRBJ2-5)
CASSLVGGEETQYF

SEQ ID NO: 679453 - protein, 14 aa, Homo sapiens
  CDR3 for alpha chain variable domain of TCR clone 339727 (TRAV23/DV6, TRAJ4)
CAAPSSGGYNKLIF

SEQ ID NO: 679454 - protein, 16 aa, Homo sapiens
  CDR3 for beta chain variable domain of TCR clone 339727 (TRBV19, TRBJ1-1)
CASRFGGPVNGTEAFF

SEQ ID NO: 679455 - protein, 14 aa, Homo sapiens
  CDR3 for alpha chain variable domain of TCR clone 339728 (TRAV6, TRAJ36)
CAGPPKRGANNLFF

SEQ ID NO: 679456 - protein, 15 aa, Homo sapiens
  CDR3 for beta chain variable domain of TCR clone 339728 (TRBV18, TRBJ2-7)
CASSPASTPNYEQYF

SEQ ID NO: 679457 - protein, 14 aa, Homo sapiens
  CDR3 for alpha chain variable domain of TCR clone 339729 (TRAV1-2, TRAJ8)
CAVREDTGFQKLVF

SEQ ID NO: 679458 - protein, 14 aa, Homo sapiens
  CDR3 for beta chain variable domain of TCR clone 339729 (TRBV19, TRBJ2-3)
CASSVGRGSDTQYF

SEQ ID NO: 679459 - protein, 22 aa, Homo sapiens
  CDR3 for alpha chain variable domain of TCR clone 339730 (TRAV8-4, TRAJ9)
CAVSDRTEASKLSLEQEQDYLL

SEQ ID NO: 679460 - protein, 13 aa, Homo sapiens
  CDR3 for beta chain variable domain of TCR clone 339730 (TRBV11-2, TRBJ2-7)
CASSLGDSYEQYF

SEQ ID NO: 679461 - protein, 14 aa, Homo sapiens
  CDR3 for alpha chain variable domain of TCR clone 339731 (TRAV12-2, TRAJ41)
CAVNRANSGYALNF

SEQ ID NO: 679462 - protein, 13 aa, Homo sapiens
  CDR3 for beta chain variable domain of TCR clone 339731 (TRBV7-9, TRBJ2-5)
CASLPSGRETQYF

SEQ ID NO: 679463 - protein, 18 aa, Homo sapiens
  CDR3 for alpha chain variable domain of TCR clone 339732 (TRAV13-1, TRAJ52)
CAAKNPNAGGTSYGKLTF

SEQ ID NO: 679464 - protein, 13 aa, Homo sapiens
  CDR3 for beta chain variable domain of TCR clone 339732 (TRBV20-1, TRBJ1-1)
CSARGGGNTEAFF

SEQ ID NO: 679465 - protein, 15 aa, Homo sapiens
  CDR3 for alpha chain variable domain of TCR clone 339733 (TRAV13-1, TRAJ18)
CAVSGGGSTLGRLYF

SEQ ID NO: 679466 - protein, 13 aa, Homo sapiens
  CDR3 for beta chain variable domain of TCR clone 339733 (TRBV18, TRBJ2-1)
CASGLASNNEQFF

SEQ ID NO: 679467 - protein, 15 aa, Homo sapiens
  CDR3 for alpha chain variable domain of TCR clone 339734 (TRAV12-3, TRAJ6)
CAMSATTGGSYIPTF

SEQ ID NO: 679468 - protein, 18 aa, Homo sapiens
  CDR3 for beta chain variable domain of TCR clone 339734 (TRBV5-5, TRBJ1-5)
CASSLRQVKGSSNQPQHF

SEQ ID NO: 679469 - protein, 14 aa, Homo sapiens
  CDR3 for alpha chain variable domain of TCR clone 339735 (TRAV12-3, TRAJ53)
CGATSGGSNYKLAF

SEQ ID NO: 679470 - protein, 13 aa, Homo sapiens
  CDR3 for beta chain variable domain of TCR clone 339735 (TRBV19, TRBJ1-5)
CASSTQDGQPQHF

SEQ ID NO: 679471 - protein, 12 aa, Homo sapiens
  CDR3 for alpha chain variable domain of TCR clone 339736 (TRAV8-3, TRAJ20)
CVVGANDYRLSF

SEQ ID NO: 679472 - protein, 16 aa, Homo sapiens
  CDR3 for beta chain variable domain of TCR clone 339736 (TRBV19, TRBJ2-2)
CASRSPGTGATGELFF

SEQ ID NO: 679473 - protein, 23 aa, Homo sapiens
  CDR3 for alpha chain variable domain of TCR clone 339737 (TRAV12-2, TRAJ43)
SLLIRDSQPSDSATYLCAFDMRF

SEQ ID NO: 679474 - protein, 18 aa, Homo sapiens
  CDR3 for beta chain variable domain of TCR clone 339737 (TRBV20-1, TRBJ2-3)
CSAYGLAGGPGTTDTQYF

SEQ ID NO: 679475 - protein, 13 aa, Homo sapiens
  CDR3 for alpha chain variable domain of TCR clone 339738 (TRAV21, TRAJ27)
CAARPGNAGKSTF

SEQ ID NO: 679476 - protein, 16 aa, Homo sapiens
  CDR3 for beta chain variable domain of TCR clone 339738 (TRBV20-1, TRBJ1-2)
CIASMGQGVANYGDTF

SEQ ID NO: 679477 - protein, 13 aa, Homo sapiens
  CDR3 for alpha chain variable domain of TCR clone 339739 (TRAV12-1, TRAJ42)
CGGVGGSQGNLIF

SEQ ID NO: 679478 - protein, 12 aa, Homo sapiens
  CDR3 for beta chain variable domain of TCR clone 339739 (TRBV19, TRBJ1-5)
CASSIAQQPQHF

SEQ ID NO: 679479 - protein, 11 aa, Homo sapiens
  CDR3 for alpha chain variable domain of TCR clone 339740 (TRAV17, TRAJ9)
CGFTGGFKTIF

SEQ ID NO: 679480 - protein, 14 aa, Homo sapiens
  CDR3 for beta chain variable domain of TCR clone 339740 (TRBV7-9, TRBJ2-2)
CAGSLVQDTGELVF

SEQ ID NO: 679481 - protein, 15 aa, Homo sapiens
  CDR3 for alpha chain variable domain of TCR clone 339741 (TRAV3, TRAJ20)
CAVIDIKLSDYKLSF

SEQ ID NO: 679482 - protein, 15 aa, Homo sapiens
  CDR3 for beta chain variable domain of TCR clone 339741 (TRBV7-9, TRBJ1-6)
CASSSPGRGNSPPHF

SEQ ID NO: 679483 - protein, 16 aa, Homo sapiens
  CDR3 for alpha chain variable domain of TCR clone 339742 (TRAV13-1, TRAJ22)
CAAKGGRSGSARQLTF

SEQ ID NO: 679484 - protein, 15 aa, Homo sapiens
  CDR3 for beta chain variable domain of TCR clone 339742 (TRBV9, TRBJ1-6)
CASSVAGTGVSPLHF

SEQ ID NO: 679485 - protein, 15 aa, Homo sapiens
  CDR3 for alpha chain variable domain of TCR clone 339743 (TRAV26-1, TRAJ40)
CIDRYATSGTYKYIF

SEQ ID NO: 679486 - protein, 16 aa, Homo sapiens
  CDR3 for beta chain variable domain of TCR clone 339743 (TRBV28, TRBJ2-1)
CASSSPEYPRDNEQFF

SEQ ID NO: 679487 - protein, 16 aa, Homo sapiens
  CDR3 for alpha chain variable domain of TCR clone 339744 (TRAV12-3, TRAJ53)
CAMSTGSGGSNYKLTF

SEQ ID NO: 679488 - protein, 13 aa, Homo sapiens
  CDR3 for beta chain variable domain of TCR clone 339744 (TRBV7-7, TRBJ2-5)
CASSRSGQETQYF

SEQ ID NO: 679489 - protein, 14 aa, Homo sapiens
  CDR3 for alpha chain variable domain of TCR clone 339745 (TRAV12-3, TRAJ10)
SHLPLTGGGNKLTF

SEQ ID NO: 679490 - protein, 13 aa, Homo sapiens
  CDR3 for beta chain variable domain of TCR clone 339745 (TRBV7-7, TRBJ2-5)
CASSRSGQENQYF

SEQ ID NO: 679491 - protein, 18 aa, Homo sapiens
  CDR3 for alpha chain variable domain of TCR clone 339746 (TRAV21, TRAJ52)
CAVRPSPAGGTSYGELTF

SEQ ID NO: 679492 - protein, 13 aa, Homo sapiens
  CDR3 for beta chain variable domain of TCR clone 339746 (TRBV11-2, TRBJ2-5)
CASSSTGEETQYF

SEQ ID NO: 679493 - protein, 12 aa, Homo sapiens
  CDR3 for alpha chain variable domain of TCR clone 339747 (TRAV23/DV6, TRAJ30)
CAASKGDDKIIF

SEQ ID NO: 679494 - protein, 18 aa, Homo sapiens
  CDR3 for beta chain variable domain of TCR clone 339747 (TRBV10-3, TRBJ2-3)
CAISESRVGPMRGDTQYS

SEQ ID NO: 679495 - protein, 14 aa, Homo sapiens
  CDR3 for alpha chain variable domain of TCR clone 339748 (TRAV12-2, TRAJ40)
CAVKIPSGTYKYIF

SEQ ID NO: 679496 - protein, 14 aa, Homo sapiens
  CDR3 for beta chain variable domain of TCR clone 339748 (TRBV19, TRBJ1-5)
CASRAPDSFLSQHF

SEQ ID NO: 679497 - protein, 13 aa, Homo sapiens
  CDR3 for alpha chain variable domain of TCR clone 339749 (TRAV12-1, TRAJ31)
CVVNMNNNARLLF

SEQ ID NO: 679498 - protein, 15 aa, Homo sapiens
  CDR3 for beta chain variable domain of TCR clone 339749 (TRBV4-1, TRBJ1-2)
CASSQGQGAAYGYTF

SEQ ID NO: 679499 - protein, 14 aa, Homo sapiens
  CDR3 for alpha chain variable domain of TCR clone 339750 (TRAV1-2, TRAJ15)
CAVRDRQAGTALIF

SEQ ID NO: 679500 - protein, 16 aa, Homo sapiens
  CDR3 for beta chain variable domain of TCR clone 339750 (TRBV28, TRBJ2-7)
CASSLFFETGGPEQYF

SEQ ID NO: 679501 - protein, 12 aa, Homo sapiens
  CDR3 for alpha chain variable domain of TCR clone 339751 (TRAV3, TRAJ43)
CAVRDPNNDMRF

SEQ ID NO: 679502 - protein, 15 aa, Homo sapiens
  CDR3 for beta chain variable domain of TCR clone 339751 (TRBV28, TRBJ2-2)
CASSSPGQGGGELFF

SEQ ID NO: 679503 - protein, 14 aa, Homo sapiens
  CDR3 for alpha chain variable domain of TCR clone 339752 (TRAV23/DV6, TRAJ49)
CSASKSFVGNQFYF

SEQ ID NO: 679504 - protein, 13 aa, Homo sapiens
  CDR3 for beta chain variable domain of TCR clone 339752 (TRBV6-3, TRBJ2-1)
CASSWEGSDEQFF

SEQ ID NO: 679505 - protein, 15 aa, Homo sapiens
  CDR3 for alpha chain variable domain of TCR clone 339753 (TRAV8-3, TRAJ27)
CAVGPSKTNAGKSTF

SEQ ID NO: 679506 - protein, 15 aa, Homo sapiens
  CDR3 for beta chain variable domain of TCR clone 339753 (TRBV7-2, TRBJ2-1)
CATSSGLAGGNEQFF

SEQ ID NO: 679507 - protein, 15 aa, Homo sapiens
  CDR3 for alpha chain variable domain of TCR clone 339754 (TRAV17, TRAJ4)
CATGTWSGGYNKLIF

SEQ ID NO: 679508 - protein, 13 aa, Homo sapiens
  CDR3 for beta chain variable domain of TCR clone 339754 (TRBV6-6, TRBJ2-7)
CASSPNHLAEQYF

SEQ ID NO: 679509 - protein, 17 aa, Homo sapiens
  CDR3 for alpha chain variable domain of TCR clone 339755 (TRAV1-2, TRAJ27)
CAVRDKTGDTNAGKSTF

SEQ ID NO: 679510 - protein, 16 aa, Homo sapiens
  CDR3 for beta chain variable domain of TCR clone 339755 (TRBV9, TRBJ2-2)
CASSAMGKGNTRELFF

SEQ ID NO: 679511 - protein, 17 aa, Homo sapiens
  CDR3 for alpha chain variable domain of TCR clone 339756 (TRAV13-1, )
CAANIQNPDPAVYQLRD

SEQ ID NO: 679512 - protein, 14 aa, Homo sapiens
  CDR3 for beta chain variable domain of TCR clone 339756 (TRBV18, TRBJ2-7)
CASSPRGGAYEQYF

SEQ ID NO: 679513 - protein, 12 aa, Homo sapiens
  CDR3 for alpha chain variable domain of TCR clone 339757 (TRAV17, TRAJ30)
CATDARDEKIIF

SEQ ID NO: 679514 - protein, 15 aa, Homo sapiens
  CDR3 for beta chain variable domain of TCR clone 339757 (TRBV4-1, TRBJ2-1)
CASSQGRELYNEQFF

SEQ ID NO: 679515 - protein, 13 aa, Homo sapiens
  CDR3 for alpha chain variable domain of TCR clone 339758 (TRAV8-4, TRAJ9)
CAVSETGGFKTIF

SEQ ID NO: 679516 - protein, 15 aa, Homo sapiens
  CDR3 for beta chain variable domain of TCR clone 339758 (TRBV7-2, TRBJ2-7)
CASSLKGALAYEQYF

SEQ ID NO: 679517 - protein, 18 aa, Homo sapiens
  CDR3 for alpha chain variable domain of TCR clone 339759 (TRAV26-1, TRAJ23)
CIVRVALEVWNQGGKLIF

SEQ ID NO: 679518 - protein, 16 aa, Homo sapiens
  CDR3 for beta chain variable domain of TCR clone 339759 (TRBV12-4, TRBJ2-5)
CASSFFVRGRQETQYF

SEQ ID NO: 679519 - protein, 15 aa, Homo sapiens
  CDR3 for alpha chain variable domain of TCR clone 339760 (TRAV29/DV5, TRAJ24)
CAATGATDSWGQFQF

SEQ ID NO: 679520 - protein, 12 aa, Homo sapiens
  CDR3 for beta chain variable domain of TCR clone 339760 (TRBV11-2, TRBJ2-2)
CASSLPTGELFF

SEQ ID NO: 679521 - protein, 14 aa, Homo sapiens
  CDR3 for alpha chain variable domain of TCR clone 339761 (TRAV1-2, TRAJ8)
CALREDTGFQKLVF

SEQ ID NO: 679522 - protein, 13 aa, Homo sapiens
  CDR3 for beta chain variable domain of TCR clone 339761 (TRBV14, TRBJ2-7)
CASSQDRRYEQYF

SEQ ID NO: 679523 - protein, 15 aa, Homo sapiens
  CDR3 for alpha chain variable domain of TCR clone 339762 (TRAV12-2, TRAJ43)
CAFDMRFGAGTRLTV

SEQ ID NO: 679524 - protein, 16 aa, Homo sapiens
  CDR3 for beta chain variable domain of TCR clone 339762 (TRBV11-2, TRBJ2-7)
CASSLAPTGVNYEQYF

SEQ ID NO: 679525 - protein, 14 aa, Homo sapiens
  CDR3 for alpha chain variable domain of TCR clone 339763 (TRAV12-2, TRAJ13)
CAVNKTGGYQKVTF

SEQ ID NO: 679526 - protein, 16 aa, Homo sapiens
  CDR3 for beta chain variable domain of TCR clone 339763 (TRBV12-4, TRBJ1-5)
CASSSGPRGSNQPQHF

SEQ ID NO: 679527 - protein, 13 aa, Homo sapiens
  CDR3 for alpha chain variable domain of TCR clone 339764 (TRAV12-2, TRAJ3)
CAFQYSSASKIIF

SEQ ID NO: 679528 - protein, 17 aa, Homo sapiens
  CDR3 for beta chain variable domain of TCR clone 339764 (TRBV20-1, TRBJ2-4)
CSARDWASGGRENIQYF

SEQ ID NO: 679529 - protein, 14 aa, Homo sapiens
  CDR3 for alpha chain variable domain of TCR clone 339765 (TRAV12-2, TRAJ13)
CAVKKTGGYQKVTF

SEQ ID NO: 679530 - protein, 14 aa, Homo sapiens
  CDR3 for beta chain variable domain of TCR clone 339765 (TRBV11-2, TRBJ2-3)
CASRRLARTDTQYF

SEQ ID NO: 679531 - protein, 13 aa, Homo sapiens
  CDR3 for alpha chain variable domain of TCR clone 339766 (TRAV12-1, TRAJ3)
CVVNPRGASKILF

SEQ ID NO: 679532 - protein, 13 aa, Homo sapiens
  CDR3 for beta chain variable domain of TCR clone 339766 (TRBV28, TRBJ1-5)
CASSDRGNQPQHF

SEQ ID NO: 679533 - protein, 11 aa, Homo sapiens
  CDR3 for alpha chain variable domain of TCR clone 339767 (TRAV13-1, TRAJ39)
CASHAGNMLTF

SEQ ID NO: 679534 - protein, 13 aa, Homo sapiens
  CDR3 for beta chain variable domain of TCR clone 339767 (TRBV6-1, TRBJ1-2)
CASSEGTHYGYTF

SEQ ID NO: 679535 - protein, 13 aa, Homo sapiens
  CDR3 for alpha chain variable domain of TCR clone 339768 (TRAV20, TRAJ49)
CAVQARTGNQVYF

SEQ ID NO: 679536 - protein, 11 aa, Homo sapiens
  CDR3 for beta chain variable domain of TCR clone 339768 (TRBV11-2, TRBJ1-1)
CASSINTEAFF

SEQ ID NO: 679537 - protein, 15 aa, Homo sapiens
  CDR3 for alpha chain variable domain of TCR clone 339769 (TRAV21, TRAJ52)
CAVRGGGTSYGKLTF

SEQ ID NO: 679538 - protein, 14 aa, Homo sapiens
  CDR3 for beta chain variable domain of TCR clone 339769 (TRBV4-1, TRBJ2-7)
CASSPVAGGGEQYF

SEQ ID NO: 679539 - protein, 13 aa, Homo sapiens
  CDR3 for alpha chain variable domain of TCR clone 339770 (TRAV26-1, TRAJ33)
CIVRVDSNYQSIW

SEQ ID NO: 679540 - protein, 15 aa, Homo sapiens
  CDR3 for beta chain variable domain of TCR clone 339770 (TRBV7-2, TRBJ1-5)
CASSFSAGINQPQHF

SEQ ID NO: 679541 - protein, 15 aa, Homo sapiens
  CDR3 for alpha chain variable domain of TCR clone 339771 (TRAV35, TRAJ32)
CAGQLPIGATNKLIF

SEQ ID NO: 679542 - protein, 16 aa, Homo sapiens
  CDR3 for beta chain variable domain of TCR clone 339771 (TRBV3-1, TRBJ2-5)
CASSPGQFNGFGTQYF

SEQ ID NO: 679543 - protein, 15 aa, Homo sapiens
  CDR3 for alpha chain variable domain of TCR clone 339772 (TRAV12-1, TRAJ45)
CVVLSGRGGADGLTF

SEQ ID NO: 679544 - protein, 12 aa, Homo sapiens
  CDR3 for beta chain variable domain of TCR clone 339772 (TRBV12-5, TRBJ2-5)
CASGQGVETQYF

SEQ ID NO: 679545 - protein, 17 aa, Homo sapiens
  CDR3 for alpha chain variable domain of TCR clone 339773 (TRAV13-1, TRAJ31)
CAPRDRLMFGDGTQLVV

SEQ ID NO: 679546 - protein, 16 aa, Homo sapiens
  CDR3 for beta chain variable domain of TCR clone 339773 (TRBV12-5, TRBJ2-5)
CASGPRTSGNQETQYF

SEQ ID NO: 679547 - protein, 13 aa, Homo sapiens
  CDR3 for alpha chain variable domain of TCR clone 339774 (TRAV12-1, TRAJ3)
CVVNPRGASKIIF

SEQ ID NO: 679548 - protein, 15 aa, Homo sapiens
  CDR3 for beta chain variable domain of TCR clone 339774 (TRBV28, TRBJ1-5)
CASSDRGNQPSILVM

SEQ ID NO: 679549 - protein, 15 aa, Homo sapiens
  CDR3 for alpha chain variable domain of TCR clone 339775 (TRAV12-2, TRAJ43)
CAFDMRVGAGTRLTV

SEQ ID NO: 679550 - protein, 18 aa, Homo sapiens
  CDR3 for beta chain variable domain of TCR clone 339775 (TRBV20-1, TRBJ2-3)
CSASGLAGGPGTTDTQYF

SEQ ID NO: 679551 - protein, 12 aa, Homo sapiens
  CDR3 for alpha chain variable domain of TCR clone 339776 (TRAV13-2, TRAJ23)
CAERHRGRKLIF

SEQ ID NO: 679552 - protein, 15 aa, Homo sapiens
  CDR3 for beta chain variable domain of TCR clone 339776 (TRBV15, TRBJ2-1)
CATSRPGQGLHEQFF

SEQ ID NO: 679553 - protein, 19 aa, Homo sapiens
  CDR3 for alpha chain variable domain of TCR clone 339777 (TRAV26-1, TRAJ28)
CIVRVAHAYSGAGSYQLTF

SEQ ID NO: 679554 - protein, 17 aa, Homo sapiens
  CDR3 for beta chain variable domain of TCR clone 339777 (TRBV5-1, TRBJ2-3)
CASSKIGLADRTDTQYF

SEQ ID NO: 679555 - protein, 16 aa, Homo sapiens
  CDR3 for alpha chain variable domain of TCR clone 339778 (TRAV23/DV6, )
CADIQNPDPAVYQLRH

SEQ ID NO: 679556 - protein, 13 aa, Homo sapiens
  CDR3 for beta chain variable domain of TCR clone 339778 (TRBV28, TRBJ2-7)
CASRSSGVYEQYF

SEQ ID NO: 679557 - protein, 12 aa, Homo sapiens
  CDR3 for alpha chain variable domain of TCR clone 339779 (TRAV12-1, TRAJ20)
CVAHFNDYKLSF

SEQ ID NO: 679558 - protein, 11 aa, Homo sapiens
  CDR3 for beta chain variable domain of TCR clone 339779 (TRBV2, TRBJ1-4)
CASRENEKLFF

SEQ ID NO: 679559 - protein, 14 aa, Homo sapiens
  CDR3 for alpha chain variable domain of TCR clone 339780 (TRAV12-3, TRAJ10)
SHLLLTGGGNKLTF

SEQ ID NO: 679560 - protein, 13 aa, Homo sapiens
  CDR3 for beta chain variable domain of TCR clone 339780 (TRBV29-1, TRBJ2-3)
CSATRGGIDTQYF

SEQ ID NO: 679561 - protein, 15 aa, Homo sapiens
  CDR3 for alpha chain variable domain of TCR clone 339781 (TRAV26-1, TRAJ22)
CIVRVSFWFCKATVL

SEQ ID NO: 679562 - protein, 14 aa, Homo sapiens
  CDR3 for beta chain variable domain of TCR clone 339781 (TRBV7-6, TRBJ2-3)
CASSLGTVTDTQYF

SEQ ID NO: 679563 - protein, 12 aa, Homo sapiens
  CDR3 for alpha chain variable domain of TCR clone 339782 (TRAV12-3, TRAJ17)
CAMTLTGKKLTF

SEQ ID NO: 679564 - protein, 15 aa, Homo sapiens
  CDR3 for beta chain variable domain of TCR clone 339782 (TRBV20-1, TRBJ2-7)
CSARDQVSGMDEQYF

SEQ ID NO: 679565 - protein, 17 aa, Homo sapiens
  CDR3 for alpha chain variable domain of TCR clone 339783 (TRAV3, TRAJ6)
CAVRDGPRAGGSYIPTF

SEQ ID NO: 679566 - protein, 18 aa, Homo sapiens
  CDR3 for beta chain variable domain of TCR clone 339783 (TRBV5-5, TRBJ1-5)
CASSLRQVKGSSNQPQHF

SEQ ID NO: 679567 - protein, 14 aa, Homo sapiens
  CDR3 for alpha chain variable domain of TCR clone 339784 (TRAV12-2, TRAJ11)
CAVEGGSGYSTLTF

SEQ ID NO: 679568 - protein, 16 aa, Homo sapiens
  CDR3 for beta chain variable domain of TCR clone 339784 (TRBV27, TRBJ2-2)
CASSFRGLVRTGELFF

SEQ ID NO: 679569 - protein, 13 aa, Homo sapiens
  CDR3 for alpha chain variable domain of TCR clone 339785 (TRAV8-3, TRAJ44)
CAAVPGTASKLTF

SEQ ID NO: 679570 - protein, 15 aa, Homo sapiens
  CDR3 for beta chain variable domain of TCR clone 339785 (TRBV7-9, TRBJ2-2)
CASGPLDTFPGELFF

SEQ ID NO: 679571 - protein, 16 aa, Homo sapiens
  CDR3 for alpha chain variable domain of TCR clone 339786 (TRAV3, TRAJ37)
WAVRVRGSGNTGKLIF

SEQ ID NO: 679572 - protein, 16 aa, Homo sapiens
  CDR3 for beta chain variable domain of TCR clone 339786 (TRBV19, TRBJ2-1)
CASSKAGPSSYNEQFF

SEQ ID NO: 679573 - protein, 14 aa, Homo sapiens
  CDR3 for alpha chain variable domain of TCR clone 339787 (TRAV12-2, TRAJ45)
CAGYSGGGADGLTF

SEQ ID NO: 679574 - protein, 14 aa, Homo sapiens
  CDR3 for beta chain variable domain of TCR clone 339787 (TRBV6-5, TRBJ1-2)
CASTRGGGSDGYTF

SEQ ID NO: 679575 - protein, 16 aa, Homo sapiens
  CDR3 for alpha chain variable domain of TCR clone 339788 (TRAV13-1, TRAJ48)
CAASIFCNFGNEKLTF

SEQ ID NO: 679576 - protein, 14 aa, Homo sapiens
  CDR3 for beta chain variable domain of TCR clone 339788 (TRBV7-3, TRBJ1-1)
CASSLKGGNTEAFF

SEQ ID NO: 679577 - protein, 16 aa, Homo sapiens
  CDR3 for alpha chain variable domain of TCR clone 339789 (TRAV17, TRAJ52)
CATSNAGGTSYGKLTF

SEQ ID NO: 679578 - protein, 16 aa, Homo sapiens
  CDR3 for beta chain variable domain of TCR clone 339789 (TRBV5-1, TRBJ2-2)
CASSLWDTTNTGELFF

SEQ ID NO: 679579 - protein, 11 aa, Homo sapiens
  CDR3 for alpha chain variable domain of TCR clone 339790 (TRAV4, TRAJ31)
CLVGLNARLMF

SEQ ID NO: 679580 - protein, 13 aa, Homo sapiens
  CDR3 for beta chain variable domain of TCR clone 339790 (TRBV6-5, TRBJ2-7)
CASRGRGGYEQYF

SEQ ID NO: 679581 - protein, 11 aa, Homo sapiens
  CDR3 for alpha chain variable domain of TCR clone 339791 (TRAV3, TRAJ21)
CALGNFNKFYF

SEQ ID NO: 679582 - protein, 14 aa, Homo sapiens
  CDR3 for beta chain variable domain of TCR clone 339791 (TRBV29-1, TRBJ2-2)
CSGRGSGNTGELFF

SEQ ID NO: 679583 - protein, 15 aa, Homo sapiens
  CDR3 for alpha chain variable domain of TCR clone 339792 (TRAV13-1, TRAJ17)
CAASIERAAGDKLTF

SEQ ID NO: 679584 - protein, 12 aa, Homo sapiens
  CDR3 for beta chain variable domain of TCR clone 339792 (TRBV5-7, TRBJ1-1)
CASSVGRGKAFF

SEQ ID NO: 679585 - protein, 12 aa, Homo sapiens
  CDR3 for alpha chain variable domain of TCR clone 339793 (TRAV12-3, TRAJ34)
CAMGYNTDKLIF

SEQ ID NO: 679586 - protein, 16 aa, Homo sapiens
  CDR3 for beta chain variable domain of TCR clone 339793 (TRBV20-1, TRBJ1-4)
CSAPGQGLLTNETLFF

SEQ ID NO: 679587 - protein, 14 aa, Homo sapiens
  CDR3 for alpha chain variable domain of TCR clone 339794 (TRAV14/DV4, TRAJ57)
CAMREEGGSEKLVF

SEQ ID NO: 679588 - protein, 11 aa, Homo sapiens
  CDR3 for beta chain variable domain of TCR clone 339794 (TRBV19, TRBJ2-2)
CASRYSGELFF

SEQ ID NO: 679589 - protein, 15 aa, Homo sapiens
  CDR3 for alpha chain variable domain of TCR clone 339795 (TRAV17, TRAJ4)
CATGTWSGGYNKRIF

SEQ ID NO: 679590 - protein, 15 aa, Homo sapiens
  CDR3 for beta chain variable domain of TCR clone 339795 (TRBV7-2, TRBJ2-2)
CASRRPGQNTGELFF

SEQ ID NO: 679591 - protein, 14 aa, Homo sapiens
  CDR3 for alpha chain variable domain of TCR clone 339796 (TRAV29/DV5, TRAJ5)
CAASGDTGRRALTF

SEQ ID NO: 679592 - protein, 12 aa, Homo sapiens
  CDR3 for beta chain variable domain of TCR clone 339796 (TRBV11-2, TRBJ2-5)
CASSLDTQTQYF

SEQ ID NO: 679593 - protein, 17 aa, Homo sapiens
  CDR3 for alpha chain variable domain of TCR clone 339797 (TRAV4, TRAJ18)
CLVGERSVGSTLGRLYS

SEQ ID NO: 679594 - protein, 14 aa, Homo sapiens
  CDR3 for beta chain variable domain of TCR clone 339797 (TRBV6-5, TRBJ1-2)
CASSYDGTGGGYTF

SEQ ID NO: 679595 - protein, 17 aa, Homo sapiens
  CDR3 for alpha chain variable domain of TCR clone 339798 (TRAV12-2, TRAJ48)
CASNEKLTFGTGTRLTI

SEQ ID NO: 679596 - protein, 16 aa, Homo sapiens
  CDR3 for beta chain variable domain of TCR clone 339798 (TRBV7-3, TRBJ2-2)
CASSLKRGTLSGELFC

SEQ ID NO: 679597 - protein, 14 aa, Homo sapiens
  CDR3 for alpha chain variable domain of TCR clone 339799 (TRAV1-2, TRAJ8)
CAVREDTCFQKLVF

SEQ ID NO: 679598 - protein, 13 aa, Homo sapiens
  CDR3 for beta chain variable domain of TCR clone 339799 (TRBV4-1, TRBJ2-7)
CASSQGQAYEQYF

SEQ ID NO: 679599 - protein, 11 aa, Homo sapiens
  CDR3 for alpha chain variable domain of TCR clone 339800 (TRAV21, TRAJ34)
CAVTNTDKLIV

SEQ ID NO: 679600 - protein, 17 aa, Homo sapiens
  CDR3 for beta chain variable domain of TCR clone 339800 (TRBV20-1, TRBJ2-1)
CSARSPSGGPPTMSSSS

SEQ ID NO: 679601 - protein, 13 aa, Homo sapiens
  CDR3 for alpha chain variable domain of TCR clone 339801 (TRAV12-1, TRAJ13)
CVVTSGGYQKVTF

SEQ ID NO: 679602 - protein, 12 aa, Homo sapiens
  CDR3 for beta chain variable domain of TCR clone 339801 (TRBV18, TRBJ2-5)
CASSPSKETQYF

SEQ ID NO: 679603 - protein, 12 aa, Homo sapiens
  CDR3 for alpha chain variable domain of TCR clone 339802 (TRAV25, TRAJ29)
CAGHSGNTPLVF

SEQ ID NO: 679604 - protein, 14 aa, Homo sapiens
  CDR3 for beta chain variable domain of TCR clone 339802 (TRBV6-1, TRBJ2-7)
CASTRTGDYYEQYV

SEQ ID NO: 679605 - protein, 14 aa, Homo sapiens
  CDR3 for alpha chain variable domain of TCR clone 339803 (TRAV26-1, TRAJ21)
CIVRVVYNFDKFYF

SEQ ID NO: 679606 - protein, 11 aa, Homo sapiens
  CDR3 for beta chain variable domain of TCR clone 339803 (TRBV5-6, TRBJ2-5)
CASSLERTQYF

SEQ ID NO: 679607 - protein, 12 aa, Homo sapiens
  CDR3 for alpha chain variable domain of TCR clone 339804 (TRAV2, TRAJ33)
CAFMDCNYQLIW

SEQ ID NO: 679608 - protein, 16 aa, Homo sapiens
  CDR3 for beta chain variable domain of TCR clone 339804 (TRBV2, TRBJ2-7)
CASSEPWTGPSYEQYF

SEQ ID NO: 679609 - protein, 18 aa, Homo sapiens
  CDR3 for alpha chain variable domain of TCR clone 339805 (TRAV12-3, TRAJ52)
CAMSVGGAVGTSYGKLTF

SEQ ID NO: 679610 - protein, 15 aa, Homo sapiens
  CDR3 for beta chain variable domain of TCR clone 339805 (TRBV27, TRBJ1-6)
CASSFDRGLGSHLHF

SEQ ID NO: 679611 - protein, 11 aa, Homo sapiens
  CDR3 for alpha chain variable domain of TCR clone 339806 (TRAV12-1, TRAJ40)
CVSSGTYKYIF

SEQ ID NO: 679612 - protein, 14 aa, Homo sapiens
  CDR3 for beta chain variable domain of TCR clone 339806 (TRBV20-1, TRBJ2-2)
CSAPDTANTGELFF

SEQ ID NO: 679613 - protein, 13 aa, Homo sapiens
  CDR3 for alpha chain variable domain of TCR clone 339807 (TRAV21, TRAJ27)
CAARPGNEGKSTF

SEQ ID NO: 679614 - protein, 13 aa, Homo sapiens
  CDR3 for beta chain variable domain of TCR clone 339807 (TRBV7-3, TRBJ2-7)
CASSQAGGYEQYF

SEQ ID NO: 679615 - protein, 11 aa, Homo sapiens
  CDR3 for alpha chain variable domain of TCR clone 339808 (TRAV21, TRAJ34)
CAVTNTDKLIF

SEQ ID NO: 679616 - protein, 14 aa, Homo sapiens
  CDR3 for beta chain variable domain of TCR clone 339808 (TRBV7-9, TRBJ2-7)
CASSIGQGAGEQYF

SEQ ID NO: 679617 - protein, 11 aa, Homo sapiens
  CDR3 for alpha chain variable domain of TCR clone 339809 (TRAV29/DV5, TRAJ49)
CAAVPGNQFYF

SEQ ID NO: 679618 - protein, 16 aa, Homo sapiens
  CDR3 for beta chain variable domain of TCR clone 339809 (TRBV4-2, TRBJ2-1)
CASSPRAGQGANEQFF

SEQ ID NO: 679619 - protein, 17 aa, Homo sapiens
  CDR3 for alpha chain variable domain of TCR clone 339810 (TRAV3, TRAJ6)
CAVRDGPRAGGSYIPTF

SEQ ID NO: 679620 - protein, 13 aa, Homo sapiens
  CDR3 for beta chain variable domain of TCR clone 339810 (TRBV20-1, TRBJ1-1)
CSARSGGNTEAFF

SEQ ID NO: 679621 - protein, 15 aa, Homo sapiens
  CDR3 for alpha chain variable domain of TCR clone 339811 (TRAV3, TRAJ22)
CAVRDRGGSARQLTF

SEQ ID NO: 679622 - protein, 15 aa, Homo sapiens
  CDR3 for beta chain variable domain of TCR clone 339811 (TRBV10-3, TRBJ2-3)
CPISLTSGGTDTQYF

SEQ ID NO: 679623 - protein, 14 aa, Homo sapiens
  CDR3 for alpha chain variable domain of TCR clone 339812 (TRAV26-1, TRAJ5)
CVVRVRFNRRALTF

SEQ ID NO: 679624 - protein, 17 aa, Homo sapiens
  CDR3 for beta chain variable domain of TCR clone 339812 (TRBV29-1, TRBJ2-3)
CSVEVLAGETSTDTQYF

SEQ ID NO: 679625 - protein, 17 aa, Homo sapiens
  CDR3 for alpha chain variable domain of TCR clone 339813 (TRAV3, TRAJ12)
CGERRDGTMDSSYKLIF

SEQ ID NO: 679626 - protein, 15 aa, Homo sapiens
  CDR3 for beta chain variable domain of TCR clone 339813 (TRBV5-5, TRBJ1-5)
CASSLKGGGEQPQHF

SEQ ID NO: 679627 - protein, 15 aa, Homo sapiens
  CDR3 for alpha chain variable domain of TCR clone 339814 (TRAV12-2, TRAJ42)
CAVSSHGGSQGNLIF

SEQ ID NO: 679628 - protein, 13 aa, Homo sapiens
  CDR3 for beta chain variable domain of TCR clone 339814 (TRBV27, TRBJ1-1)
CASSVSANTEAFF

SEQ ID NO: 679629 - protein, 14 aa, Homo sapiens
  CDR3 for alpha chain variable domain of TCR clone 339815 (TRAV26-1, TRAJ40)
CIVRLLSGTYKYIF

SEQ ID NO: 679630 - protein, 15 aa, Homo sapiens
  CDR3 for beta chain variable domain of TCR clone 339815 (TRBV11-2, TRBJ2-1)
CASSWDGRSYNEQFF

SEQ ID NO: 679631 - protein, 14 aa, Homo sapiens
  CDR3 for alpha chain variable domain of TCR clone 339816 (TRAV12-2, TRAJ44)
CAVDKAGTASKLTF

SEQ ID NO: 679632 - protein, 12 aa, Homo sapiens
  CDR3 for beta chain variable domain of TCR clone 339816 (TRBV19, TRBJ1-4)
CASKDWPGGLFF

SEQ ID NO: 679633 - protein, 15 aa, Homo sapiens
  CDR3 for alpha chain variable domain of TCR clone 339817 (TRAV2, TRAJ20)
RAVDLRGSNDYKLSF

SEQ ID NO: 679634 - protein, 13 aa, Homo sapiens
  CDR3 for beta chain variable domain of TCR clone 339817 (TRBV2, TRBJ2-7)
CANGLAGDYEQYF

SEQ ID NO: 679635 - protein, 12 aa, Homo sapiens
  CDR3 for alpha chain variable domain of TCR clone 339818 (TRAV21, TRAJ27)
CAANTNAGKSTF

SEQ ID NO: 679636 - protein, 13 aa, Homo sapiens
  CDR3 for beta chain variable domain of TCR clone 339818 (TRBV19, TRBJ1-2)
CASSVPGQDGYTF

SEQ ID NO: 679637 - protein, 16 aa, Homo sapiens
  CDR3 for alpha chain variable domain of TCR clone 339819 (TRAV25, TRAJ24)
CAQRRGTTDSWGRLQF

SEQ ID NO: 679638 - protein, 14 aa, Homo sapiens
  CDR3 for beta chain variable domain of TCR clone 339819 (TRBV6-6, TRBJ1-5)
CASSYGPANQPQHF

SEQ ID NO: 679639 - protein, 13 aa, Homo sapiens
  CDR3 for alpha chain variable domain of TCR clone 339820 (TRAV8-1, TRAJ30)
CAVIMNRDDKIIF

SEQ ID NO: 679640 - protein, 13 aa, Homo sapiens
  CDR3 for beta chain variable domain of TCR clone 339820 (TRBV7-2, TRBJ2-5)
CASSQTSVETQYF

SEQ ID NO: 679641 - protein, 12 aa, Homo sapiens
  CDR3 for alpha chain variable domain of TCR clone 339821 (TRAV1-1, TRAJ43)
CAPCVSSNDMRF

SEQ ID NO: 679642 - protein, 15 aa, Homo sapiens
  CDR3 for beta chain variable domain of TCR clone 339821 (TRBV5-1, TRBJ2-7)
CASSLGDFTTCEQYF

SEQ ID NO: 679643 - protein, 10 aa, Homo sapiens
  CDR3 for alpha chain variable domain of TCR clone 339822 (TRAV23/DV6, TRAJ45)
TGGGADGLTF

SEQ ID NO: 679644 - protein, 17 aa, Homo sapiens
  CDR3 for beta chain variable domain of TCR clone 339822 (TRBV4-1, TRBJ2-3)
CASSQGYVSGGTDTQYF

SEQ ID NO: 679645 - protein, 13 aa, Homo sapiens
  CDR3 for alpha chain variable domain of TCR clone 339823 (TRAV13-2, TRAJ48)
CAEMDFGNEKLTF

SEQ ID NO: 679646 - protein, 12 aa, Homo sapiens
  CDR3 for beta chain variable domain of TCR clone 339823 (TRBV5-1, TRBJ1-2)
CASSQDTYGYAF

SEQ ID NO: 679647 - protein, 13 aa, Homo sapiens
  CDR3 for alpha chain variable domain of TCR clone 339824 (TRAV21, TRAJ57)
CAVTQGGSEKLVF

SEQ ID NO: 679648 - protein, 15 aa, Homo sapiens
  CDR3 for beta chain variable domain of TCR clone 339824 (TRBV5-1, TRBJ1-1)
GASSSTTGTNTEAFF

SEQ ID NO: 679649 - protein, 14 aa, Homo sapiens
  CDR3 for alpha chain variable domain of TCR clone 339825 (TRAV3, TRAJ17)
CAVRDAAAGNKLTF

SEQ ID NO: 679650 - protein, 15 aa, Homo sapiens
  CDR3 for beta chain variable domain of TCR clone 339825 (TRBV7-2, TRBJ2-1)
CASSSGLAGGNEQFF

SEQ ID NO: 679651 - protein, 13 aa, Homo sapiens
  CDR3 for alpha chain variable domain of TCR clone 339826 (TRAV27, TRAJ16)
CAGACSDGQKLLF

SEQ ID NO: 679652 - protein, 16 aa, Homo sapiens
  CDR3 for beta chain variable domain of TCR clone 339826 (TRBV15, TRBJ2-7)
CATSRDRGRRRGEQYF

SEQ ID NO: 679653 - protein, 17 aa, Homo sapiens
  CDR3 for alpha chain variable domain of TCR clone 339827 (TRAV3, TRAJ42)
CAVRDRDYGGSQGNLIF

SEQ ID NO: 679654 - protein, 13 aa, Homo sapiens
  CDR3 for beta chain variable domain of TCR clone 339827 (TRBV20-1, TRBJ2-5)
CSAREAFQETQYF

SEQ ID NO: 679655 - protein, 14 aa, Homo sapiens
  CDR3 for alpha chain variable domain of TCR clone 339828 (TRAV29/DV5, TRAJ45)
CAASEGGGADGLTV

SEQ ID NO: 679656 - protein, 13 aa, Homo sapiens
  CDR3 for beta chain variable domain of TCR clone 339828 (TRBV12-4, TRBJ1-1)
CASSPGTGFEAFF

SEQ ID NO: 679657 - protein, 12 aa, Homo sapiens
  CDR3 for alpha chain variable domain of TCR clone 339829 (TRAV13-1, TRAJ30)
CAASYRDDKIIF

SEQ ID NO: 679658 - protein, 16 aa, Homo sapiens
  CDR3 for beta chain variable domain of TCR clone 339829 (TRBV7-2, TRBJ2-3)
CASSLVALYSTDTQYF

SEQ ID NO: 679659 - protein, 13 aa, Homo sapiens
  CDR3 for alpha chain variable domain of TCR clone 339830 (TRAV13-2, TRAJ8)
CAFMNTGFQQLGF

SEQ ID NO: 679660 - protein, 17 aa, Homo sapiens
  CDR3 for beta chain variable domain of TCR clone 339830 (TRBV28, TRBJ2-1)
CASSSARQALTYNEQFF

SEQ ID NO: 679661 - protein, 12 aa, Homo sapiens
  CDR3 for alpha chain variable domain of TCR clone 339831 (TRAV12-3, TRAJ20)
CAMVRGDSKLSF

SEQ ID NO: 679662 - protein, 14 aa, Homo sapiens
  CDR3 for beta chain variable domain of TCR clone 339831 (TRBV5-5, TRBJ1-5)
CASSGQGVDQPQHF

SEQ ID NO: 679663 - protein, 15 aa, Homo sapiens
  CDR3 for alpha chain variable domain of TCR clone 339832 (TRAV3, TRAJ5)
CAVRDLDTGRRALTF

SEQ ID NO: 679664 - protein, 18 aa, Homo sapiens
  CDR3 for beta chain variable domain of TCR clone 339832 (TRBV12-4, TRBJ2-2)
CASSLVAGTRGRTGELFF

SEQ ID NO: 679665 - protein, 13 aa, Homo sapiens
  CDR3 for alpha chain variable domain of TCR clone 339833 (TRAV23/DV6, TRAJ5)
CAARAAGRRALTF

SEQ ID NO: 679666 - protein, 15 aa, Homo sapiens
  CDR3 for beta chain variable domain of TCR clone 339833 (TRBV20-1, TRBJ2-7)
CSARDRVSGMDEQYF

SEQ ID NO: 679667 - protein, 14 aa, Homo sapiens
  CDR3 for alpha chain variable domain of TCR clone 339834 (TRAV1-2, TRAJ8)
CAVREDTGFQKVVF

SEQ ID NO: 679668 - protein, 12 aa, Homo sapiens
  CDR3 for beta chain variable domain of TCR clone 339834 (TRBV2, TRBJ2-1)
CAYGPPGNEQFF

SEQ ID NO: 679669 - protein, 18 aa, Homo sapiens
  CDR3 for alpha chain variable domain of TCR clone 339835 (TRAV21, TRAJ52)
CAVRPSPAGGTSYGKLTF

SEQ ID NO: 679670 - protein, 17 aa, Homo sapiens
  CDR3 for beta chain variable domain of TCR clone 339835 (TRBV13, TRBJ2-3)
GASSLSRVAGGRKTQYF

SEQ ID NO: 679671 - protein, 16 aa, Homo sapiens
  CDR3 for alpha chain variable domain of TCR clone 339836 (TRAV35, TRAJ28)
CGGQRYSGAGSYQLTF

SEQ ID NO: 679672 - protein, 13 aa, Homo sapiens
  CDR3 for beta chain variable domain of TCR clone 339836 (TRBV19, TRBJ1-2)
CASSQGQVYGYTF

SEQ ID NO: 679673 - protein, 15 aa, Homo sapiens
  CDR3 for alpha chain variable domain of TCR clone 339837 (TRAV21, TRAJ52)
CAVRGGGTSYGKLTF

SEQ ID NO: 679674 - protein, 14 aa, Homo sapiens
  CDR3 for beta chain variable domain of TCR clone 339837 (TRBV12-4, TRBJ1-1)
CASRPGQGRTEAFF

SEQ ID NO: 679675 - protein, 13 aa, Homo sapiens
  CDR3 for alpha chain variable domain of TCR clone 339838 (TRAV8-6, TRAJ54)
CAVEAQGAQKLVF

SEQ ID NO: 679676 - protein, 12 aa, Homo sapiens
  CDR3 for beta chain variable domain of TCR clone 339838 (TRBV24-1, TRBJ1-1)
CATLYPDTEAFF

SEQ ID NO: 679677 - protein, 14 aa, Homo sapiens
  CDR3 for alpha chain variable domain of TCR clone 339839 (TRAV12-2, TRAJ13)
CAVKKTGGYQKVTF

SEQ ID NO: 679678 - protein, 22 aa, Homo sapiens
  CDR3 for beta chain variable domain of TCR clone 339839 (TRBV12-4, TRBJ2-5)
CASSFETSGVIRRDPVLRARHA

SEQ ID NO: 679679 - protein, 15 aa, Homo sapiens
  CDR3 for alpha chain variable domain of TCR clone 339840 (TRAV2, TRAJ24)
CAVEVLTNSWGKFQF

SEQ ID NO: 679680 - protein, 13 aa, Homo sapiens
  CDR3 for beta chain variable domain of TCR clone 339840 (TRBV12-4, TRBJ1-5)
CASSPDRAQPQHF

SEQ ID NO: 679681 - protein, 12 aa, Homo sapiens
  CDR3 for alpha chain variable domain of TCR clone 339841 (TRAV27, TRAJ33)
CAGDGSNYQLIW

SEQ ID NO: 679682 - protein, 11 aa, Homo sapiens
  CDR3 for beta chain variable domain of TCR clone 339841 (TRBV29-1, TRBJ2-5)
CSEDRTGTQYF

SEQ ID NO: 679683 - protein, 11 aa, Homo sapiens
  CDR3 for alpha chain variable domain of TCR clone 339842 (TRAV1-1, TRAJ23)
CALRQGGKLVF

SEQ ID NO: 679684 - protein, 14 aa, Homo sapiens
  CDR3 for beta chain variable domain of TCR clone 339842 (TRBV19, TRBJ2-1)
CASPTFVLSGEQFF

SEQ ID NO: 679685 - protein, 12 aa, Homo sapiens
  CDR3 for alpha chain variable domain of TCR clone 339843 (TRAV22, TRAJ43)
CAVELNNNDMRF

SEQ ID NO: 679686 - protein, 12 aa, Homo sapiens
  CDR3 for beta chain variable domain of TCR clone 339843 (TRBV12-4, TRBJ2-7)
CASSLGGYEQYF

SEQ ID NO: 679687 - protein, 12 aa, Homo sapiens
  CDR3 for alpha chain variable domain of TCR clone 339844 (TRAV21, TRAJ3)
CCFYSSAAKIIF

SEQ ID NO: 679688 - protein, 16 aa, Homo sapiens
  CDR3 for beta chain variable domain of TCR clone 339844 (TRBV19, TRBJ2-1)
CASSKAGPSSYNEQFF

SEQ ID NO: 679689 - protein, 13 aa, Homo sapiens
  CDR3 for alpha chain variable domain of TCR clone 339845 (TRAV36/DV7, TRAJ37)
CAVFSSNTGKLIF

SEQ ID NO: 679690 - protein, 15 aa, Homo sapiens
  CDR3 for beta chain variable domain of TCR clone 339845 (TRBV12-4, TRBJ2-5)
CQQFFVRGRQGTQYF

SEQ ID NO: 679691 - protein, 18 aa, Homo sapiens
  CDR3 for alpha chain variable domain of TCR clone 339846 (TRAV21, TRAJ52)
CAVRPSPAGGTSDGKLTF

SEQ ID NO: 679692 - protein, 17 aa, Homo sapiens
  CDR3 for beta chain variable domain of TCR clone 339846 (TRBV13, TRBJ2-3)
CASSLSRVAGGKNTQYF

SEQ ID NO: 679693 - protein, 12 aa, Homo sapiens
  CDR3 for alpha chain variable domain of TCR clone 339847 (TRAV8-3, TRAJ20)
CAVGANDYKLSF

SEQ ID NO: 679694 - protein, 17 aa, Homo sapiens
  CDR3 for beta chain variable domain of TCR clone 339847 (TRBV13, TRBJ2-3)
CTSSLSRVAGGRNTQYF

SEQ ID NO: 679695 - protein, 15 aa, Homo sapiens
  CDR3 for alpha chain variable domain of TCR clone 339848 (TRAV12-3, TRAJ22)
CAMRSSSGSARQRTF

SEQ ID NO: 679696 - protein, 18 aa, Homo sapiens
  CDR3 for beta chain variable domain of TCR clone 339848 (TRBV27, TRBJ2-1)
CASRRSGRGESSGNEQFF

SEQ ID NO: 679697 - protein, 13 aa, Homo sapiens
  CDR3 for alpha chain variable domain of TCR clone 339849 (TRAV21, TRAJ27)
CAALNTNAGKSTF

SEQ ID NO: 679698 - protein, 15 aa, Homo sapiens
  CDR3 for beta chain variable domain of TCR clone 339849 (TRBV20-1, TRBJ2-7)
CSVRKGLAESYEQYF

SEQ ID NO: 679699 - protein, 14 aa, Homo sapiens
  CDR3 for alpha chain variable domain of TCR clone 339850 (TRAV12-2, TRAJ40)
CAMKIPSGTYKYIF

SEQ ID NO: 679700 - protein, 12 aa, Homo sapiens
  CDR3 for beta chain variable domain of TCR clone 339850 (TRBV11-2, TRBJ2-2)
CASSLGGGELFF

SEQ ID NO: 679701 - protein, 17 aa, Homo sapiens
  CDR3 for alpha chain variable domain of TCR clone 339851 (TRAV3, TRAJ42)
CAVRHRDYGGSQGNLIF

SEQ ID NO: 679702 - protein, 15 aa, Homo sapiens
  CDR3 for beta chain variable domain of TCR clone 339851 (TRBV6-6, TRBJ2-7)
CASSYSYGGSYEQYF

SEQ ID NO: 679703 - protein, 11 aa, Homo sapiens
  CDR3 for alpha chain variable domain of TCR clone 339852 (TRAV1-1, TRAJ23)
CALCQGGKLIF

SEQ ID NO: 679704 - protein, 20 aa, Homo sapiens
  CDR3 for beta chain variable domain of TCR clone 339852 (TRBV7-8, TRBJ2-2)
CASSHLFPGPTIHITGELFF

SEQ ID NO: 679705 - protein, 14 aa, Homo sapiens
  CDR3 for alpha chain variable domain of TCR clone 339853 (TRAV13-2, TRAJ32)
CAENYGGATNKLIF

SEQ ID NO: 679706 - protein, 15 aa, Homo sapiens
  CDR3 for beta chain variable domain of TCR clone 339853 (TRBV12-4, TRBJ2-5)
CASTLNSGSGETQYF

SEQ ID NO: 679707 - protein, 14 aa, Homo sapiens
  CDR3 for alpha chain variable domain of TCR clone 339854 (TRAV25, TRAJ9)
CAGPGNTGGFKTIF

SEQ ID NO: 679708 - protein, 15 aa, Homo sapiens
  CDR3 for beta chain variable domain of TCR clone 339854 (TRBV11-2, TRBJ2-2)
CASSSDRVNAGELFF

SEQ ID NO: 679709 - protein, 11 aa, Homo sapiens
  CDR3 for alpha chain variable domain of TCR clone 339855 (TRAV22, TRAJ49)
CAVLTGNQFYF

SEQ ID NO: 679710 - protein, 14 aa, Homo sapiens
  CDR3 for beta chain variable domain of TCR clone 339855 (TRBV12-4, TRBJ1-1)
CASSLGTGGTEAFF

SEQ ID NO: 679711 - protein, 15 aa, Homo sapiens
  CDR3 for alpha chain variable domain of TCR clone 339856 (TRAV17, TRAJ45)
TSVLRTGGGADGLTF

SEQ ID NO: 679712 - protein, 15 aa, Homo sapiens
  CDR3 for beta chain variable domain of TCR clone 339856 (TRBV11-2, TRBJ2-2)
CASRGLAANTGELFF

SEQ ID NO: 679713 - protein, 14 aa, Homo sapiens
  CDR3 for alpha chain variable domain of TCR clone 339857 (TRAV8-3, TRAJ9)
CALVHNTGGFKTIF

SEQ ID NO: 679714 - protein, 14 aa, Homo sapiens
  CDR3 for beta chain variable domain of TCR clone 339857 (TRBV7-3, TRBJ2-2)
CASSSGGYTGELFF

SEQ ID NO: 679715 - protein, 12 aa, Homo sapiens
  CDR3 for alpha chain variable domain of TCR clone 339858 (TRAV20, TRAJ33)
CAVRGSNYQLIW

SEQ ID NO: 679716 - protein, 13 aa, Homo sapiens
  CDR3 for beta chain variable domain of TCR clone 339858 (TRBV4-1, TRBJ2-7)
CASSQGQAYEQYF

SEQ ID NO: 679717 - protein, 15 aa, Homo sapiens
  CDR3 for alpha chain variable domain of TCR clone 339859 (TRAV29/DV5, TRAJ53)
CAASAIGGSNYKLTF

SEQ ID NO: 679718 - protein, 17 aa, Homo sapiens
  CDR3 for beta chain variable domain of TCR clone 339859 (TRBV7-8, TRBJ2-6)
CASSAGTGGAGANVLTF

SEQ ID NO: 679719 - protein, 12 aa, Homo sapiens
  CDR3 for alpha chain variable domain of TCR clone 339860 (TRAV2, TRAJ9)
CAVGAGGFKTIF

SEQ ID NO: 679720 - protein, 16 aa, Homo sapiens
  CDR3 for beta chain variable domain of TCR clone 339860 (TRBV7-9, TRBJ2-3)
CASSPWREVGTDTQYF

SEQ ID NO: 679721 - protein, 13 aa, Homo sapiens
  CDR3 for alpha chain variable domain of TCR clone 339861 (TRAV1-1, TRAJ31)
CASYLNNNPRLMF

SEQ ID NO: 679722 - protein, 14 aa, Homo sapiens
  CDR3 for beta chain variable domain of TCR clone 339861 (TRBV4-1, TRBJ2-5)
CASSRSGSGETQYF

SEQ ID NO: 679723 - protein, 11 aa, Homo sapiens
  CDR3 for alpha chain variable domain of TCR clone 339862 (TRAV3, TRAJ21)
CAVGNFNKFYF

SEQ ID NO: 679724 - protein, 14 aa, Homo sapiens
  CDR3 for beta chain variable domain of TCR clone 339862 (TRBV18, TRBJ2-5)
CASSPGVAQETQYF

SEQ ID NO: 679725 - protein, 12 aa, Homo sapiens
  CDR3 for alpha chain variable domain of TCR clone 339863 (TRAV16, TRAJ56)
CAPSGANSKLTF

SEQ ID NO: 679726 - protein, 16 aa, Homo sapiens
  CDR3 for beta chain variable domain of TCR clone 339863 (TRBV7-9, TRBJ1-2)
CASSLGFSSGEDGYTF

SEQ ID NO: 679727 - protein, 14 aa, Homo sapiens
  CDR3 for alpha chain variable domain of TCR clone 339864 (TRAV3, TRAJ36)
CAVRDGTGANNLFF

SEQ ID NO: 679728 - protein, 16 aa, Homo sapiens
  CDR3 for beta chain variable domain of TCR clone 339864 (TRBV20-1, TRBJ2-6)
CSAREGPGVGSNVLTF

SEQ ID NO: 679729 - protein, 15 aa, Homo sapiens
  CDR3 for alpha chain variable domain of TCR clone 339865 (TRAV26-1, TRAJ23)
CIVRVAGYQGGKLIF

SEQ ID NO: 679730 - protein, 15 aa, Homo sapiens
  CDR3 for beta chain variable domain of TCR clone 339865 (TRBV28, TRBJ2-1)
CASSNGGGSSNEQFF

SEQ ID NO: 679731 - protein, 14 aa, Homo sapiens
  CDR3 for alpha chain variable domain of TCR clone 339866 (TRAV8-2, TRAJ37)
CVVSISGNTGKLIF

SEQ ID NO: 679732 - protein, 15 aa, Homo sapiens
  CDR3 for beta chain variable domain of TCR clone 339866 (TRBV13, TRBJ1-5)
CASSFGQGGVQPQHF

SEQ ID NO: 679733 - protein, 13 aa, Homo sapiens
  CDR3 for alpha chain variable domain of TCR clone 339867 (TRAV4, TRAJ22)
CLGGSGSARQLTF

SEQ ID NO: 679734 - protein, 15 aa, Homo sapiens
  CDR3 for beta chain variable domain of TCR clone 339867 (TRBV7-9, TRBJ1-6)
CASSSPGRGNSHLHF

SEQ ID NO: 679735 - protein, 12 aa, Homo sapiens
  CDR3 for alpha chain variable domain of TCR clone 339868 (TRAV17, TRAJ12)
CATLRSSYKFIF

SEQ ID NO: 679736 - protein, 16 aa, Homo sapiens
  CDR3 for beta chain variable domain of TCR clone 339868 (TRBV28, TRBJ2-7)
CASSLFFETGGHEQYF

SEQ ID NO: 679737 - protein, 17 aa, Homo sapiens
  CDR3 for alpha chain variable domain of TCR clone 339869 (TRAV13-2, TRAJ28)
CAEEPAGSGAGSYQLTF

SEQ ID NO: 679738 - protein, 15 aa, Homo sapiens
  CDR3 for beta chain variable domain of TCR clone 339869 (TRBV5-5, TRBJ1-1)
CASSLVGKDNTEAVF

SEQ ID NO: 679739 - protein, 15 aa, Homo sapiens
  CDR3 for alpha chain variable domain of TCR clone 339870 (TRAV10, TRAJ10)
CVVSADTGGGNKLTF

SEQ ID NO: 679740 - protein, 11 aa, Homo sapiens
  CDR3 for beta chain variable domain of TCR clone 339870 (TRBV7-8, TRBJ2-7)
CASSLSLEQYF

SEQ ID NO: 679741 - protein, 14 aa, Homo sapiens
  CDR3 for alpha chain variable domain of TCR clone 339871 (TRAV23/DV6, TRAJ22)
CAASVSGSARQLTF

SEQ ID NO: 679742 - protein, 17 aa, Homo sapiens
  CDR3 for beta chain variable domain of TCR clone 339871 (TRBV7-6, TRBJ2-5)
CASSPGLADPWGETQYF

SEQ ID NO: 679743 - protein, 14 aa, Homo sapiens
  CDR3 for alpha chain variable domain of TCR clone 339872 (TRAV26-1, TRAJ38)
CIADNAGNNRKLIW

SEQ ID NO: 679744 - protein, 15 aa, Homo sapiens
  CDR3 for beta chain variable domain of TCR clone 339872 (TRBV7-6, TRBJ1-4)
CASSFGAGAGEKLFF

SEQ ID NO: 679745 - protein, 13 aa, Homo sapiens
  CDR3 for alpha chain variable domain of TCR clone 339873 (TRAV38-1, TRAJ42)
CARWGGSQGNLIF

SEQ ID NO: 679746 - protein, 15 aa, Homo sapiens
  CDR3 for beta chain variable domain of TCR clone 339873 (TRBV7-9, TRBJ1-5)
CASSQGHQPNQPQHF

SEQ ID NO: 679747 - protein, 16 aa, Homo sapiens
  CDR3 for alpha chain variable domain of TCR clone 339874 (TRAV12-1, TRAJ4)
CLVNPGISGGYNKLIF

SEQ ID NO: 679748 - protein, 14 aa, Homo sapiens
  CDR3 for beta chain variable domain of TCR clone 339874 (TRBV5-7, TRBJ2-3)
CASRTSGGHRYAVF

SEQ ID NO: 679749 - protein, 14 aa, Homo sapiens
  CDR3 for alpha chain variable domain of TCR clone 339875 (TRAV2, TRAJ3)
CAVDRYSSASKIIL

SEQ ID NO: 679750 - protein, 16 aa, Homo sapiens
  CDR3 for beta chain variable domain of TCR clone 339875 (TRBV20-1, TRBJ1-5)
CSAELPGQQTNQPQHF

SEQ ID NO: 679751 - protein, 13 aa, Homo sapiens
  CDR3 for alpha chain variable domain of TCR clone 339876 (TRAV16, TRAJ39)
CALSKIMQATCSP

SEQ ID NO: 679752 - protein, 17 aa, Homo sapiens
  CDR3 for beta chain variable domain of TCR clone 339876 (TRBV23-1, TRBJ1-2)
CASSNTGGGLLWLHLRF

SEQ ID NO: 679753 - protein, 11 aa, Homo sapiens
  CDR3 for alpha chain variable domain of TCR clone 339877 (TRAV13-1, TRAJ8)
CASGGFQKLVF

SEQ ID NO: 679754 - protein, 13 aa, Homo sapiens
  CDR3 for beta chain variable domain of TCR clone 339877 (TRBV7-2, TRBJ2-2)
CASSLAVTGELFF

SEQ ID NO: 679755 - protein, 13 aa, Homo sapiens
  CDR3 for alpha chain variable domain of TCR clone 339878 (TRAV3, TRAJ27)
CAVRPLGAGKSTF

SEQ ID NO: 679756 - protein, 16 aa, Homo sapiens
  CDR3 for beta chain variable domain of TCR clone 339878 (TRBV12-5, TRBJ2-5)
CASGPRTGGNQETQYF

SEQ ID NO: 679757 - protein, 11 aa, Homo sapiens
  CDR3 for alpha chain variable domain of TCR clone 339879 (TRAV3, TRAJ21)
CAVGNINKFYF

SEQ ID NO: 679758 - protein, 14 aa, Homo sapiens
  CDR3 for beta chain variable domain of TCR clone 339879 (TRBV29-1, TRBJ2-2)
CSGRGSGNTGELFF

SEQ ID NO: 679759 - protein, 17 aa, Homo sapiens
  CDR3 for alpha chain variable domain of TCR clone 339880 (TRAV1-1, TRAJ32)
CAVRVDELWWCYKQAHL

SEQ ID NO: 679760 - protein, 15 aa, Homo sapiens
  CDR3 for beta chain variable domain of TCR clone 339880 (TRBV27, TRBJ1-6)
CASSFDRGLGSPLHF

SEQ ID NO: 679761 - protein, 14 aa, Homo sapiens
  CDR3 for alpha chain variable domain of TCR clone 339881 (TRAV8-4, TRAJ13)
CAVTLSGGYQKVTF

SEQ ID NO: 679762 - protein, 18 aa, Homo sapiens
  CDR3 for beta chain variable domain of TCR clone 339881 (TRBV7-9, TRBJ2-7)
CASSLTTSGSRTWYEQYF

SEQ ID NO: 679763 - protein, 17 aa, Homo sapiens
  CDR3 for alpha chain variable domain of TCR clone 339882 (TRAV3, TRAJ6)
CAVRDGPRAGGSYIPTF

SEQ ID NO: 679764 - protein, 15 aa, Homo sapiens
  CDR3 for beta chain variable domain of TCR clone 339882 (TRBV7-9, TRBJ1-5)
CASGQGHQPNQPQHF

SEQ ID NO: 679765 - protein, 15 aa, Homo sapiens
  CDR3 for alpha chain variable domain of TCR clone 339883 (TRAV25, TRAJ52)
CAGTSGGTSYGKLTF

SEQ ID NO: 679766 - protein, 16 aa, Homo sapiens
  CDR3 for beta chain variable domain of TCR clone 339883 (TRBV15, TRBJ1-2)
CATSRGPRTGAGGYTF

SEQ ID NO: 679767 - protein, 14 aa, Homo sapiens
  CDR3 for alpha chain variable domain of TCR clone 339884 (TRAV17, TRAJ54)
CATDANQGAQKLVF

SEQ ID NO: 679768 - protein, 14 aa, Homo sapiens
  CDR3 for beta chain variable domain of TCR clone 339884 (TRBV25-1, TRBJ1-1)
CASTHLGGDTEAFF

SEQ ID NO: 679769 - protein, 15 aa, Homo sapiens
  CDR3 for alpha chain variable domain of TCR clone 339885 (TRAV9-2, TRAJ9)
CALREGNTGGFKTIF

SEQ ID NO: 679770 - protein, 11 aa, Homo sapiens
  CDR3 for beta chain variable domain of TCR clone 339885 (TRBV19, TRBJ1-1)
CASSIGSEAFF

SEQ ID NO: 679771 - protein, 16 aa, Homo sapiens
  CDR3 for alpha chain variable domain of TCR clone 339886 (TRAV26-1, TRAJ53)
CIVRVAMGFSNYKLTF

SEQ ID NO: 679772 - protein, 12 aa, Homo sapiens
  CDR3 for beta chain variable domain of TCR clone 339886 (TRBV7-9, TRBJ1-5)
CASSPQGQPQHF

SEQ ID NO: 679773 - protein, 15 aa, Homo sapiens
  CDR3 for alpha chain variable domain of TCR clone 339887 (TRAV8-3, TRAJ23)
CAVGDRYNQGGKLIF

SEQ ID NO: 679774 - protein, 14 aa, Homo sapiens
  CDR3 for beta chain variable domain of TCR clone 339887 (TRBV25-1, TRBJ1-1)
CASTHLGGNTEAFF

SEQ ID NO: 679775 - protein, 15 aa, Homo sapiens
  CDR3 for alpha chain variable domain of TCR clone 339888 (TRAV12-3, TRAJ6)
CAMSATTGGSYIPTF

SEQ ID NO: 679776 - protein, 15 aa, Homo sapiens
  CDR3 for beta chain variable domain of TCR clone 339888 (TRBV27, TRBJ2-5)
CASSYVPGFVETQYF

SEQ ID NO: 679777 - protein, 11 aa, Homo sapiens
  CDR3 for alpha chain variable domain of TCR clone 339889 (TRAV1-2, TRAJ20)
CAVANDYKLSF

SEQ ID NO: 679778 - protein, 13 aa, Homo sapiens
  CDR3 for beta chain variable domain of TCR clone 339889 (TRBV5-5, TRBJ1-2)
CASSFWRGEDYTF

SEQ ID NO: 679779 - protein, 15 aa, Homo sapiens
  CDR3 for alpha chain variable domain of TCR clone 339890 (TRAV4, TRAJ39)
CLVGPNNNAGNMLTF

SEQ ID NO: 679780 - protein, 12 aa, Homo sapiens
  CDR3 for beta chain variable domain of TCR clone 339890 (TRBV11-2, TRBJ2-5)
CQQLDGEETQYF

SEQ ID NO: 679781 - protein, 13 aa, Homo sapiens
  CDR3 for alpha chain variable domain of TCR clone 339891 (TRAV13-1, TRAJ39)
CSKYRNAGNMLTF

SEQ ID NO: 679782 - protein, 16 aa, Homo sapiens
  CDR3 for beta chain variable domain of TCR clone 339891 (TRBV7-2, TRBJ2-3)
CASSLVALYSTDTQYF

SEQ ID NO: 679783 - protein, 15 aa, Homo sapiens
  CDR3 for alpha chain variable domain of TCR clone 339892 (TRAV12-3, TRAJ6)
WAMSASTGGSYIPTF

SEQ ID NO: 679784 - protein, 16 aa, Homo sapiens
  CDR3 for beta chain variable domain of TCR clone 339892 (TRBV20-1, TRBJ1-2)
CSASMGQGVANYGYTF

SEQ ID NO: 679785 - protein, 13 aa, Homo sapiens
  CDR3 for alpha chain variable domain of TCR clone 339893 (TRAV16, TRAJ30)
CALAQNRDDKIIF

SEQ ID NO: 679786 - protein, 13 aa, Homo sapiens
  CDR3 for beta chain variable domain of TCR clone 339893 (TRBV7-9, TRBJ1-2)
CASSLKQNYGYTF

SEQ ID NO: 679787 - protein, 15 aa, Homo sapiens
  CDR3 for alpha chain variable domain of TCR clone 339894 (TRAV16, TRAJ12)
CSKWPLRDSSYKLIF

SEQ ID NO: 679788 - protein, 14 aa, Homo sapiens
  CDR3 for beta chain variable domain of TCR clone 339894 (TRBV19, TRBJ2-1)
CASPTFVLSGEQFF

SEQ ID NO: 679789 - protein, 12 aa, Homo sapiens
  CDR3 for alpha chain variable domain of TCR clone 339895 (TRAV38-2/DV8, TRAJ48)
CALLSGNEKLTF

SEQ ID NO: 679790 - protein, 15 aa, Homo sapiens
  CDR3 for beta chain variable domain of TCR clone 339895 (TRBV6-3, TRBJ2-7)
CASSSPGTVFYEQYF

SEQ ID NO: 679791 - protein, 13 aa, Homo sapiens
  CDR3 for alpha chain variable domain of TCR clone 339896 (TRAV12-1, TRAJ26)
CVVRRNYGQHFVF

SEQ ID NO: 679792 - protein, 14 aa, Homo sapiens
  CDR3 for beta chain variable domain of TCR clone 339896 (TRBV4-2, TRBJ2-1)
CASGLDRAYNEQFF

SEQ ID NO: 679793 - protein, 14 aa, Homo sapiens
  CDR3 for alpha chain variable domain of TCR clone 339897 (TRAV13-1, TRAJ35)
CAASKGGFGNVLHC

SEQ ID NO: 679794 - protein, 13 aa, Homo sapiens
  CDR3 for beta chain variable domain of TCR clone 339897 (TRBV7-3, TRBJ1-1)
CASSQGWGAEASF

SEQ ID NO: 679795 - protein, 13 aa, Homo sapiens
  CDR3 for alpha chain variable domain of TCR clone 339898 (TRAV17, TRAJ9)
CATDYTGGFKTIF

SEQ ID NO: 679796 - protein, 14 aa, Homo sapiens
  CDR3 for beta chain variable domain of TCR clone 339898 (TRBV4-2, TRBJ2-5)
CASSQDRGRETQYF

SEQ ID NO: 679797 - protein, 13 aa, Homo sapiens
  CDR3 for alpha chain variable domain of TCR clone 339899 (TRAV12-3, TRAJ13)
CAMTSGGYQKVTF

SEQ ID NO: 679798 - protein, 13 aa, Homo sapiens
  CDR3 for beta chain variable domain of TCR clone 339899 (TRBV7-9, TRBJ1-2)
CASSLKQKYGYTF

SEQ ID NO: 679799 - protein, 14 aa, Homo sapiens
  CDR3 for alpha chain variable domain of TCR clone 339900 (TRAV16, TRAJ49)
CALSSQSTGNQFYF

SEQ ID NO: 679800 - protein, 15 aa, Homo sapiens
  CDR3 for beta chain variable domain of TCR clone 339900 (TRBV11-1, TRBJ2-1)
CASSLFRDTYNEQFF

SEQ ID NO: 679801 - protein, 12 aa, Homo sapiens
  CDR3 for alpha chain variable domain of TCR clone 339901 (TRAV13-2, TRAJ23)
CAERHRGGKLIF

SEQ ID NO: 679802 - protein, 13 aa, Homo sapiens
  CDR3 for beta chain variable domain of TCR clone 339901 (TRBV7-2, TRBJ2-7)
CASSSPSGSEQYF

SEQ ID NO: 679803 - protein, 13 aa, Homo sapiens
  CDR3 for alpha chain variable domain of TCR clone 339902 (TRAV20, TRAJ37)
CAGCSSNTGKLIF

SEQ ID NO: 679804 - protein, 12 aa, Homo sapiens
  CDR3 for beta chain variable domain of TCR clone 339902 (TRBV12-4, TRBJ2-1)
CASSPGRNEQFF

SEQ ID NO: 679805 - protein, 12 aa, Homo sapiens
  CDR3 for alpha chain variable domain of TCR clone 339903 (TRAV12-3, TRAJ17)
CAMTPTGNKLTF

SEQ ID NO: 679806 - protein, 13 aa, Homo sapiens
  CDR3 for beta chain variable domain of TCR clone 339903 (TRBV12-5, TRBJ2-3)
CASGDRQSDTQYF

SEQ ID NO: 679807 - protein, 11 aa, Homo sapiens
  CDR3 for alpha chain variable domain of TCR clone 339904 (TRAV27, TRAJ47)
SIVEYGNKLVF

SEQ ID NO: 679808 - protein, 18 aa, Homo sapiens
  CDR3 for beta chain variable domain of TCR clone 339904 (TRBV2, TRBJ2-1)
CASRGLAGRPRTYNEQFF

SEQ ID NO: 679809 - protein, 11 aa, Homo sapiens
  CDR3 for alpha chain variable domain of TCR clone 339905 (TRAV13-1, TRAJ39)
CASHAGNMLTF

SEQ ID NO: 679810 - protein, 12 aa, Homo sapiens
  CDR3 for beta chain variable domain of TCR clone 339905 (TRBV27, TRBJ2-7)
CASSGGFYEQYF

SEQ ID NO: 679811 - protein, 12 aa, Homo sapiens
  CDR3 for alpha chain variable domain of TCR clone 339906 (TRAV13-2, TRAJ23)
CAERHRGGKRIF

SEQ ID NO: 679812 - protein, 15 aa, Homo sapiens
  CDR3 for beta chain variable domain of TCR clone 339906 (TRBV19, TRBJ1-2)
CASSVGQVLNYGYTF

SEQ ID NO: 679813 - protein, 13 aa, Homo sapiens
  CDR3 for alpha chain variable domain of TCR clone 339907 (TRAV12-2, TRAJ39)
RAVNNNAGNMLTF

SEQ ID NO: 679814 - protein, 13 aa, Homo sapiens
  CDR3 for beta chain variable domain of TCR clone 339907 (TRBV2, TRBJ1-5)
CATAGPGNQPQHF

SEQ ID NO: 679815 - protein, 17 aa, Homo sapiens
  CDR3 for alpha chain variable domain of TCR clone 339908 (TRAV3, TRAJ42)
CAVRDRDYGGSQGNLIF

SEQ ID NO: 679816 - protein, 13 aa, Homo sapiens
  CDR3 for beta chain variable domain of TCR clone 339908 (TRBV12-4, TRBJ2-5)
CASSPGTVETQYF

SEQ ID NO: 679817 - protein, 12 aa, Homo sapiens
  CDR3 for alpha chain variable domain of TCR clone 339909 (TRAV12-3, TRAJ17)
CAMKLTGNKLTF

SEQ ID NO: 679818 - protein, 15 aa, Homo sapiens
  CDR3 for beta chain variable domain of TCR clone 339909 (TRBV5-1, TRBJ2-1)
CASSPPRAPYNEQFF

SEQ ID NO: 679819 - protein, 12 aa, Homo sapiens
  CDR3 for alpha chain variable domain of TCR clone 339910 (TRAV16, TRAJ21)
CALLGNFNKFYF

SEQ ID NO: 679820 - protein, 13 aa, Homo sapiens
  CDR3 for beta chain variable domain of TCR clone 339910 (TRBV28, TRBJ2-7)
CAGKAGGVYEQYF

SEQ ID NO: 679821 - protein, 14 aa, Homo sapiens
  CDR3 for alpha chain variable domain of TCR clone 339911 (TRAV26-1, TRAJ34)
CIVRVAYNTDKLIF

SEQ ID NO: 679822 - protein, 14 aa, Homo sapiens
  CDR3 for beta chain variable domain of TCR clone 339911 (TRBV7-2, TRBJ2-7)
CASSLRWEVNEQYF

SEQ ID NO: 679823 - protein, 16 aa, Homo sapiens
  CDR3 for alpha chain variable domain of TCR clone 339912 (TRAV36/DV7, TRAJ38)
SAVTTSNAGNNRKLIW

SEQ ID NO: 679824 - protein, 12 aa, Homo sapiens
  CDR3 for beta chain variable domain of TCR clone 339912 (TRBV20-1, TRBJ1-1)
CSASGYTLRAFF

SEQ ID NO: 679825 - protein, 12 aa, Homo sapiens
  CDR3 for alpha chain variable domain of TCR clone 339913 (TRAV2, TRAJ37)
CAVAGNTGKLIF

SEQ ID NO: 679826 - protein, 17 aa, Homo sapiens
  CDR3 for beta chain variable domain of TCR clone 339913 (TRBV28, TRBJ2-5)
CASSTPEGDALQENQYF

SEQ ID NO: 679827 - protein, 13 aa, Homo sapiens
  CDR3 for alpha chain variable domain of TCR clone 339914 (TRAV8-1, TRAJ41)
CAVNPGSGYALNF

SEQ ID NO: 679828 - protein, 14 aa, Homo sapiens
  CDR3 for beta chain variable domain of TCR clone 339914 (TRBV7-3, TRBJ2-1)
CASSLAGGTNEQFF

SEQ ID NO: 679829 - protein, 12 aa, Homo sapiens
  CDR3 for alpha chain variable domain of TCR clone 339915 (TRAV26-2, TRAJ21)
CILKGNFNEFYF

SEQ ID NO: 679830 - protein, 14 aa, Homo sapiens
  CDR3 for beta chain variable domain of TCR clone 339915 (TRBV2, TRBJ2-1)
CASSDRAYYNEQFF

SEQ ID NO: 679831 - protein, 22 aa, Homo sapiens
  CDR3 for alpha chain variable domain of TCR clone 339916 (TRAV26-1, TRAJ30)
CIVRVRTEMARSSLEKGHDFIF

SEQ ID NO: 679832 - protein, 18 aa, Homo sapiens
  CDR3 for beta chain variable domain of TCR clone 339916 (TRBV4-1, TRBJ1-5)
CASSQDPRGQGLNQPQHF

SEQ ID NO: 679833 - protein, 14 aa, Homo sapiens
  CDR3 for alpha chain variable domain of TCR clone 339917 (TRAV17, TRAJ23)
CATALGGQGGKLIF

SEQ ID NO: 679834 - protein, 14 aa, Homo sapiens
  CDR3 for beta chain variable domain of TCR clone 339917 (TRBV15, TRBJ1-5)
CATSKAGDNQPQHF

SEQ ID NO: 679835 - protein, 12 aa, Homo sapiens
  CDR3 for alpha chain variable domain of TCR clone 339918 (TRAV12-3, TRAJ17)
CAMTLTGNKLTF

SEQ ID NO: 679836 - protein, 15 aa, Homo sapiens
  CDR3 for beta chain variable domain of TCR clone 339918 (TRBV7-2, TRBJ2-3)
CASSLAGSFIDTQYF

SEQ ID NO: 679837 - protein, 11 aa, Homo sapiens
  CDR3 for alpha chain variable domain of TCR clone 339919 (TRAV17, TRAJ29)
CYVATDTPLVF

SEQ ID NO: 679838 - protein, 14 aa, Homo sapiens
  CDR3 for beta chain variable domain of TCR clone 339919 (TRBV25-1, TRBJ1-1)
CASTHLGGNTEAFF

SEQ ID NO: 679839 - protein, 15 aa, Homo sapiens
  CDR3 for alpha chain variable domain of TCR clone 339920 (TRAV8-4, TRAJ29)
CSVSEDFRGNTPLVF

SEQ ID NO: 679840 - protein, 18 aa, Homo sapiens
  CDR3 for beta chain variable domain of TCR clone 339920 (TRBV20-1, TRBJ2-6)
CSARTLAGGPSGANVLTF

SEQ ID NO: 679841 - protein, 20 aa, Homo sapiens
  CDR3 for alpha chain variable domain of TCR clone 339921 (TRAV1-1, TRAJ4)
CLLLLRCEGFLSGGYNKLIF

SEQ ID NO: 679842 - protein, 16 aa, Homo sapiens
  CDR3 for beta chain variable domain of TCR clone 339921 (TRBV28, TRBJ1-4)
CPSSPPYRGRSEKLFF

SEQ ID NO: 679843 - protein, 13 aa, Homo sapiens
  CDR3 for alpha chain variable domain of TCR clone 339922 (TRAV2, TRAJ12)
CAVGADSSYKSIF

SEQ ID NO: 679844 - protein, 13 aa, Homo sapiens
  CDR3 for beta chain variable domain of TCR clone 339922 (TRBV20-1, TRBJ2-1)
CSARSSPRDEQFF

SEQ ID NO: 679845 - protein, 13 aa, Homo sapiens
  CDR3 for alpha chain variable domain of TCR clone 339923 (TRAV3, TRAJ41)
CAVSSNSGYAINF

SEQ ID NO: 679846 - protein, 13 aa, Homo sapiens
  CDR3 for beta chain variable domain of TCR clone 339923 (TRBV20-1, TRBJ2-2)
CSALSGGAGELFF

SEQ ID NO: 679847 - protein, 14 aa, Homo sapiens
  CDR3 for alpha chain variable domain of TCR clone 339924 (TRAV21, TRAJ21)
CAVGVEDNFNKFYF

SEQ ID NO: 679848 - protein, 12 aa, Homo sapiens
  CDR3 for beta chain variable domain of TCR clone 339924 (TRBV19, TRBJ2-1)
CASRMQDTEQFF

SEQ ID NO: 679849 - protein, 14 aa, Homo sapiens
  CDR3 for alpha chain variable domain of TCR clone 339925 (TRAV17, TRAJ16)
WATADFSDGQKLLF

SEQ ID NO: 679850 - protein, 15 aa, Homo sapiens
  CDR3 for beta chain variable domain of TCR clone 339925 (TRBV18, TRBJ2-1)
CASSPPSASYNEQFF

SEQ ID NO: 679851 - protein, 13 aa, Homo sapiens
  CDR3 for alpha chain variable domain of TCR clone 339926 (TRAV3, TRAJ20)
CCEAFCNDYKLSF

SEQ ID NO: 679852 - protein, 15 aa, Homo sapiens
  CDR3 for beta chain variable domain of TCR clone 339926 (TRBV4-3, TRBJ2-1)
CASSQMRGAHNEQFF

SEQ ID NO: 679853 - protein, 14 aa, Homo sapiens
  CDR3 for alpha chain variable domain of TCR clone 339927 (TRAV1-2, TRAJ16)
CAVRSASDGQKLLF

SEQ ID NO: 679854 - protein, 17 aa, Homo sapiens
  CDR3 for beta chain variable domain of TCR clone 339927 (TRBV7-3, TRBJ2-3)
CASSLMKRMRGADTQYY

SEQ ID NO: 679855 - protein, 12 aa, Homo sapiens
  CDR3 for alpha chain variable domain of TCR clone 339928 (TRAV30, TRAJ43)
CGTEERGNDMRF

SEQ ID NO: 679856 - protein, 13 aa, Homo sapiens
  CDR3 for beta chain variable domain of TCR clone 339928 (TRBV27, TRBJ2-7)
CVSSVSQGYEQYF

SEQ ID NO: 679857 - protein, 14 aa, Homo sapiens
  CDR3 for alpha chain variable domain of TCR clone 339929 (TRAV38-1, TRAJ48)
CAFIANFGNEKLTF

SEQ ID NO: 679858 - protein, 16 aa, Homo sapiens
  CDR3 for beta chain variable domain of TCR clone 339929 (TRBV7-2, TRBJ1-4)
CASSLAPGRRDEKLFF

SEQ ID NO: 679859 - protein, 13 aa, Homo sapiens
  CDR3 for alpha chain variable domain of TCR clone 339930 (TRAV3, TRAJ20)
CAVRDTPRYKLSF

SEQ ID NO: 679860 - protein, 18 aa, Homo sapiens
  CDR3 for beta chain variable domain of TCR clone 339930 (TRBV25-1, TRBJ1-2)
CASSGLQNGQGLIFGYTF

SEQ ID NO: 679861 - protein, 13 aa, Homo sapiens
  CDR3 for alpha chain variable domain of TCR clone 339931 (TRAV8-4, TRAJ9)
CAVSETGGFKTIF

SEQ ID NO: 679862 - protein, 14 aa, Homo sapiens
  CDR3 for beta chain variable domain of TCR clone 339931 (TRBV18, TRBJ2-3)
RDSSGLADTDTQYF

SEQ ID NO: 679863 - protein, 13 aa, Homo sapiens
  CDR3 for alpha chain variable domain of TCR clone 339932 (TRAV23/DV6, TRAJ58)
CAAGEIGGSRLTF

SEQ ID NO: 679864 - protein, 15 aa, Homo sapiens
  CDR3 for beta chain variable domain of TCR clone 339932 (TRBV19, TRBJ1-1)
CASTSGQIQNTEAFF

SEQ ID NO: 679865 - protein, 15 aa, Homo sapiens
  CDR3 for alpha chain variable domain of TCR clone 339933 (TRAV17, TRAJ56)
CATDANTGANSKLTF

SEQ ID NO: 679866 - protein, 14 aa, Homo sapiens
  CDR3 for beta chain variable domain of TCR clone 339933 (TRBV19, TRBJ1-5)
CASSLGTGGQPQQF

SEQ ID NO: 679867 - protein, 15 aa, Homo sapiens
  CDR3 for alpha chain variable domain of TCR clone 339934 (TRAV21, TRAJ37)
CAVRPTLTHPGKLIF

SEQ ID NO: 679868 - protein, 16 aa, Homo sapiens
  CDR3 for beta chain variable domain of TCR clone 339934 (TRBV24-1, TRBJ2-3)
CATSDRRQDLTDTQYF

SEQ ID NO: 679869 - protein, 19 aa, Homo sapiens
  CDR3 for alpha chain variable domain of TCR clone 339935 (TRAV2, TRAJ20)
ILQVREADAAVYRDCKLSF

SEQ ID NO: 679870 - protein, 16 aa, Homo sapiens
  CDR3 for beta chain variable domain of TCR clone 339935 (TRBV12-4, TRBJ2-7)
CASSLIGGTGTYEQYF

SEQ ID NO: 679871 - protein, 15 aa, Homo sapiens
  CDR3 for alpha chain variable domain of TCR clone 339936 (TRAV12-2, TRAJ53)
CAVNAGGGSNYKLTF

SEQ ID NO: 679872 - protein, 17 aa, Homo sapiens
  CDR3 for beta chain variable domain of TCR clone 339936 (TRBV7-3, TRBJ2-3)
CASSLMKRMRGADTQYF

SEQ ID NO: 679873 - protein, 16 aa, Homo sapiens
  CDR3 for alpha chain variable domain of TCR clone 339937 (TRAV29/DV5, TRAJ39)
CEASLLFNNAGNMLTF

SEQ ID NO: 679874 - protein, 16 aa, Homo sapiens
  CDR3 for beta chain variable domain of TCR clone 339937 (TRBV19, TRBJ2-6)
CASSMSGLSGANFLTF

SEQ ID NO: 679875 - protein, 10 aa, Homo sapiens
  CDR3 for alpha chain variable domain of TCR clone 339938 (TRAV5, TRAJ34)
CAEDTDKLIF

SEQ ID NO: 679876 - protein, 14 aa, Homo sapiens
  CDR3 for beta chain variable domain of TCR clone 339938 (TRBV11-1, TRBJ1-1)
CASSLEHPNTEAFF

SEQ ID NO: 679877 - protein, 15 aa, Homo sapiens
  CDR3 for alpha chain variable domain of TCR clone 339939 (TRAV3, TRAJ9)
CAVRARNTGGFKTIF

SEQ ID NO: 679878 - protein, 14 aa, Homo sapiens
  CDR3 for beta chain variable domain of TCR clone 339939 (TRBV19, TRBJ2-1)
CASSMGSGATEQFF

SEQ ID NO: 679879 - protein, 12 aa, Homo sapiens
  CDR3 for alpha chain variable domain of TCR clone 339940 (TRAV12-3, TRAJ34)
CAMGYNTDKLIF

SEQ ID NO: 679880 - protein, 14 aa, Homo sapiens
  CDR3 for beta chain variable domain of TCR clone 339940 (TRBV4-1, TRBJ2-2)
CTSSQAVNTGELFF

SEQ ID NO: 679881 - protein, 12 aa, Homo sapiens
  CDR3 for alpha chain variable domain of TCR clone 339941 (TRAV12-3, TRAJ5)
CAMDTGRIALTF

SEQ ID NO: 679882 - protein, 12 aa, Homo sapiens
  CDR3 for beta chain variable domain of TCR clone 339941 (TRBV19, TRBJ1-5)
CASSIAQQPQHF

SEQ ID NO: 679883 - protein, 13 aa, Homo sapiens
  CDR3 for alpha chain variable domain of TCR clone 339942 (TRAV8-3, TRAJ16)
CAVDRFSDGQAAL

SEQ ID NO: 679884 - protein, 15 aa, Homo sapiens
  CDR3 for beta chain variable domain of TCR clone 339942 (TRBV7-6, TRBJ2-1)
CASSPGQGPYNEQFF

SEQ ID NO: 679885 - protein, 12 aa, Homo sapiens
  CDR3 for alpha chain variable domain of TCR clone 339943 (TRAV3, TRAJ43)
CAVRDPNNDMRF

SEQ ID NO: 679886 - protein, 15 aa, Homo sapiens
  CDR3 for beta chain variable domain of TCR clone 339943 (TRBV27, TRBJ1-5)
CASSLVTGFDQPQHF

SEQ ID NO: 679887 - protein, 14 aa, Homo sapiens
  CDR3 for alpha chain variable domain of TCR clone 339944 (TRAV12-2, TRAJ13)
CAVKKTGGYQKVTF

SEQ ID NO: 679888 - protein, 12 aa, Homo sapiens
  CDR3 for beta chain variable domain of TCR clone 339944 (TRBV11-2, TRBJ2-7)
CASSPPADEQYF

SEQ ID NO: 679889 - protein, 14 aa, Homo sapiens
  CDR3 for alpha chain variable domain of TCR clone 339945 (TRAV8-1, TRAJ5)
CAVRTDTGRRALTF

SEQ ID NO: 679890 - protein, 13 aa, Homo sapiens
  CDR3 for beta chain variable domain of TCR clone 339945 (TRBV14, TRBJ1-1)
CASSREFGTEAFF

SEQ ID NO: 679891 - protein, 11 aa, Homo sapiens
  CDR3 for alpha chain variable domain of TCR clone 339946 (TRAV17, TRAJ36)
CAPTGANNLFF

SEQ ID NO: 679892 - protein, 13 aa, Homo sapiens
  CDR3 for beta chain variable domain of TCR clone 339946 (TRBV7-3, TRBJ1-1)
CASSQDWGAEAFF

SEQ ID NO: 679893 - protein, 14 aa, Homo sapiens
  CDR3 for alpha chain variable domain of TCR clone 339947 (TRAV26-1, TRAJ38)
CIADNAGNNRKLTW

SEQ ID NO: 679894 - protein, 12 aa, Homo sapiens
  CDR3 for beta chain variable domain of TCR clone 339947 (TRBV11-2, TRBJ2-1)
CASSPGNNEQFF

SEQ ID NO: 679895 - protein, 15 aa, Homo sapiens
  CDR3 for alpha chain variable domain of TCR clone 339948 (TRAV17, TRAJ22)
CATVAPSGSARRLTF

SEQ ID NO: 679896 - protein, 15 aa, Homo sapiens
  CDR3 for beta chain variable domain of TCR clone 339948 (TRBV7-9, TRBJ1-1)
CASSHRGTVNTEAFF

SEQ ID NO: 679897 - protein, 12 aa, Homo sapiens
  CDR3 for alpha chain variable domain of TCR clone 339949 (TRAV1-1, TRAJ8)
CAGGTGFHKLVF

SEQ ID NO: 679898 - protein, 15 aa, Homo sapiens
  CDR3 for beta chain variable domain of TCR clone 339949 (TRBV7-9, TRBJ1-4)
CASSLTGGFNEKLFF

SEQ ID NO: 679899 - protein, 19 aa, Homo sapiens
  CDR3 for alpha chain variable domain of TCR clone 339950 (TRAV38-1, TRAJ53)
CAFMKHGLESGGSNYKLTF

SEQ ID NO: 679900 - protein, 12 aa, Homo sapiens
  CDR3 for beta chain variable domain of TCR clone 339950 (TRBV29-1, TRBJ2-3)
CSVTGGADTQYF

SEQ ID NO: 679901 - protein, 13 aa, Homo sapiens
  CDR3 for alpha chain variable domain of TCR clone 339951 (TRAV21, TRAJ27)
CAARPGNAGKTTF

SEQ ID NO: 679902 - protein, 14 aa, Homo sapiens
  CDR3 for beta chain variable domain of TCR clone 339951 (TRBV5-4, TRBJ1-1)
FASSLDRRRDEAFF

SEQ ID NO: 679903 - protein, 15 aa, Homo sapiens
  CDR3 for alpha chain variable domain of TCR clone 339952 (TRAV8-3, TRAJ34)
DAAEYFCAIPGKLIF

SEQ ID NO: 679904 - protein, 14 aa, Homo sapiens
  CDR3 for beta chain variable domain of TCR clone 339952 (TRBV7-9, TRBJ2-2)
CASSGLADTGELFF

SEQ ID NO: 679905 - protein, 15 aa, Homo sapiens
  CDR3 for alpha chain variable domain of TCR clone 339953 (TRAV21, TRAJ24)
CAARSSTDSWGKLQF

SEQ ID NO: 679906 - protein, 16 aa, Homo sapiens
  CDR3 for beta chain variable domain of TCR clone 339953 (TRBV10-3, TRBJ1-2)
CAISDKVSGPFYGYTF

SEQ ID NO: 679907 - protein, 14 aa, Homo sapiens
  CDR3 for alpha chain variable domain of TCR clone 339954 (TRAV12-1, TRAJ17)
CVVNYKAAGNKLTF

SEQ ID NO: 679908 - protein, 12 aa, Homo sapiens
  CDR3 for beta chain variable domain of TCR clone 339954 (TRBV12-4, TRBJ1-2)
CASSFIWLHLRF

SEQ ID NO: 679909 - protein, 11 aa, Homo sapiens
  CDR3 for alpha chain variable domain of TCR clone 339955 (TRAV3, TRAJ21)
CAVGNFNKFYF

SEQ ID NO: 679910 - protein, 13 aa, Homo sapiens
  CDR3 for beta chain variable domain of TCR clone 339955 (TRBV10-3, TRBJ2-7)
CASKLAVNYEQYF

SEQ ID NO: 679911 - protein, 18 aa, Homo sapiens
  CDR3 for alpha chain variable domain of TCR clone 339956 (TRAV21, TRAJ52)
CAVRPSPAGGTSYGKLTF

SEQ ID NO: 679912 - protein, 14 aa, Homo sapiens
  CDR3 for beta chain variable domain of TCR clone 339956 (TRBV28, TRBJ1-1)
CASSPRTRWAAAFF

SEQ ID NO: 679913 - protein, 15 aa, Homo sapiens
  CDR3 for alpha chain variable domain of TCR clone 339957 (TRAV27, TRAJ38)
CASRRNAGNNRKLIW

SEQ ID NO: 679914 - protein, 13 aa, Homo sapiens
  CDR3 for beta chain variable domain of TCR clone 339957 (TRBV12-5, TRBJ2-3)
CASGDRQSDAQYF

SEQ ID NO: 679915 - protein, 16 aa, Homo sapiens
  CDR3 for alpha chain variable domain of TCR clone 339958 (TRAV30, TRAJ24)
CGSEIVDADSGGKFQL

SEQ ID NO: 679916 - protein, 14 aa, Homo sapiens
  CDR3 for beta chain variable domain of TCR clone 339958 (TRBV12-5, TRBJ2-5)
CASGSRTHQETQYF

SEQ ID NO: 679917 - protein, 16 aa, Homo sapiens
  CDR3 for alpha chain variable domain of TCR clone 339959 (TRAV2, TRAJ13)
CAARILGVTRKLPLEL

SEQ ID NO: 679918 - protein, 14 aa, Homo sapiens
  CDR3 for beta chain variable domain of TCR clone 339959 (TRBV19, TRBJ2-1)
CASEVTGARNEQLF

SEQ ID NO: 679919 - protein, 14 aa, Homo sapiens
  CDR3 for alpha chain variable domain of TCR clone 339960 (TRAV13-1, TRAJ37)
CAASRLATQANKSL

SEQ ID NO: 679920 - protein, 13 aa, Homo sapiens
  CDR3 for beta chain variable domain of TCR clone 339960 (TRBV2, TRBJ1-1)
CASSVSGYTEAFF

SEQ ID NO: 679921 - protein, 12 aa, Homo sapiens
  CDR3 for alpha chain variable domain of TCR clone 339961 (TRAV9-2, TRAJ26)
CAMRGYGQNFVF

SEQ ID NO: 679922 - protein, 12 aa, Homo sapiens
  CDR3 for beta chain variable domain of TCR clone 339961 (TRBV29-1, TRBJ2-3)
CSVTGGADTQYF

SEQ ID NO: 679923 - protein, 13 aa, Homo sapiens
  CDR3 for alpha chain variable domain of TCR clone 339962 (TRAV21, TRAJ27)
CAARPGNAGELTF

SEQ ID NO: 679924 - protein, 14 aa, Homo sapiens
  CDR3 for beta chain variable domain of TCR clone 339962 (TRBV7-6, TRBJ2-3)
CASSLGTVTDTQYF

SEQ ID NO: 679925 - protein, 14 aa, Homo sapiens
  CDR3 for alpha chain variable domain of TCR clone 339963 (TRAV12-2, TRAJ13)
CAVKKTGGYQKVTF

SEQ ID NO: 679926 - protein, 13 aa, Homo sapiens
  CDR3 for beta chain variable domain of TCR clone 339963 (TRBV10-3, TRBJ2-7)
CASKLAVYYEQYF

SEQ ID NO: 679927 - protein, 14 aa, Homo sapiens
  CDR3 for alpha chain variable domain of TCR clone 339964 (TRAV1-1, TRAJ27)
CAVIYITNAGKSTF

SEQ ID NO: 679928 - protein, 15 aa, Homo sapiens
  CDR3 for beta chain variable domain of TCR clone 339964 (TRBV7-2, TRBJ2-1)
CASSSGLAGSNEQFF

SEQ ID NO: 679929 - protein, 11 aa, Homo sapiens
  CDR3 for alpha chain variable domain of TCR clone 339965 (TRAV8-1, TRAJ8)
CAMTGFQKLVF

SEQ ID NO: 679930 - protein, 14 aa, Homo sapiens
  CDR3 for beta chain variable domain of TCR clone 339965 (TRBV5-4, TRBJ1-2)
CASTRQKGNYGYTF

SEQ ID NO: 679931 - protein, 11 aa, Homo sapiens
  CDR3 for alpha chain variable domain of TCR clone 339966 (TRAV21, TRAJ34)
CAHYNTDKLIF

SEQ ID NO: 679932 - protein, 13 aa, Homo sapiens
  CDR3 for beta chain variable domain of TCR clone 339966 (TRBV7-6, TRBJ1-2)
CASSLVSDYGYTF

SEQ ID NO: 679933 - protein, 12 aa, Homo sapiens
  CDR3 for alpha chain variable domain of TCR clone 339967 (TRAV2, TRAJ9)
CAVGAGGFKTIF

SEQ ID NO: 679934 - protein, 15 aa, Homo sapiens
  CDR3 for beta chain variable domain of TCR clone 339967 (TRBV3-1, TRBJ2-2)
CASSQDWTRAGELFF

SEQ ID NO: 679935 - protein, 11 aa, Homo sapiens
  CDR3 for alpha chain variable domain of TCR clone 339968 (TRAV2, TRAJ23)
CAVETRGKLIF

SEQ ID NO: 679936 - protein, 14 aa, Homo sapiens
  CDR3 for beta chain variable domain of TCR clone 339968 (TRBV2, TRBJ2-3)
YASSEGQNTDTQYF

SEQ ID NO: 679937 - protein, 14 aa, Homo sapiens
  CDR3 for alpha chain variable domain of TCR clone 339969 (TRAV1-2, TRAJ8)
CAVREDTGFQKLVF

SEQ ID NO: 679938 - protein, 15 aa, Homo sapiens
  CDR3 for beta chain variable domain of TCR clone 339969 (TRBV28, TRBJ2-1)
CARSIIAGGRSEQFF

SEQ ID NO: 679939 - protein, 23 aa, Homo sapiens
  CDR3 for alpha chain variable domain of TCR clone 339970 (TRAV3, TRAJ36)
CSVRDTGQTTSSLGLERDSPLLP

SEQ ID NO: 679940 - protein, 15 aa, Homo sapiens
  CDR3 for beta chain variable domain of TCR clone 339970 (TRBV24-1, TRBJ2-1)
CATSGSGGFYNEQFF

SEQ ID NO: 679941 - protein, 13 aa, Homo sapiens
  CDR3 for alpha chain variable domain of TCR clone 339971 (TRAV21, TRAJ27)
CAALNPNAGQSTF

SEQ ID NO: 679942 - protein, 14 aa, Homo sapiens
  CDR3 for beta chain variable domain of TCR clone 339971 (TRBV27, TRBJ1-1)
CASSLLSGLSEAFF

SEQ ID NO: 679943 - protein, 17 aa, Homo sapiens
  CDR3 for alpha chain variable domain of TCR clone 339972 (TRAV17, TRAJ28)
CATDPRRGWAGSYQLTF

SEQ ID NO: 679944 - protein, 16 aa, Homo sapiens
  CDR3 for beta chain variable domain of TCR clone 339972 (TRBV25-1, TRBJ1-1)
CASSGDRDRRRIEAFF

SEQ ID NO: 679945 - protein, 12 aa, Homo sapiens
  CDR3 for alpha chain variable domain of TCR clone 339973 (TRAV1-2, TRAJ9)
CSGYTGGFKTIF

SEQ ID NO: 679946 - protein, 15 aa, Homo sapiens
  CDR3 for beta chain variable domain of TCR clone 339973 (TRBV11-2, TRBJ2-1)
CASSPAGQSLNEQFF

SEQ ID NO: 679947 - protein, 13 aa, Homo sapiens
  CDR3 for alpha chain variable domain of TCR clone 339974 (TRAV16, TRAJ28)
CALTGAGSYQLTF

SEQ ID NO: 679948 - protein, 16 aa, Homo sapiens
  CDR3 for beta chain variable domain of TCR clone 339974 (TRBV6-1, TRBJ2-5)
CASSETLDRGAETQYF

SEQ ID NO: 679949 - protein, 11 aa, Homo sapiens
  CDR3 for alpha chain variable domain of TCR clone 339975 (TRAV21, TRAJ34)
CAHYNTDKLIF

SEQ ID NO: 679950 - protein, 13 aa, Homo sapiens
  CDR3 for beta chain variable domain of TCR clone 339975 (TRBV7-6, TRBJ1-2)
CARSLVADYGYTF

SEQ ID NO: 679951 - protein, 10 aa, Homo sapiens
  CDR3 for alpha chain variable domain of TCR clone 339976 (TRAV13-1, TRAJ27)
CAPLARQINL

SEQ ID NO: 679952 - protein, 13 aa, Homo sapiens
  CDR3 for beta chain variable domain of TCR clone 339976 (TRBV28, TRBJ1-1)
CASSKQGWTEDFF

SEQ ID NO: 679953 - protein, 23 aa, Homo sapiens
  CDR3 for alpha chain variable domain of TCR clone 339977 (TRAV26-1, TRAJ38)
CIADNAGNNHNQNPDPAGYQLRD

SEQ ID NO: 679954 - protein, 12 aa, Homo sapiens
  CDR3 for beta chain variable domain of TCR clone 339977 (TRBV11-2, TRBJ2-2)
CASSLGGGELFF

SEQ ID NO: 679955 - protein, 14 aa, Homo sapiens
  CDR3 for alpha chain variable domain of TCR clone 339978 (TRAV35, TRAJ50)
CAGHRKTSYDKVIF

SEQ ID NO: 679956 - protein, 13 aa, Homo sapiens
  CDR3 for beta chain variable domain of TCR clone 339978 (TRBV15, TRBJ1-6)
CATSGGLNSPLHF

SEQ ID NO: 679957 - protein, 23 aa, Homo sapiens
  CDR3 for alpha chain variable domain of TCR clone 339979 (TRAV8-3, )
CAVVTTRIPDIQNPDPAVYQLRD

SEQ ID NO: 679958 - protein, 17 aa, Homo sapiens
  CDR3 for beta chain variable domain of TCR clone 339979 (TRBV7-9, TRBJ2-6)
CVSSFGAGYSGANVLTF

SEQ ID NO: 679959 - protein, 14 aa, Homo sapiens
  CDR3 for alpha chain variable domain of TCR clone 339980 (TRAV20, TRAJ26)
CSVQAAIYGQNFVF

SEQ ID NO: 679960 - protein, 14 aa, Homo sapiens
  CDR3 for beta chain variable domain of TCR clone 339980 (TRBV27, TRBJ2-2)
CASSLGDTTGELFF

SEQ ID NO: 679961 - protein, 14 aa, Homo sapiens
  CDR3 for alpha chain variable domain of TCR clone 339981 (TRAV26-1, TRAJ40)
CIVRLLSGTYKYIF

SEQ ID NO: 679962 - protein, 13 aa, Homo sapiens
  CDR3 for beta chain variable domain of TCR clone 339981 (TRBV19, TRBJ1-2)
CASSISEDYGYTF

SEQ ID NO: 679963 - protein, 15 aa, Homo sapiens
  CDR3 for alpha chain variable domain of TCR clone 339982 (TRAV17, TRAJ22)
CATVAPSGSARQLTF

SEQ ID NO: 679964 - protein, 13 aa, Homo sapiens
  CDR3 for beta chain variable domain of TCR clone 339982 (TRBV7-9, TRBJ1-2)
CASSLKQNYGYTF

SEQ ID NO: 679965 - protein, 11 aa, Homo sapiens
  CDR3 for alpha chain variable domain of TCR clone 339983 (TRAV12-2, TRAJ29)
CAVTLRSPLVF

SEQ ID NO: 679966 - protein, 16 aa, Homo sapiens
  CDR3 for beta chain variable domain of TCR clone 339983 (TRBV19, TRBJ1-5)
CASSIDRGGSRQPQHF

SEQ ID NO: 679967 - protein, 14 aa, Homo sapiens
  CDR3 for alpha chain variable domain of TCR clone 339984 (TRAV8-3, TRAJ9)
CAVVYNTGGFKTIF

SEQ ID NO: 679968 - protein, 14 aa, Homo sapiens
  CDR3 for beta chain variable domain of TCR clone 339984 (TRBV7-3, TRBJ2-2)
CASSPGGYTGELFF

SEQ ID NO: 679969 - protein, 18 aa, Homo sapiens
  CDR3 for alpha chain variable domain of TCR clone 339985 (TRAV13-1, TRAJ52)
CAAKNPNAGGTSYGKLTF

SEQ ID NO: 679970 - protein, 13 aa, Homo sapiens
  CDR3 for beta chain variable domain of TCR clone 339985 (TRBV7-3, TRBJ2-1)
CASSLWPYNEQFF

SEQ ID NO: 679971 - protein, 18 aa, Homo sapiens
  CDR3 for alpha chain variable domain of TCR clone 339986 (TRAV13-1, TRAJ52)
CAAKNPNAGGTSYGKLTF

SEQ ID NO: 679972 - protein, 18 aa, Homo sapiens
  CDR3 for beta chain variable domain of TCR clone 339986 (TRBV12-4, TRBJ2-4)
CASSRTEAVDVAKNIQYF

SEQ ID NO: 679973 - protein, 11 aa, Homo sapiens
  CDR3 for alpha chain variable domain of TCR clone 339987 (TRAV20, TRAJ23)
CACNQGGKLNF

SEQ ID NO: 679974 - protein, 16 aa, Homo sapiens
  CDR3 for beta chain variable domain of TCR clone 339987 (TRBV7-8, TRBJ2-5)
CASSFGGQPAQETQYF

SEQ ID NO: 679975 - protein, 12 aa, Homo sapiens
  CDR3 for alpha chain variable domain of TCR clone 339988 (TRAV21, TRAJ33)
CAKMDSNYQLIW

SEQ ID NO: 679976 - protein, 15 aa, Homo sapiens
  CDR3 for beta chain variable domain of TCR clone 339988 (TRBV9, TRBJ1-6)
CAGSVAGTGDSPLHF

SEQ ID NO: 679977 - protein, 13 aa, Homo sapiens
  CDR3 for alpha chain variable domain of TCR clone 339989 (TRAV8-6, TRAJ34)
CAVSDQRTDKLIF

SEQ ID NO: 679978 - protein, 14 aa, Homo sapiens
  CDR3 for beta chain variable domain of TCR clone 339989 (TRBV12-4, TRBJ1-1)
CASTWTGHDTEAFF

SEQ ID NO: 679979 - protein, 15 aa, Homo sapiens
  CDR3 for alpha chain variable domain of TCR clone 339990 (TRAV17, TRAJ57)
CATGPSQVGSEKLVF

SEQ ID NO: 679980 - protein, 15 aa, Homo sapiens
  CDR3 for beta chain variable domain of TCR clone 339990 (TRBV6-3, TRBJ2-7)
CASSSPGTVFYEQYF

SEQ ID NO: 679981 - protein, 18 aa, Homo sapiens
  CDR3 for alpha chain variable domain of TCR clone 339991 (TRAV12-2, )
CAVEDIQNPDPAVYQLTD

SEQ ID NO: 679982 - protein, 18 aa, Homo sapiens
  CDR3 for beta chain variable domain of TCR clone 339991 (TRBV11-2, TRBJ2-3)
CASSLGGASRGAPNTQYF

SEQ ID NO: 679983 - protein, 17 aa, Homo sapiens
  CDR3 for alpha chain variable domain of TCR clone 339992 (TRAV38-1, TRAJ45)
CAFMRSHSGGGADGLTF

SEQ ID NO: 679984 - protein, 15 aa, Homo sapiens
  CDR3 for beta chain variable domain of TCR clone 339992 (TRBV4-1, TRBJ2-7)
CASSQQGQGFDEQYF

SEQ ID NO: 679985 - protein, 14 aa, Homo sapiens
  CDR3 for alpha chain variable domain of TCR clone 339993 (TRAV25, TRAJ27)
CAGPGNTNAGKSTF

SEQ ID NO: 679986 - protein, 16 aa, Homo sapiens
  CDR3 for beta chain variable domain of TCR clone 339993 (TRBV4-1, TRBJ2-6)
CASSQDGGPGANVLSF

SEQ ID NO: 679987 - protein, 10 aa, Homo sapiens
  CDR3 for alpha chain variable domain of TCR clone 339994 (TRAV38-2/DV8, TRAJ21)
CADRSNKFYF

SEQ ID NO: 679988 - protein, 12 aa, Homo sapiens
  CDR3 for beta chain variable domain of TCR clone 339994 (TRBV11-3, TRBJ2-3)
CASSLWEDTQYF

SEQ ID NO: 679989 - protein, 12 aa, Homo sapiens
  CDR3 for alpha chain variable domain of TCR clone 339995 (TRAV30, TRAJ43)
CGTEERCNDMRF

SEQ ID NO: 679990 - protein, 14 aa, Homo sapiens
  CDR3 for beta chain variable domain of TCR clone 339995 (TRBV7-2, TRBJ2-7)
CASSPKTSFYEQYF

SEQ ID NO: 679991 - protein, 17 aa, Homo sapiens
  CDR3 for alpha chain variable domain of TCR clone 339996 (TRAV3, TRAJ42)
CAVRDRDYGGSQGNPIF

SEQ ID NO: 679992 - protein, 14 aa, Homo sapiens
  CDR3 for beta chain variable domain of TCR clone 339996 (TRBV7-2, TRBJ2-7)
CASRSQGAAYEQYF

SEQ ID NO: 679993 - protein, 13 aa, Homo sapiens
  CDR3 for alpha chain variable domain of TCR clone 339997 (TRAV17, TRAJ5)
CAPMDTGRRALTF

SEQ ID NO: 679994 - protein, 15 aa, Homo sapiens
  CDR3 for beta chain variable domain of TCR clone 339997 (TRBV6-6, TRBJ2-5)
CASSPGGGLEETQYI

SEQ ID NO: 679995 - protein, 15 aa, Homo sapiens
  CDR3 for alpha chain variable domain of TCR clone 339998 (TRAV4, TRAJ42)
CLVGGYGGSQGNLIF

SEQ ID NO: 679996 - protein, 19 aa, Homo sapiens
  CDR3 for beta chain variable domain of TCR clone 339998 (TRBV7-2, TRBJ2-3)
CASSFLSRNWGGGTDTQYF

SEQ ID NO: 679997 - protein, 15 aa, Homo sapiens
  CDR3 for alpha chain variable domain of TCR clone 339999 (TRAV34, TRAJ38)
CGADFTPGNNRQLLW

SEQ ID NO: 679998 - protein, 14 aa, Homo sapiens
  CDR3 for beta chain variable domain of TCR clone 339999 (TRBV11-2, TRBJ2-3)
CASSLGGGANTQYF

SEQ ID NO: 679999 - protein, 17 aa, Homo sapiens
  CDR3 for alpha chain variable domain of TCR clone 340000 (TRAV3, TRAJ42)
CAVRDRDYGGSQGNLIF

SEQ ID NO: 680000 - protein, 13 aa, Homo sapiens
  CDR3 for beta chain variable domain of TCR clone 340000 (TRBV4-1, TRBJ2-1)
CASSQAGGDEQFF

SEQ ID NO: 680001 - protein, 14 aa, Homo sapiens
  CDR3 for alpha chain variable domain of TCR clone 340001 (TRAV3, TRAJ8)
CAVSRNTGFQKLVF

SEQ ID NO: 680002 - protein, 13 aa, Homo sapiens
  CDR3 for beta chain variable domain of TCR clone 340001 (TRBV10-3, TRBJ2-7)
CASKLAVNYEQYF

SEQ ID NO: 680003 - protein, 10 aa, Homo sapiens
  CDR3 for alpha chain variable domain of TCR clone 340002 (TRAV1-2, TRAJ20)
CACNDYKLSF

SEQ ID NO: 680004 - protein, 13 aa, Homo sapiens
  CDR3 for beta chain variable domain of TCR clone 340002 (TRBV4-1, TRBJ2-1)
CASSQAGGDEQFF

SEQ ID NO: 680005 - protein, 16 aa, Homo sapiens
  CDR3 for alpha chain variable domain of TCR clone 340003 (TRAV30, TRAJ24)
CGTEIVDADSWGKFQF

SEQ ID NO: 680006 - protein, 15 aa, Homo sapiens
  CDR3 for beta chain variable domain of TCR clone 340003 (TRBV25-1, TRBJ2-5)
CASSDTGTHQETQYF

SEQ ID NO: 680007 - protein, 11 aa, Homo sapiens
  CDR3 for alpha chain variable domain of TCR clone 340004 (TRAV23/DV6, TRAJ9)
CFHTGGFKTIF

SEQ ID NO: 680008 - protein, 13 aa, Homo sapiens
  CDR3 for beta chain variable domain of TCR clone 340004 (TRBV2, TRBJ2-1)
CASTRDRNNEQFF

SEQ ID NO: 680009 - protein, 12 aa, Homo sapiens
  CDR3 for alpha chain variable domain of TCR clone 340005 (TRAV27, TRAJ20)
CAGASNDYKLSF

SEQ ID NO: 680010 - protein, 15 aa, Homo sapiens
  CDR3 for beta chain variable domain of TCR clone 340005 (TRBV7-2, TRBJ2-1)
CASSSGLAGGNEQFF

SEQ ID NO: 680011 - protein, 16 aa, Homo sapiens
  CDR3 for alpha chain variable domain of TCR clone 340006 (TRAV30, TRAJ24)
CGTEIVDADSWGKFQF

SEQ ID NO: 680012 - protein, 15 aa, Homo sapiens
  CDR3 for beta chain variable domain of TCR clone 340006 (TRBV15, TRBJ1-5)
CATSRDPVGNQPQHF

SEQ ID NO: 680013 - protein, 15 aa, Homo sapiens
  CDR3 for alpha chain variable domain of TCR clone 340007 (TRAV39, TRAJ32)
CAVDMEGGATNKLIF

SEQ ID NO: 680014 - protein, 17 aa, Homo sapiens
  CDR3 for beta chain variable domain of TCR clone 340007 (TRBV7-2, TRBJ1-4)
CASSFKAGPTANEKLFF

SEQ ID NO: 680015 - protein, 13 aa, Homo sapiens
  CDR3 for alpha chain variable domain of TCR clone 340008 (TRAV12-3, TRAJ7)
CVMSPYGNNRLAF

SEQ ID NO: 680016 - protein, 16 aa, Homo sapiens
  CDR3 for beta chain variable domain of TCR clone 340008 (TRBV20-1, TRBJ1-4)
CSARPYGGELNEKLFF

SEQ ID NO: 680017 - protein, 13 aa, Homo sapiens
  CDR3 for alpha chain variable domain of TCR clone 340009 (TRAV12-3, TRAJ33)
CAMSVNSNYHLIW

SEQ ID NO: 680018 - protein, 12 aa, Homo sapiens
  CDR3 for beta chain variable domain of TCR clone 340009 (TRBV11-2, TRBJ2-2)
CASSLGGGELFF

SEQ ID NO: 680019 - protein, 14 aa, Homo sapiens
  CDR3 for alpha chain variable domain of TCR clone 340010 (TRAV13-1, TRAJ9)
CAASALTGGFKTIF

SEQ ID NO: 680020 - protein, 16 aa, Homo sapiens
  CDR3 for beta chain variable domain of TCR clone 340010 (TRBV4-2, TRBJ1-1)
CASSQAGFGMNTEAFF

SEQ ID NO: 680021 - protein, 17 aa, Homo sapiens
  CDR3 for alpha chain variable domain of TCR clone 340011 (TRAV13-1, TRAJ31)
CAPRDRLMFGDGTQLVV

SEQ ID NO: 680022 - protein, 13 aa, Homo sapiens
  CDR3 for beta chain variable domain of TCR clone 340011 (TRBV19, TRBJ1-2)
CASSVPGQDGYTF

SEQ ID NO: 680023 - protein, 16 aa, Homo sapiens
  CDR3 for alpha chain variable domain of TCR clone 340012 (TRAV20, TRAJ53)
CAVQAGSGGSNYKLTF

SEQ ID NO: 680024 - protein, 14 aa, Homo sapiens
  CDR3 for beta chain variable domain of TCR clone 340012 (TRBV27, TRBJ2-5)
CASSRTFLVDTQYF

SEQ ID NO: 680025 - protein, 16 aa, Homo sapiens
  CDR3 for alpha chain variable domain of TCR clone 340013 (TRAV20, TRAJ45)
CAVQADSGGGADGLTF

SEQ ID NO: 680026 - protein, 15 aa, Homo sapiens
  CDR3 for beta chain variable domain of TCR clone 340013 (TRBV4-2, TRBJ1-4)
CASSRTHATNEKLFF

SEQ ID NO: 680027 - protein, 16 aa, Homo sapiens
  CDR3 for alpha chain variable domain of TCR clone 340014 (TRAV27, TRAJ53)
CAAPKGSGGSNYKLTF

SEQ ID NO: 680028 - protein, 12 aa, Homo sapiens
  CDR3 for beta chain variable domain of TCR clone 340014 (TRBV7-8, TRBJ2-7)
CASSLGDREQYF

SEQ ID NO: 680029 - protein, 14 aa, Homo sapiens
  CDR3 for alpha chain variable domain of TCR clone 340015 (TRAV12-1, TRAJ4)
CVVTPSGGYNKLIF

SEQ ID NO: 680030 - protein, 13 aa, Homo sapiens
  CDR3 for beta chain variable domain of TCR clone 340015 (TRBV19, TRBJ1-2)
CASSVPGQDGYTF

SEQ ID NO: 680031 - protein, 14 aa, Homo sapiens
  CDR3 for alpha chain variable domain of TCR clone 340016 (TRAV17, TRAJ32)
CATDPGGATNKLIF

SEQ ID NO: 680032 - protein, 14 aa, Homo sapiens
  CDR3 for beta chain variable domain of TCR clone 340016 (TRBV7-9, TRBJ2-7)
CASSIGQGAGEQYF

SEQ ID NO: 680033 - protein, 13 aa, Homo sapiens
  CDR3 for alpha chain variable domain of TCR clone 340017 (TRAV13-1, TRAJ6)
CAASKGGSYIPTL

SEQ ID NO: 680034 - protein, 14 aa, Homo sapiens
  CDR3 for beta chain variable domain of TCR clone 340017 (TRBV7-2, TRBJ2-1)
CASSLGVGYNEQFF

SEQ ID NO: 680035 - protein, 13 aa, Homo sapiens
  CDR3 for alpha chain variable domain of TCR clone 340018 (TRAV26-1, TRAJ34)
CIVRPWITDKLIF

SEQ ID NO: 680036 - protein, 13 aa, Homo sapiens
  CDR3 for beta chain variable domain of TCR clone 340018 (TRBV7-9, TRBJ2-3)
CASSPGSTDTQYF

SEQ ID NO: 680037 - protein, 20 aa, Homo sapiens
  CDR3 for alpha chain variable domain of TCR clone 340019 (TRAV1-1, TRAJ4)
CLLLLRCEGFLSGGYNKLIF

SEQ ID NO: 680038 - protein, 16 aa, Homo sapiens
  CDR3 for beta chain variable domain of TCR clone 340019 (TRBV28, TRBJ1-4)
CATSPPYRGRSEKLFF

SEQ ID NO: 680039 - protein, 14 aa, Homo sapiens
  CDR3 for alpha chain variable domain of TCR clone 340020 (TRAV2, TRAJ9)
CAVEDRSGGFKTIF

SEQ ID NO: 680040 - protein, 14 aa, Homo sapiens
  CDR3 for beta chain variable domain of TCR clone 340020 (TRBV7-9, TRBJ2-7)
CASSPSVGQNEQYF

SEQ ID NO: 680041 - protein, 11 aa, Homo sapiens
  CDR3 for alpha chain variable domain of TCR clone 340021 (TRAV21, TRAJ48)
CAVDGIEKLTF

SEQ ID NO: 680042 - protein, 16 aa, Homo sapiens
  CDR3 for beta chain variable domain of TCR clone 340021 (TRBV12-4, TRBJ1-5)
CAISSGPRGSNQPQHF

SEQ ID NO: 680043 - protein, 11 aa, Homo sapiens
  CDR3 for alpha chain variable domain of TCR clone 340022 (TRAV1-2, TRAJ20)
CAVANDYKLSF

SEQ ID NO: 680044 - protein, 17 aa, Homo sapiens
  CDR3 for beta chain variable domain of TCR clone 340022 (TRBV20-1, TRBJ2-1)
CSASSSGLAGSCNEQFF

SEQ ID NO: 680045 - protein, 13 aa, Homo sapiens
  CDR3 for alpha chain variable domain of TCR clone 340023 (TRAV26-2, TRAJ47)
CIRLMEYGNKLVF

SEQ ID NO: 680046 - protein, 12 aa, Homo sapiens
  CDR3 for beta chain variable domain of TCR clone 340023 (TRBV5-1, TRBJ1-1)
CASSFGNTEAFF

SEQ ID NO: 680047 - protein, 14 aa, Homo sapiens
  CDR3 for alpha chain variable domain of TCR clone 340024 (TRAV26-1, TRAJ22)
CIVYPPGSARQLTF

SEQ ID NO: 680048 - protein, 16 aa, Homo sapiens
  CDR3 for beta chain variable domain of TCR clone 340024 (TRBV27, TRBJ2-2)
CASSFRGLVRTGELFF

SEQ ID NO: 680049 - protein, 13 aa, Homo sapiens
  CDR3 for alpha chain variable domain of TCR clone 340025 (TRAV16, TRAJ31)
CALSAHNNARLMF

SEQ ID NO: 680050 - protein, 14 aa, Homo sapiens
  CDR3 for beta chain variable domain of TCR clone 340025 (TRBV7-2, TRBJ2-7)
CASRSQGAAYEQYF

SEQ ID NO: 680051 - protein, 11 aa, Homo sapiens
  CDR3 for alpha chain variable domain of TCR clone 340026 (TRAV10, TRAJ3)
YPGRGASKIIF

SEQ ID NO: 680052 - protein, 18 aa, Homo sapiens
  CDR3 for beta chain variable domain of TCR clone 340026 (TRBV4-3, TRBJ2-6)
CASSQDIQGGPGANVLTF

SEQ ID NO: 680053 - protein, 12 aa, Homo sapiens
  CDR3 for alpha chain variable domain of TCR clone 340027 (TRAV6, TRAJ3)
CALYSSASKILF

SEQ ID NO: 680054 - protein, 12 aa, Homo sapiens
  CDR3 for beta chain variable domain of TCR clone 340027 (TRBV7-2, TRBJ2-3)
CASSLIGETQYF

SEQ ID NO: 680055 - protein, 13 aa, Homo sapiens
  CDR3 for alpha chain variable domain of TCR clone 340028 (TRAV38-1, TRAJ42)
CARGGGSQGNLIF

SEQ ID NO: 680056 - protein, 17 aa, Homo sapiens
  CDR3 for beta chain variable domain of TCR clone 340028 (TRBV20-1, TRBJ2-1)
CSARDPLAGAWDNEQSF

SEQ ID NO: 680057 - protein, 13 aa, Homo sapiens
  CDR3 for alpha chain variable domain of TCR clone 340029 (TRAV12-2, TRAJ20)
CAVYPSNDHKLSF

SEQ ID NO: 680058 - protein, 14 aa, Homo sapiens
  CDR3 for beta chain variable domain of TCR clone 340029 (TRBV27, TRBJ2-5)
CQQFIPAGGETQYF

SEQ ID NO: 680059 - protein, 15 aa, Homo sapiens
  CDR3 for alpha chain variable domain of TCR clone 340030 (TRAV8-3, TRAJ27)
CAVGPSKTNAGKSTF

SEQ ID NO: 680060 - protein, 15 aa, Homo sapiens
  CDR3 for beta chain variable domain of TCR clone 340030 (TRBV27, TRBJ2-1)
CARSNGGGSSNEQFF

SEQ ID NO: 680061 - protein, 14 aa, Homo sapiens
  CDR3 for alpha chain variable domain of TCR clone 340031 (TRAV20, TRAJ29)
CAVQAWVGNIPLVF

SEQ ID NO: 680062 - protein, 15 aa, Homo sapiens
  CDR3 for beta chain variable domain of TCR clone 340031 (TRBV29-1, TRBJ2-7)
CSVEFFDRGSYEQYF

SEQ ID NO: 680063 - protein, 15 aa, Homo sapiens
  CDR3 for alpha chain variable domain of TCR clone 340032 (TRAV3, TRAJ22)
CAVRDRGGSARQLTF

SEQ ID NO: 680064 - protein, 15 aa, Homo sapiens
  CDR3 for beta chain variable domain of TCR clone 340032 (TRBV7-9, TRBJ2-5)
CASSRRTGGGETQYF

SEQ ID NO: 680065 - protein, 16 aa, Homo sapiens
  CDR3 for alpha chain variable domain of TCR clone 340033 (TRAV4, TRAJ18)
CCVLLIGGSTLGRLYF

SEQ ID NO: 680066 - protein, 15 aa, Homo sapiens
  CDR3 for beta chain variable domain of TCR clone 340033 (TRBV11-2, TRBJ2-2)
CASSSDRVNAGELFF

SEQ ID NO: 680067 - protein, 17 aa, Homo sapiens
  CDR3 for alpha chain variable domain of TCR clone 340034 (TRAV3, TRAJ6)
CAVRDGPRAGGSYIPTF

SEQ ID NO: 680068 - protein, 17 aa, Homo sapiens
  CDR3 for beta chain variable domain of TCR clone 340034 (TRBV4-2, TRBJ2-5)
CASSPGRWRNFQETQYF

SEQ ID NO: 680069 - protein, 13 aa, Homo sapiens
  CDR3 for alpha chain variable domain of TCR clone 340035 (TRAV12-1, TRAJ29)
CVVDTSGNTPLVF

SEQ ID NO: 680070 - protein, 14 aa, Homo sapiens
  CDR3 for beta chain variable domain of TCR clone 340035 (TRBV12-4, TRBJ2-3)
CASSVVPSTDTQYF

SEQ ID NO: 680071 - protein, 13 aa, Homo sapiens
  CDR3 for alpha chain variable domain of TCR clone 340036 (TRAV12-3, TRAJ33)
CAMSVNSNYQLIW

SEQ ID NO: 680072 - protein, 14 aa, Homo sapiens
  CDR3 for beta chain variable domain of TCR clone 340036 (TRBV7-2, TRBJ2-7)
CAGRSQGAAYEQYF

SEQ ID NO: 680073 - protein, 14 aa, Homo sapiens
  CDR3 for alpha chain variable domain of TCR clone 340037 (TRAV10, TRAJ36)
CEVKYEGGANNLFF

SEQ ID NO: 680074 - protein, 16 aa, Homo sapiens
  CDR3 for beta chain variable domain of TCR clone 340037 (TRBV7-3, TRBJ2-2)
CASSLKRGTLSGELFF

SEQ ID NO: 680075 - protein, 15 aa, Homo sapiens
  CDR3 for alpha chain variable domain of TCR clone 340038 (TRAV12-3, TRAJ6)
CAMSAASGGSYLPTF

SEQ ID NO: 680076 - protein, 13 aa, Homo sapiens
  CDR3 for beta chain variable domain of TCR clone 340038 (TRBV20-1, TRBJ1-2)
CSASTERIYGYTF

SEQ ID NO: 680077 - protein, 13 aa, Homo sapiens
  CDR3 for alpha chain variable domain of TCR clone 340039 (TRAV1-2, TRAJ37)
CAGGSGDTGKLIF

SEQ ID NO: 680078 - protein, 14 aa, Homo sapiens
  CDR3 for beta chain variable domain of TCR clone 340039 (TRBV6-1, TRBJ2-6)
CASQQGAGANVLTF

SEQ ID NO: 680079 - protein, 11 aa, Homo sapiens
  CDR3 for alpha chain variable domain of TCR clone 340040 (TRAV30, TRAJ43)
CGTDGNNDMRF

SEQ ID NO: 680080 - protein, 13 aa, Homo sapiens
  CDR3 for beta chain variable domain of TCR clone 340040 (TRBV6-5, TRBJ2-5)
CASSPQGGETQYF

SEQ ID NO: 680081 - protein, 12 aa, Homo sapiens
  CDR3 for alpha chain variable domain of TCR clone 340041 (TRAV12-2, TRAJ9)
CRERTGGFKTIF

SEQ ID NO: 680082 - protein, 14 aa, Homo sapiens
  CDR3 for beta chain variable domain of TCR clone 340041 (TRBV6-1, TRBJ1-3)
CASVQGGGGNTIYF

SEQ ID NO: 680083 - protein, 14 aa, Homo sapiens
  CDR3 for alpha chain variable domain of TCR clone 340042 (TRAV13-1, TRAJ35)
CSASKGGFGNVLDC

SEQ ID NO: 680084 - protein, 13 aa, Homo sapiens
  CDR3 for beta chain variable domain of TCR clone 340042 (TRBV7-3, TRBJ1-1)
CASSQDWGAEAFF

SEQ ID NO: 680085 - protein, 14 aa, Homo sapiens
  CDR3 for alpha chain variable domain of TCR clone 340043 (TRAV12-2, TRAJ13)
CAVKKTGGYQKVTF

SEQ ID NO: 680086 - protein, 14 aa, Homo sapiens
  CDR3 for beta chain variable domain of TCR clone 340043 (TRBV7-8, TRBJ2-7)
CASSPRDRVYEQYF

SEQ ID NO: 680087 - protein, 16 aa, Homo sapiens
  CDR3 for alpha chain variable domain of TCR clone 340044 (TRAV12-2, TRAJ39)
CAVNRGPNNAGNTLTF

SEQ ID NO: 680088 - protein, 10 aa, Homo sapiens
  CDR3 for beta chain variable domain of TCR clone 340044 (TRBV2, TRBJ2-4)
CASRGSIQYF

SEQ ID NO: 680089 - protein, 14 aa, Homo sapiens
  CDR3 for alpha chain variable domain of TCR clone 340045 (TRAV17, TRAJ57)
CATDPHGGSEKLVF

SEQ ID NO: 680090 - protein, 18 aa, Homo sapiens
  CDR3 for beta chain variable domain of TCR clone 340045 (TRBV6-6, TRBJ1-3)
CASSYSKWDSISGNTIDF

SEQ ID NO: 680091 - protein, 14 aa, Homo sapiens
  CDR3 for alpha chain variable domain of TCR clone 340046 (TRAV2, TRAJ37)
CAVDFTSNTGKLIF

SEQ ID NO: 680092 - protein, 16 aa, Homo sapiens
  CDR3 for beta chain variable domain of TCR clone 340046 (TRBV11-2, TRBJ2-1)
CASARGSYSHHNEQFF

SEQ ID NO: 680093 - protein, 15 aa, Homo sapiens
  CDR3 for alpha chain variable domain of TCR clone 340047 (TRAV21, TRAJ18)
CAVRDRGSTLGRLYF

SEQ ID NO: 680094 - protein, 14 aa, Homo sapiens
  CDR3 for beta chain variable domain of TCR clone 340047 (TRBV7-8, TRBJ2-3)
CASSLEAGTDTQYF

SEQ ID NO: 680095 - protein, 15 aa, Homo sapiens
  CDR3 for alpha chain variable domain of TCR clone 340048 (TRAV16, TRAJ17)
CALSGNKAAGTKLTF

SEQ ID NO: 680096 - protein, 16 aa, Homo sapiens
  CDR3 for beta chain variable domain of TCR clone 340048 (TRBV7-6, TRBJ1-6)
CASSSLPAGEYSPLHF

SEQ ID NO: 680097 - protein, 15 aa, Homo sapiens
  CDR3 for alpha chain variable domain of TCR clone 340049 (TRAV26-1, TRAJ44)
CIVRANTGTASKLTF

SEQ ID NO: 680098 - protein, 15 aa, Homo sapiens
  CDR3 for beta chain variable domain of TCR clone 340049 (TRBV15, TRBJ1-5)
RATSREQGGNQPQHF

SEQ ID NO: 680099 - protein, 15 aa, Homo sapiens
  CDR3 for alpha chain variable domain of TCR clone 340050 (TRAV3, TRAJ22)
CAVRDRGGSARQLTF

SEQ ID NO: 680100 - protein, 15 aa, Homo sapiens
  CDR3 for beta chain variable domain of TCR clone 340050 (TRBV7-9, TRBJ1-2)
CASSSFGDTNYGYTF

SEQ ID NO: 680101 - protein, 11 aa, Homo sapiens
  CDR3 for alpha chain variable domain of TCR clone 340051 (TRAV17, TRAJ43)
CATPRSNDMRF

SEQ ID NO: 680102 - protein, 16 aa, Homo sapiens
  CDR3 for beta chain variable domain of TCR clone 340051 (TRBV10-3, TRBJ2-1)
CAISGVGDGGGGEQFF

SEQ ID NO: 680103 - protein, 14 aa, Homo sapiens
  CDR3 for alpha chain variable domain of TCR clone 340052 (TRAV17, TRAJ53)
CATDARGSNYKLTF

SEQ ID NO: 680104 - protein, 16 aa, Homo sapiens
  CDR3 for beta chain variable domain of TCR clone 340052 (TRBV4-1, TRBJ1-1)
CASSQDAGMGNTEAFF

SEQ ID NO: 680105 - protein, 23 aa, Homo sapiens
  CDR3 for alpha chain variable domain of TCR clone 340053 (TRAV8-3, )
CAVVTTRIPDIQNPDPAVYQLRD

SEQ ID NO: 680106 - protein, 14 aa, Homo sapiens
  CDR3 for beta chain variable domain of TCR clone 340053 (TRBV11-2, TRBJ2-7)
CASSPSTISYEQYF

SEQ ID NO: 680107 - protein, 12 aa, Homo sapiens
  CDR3 for alpha chain variable domain of TCR clone 340054 (TRAV8-3, TRAJ26)
CAGDNYGQNFVF

SEQ ID NO: 680108 - protein, 16 aa, Homo sapiens
  CDR3 for beta chain variable domain of TCR clone 340054 (TRBV7-9, TRBJ2-7)
CASSLVAGYKNYEQYF

SEQ ID NO: 680109 - protein, 14 aa, Homo sapiens
  CDR3 for alpha chain variable domain of TCR clone 340055 (TRAV3, TRAJ21)
CAVRDWDNFNKFYF

SEQ ID NO: 680110 - protein, 13 aa, Homo sapiens
  CDR3 for beta chain variable domain of TCR clone 340055 (TRBV11-3, TRBJ1-1)
CASSSNRDTEAFF

SEQ ID NO: 680111 - protein, 12 aa, Homo sapiens
  CDR3 for alpha chain variable domain of TCR clone 340056 (TRAV12-3, TRAJ17)
CAKTLTGKKLTF

SEQ ID NO: 680112 - protein, 15 aa, Homo sapiens
  CDR3 for beta chain variable domain of TCR clone 340056 (TRBV20-1, TRBJ2-7)
CSARDRVSGMDEQYF

SEQ ID NO: 680113 - protein, 20 aa, Homo sapiens
  CDR3 for alpha chain variable domain of TCR clone 340057 (TRAV21, TRAJ30)
CAVRRRMTRSSLEKGHDFIF

SEQ ID NO: 680114 - protein, 14 aa, Homo sapiens
  CDR3 for beta chain variable domain of TCR clone 340057 (TRBV12-4, TRBJ1-1)
CASSSARGYTEAFF

SEQ ID NO: 680115 - protein, 13 aa, Homo sapiens
  CDR3 for alpha chain variable domain of TCR clone 340058 (TRAV1-2, TRAJ31)
CAVRGYNNARLMF

SEQ ID NO: 680116 - protein, 14 aa, Homo sapiens
  CDR3 for beta chain variable domain of TCR clone 340058 (TRBV12-4, TRBJ1-3)
CASTLTGAGNSIYF

SEQ ID NO: 680117 - protein, 16 aa, Homo sapiens
  CDR3 for alpha chain variable domain of TCR clone 340059 (TRAV16, TRAJ52)
CALSGVGGTSYGKLTF

SEQ ID NO: 680118 - protein, 12 aa, Homo sapiens
  CDR3 for beta chain variable domain of TCR clone 340059 (TRBV5-1, TRBJ2-7)
CASRVGGLEQYF

SEQ ID NO: 680119 - protein, 17 aa, Homo sapiens
  CDR3 for alpha chain variable domain of TCR clone 340060 (TRAV1-2, TRAJ8)
CAVRDPDENTGFQKLVF

SEQ ID NO: 680120 - protein, 12 aa, Homo sapiens
  CDR3 for beta chain variable domain of TCR clone 340060 (TRBV11-2, TRBJ2-2)
CASSLGGGELFF

SEQ ID NO: 680121 - protein, 13 aa, Homo sapiens
  CDR3 for alpha chain variable domain of TCR clone 340061 (TRAV21, TRAJ57)
CSVTQGGSEKLVF

SEQ ID NO: 680122 - protein, 17 aa, Homo sapiens
  CDR3 for beta chain variable domain of TCR clone 340061 (TRBV10-3, TRBJ2-6)
CAISELAESSGANVLTF

SEQ ID NO: 680123 - protein, 13 aa, Homo sapiens
  CDR3 for alpha chain variable domain of TCR clone 340062 (TRAV12-2, TRAJ6)
CAVNVSRKLHTYI

SEQ ID NO: 680124 - protein, 15 aa, Homo sapiens
  CDR3 for beta chain variable domain of TCR clone 340062 (TRBV2, TRBJ2-1)
CASSEEREGDNEQFF

SEQ ID NO: 680125 - protein, 16 aa, Homo sapiens
  CDR3 for alpha chain variable domain of TCR clone 340063 (TRAV12-1, TRAJ43)
CVVNPHRFGAGTRLAV

SEQ ID NO: 680126 - protein, 16 aa, Homo sapiens
  CDR3 for beta chain variable domain of TCR clone 340063 (TRBV27, TRBJ2-2)
CASSSTGGGDTGELFF

SEQ ID NO: 680127 - protein, 16 aa, Homo sapiens
  CDR3 for alpha chain variable domain of TCR clone 340064 (TRAV30, TRAJ24)
CGTEIVDADSWGKFQF

SEQ ID NO: 680128 - protein, 12 aa, Homo sapiens
  CDR3 for beta chain variable domain of TCR clone 340064 (TRBV2, TRBJ2-7)
CASKRGSYEQYF

SEQ ID NO: 680129 - protein, 13 aa, Homo sapiens
  CDR3 for alpha chain variable domain of TCR clone 340065 (TRAV27, TRAJ56)
CAGKPGANSKLTF

SEQ ID NO: 680130 - protein, 17 aa, Homo sapiens
  CDR3 for beta chain variable domain of TCR clone 340065 (TRBV5-1, TRBJ2-7)
FAPAADNPGPIPYEQYF

SEQ ID NO: 680131 - protein, 14 aa, Homo sapiens
  CDR3 for alpha chain variable domain of TCR clone 340066 (TRAV17, TRAJ53)
CATDAGGSNYKLTF

SEQ ID NO: 680132 - protein, 18 aa, Homo sapiens
  CDR3 for beta chain variable domain of TCR clone 340066 (TRBV4-1, TRBJ1-1)
CASSQDAGMGNTEAFLDK

SEQ ID NO: 680133 - protein, 14 aa, Homo sapiens
  CDR3 for alpha chain variable domain of TCR clone 340067 (TRAV8-3, TRAJ13)
CAVGGTFGYQNVTF

SEQ ID NO: 680134 - protein, 17 aa, Homo sapiens
  CDR3 for beta chain variable domain of TCR clone 340067 (TRBV7-9, TRBJ2-1)
CASSAGTLGRSYNEQFF

SEQ ID NO: 680135 - protein, 13 aa, Homo sapiens
  CDR3 for alpha chain variable domain of TCR clone 340068 (TRAV20, TRAJ40)
CAVPFSGTYKYIF

SEQ ID NO: 680136 - protein, 13 aa, Homo sapiens
  CDR3 for beta chain variable domain of TCR clone 340068 (TRBV15, TRBJ2-5)
CDTSQIGEETQYF

SEQ ID NO: 680137 - protein, 15 aa, Homo sapiens
  CDR3 for alpha chain variable domain of TCR clone 340069 (TRAV3, TRAJ5)
CAVRDLDTGRRALTF

SEQ ID NO: 680138 - protein, 14 aa, Homo sapiens
  CDR3 for beta chain variable domain of TCR clone 340069 (TRBV7-8, TRBJ2-3)
CASSFKSSTDTQYF

SEQ ID NO: 680139 - protein, 13 aa, Homo sapiens
  CDR3 for alpha chain variable domain of TCR clone 340070 (TRAV21, TRAJ20)
CAVGVFADYKLSF

SEQ ID NO: 680140 - protein, 13 aa, Homo sapiens
  CDR3 for beta chain variable domain of TCR clone 340070 (TRBV4-2, TRBJ1-4)
CSSPSSGNEKLFF

SEQ ID NO: 680141 - protein, 15 aa, Homo sapiens
  CDR3 for alpha chain variable domain of TCR clone 340071 (TRAV29/DV5, TRAJ57)
CAASLLRGGCEKLVF

SEQ ID NO: 680142 - protein, 15 aa, Homo sapiens
  CDR3 for beta chain variable domain of TCR clone 340071 (TRBV5-1, TRBJ1-3)
CASSLEGGSGNTIYF

SEQ ID NO: 680143 - protein, 16 aa, Homo sapiens
  CDR3 for alpha chain variable domain of TCR clone 340072 (TRAV12-3, TRAJ53)
CAMSPGSGGSNYKLTF

SEQ ID NO: 680144 - protein, 14 aa, Homo sapiens
  CDR3 for beta chain variable domain of TCR clone 340072 (TRBV2, TRBJ2-1)
CASSEPSSYNEQFF

SEQ ID NO: 680145 - protein, 14 aa, Homo sapiens
  CDR3 for alpha chain variable domain of TCR clone 340073 (TRAV23/DV6, TRAJ4)
CAAPSSGGYNKLIF

SEQ ID NO: 680146 - protein, 20 aa, Homo sapiens
  CDR3 for beta chain variable domain of TCR clone 340073 (TRBV19, TRBJ2-1)
CASSISRTVTSTRLNNEQFF

SEQ ID NO: 680147 - protein, 19 aa, Homo sapiens
  CDR3 for alpha chain variable domain of TCR clone 340074 (TRAV2, TRAJ20)
ILQVREADAAVYRDCKLSF

SEQ ID NO: 680148 - protein, 14 aa, Homo sapiens
  CDR3 for beta chain variable domain of TCR clone 340074 (TRBV5-5, TRBJ2-7)
CASSAGYSSYEQYF

SEQ ID NO: 680149 - protein, 13 aa, Homo sapiens
  CDR3 for alpha chain variable domain of TCR clone 340075 (TRAV12-1, TRAJ17)
CVVSKAAGNKLTF

SEQ ID NO: 680150 - protein, 17 aa, Homo sapiens
  CDR3 for beta chain variable domain of TCR clone 340075 (TRBV4-1, TRBJ2-5)
CASSQDPSGGPQETQFF

SEQ ID NO: 680151 - protein, 14 aa, Homo sapiens
  CDR3 for alpha chain variable domain of TCR clone 340076 (TRAV8-4, TRAJ43)
CAVSDPRNNNYIRF

SEQ ID NO: 680152 - protein, 15 aa, Homo sapiens
  CDR3 for beta chain variable domain of TCR clone 340076 (TRBV4-2, TRBJ1-2)
CASSQRTGGRDGYTF

SEQ ID NO: 680153 - protein, 13 aa, Homo sapiens
  CDR3 for alpha chain variable domain of TCR clone 340077 (TRAV3, TRAJ21)
CAVREPDFSKFYF

SEQ ID NO: 680154 - protein, 17 aa, Homo sapiens
  CDR3 for beta chain variable domain of TCR clone 340077 (TRBV28, TRBJ2-3)
CASSPTPAGGRVDTQYF

SEQ ID NO: 680155 - protein, 12 aa, Homo sapiens
  CDR3 for alpha chain variable domain of TCR clone 340078 (TRAV35, TRAJ49)
CAGWNTGNQFYF

SEQ ID NO: 680156 - protein, 13 aa, Homo sapiens
  CDR3 for beta chain variable domain of TCR clone 340078 (TRBV7-9, TRBJ2-2)
CASSLDPTGELFF

SEQ ID NO: 680157 - protein, 15 aa, Homo sapiens
  CDR3 for alpha chain variable domain of TCR clone 340079 (TRAV29/DV5, TRAJ42)
CAAKTDGGSQGNLIF

SEQ ID NO: 680158 - protein, 15 aa, Homo sapiens
  CDR3 for beta chain variable domain of TCR clone 340079 (TRBV7-2, TRBJ2-1)
CASTHGTGIYNEQFF

SEQ ID NO: 680159 - protein, 13 aa, Homo sapiens
  CDR3 for alpha chain variable domain of TCR clone 340080 (TRAV16, TRAJ44)
CALSAGTASKLTF

SEQ ID NO: 680160 - protein, 15 aa, Homo sapiens
  CDR3 for beta chain variable domain of TCR clone 340080 (TRBV5-7, TRBJ2-7)
CASSPYFEGSYEQYF

SEQ ID NO: 680161 - protein, 11 aa, Homo sapiens
  CDR3 for alpha chain variable domain of TCR clone 340081 (TRAV26-1, TRAJ56)
RVTGANSKLTF

SEQ ID NO: 680162 - protein, 15 aa, Homo sapiens
  CDR3 for beta chain variable domain of TCR clone 340081 (TRBV7-9, TRBJ2-5)
CASSDTGRGRETQYF

SEQ ID NO: 680163 - protein, 16 aa, Homo sapiens
  CDR3 for alpha chain variable domain of TCR clone 340082 (TRAV12-3, TRAJ53)
CAMSPGSGGSNYKLTF

SEQ ID NO: 680164 - protein, 16 aa, Homo sapiens
  CDR3 for beta chain variable domain of TCR clone 340082 (TRBV7-3, TRBJ2-3)
CASSRTASLSTDTQYF

SEQ ID NO: 680165 - protein, 13 aa, Homo sapiens
  CDR3 for alpha chain variable domain of TCR clone 340083 (TRAV36/DV7, TRAJ54)
CAVCTQGAQKLVF

SEQ ID NO: 680166 - protein, 13 aa, Homo sapiens
  CDR3 for beta chain variable domain of TCR clone 340083 (TRBV7-6, TRBJ2-7)
CASSLDHAHEQYF

SEQ ID NO: 680167 - protein, 18 aa, Homo sapiens
  CDR3 for alpha chain variable domain of TCR clone 340084 (TRAV13-1, TRAJ52)
CAAKNPNAGGTSYGKLTF

SEQ ID NO: 680168 - protein, 16 aa, Homo sapiens
  CDR3 for beta chain variable domain of TCR clone 340084 (TRBV28, TRBJ2-7)
CASSPWVATGDRAQYF

SEQ ID NO: 680169 - protein, 17 aa, Homo sapiens
  CDR3 for alpha chain variable domain of TCR clone 340085 (TRAV14/DV4, TRAJ4)
CAMREASGRGGCNKLIF

SEQ ID NO: 680170 - protein, 14 aa, Homo sapiens
  CDR3 for beta chain variable domain of TCR clone 340085 (TRBV19, TRBJ2-7)
CASSMGQGAIEQYF

SEQ ID NO: 680171 - protein, 14 aa, Homo sapiens
  CDR3 for alpha chain variable domain of TCR clone 340086 (TRAV8-6, TRAJ15)
CAVSEDQAGTALIF

SEQ ID NO: 680172 - protein, 14 aa, Homo sapiens
  CDR3 for beta chain variable domain of TCR clone 340086 (TRBV12-5, TRBJ2-5)
CASGSRTHQETQYF

SEQ ID NO: 680173 - protein, 11 aa, Homo sapiens
  CDR3 for alpha chain variable domain of TCR clone 340087 (TRAV12-2, TRAJ29)
CAVTLRSPLVF

SEQ ID NO: 680174 - protein, 16 aa, Homo sapiens
  CDR3 for beta chain variable domain of TCR clone 340087 (TRBV11-2, TRBJ2-3)
CASSSRTSGGAGTQYF

SEQ ID NO: 680175 - protein, 15 aa, Homo sapiens
  CDR3 for alpha chain variable domain of TCR clone 340088 (TRAV17, TRAJ42)
CATEHYGGSQGNLIF

SEQ ID NO: 680176 - protein, 13 aa, Homo sapiens
  CDR3 for beta chain variable domain of TCR clone 340088 (TRBV7-2, TRBJ1-5)
CASSFARNQPQHF

SEQ ID NO: 680177 - protein, 14 aa, Homo sapiens
  CDR3 for alpha chain variable domain of TCR clone 340089 (TRAV26-1, TRAJ48)
CIVRVGFGNEKLTF

SEQ ID NO: 680178 - protein, 15 aa, Homo sapiens
  CDR3 for beta chain variable domain of TCR clone 340089 (TRBV4-1, TRBJ1-4)
CASSDTGGTNEKLFF

SEQ ID NO: 680179 - protein, 10 aa, Homo sapiens
  CDR3 for alpha chain variable domain of TCR clone 340090 (TRAV1-2, TRAJ34)
CAVNTDKLIF

SEQ ID NO: 680180 - protein, 13 aa, Homo sapiens
  CDR3 for beta chain variable domain of TCR clone 340090 (TRBV4-2, TRBJ1-1)
CASSQAGNTEAFF

SEQ ID NO: 680181 - protein, 13 aa, Homo sapiens
  CDR3 for alpha chain variable domain of TCR clone 340091 (TRAV13-1, TRAJ21)
CTASIYNFNKFYF

SEQ ID NO: 680182 - protein, 13 aa, Homo sapiens
  CDR3 for beta chain variable domain of TCR clone 340091 (TRBV7-9, TRBJ2-3)
CASSPGSTDTQYF

SEQ ID NO: 680183 - protein, 14 aa, Homo sapiens
  CDR3 for alpha chain variable domain of TCR clone 340092 (TRAV9-2, TRAJ39)
CALYIYNAGIMLTF

SEQ ID NO: 680184 - protein, 14 aa, Homo sapiens
  CDR3 for beta chain variable domain of TCR clone 340092 (TRBV12-5, TRBJ2-5)
CASGSRTHQETQYF

SEQ ID NO: 680185 - protein, 14 aa, Homo sapiens
  CDR3 for alpha chain variable domain of TCR clone 340093 (TRAV3, TRAJ8)
CAVSRNTGFQKLVF

SEQ ID NO: 680186 - protein, 15 aa, Homo sapiens
  CDR3 for beta chain variable domain of TCR clone 340093 (TRBV28, TRBJ1-3)
CASSMGWASGNTIYF

SEQ ID NO: 680187 - protein, 12 aa, Homo sapiens
  CDR3 for alpha chain variable domain of TCR clone 340094 (TRAV12-3, TRAJ42)
CAPGGSQGDLIF

SEQ ID NO: 680188 - protein, 14 aa, Homo sapiens
  CDR3 for beta chain variable domain of TCR clone 340094 (TRBV7-2, TRBJ1-6)
CASSLQGANSPLHF

SEQ ID NO: 680189 - protein, 14 aa, Homo sapiens
  CDR3 for alpha chain variable domain of TCR clone 340095 (TRAV8-2, TRAJ4)
CVVSPSGGYNKLIF

SEQ ID NO: 680190 - protein, 16 aa, Homo sapiens
  CDR3 for beta chain variable domain of TCR clone 340095 (TRBV7-3, TRBJ2-1)
CASSLEGYRSYDEQFF

SEQ ID NO: 680191 - protein, 13 aa, Homo sapiens
  CDR3 for alpha chain variable domain of TCR clone 340096 (TRAV8-4, TRAJ27)
CAVSPRNAGKSTF

SEQ ID NO: 680192 - protein, 16 aa, Homo sapiens
  CDR3 for beta chain variable domain of TCR clone 340096 (TRBV18, TRBJ2-7)
CASSPRSQGISYEQYF

SEQ ID NO: 680193 - protein, 17 aa, Homo sapiens
  CDR3 for alpha chain variable domain of TCR clone 340097 (TRAV3, TRAJ6)
CAVRDGPRAGGSYIPTF

SEQ ID NO: 680194 - protein, 15 aa, Homo sapiens
  CDR3 for beta chain variable domain of TCR clone 340097 (TRBV15, TRBJ1-2)
CATSRVRASGSGYTF

SEQ ID NO: 680195 - protein, 13 aa, Homo sapiens
  CDR3 for alpha chain variable domain of TCR clone 340098 (TRAV13-1, TRAJ39)
CAASIWAGNMLTF

SEQ ID NO: 680196 - protein, 15 aa, Homo sapiens
  CDR3 for beta chain variable domain of TCR clone 340098 (TRBV18, TRBJ1-1)
CASSPRQGENTEAFF

SEQ ID NO: 680197 - protein, 16 aa, Homo sapiens
  CDR3 for alpha chain variable domain of TCR clone 340099 (TRAV12-1, TRAJ13)
CVVNLEVSGGYQKVTF

SEQ ID NO: 680198 - protein, 16 aa, Homo sapiens
  CDR3 for beta chain variable domain of TCR clone 340099 (TRBV24-1, TRBJ2-6)
CATSDRRASGANGLTF

SEQ ID NO: 680199 - protein, 12 aa, Homo sapiens
  CDR3 for alpha chain variable domain of TCR clone 340100 (TRAV12-3, TRAJ17)
CAMTPTGNKLTF

SEQ ID NO: 680200 - protein, 15 aa, Homo sapiens
  CDR3 for beta chain variable domain of TCR clone 340100 (TRBV20-1, TRBJ2-7)
CSARDRVSGMDAQYF

SEQ ID NO: 680201 - protein, 13 aa, Homo sapiens
  CDR3 for alpha chain variable domain of TCR clone 340101 (TRAV12-3, TRAJ5)
CGMIYTGRRALTF

SEQ ID NO: 680202 - protein, 15 aa, Homo sapiens
  CDR3 for beta chain variable domain of TCR clone 340101 (TRBV20-1, TRBJ2-7)
CSARDRVSGMDEQYF

SEQ ID NO: 680203 - protein, 17 aa, Homo sapiens
  CDR3 for alpha chain variable domain of TCR clone 340102 (TRAV3, TRAJ6)
CAVRDGHRVGGSYIPTF

SEQ ID NO: 680204 - protein, 12 aa, Homo sapiens
  CDR3 for beta chain variable domain of TCR clone 340102 (TRBV11-2, TRBJ2-2)
CASSLGGGELFF

SEQ ID NO: 680205 - protein, 15 aa, Homo sapiens
  CDR3 for alpha chain variable domain of TCR clone 340103 (TRAV12-1, TRAJ44)
CVVDEYTVTASKLTF

SEQ ID NO: 680206 - protein, 14 aa, Homo sapiens
  CDR3 for beta chain variable domain of TCR clone 340103 (TRBV5-1, TRBJ1-2)
CASSLEPVNYGYTF

SEQ ID NO: 680207 - protein, 16 aa, Homo sapiens
  CDR3 for alpha chain variable domain of TCR clone 340104 (TRAV21, TRAJ37)
CAVRTAGPSNTGKLIF

SEQ ID NO: 680208 - protein, 13 aa, Homo sapiens
  CDR3 for beta chain variable domain of TCR clone 340104 (TRBV7-9, TRBJ2-5)
RASLPSGRETQYF

SEQ ID NO: 680209 - protein, 13 aa, Homo sapiens
  CDR3 for alpha chain variable domain of TCR clone 340105 (TRAV12-1, TRAJ16)
CVVRTRNGQKLLF

SEQ ID NO: 680210 - protein, 19 aa, Homo sapiens
  CDR3 for beta chain variable domain of TCR clone 340105 (TRBV6-1, TRBJ2-5)
CASSRFGAGGPGLEETQYF

SEQ ID NO: 680211 - protein, 16 aa, Homo sapiens
  CDR3 for alpha chain variable domain of TCR clone 340106 (TRAV27, TRAJ53)
CAAPEGSGGSNYKLTF

SEQ ID NO: 680212 - protein, 15 aa, Homo sapiens
  CDR3 for beta chain variable domain of TCR clone 340106 (TRBV20-1, TRBJ1-1)
CSASRGVTGNTESFF

SEQ ID NO: 680213 - protein, 12 aa, Homo sapiens
  CDR3 for alpha chain variable domain of TCR clone 340107 (TRAV13-1, TRAJ21)
CAAKEGFNKFYF

SEQ ID NO: 680214 - protein, 12 aa, Homo sapiens
  CDR3 for beta chain variable domain of TCR clone 340107 (TRBV11-2, TRBJ2-2)
CASSLGGGELFF

SEQ ID NO: 680215 - protein, 13 aa, Homo sapiens
  CDR3 for alpha chain variable domain of TCR clone 340108 (TRAV8-3, TRAJ44)
CPVVPGTASQLTF

SEQ ID NO: 680216 - protein, 14 aa, Homo sapiens
  CDR3 for beta chain variable domain of TCR clone 340108 (TRBV11-2, TRBJ2-3)
CASSRLARTDTQYF

SEQ ID NO: 680217 - protein, 15 aa, Homo sapiens
  CDR3 for alpha chain variable domain of TCR clone 340109 (TRAV35, TRAJ40)
CAGQLGTSGTYKYIF

SEQ ID NO: 680218 - protein, 14 aa, Homo sapiens
  CDR3 for beta chain variable domain of TCR clone 340109 (TRBV7-3, TRBJ2-1)
CASSLARGTNEQVF

SEQ ID NO: 680219 - protein, 17 aa, Homo sapiens
  CDR3 for alpha chain variable domain of TCR clone 340110 (TRAV3, TRAJ38)
CAVRECLNAGNNRKLIW

SEQ ID NO: 680220 - protein, 13 aa, Homo sapiens
  CDR3 for beta chain variable domain of TCR clone 340110 (TRBV23-1, TRBJ1-4)
CASRGKFNEKLFF

SEQ ID NO: 680221 - protein, 13 aa, Homo sapiens
  CDR3 for alpha chain variable domain of TCR clone 340111 (TRAV1-1, TRAJ9)
CAATNTAGFKTIF

SEQ ID NO: 680222 - protein, 14 aa, Homo sapiens
  CDR3 for beta chain variable domain of TCR clone 340111 (TRBV20-1, TRBJ2-1)
CSAQIGGSANEQFF

SEQ ID NO: 680223 - protein, 12 aa, Homo sapiens
  CDR3 for alpha chain variable domain of TCR clone 340112 (TRAV12-3, TRAJ20)
CAMVRGDYTLSF

SEQ ID NO: 680224 - protein, 14 aa, Homo sapiens
  CDR3 for beta chain variable domain of TCR clone 340112 (TRBV5-5, TRBJ1-5)
CDSSGQGVDQPQHF

SEQ ID NO: 680225 - protein, 14 aa, Homo sapiens
  CDR3 for alpha chain variable domain of TCR clone 340113 (TRAV35, TRAJ22)
CAGLRPGSARQLTF

SEQ ID NO: 680226 - protein, 15 aa, Homo sapiens
  CDR3 for beta chain variable domain of TCR clone 340113 (TRBV12-4, TRBJ2-5)
CASSPQTGLQGTQYV

SEQ ID NO: 680227 - protein, 12 aa, Homo sapiens
  CDR3 for alpha chain variable domain of TCR clone 340114 (TRAV1-1, TRAJ8)
FAGGTGFQKLVF

SEQ ID NO: 680228 - protein, 15 aa, Homo sapiens
  CDR3 for beta chain variable domain of TCR clone 340114 (TRBV7-9, TRBJ1-4)
CAGSRTGGFNEKLFF

SEQ ID NO: 680229 - protein, 13 aa, Homo sapiens
  CDR3 for alpha chain variable domain of TCR clone 340115 (TRAV2, TRAJ21)
CAVPFYNFNKFYF

SEQ ID NO: 680230 - protein, 13 aa, Homo sapiens
  CDR3 for beta chain variable domain of TCR clone 340115 (TRBV7-8, TRBJ2-7)
RRVRLTEMGEQYF

SEQ ID NO: 680231 - protein, 13 aa, Homo sapiens
  CDR3 for alpha chain variable domain of TCR clone 340116 (TRAV36/DV7, TRAJ17)
CARASAAGNKLTF

SEQ ID NO: 680232 - protein, 14 aa, Homo sapiens
  CDR3 for beta chain variable domain of TCR clone 340116 (TRBV19, TRBJ2-7)
CASTVQGRPYEQYF

SEQ ID NO: 680233 - protein, 16 aa, Homo sapiens
  CDR3 for alpha chain variable domain of TCR clone 340117 (TRAV35, TRAJ54)
SDVGIYPLQGAQKLVF

SEQ ID NO: 680234 - protein, 15 aa, Homo sapiens
  CDR3 for beta chain variable domain of TCR clone 340117 (TRBV10-2, TRBJ2-6)
CASSEQGTGANVLTF

SEQ ID NO: 680235 - protein, 13 aa, Homo sapiens
  CDR3 for alpha chain variable domain of TCR clone 340118 (TRAV17, TRAJ26)
CATVDNYGQNFVF

SEQ ID NO: 680236 - protein, 11 aa, Homo sapiens
  CDR3 for beta chain variable domain of TCR clone 340118 (TRBV6-1, TRBJ1-3)
CKGGGGNTIYF

SEQ ID NO: 680237 - protein, 12 aa, Homo sapiens
  CDR3 for alpha chain variable domain of TCR clone 340119 (TRAV1-1, TRAJ43)
CAPRVSSNGMRF

SEQ ID NO: 680238 - protein, 15 aa, Homo sapiens
  CDR3 for beta chain variable domain of TCR clone 340119 (TRBV5-1, TRBJ2-7)
CASSLGDCTTYEQYF

SEQ ID NO: 680239 - protein, 11 aa, Homo sapiens
  CDR3 for alpha chain variable domain of TCR clone 340120 (TRAV2, TRAJ33)
CAVESNYQLIW

SEQ ID NO: 680240 - protein, 16 aa, Homo sapiens
  CDR3 for beta chain variable domain of TCR clone 340120 (TRBV19, TRBJ2-7)
CASSPAGSGSLNEQYV

SEQ ID NO: 680241 - protein, 12 aa, Homo sapiens
  CDR3 for alpha chain variable domain of TCR clone 340121 (TRAV12-2, TRAJ52)
IGGGTSYGKLTF

SEQ ID NO: 680242 - protein, 16 aa, Homo sapiens
  CDR3 for beta chain variable domain of TCR clone 340121 (TRBV20-1, TRBJ1-4)
CSAPGQGLLTNEKLFF

SEQ ID NO: 680243 - protein, 13 aa, Homo sapiens
  CDR3 for alpha chain variable domain of TCR clone 340122 (TRAV1-2, TRAJ9)
CAALNTGGFKTIF

SEQ ID NO: 680244 - protein, 16 aa, Homo sapiens
  CDR3 for beta chain variable domain of TCR clone 340122 (TRBV29-1, TRBJ2-6)
CSVEDITYSGANVLTF

SEQ ID NO: 680245 - protein, 14 aa, Homo sapiens
  CDR3 for alpha chain variable domain of TCR clone 340123 (TRAV1-2, TRAJ16)
CAVNRFLDGQKLLF

SEQ ID NO: 680246 - protein, 14 aa, Homo sapiens
  CDR3 for beta chain variable domain of TCR clone 340123 (TRBV7-2, TRBJ1-1)
CASSFLTGTTEAFF

SEQ ID NO: 680247 - protein, 16 aa, Homo sapiens
  CDR3 for alpha chain variable domain of TCR clone 340124 (TRAV14/DV4, TRAJ21)
CAMREGPENNFNKFYF

SEQ ID NO: 680248 - protein, 16 aa, Homo sapiens
  CDR3 for beta chain variable domain of TCR clone 340124 (TRBV20-1, TRBJ2-1)
CSARDLKQGMNNEQFF

SEQ ID NO: 680249 - protein, 15 aa, Homo sapiens
  CDR3 for alpha chain variable domain of TCR clone 340125 (TRAV12-2, TRAJ50)
CAVNGLETSYDKVIF

SEQ ID NO: 680250 - protein, 16 aa, Homo sapiens
  CDR3 for beta chain variable domain of TCR clone 340125 (TRBV5-4, TRBJ2-3)
CASQRPGAGGADTQYF

SEQ ID NO: 680251 - protein, 10 aa, Homo sapiens
  CDR3 for alpha chain variable domain of TCR clone 340126 (TRAV23/DV6, TRAJ57)
CAASSTLSQG

SEQ ID NO: 680252 - protein, 16 aa, Homo sapiens
  CDR3 for beta chain variable domain of TCR clone 340126 (TRBV2, TRBJ2-7)
CASSEPWTGPSYEQYF

SEQ ID NO: 680253 - protein, 13 aa, Homo sapiens
  CDR3 for alpha chain variable domain of TCR clone 340127 (TRAV9-2, TRAJ53)
CALSGGSNYKLTF

SEQ ID NO: 680254 - protein, 17 aa, Homo sapiens
  CDR3 for beta chain variable domain of TCR clone 340127 (TRBV11-2, TRBJ2-1)
CDSSLYPPGVEYNEQFF

SEQ ID NO: 680255 - protein, 14 aa, Homo sapiens
  CDR3 for alpha chain variable domain of TCR clone 340128 (TRAV38-1, TRAJ40)
CALRPTSGTYKYIF

SEQ ID NO: 680256 - protein, 16 aa, Homo sapiens
  CDR3 for beta chain variable domain of TCR clone 340128 (TRBV24-1, TRBJ2-3)
CATSDPGTGATDTQYF

SEQ ID NO: 680257 - protein, 14 aa, Homo sapiens
  CDR3 for alpha chain variable domain of TCR clone 340129 (TRAV13-1, TRAJ40)
CAARPTSGTYKYIF

SEQ ID NO: 680258 - protein, 15 aa, Homo sapiens
  CDR3 for beta chain variable domain of TCR clone 340129 (TRBV18, TRBJ1-5)
CASSETGGNNQPQHF

SEQ ID NO: 680259 - protein, 13 aa, Homo sapiens
  CDR3 for alpha chain variable domain of TCR clone 340130 (TRAV38-1, TRAJ42)
CARRGGSQGNLIF

SEQ ID NO: 680260 - protein, 17 aa, Homo sapiens
  CDR3 for beta chain variable domain of TCR clone 340130 (TRBV20-1, TRBJ2-1)
CSSRDPLAGVWDNEQFF

SEQ ID NO: 680261 - protein, 13 aa, Homo sapiens
  CDR3 for alpha chain variable domain of TCR clone 340131 (TRAV21, TRAJ27)
CAARPGNAGESTF

SEQ ID NO: 680262 - protein, 15 aa, Homo sapiens
  CDR3 for beta chain variable domain of TCR clone 340131 (TRBV20-1, TRBJ2-7)
CSARDRVSGMDEQYF

SEQ ID NO: 680263 - protein, 14 aa, Homo sapiens
  CDR3 for alpha chain variable domain of TCR clone 340132 (TRAV13-1, TRAJ3)
CAASKSSSASKIIF

SEQ ID NO: 680264 - protein, 16 aa, Homo sapiens
  CDR3 for beta chain variable domain of TCR clone 340132 (TRBV15, TRBJ2-3)
CVTSRDLGIVTDTQYF

SEQ ID NO: 680265 - protein, 13 aa, Homo sapiens
  CDR3 for alpha chain variable domain of TCR clone 340133 (TRAV26-1, TRAJ48)
CIVRVVGDEKLTF

SEQ ID NO: 680266 - protein, 16 aa, Homo sapiens
  CDR3 for beta chain variable domain of TCR clone 340133 (TRBV2, TRBJ1-1)
CASSPPNRGMNTKAFF

SEQ ID NO: 680267 - protein, 12 aa, Homo sapiens
  CDR3 for alpha chain variable domain of TCR clone 340134 (TRAV3, TRAJ31)
CAVRDGNARLMF

SEQ ID NO: 680268 - protein, 14 aa, Homo sapiens
  CDR3 for beta chain variable domain of TCR clone 340134 (TRBV2, TRBJ2-3)
CASSEGQNTDTQYF

SEQ ID NO: 680269 - protein, 21 aa, Homo sapiens
  CDR3 for alpha chain variable domain of TCR clone 340135 (TRAV8-3, TRAJ10)
CAVGHTHGRRKQTHLWDRHSA

SEQ ID NO: 680270 - protein, 15 aa, Homo sapiens
  CDR3 for beta chain variable domain of TCR clone 340135 (TRBV6-1, TRBJ2-1)
CASSELRGQYNEQFF

SEQ ID NO: 680271 - protein, 14 aa, Homo sapiens
  CDR3 for alpha chain variable domain of TCR clone 340136 (TRAV38-1, TRAJ29)
CAFITPSGNTLLAF

SEQ ID NO: 680272 - protein, 14 aa, Homo sapiens
  CDR3 for beta chain variable domain of TCR clone 340136 (TRBV18, TRBJ2-7)
CASSPRGGAYEQYF

SEQ ID NO: 680273 - protein, 13 aa, Homo sapiens
  CDR3 for alpha chain variable domain of TCR clone 340137 (TRAV21, TRAJ27)
CAARPGNAGKSTF

SEQ ID NO: 680274 - protein, 14 aa, Homo sapiens
  CDR3 for beta chain variable domain of TCR clone 340137 (TRBV12-4, TRBJ1-5)
CASSRGQVDQPQHF

SEQ ID NO: 680275 - protein, 17 aa, Homo sapiens
  CDR3 for alpha chain variable domain of TCR clone 340138 (TRAV3, TRAJ6)
CAVRDGPRAGGSYIPTF

SEQ ID NO: 680276 - protein, 16 aa, Homo sapiens
  CDR3 for beta chain variable domain of TCR clone 340138 (TRBV4-2, TRBJ2-7)
CASSQDTSGGPSEQYF

SEQ ID NO: 680277 - protein, 15 aa, Homo sapiens
  CDR3 for alpha chain variable domain of TCR clone 340139 (TRAV3, TRAJ20)
CAVRDIKLSDYKLSF

SEQ ID NO: 680278 - protein, 15 aa, Homo sapiens
  CDR3 for beta chain variable domain of TCR clone 340139 (TRBV6-6, TRBJ1-6)
CASSYTRSGTSPLHF

SEQ ID NO: 680279 - protein, 16 aa, Homo sapiens
  CDR3 for alpha chain variable domain of TCR clone 340140 (TRAV17, TRAJ36)
CATVSLNWGKQPLLWD

SEQ ID NO: 680280 - protein, 13 aa, Homo sapiens
  CDR3 for beta chain variable domain of TCR clone 340140 (TRBV4-1, TRBJ1-1)
CASSQLGTGEAYL

SEQ ID NO: 680281 - protein, 12 aa, Homo sapiens
  CDR3 for alpha chain variable domain of TCR clone 340141 (TRAV27, TRAJ13)
CAGVRGYQKVTF

SEQ ID NO: 680282 - protein, 16 aa, Homo sapiens
  CDR3 for beta chain variable domain of TCR clone 340141 (TRBV28, TRBJ2-1)
CASSSSYGGSLNEQFF

SEQ ID NO: 680283 - protein, 17 aa, Homo sapiens
  CDR3 for alpha chain variable domain of TCR clone 340142 (TRAV3, TRAJ42)
CAVRDRDYGGSQGNLIF

SEQ ID NO: 680284 - protein, 13 aa, Homo sapiens
  CDR3 for beta chain variable domain of TCR clone 340142 (TRBV12-4, TRBJ1-1)
CASSPGTGFEAFF

SEQ ID NO: 680285 - protein, 15 aa, Homo sapiens
  CDR3 for alpha chain variable domain of TCR clone 340143 (TRAV26-1, TRAJ48)
CIARWSWFGNGKLTF

SEQ ID NO: 680286 - protein, 13 aa, Homo sapiens
  CDR3 for beta chain variable domain of TCR clone 340143 (TRBV12-5, TRBJ2-3)
CASQNRGTDTQYF

SEQ ID NO: 680287 - protein, 13 aa, Homo sapiens
  CDR3 for alpha chain variable domain of TCR clone 340144 (TRAV27, TRAJ29)
CAGAHSGNTPLVF

SEQ ID NO: 680288 - protein, 15 aa, Homo sapiens
  CDR3 for beta chain variable domain of TCR clone 340144 (TRBV19, TRBJ2-7)
CASSPAGSGEALRYF

SEQ ID NO: 680289 - protein, 14 aa, Homo sapiens
  CDR3 for alpha chain variable domain of TCR clone 340145 (TRAV1-2, TRAJ8)
CAVREDTGFQKLVF

SEQ ID NO: 680290 - protein, 15 aa, Homo sapiens
  CDR3 for beta chain variable domain of TCR clone 340145 (TRBV6-6, TRBJ2-7)
CASSDSYGGSYEQYF

SEQ ID NO: 680291 - protein, 15 aa, Homo sapiens
  CDR3 for alpha chain variable domain of TCR clone 340146 (TRAV25, TRAJ10)
CAGLGLTGGGNKLTF

SEQ ID NO: 680292 - protein, 14 aa, Homo sapiens
  CDR3 for beta chain variable domain of TCR clone 340146 (TRBV7-2, TRBJ2-1)
CASSLEGGYNKQFF

SEQ ID NO: 680293 - protein, 18 aa, Homo sapiens
  CDR3 for alpha chain variable domain of TCR clone 340147 (TRAV21, TRAJ52)
CAVRPSPSGGTSYGKLTF

SEQ ID NO: 680294 - protein, 15 aa, Homo sapiens
  CDR3 for beta chain variable domain of TCR clone 340147 (TRBV12-4, TRBJ2-5)
CASSPPTGLQETQYF

SEQ ID NO: 680295 - protein, 14 aa, Homo sapiens
  CDR3 for alpha chain variable domain of TCR clone 340148 (TRAV16, TRAJ33)
CALSAMDSNYQLIW

SEQ ID NO: 680296 - protein, 17 aa, Homo sapiens
  CDR3 for beta chain variable domain of TCR clone 340148 (TRBV25-1, TRBJ2-7)
CSSSDARVVFSSYEQYF

SEQ ID NO: 680297 - protein, 18 aa, Homo sapiens
  CDR3 for alpha chain variable domain of TCR clone 340149 (TRAV26-2, TRAJ45)
CILRVDKNSGGGADGLTF

SEQ ID NO: 680298 - protein, 14 aa, Homo sapiens
  CDR3 for beta chain variable domain of TCR clone 340149 (TRBV19, TRBJ2-1)
CASPTFVLSGEQFF

SEQ ID NO: 680299 - protein, 13 aa, Homo sapiens
  CDR3 for alpha chain variable domain of TCR clone 340150 (TRAV20, TRAJ34)
CAVSSSNTDKLIF

SEQ ID NO: 680300 - protein, 13 aa, Homo sapiens
  CDR3 for beta chain variable domain of TCR clone 340150 (TRBV7-9, TRBJ1-2)
CASSLKQNYGYTF

SEQ ID NO: 680301 - protein, 16 aa, Homo sapiens
  CDR3 for alpha chain variable domain of TCR clone 340151 (TRAV30, TRAJ24)
CGTEIVDADSWGKCQF

SEQ ID NO: 680302 - protein, 14 aa, Homo sapiens
  CDR3 for beta chain variable domain of TCR clone 340151 (TRBV12-5, TRBJ2-5)
CTSGSRTHQETQYF

SEQ ID NO: 680303 - protein, 14 aa, Homo sapiens
  CDR3 for alpha chain variable domain of TCR clone 340152 (TRAV12-2, TRAJ40)
CAVKIPSGTYKYIF

SEQ ID NO: 680304 - protein, 16 aa, Homo sapiens
  CDR3 for beta chain variable domain of TCR clone 340152 (TRBV9, TRBJ2-7)
CASSAGPDRSPYEQHF

SEQ ID NO: 680305 - protein, 14 aa, Homo sapiens
  CDR3 for alpha chain variable domain of TCR clone 340153 (TRAV17, TRAJ15)
CATAPNQAGTALIF

SEQ ID NO: 680306 - protein, 19 aa, Homo sapiens
  CDR3 for beta chain variable domain of TCR clone 340153 (TRBV6-6, TRBJ1-3)
CASSYGYEGQDLSGNTIYF

SEQ ID NO: 680307 - protein, 13 aa, Homo sapiens
  CDR3 for alpha chain variable domain of TCR clone 340154 (TRAV35, TRAJ20)
CAGPLSNDYKLSF

SEQ ID NO: 680308 - protein, 16 aa, Homo sapiens
  CDR3 for beta chain variable domain of TCR clone 340154 (TRBV29-1, TRBJ2-7)
CSVDVVGTSGSYEQYF

SEQ ID NO: 680309 - protein, 13 aa, Homo sapiens
  CDR3 for alpha chain variable domain of TCR clone 340155 (TRAV26-1, TRAJ30)
CIVNMKRDDKIIF

SEQ ID NO: 680310 - protein, 16 aa, Homo sapiens
  CDR3 for beta chain variable domain of TCR clone 340155 (TRBV16, TRBJ2-7)
CASSRPAGGSSYEQYF

SEQ ID NO: 680311 - protein, 12 aa, Homo sapiens
  CDR3 for alpha chain variable domain of TCR clone 340156 (TRAV9-2, TRAJ4)
VIMSGGYNKLIF

SEQ ID NO: 680312 - protein, 12 aa, Homo sapiens
  CDR3 for beta chain variable domain of TCR clone 340156 (TRBV11-2, TRBJ2-2)
CASSLGGGELFF

SEQ ID NO: 680313 - protein, 14 aa, Homo sapiens
  CDR3 for alpha chain variable domain of TCR clone 340157 (TRAV1-1, TRAJ23)
CAAPIYNQGGKLIF

SEQ ID NO: 680314 - protein, 15 aa, Homo sapiens
  CDR3 for beta chain variable domain of TCR clone 340157 (TRBV4-3, TRBJ1-1)
CASSQELGRGTEAFF

SEQ ID NO: 680315 - protein, 15 aa, Homo sapiens
  CDR3 for alpha chain variable domain of TCR clone 340158 (TRAV27, TRAJ17)
CRSTMIKATGNKLTF

SEQ ID NO: 680316 - protein, 13 aa, Homo sapiens
  CDR3 for beta chain variable domain of TCR clone 340158 (TRBV18, TRBJ2-7)
CASQSGGGYEQYF

SEQ ID NO: 680317 - protein, 14 aa, Homo sapiens
  CDR3 for alpha chain variable domain of TCR clone 340159 (TRAV8-3, TRAJ4)
CAVGAAGGDNKLIF

SEQ ID NO: 680318 - protein, 15 aa, Homo sapiens
  CDR3 for beta chain variable domain of TCR clone 340159 (TRBV6-3, TRBJ2-7)
CASSSPGTVFYEQYF

SEQ ID NO: 680319 - protein, 10 aa, Homo sapiens
  CDR3 for alpha chain variable domain of TCR clone 340160 (TRAV1-2, TRAJ31)
CAFFDARLMF

SEQ ID NO: 680320 - protein, 16 aa, Homo sapiens
  CDR3 for beta chain variable domain of TCR clone 340160 (TRBV12-5, TRBJ2-5)
CASGPRTSGNQETQYF

SEQ ID NO: 680321 - protein, 14 aa, Homo sapiens
  CDR3 for alpha chain variable domain of TCR clone 340161 (TRAV1-2, TRAJ16)
CAVHRFSDGQKLLF

SEQ ID NO: 680322 - protein, 14 aa, Homo sapiens
  CDR3 for beta chain variable domain of TCR clone 340161 (TRBV7-9, TRBJ2-3)
CASSLEDGTDTQYF

SEQ ID NO: 680323 - protein, 15 aa, Homo sapiens
  CDR3 for alpha chain variable domain of TCR clone 340162 (TRAV3, TRAJ3)
CAVRDRDSSASKIIF

SEQ ID NO: 680324 - protein, 18 aa, Homo sapiens
  CDR3 for beta chain variable domain of TCR clone 340162 (TRBV20-1, TRBJ2-3)
CSASGLAGGPGTTDTQYF

SEQ ID NO: 680325 - protein, 14 aa, Homo sapiens
  CDR3 for alpha chain variable domain of TCR clone 340163 (TRAV12-3, TRAJ10)
SHLPLTGGGNKLSF

SEQ ID NO: 680326 - protein, 14 aa, Homo sapiens
  CDR3 for beta chain variable domain of TCR clone 340163 (TRBV12-4, TRBJ1-1)
CASSLGTGGTEAFF

SEQ ID NO: 680327 - protein, 12 aa, Homo sapiens
  CDR3 for alpha chain variable domain of TCR clone 340164 (TRAV17, TRAJ57)
CATDGGSEKLVF

SEQ ID NO: 680328 - protein, 12 aa, Homo sapiens
  CDR3 for beta chain variable domain of TCR clone 340164 (TRBV29-1, TRBJ2-2)
GSVDKYTGELFF

SEQ ID NO: 680329 - protein, 12 aa, Homo sapiens
  CDR3 for alpha chain variable domain of TCR clone 340165 (TRAV12-3, TRAJ17)
CAMTLAGNKLTF

SEQ ID NO: 680330 - protein, 15 aa, Homo sapiens
  CDR3 for beta chain variable domain of TCR clone 340165 (TRBV19, TRBJ2-5)
CASHGLAGAQETQYF

SEQ ID NO: 680331 - protein, 13 aa, Homo sapiens
  CDR3 for alpha chain variable domain of TCR clone 340166 (TRAV13-2, TRAJ48)
CAEMDFGNEKLTF

SEQ ID NO: 680332 - protein, 16 aa, Homo sapiens
  CDR3 for beta chain variable domain of TCR clone 340166 (TRBV4-2, TRBJ1-1)
CASSPSPGRAAPEAFF

SEQ ID NO: 680333 - protein, 14 aa, Homo sapiens
  CDR3 for alpha chain variable domain of TCR clone 340167 (TRAV12-3, TRAJ10)
SHLPLTGGGNKLSF

SEQ ID NO: 680334 - protein, 16 aa, Homo sapiens
  CDR3 for beta chain variable domain of TCR clone 340167 (TRBV4-3, TRBJ2-1)
CASSPALDRGVNEQFF

SEQ ID NO: 680335 - protein, 14 aa, Homo sapiens
  CDR3 for alpha chain variable domain of TCR clone 340168 (TRAV12-3, TRAJ10)
SHLPLTVGGNKLTF

SEQ ID NO: 680336 - protein, 15 aa, Homo sapiens
  CDR3 for beta chain variable domain of TCR clone 340168 (TRBV4-1, TRBJ1-4)
CASSDTGGTNEKLFF

SEQ ID NO: 680337 - protein, 13 aa, Homo sapiens
  CDR3 for alpha chain variable domain of TCR clone 340169 (TRAV26-2, TRAJ54)
CIPRVGGAHKLVF

SEQ ID NO: 680338 - protein, 16 aa, Homo sapiens
  CDR3 for beta chain variable domain of TCR clone 340169 (TRBV4-1, TRBJ1-1)
CASSSMSERPNTEAFF

SEQ ID NO: 680339 - protein, 15 aa, Homo sapiens
  CDR3 for alpha chain variable domain of TCR clone 340170 (TRAV23/DV6, TRAJ49)
CAATPGQVGRSFQIS

SEQ ID NO: 680340 - protein, 14 aa, Homo sapiens
  CDR3 for beta chain variable domain of TCR clone 340170 (TRBV7-3, TRBJ1-1)
CASSLKGGNTEAFF

SEQ ID NO: 680341 - protein, 15 aa, Homo sapiens
  CDR3 for alpha chain variable domain of TCR clone 340171 (TRAV25, TRAJ41)
CAGPWNSNSGYALNF

SEQ ID NO: 680342 - protein, 13 aa, Homo sapiens
  CDR3 for beta chain variable domain of TCR clone 340171 (TRBV15, TRBJ1-1)
CATRRGIQARAFF

SEQ ID NO: 680343 - protein, 15 aa, Homo sapiens
  CDR3 for alpha chain variable domain of TCR clone 340172 (TRAV27, TRAJ38)
CAARRNAGNNRKLIG

SEQ ID NO: 680344 - protein, 17 aa, Homo sapiens
  CDR3 for beta chain variable domain of TCR clone 340172 (TRBV5-8, TRBJ1-5)
CASSSRLQLYSNQPQHF

SEQ ID NO: 680345 - protein, 14 aa, Homo sapiens
  CDR3 for alpha chain variable domain of TCR clone 340173 (TRAV12-2, TRAJ17)
CAVNLKAAGNKLTF

SEQ ID NO: 680346 - protein, 16 aa, Homo sapiens
  CDR3 for beta chain variable domain of TCR clone 340173 (TRBV20-1, TRBJ2-6)
CSASSQGYDGANVLTF

SEQ ID NO: 680347 - protein, 18 aa, Homo sapiens
  CDR3 for alpha chain variable domain of TCR clone 340174 (TRAV21, TRAJ52)
CAVRPSPAGGTSYGKLTF

SEQ ID NO: 680348 - protein, 13 aa, Homo sapiens
  CDR3 for beta chain variable domain of TCR clone 340174 (TRBV13, TRBJ2-7)
CASSPTETYEQYF

SEQ ID NO: 680349 - protein, 13 aa, Homo sapiens
  CDR3 for alpha chain variable domain of TCR clone 340175 (TRAV12-3, TRAJ9)
CAMRNTGGFKTIF

SEQ ID NO: 680350 - protein, 13 aa, Homo sapiens
  CDR3 for beta chain variable domain of TCR clone 340175 (TRBV7-9, TRBJ1-2)
CASSLEQNYGYTF

SEQ ID NO: 680351 - protein, 17 aa, Homo sapiens
  CDR3 for alpha chain variable domain of TCR clone 340176 (TRAV3, TRAJ6)
CAVRDGPRAGGSYNPTF

SEQ ID NO: 680352 - protein, 17 aa, Homo sapiens
  CDR3 for beta chain variable domain of TCR clone 340176 (TRBV28, TRBJ2-5)
CASSTPEGDALQETQYF

SEQ ID NO: 680353 - protein, 13 aa, Homo sapiens
  CDR3 for alpha chain variable domain of TCR clone 340177 (TRAV17, TRAJ26)
CATVDNYGQNFVF

SEQ ID NO: 680354 - protein, 13 aa, Homo sapiens
  CDR3 for beta chain variable domain of TCR clone 340177 (TRBV12-5, TRBJ2-3)
CASGDRQSDTQYF

SEQ ID NO: 680355 - protein, 16 aa, Homo sapiens
  CDR3 for alpha chain variable domain of TCR clone 340178 (TRAV30, TRAJ24)
CGTEIVDADSWGKFQF

SEQ ID NO: 680356 - protein, 15 aa, Homo sapiens
  CDR3 for beta chain variable domain of TCR clone 340178 (TRBV10-2, TRBJ2-7)
CASWNRGQATYEQYF

SEQ ID NO: 680357 - protein, 13 aa, Homo sapiens
  CDR3 for alpha chain variable domain of TCR clone 340179 (TRAV30, TRAJ24)
CGTVTDSWGKWQF

SEQ ID NO: 680358 - protein, 15 aa, Homo sapiens
  CDR3 for beta chain variable domain of TCR clone 340179 (TRBV9, TRBJ1-6)
CASSVAGTGDSPLHF

SEQ ID NO: 680359 - protein, 18 aa, Homo sapiens
  CDR3 for alpha chain variable domain of TCR clone 340180 (TRAV12-2, )
CAVEDIQNPDPAVYHLRD

SEQ ID NO: 680360 - protein, 15 aa, Homo sapiens
  CDR3 for beta chain variable domain of TCR clone 340180 (TRBV11-1, TRBJ2-7)
CASSLNYGASYEQYF

SEQ ID NO: 680361 - protein, 12 aa, Homo sapiens
  CDR3 for alpha chain variable domain of TCR clone 340181 (TRAV12-3, TRAJ17)
CAMTLTGNKLTF

SEQ ID NO: 680362 - protein, 15 aa, Homo sapiens
  CDR3 for beta chain variable domain of TCR clone 340181 (TRBV20-1, TRBJ2-7)
RSASDRVSGMDEQYF

SEQ ID NO: 680363 - protein, 14 aa, Homo sapiens
  CDR3 for alpha chain variable domain of TCR clone 340182 (TRAV13-1, TRAJ44)
CAAKATGTASKLTF

SEQ ID NO: 680364 - protein, 17 aa, Homo sapiens
  CDR3 for beta chain variable domain of TCR clone 340182 (TRBV7-3, TRBJ2-1)
CASSLMKRMRGADTQYF

SEQ ID NO: 680365 - protein, 14 aa, Homo sapiens
  CDR3 for alpha chain variable domain of TCR clone 340183 (TRAV8-6, TRAJ52)
CAVIGGTSYGKLTF

SEQ ID NO: 680366 - protein, 15 aa, Homo sapiens
  CDR3 for beta chain variable domain of TCR clone 340183 (TRBV6-3, TRBJ2-7)
CASSSPGTVFYEQYF

SEQ ID NO: 680367 - protein, 14 aa, Homo sapiens
  CDR3 for alpha chain variable domain of TCR clone 340184 (TRAV13-1, TRAJ23)
CAASRLGLGGKLIF

SEQ ID NO: 680368 - protein, 15 aa, Homo sapiens
  CDR3 for beta chain variable domain of TCR clone 340184 (TRBV7-2, TRBJ2-1)
CASSLVAGRYNEQFF

SEQ ID NO: 680369 - protein, 11 aa, Homo sapiens
  CDR3 for alpha chain variable domain of TCR clone 340185 (TRAV12-1, TRAJ21)
CVVYNFNKFYF

SEQ ID NO: 680370 - protein, 14 aa, Homo sapiens
  CDR3 for beta chain variable domain of TCR clone 340185 (TRBV19, TRBJ2-7)
CASSMGEGAIEQYF

SEQ ID NO: 680371 - protein, 15 aa, Homo sapiens
  CDR3 for alpha chain variable domain of TCR clone 340186 (TRAV40, TRAJ45)
CLLGDLGGGADGLTF

SEQ ID NO: 680372 - protein, 16 aa, Homo sapiens
  CDR3 for beta chain variable domain of TCR clone 340186 (TRBV7-9, TRBJ2-3)
CASSPWREVGTDTQYF

SEQ ID NO: 680373 - protein, 15 aa, Homo sapiens
  CDR3 for alpha chain variable domain of TCR clone 340187 (TRAV26-1, TRAJ38)
CIASSNSCNNRKLIW

SEQ ID NO: 680374 - protein, 12 aa, Homo sapiens
  CDR3 for beta chain variable domain of TCR clone 340187 (TRBV5-8, TRBJ1-2)
CASSFGVYGYTF

SEQ ID NO: 680375 - protein, 14 aa, Homo sapiens
  CDR3 for alpha chain variable domain of TCR clone 340188 (TRAV1-2, TRAJ16)
CAVNRFSDGQKLLF

SEQ ID NO: 680376 - protein, 14 aa, Homo sapiens
  CDR3 for beta chain variable domain of TCR clone 340188 (TRBV13, TRBJ2-5)
CAGSLGRGQETQYF

SEQ ID NO: 680377 - protein, 13 aa, Homo sapiens
  CDR3 for alpha chain variable domain of TCR clone 340189 (TRAV12-2, TRAJ34)
CAVRGYNTDKLIF

SEQ ID NO: 680378 - protein, 18 aa, Homo sapiens
  CDR3 for beta chain variable domain of TCR clone 340189 (TRBV11-2, TRBJ2-3)
CASSLGGGLAGGSEYAVF

SEQ ID NO: 680379 - protein, 15 aa, Homo sapiens
  CDR3 for alpha chain variable domain of TCR clone 340190 (TRAV13-1, TRAJ17)
CAASIEMAAGNKLTF

SEQ ID NO: 680380 - protein, 14 aa, Homo sapiens
  CDR3 for beta chain variable domain of TCR clone 340190 (TRBV7-9, TRBJ2-1)
CASSPRDSLYEQFF

SEQ ID NO: 680381 - protein, 14 aa, Homo sapiens
  CDR3 for alpha chain variable domain of TCR clone 340191 (TRAV26-1, TRAJ34)
CIVRVAYNTEKLIF

SEQ ID NO: 680382 - protein, 15 aa, Homo sapiens
  CDR3 for beta chain variable domain of TCR clone 340191 (TRBV20-1, TRBJ2-7)
CSARVPAAYFYEQYL

SEQ ID NO: 680383 - protein, 16 aa, Homo sapiens
  CDR3 for alpha chain variable domain of TCR clone 340192 (TRAV8-3, TRAJ8)
CAVPRDGNTGFQKLVF

SEQ ID NO: 680384 - protein, 11 aa, Homo sapiens
  CDR3 for beta chain variable domain of TCR clone 340192 (TRBV7-3, TRBJ2-2)
CASSLNSGGLA

SEQ ID NO: 680385 - protein, 13 aa, Homo sapiens
  CDR3 for alpha chain variable domain of TCR clone 340193 (TRAV17, TRAJ22)
CAHNSGSARQLTF

SEQ ID NO: 680386 - protein, 14 aa, Homo sapiens
  CDR3 for beta chain variable domain of TCR clone 340193 (TRBV16, TRBJ1-1)
CASSQAGPNTEAFF

SEQ ID NO: 680387 - protein, 13 aa, Homo sapiens
  CDR3 for alpha chain variable domain of TCR clone 340194 (TRAV29/DV5, TRAJ28)
CAAHRTRSYHLTF

SEQ ID NO: 680388 - protein, 13 aa, Homo sapiens
  CDR3 for beta chain variable domain of TCR clone 340194 (TRBV6-3, TRBJ2-3)
CASSYYPADTQYF

SEQ ID NO: 680389 - protein, 15 aa, Homo sapiens
  CDR3 for alpha chain variable domain of TCR clone 340195 (TRAV13-1, TRAJ10)
CAAPILTGGGNKLTF

SEQ ID NO: 680390 - protein, 15 aa, Homo sapiens
  CDR3 for beta chain variable domain of TCR clone 340195 (TRBV2, TRBJ2-7)
CASTLLGSGATEQYF

SEQ ID NO: 680391 - protein, 14 aa, Homo sapiens
  CDR3 for alpha chain variable domain of TCR clone 340196 (TRAV35, TRAJ13)
CAGSPSGGYQKVTF

SEQ ID NO: 680392 - protein, 14 aa, Homo sapiens
  CDR3 for beta chain variable domain of TCR clone 340196 (TRBV7-9, TRBJ1-1)
CASTPLQSYTEAFF

SEQ ID NO: 680393 - protein, 14 aa, Homo sapiens
  CDR3 for alpha chain variable domain of TCR clone 340197 (TRAV17, TRAJ57)
CATDPQGGSEKLVF

SEQ ID NO: 680394 - protein, 13 aa, Homo sapiens
  CDR3 for beta chain variable domain of TCR clone 340197 (TRBV29-1, TRBJ2-1)
CSVEGGRVNEKFF

SEQ ID NO: 680395 - protein, 15 aa, Homo sapiens
  CDR3 for alpha chain variable domain of TCR clone 340198 (TRAV26-2, TRAJ16)
CILSLRFSDGQKPLF

SEQ ID NO: 680396 - protein, 13 aa, Homo sapiens
  CDR3 for beta chain variable domain of TCR clone 340198 (TRBV10-3, TRBJ2-7)
CAIRPTEAYEQYF

SEQ ID NO: 680397 - protein, 13 aa, Homo sapiens
  CDR3 for alpha chain variable domain of TCR clone 340199 (TRAV26-1, TRAJ29)
CIVRRLGNTPLVF

SEQ ID NO: 680398 - protein, 16 aa, Homo sapiens
  CDR3 for beta chain variable domain of TCR clone 340199 (TRBV11-2, TRBJ2-7)
CASSLAPTGVNYEQYF

SEQ ID NO: 680399 - protein, 14 aa, Homo sapiens
  CDR3 for alpha chain variable domain of TCR clone 340200 (TRAV12-2, TRAJ13)
CAVQKTGGYKKVTF

SEQ ID NO: 680400 - protein, 15 aa, Homo sapiens
  CDR3 for beta chain variable domain of TCR clone 340200 (TRBV27, TRBJ2-1)
CASSNGGGSSNEQFF

SEQ ID NO: 680401 - protein, 16 aa, Homo sapiens
  CDR3 for alpha chain variable domain of TCR clone 340201 (TRAV8-3, TRAJ13)
CAVGAYPSGGYQKVTF

SEQ ID NO: 680402 - protein, 13 aa, Homo sapiens
  CDR3 for beta chain variable domain of TCR clone 340201 (TRBV11-2, TRBJ1-1)
CASSLGNGAEAFF

SEQ ID NO: 680403 - protein, 14 aa, Homo sapiens
  CDR3 for alpha chain variable domain of TCR clone 340202 (TRAV38-1, TRAJ35)
CAFLTIGFGNVLHC

SEQ ID NO: 680404 - protein, 17 aa, Homo sapiens
  CDR3 for beta chain variable domain of TCR clone 340202 (TRBV28, TRBJ1-1)
CASSGDLRTESNTEAFS

SEQ ID NO: 680405 - protein, 15 aa, Homo sapiens
  CDR3 for alpha chain variable domain of TCR clone 340203 (TRAV3, TRAJ22)
CAVRYRGGSARQLTF

SEQ ID NO: 680406 - protein, 14 aa, Homo sapiens
  CDR3 for beta chain variable domain of TCR clone 340203 (TRBV20-1, TRBJ1-1)
CSAQTRIGGTEAFF

SEQ ID NO: 680407 - protein, 14 aa, Homo sapiens
  CDR3 for alpha chain variable domain of TCR clone 340204 (TRAV1-2, TRAJ8)
CAVREDTGFQKLVF

SEQ ID NO: 680408 - protein, 16 aa, Homo sapiens
  CDR3 for beta chain variable domain of TCR clone 340204 (TRBV12-5, TRBJ2-5)
CASGPRTSGNRETQYF

SEQ ID NO: 680409 - protein, 14 aa, Homo sapiens
  CDR3 for alpha chain variable domain of TCR clone 340205 (TRAV12-3, TRAJ10)
SHLPLTGGGNKLTF

SEQ ID NO: 680410 - protein, 16 aa, Homo sapiens
  CDR3 for beta chain variable domain of TCR clone 340205 (TRBV15, TRBJ1-2)
CATSRGPRTGGGGYTF

SEQ ID NO: 680411 - protein, 14 aa, Homo sapiens
  CDR3 for alpha chain variable domain of TCR clone 340206 (TRAV12-1, TRAJ17)
CVVNYKAAGIKLTF

SEQ ID NO: 680412 - protein, 17 aa, Homo sapiens
  CDR3 for beta chain variable domain of TCR clone 340206 (TRBV20-1, TRBJ2-1)
CSASSSGLAGSYNEQVF

SEQ ID NO: 680413 - protein, 13 aa, Homo sapiens
  CDR3 for alpha chain variable domain of TCR clone 340207 (TRAV36/DV7, TRAJ37)
CAVFSSNTGKLIF

SEQ ID NO: 680414 - protein, 14 aa, Homo sapiens
  CDR3 for beta chain variable domain of TCR clone 340207 (TRBV29-1, TRBJ2-1)
CSVGAVAGGNEQFF

SEQ ID NO: 680415 - protein, 16 aa, Homo sapiens
  CDR3 for alpha chain variable domain of TCR clone 340208 (TRAV4, TRAJ5)
CLVGPDHGHGQESTYF

SEQ ID NO: 680416 - protein, 13 aa, Homo sapiens
  CDR3 for beta chain variable domain of TCR clone 340208 (TRBV4-2, TRBJ1-2)
CASSPSASGGYTF

SEQ ID NO: 680417 - protein, 17 aa, Homo sapiens
  CDR3 for alpha chain variable domain of TCR clone 340209 (TRAV16, TRAJ42)
CALITKLYGGSQGNLIF

SEQ ID NO: 680418 - protein, 13 aa, Homo sapiens
  CDR3 for beta chain variable domain of TCR clone 340209 (TRBV19, TRBJ1-5)
CASSTRRDQPQHF

SEQ ID NO: 680419 - protein, 13 aa, Homo sapiens
  CDR3 for alpha chain variable domain of TCR clone 340210 (TRAV21, TRAJ27)
CAARPGNAGKSTF

SEQ ID NO: 680420 - protein, 13 aa, Homo sapiens
  CDR3 for beta chain variable domain of TCR clone 340210 (TRBV18, TRBJ2-7)
YASQSGGGYEQYF

SEQ ID NO: 680421 - protein, 12 aa, Homo sapiens
  CDR3 for alpha chain variable domain of TCR clone 340211 (TRAV21, TRAJ49)
CAVNDGGNQFYF

SEQ ID NO: 680422 - protein, 13 aa, Homo sapiens
  CDR3 for beta chain variable domain of TCR clone 340211 (TRBV2, TRBJ1-1)
FASSVLMNTEAFF

SEQ ID NO: 680423 - protein, 13 aa, Homo sapiens
  CDR3 for alpha chain variable domain of TCR clone 340212 (TRAV8-3, TRAJ28)
CAVGAVGSYQLTF

SEQ ID NO: 680424 - protein, 13 aa, Homo sapiens
  CDR3 for beta chain variable domain of TCR clone 340212 (TRBV20-1, TRBJ1-1)
CSARLGQGTEAFF

SEQ ID NO: 680425 - protein, 16 aa, Homo sapiens
  CDR3 for alpha chain variable domain of TCR clone 340213 (TRAV2, TRAJ13)
CAARNLGVTRKLPLEL

SEQ ID NO: 680426 - protein, 14 aa, Homo sapiens
  CDR3 for beta chain variable domain of TCR clone 340213 (TRBV19, TRBJ2-1)
CASEVTGARNEQFF

SEQ ID NO: 680427 - protein, 15 aa, Homo sapiens
  CDR3 for alpha chain variable domain of TCR clone 340214 (TRAV1-2, TRAJ38)
CSVSENAGNNRKLIW

SEQ ID NO: 680428 - protein, 16 aa, Homo sapiens
  CDR3 for beta chain variable domain of TCR clone 340214 (TRBV4-1, TRBJ2-7)
CASSLTAGQATYEQYF

SEQ ID NO: 680429 - protein, 15 aa, Homo sapiens
  CDR3 for alpha chain variable domain of TCR clone 340215 (TRAV26-1, TRAJ22)
CIVRVSFWFCKATDL

SEQ ID NO: 680430 - protein, 13 aa, Homo sapiens
  CDR3 for beta chain variable domain of TCR clone 340215 (TRBV7-9, TRBJ1-2)
CASSLKQNYRHTF

SEQ ID NO: 680431 - protein, 16 aa, Homo sapiens
  CDR3 for alpha chain variable domain of TCR clone 340216 (TRAV26-1, TRAJ37)
CIYARHGSSNTGRLIF

SEQ ID NO: 680432 - protein, 14 aa, Homo sapiens
  CDR3 for beta chain variable domain of TCR clone 340216 (TRBV7-6, TRBJ2-3)
YASSLGTVTDTQYF

SEQ ID NO: 680433 - protein, 13 aa, Homo sapiens
  CDR3 for alpha chain variable domain of TCR clone 340217 (TRAV21, TRAJ27)
CAARPGNAGKSTF

SEQ ID NO: 680434 - protein, 14 aa, Homo sapiens
  CDR3 for beta chain variable domain of TCR clone 340217 (TRBV7-2, TRBJ2-5)
CASSPRGSSETQYV

SEQ ID NO: 680435 - protein, 15 aa, Homo sapiens
  CDR3 for alpha chain variable domain of TCR clone 340218 (TRAV21, TRAJ53)
CATLNSGGSNYKLTF

SEQ ID NO: 680436 - protein, 15 aa, Homo sapiens
  CDR3 for beta chain variable domain of TCR clone 340218 (TRBV11-3, TRBJ2-1)
CASSLGDSSHNEQFF

SEQ ID NO: 680437 - protein, 13 aa, Homo sapiens
  CDR3 for alpha chain variable domain of TCR clone 340219 (TRAV8-6, TRAJ50)
CAVIKTSYDKEIF

SEQ ID NO: 680438 - protein, 15 aa, Homo sapiens
  CDR3 for beta chain variable domain of TCR clone 340219 (TRBV7-2, TRBJ2-2)
CASRRPGQNTGELFF

SEQ ID NO: 680439 - protein, 16 aa, Homo sapiens
  CDR3 for alpha chain variable domain of TCR clone 340220 (TRAV12-3, TRAJ53)
CAMGPGSGGSNYKLTF

SEQ ID NO: 680440 - protein, 12 aa, Homo sapiens
  CDR3 for beta chain variable domain of TCR clone 340220 (TRBV7-8, TRBJ2-7)
CASSLGDREQYF

SEQ ID NO: 680441 - protein, 17 aa, Homo sapiens
  CDR3 for alpha chain variable domain of TCR clone 340221 (TRAV29/DV5, TRAJ45)
CAADGPFSGGGADGLTF

SEQ ID NO: 680442 - protein, 15 aa, Homo sapiens
  CDR3 for beta chain variable domain of TCR clone 340221 (TRBV7-2, TRBJ2-1)
CASSSGLAGGNEQFF

SEQ ID NO: 680443 - protein, 17 aa, Homo sapiens
  CDR3 for alpha chain variable domain of TCR clone 340222 (TRAV12-2, TRAJ52)
CAVNPYAGGTSYGKLTF

SEQ ID NO: 680444 - protein, 16 aa, Homo sapiens
  CDR3 for beta chain variable domain of TCR clone 340222 (TRBV4-3, TRBJ2-7)
CASSPRTSGRSYEQYF

SEQ ID NO: 680445 - protein, 12 aa, Homo sapiens
  CDR3 for alpha chain variable domain of TCR clone 340223 (TRAV27, TRAJ33)
CAGDGSNYQLIW

SEQ ID NO: 680446 - protein, 15 aa, Homo sapiens
  CDR3 for beta chain variable domain of TCR clone 340223 (TRBV6-5, TRBJ2-7)
CASSYSTSGNHEQYF

SEQ ID NO: 680447 - protein, 17 aa, Homo sapiens
  CDR3 for alpha chain variable domain of TCR clone 340224 (TRAV3, TRAJ42)
CSVRDRDYGGSQGNLIF

SEQ ID NO: 680448 - protein, 17 aa, Homo sapiens
  CDR3 for beta chain variable domain of TCR clone 340224 (TRBV7-9, TRBJ2-3)
CASSPTVAGDLTDTQYF

SEQ ID NO: 680449 - protein, 16 aa, Homo sapiens
  CDR3 for alpha chain variable domain of TCR clone 340225 (TRAV27, TRAJ52)
CAGAGAGGTSYGKLTF

SEQ ID NO: 680450 - protein, 17 aa, Homo sapiens
  CDR3 for beta chain variable domain of TCR clone 340225 (TRBV24-1, TRBJ2-3)
YATSDLPSGEDTDTQYF

SEQ ID NO: 680451 - protein, 14 aa, Homo sapiens
  CDR3 for alpha chain variable domain of TCR clone 340226 (TRAV26-1, TRAJ38)
CIADNAGSNRKLIW

SEQ ID NO: 680452 - protein, 16 aa, Homo sapiens
  CDR3 for beta chain variable domain of TCR clone 340226 (TRBV20-1, TRBJ2-7)
CSASTSGRLSSYEQYF

SEQ ID NO: 680453 - protein, 16 aa, Homo sapiens
  CDR3 for alpha chain variable domain of TCR clone 340227 (TRAV3, TRAJ37)
CAVRVRGSGNTGKLIF

SEQ ID NO: 680454 - protein, 18 aa, Homo sapiens
  CDR3 for beta chain variable domain of TCR clone 340227 (TRBV20-1, TRBJ2-6)
CSAETTPTHGSGANVLTF

SEQ ID NO: 680455 - protein, 17 aa, Homo sapiens
  CDR3 for alpha chain variable domain of TCR clone 340228 (TRAV14/DV4, TRAJ12)
CAMIELPWRDSSYKLIF

SEQ ID NO: 680456 - protein, 14 aa, Homo sapiens
  CDR3 for beta chain variable domain of TCR clone 340228 (TRBV20-1, TRBJ2-7)
CSARRSGSSYEQYF

SEQ ID NO: 680457 - protein, 17 aa, Homo sapiens
  CDR3 for alpha chain variable domain of TCR clone 340229 (TRAV26-1, TRAJ27)
CIVSTPWIKTNAGKSTF

SEQ ID NO: 680458 - protein, 16 aa, Homo sapiens
  CDR3 for beta chain variable domain of TCR clone 340229 (TRBV7-9, TRBJ2-1)
CASSLDPGLAIDEQFF

SEQ ID NO: 680459 - protein, 14 aa, Homo sapiens
  CDR3 for alpha chain variable domain of TCR clone 340230 (TRAV8-4, TRAJ48)
CAVSETFGNEKLTF

SEQ ID NO: 680460 - protein, 13 aa, Homo sapiens
  CDR3 for beta chain variable domain of TCR clone 340230 (TRBV19, TRBJ1-2)
CASSVPGQDGYTF

SEQ ID NO: 680461 - protein, 10 aa, Homo sapiens
  CDR3 for alpha chain variable domain of TCR clone 340231 (TRAV26-1, TRAJ40)
CIAGTYKYIF

SEQ ID NO: 680462 - protein, 14 aa, Homo sapiens
  CDR3 for beta chain variable domain of TCR clone 340231 (TRBV29-1, TRBJ2-7)
CSVDQRQASYEQYF

SEQ ID NO: 680463 - protein, 10 aa, Homo sapiens
  CDR3 for alpha chain variable domain of TCR clone 340232 (TRAV8-3, TRAJ27)
CAVGPSKTNA

SEQ ID NO: 680464 - protein, 15 aa, Homo sapiens
  CDR3 for beta chain variable domain of TCR clone 340232 (TRBV7-2, TRBJ2-1)
CAISSGLAGGNEQFF

SEQ ID NO: 680465 - protein, 12 aa, Homo sapiens
  CDR3 for alpha chain variable domain of TCR clone 340233 (TRAV8-3, TRAJ43)
CAVGAGNNDMRF

SEQ ID NO: 680466 - protein, 14 aa, Homo sapiens
  CDR3 for beta chain variable domain of TCR clone 340233 (TRBV19, TRBJ1-5)
CASSIGGGGQPQHF

SEQ ID NO: 680467 - protein, 14 aa, Homo sapiens
  CDR3 for alpha chain variable domain of TCR clone 340234 (TRAV38-1, TRAJ35)
CAFLPIGFGNVLHS

SEQ ID NO: 680468 - protein, 17 aa, Homo sapiens
  CDR3 for beta chain variable domain of TCR clone 340234 (TRBV28, TRBJ1-1)
CASSGDLRTESNTEAFF

SEQ ID NO: 680469 - protein, 12 aa, Homo sapiens
  CDR3 for alpha chain variable domain of TCR clone 340235 (TRAV8-6, TRAJ36)
CAVSDWRGQTTF

SEQ ID NO: 680470 - protein, 13 aa, Homo sapiens
  CDR3 for beta chain variable domain of TCR clone 340235 (TRBV29-1, TRBJ2-1)
CSVEGGRVNEQFF

SEQ ID NO: 680471 - protein, 13 aa, Homo sapiens
  CDR3 for alpha chain variable domain of TCR clone 340236 (TRAV9-2, TRAJ37)
CALHSSNTGKLIF

SEQ ID NO: 680472 - protein, 15 aa, Homo sapiens
  CDR3 for beta chain variable domain of TCR clone 340236 (TRBV7-2, TRBJ2-7)
CASGTPGLTRGEQYF

SEQ ID NO: 680473 - protein, 14 aa, Homo sapiens
  CDR3 for alpha chain variable domain of TCR clone 340237 (TRAV29/DV5, TRAJ36)
YAARRKTGANNLFF

SEQ ID NO: 680474 - protein, 16 aa, Homo sapiens
  CDR3 for beta chain variable domain of TCR clone 340237 (TRBV6-1, TRBJ2-1)
CASILRQGSSYNEQFF

SEQ ID NO: 680475 - protein, 13 aa, Homo sapiens
  CDR3 for alpha chain variable domain of TCR clone 340238 (TRAV17, TRAJ4)
CATKSGGYNKLLF

SEQ ID NO: 680476 - protein, 14 aa, Homo sapiens
  CDR3 for beta chain variable domain of TCR clone 340238 (TRBV20-1, TRBJ1-5)
CSARDDRGNQPQHF

SEQ ID NO: 680477 - protein, 18 aa, Homo sapiens
  CDR3 for alpha chain variable domain of TCR clone 340239 (TRAV29/DV5, TRAJ52)
CAAGFRGAGGTSYGKLTF

SEQ ID NO: 680478 - protein, 14 aa, Homo sapiens
  CDR3 for beta chain variable domain of TCR clone 340239 (TRBV2, TRBJ2-1)
CASSEALDGNEQFF

SEQ ID NO: 680479 - protein, 17 aa, Homo sapiens
  CDR3 for alpha chain variable domain of TCR clone 340240 (TRAV13-1, TRAJ52)
CAASSGAGGTSYGKLTF

SEQ ID NO: 680480 - protein, 16 aa, Homo sapiens
  CDR3 for beta chain variable domain of TCR clone 340240 (TRBV2, TRBJ2-1)
CASSVGGSLSYNEQFF

SEQ ID NO: 680481 - protein, 14 aa, Homo sapiens
  CDR3 for alpha chain variable domain of TCR clone 340241 (TRAV1-2, TRAJ16)
CAVNRFSDGQKLLF

SEQ ID NO: 680482 - protein, 16 aa, Homo sapiens
  CDR3 for beta chain variable domain of TCR clone 340241 (TRBV7-3, TRBJ2-3)
CASSLRGYRPEDTQYF

SEQ ID NO: 680483 - protein, 15 aa, Homo sapiens
  CDR3 for alpha chain variable domain of TCR clone 340242 (TRAV17, TRAJ57)
CATGPPQGGSETLVF

SEQ ID NO: 680484 - protein, 14 aa, Homo sapiens
  CDR3 for beta chain variable domain of TCR clone 340242 (TRBV12-5, TRBJ2-5)
CASGSRTHQETQYF

SEQ ID NO: 680485 - protein, 12 aa, Homo sapiens
  CDR3 for alpha chain variable domain of TCR clone 340243 (TRAV25, TRAJ11)
CAGASGYGTLTF

SEQ ID NO: 680486 - protein, 20 aa, Homo sapiens
  CDR3 for beta chain variable domain of TCR clone 340243 (TRBV7-8, TRBJ2-2)
CASSHLFPGPTIHITGELFF

SEQ ID NO: 680487 - protein, 13 aa, Homo sapiens
  CDR3 for alpha chain variable domain of TCR clone 340244 (TRAV3, TRAJ27)
CAVRPLGAGKSTF

SEQ ID NO: 680488 - protein, 17 aa, Homo sapiens
  CDR3 for beta chain variable domain of TCR clone 340244 (TRBV20-1, TRBJ2-7)
CSARDPEGDHREYEQYS

SEQ ID NO: 680489 - protein, 16 aa, Homo sapiens
  CDR3 for alpha chain variable domain of TCR clone 340245 (TRAV20, TRAJ26)
CAVQHRQDNYGQNFVF

SEQ ID NO: 680490 - protein, 15 aa, Homo sapiens
  CDR3 for beta chain variable domain of TCR clone 340245 (TRBV7-2, TRBJ2-7)
CASSWGQGAIYEQYF

SEQ ID NO: 680491 - protein, 14 aa, Homo sapiens
  CDR3 for alpha chain variable domain of TCR clone 340246 (TRAV26-1, TRAJ38)
CIADNAGNNRKLIW

SEQ ID NO: 680492 - protein, 13 aa, Homo sapiens
  CDR3 for beta chain variable domain of TCR clone 340246 (TRBV20-1, TRBJ1-1)
CSARGGLNTEAFF

SEQ ID NO: 680493 - protein, 17 aa, Homo sapiens
  CDR3 for alpha chain variable domain of TCR clone 340247 (TRAV3, TRAJ42)
CAVRDRDYGGSQGNLTF

SEQ ID NO: 680494 - protein, 18 aa, Homo sapiens
  CDR3 for beta chain variable domain of TCR clone 340247 (TRBV20-1, TRBJ2-3)
CSASGLAGGPGTTDTQYF

SEQ ID NO: 680495 - protein, 13 aa, Homo sapiens
  CDR3 for alpha chain variable domain of TCR clone 340248 (TRAV12-1, TRAJ31)
CVVIPNNYARLMF

SEQ ID NO: 680496 - protein, 15 aa, Homo sapiens
  CDR3 for beta chain variable domain of TCR clone 340248 (TRBV6-3, TRBJ2-7)
CASSSPGTVFYEQYF

SEQ ID NO: 680497 - protein, 16 aa, Homo sapiens
  CDR3 for alpha chain variable domain of TCR clone 340249 (TRAV12-2, TRAJ32)
CAVNMNYGGATNKLIF

SEQ ID NO: 680498 - protein, 17 aa, Homo sapiens
  CDR3 for beta chain variable domain of TCR clone 340249 (TRBV7-3, TRBJ2-3)
CASSLMKRMRGADTQYF

SEQ ID NO: 680499 - protein, 13 aa, Homo sapiens
  CDR3 for alpha chain variable domain of TCR clone 340250 (TRAV13-1, TRAJ9)
CAARITGGFKTIF

SEQ ID NO: 680500 - protein, 15 aa, Homo sapiens
  CDR3 for beta chain variable domain of TCR clone 340250 (TRBV7-6, TRBJ2-7)
CASSLGGAEPYEQYF

SEQ ID NO: 680501 - protein, 13 aa, Homo sapiens
  CDR3 for alpha chain variable domain of TCR clone 340251 (TRAV13-1, TRAJ43)
CAASLSNNNDMRF

SEQ ID NO: 680502 - protein, 14 aa, Homo sapiens
  CDR3 for beta chain variable domain of TCR clone 340251 (TRBV5-1, TRBJ2-5)
CASSLAGKQKTQYF

SEQ ID NO: 680503 - protein, 13 aa, Homo sapiens
  CDR3 for alpha chain variable domain of TCR clone 340252 (TRAV1-1, TRAJ9)
CAAKNTGAFKTIF

SEQ ID NO: 680504 - protein, 13 aa, Homo sapiens
  CDR3 for beta chain variable domain of TCR clone 340252 (TRBV12-4, TRBJ1-5)
CASSPDRAQPQHF

SEQ ID NO: 680505 - protein, 15 aa, Homo sapiens
  CDR3 for alpha chain variable domain of TCR clone 340253 (TRAV1-2, TRAJ15)
CAVDVMGSAGAALIF

SEQ ID NO: 680506 - protein, 13 aa, Homo sapiens
  CDR3 for beta chain variable domain of TCR clone 340253 (TRBV20-1, TRBJ1-1)
CSAFDRENTEAFF

SEQ ID NO: 680507 - protein, 19 aa, Homo sapiens
  CDR3 for alpha chain variable domain of TCR clone 340254 (TRAV13-1, TRAJ52)
CAASPYQNDGGTSYGKLTF

SEQ ID NO: 680508 - protein, 15 aa, Homo sapiens
  CDR3 for beta chain variable domain of TCR clone 340254 (TRBV7-2, TRBJ2-1)
CASTHGTGIYNEQFF

SEQ ID NO: 680509 - protein, 13 aa, Homo sapiens
  CDR3 for alpha chain variable domain of TCR clone 340255 (TRAV1-1, TRAJ9)
CAAKNTGGFKPIF

SEQ ID NO: 680510 - protein, 12 aa, Homo sapiens
  CDR3 for beta chain variable domain of TCR clone 340255 (TRBV11-2, TRBJ2-2)
CAGSLGGGELFF

SEQ ID NO: 680511 - protein, 16 aa, Homo sapiens
  CDR3 for alpha chain variable domain of TCR clone 340256 (TRAV12-2, TRAJ52)
CRLANAGGTSYGKLTF

SEQ ID NO: 680512 - protein, 13 aa, Homo sapiens
  CDR3 for beta chain variable domain of TCR clone 340256 (TRBV10-3, TRBJ2-7)
CPSKLAVNYEQYF

SEQ ID NO: 680513 - protein, 15 aa, Homo sapiens
  CDR3 for alpha chain variable domain of TCR clone 340257 (TRAV35, TRAJ41)
CAGQLFSNSGYALNF

SEQ ID NO: 680514 - protein, 11 aa, Homo sapiens
  CDR3 for beta chain variable domain of TCR clone 340257 (TRBV11-2, TRBJ2-2)
CASSLPGELFF

SEQ ID NO: 680515 - protein, 14 aa, Homo sapiens
  CDR3 for alpha chain variable domain of TCR clone 340258 (TRAV12-2, TRAJ48)
CAVNAFFGNEKLTF

SEQ ID NO: 680516 - protein, 13 aa, Homo sapiens
  CDR3 for beta chain variable domain of TCR clone 340258 (TRBV28, TRBJ2-7)
CAGAKQGLDEQYF

SEQ ID NO: 680517 - protein, 14 aa, Homo sapiens
  CDR3 for alpha chain variable domain of TCR clone 340259 (TRAV12-2, TRAJ13)
CAVKKTGGYQQVTF

SEQ ID NO: 680518 - protein, 23 aa, Homo sapiens
  CDR3 for beta chain variable domain of TCR clone 340259 (TRBV4-2, TRBJ2-3)
CASSHDPPRASSISGGRGDTQYF

SEQ ID NO: 680519 - protein, 17 aa, Homo sapiens
  CDR3 for alpha chain variable domain of TCR clone 340260 (TRAV3, TRAJ6)
CAVRDGPRAGGSYIPTF

SEQ ID NO: 680520 - protein, 14 aa, Homo sapiens
  CDR3 for beta chain variable domain of TCR clone 340260 (TRBV11-2, TRBJ2-3)
CASSRLACTDTQYF

SEQ ID NO: 680521 - protein, 15 aa, Homo sapiens
  CDR3 for alpha chain variable domain of TCR clone 340261 (TRAV26-1, TRAJ40)
CIVRVTTSGTYKYIF

SEQ ID NO: 680522 - protein, 13 aa, Homo sapiens
  CDR3 for beta chain variable domain of TCR clone 340261 (TRBV10-3, TRBJ1-2)
CAINADLNYGYTF

SEQ ID NO: 680523 - protein, 22 aa, Homo sapiens
  CDR3 for alpha chain variable domain of TCR clone 340262 (TRAV12-2, TRAJ53)
CSSETPSPVIQPPRGSNYKLTF

SEQ ID NO: 680524 - protein, 17 aa, Homo sapiens
  CDR3 for beta chain variable domain of TCR clone 340262 (TRBV7-3, TRBJ2-3)
CASSLMKRMRGADTQYF

SEQ ID NO: 680525 - protein, 13 aa, Homo sapiens
  CDR3 for alpha chain variable domain of TCR clone 340263 (TRAV2, TRAJ40)
CAVVTSGTYKYIF

SEQ ID NO: 680526 - protein, 14 aa, Homo sapiens
  CDR3 for beta chain variable domain of TCR clone 340263 (TRBV5-1, TRBJ2-5)
CASSFGGSQETQYF

SEQ ID NO: 680527 - protein, 14 aa, Homo sapiens
  CDR3 for alpha chain variable domain of TCR clone 340264 (TRAV38-1, TRAJ45)
CAYYSGGGADGLTF

SEQ ID NO: 680528 - protein, 13 aa, Homo sapiens
  CDR3 for beta chain variable domain of TCR clone 340264 (TRBV14, TRBJ1-2)
CASSEDRRYGYTF

SEQ ID NO: 680529 - protein, 17 aa, Homo sapiens
  CDR3 for alpha chain variable domain of TCR clone 340265 (TRAV13-1, TRAJ31)
CAPRDRLMFGDGAQLVV

SEQ ID NO: 680530 - protein, 12 aa, Homo sapiens
  CDR3 for beta chain variable domain of TCR clone 340265 (TRBV7-9, TRBJ2-7)
CASSVEGYEQYF

SEQ ID NO: 680531 - protein, 15 aa, Homo sapiens
  CDR3 for alpha chain variable domain of TCR clone 340266 (TRAV12-1, TRAJ23)
CGERSRCNQGGKLIF

SEQ ID NO: 680532 - protein, 14 aa, Homo sapiens
  CDR3 for beta chain variable domain of TCR clone 340266 (TRBV18, TRBJ2-5)
CASSPGVSQETQYF

SEQ ID NO: 680533 - protein, 14 aa, Homo sapiens
  CDR3 for alpha chain variable domain of TCR clone 340267 (TRAV12-3, TRAJ10)
SHLPLTGGGNKITF

SEQ ID NO: 680534 - protein, 15 aa, Homo sapiens
  CDR3 for beta chain variable domain of TCR clone 340267 (TRBV10-2, TRBJ2-6)
CASSEQGTGANVLTF

SEQ ID NO: 680535 - protein, 13 aa, Homo sapiens
  CDR3 for alpha chain variable domain of TCR clone 340268 (TRAV8-3, TRAJ40)
CAVGAQYLRNLQI

SEQ ID NO: 680536 - protein, 12 aa, Homo sapiens
  CDR3 for beta chain variable domain of TCR clone 340268 (TRBV7-9, TRBJ2-7)
CASSVVSYEQYF

SEQ ID NO: 680537 - protein, 18 aa, Homo sapiens
  CDR3 for alpha chain variable domain of TCR clone 340269 (TRAV2, TRAJ32)
CCLLLCLHYGGATNKLIF

SEQ ID NO: 680538 - protein, 16 aa, Homo sapiens
  CDR3 for beta chain variable domain of TCR clone 340269 (TRBV7-9, TRBJ2-7)
CASSYPVREGGYEQYF

SEQ ID NO: 680539 - protein, 18 aa, Homo sapiens
  CDR3 for alpha chain variable domain of TCR clone 340270 (TRAV12-3, TRAJ52)
CAMSVGGAGGTSYGKLKF

SEQ ID NO: 680540 - protein, 13 aa, Homo sapiens
  CDR3 for beta chain variable domain of TCR clone 340270 (TRBV4-2, TRBJ1-1)
CASSQAGNTEAFF

SEQ ID NO: 680541 - protein, 16 aa, Homo sapiens
  CDR3 for alpha chain variable domain of TCR clone 340271 (TRAV3, TRAJ42)
CAVRDIEGGIQGNLIF

SEQ ID NO: 680542 - protein, 15 aa, Homo sapiens
  CDR3 for beta chain variable domain of TCR clone 340271 (TRBV9, TRBJ2-2)
CASSDFAGASGELFF

SEQ ID NO: 680543 - protein, 13 aa, Homo sapiens
  CDR3 for alpha chain variable domain of TCR clone 340272 (TRAV27, TRAJ45)
CRSSGGGADGLTF

SEQ ID NO: 680544 - protein, 12 aa, Homo sapiens
  CDR3 for beta chain variable domain of TCR clone 340272 (TRBV5-1, TRBJ2-7)
CASSLDSYEQYF

SEQ ID NO: 680545 - protein, 14 aa, Homo sapiens
  CDR3 for alpha chain variable domain of TCR clone 340273 (TRAV26-1, TRAJ49)
CIVRPSNTGTQFYF

SEQ ID NO: 680546 - protein, 15 aa, Homo sapiens
  CDR3 for beta chain variable domain of TCR clone 340273 (TRBV19, TRBJ1-1)
CASMGFRDVNTEAFF

SEQ ID NO: 680547 - protein, 14 aa, Homo sapiens
  CDR3 for alpha chain variable domain of TCR clone 340274 (TRAV8-3, TRAJ12)
CAVGARDSSYKLIF

SEQ ID NO: 680548 - protein, 15 aa, Homo sapiens
  CDR3 for beta chain variable domain of TCR clone 340274 (TRBV5-7, TRBJ1-5)
CASSYGKLWDQPQHF

SEQ ID NO: 680549 - protein, 15 aa, Homo sapiens
  CDR3 for alpha chain variable domain of TCR clone 340275 (TRAV17, TRAJ16)
CATALRFSDGQKLLF

SEQ ID NO: 680550 - protein, 15 aa, Homo sapiens
  CDR3 for beta chain variable domain of TCR clone 340275 (TRBV20-1, TRBJ1-1)
CSASRGMTGNTEAFF

SEQ ID NO: 680551 - protein, 12 aa, Homo sapiens
  CDR3 for alpha chain variable domain of TCR clone 340276 (TRAV29/DV5, TRAJ15)
CASNQAGSALIF

SEQ ID NO: 680552 - protein, 15 aa, Homo sapiens
  CDR3 for beta chain variable domain of TCR clone 340276 (TRBV11-2, TRBJ2-2)
CASSSDRVNAGELFF

SEQ ID NO: 680553 - protein, 14 aa, Homo sapiens
  CDR3 for alpha chain variable domain of TCR clone 340277 (TRAV9-2, TRAJ39)
CALYIYNAGNMLTF

SEQ ID NO: 680554 - protein, 16 aa, Homo sapiens
  CDR3 for beta chain variable domain of TCR clone 340277 (TRBV12-4, TRBJ2-1)
CASSFFSGRFYNEQFF

SEQ ID NO: 680555 - protein, 12 aa, Homo sapiens
  CDR3 for alpha chain variable domain of TCR clone 340278 (TRAV16, TRAJ27)
CALNHQCRQINL

SEQ ID NO: 680556 - protein, 14 aa, Homo sapiens
  CDR3 for beta chain variable domain of TCR clone 340278 (TRBV11-2, TRBJ1-5)
CASSLDRGRQPQYF

SEQ ID NO: 680557 - protein, 15 aa, Homo sapiens
  CDR3 for alpha chain variable domain of TCR clone 340279 (TRAV4, TRAJ10)
CLVGDGSGGGNKLAF

SEQ ID NO: 680558 - protein, 11 aa, Homo sapiens
  CDR3 for beta chain variable domain of TCR clone 340279 (TRBV5-1, TRBJ2-2)
CASSPSRCEHR

SEQ ID NO: 680559 - protein, 14 aa, Homo sapiens
  CDR3 for alpha chain variable domain of TCR clone 340280 (TRAV12-2, TRAJ45)
CAVNIGGGADGLTF

SEQ ID NO: 680560 - protein, 16 aa, Homo sapiens
  CDR3 for beta chain variable domain of TCR clone 340280 (TRBV2, TRBJ2-3)
CQHRGAPRRWTDTQYF

SEQ ID NO: 680561 - protein, 11 aa, Homo sapiens
  CDR3 for alpha chain variable domain of TCR clone 340281 (TRAV2, TRAJ13)
CASGGYQKVTF

SEQ ID NO: 680562 - protein, 15 aa, Homo sapiens
  CDR3 for beta chain variable domain of TCR clone 340281 (TRBV18, TRBJ1-5)
CASSETGGNNQPQHF

SEQ ID NO: 680563 - protein, 16 aa, Homo sapiens
  CDR3 for alpha chain variable domain of TCR clone 340282 (TRAV29/DV5, TRAJ36)
CAASAGVETGANNLFF

SEQ ID NO: 680564 - protein, 17 aa, Homo sapiens
  CDR3 for beta chain variable domain of TCR clone 340282 (TRBV24-1, TRBJ2-1)
CATSDVSTSGTYNEQFF

SEQ ID NO: 680565 - protein, 13 aa, Homo sapiens
  CDR3 for alpha chain variable domain of TCR clone 340283 (TRAV13-2, TRAJ13)
CAERPGGYQTVTF

SEQ ID NO: 680566 - protein, 15 aa, Homo sapiens
  CDR3 for beta chain variable domain of TCR clone 340283 (TRBV11-3, TRBJ2-7)
CASSPGPASSDEQYF

SEQ ID NO: 680567 - protein, 11 aa, Homo sapiens
  CDR3 for alpha chain variable domain of TCR clone 340284 (TRAV3, TRAJ21)
CAVGNFNKFYF

SEQ ID NO: 680568 - protein, 17 aa, Homo sapiens
  CDR3 for beta chain variable domain of TCR clone 340284 (TRBV5-1, TRBJ2-5)
CASAVTRQFWNKETQYF

SEQ ID NO: 680569 - protein, 16 aa, Homo sapiens
  CDR3 for alpha chain variable domain of TCR clone 340285 (TRAV26-1, TRAJ37)
CIVRGDGSGNTGKLIF

SEQ ID NO: 680570 - protein, 13 aa, Homo sapiens
  CDR3 for beta chain variable domain of TCR clone 340285 (TRBV7-9, TRBJ1-2)
CASSPKTGYGYTF

SEQ ID NO: 680571 - protein, 15 aa, Homo sapiens
  CDR3 for alpha chain variable domain of TCR clone 340286 (TRAV26-1, TRAJ21)
CIVRVPNYNFNKFYF

SEQ ID NO: 680572 - protein, 13 aa, Homo sapiens
  CDR3 for beta chain variable domain of TCR clone 340286 (TRBV7-9, TRBJ2-3)
CASSPGSTDTQYF

SEQ ID NO: 680573 - protein, 14 aa, Homo sapiens
  CDR3 for alpha chain variable domain of TCR clone 340287 (TRAV26-1, TRAJ34)
CIVRVAYNTAKLIF

SEQ ID NO: 680574 - protein, 15 aa, Homo sapiens
  CDR3 for beta chain variable domain of TCR clone 340287 (TRBV20-1, TRBJ2-7)
CSARVPAAYFHEQYF

SEQ ID NO: 680575 - protein, 11 aa, Homo sapiens
  CDR3 for alpha chain variable domain of TCR clone 340288 (TRAV12-3, TRAJ49)
CAMSSGNQFYF

SEQ ID NO: 680576 - protein, 17 aa, Homo sapiens
  CDR3 for beta chain variable domain of TCR clone 340288 (TRBV5-7, TRBJ2-7)
CASSLWRVLAGSYEQCF

SEQ ID NO: 680577 - protein, 15 aa, Homo sapiens
  CDR3 for alpha chain variable domain of TCR clone 340289 (TRAV8-3, TRAJ45)
CASSYSGGGADGLTF

SEQ ID NO: 680578 - protein, 19 aa, Homo sapiens
  CDR3 for beta chain variable domain of TCR clone 340289 (TRBV3-1, TRBJ2-2)
CASSQGGIFRTGYTGELFF

SEQ ID NO: 680579 - protein, 14 aa, Homo sapiens
  CDR3 for alpha chain variable domain of TCR clone 340290 (TRAV4, TRAJ9)
CLVGSGTGCFKTIF

SEQ ID NO: 680580 - protein, 15 aa, Homo sapiens
  CDR3 for beta chain variable domain of TCR clone 340290 (TRBV7-2, TRBJ2-1)
CASSLASGRVNEQFF

SEQ ID NO: 680581 - protein, 13 aa, Homo sapiens
  CDR3 for alpha chain variable domain of TCR clone 340291 (TRAV1-2, TRAJ12)
CAAWMDSSYKLIF

SEQ ID NO: 680582 - protein, 16 aa, Homo sapiens
  CDR3 for beta chain variable domain of TCR clone 340291 (TRBV12-4, TRBJ1-5)
CASSRPVGGSNQPQHF

SEQ ID NO: 680583 - protein, 13 aa, Homo sapiens
  CDR3 for alpha chain variable domain of TCR clone 340292 (TRAV38-1, TRAJ42)
CARWGGSHGNLIF

SEQ ID NO: 680584 - protein, 14 aa, Homo sapiens
  CDR3 for beta chain variable domain of TCR clone 340292 (TRBV6-1, TRBJ1-3)
CASVQGGGGNTIYF

SEQ ID NO: 680585 - protein, 14 aa, Homo sapiens
  CDR3 for alpha chain variable domain of TCR clone 340293 (TRAV1-2, TRAJ16)
CAVRSASDGQKLLF

SEQ ID NO: 680586 - protein, 15 aa, Homo sapiens
  CDR3 for beta chain variable domain of TCR clone 340293 (TRBV4-1, TRBJ1-4)
CASSDTGGTNEKLFF

SEQ ID NO: 680587 - protein, 15 aa, Homo sapiens
  CDR3 for alpha chain variable domain of TCR clone 340294 (TRAV35, TRAJ50)
CAGQLRKTSYDKVIF

SEQ ID NO: 680588 - protein, 14 aa, Homo sapiens
  CDR3 for beta chain variable domain of TCR clone 340294 (TRBV7-3, TRBJ1-1)
CASSLKGGNTEAFF

SEQ ID NO: 680589 - protein, 15 aa, Homo sapiens
  CDR3 for alpha chain variable domain of TCR clone 340295 (TRAV8-4, TRAJ8)
CAVSDLNTGFQKLVF

SEQ ID NO: 680590 - protein, 15 aa, Homo sapiens
  CDR3 for beta chain variable domain of TCR clone 340295 (TRBV20-1, TRBJ2-5)
CSAEGTGGLQETQYF

SEQ ID NO: 680591 - protein, 13 aa, Homo sapiens
  CDR3 for alpha chain variable domain of TCR clone 340296 (TRAV3, TRAJ31)
CAVREGNNARLIF

SEQ ID NO: 680592 - protein, 15 aa, Homo sapiens
  CDR3 for beta chain variable domain of TCR clone 340296 (TRBV6-1, TRBJ1-1)
CASRTPGQLNTEAFF

SEQ ID NO: 680593 - protein, 12 aa, Homo sapiens
  CDR3 for alpha chain variable domain of TCR clone 340297 (TRAV8-3, TRAJ41)
CAVGALGYALNF

SEQ ID NO: 680594 - protein, 16 aa, Homo sapiens
  CDR3 for beta chain variable domain of TCR clone 340297 (TRBV7-6, TRBJ2-3)
CASSDSRGEGSDTQYF

SEQ ID NO: 680595 - protein, 15 aa, Homo sapiens
  CDR3 for alpha chain variable domain of TCR clone 340298 (TRAV16, TRAJ48)
CALFISNFGNEKLTF

SEQ ID NO: 680596 - protein, 14 aa, Homo sapiens
  CDR3 for beta chain variable domain of TCR clone 340298 (TRBV18, TRBJ2-7)
CASSPRGGAYEQYF

SEQ ID NO: 680597 - protein, 10 aa, Homo sapiens
  CDR3 for alpha chain variable domain of TCR clone 340299 (TRAV23/DV6, TRAJ43)
CAAAVAALEQ

SEQ ID NO: 680598 - protein, 13 aa, Homo sapiens
  CDR3 for beta chain variable domain of TCR clone 340299 (TRBV12-4, TRBJ1-2)
CARSLRQGKGYTF

SEQ ID NO: 680599 - protein, 13 aa, Homo sapiens
  CDR3 for alpha chain variable domain of TCR clone 340300 (TRAV1-2, TRAJ9)
CAALNTGGFKTIF

SEQ ID NO: 680600 - protein, 13 aa, Homo sapiens
  CDR3 for beta chain variable domain of TCR clone 340300 (TRBV20-1, TRBJ1-1)
CSARVGGNTEAFF

SEQ ID NO: 680601 - protein, 14 aa, Homo sapiens
  CDR3 for alpha chain variable domain of TCR clone 340301 (TRAV1-2, TRAJ16)
CAVNRFSDGQKLLF

SEQ ID NO: 680602 - protein, 14 aa, Homo sapiens
  CDR3 for beta chain variable domain of TCR clone 340301 (TRBV7-8, TRBJ2-7)
CASSLRGSSYEQYF

SEQ ID NO: 680603 - protein, 14 aa, Homo sapiens
  CDR3 for alpha chain variable domain of TCR clone 340302 (TRAV35, TRAJ33)
CAGSSQDSNYQLIW

SEQ ID NO: 680604 - protein, 15 aa, Homo sapiens
  CDR3 for beta chain variable domain of TCR clone 340302 (TRBV28, TRBJ2-1)
CASSGLAEVDNEQFF

SEQ ID NO: 680605 - protein, 12 aa, Homo sapiens
  CDR3 for alpha chain variable domain of TCR clone 340303 (TRAV36/DV7, TRAJ54)
CAVVRGAQKLVF

SEQ ID NO: 680606 - protein, 14 aa, Homo sapiens
  CDR3 for beta chain variable domain of TCR clone 340303 (TRBV7-3, TRBJ2-3)
CASSLGTVTDTQYF

SEQ ID NO: 680607 - protein, 15 aa, Homo sapiens
  CDR3 for alpha chain variable domain of TCR clone 340304 (TRAV10, TRAJ22)
CVVRISSGSARQLTF

SEQ ID NO: 680608 - protein, 13 aa, Homo sapiens
  CDR3 for beta chain variable domain of TCR clone 340304 (TRBV15, TRBJ1-1)
CATSRGIQARAFF

SEQ ID NO: 680609 - protein, 14 aa, Homo sapiens
  CDR3 for alpha chain variable domain of TCR clone 340305 (TRAV1-2, TRAJ16)
CAVNRFSDGQKLLF

SEQ ID NO: 680610 - protein, 16 aa, Homo sapiens
  CDR3 for beta chain variable domain of TCR clone 340305 (TRBV28, TRBJ2-4)
CAGSLIQGSLGNIQYF

SEQ ID NO: 680611 - protein, 16 aa, Homo sapiens
  CDR3 for alpha chain variable domain of TCR clone 340306 (TRAV12-2, TRAJ52)
CRVANAGGTSYGKLTF

SEQ ID NO: 680612 - protein, 13 aa, Homo sapiens
  CDR3 for beta chain variable domain of TCR clone 340306 (TRBV10-3, TRBJ2-7)
CASKLAVNYEQYF

SEQ ID NO: 680613 - protein, 17 aa, Homo sapiens
  CDR3 for alpha chain variable domain of TCR clone 340307 (TRAV13-2, TRAJ43)
CLLFAEIPTYNNNDMRF

SEQ ID NO: 680614 - protein, 15 aa, Homo sapiens
  CDR3 for beta chain variable domain of TCR clone 340307 (TRBV7-9, TRBJ2-2)
CASGPLDTFPGELFF

SEQ ID NO: 680615 - protein, 14 aa, Homo sapiens
  CDR3 for alpha chain variable domain of TCR clone 340308 (TRAV17, TRAJ53)
CATDAGGSNYKLTF

SEQ ID NO: 680616 - protein, 13 aa, Homo sapiens
  CDR3 for beta chain variable domain of TCR clone 340308 (TRBV7-3, TRBJ2-5)
CASSFRGGETQYF

SEQ ID NO: 680617 - protein, 17 aa, Homo sapiens
  CDR3 for alpha chain variable domain of TCR clone 340309 (TRAV8-1, TRAJ43)
CAVTNDMRFGAGTRLTV

SEQ ID NO: 680618 - protein, 17 aa, Homo sapiens
  CDR3 for beta chain variable domain of TCR clone 340309 (TRBV5-4, TRBJ2-1)
CASSSAGGRGPYNEQSF

SEQ ID NO: 680619 - protein, 12 aa, Homo sapiens
  CDR3 for alpha chain variable domain of TCR clone 340310 (TRAV13-2, TRAJ23)
CAERHRGGKLIF

SEQ ID NO: 680620 - protein, 15 aa, Homo sapiens
  CDR3 for beta chain variable domain of TCR clone 340310 (TRBV5-1, TRBJ2-7)
CASSLMTSGGNEQYF

SEQ ID NO: 680621 - protein, 12 aa, Homo sapiens
  CDR3 for alpha chain variable domain of TCR clone 340311 (TRAV29/DV5, TRAJ43)
CAALYNNNDMRF

SEQ ID NO: 680622 - protein, 15 aa, Homo sapiens
  CDR3 for beta chain variable domain of TCR clone 340311 (TRBV5-1, TRBJ2-3)
CASSVTSGSTDTQYF

SEQ ID NO: 680623 - protein, 16 aa, Homo sapiens
  CDR3 for alpha chain variable domain of TCR clone 340312 (TRAV13-2, TRAJ32)
CAENMNYGGATNKLIF

SEQ ID NO: 680624 - protein, 14 aa, Homo sapiens
  CDR3 for beta chain variable domain of TCR clone 340312 (TRBV15, TRBJ2-5)
CATSSTGYHETQYF

SEQ ID NO: 680625 - protein, 14 aa, Homo sapiens
  CDR3 for alpha chain variable domain of TCR clone 340313 (TRAV1-2, TRAJ16)
CAANRFSDGQKLLF

SEQ ID NO: 680626 - protein, 14 aa, Homo sapiens
  CDR3 for beta chain variable domain of TCR clone 340313 (TRBV7-2, TRBJ2-5)
CASSPRGSSETQYF

SEQ ID NO: 680627 - protein, 13 aa, Homo sapiens
  CDR3 for alpha chain variable domain of TCR clone 340314 (TRAV21, TRAJ57)
CAVTQGGSEKLVF

SEQ ID NO: 680628 - protein, 16 aa, Homo sapiens
  CDR3 for beta chain variable domain of TCR clone 340314 (TRBV28, TRBJ2-1)
CASSSPEYPRDNEQFF

SEQ ID NO: 680629 - protein, 16 aa, Homo sapiens
  CDR3 for alpha chain variable domain of TCR clone 340315 (TRAV3, TRAJ3)
CSVRDRAKSSASKIIF

SEQ ID NO: 680630 - protein, 16 aa, Homo sapiens
  CDR3 for beta chain variable domain of TCR clone 340315 (TRBV20-1, TRBJ2-4)
CSATSLAELAKNIQYF

SEQ ID NO: 680631 - protein, 13 aa, Homo sapiens
  CDR3 for alpha chain variable domain of TCR clone 340316 (TRAV27, TRAJ6)
CAGGTRGSYIPTF

SEQ ID NO: 680632 - protein, 13 aa, Homo sapiens
  CDR3 for beta chain variable domain of TCR clone 340316 (TRBV20-1, TRBJ1-2)
CSATGIQGSGYTF

SEQ ID NO: 680633 - protein, 16 aa, Homo sapiens
  CDR3 for alpha chain variable domain of TCR clone 340317 (TRAV23/DV6, TRAJ9)
CAASIGGNTGGFKTTF

SEQ ID NO: 680634 - protein, 15 aa, Homo sapiens
  CDR3 for beta chain variable domain of TCR clone 340317 (TRBV20-1, TRBJ1-1)
CSASRGVTGNTEAFF

SEQ ID NO: 680635 - protein, 13 aa, Homo sapiens
  CDR3 for alpha chain variable domain of TCR clone 340318 (TRAV8-6, TRAJ49)
CAVITNSGNQFYF

SEQ ID NO: 680636 - protein, 12 aa, Homo sapiens
  CDR3 for beta chain variable domain of TCR clone 340318 (TRBV11-2, TRBJ2-2)
CASSLGGGELFF

SEQ ID NO: 680637 - protein, 14 aa, Homo sapiens
  CDR3 for alpha chain variable domain of TCR clone 340319 (TRAV12-3, TRAJ15)
CAMIPPQAGTALIF

SEQ ID NO: 680638 - protein, 19 aa, Homo sapiens
  CDR3 for beta chain variable domain of TCR clone 340319 (TRBV7-2, TRBJ2-3)
CASSFLSRNWGGGTDTQYF

SEQ ID NO: 680639 - protein, 12 aa, Homo sapiens
  CDR3 for alpha chain variable domain of TCR clone 340320 (TRAV16, TRAJ10)
CSRTGGGNKLTF

SEQ ID NO: 680640 - protein, 16 aa, Homo sapiens
  CDR3 for beta chain variable domain of TCR clone 340320 (TRBV7-2, TRBJ2-1)
CASSLVAGAGYNEQFF

SEQ ID NO: 680641 - protein, 13 aa, Homo sapiens
  CDR3 for alpha chain variable domain of TCR clone 340321 (TRAV1-2, TRAJ9)
CAALNTGGFKTIF

SEQ ID NO: 680642 - protein, 15 aa, Homo sapiens
  CDR3 for beta chain variable domain of TCR clone 340321 (TRBV6-3, TRBJ2-7)
CASSSPGTGFYEQYF

SEQ ID NO: 680643 - protein, 12 aa, Homo sapiens
  CDR3 for alpha chain variable domain of TCR clone 340322 (TRAV12-3, TRAJ5)
CAMDTGRRALTF

SEQ ID NO: 680644 - protein, 16 aa, Homo sapiens
  CDR3 for beta chain variable domain of TCR clone 340322 (TRBV5-1, TRBJ2-2)
CASSLWDTTNTGELFF

SEQ ID NO: 680645 - protein, 15 aa, Homo sapiens
  CDR3 for alpha chain variable domain of TCR clone 340323 (TRAV3, TRAJ22)
CAVRDRGGSARQLTF

SEQ ID NO: 680646 - protein, 15 aa, Homo sapiens
  CDR3 for beta chain variable domain of TCR clone 340323 (TRBV7-9, TRBJ1-4)
CDSSRTGGFNEKLFF

SEQ ID NO: 680647 - protein, 14 aa, Homo sapiens
  CDR3 for alpha chain variable domain of TCR clone 340324 (TRAV4, TRAJ26)
CLVGPHNYGQNFVF

SEQ ID NO: 680648 - protein, 15 aa, Homo sapiens
  CDR3 for beta chain variable domain of TCR clone 340324 (TRBV15, TRBJ2-3)
CATSGAGFGTDTQYF

SEQ ID NO: 680649 - protein, 15 aa, Homo sapiens
  CDR3 for alpha chain variable domain of TCR clone 340325 (TRAV21, TRAJ53)
CATLNSGGSNYKLTF

SEQ ID NO: 680650 - protein, 13 aa, Homo sapiens
  CDR3 for beta chain variable domain of TCR clone 340325 (TRBV24-1, TRBJ2-1)
CATSRGARNEQFF

SEQ ID NO: 680651 - protein, 15 aa, Homo sapiens
  CDR3 for alpha chain variable domain of TCR clone 340326 (TRAV39, TRAJ32)
CAVGMEGGATNKLIF

SEQ ID NO: 680652 - protein, 17 aa, Homo sapiens
  CDR3 for beta chain variable domain of TCR clone 340326 (TRBV7-2, TRBJ1-4)
CASSFKAGPTTNEKLFF

SEQ ID NO: 680653 - protein, 11 aa, Homo sapiens
  CDR3 for alpha chain variable domain of TCR clone 340327 (TRAV13-1, TRAJ39)
CASHAVNMLTF

SEQ ID NO: 680654 - protein, 14 aa, Homo sapiens
  CDR3 for beta chain variable domain of TCR clone 340327 (TRBV11-2, TRBJ1-5)
CASSLDRGRQTQHF

SEQ ID NO: 680655 - protein, 12 aa, Homo sapiens
  CDR3 for alpha chain variable domain of TCR clone 340328 (TRAV3, TRAJ43)
CAVRDPINDMRF

SEQ ID NO: 680656 - protein, 15 aa, Homo sapiens
  CDR3 for beta chain variable domain of TCR clone 340328 (TRBV27, TRBJ1-5)
CASSLGTGFDQPQHF

SEQ ID NO: 680657 - protein, 17 aa, Homo sapiens
  CDR3 for alpha chain variable domain of TCR clone 340329 (TRAV13-1, TRAJ28)
CAASPPYSGAGSYQLTF

SEQ ID NO: 680658 - protein, 14 aa, Homo sapiens
  CDR3 for beta chain variable domain of TCR clone 340329 (TRBV15, TRBJ2-3)
CATRSGTSTDTQYF

SEQ ID NO: 680659 - protein, 13 aa, Homo sapiens
  CDR3 for alpha chain variable domain of TCR clone 340330 (TRAV20, TRAJ26)
CAVPTSYVQNFVF

SEQ ID NO: 680660 - protein, 16 aa, Homo sapiens
  CDR3 for beta chain variable domain of TCR clone 340330 (TRBV28, TRBJ2-7)
CASSSPQGRDVYEQYF

SEQ ID NO: 680661 - protein, 14 aa, Homo sapiens
  CDR3 for alpha chain variable domain of TCR clone 340331 (TRAV2, TRAJ9)
CAVEDRSGGFKTIF

SEQ ID NO: 680662 - protein, 14 aa, Homo sapiens
  CDR3 for beta chain variable domain of TCR clone 340331 (TRBV4-2, TRBJ2-1)
CASGLNRAYNEQFF

SEQ ID NO: 680663 - protein, 18 aa, Homo sapiens
  CDR3 for alpha chain variable domain of TCR clone 340332 (TRAV26-2, TRAJ45)
CILRVDKYSGGGADGHTF

SEQ ID NO: 680664 - protein, 17 aa, Homo sapiens
  CDR3 for beta chain variable domain of TCR clone 340332 (TRBV25-1, TRBJ2-1)
CASSAYGQGRGVYEQFF

SEQ ID NO: 680665 - protein, 15 aa, Homo sapiens
  CDR3 for alpha chain variable domain of TCR clone 340333 (TRAV26-2, TRAJ13)
CILRDLSGGYQKVTF

SEQ ID NO: 680666 - protein, 15 aa, Homo sapiens
  CDR3 for beta chain variable domain of TCR clone 340333 (TRBV28, TRBJ1-3)
CASSMGWASGNTIYF

SEQ ID NO: 680667 - protein, 13 aa, Homo sapiens
  CDR3 for alpha chain variable domain of TCR clone 340334 (TRAV26-1, TRAJ33)
CIVRVEGNYQLIW

SEQ ID NO: 680668 - protein, 16 aa, Homo sapiens
  CDR3 for beta chain variable domain of TCR clone 340334 (TRBV15, TRBJ2-7)
CATSRGRGRRRGEQYF

SEQ ID NO: 680669 - protein, 12 aa, Homo sapiens
  CDR3 for alpha chain variable domain of TCR clone 340335 (TRAV30, TRAJ31)
CCTAKHNARLMF

SEQ ID NO: 680670 - protein, 15 aa, Homo sapiens
  CDR3 for beta chain variable domain of TCR clone 340335 (TRBV7-2, TRBJ2-1)
CASSPLAGEYNEQFF

SEQ ID NO: 680671 - protein, 12 aa, Homo sapiens
  CDR3 for alpha chain variable domain of TCR clone 340336 (TRAV30, TRAJ43)
CGTEERGNDMRF

SEQ ID NO: 680672 - protein, 13 aa, Homo sapiens
  CDR3 for beta chain variable domain of TCR clone 340336 (TRBV7-9, TRBJ2-3)
CASSPGSTDAQYF

SEQ ID NO: 680673 - protein, 13 aa, Homo sapiens
  CDR3 for alpha chain variable domain of TCR clone 340337 (TRAV3, TRAJ15)
CAVRDQAGTALIF

SEQ ID NO: 680674 - protein, 14 aa, Homo sapiens
  CDR3 for beta chain variable domain of TCR clone 340337 (TRBV25-1, TRBJ1-1)
CASTHLGGNTEAFF

SEQ ID NO: 680675 - protein, 13 aa, Homo sapiens
  CDR3 for alpha chain variable domain of TCR clone 340338 (TRAV20, TRAJ15)
CATINQAGNALIF

SEQ ID NO: 680676 - protein, 13 aa, Homo sapiens
  CDR3 for beta chain variable domain of TCR clone 340338 (TRBV12-4, TRBJ2-1)
CASRQPSNNEQFF

SEQ ID NO: 680677 - protein, 14 aa, Homo sapiens
  CDR3 for alpha chain variable domain of TCR clone 340339 (TRAV12-2, TRAJ44)
CAVNKAGTASKLTF

SEQ ID NO: 680678 - protein, 12 aa, Homo sapiens
  CDR3 for beta chain variable domain of TCR clone 340339 (TRBV19, TRBJ1-4)
CASKDWPGGLYF

SEQ ID NO: 680679 - protein, 12 aa, Homo sapiens
  CDR3 for alpha chain variable domain of TCR clone 340340 (TRAV2, TRAJ33)
CAVWGSNYQLVW

SEQ ID NO: 680680 - protein, 16 aa, Homo sapiens
  CDR3 for beta chain variable domain of TCR clone 340340 (TRBV20-1, TRBJ1-4)
CSAPGQGLLTNEKLFF

SEQ ID NO: 680681 - protein, 12 aa, Homo sapiens
  CDR3 for alpha chain variable domain of TCR clone 340341 (TRAV12-2, TRAJ10)
WGVTGGGKKLTF

SEQ ID NO: 680682 - protein, 16 aa, Homo sapiens
  CDR3 for beta chain variable domain of TCR clone 340341 (TRBV6-4, TRBJ1-2)
CASSEAVGDPNYGYTF

SEQ ID NO: 680683 - protein, 17 aa, Homo sapiens
  CDR3 for alpha chain variable domain of TCR clone 340342 (TRAV4, TRAJ13)
CLVGVQGSSGGYQNFTF

SEQ ID NO: 680684 - protein, 13 aa, Homo sapiens
  CDR3 for beta chain variable domain of TCR clone 340342 (TRBV10-3, TRBJ2-7)
CASKLAVNYEQYF

SEQ ID NO: 680685 - protein, 14 aa, Homo sapiens
  CDR3 for alpha chain variable domain of TCR clone 340343 (TRAV17, TRAJ22)
CATSPSGSARQLTF

SEQ ID NO: 680686 - protein, 15 aa, Homo sapiens
  CDR3 for beta chain variable domain of TCR clone 340343 (TRBV4-1, TRBJ2-5)
CANSQWDLYQETQYF

SEQ ID NO: 680687 - protein, 15 aa, Homo sapiens
  CDR3 for alpha chain variable domain of TCR clone 340344 (TRAV4, TRAJ4)
CLVGPLSGGYNKLIF

SEQ ID NO: 680688 - protein, 17 aa, Homo sapiens
  CDR3 for beta chain variable domain of TCR clone 340344 (TRBV7-8, TRBJ2-6)
CASSAGTGGAGANVLTF

SEQ ID NO: 680689 - protein, 13 aa, Homo sapiens
  CDR3 for alpha chain variable domain of TCR clone 340345 (TRAV2, TRAJ27)
CAVEAPMQANQPL

SEQ ID NO: 680690 - protein, 13 aa, Homo sapiens
  CDR3 for beta chain variable domain of TCR clone 340345 (TRBV10-2, TRBJ2-3)
CGSSESGDHTQYF

SEQ ID NO: 680691 - protein, 13 aa, Homo sapiens
  CDR3 for alpha chain variable domain of TCR clone 340346 (TRAV8-3, TRAJ4)
WVFYSGGYNKLIF

SEQ ID NO: 680692 - protein, 14 aa, Homo sapiens
  CDR3 for beta chain variable domain of TCR clone 340346 (TRBV7-9, TRBJ2-3)
CASSLEDGTDTKHF

SEQ ID NO: 680693 - protein, 10 aa, Homo sapiens
  CDR3 for alpha chain variable domain of TCR clone 340347 (TRAV12-1, TRAJ37)
ARGNTGKLIF

SEQ ID NO: 680694 - protein, 15 aa, Homo sapiens
  CDR3 for beta chain variable domain of TCR clone 340347 (TRBV7-2, TRBJ2-3)
CASSLEQGGIDTQYF

SEQ ID NO: 680695 - protein, 15 aa, Homo sapiens
  CDR3 for alpha chain variable domain of TCR clone 340348 (TRAV17, TRAJ57)
CATGPSQGGSEKLVF

SEQ ID NO: 680696 - protein, 16 aa, Homo sapiens
  CDR3 for beta chain variable domain of TCR clone 340348 (TRBV12-4, TRBJ1-5)
CARSRPVGGSNQPQLF

SEQ ID NO: 680697 - protein, 12 aa, Homo sapiens
  CDR3 for alpha chain variable domain of TCR clone 340349 (TRAV8-3, TRAJ26)
CAGDNYGQDFVF

SEQ ID NO: 680698 - protein, 13 aa, Homo sapiens
  CDR3 for beta chain variable domain of TCR clone 340349 (TRBV20-1, TRBJ1-1)
CSAPLGGGTEAFF

SEQ ID NO: 680699 - protein, 15 aa, Homo sapiens
  CDR3 for alpha chain variable domain of TCR clone 340350 (TRAV26-1, TRAJ22)
CIVRVSFWFCKATDL

SEQ ID NO: 680700 - protein, 13 aa, Homo sapiens
  CDR3 for beta chain variable domain of TCR clone 340350 (TRBV18, TRBJ2-5)
CASSPAGKETQYF

SEQ ID NO: 680701 - protein, 14 aa, Homo sapiens
  CDR3 for alpha chain variable domain of TCR clone 340351 (TRAV13-1, TRAJ44)
CAAKATGTASKLTF

SEQ ID NO: 680702 - protein, 13 aa, Homo sapiens
  CDR3 for beta chain variable domain of TCR clone 340351 (TRBV28, TRBJ2-5)
CASSFAGGETQYF

SEQ ID NO: 680703 - protein, 14 aa, Homo sapiens
  CDR3 for alpha chain variable domain of TCR clone 340352 (TRAV20, TRAJ37)
CAVQSSSNTGKLIF

SEQ ID NO: 680704 - protein, 13 aa, Homo sapiens
  CDR3 for beta chain variable domain of TCR clone 340352 (TRBV19, TRBJ1-2)
CASSQGQVYGYTF

SEQ ID NO: 680705 - protein, 17 aa, Homo sapiens
  CDR3 for alpha chain variable domain of TCR clone 340353 (TRAV3, TRAJ6)
CAVRDGPRAGGSYIPTF

SEQ ID NO: 680706 - protein, 16 aa, Homo sapiens
  CDR3 for beta chain variable domain of TCR clone 340353 (TRBV7-9, TRBJ2-5)
CASSPSGQGVKGTQYF

SEQ ID NO: 680707 - protein, 12 aa, Homo sapiens
  CDR3 for alpha chain variable domain of TCR clone 340354 (TRAV1-2, TRAJ40)
TSVVPGTYKYIF

SEQ ID NO: 680708 - protein, 16 aa, Homo sapiens
  CDR3 for beta chain variable domain of TCR clone 340354 (TRBV29-1, TRBJ2-7)
CSVEVVGTSGSYEQYF

SEQ ID NO: 680709 - protein, 13 aa, Homo sapiens
  CDR3 for alpha chain variable domain of TCR clone 340355 (TRAV25, TRAJ54)
CAGTIQGAQKLVF

SEQ ID NO: 680710 - protein, 15 aa, Homo sapiens
  CDR3 for beta chain variable domain of TCR clone 340355 (TRBV19, TRBJ1-5)
CASSMLTGENQPQHF

SEQ ID NO: 680711 - protein, 12 aa, Homo sapiens
  CDR3 for alpha chain variable domain of TCR clone 340356 (TRAV35, TRAJ30)
CAGQLADDKIIF

SEQ ID NO: 680712 - protein, 17 aa, Homo sapiens
  CDR3 for beta chain variable domain of TCR clone 340356 (TRBV4-2, TRBJ2-3)
CASSPGRWRNFQETQYF

SEQ ID NO: 680713 - protein, 15 aa, Homo sapiens
  CDR3 for alpha chain variable domain of TCR clone 340357 (TRAV26-1, TRAJ39)
CIVRVARNAGNLLTF

SEQ ID NO: 680714 - protein, 16 aa, Homo sapiens
  CDR3 for beta chain variable domain of TCR clone 340357 (TRBV5-1, TRBJ2-1)
CASSLTLAGGRNEQFF

SEQ ID NO: 680715 - protein, 14 aa, Homo sapiens
  CDR3 for alpha chain variable domain of TCR clone 340358 (TRAV9-2, TRAJ39)
CALYIYNAGNMLTF

SEQ ID NO: 680716 - protein, 15 aa, Homo sapiens
  CDR3 for beta chain variable domain of TCR clone 340358 (TRBV5-1, TRBJ2-1)
CASSTPRAPYNEQFF

SEQ ID NO: 680717 - protein, 16 aa, Homo sapiens
  CDR3 for alpha chain variable domain of TCR clone 340359 (TRAV26-1, TRAJ23)
CIVRVERYNQGGKLIF

SEQ ID NO: 680718 - protein, 14 aa, Homo sapiens
  CDR3 for beta chain variable domain of TCR clone 340359 (TRBV20-1, TRBJ2-7)
CSAKRGRSSYEQYF

SEQ ID NO: 680719 - protein, 14 aa, Homo sapiens
  CDR3 for alpha chain variable domain of TCR clone 340360 (TRAV12-3, TRAJ13)
CAMKNSGGYQKVTF

SEQ ID NO: 680720 - protein, 13 aa, Homo sapiens
  CDR3 for beta chain variable domain of TCR clone 340360 (TRBV29-1, TRBJ2-5)
CSARDSVEETQYF

SEQ ID NO: 680721 - protein, 11 aa, Homo sapiens
  CDR3 for alpha chain variable domain of TCR clone 340361 (TRAV1-1, TRAJ23)
CAVRQGEKLIF

SEQ ID NO: 680722 - protein, 13 aa, Homo sapiens
  CDR3 for beta chain variable domain of TCR clone 340361 (TRBV7-3, TRBJ1-1)
CASSQDWGAEAFF

SEQ ID NO: 680723 - protein, 13 aa, Homo sapiens
  CDR3 for alpha chain variable domain of TCR clone 340362 (TRAV26-2, TRAJ37)
CIRGSSNTGKLIF

SEQ ID NO: 680724 - protein, 15 aa, Homo sapiens
  CDR3 for beta chain variable domain of TCR clone 340362 (TRBV7-9, TRBJ1-4)
CASSRTGGFNEKLFF

SEQ ID NO: 680725 - protein, 16 aa, Homo sapiens
  CDR3 for alpha chain variable domain of TCR clone 340363 (TRAV3, TRAJ10)
CAVRDMRAGGGNKLTF

SEQ ID NO: 680726 - protein, 13 aa, Homo sapiens
  CDR3 for beta chain variable domain of TCR clone 340363 (TRBV20-1, TRBJ2-7)
CSAQDRDSYEQYF

SEQ ID NO: 680727 - protein, 14 aa, Homo sapiens
  CDR3 for alpha chain variable domain of TCR clone 340364 (TRAV26-1, TRAJ21)
CIVRVVYNFNKFYF

SEQ ID NO: 680728 - protein, 11 aa, Homo sapiens
  CDR3 for beta chain variable domain of TCR clone 340364 (TRBV5-6, TRBJ2-5)
CASRLERTQYF

SEQ ID NO: 680729 - protein, 13 aa, Homo sapiens
  CDR3 for alpha chain variable domain of TCR clone 340365 (TRAV17, TRAJ40)
CATAPGGTYTYIF

SEQ ID NO: 680730 - protein, 12 aa, Homo sapiens
  CDR3 for beta chain variable domain of TCR clone 340365 (TRBV2, TRBJ1-5)
CASSENRTTQHF

SEQ ID NO: 680731 - protein, 13 aa, Homo sapiens
  CDR3 for alpha chain variable domain of TCR clone 340366 (TRAV35, TRAJ42)
CAGFPGSQGNLIF

SEQ ID NO: 680732 - protein, 14 aa, Homo sapiens
  CDR3 for beta chain variable domain of TCR clone 340366 (TRBV19, TRBJ2-1)
CSSPTFVLSGEQFF

SEQ ID NO: 680733 - protein, 16 aa, Homo sapiens
  CDR3 for alpha chain variable domain of TCR clone 340367 (TRAV21, TRAJ17)
WAVRPGEEAAGNKLTF

SEQ ID NO: 680734 - protein, 16 aa, Homo sapiens
  CDR3 for beta chain variable domain of TCR clone 340367 (TRBV2, TRBJ2-7)
CASSEPWTGPSYEQYF

SEQ ID NO: 680735 - protein, 15 aa, Homo sapiens
  CDR3 for alpha chain variable domain of TCR clone 340368 (TRAV8-3, TRAJ6)
CAVGEDRGGSYIPTF

SEQ ID NO: 680736 - protein, 14 aa, Homo sapiens
  CDR3 for beta chain variable domain of TCR clone 340368 (TRBV27, TRBJ2-2)
CDSLRSPPGGELFF

SEQ ID NO: 680737 - protein, 13 aa, Homo sapiens
  CDR3 for alpha chain variable domain of TCR clone 340369 (TRAV26-1, TRAJ34)
CIVRPWITDKLIF

SEQ ID NO: 680738 - protein, 13 aa, Homo sapiens
  CDR3 for beta chain variable domain of TCR clone 340369 (TRBV5-1, TRBJ2-1)
CASSLGSYNEQFF

SEQ ID NO: 680739 - protein, 15 aa, Homo sapiens
  CDR3 for alpha chain variable domain of TCR clone 340370 (TRAV13-1, TRAJ44)
CAASRGGGTASKLTF

SEQ ID NO: 680740 - protein, 16 aa, Homo sapiens
  CDR3 for beta chain variable domain of TCR clone 340370 (TRBV7-2, TRBJ2-5)
CASSSKWLSGQETQYF

SEQ ID NO: 680741 - protein, 12 aa, Homo sapiens
  CDR3 for alpha chain variable domain of TCR clone 340371 (TRAV21, TRAJ33)
CATMDSNYQLIW

SEQ ID NO: 680742 - protein, 14 aa, Homo sapiens
  CDR3 for beta chain variable domain of TCR clone 340371 (TRBV2, TRBJ2-7)
CASSLASGGYEQYF

SEQ ID NO: 680743 - protein, 14 aa, Homo sapiens
  CDR3 for alpha chain variable domain of TCR clone 340372 (TRAV38-1, TRAJ45)
CASHLGGGADGLTF

SEQ ID NO: 680744 - protein, 13 aa, Homo sapiens
  CDR3 for beta chain variable domain of TCR clone 340372 (TRBV7-9, TRBJ2-2)
CASSSAGTGELFF

SEQ ID NO: 680745 - protein, 14 aa, Homo sapiens
  CDR3 for alpha chain variable domain of TCR clone 340373 (TRAV12-3, TRAJ10)
SHLPLPGGGNKLTF

SEQ ID NO: 680746 - protein, 14 aa, Homo sapiens
  CDR3 for beta chain variable domain of TCR clone 340373 (TRBV3-1, TRBJ2-5)
CASSQGPDQETQYF

SEQ ID NO: 680747 - protein, 12 aa, Homo sapiens
  CDR3 for alpha chain variable domain of TCR clone 340374 (TRAV13-1, TRAJ49)
CAASPMGNQFYF

SEQ ID NO: 680748 - protein, 14 aa, Homo sapiens
  CDR3 for beta chain variable domain of TCR clone 340374 (TRBV11-2, TRBJ2-3)
CASSRLARTDTQYF

SEQ ID NO: 680749 - protein, 14 aa, Homo sapiens
  CDR3 for alpha chain variable domain of TCR clone 340375 (TRAV1-2, TRAJ8)
CAVREDTGFQKLVF

SEQ ID NO: 680750 - protein, 15 aa, Homo sapiens
  CDR3 for beta chain variable domain of TCR clone 340375 (TRBV7-9, TRBJ1-6)
CASSSPGRGNSPPHF

SEQ ID NO: 680751 - protein, 14 aa, Homo sapiens
  CDR3 for alpha chain variable domain of TCR clone 340376 (TRAV26-1, TRAJ38)
CIADNAGNNRKLIW

SEQ ID NO: 680752 - protein, 14 aa, Homo sapiens
  CDR3 for beta chain variable domain of TCR clone 340376 (TRBV4-1, TRBJ2-2)
CASSQAVNIGELFF

SEQ ID NO: 680753 - protein, 13 aa, Homo sapiens
  CDR3 for alpha chain variable domain of TCR clone 340377 (TRAV21, TRAJ20)
CAVGLRVDYKLSF

SEQ ID NO: 680754 - protein, 14 aa, Homo sapiens
  CDR3 for beta chain variable domain of TCR clone 340377 (TRBV7-9, TRBJ1-1)
CASSLGGANTEAFF

SEQ ID NO: 680755 - protein, 15 aa, Homo sapiens
  CDR3 for alpha chain variable domain of TCR clone 340378 (TRAV21, TRAJ37)
CALRPTLSNTGKQIF

SEQ ID NO: 680756 - protein, 16 aa, Homo sapiens
  CDR3 for beta chain variable domain of TCR clone 340378 (TRBV24-1, TRBJ2-3)
CATSDRRQDLTDTQYF

SEQ ID NO: 680757 - protein, 12 aa, Homo sapiens
  CDR3 for alpha chain variable domain of TCR clone 340379 (TRAV13-1, TRAJ15)
CAASQAGTALIF

SEQ ID NO: 680758 - protein, 14 aa, Homo sapiens
  CDR3 for beta chain variable domain of TCR clone 340379 (TRBV4-2, TRBJ2-3)
CASRETRAPGMQYF

SEQ ID NO: 680759 - protein, 16 aa, Homo sapiens
  CDR3 for alpha chain variable domain of TCR clone 340380 (TRAV26-1, TRAJ53)
CIGRVAMGGSNYKLTF

SEQ ID NO: 680760 - protein, 12 aa, Homo sapiens
  CDR3 for beta chain variable domain of TCR clone 340380 (TRBV7-9, TRBJ1-5)
CASSPQGQPQHF

SEQ ID NO: 680761 - protein, 23 aa, Homo sapiens
  CDR3 for alpha chain variable domain of TCR clone 340381 (TRAV12-2, TRAJ36)
SLLIRDSQPSDSATLERANNLFF

SEQ ID NO: 680762 - protein, 16 aa, Homo sapiens
  CDR3 for beta chain variable domain of TCR clone 340381 (TRBV7-7, TRBJ2-1)
CASSLASGTSYNEQFF

SEQ ID NO: 680763 - protein, 13 aa, Homo sapiens
  CDR3 for alpha chain variable domain of TCR clone 340382 (TRAV27, TRAJ6)
CAGGTRGSYIPTF

SEQ ID NO: 680764 - protein, 16 aa, Homo sapiens
  CDR3 for beta chain variable domain of TCR clone 340382 (TRBV24-1, TRBJ2-2)
CATSDTGQGGTGELFF

SEQ ID NO: 680765 - protein, 11 aa, Homo sapiens
  CDR3 for alpha chain variable domain of TCR clone 340383 (TRAV12-1, TRAJ34)
CVVNKGGELVF

SEQ ID NO: 680766 - protein, 12 aa, Homo sapiens
  CDR3 for beta chain variable domain of TCR clone 340383 (TRBV2, TRBJ2-1)
CAYGPPGNEQFF

SEQ ID NO: 680767 - protein, 13 aa, Homo sapiens
  CDR3 for alpha chain variable domain of TCR clone 340384 (TRAV8-3, TRAJ36)
CAVGATGANNLFF

SEQ ID NO: 680768 - protein, 17 aa, Homo sapiens
  CDR3 for beta chain variable domain of TCR clone 340384 (TRBV4-2, TRBJ1-1)
CASTPFGGGSGNTEAFF

SEQ ID NO: 680769 - protein, 15 aa, Homo sapiens
  CDR3 for alpha chain variable domain of TCR clone 340385 (TRAV13-1, TRAJ8)
CAASIPNTGFQKIVF

SEQ ID NO: 680770 - protein, 13 aa, Homo sapiens
  CDR3 for beta chain variable domain of TCR clone 340385 (TRBV5-4, TRBJ1-1)
CASSFQVNTEAFF

SEQ ID NO: 680771 - protein, 13 aa, Homo sapiens
  CDR3 for alpha chain variable domain of TCR clone 340386 (TRAV8-3, TRAJ28)
CAVGAVGSYKLTF

SEQ ID NO: 680772 - protein, 17 aa, Homo sapiens
  CDR3 for beta chain variable domain of TCR clone 340386 (TRBV11-2, TRBJ2-1)
CASSLYPPWVEYNEQFF

SEQ ID NO: 680773 - protein, 14 aa, Homo sapiens
  CDR3 for alpha chain variable domain of TCR clone 340387 (TRAV3, TRAJ7)
CAVREEGREQQTHF

SEQ ID NO: 680774 - protein, 12 aa, Homo sapiens
  CDR3 for beta chain variable domain of TCR clone 340387 (TRBV7-8, TRBJ2-7)
CASSLGDREQYF

SEQ ID NO: 680775 - protein, 17 aa, Homo sapiens
  CDR3 for alpha chain variable domain of TCR clone 340388 (TRAV17, TRAJ7)
CATLGRLAFGKGNQVVV

SEQ ID NO: 680776 - protein, 14 aa, Homo sapiens
  CDR3 for beta chain variable domain of TCR clone 340388 (TRBV20-1, TRBJ1-1)
CSAQTRIGGTEAFF

SEQ ID NO: 680777 - protein, 14 aa, Homo sapiens
  CDR3 for alpha chain variable domain of TCR clone 340389 (TRAV20, TRAJ42)
CCAADGGSQGNLIF

SEQ ID NO: 680778 - protein, 15 aa, Homo sapiens
  CDR3 for beta chain variable domain of TCR clone 340389 (TRBV12-4, TRBJ1-3)
CASTPGRRSGNTIYF

SEQ ID NO: 680779 - protein, 15 aa, Homo sapiens
  CDR3 for alpha chain variable domain of TCR clone 340390 (TRAV12-3, TRAJ6)
CAMSATTGGSYIPTF

SEQ ID NO: 680780 - protein, 16 aa, Homo sapiens
  CDR3 for beta chain variable domain of TCR clone 340390 (TRBV4-1, TRBJ2-5)
CASSSGLAGVLGTQYF

SEQ ID NO: 680781 - protein, 11 aa, Homo sapiens
  CDR3 for alpha chain variable domain of TCR clone 340391 (TRAV13-1, TRAJ30)
CAASRDDKIIF

SEQ ID NO: 680782 - protein, 15 aa, Homo sapiens
  CDR3 for beta chain variable domain of TCR clone 340391 (TRBV18, TRBJ1-1)
CASSPSSGVNTEAFF

SEQ ID NO: 680783 - protein, 14 aa, Homo sapiens
  CDR3 for alpha chain variable domain of TCR clone 340392 (TRAV8-3, TRAJ30)
CAVGDMNRDDKIIF

SEQ ID NO: 680784 - protein, 16 aa, Homo sapiens
  CDR3 for beta chain variable domain of TCR clone 340392 (TRBV7-3, TRBJ2-2)
CASSLKRGTLSGELFF

SEQ ID NO: 680785 - protein, 17 aa, Homo sapiens
  CDR3 for alpha chain variable domain of TCR clone 340393 (TRAV3, TRAJ6)
CAVRDGPRAGGSYIPTF

SEQ ID NO: 680786 - protein, 14 aa, Homo sapiens
  CDR3 for beta chain variable domain of TCR clone 340393 (TRBV5-1, TRBJ2-3)
CASRGQTSTDTQYF

SEQ ID NO: 680787 - protein, 14 aa, Homo sapiens
  CDR3 for alpha chain variable domain of TCR clone 340394 (TRAV30, TRAJ26)
CDTEIVSYGQNFVF

SEQ ID NO: 680788 - protein, 13 aa, Homo sapiens
  CDR3 for beta chain variable domain of TCR clone 340394 (TRBV10-3, TRBJ2-7)
CASKLAVNYEQYF

SEQ ID NO: 680789 - protein, 14 aa, Homo sapiens
  CDR3 for alpha chain variable domain of TCR clone 340395 (TRAV16, TRAJ39)
CALSKNNAGNMLTF

SEQ ID NO: 680790 - protein, 19 aa, Homo sapiens
  CDR3 for beta chain variable domain of TCR clone 340395 (TRBV6-6, TRBJ2-1)
AAPSQTSVYFWASSYEQFL

SEQ ID NO: 680791 - protein, 13 aa, Homo sapiens
  CDR3 for alpha chain variable domain of TCR clone 340396 (TRAV36/DV7, TRAJ54)
CAVDIQGAQKLVF

SEQ ID NO: 680792 - protein, 12 aa, Homo sapiens
  CDR3 for beta chain variable domain of TCR clone 340396 (TRBV20-1, TRBJ1-2)
CSASHPSGGYTF

SEQ ID NO: 680793 - protein, 12 aa, Homo sapiens
  CDR3 for alpha chain variable domain of TCR clone 340397 (TRAV26-1, TRAJ43)
CIVRGNNNDVRF

SEQ ID NO: 680794 - protein, 13 aa, Homo sapiens
  CDR3 for beta chain variable domain of TCR clone 340397 (TRBV20-1, TRBJ2-3)
CSAIYPGADTQYF

SEQ ID NO: 680795 - protein, 16 aa, Homo sapiens
  CDR3 for alpha chain variable domain of TCR clone 340398 (TRAV17, TRAJ35)
CATAEGGIGFGNVLHC

SEQ ID NO: 680796 - protein, 15 aa, Homo sapiens
  CDR3 for beta chain variable domain of TCR clone 340398 (TRBV5-1, TRBJ2-1)
CASSPPRAPYNEQFF

SEQ ID NO: 680797 - protein, 12 aa, Homo sapiens
  CDR3 for alpha chain variable domain of TCR clone 340399 (TRAV1-1, TRAJ39)
CAVPVVGNMLTF

SEQ ID NO: 680798 - protein, 13 aa, Homo sapiens
  CDR3 for beta chain variable domain of TCR clone 340399 (TRBV10-2, TRBJ2-5)
CASSEGGKETQYF

SEQ ID NO: 680799 - protein, 14 aa, Homo sapiens
  CDR3 for alpha chain variable domain of TCR clone 340400 (TRAV1-2, TRAJ16)
CAVNRFSDGQKLLF

SEQ ID NO: 680800 - protein, 15 aa, Homo sapiens
  CDR3 for beta chain variable domain of TCR clone 340400 (TRBV4-2, TRBJ1-1)
CASSQQGAGDTEAFF

SEQ ID NO: 680801 - protein, 13 aa, Homo sapiens
  CDR3 for alpha chain variable domain of TCR clone 340401 (TRAV17, TRAJ5)
CAPLDTGRRALTF

SEQ ID NO: 680802 - protein, 14 aa, Homo sapiens
  CDR3 for beta chain variable domain of TCR clone 340401 (TRBV19, TRBJ2-1)
CASPTFVLSGEQFF

SEQ ID NO: 680803 - protein, 14 aa, Homo sapiens
  CDR3 for alpha chain variable domain of TCR clone 340402 (TRAV1-2, TRAJ16)
CAVNRFSDGQKLLF

SEQ ID NO: 680804 - protein, 14 aa, Homo sapiens
  CDR3 for beta chain variable domain of TCR clone 340402 (TRBV11-1, TRBJ2-7)
CASTFAVPSYEQYF

SEQ ID NO: 680805 - protein, 13 aa, Homo sapiens
  CDR3 for alpha chain variable domain of TCR clone 340403 (TRAV21, TRAJ57)
CAVTQGGSEKLVF

SEQ ID NO: 680806 - protein, 14 aa, Homo sapiens
  CDR3 for beta chain variable domain of TCR clone 340403 (TRBV7-8, TRBJ2-3)
CASSVEAGTDTQYF

SEQ ID NO: 680807 - protein, 14 aa, Homo sapiens
  CDR3 for alpha chain variable domain of TCR clone 340404 (TRAV13-2, TRAJ17)
CAENSKAACNKLTF

SEQ ID NO: 680808 - protein, 14 aa, Homo sapiens
  CDR3 for beta chain variable domain of TCR clone 340404 (TRBV19, TRBJ2-1)
CASPTFVLSGEQFF

SEQ ID NO: 680809 - protein, 16 aa, Homo sapiens
  CDR3 for alpha chain variable domain of TCR clone 340405 (TRAV12-2, TRAJ32)
CAVNLGQGGATNKLIF

SEQ ID NO: 680810 - protein, 15 aa, Homo sapiens
  CDR3 for beta chain variable domain of TCR clone 340405 (TRBV20-1, TRBJ2-7)
SAVLGPLAGGREQYF

SEQ ID NO: 680811 - protein, 17 aa, Homo sapiens
  CDR3 for alpha chain variable domain of TCR clone 340406 (TRAV3, TRAJ42)
CAVRERNYGGSQGNIIF

SEQ ID NO: 680812 - protein, 17 aa, Homo sapiens
  CDR3 for beta chain variable domain of TCR clone 340406 (TRBV7-9, TRBJ2-3)
CASSPTVAGDLTDTQYL

SEQ ID NO: 680813 - protein, 13 aa, Homo sapiens
  CDR3 for alpha chain variable domain of TCR clone 340407 (TRAV8-6, TRAJ49)
CAVITNTGNQFYF

SEQ ID NO: 680814 - protein, 17 aa, Homo sapiens
  CDR3 for beta chain variable domain of TCR clone 340407 (TRBV11-2, TRBJ2-1)
CASSLYPQGVEYNEQFF

SEQ ID NO: 680815 - protein, 16 aa, Homo sapiens
  CDR3 for alpha chain variable domain of TCR clone 340408 (TRAV30, TRAJ49)
SAAQRVGPNTGNQFSF

SEQ ID NO: 680816 - protein, 15 aa, Homo sapiens
  CDR3 for beta chain variable domain of TCR clone 340408 (TRBV7-2, TRBJ2-1)
CASSSGLAGGNEQFF

SEQ ID NO: 680817 - protein, 12 aa, Homo sapiens
  CDR3 for alpha chain variable domain of TCR clone 340409 (TRAV17, TRAJ21)
CALRYNFNKFYF

SEQ ID NO: 680818 - protein, 20 aa, Homo sapiens
  CDR3 for beta chain variable domain of TCR clone 340409 (TRBV28, TRBJ2-1)
CASTPIGRSPGLAGGNEQFF

SEQ ID NO: 680819 - protein, 15 aa, Homo sapiens
  CDR3 for alpha chain variable domain of TCR clone 340410 (TRAV2, TRAJ24)
CAVVRLKNSWGKLQF

SEQ ID NO: 680820 - protein, 15 aa, Homo sapiens
  CDR3 for beta chain variable domain of TCR clone 340410 (TRBV7-7, TRBJ2-3)
CQQPRTSGSTDTQYF

SEQ ID NO: 680821 - protein, 16 aa, Homo sapiens
  CDR3 for alpha chain variable domain of TCR clone 340411 (TRAV3, TRAJ10)
CAVRDMRAGGGNKITF

SEQ ID NO: 680822 - protein, 14 aa, Homo sapiens
  CDR3 for beta chain variable domain of TCR clone 340411 (TRBV25-1, TRBJ1-1)
CASTHLGGNTEAFF

SEQ ID NO: 680823 - protein, 13 aa, Homo sapiens
  CDR3 for alpha chain variable domain of TCR clone 340412 (TRAV8-6, TRAJ49)
CAVITNTGNQFYF

SEQ ID NO: 680824 - protein, 16 aa, Homo sapiens
  CDR3 for beta chain variable domain of TCR clone 340412 (TRBV7-2, TRBJ1-2)
CASSSNQDRRGHGYTF

SEQ ID NO: 680825 - protein, 16 aa, Homo sapiens
  CDR3 for alpha chain variable domain of TCR clone 340413 (TRAV27, TRAJ53)
CAAPEGSGGSNYKLTF

SEQ ID NO: 680826 - protein, 15 aa, Homo sapiens
  CDR3 for beta chain variable domain of TCR clone 340413 (TRBV20-1, TRBJ1-1)
CSASRGVTGNTEAVF

SEQ ID NO: 680827 - protein, 11 aa, Homo sapiens
  CDR3 for alpha chain variable domain of TCR clone 340414 (TRAV2, TRAJ33)
CAVESNYQLIW

SEQ ID NO: 680828 - protein, 15 aa, Homo sapiens
  CDR3 for beta chain variable domain of TCR clone 340414 (TRBV6-3, TRBJ2-2)
CASSVDRANTGELFF

SEQ ID NO: 680829 - protein, 15 aa, Homo sapiens
  CDR3 for alpha chain variable domain of TCR clone 340415 (TRAV13-1, TRAJ36)
CAASIRQTGANNLFF

SEQ ID NO: 680830 - protein, 17 aa, Homo sapiens
  CDR3 for beta chain variable domain of TCR clone 340415 (TRBV7-3, TRBJ2-3)
CASSRGLAGEVPDTQYF

SEQ ID NO: 680831 - protein, 15 aa, Homo sapiens
  CDR3 for alpha chain variable domain of TCR clone 340416 (TRAV23/DV6, TRAJ18)
CAARYRGSTLGRLYF

SEQ ID NO: 680832 - protein, 13 aa, Homo sapiens
  CDR3 for beta chain variable domain of TCR clone 340416 (TRBV7-2, TRBJ2-1)
CASSSPSGSEQYF

SEQ ID NO: 680833 - protein, 10 aa, Homo sapiens
  CDR3 for alpha chain variable domain of TCR clone 340417 (TRAV12-2, TRAJ31)
CAVTRCQTHV

SEQ ID NO: 680834 - protein, 15 aa, Homo sapiens
  CDR3 for beta chain variable domain of TCR clone 340417 (TRBV19, TRBJ2-7)
CASSIGGGLVNEQYF

SEQ ID NO: 680835 - protein, 14 aa, Homo sapiens
  CDR3 for alpha chain variable domain of TCR clone 340418 (TRAV8-4, TRAJ13)
CAVTLSGGYQKVTF

SEQ ID NO: 680836 - protein, 14 aa, Homo sapiens
  CDR3 for beta chain variable domain of TCR clone 340418 (TRBV19, TRBJ2-3)
CASSAPRGTDTQYF

SEQ ID NO: 680837 - protein, 13 aa, Homo sapiens
  CDR3 for alpha chain variable domain of TCR clone 340419 (TRAV12-1, TRAJ16)
CVVNGPDGQKLLF

SEQ ID NO: 680838 - protein, 13 aa, Homo sapiens
  CDR3 for beta chain variable domain of TCR clone 340419 (TRBV2, TRBJ1-1)
CARNPAGGFHAFF

SEQ ID NO: 680839 - protein, 16 aa, Homo sapiens
  CDR3 for alpha chain variable domain of TCR clone 340420 (TRAV3, TRAJ10)
CAVRDMRAGGGNKLTF

SEQ ID NO: 680840 - protein, 16 aa, Homo sapiens
  CDR3 for beta chain variable domain of TCR clone 340420 (TRBV3-1, TRBJ2-7)
CASSQGATGVAYEQYF

SEQ ID NO: 680841 - protein, 16 aa, Homo sapiens
  CDR3 for alpha chain variable domain of TCR clone 340421 (TRAV3, TRAJ21)
CAVRDIERGNFNKFYF

SEQ ID NO: 680842 - protein, 14 aa, Homo sapiens
  CDR3 for beta chain variable domain of TCR clone 340421 (TRBV7-3, TRBJ2-1)
CASSLAGGTNEQFF

SEQ ID NO: 680843 - protein, 17 aa, Homo sapiens
  CDR3 for alpha chain variable domain of TCR clone 340422 (TRAV13-1, TRAJ52)
CAAGRNAGGTSYGKLTF

SEQ ID NO: 680844 - protein, 13 aa, Homo sapiens
  CDR3 for beta chain variable domain of TCR clone 340422 (TRBV7-2, TRBJ1-1)
CASNLKGAKLAFF

SEQ ID NO: 680845 - protein, 15 aa, Homo sapiens
  CDR3 for alpha chain variable domain of TCR clone 340423 (TRAV12-3, TRAJ49)
CAMTAPGNTGNQFYF

SEQ ID NO: 680846 - protein, 19 aa, Homo sapiens
  CDR3 for beta chain variable domain of TCR clone 340423 (TRBV28, TRBJ2-7)
CASSYSGTSRLGWVYEQYF

SEQ ID NO: 680847 - protein, 15 aa, Homo sapiens
  CDR3 for alpha chain variable domain of TCR clone 340424 (TRAV21, TRAJ32)
CAVNSYGGATNKLIF

SEQ ID NO: 680848 - protein, 18 aa, Homo sapiens
  CDR3 for beta chain variable domain of TCR clone 340424 (TRBV7-9, TRBJ2-1)
CASSTGLAEGSSYNEHFF

SEQ ID NO: 680849 - protein, 17 aa, Homo sapiens
  CDR3 for alpha chain variable domain of TCR clone 340425 (TRAV26-1, TRAJ38)
CIVRPLNAGNNHIQKPD

SEQ ID NO: 680850 - protein, 13 aa, Homo sapiens
  CDR3 for beta chain variable domain of TCR clone 340425 (TRBV18, TRBJ1-1)
CASSPNGDTEAFF

SEQ ID NO: 680851 - protein, 23 aa, Homo sapiens
  CDR3 for alpha chain variable domain of TCR clone 340426 (TRAV12-2, TRAJ22)
CAVSFRVHPGTPIVSGSARQLTF

SEQ ID NO: 680852 - protein, 13 aa, Homo sapiens
  CDR3 for beta chain variable domain of TCR clone 340426 (TRBV12-4, TRBJ1-2)
CASSLDSNYGYTF

SEQ ID NO: 680853 - protein, 12 aa, Homo sapiens
  CDR3 for alpha chain variable domain of TCR clone 340427 (TRAV13-1, TRAJ21)
CAAKEGFDKFYF

SEQ ID NO: 680854 - protein, 15 aa, Homo sapiens
  CDR3 for beta chain variable domain of TCR clone 340427 (TRBV25-1, TRBJ1-4)
CASSPGDSTNEKLFF

SEQ ID NO: 680855 - protein, 17 aa, Homo sapiens
  CDR3 for alpha chain variable domain of TCR clone 340428 (TRAV3, TRAJ38)
CAVRDCLNAGNNRTLIW

SEQ ID NO: 680856 - protein, 15 aa, Homo sapiens
  CDR3 for beta chain variable domain of TCR clone 340428 (TRBV27, TRBJ2-1)
CASSNGGGSANEQFF

SEQ ID NO: 680857 - protein, 18 aa, Homo sapiens
  CDR3 for alpha chain variable domain of TCR clone 340429 (TRAV29/DV5, TRAJ53)
CSVLLCSKRGGSNYKLTF

SEQ ID NO: 680858 - protein, 17 aa, Homo sapiens
  CDR3 for beta chain variable domain of TCR clone 340429 (TRBV7-8, TRBJ2-6)
CASRAGTGGAGANVLTF

SEQ ID NO: 680859 - protein, 13 aa, Homo sapiens
  CDR3 for alpha chain variable domain of TCR clone 340430 (TRAV21, TRAJ56)
CAVRLGANSKLTF

SEQ ID NO: 680860 - protein, 12 aa, Homo sapiens
  CDR3 for beta chain variable domain of TCR clone 340430 (TRBV12-4, TRBJ2-3)
CASSSTADTQYF

SEQ ID NO: 680861 - protein, 15 aa, Homo sapiens
  CDR3 for alpha chain variable domain of TCR clone 340431 (TRAV26-1, TRAJ56)
CIVRVATGDNSKLIF

SEQ ID NO: 680862 - protein, 15 aa, Homo sapiens
  CDR3 for beta chain variable domain of TCR clone 340431 (TRBV27, TRBJ2-7)
CASSPQREGQREQYF

SEQ ID NO: 680863 - protein, 15 aa, Homo sapiens
  CDR3 for alpha chain variable domain of TCR clone 340432 (TRAV12-1, TRAJ9)
CVVSFGDTEGFKTIF

SEQ ID NO: 680864 - protein, 19 aa, Homo sapiens
  CDR3 for beta chain variable domain of TCR clone 340432 (TRBV25-1, TRBJ2-2)
CAILVYRVDRGRKTGELFF

SEQ ID NO: 680865 - protein, 15 aa, Homo sapiens
  CDR3 for alpha chain variable domain of TCR clone 340433 (TRAV27, TRAJ38)
CAARHNAGNNRKRMW

SEQ ID NO: 680866 - protein, 13 aa, Homo sapiens
  CDR3 for beta chain variable domain of TCR clone 340433 (TRBV12-5, TRBJ2-3)
CASGDRQSDTQYF

SEQ ID NO: 680867 - protein, 13 aa, Homo sapiens
  CDR3 for alpha chain variable domain of TCR clone 340434 (TRAV17, TRAJ5)
CALRGTGRRALTF

SEQ ID NO: 680868 - protein, 14 aa, Homo sapiens
  CDR3 for beta chain variable domain of TCR clone 340434 (TRBV11-2, TRBJ2-7)
CASSRSGGAGEQYF

SEQ ID NO: 680869 - protein, 12 aa, Homo sapiens
  CDR3 for alpha chain variable domain of TCR clone 340435 (TRAV8-3, TRAJ20)
CAVGANDYKLSF

SEQ ID NO: 680870 - protein, 17 aa, Homo sapiens
  CDR3 for beta chain variable domain of TCR clone 340435 (TRBV7-7, TRBJ1-1)
CASIGDRPNLGVTEAFF

SEQ ID NO: 680871 - protein, 16 aa, Homo sapiens
  CDR3 for alpha chain variable domain of TCR clone 340436 (TRAV3, TRAJ21)
CAVRDIERGNFNKFYF

SEQ ID NO: 680872 - protein, 15 aa, Homo sapiens
  CDR3 for beta chain variable domain of TCR clone 340436 (TRBV9, TRBJ1-6)
CASSVAGTGDSPLHL

SEQ ID NO: 680873 - protein, 11 aa, Homo sapiens
  CDR3 for alpha chain variable domain of TCR clone 340437 (TRAV17, TRAJ31)
CATSNNARLMF

SEQ ID NO: 680874 - protein, 14 aa, Homo sapiens
  CDR3 for beta chain variable domain of TCR clone 340437 (TRBV18, TRBJ2-7)
CTSSPRGGAYEQYF

SEQ ID NO: 680875 - protein, 14 aa, Homo sapiens
  CDR3 for alpha chain variable domain of TCR clone 340438 (TRAV8-3, TRAJ4)
CAVGASGGYNKLIF

SEQ ID NO: 680876 - protein, 11 aa, Homo sapiens
  CDR3 for beta chain variable domain of TCR clone 340438 (TRBV19, TRBJ2-2)
CASSPSGGLNT

SEQ ID NO: 680877 - protein, 13 aa, Homo sapiens
  CDR3 for alpha chain variable domain of TCR clone 340439 (TRAV3, TRAJ27)
FAVRPLGAGKSTF

SEQ ID NO: 680878 - protein, 15 aa, Homo sapiens
  CDR3 for beta chain variable domain of TCR clone 340439 (TRBV4-1, TRBJ1-4)
CASSDTGGTNEKLFF

SEQ ID NO: 680879 - protein, 14 aa, Homo sapiens
  CDR3 for alpha chain variable domain of TCR clone 340440 (TRAV1-2, TRAJ8)
CAVREDTGFQKLVS

SEQ ID NO: 680880 - protein, 15 aa, Homo sapiens
  CDR3 for beta chain variable domain of TCR clone 340440 (TRBV6-3, TRBJ2-7)
CASSSPGAVFYEQYF

SEQ ID NO: 680881 - protein, 21 aa, Homo sapiens
  CDR3 for alpha chain variable domain of TCR clone 340441 (TRAV12-1, TRAJ32)
SSVIQPPTSMNYGGATNELIF

SEQ ID NO: 680882 - protein, 15 aa, Homo sapiens
  CDR3 for beta chain variable domain of TCR clone 340441 (TRBV7-9, TRBJ2-2)
CASGPLDTFPGELFF

SEQ ID NO: 680883 - protein, 15 aa, Homo sapiens
  CDR3 for alpha chain variable domain of TCR clone 340442 (TRAV3, TRAJ10)
CVRDMRAGGGNKLTF

SEQ ID NO: 680884 - protein, 17 aa, Homo sapiens
  CDR3 for beta chain variable domain of TCR clone 340442 (TRBV28, TRBJ2-5)
CASSTPEGDALQETQYF

SEQ ID NO: 680885 - protein, 13 aa, Homo sapiens
  CDR3 for alpha chain variable domain of TCR clone 340443 (TRAV13-1, TRAJ43)
RAASLSNNNDMRF

SEQ ID NO: 680886 - protein, 17 aa, Homo sapiens
  CDR3 for beta chain variable domain of TCR clone 340443 (TRBV5-1, TRBJ2-2)
CASSLAGLSGGTGELFF

SEQ ID NO: 680887 - protein, 11 aa, Homo sapiens
  CDR3 for alpha chain variable domain of TCR clone 340444 (TRAV16, TRAJ54)
CALSPSGSPEA

SEQ ID NO: 680888 - protein, 14 aa, Homo sapiens
  CDR3 for beta chain variable domain of TCR clone 340444 (TRBV25-1, TRBJ1-1)
CASTHLGGNTEAFF

SEQ ID NO: 680889 - protein, 16 aa, Homo sapiens
  CDR3 for alpha chain variable domain of TCR clone 340445 (TRAV30, TRAJ24)
CGTEIVDADSWGKFQF

SEQ ID NO: 680890 - protein, 15 aa, Homo sapiens
  CDR3 for beta chain variable domain of TCR clone 340445 (TRBV20-1, TRBJ2-6)
CSARDRGPGANVLTF

SEQ ID NO: 680891 - protein, 12 aa, Homo sapiens
  CDR3 for alpha chain variable domain of TCR clone 340446 (TRAV23/DV6, TRAJ30)
CAASKGDDKIIL

SEQ ID NO: 680892 - protein, 15 aa, Homo sapiens
  CDR3 for beta chain variable domain of TCR clone 340446 (TRBV29-1, TRBJ2-1)
CSGRDRKSSYNEQFF

SEQ ID NO: 680893 - protein, 15 aa, Homo sapiens
  CDR3 for alpha chain variable domain of TCR clone 340447 (TRAV12-3, TRAJ27)
CAMRAYNTNAGNSTF

SEQ ID NO: 680894 - protein, 13 aa, Homo sapiens
  CDR3 for beta chain variable domain of TCR clone 340447 (TRBV11-2, TRBJ2-5)
CASGRGPSETQYF

SEQ ID NO: 680895 - protein, 11 aa, Homo sapiens
  CDR3 for alpha chain variable domain of TCR clone 340448 (TRAV3, TRAJ21)
CAVGNFNKFYF

SEQ ID NO: 680896 - protein, 17 aa, Homo sapiens
  CDR3 for beta chain variable domain of TCR clone 340448 (TRBV11-2, TRBJ2-3)
CQQLRGASRGAPNTQYF

SEQ ID NO: 680897 - protein, 15 aa, Homo sapiens
  CDR3 for alpha chain variable domain of TCR clone 340449 (TRAV26-1, TRAJ29)
CIVRFEGSGNTPLVF

SEQ ID NO: 680898 - protein, 14 aa, Homo sapiens
  CDR3 for beta chain variable domain of TCR clone 340449 (TRBV19, TRBJ1-5)
CASRAPDSFLSQHF

SEQ ID NO: 680899 - protein, 10 aa, Homo sapiens
  CDR3 for alpha chain variable domain of TCR clone 340450 (TRAV12-1, TRAJ33)
SGYSNYQLIW

SEQ ID NO: 680900 - protein, 15 aa, Homo sapiens
  CDR3 for beta chain variable domain of TCR clone 340450 (TRBV4-2, TRBJ2-7)
CASSQASGGTYEQYF

SEQ ID NO: 680901 - protein, 11 aa, Homo sapiens
  CDR3 for alpha chain variable domain of TCR clone 340451 (TRAV17, TRAJ43)
CATDNNNDMRF

SEQ ID NO: 680902 - protein, 15 aa, Homo sapiens
  CDR3 for beta chain variable domain of TCR clone 340451 (TRBV20-1, TRBJ1-2)
CCAIRTGAFNYGYTF

SEQ ID NO: 680903 - protein, 14 aa, Homo sapiens
  CDR3 for alpha chain variable domain of TCR clone 340452 (TRAV26-1, TRAJ22)
CIVRVYGSARQLTF

SEQ ID NO: 680904 - protein, 16 aa, Homo sapiens
  CDR3 for beta chain variable domain of TCR clone 340452 (TRBV7-3, TRBJ2-1)
CASSLEGYRSYNEQFF

SEQ ID NO: 680905 - protein, 13 aa, Homo sapiens
  CDR3 for alpha chain variable domain of TCR clone 340453 (TRAV3, TRAJ29)
CAVRDWGNTPLVF

SEQ ID NO: 680906 - protein, 15 aa, Homo sapiens
  CDR3 for beta chain variable domain of TCR clone 340453 (TRBV12-4, TRBJ2-5)
CACIGRTGEGETQYF

SEQ ID NO: 680907 - protein, 15 aa, Homo sapiens
  CDR3 for alpha chain variable domain of TCR clone 340454 (TRAV17, TRAJ10)
CATVLLTGGGNKLTF

SEQ ID NO: 680908 - protein, 17 aa, Homo sapiens
  CDR3 for beta chain variable domain of TCR clone 340454 (TRBV7-9, TRBJ2-6)
CASSAGTGGAGANVLTF

SEQ ID NO: 680909 - protein, 12 aa, Homo sapiens
  CDR3 for alpha chain variable domain of TCR clone 340455 (TRAV35, TRAJ30)
CAGLNRDDKIIF

SEQ ID NO: 680910 - protein, 15 aa, Homo sapiens
  CDR3 for beta chain variable domain of TCR clone 340455 (TRBV9, TRBJ1-6)
CASSVAGTGDSSLHF

SEQ ID NO: 680911 - protein, 12 aa, Homo sapiens
  CDR3 for alpha chain variable domain of TCR clone 340456 (TRAV12-1, TRAJ40)
CVVYSGTYKYIF

SEQ ID NO: 680912 - protein, 14 aa, Homo sapiens
  CDR3 for beta chain variable domain of TCR clone 340456 (TRBV7-6, TRBJ2-1)
RASSLGGGADEQFF

SEQ ID NO: 680913 - protein, 15 aa, Homo sapiens
  CDR3 for alpha chain variable domain of TCR clone 340457 (TRAV12-3, TRAJ6)
CAMSATTGGSYIPTL

SEQ ID NO: 680914 - protein, 13 aa, Homo sapiens
  CDR3 for beta chain variable domain of TCR clone 340457 (TRBV7-9, TRBJ1-2)
CASSLRQNYGYTF

SEQ ID NO: 680915 - protein, 13 aa, Homo sapiens
  CDR3 for alpha chain variable domain of TCR clone 340458 (TRAV35, TRAJ43)
CAGYPYNNNDMRF

SEQ ID NO: 680916 - protein, 13 aa, Homo sapiens
  CDR3 for beta chain variable domain of TCR clone 340458 (TRBV11-3, TRBJ2-7)
CASSLDKLYEQYF

SEQ ID NO: 680917 - protein, 14 aa, Homo sapiens
  CDR3 for alpha chain variable domain of TCR clone 340459 (TRAV8-2, TRAJ37)
CVVSISGNTGKLIF

SEQ ID NO: 680918 - protein, 14 aa, Homo sapiens
  CDR3 for beta chain variable domain of TCR clone 340459 (TRBV25-1, TRBJ1-1)
CASTHLGGNTEAFF

SEQ ID NO: 680919 - protein, 16 aa, Homo sapiens
  CDR3 for alpha chain variable domain of TCR clone 340460 (TRAV26-1, )
CIDIQNPEPAVYQLRD

SEQ ID NO: 680920 - protein, 19 aa, Homo sapiens
  CDR3 for beta chain variable domain of TCR clone 340460 (TRBV19, TRBJ2-5)
CASSIGQVTDFFLGETQYF

SEQ ID NO: 680921 - protein, 13 aa, Homo sapiens
  CDR3 for alpha chain variable domain of TCR clone 340461 (TRAV2, TRAJ15)
CAVAPQAGTALIF

SEQ ID NO: 680922 - protein, 17 aa, Homo sapiens
  CDR3 for beta chain variable domain of TCR clone 340461 (TRBV7-2, TRBJ2-7)
CASSLVGAGGARNEQYF

SEQ ID NO: 680923 - protein, 14 aa, Homo sapiens
  CDR3 for alpha chain variable domain of TCR clone 340462 (TRAV8-4, TRAJ17)
CAESDQAAGNKLTF

SEQ ID NO: 680924 - protein, 15 aa, Homo sapiens
  CDR3 for beta chain variable domain of TCR clone 340462 (TRBV7-2, TRBJ1-2)
CASSLAPDRGLGYTF

SEQ ID NO: 680925 - protein, 11 aa, Homo sapiens
  CDR3 for alpha chain variable domain of TCR clone 340463 (TRAV13-1, TRAJ52)
PGGTSYGKLTF

SEQ ID NO: 680926 - protein, 14 aa, Homo sapiens
  CDR3 for beta chain variable domain of TCR clone 340463 (TRBV6-1, TRBJ1-3)
CASVQGGGGNTIYF

SEQ ID NO: 680927 - protein, 16 aa, Homo sapiens
  CDR3 for alpha chain variable domain of TCR clone 340464 (TRAV26-1, )
CIDIQNPDPAVYQLRN

SEQ ID NO: 680928 - protein, 19 aa, Homo sapiens
  CDR3 for beta chain variable domain of TCR clone 340464 (TRBV19, TRBJ2-5)
CASSIGQVTDFFLGETQYF

SEQ ID NO: 680929 - protein, 14 aa, Homo sapiens
  CDR3 for alpha chain variable domain of TCR clone 340465 (TRAV1-2, TRAJ27)
CAPAEYTNAGKSTF

SEQ ID NO: 680930 - protein, 18 aa, Homo sapiens
  CDR3 for beta chain variable domain of TCR clone 340465 (TRBV28, TRBJ1-2)
CASRQQQGERGSNYGYTF

SEQ ID NO: 680931 - protein, 13 aa, Homo sapiens
  CDR3 for alpha chain variable domain of TCR clone 340466 (TRAV2, TRAJ40)
CAVVTSGTYKYIF

SEQ ID NO: 680932 - protein, 14 aa, Homo sapiens
  CDR3 for beta chain variable domain of TCR clone 340466 (TRBV19, TRBJ2-1)
CASLTFVLSGEKFF

SEQ ID NO: 680933 - protein, 13 aa, Homo sapiens
  CDR3 for alpha chain variable domain of TCR clone 340467 (TRAV21, TRAJ37)
CAVSSGNTGKLIF

SEQ ID NO: 680934 - protein, 16 aa, Homo sapiens
  CDR3 for beta chain variable domain of TCR clone 340467 (TRBV7-3, TRBJ2-2)
CASSLKRGTLSGELFF

SEQ ID NO: 680935 - protein, 14 aa, Homo sapiens
  CDR3 for alpha chain variable domain of TCR clone 340468 (TRAV8-1, TRAJ4)
CAVPFSGGYNKLIF

SEQ ID NO: 680936 - protein, 16 aa, Homo sapiens
  CDR3 for beta chain variable domain of TCR clone 340468 (TRBV6-1, TRBJ1-2)
CASSGAWQVRSHGYTF

SEQ ID NO: 680937 - protein, 13 aa, Homo sapiens
  CDR3 for alpha chain variable domain of TCR clone 340469 (TRAV12-2, TRAJ42)
CAVKRGSQGNLIF

SEQ ID NO: 680938 - protein, 13 aa, Homo sapiens
  CDR3 for beta chain variable domain of TCR clone 340469 (TRBV10-3, TRBJ2-7)
CASKLAVNYEQYF

SEQ ID NO: 680939 - protein, 17 aa, Homo sapiens
  CDR3 for alpha chain variable domain of TCR clone 340470 (TRAV3, TRAJ42)
CAVRDRDYGGSQGNLIF

SEQ ID NO: 680940 - protein, 13 aa, Homo sapiens
  CDR3 for beta chain variable domain of TCR clone 340470 (TRBV10-3, TRBJ2-7)
CASKLAVSYEQYF

SEQ ID NO: 680941 - protein, 13 aa, Homo sapiens
  CDR3 for alpha chain variable domain of TCR clone 340471 (TRAV12-1, TRAJ40)
CVVNSSGTYQYIF

SEQ ID NO: 680942 - protein, 14 aa, Homo sapiens
  CDR3 for beta chain variable domain of TCR clone 340471 (TRBV2, TRBJ1-6)
CASEVSSYNSPLHF

SEQ ID NO: 680943 - protein, 14 aa, Homo sapiens
  CDR3 for alpha chain variable domain of TCR clone 340472 (TRAV1-2, TRAJ8)
CAVREDTDFQKLVF

SEQ ID NO: 680944 - protein, 16 aa, Homo sapiens
  CDR3 for beta chain variable domain of TCR clone 340472 (TRBV28, TRBJ1-4)
CASSPPYRGRSEKLFF

SEQ ID NO: 680945 - protein, 14 aa, Homo sapiens
  CDR3 for alpha chain variable domain of TCR clone 340473 (TRAV3, TRAJ7)
CAVREEEREQQTRF

SEQ ID NO: 680946 - protein, 13 aa, Homo sapiens
  CDR3 for beta chain variable domain of TCR clone 340473 (TRBV7-6, TRBJ1-2)
CASSLVADYGYTF

SEQ ID NO: 680947 - protein, 18 aa, Homo sapiens
  CDR3 for alpha chain variable domain of TCR clone 340474 (TRAV26-2, TRAJ32)
CILRAPLNYGGATNKLIF

SEQ ID NO: 680948 - protein, 20 aa, Homo sapiens
  CDR3 for beta chain variable domain of TCR clone 340474 (TRBV7-8, TRBJ2-2)
CASSHLFPGPTIHITGELFF

SEQ ID NO: 680949 - protein, 23 aa, Homo sapiens
  CDR3 for alpha chain variable domain of TCR clone 340475 (TRAV1-2, TRAJ26)
CAVRDLITMVRILSLVPESDCPF

SEQ ID NO: 680950 - protein, 14 aa, Homo sapiens
  CDR3 for beta chain variable domain of TCR clone 340475 (TRBV10-1, TRBJ2-5)
CASSESQGAKTQYF

SEQ ID NO: 680951 - protein, 14 aa, Homo sapiens
  CDR3 for alpha chain variable domain of TCR clone 340476 (TRAV16, TRAJ33)
CALSAMDSNYQLIW

SEQ ID NO: 680952 - protein, 15 aa, Homo sapiens
  CDR3 for beta chain variable domain of TCR clone 340476 (TRBV28, TRBJ2-7)
CASSLEAYPIYEQDF

SEQ ID NO: 680953 - protein, 12 aa, Homo sapiens
  CDR3 for alpha chain variable domain of TCR clone 340477 (TRAV12-3, TRAJ17)
CAMTLTGNKLTV

SEQ ID NO: 680954 - protein, 15 aa, Homo sapiens
  CDR3 for beta chain variable domain of TCR clone 340477 (TRBV20-1, TRBJ2-7)
CSARDRVAGMDEQYF

SEQ ID NO: 680955 - protein, 11 aa, Homo sapiens
  CDR3 for alpha chain variable domain of TCR clone 340478 (TRAV1-2, TRAJ20)
CAMSNDYKLSF

SEQ ID NO: 680956 - protein, 13 aa, Homo sapiens
  CDR3 for beta chain variable domain of TCR clone 340478 (TRBV7-9, TRBJ1-2)
CASSLKQNYGYTF

SEQ ID NO: 680957 - protein, 10 aa, Homo sapiens
  CDR3 for alpha chain variable domain of TCR clone 340479 (TRAV1-2, TRAJ20)
CACNDYKLSF

SEQ ID NO: 680958 - protein, 14 aa, Homo sapiens
  CDR3 for beta chain variable domain of TCR clone 340479 (TRBV13, TRBJ2-5)
CASYRRLAEETQYF

SEQ ID NO: 680959 - protein, 16 aa, Homo sapiens
  CDR3 for alpha chain variable domain of TCR clone 340480 (TRAV12-3, TRAJ53)
CAMSPGSGGSNYKLTF

SEQ ID NO: 680960 - protein, 14 aa, Homo sapiens
  CDR3 for beta chain variable domain of TCR clone 340480 (TRBV7-9, TRBJ2-2)
CASSGLADTGELFF

SEQ ID NO: 680961 - protein, 13 aa, Homo sapiens
  CDR3 for alpha chain variable domain of TCR clone 340481 (TRAV17, TRAJ5)
CAPMDTGRRALTF

SEQ ID NO: 680962 - protein, 15 aa, Homo sapiens
  CDR3 for beta chain variable domain of TCR clone 340481 (TRBV7-9, TRBJ1-5)
CASSQGHQPNQPQHF

SEQ ID NO: 680963 - protein, 15 aa, Homo sapiens
  CDR3 for alpha chain variable domain of TCR clone 340482 (TRAV27, TRAJ38)
CAARRNAGNNRKPIW

SEQ ID NO: 680964 - protein, 13 aa, Homo sapiens
  CDR3 for beta chain variable domain of TCR clone 340482 (TRBV20-1, TRBJ1-1)
CSARAGGNTEAFF

SEQ ID NO: 680965 - protein, 11 aa, Homo sapiens
  CDR3 for alpha chain variable domain of TCR clone 340483 (TRAV12-2, TRAJ30)
CAVGRDDKIIF

SEQ ID NO: 680966 - protein, 22 aa, Homo sapiens
  CDR3 for beta chain variable domain of TCR clone 340483 (TRBV6-1, TRBJ1-3)
CASVQGGGWKHHIFWRGKLAHC

SEQ ID NO: 680967 - protein, 16 aa, Homo sapiens
  CDR3 for alpha chain variable domain of TCR clone 340484 (TRAV30, TRAJ24)
CGTEIVDADSWGKFQV

SEQ ID NO: 680968 - protein, 13 aa, Homo sapiens
  CDR3 for beta chain variable domain of TCR clone 340484 (TRBV7-2, TRBJ1-4)
CASSLAGLEKLFF

SEQ ID NO: 680969 - protein, 12 aa, Homo sapiens
  CDR3 for alpha chain variable domain of TCR clone 340485 (TRAV12-1, TRAJ40)
CVVYSGTYKYIF

SEQ ID NO: 680970 - protein, 12 aa, Homo sapiens
  CDR3 for beta chain variable domain of TCR clone 340485 (TRBV28, TRBJ2-6)
CAIQAGANVLTF

SEQ ID NO: 680971 - protein, 15 aa, Homo sapiens
  CDR3 for alpha chain variable domain of TCR clone 340486 (TRAV13-1, TRAJ32)
CAASIFGGATTKLIF

SEQ ID NO: 680972 - protein, 14 aa, Homo sapiens
  CDR3 for beta chain variable domain of TCR clone 340486 (TRBV7-9, TRBJ2-1)
CASSLASGSNEQFF

SEQ ID NO: 680973 - protein, 15 aa, Homo sapiens
  CDR3 for alpha chain variable domain of TCR clone 340487 (TRAV17, TRAJ57)
CVTGPSQGGSEKLVF

SEQ ID NO: 680974 - protein, 13 aa, Homo sapiens
  CDR3 for beta chain variable domain of TCR clone 340487 (TRBV11-2, TRBJ2-5)
CASSSTGEETQYF

SEQ ID NO: 680975 - protein, 13 aa, Homo sapiens
  CDR3 for alpha chain variable domain of TCR clone 340488 (TRAV38-2/DV8, TRAJ34)
CAYRTWNTDKLIF

SEQ ID NO: 680976 - protein, 12 aa, Homo sapiens
  CDR3 for beta chain variable domain of TCR clone 340488 (TRBV7-9, TRBJ2-7)
CASSLEGYEQYF

SEQ ID NO: 680977 - protein, 13 aa, Homo sapiens
  CDR3 for alpha chain variable domain of TCR clone 340489 (TRAV12-3, TRAJ6)
CANPSGGSYIPTF

SEQ ID NO: 680978 - protein, 14 aa, Homo sapiens
  CDR3 for beta chain variable domain of TCR clone 340489 (TRBV19, TRBJ1-1)
CGSSRDRDATEAFF

SEQ ID NO: 680979 - protein, 15 aa, Homo sapiens
  CDR3 for alpha chain variable domain of TCR clone 340490 (TRAV13-1, TRAJ57)
CAASNTQGGSEKLVF

SEQ ID NO: 680980 - protein, 16 aa, Homo sapiens
  CDR3 for beta chain variable domain of TCR clone 340490 (TRBV19, TRBJ2-1)
CASSKAGPSSYNEQFV

SEQ ID NO: 680981 - protein, 12 aa, Homo sapiens
  CDR3 for alpha chain variable domain of TCR clone 340491 (TRAV12-1, TRAJ40)
CVVYSGTYKYIF

SEQ ID NO: 680982 - protein, 16 aa, Homo sapiens
  CDR3 for beta chain variable domain of TCR clone 340491 (TRBV4-1, TRBJ1-5)
CASSPRGGLSPSILVM

SEQ ID NO: 680983 - protein, 14 aa, Homo sapiens
  CDR3 for alpha chain variable domain of TCR clone 340492 (TRAV1-2, TRAJ8)
CAVREDTGFQKLLF

SEQ ID NO: 680984 - protein, 17 aa, Homo sapiens
  CDR3 for beta chain variable domain of TCR clone 340492 (TRBV6-5, TRBJ2-7)
CASRQSVGEVQHYEQYF

SEQ ID NO: 680985 - protein, 13 aa, Homo sapiens
  CDR3 for alpha chain variable domain of TCR clone 340493 (TRAV13-1, TRAJ8)
CAASIRGFQKLVF

SEQ ID NO: 680986 - protein, 14 aa, Homo sapiens
  CDR3 for beta chain variable domain of TCR clone 340493 (TRBV7-2, TRBJ2-1)
CASSLVQGRNEQFL

SEQ ID NO: 680987 - protein, 18 aa, Homo sapiens
  CDR3 for alpha chain variable domain of TCR clone 340494 (TRAV12-3, TRAJ52)
CAMSVAGAGGTSYGKLTF

SEQ ID NO: 680988 - protein, 14 aa, Homo sapiens
  CDR3 for beta chain variable domain of TCR clone 340494 (TRBV7-2, TRBJ2-7)
CASRSQGAAYEQYF

SEQ ID NO: 680989 - protein, 15 aa, Homo sapiens
  CDR3 for alpha chain variable domain of TCR clone 340495 (TRAV12-3, TRAJ17)
CAMSPSLAAGNKLTF

SEQ ID NO: 680990 - protein, 15 aa, Homo sapiens
  CDR3 for beta chain variable domain of TCR clone 340495 (TRBV27, TRBJ2-5)
CASSLIPSGGETQYF

SEQ ID NO: 680991 - protein, 13 aa, Homo sapiens
  CDR3 for alpha chain variable domain of TCR clone 340496 (TRAV20, TRAJ31)
CAVQAIGGARLMF

SEQ ID NO: 680992 - protein, 14 aa, Homo sapiens
  CDR3 for beta chain variable domain of TCR clone 340496 (TRBV18, TRBJ2-5)
CASSPGVSQETQYF

SEQ ID NO: 680993 - protein, 16 aa, Homo sapiens
  CDR3 for alpha chain variable domain of TCR clone 340497 (TRAV38-1, TRAJ32)
CAFMKGGGGATNKLIF

SEQ ID NO: 680994 - protein, 17 aa, Homo sapiens
  CDR3 for beta chain variable domain of TCR clone 340497 (TRBV13, TRBJ2-3)
CASSLSRVAGGRNTQYF

SEQ ID NO: 680995 - protein, 12 aa, Homo sapiens
  CDR3 for alpha chain variable domain of TCR clone 340498 (TRAV13-1, TRAJ21)
CAAKEGFNKFYF

SEQ ID NO: 680996 - protein, 15 aa, Homo sapiens
  CDR3 for beta chain variable domain of TCR clone 340498 (TRBV15, TRBJ1-5)
CATSRAPVSNQPQHF

SEQ ID NO: 680997 - protein, 13 aa, Homo sapiens
  CDR3 for alpha chain variable domain of TCR clone 340499 (TRAV27, TRAJ8)
CAGGPTGFQKLVF

SEQ ID NO: 680998 - protein, 15 aa, Homo sapiens
  CDR3 for beta chain variable domain of TCR clone 340499 (TRBV20-1, TRBJ2-7)
CSAVEGLAGGYEQYF

SEQ ID NO: 680999 - protein, 15 aa, Homo sapiens
  CDR3 for alpha chain variable domain of TCR clone 340500 (TRAV12-2, TRAJ32)
CAVNHYGGSTNKLIF

SEQ ID NO: 681000 - protein, 14 aa, Homo sapiens
  CDR3 for beta chain variable domain of TCR clone 340500 (TRBV27, TRBJ2-1)
CASSFGREANEQFF

SEQ ID NO: 681001 - protein, 17 aa, Homo sapiens
  CDR3 for alpha chain variable domain of TCR clone 340501 (TRAV13-1, TRAJ53)
CAARWKSSGGSNYKLTF

SEQ ID NO: 681002 - protein, 19 aa, Homo sapiens
  CDR3 for beta chain variable domain of TCR clone 340501 (TRBV7-9, TRBJ2-1)
CASSHNRGALLRSYNEQFF

SEQ ID NO: 681003 - protein, 10 aa, Homo sapiens
  CDR3 for alpha chain variable domain of TCR clone 340502 (TRAV30, TRAJ48)
CGIGTEKLTF

SEQ ID NO: 681004 - protein, 15 aa, Homo sapiens
  CDR3 for beta chain variable domain of TCR clone 340502 (TRBV28, TRBJ2-1)
CASRRTGTAYNEQFF

SEQ ID NO: 681005 - protein, 16 aa, Homo sapiens
  CDR3 for alpha chain variable domain of TCR clone 340503 (TRAV30, TRAJ24)
CGTETVDADSWGKFKF

SEQ ID NO: 681006 - protein, 14 aa, Homo sapiens
  CDR3 for beta chain variable domain of TCR clone 340503 (TRBV12-5, TRBJ2-5)
CASGSRTHQETQCF

SEQ ID NO: 681007 - protein, 15 aa, Homo sapiens
  CDR3 for alpha chain variable domain of TCR clone 340504 (TRAV35, TRAJ20)
CAGQLFGSNDYKLSF

SEQ ID NO: 681008 - protein, 13 aa, Homo sapiens
  CDR3 for beta chain variable domain of TCR clone 340504 (TRBV19, TRBJ2-7)
CASSKTGTHEQYF

SEQ ID NO: 681009 - protein, 12 aa, Homo sapiens
  CDR3 for alpha chain variable domain of TCR clone 340505 (TRAV16, TRAJ10)
CSRTGGGNKLTF

SEQ ID NO: 681010 - protein, 19 aa, Homo sapiens
  CDR3 for beta chain variable domain of TCR clone 340505 (TRBV25-1, TRBJ2-2)
CAILGYRVDRGRKTGELFF

SEQ ID NO: 681011 - protein, 16 aa, Homo sapiens
  CDR3 for alpha chain variable domain of TCR clone 340506 (TRAV12-2, TRAJ18)
CAVTTDRGPTLGRLYF

SEQ ID NO: 681012 - protein, 14 aa, Homo sapiens
  CDR3 for beta chain variable domain of TCR clone 340506 (TRBV7-2, TRBJ1-6)
CASSLTGVNSPLHF

SEQ ID NO: 681013 - protein, 12 aa, Homo sapiens
  CDR3 for alpha chain variable domain of TCR clone 340507 (TRAV8-3, TRAJ41)
CAVALSGYARNF

SEQ ID NO: 681014 - protein, 16 aa, Homo sapiens
  CDR3 for beta chain variable domain of TCR clone 340507 (TRBV27, TRBJ2-7)
CASSSERRDSAYEQYF

SEQ ID NO: 681015 - protein, 15 aa, Homo sapiens
  CDR3 for alpha chain variable domain of TCR clone 340508 (TRAV4, TRAJ17)
CLVSDIGAAGNKLTF

SEQ ID NO: 681016 - protein, 14 aa, Homo sapiens
  CDR3 for beta chain variable domain of TCR clone 340508 (TRBV6-3, TRBJ2-7)
CASSYSVRVYEQYF

SEQ ID NO: 681017 - protein, 14 aa, Homo sapiens
  CDR3 for alpha chain variable domain of TCR clone 340509 (TRAV13-1, TRAJ40)
CAARSTSGTYKYIF

SEQ ID NO: 681018 - protein, 16 aa, Homo sapiens
  CDR3 for beta chain variable domain of TCR clone 340509 (TRBV6-1, TRBJ2-5)
CASSETLDRGAETQYF

SEQ ID NO: 681019 - protein, 14 aa, Homo sapiens
  CDR3 for alpha chain variable domain of TCR clone 340510 (TRAV13-1, TRAJ39)
CAASKNNAGNMLAF

SEQ ID NO: 681020 - protein, 15 aa, Homo sapiens
  CDR3 for beta chain variable domain of TCR clone 340510 (TRBV7-9, TRBJ1-6)
CASSSPGRGNSPLHF

SEQ ID NO: 681021 - protein, 15 aa, Homo sapiens
  CDR3 for alpha chain variable domain of TCR clone 340511 (TRAV10, TRAJ10)
CVVRGLTGGGNKLPF

SEQ ID NO: 681022 - protein, 15 aa, Homo sapiens
  CDR3 for beta chain variable domain of TCR clone 340511 (TRBV6-1, TRBJ2-2)
CAILTGTRDTGELFF

SEQ ID NO: 681023 - protein, 13 aa, Homo sapiens
  CDR3 for alpha chain variable domain of TCR clone 340512 (TRAV36/DV7, TRAJ37)
CAVFSSNTGKLIF

SEQ ID NO: 681024 - protein, 14 aa, Homo sapiens
  CDR3 for beta chain variable domain of TCR clone 340512 (TRBV7-6, TRBJ2-7)
CASSFRQGADEQYF

SEQ ID NO: 681025 - protein, 15 aa, Homo sapiens
  CDR3 for alpha chain variable domain of TCR clone 340513 (TRAV29/DV5, TRAJ29)
CAASERSSGNTPLVF

SEQ ID NO: 681026 - protein, 13 aa, Homo sapiens
  CDR3 for beta chain variable domain of TCR clone 340513 (TRBV19, TRBJ1-3)
CASRLSLGNTIYF

SEQ ID NO: 681027 - protein, 13 aa, Homo sapiens
  CDR3 for alpha chain variable domain of TCR clone 340514 (TRAV35, TRAJ42)
CAGFPGSQGNLMF

SEQ ID NO: 681028 - protein, 13 aa, Homo sapiens
  CDR3 for beta chain variable domain of TCR clone 340514 (TRBV29-1, TRBJ2-1)
CSVEGGRVNEQFF

SEQ ID NO: 681029 - protein, 14 aa, Homo sapiens
  CDR3 for alpha chain variable domain of TCR clone 340515 (TRAV23/DV6, TRAJ27)
FAASRDTNAGKSTF

SEQ ID NO: 681030 - protein, 13 aa, Homo sapiens
  CDR3 for beta chain variable domain of TCR clone 340515 (TRBV20-1, TRBJ1-5)
CSASGRGNQPQHF

SEQ ID NO: 681031 - protein, 14 aa, Homo sapiens
  CDR3 for alpha chain variable domain of TCR clone 340516 (TRAV1-1, TRAJ27)
CADDRGLGVTNSLS

SEQ ID NO: 681032 - protein, 17 aa, Homo sapiens
  CDR3 for beta chain variable domain of TCR clone 340516 (TRBV6-1, TRBJ1-1)
CASSPGTGGRIGTEAFF

SEQ ID NO: 681033 - protein, 14 aa, Homo sapiens
  CDR3 for alpha chain variable domain of TCR clone 340517 (TRAV2, TRAJ9)
CAVEDRGGGFKTIF

SEQ ID NO: 681034 - protein, 15 aa, Homo sapiens
  CDR3 for beta chain variable domain of TCR clone 340517 (TRBV25-1, TRBJ1-4)
CASSPGDSTNEKLFF

SEQ ID NO: 681035 - protein, 14 aa, Homo sapiens
  CDR3 for alpha chain variable domain of TCR clone 340518 (TRAV2, TRAJ37)
CAVDFTSNTGKLIF

SEQ ID NO: 681036 - protein, 14 aa, Homo sapiens
  CDR3 for beta chain variable domain of TCR clone 340518 (TRBV11-2, TRBJ2-3)
CASSRLARTDTQYF

SEQ ID NO: 681037 - protein, 18 aa, Homo sapiens
  CDR3 for alpha chain variable domain of TCR clone 340519 (TRAV2, TRAJ32)
CCLLLCFHYGGATNKLSF

SEQ ID NO: 681038 - protein, 16 aa, Homo sapiens
  CDR3 for beta chain variable domain of TCR clone 340519 (TRBV7-9, TRBJ2-7)
CASSYPDREGGYEQYF

SEQ ID NO: 681039 - protein, 14 aa, Homo sapiens
  CDR3 for alpha chain variable domain of TCR clone 340520 (TRAV12-2, TRAJ45)
CALPERGGADGLTF

SEQ ID NO: 681040 - protein, 17 aa, Homo sapiens
  CDR3 for beta chain variable domain of TCR clone 340520 (TRBV7-8, TRBJ2-6)
CASSGGTGGAGANVPTF

SEQ ID NO: 681041 - protein, 15 aa, Homo sapiens
  CDR3 for alpha chain variable domain of TCR clone 340521 (TRAV21, TRAJ53)
CATLNSGGRNYKLTF

SEQ ID NO: 681042 - protein, 15 aa, Homo sapiens
  CDR3 for beta chain variable domain of TCR clone 340521 (TRBV5-1, TRBJ2-3)
CASSYTSGSTDTQYF

SEQ ID NO: 681043 - protein, 18 aa, Homo sapiens
  CDR3 for alpha chain variable domain of TCR clone 340522 (TRAV21, TRAJ52)
CAVRPSPAGGTSYGKLTF

SEQ ID NO: 681044 - protein, 15 aa, Homo sapiens
  CDR3 for beta chain variable domain of TCR clone 340522 (TRBV7-9, TRBJ2-5)
CASSLVAGGLETQYF

SEQ ID NO: 681045 - protein, 14 aa, Homo sapiens
  CDR3 for alpha chain variable domain of TCR clone 340523 (TRAV17, TRAJ40)
CATALTSGTYKYIF

SEQ ID NO: 681046 - protein, 13 aa, Homo sapiens
  CDR3 for beta chain variable domain of TCR clone 340523 (TRBV7-9, TRBJ2-2)
CASSLDPTGELFF

SEQ ID NO: 681047 - protein, 12 aa, Homo sapiens
  CDR3 for alpha chain variable domain of TCR clone 340524 (TRAV1-1, TRAJ8)
CAGGTGFQKLVF

SEQ ID NO: 681048 - protein, 13 aa, Homo sapiens
  CDR3 for beta chain variable domain of TCR clone 340524 (TRBV7-9, TRBJ1-2)
CASSLKQDYGYTF

SEQ ID NO: 681049 - protein, 15 aa, Homo sapiens
  CDR3 for alpha chain variable domain of TCR clone 340525 (TRAV8-3, TRAJ11)
CAVGLLNSGYSTLTF

SEQ ID NO: 681050 - protein, 18 aa, Homo sapiens
  CDR3 for beta chain variable domain of TCR clone 340525 (TRBV11-3, TRBJ2-3)
CASSLGGASRGAPNTQYF

SEQ ID NO: 681051 - protein, 16 aa, Homo sapiens
  CDR3 for alpha chain variable domain of TCR clone 340526 (TRAV17, TRAJ22)
CATGPISSGSARQLTF

SEQ ID NO: 681052 - protein, 15 aa, Homo sapiens
  CDR3 for beta chain variable domain of TCR clone 340526 (TRBV6-3, TRBJ2-7)
CASSSPGTVFYEQYF

SEQ ID NO: 681053 - protein, 21 aa, Homo sapiens
  CDR3 for alpha chain variable domain of TCR clone 340527 (TRAV30, TRAJ43)
GLPAQLLRNLLPIIELNDMRF

SEQ ID NO: 681054 - protein, 14 aa, Homo sapiens
  CDR3 for beta chain variable domain of TCR clone 340527 (TRBV27, TRBJ2-1)
CASRHLGGRKERFF

SEQ ID NO: 681055 - protein, 13 aa, Homo sapiens
  CDR3 for alpha chain variable domain of TCR clone 340528 (TRAV12-2, TRAJ40)
CAVKRTGTYKYIF

SEQ ID NO: 681056 - protein, 15 aa, Homo sapiens
  CDR3 for beta chain variable domain of TCR clone 340528 (TRBV12-4, TRBJ1-2)
CASSTITGGGYGYTF

SEQ ID NO: 681057 - protein, 13 aa, Homo sapiens
  CDR3 for alpha chain variable domain of TCR clone 340529 (TRAV3, TRAJ20)
CAVRDTPRYKLSF

SEQ ID NO: 681058 - protein, 11 aa, Homo sapiens
  CDR3 for beta chain variable domain of TCR clone 340529 (TRBV12-4, TRBJ2-3)
CASTATDTQYF

SEQ ID NO: 681059 - protein, 17 aa, Homo sapiens
  CDR3 for alpha chain variable domain of TCR clone 340530 (TRAV4, TRAJ42)
FLVGVLNYGGSQGNLIF

SEQ ID NO: 681060 - protein, 12 aa, Homo sapiens
  CDR3 for beta chain variable domain of TCR clone 340530 (TRBV20-1, TRBJ2-1)
CSAQYAYNEQFF

SEQ ID NO: 681061 - protein, 15 aa, Homo sapiens
  CDR3 for alpha chain variable domain of TCR clone 340531 (TRAV26-1, TRAJ29)
CIVRVEGSGNTPLVF

SEQ ID NO: 681062 - protein, 14 aa, Homo sapiens
  CDR3 for beta chain variable domain of TCR clone 340531 (TRBV5-5, TRBJ1-5)
CASSGQGVDQTQHF

SEQ ID NO: 681063 - protein, 14 aa, Homo sapiens
  CDR3 for alpha chain variable domain of TCR clone 340532 (TRAV8-2, TRAJ4)
CVVSPSGGYNKLIF

SEQ ID NO: 681064 - protein, 14 aa, Homo sapiens
  CDR3 for beta chain variable domain of TCR clone 340532 (TRBV4-1, TRBJ2-2)
CASSQAVNTGELFF

SEQ ID NO: 681065 - protein, 13 aa, Homo sapiens
  CDR3 for alpha chain variable domain of TCR clone 340533 (TRAV13-1, TRAJ6)
CAASRGGSYIPTF

SEQ ID NO: 681066 - protein, 15 aa, Homo sapiens
  CDR3 for beta chain variable domain of TCR clone 340533 (TRBV25-1, TRBJ2-5)
CASSDKGTHQETQYF

SEQ ID NO: 681067 - protein, 14 aa, Homo sapiens
  CDR3 for alpha chain variable domain of TCR clone 340534 (TRAV1-2, TRAJ16)
CAVNRFSDGQKLLF

SEQ ID NO: 681068 - protein, 16 aa, Homo sapiens
  CDR3 for beta chain variable domain of TCR clone 340534 (TRBV7-3, TRBJ2-2)
CASSLKRWTLSGELFF

SEQ ID NO: 681069 - protein, 14 aa, Homo sapiens
  CDR3 for alpha chain variable domain of TCR clone 340535 (TRAV13-2, TRAJ54)
CAENMWGACGSPEA

SEQ ID NO: 681070 - protein, 15 aa, Homo sapiens
  CDR3 for beta chain variable domain of TCR clone 340535 (TRBV27, TRBJ2-7)
CASSPQREGQREQYF

SEQ ID NO: 681071 - protein, 14 aa, Homo sapiens
  CDR3 for alpha chain variable domain of TCR clone 340536 (TRAV16, TRAJ54)
CALSGVQGAQKLVL

SEQ ID NO: 681072 - protein, 15 aa, Homo sapiens
  CDR3 for beta chain variable domain of TCR clone 340536 (TRBV18, TRBJ2-2)
CASSTSGLHTGELFF

SEQ ID NO: 681073 - protein, 17 aa, Homo sapiens
  CDR3 for alpha chain variable domain of TCR clone 340537 (TRAV3, TRAJ42)
CAVRDRDDGGSQGNPIL

SEQ ID NO: 681074 - protein, 12 aa, Homo sapiens
  CDR3 for beta chain variable domain of TCR clone 340537 (TRBV11-2, TRBJ2-1)
CASSPGNNEQFF

SEQ ID NO: 681075 - protein, 13 aa, Homo sapiens
  CDR3 for alpha chain variable domain of TCR clone 340538 (TRAV2, TRAJ40)
CAVVTSGTYKYIF

SEQ ID NO: 681076 - protein, 13 aa, Homo sapiens
  CDR3 for beta chain variable domain of TCR clone 340538 (TRBV25-1, TRBJ2-2)
CASRKANTGELFF

SEQ ID NO: 681077 - protein, 13 aa, Homo sapiens
  CDR3 for alpha chain variable domain of TCR clone 340539 (TRAV35, TRAJ36)
CAGPRIGANNLFF

SEQ ID NO: 681078 - protein, 15 aa, Homo sapiens
  CDR3 for beta chain variable domain of TCR clone 340539 (TRBV28, TRBJ2-5)
CASSPPWSYQQTQYF

SEQ ID NO: 681079 - protein, 14 aa, Homo sapiens
  CDR3 for alpha chain variable domain of TCR clone 340540 (TRAV12-1, TRAJ9)
CVVTGYSGGFKAIF

SEQ ID NO: 681080 - protein, 13 aa, Homo sapiens
  CDR3 for beta chain variable domain of TCR clone 340540 (TRBV20-1, TRBJ1-1)
CSARAGGNTEAFF

SEQ ID NO: 681081 - protein, 13 aa, Homo sapiens
  CDR3 for alpha chain variable domain of TCR clone 340541 (TRAV3, TRAJ20)
CAVRDTPRYKLSF

SEQ ID NO: 681082 - protein, 14 aa, Homo sapiens
  CDR3 for beta chain variable domain of TCR clone 340541 (TRBV7-2, TRBJ1-1)
CASSFLTGTTEAFF

SEQ ID NO: 681083 - protein, 15 aa, Homo sapiens
  CDR3 for alpha chain variable domain of TCR clone 340542 (TRAV12-3, TRAJ6)
CAMSATTGGSYIPTF

SEQ ID NO: 681084 - protein, 14 aa, Homo sapiens
  CDR3 for beta chain variable domain of TCR clone 340542 (TRBV7-8, TRBJ2-3)
CASSFKSSTDTQYF

SEQ ID NO: 681085 - protein, 16 aa, Homo sapiens
  CDR3 for alpha chain variable domain of TCR clone 340543 (TRAV17, TRAJ28)
CATASVSGAGSYQLTF

SEQ ID NO: 681086 - protein, 11 aa, Homo sapiens
  CDR3 for beta chain variable domain of TCR clone 340543 (TRBV7-9, TRBJ2-5)
CAISLGETQYF

SEQ ID NO: 681087 - protein, 16 aa, Homo sapiens
  CDR3 for alpha chain variable domain of TCR clone 340544 (TRAV20, TRAJ38)
CAVQASNAGTSRKLIW

SEQ ID NO: 681088 - protein, 16 aa, Homo sapiens
  CDR3 for beta chain variable domain of TCR clone 340544 (TRBV7-8, TRBJ2-6)
CASRVGDSSGANVLTF

SEQ ID NO: 681089 - protein, 13 aa, Homo sapiens
  CDR3 for alpha chain variable domain of TCR clone 340545 (TRAV17, TRAJ5)
CATMDTVRRALTF

SEQ ID NO: 681090 - protein, 15 aa, Homo sapiens
  CDR3 for beta chain variable domain of TCR clone 340545 (TRBV20-1, TRBJ2-5)
CSATRTSGSLETQYV

SEQ ID NO: 681091 - protein, 18 aa, Homo sapiens
  CDR3 for alpha chain variable domain of TCR clone 340546 (TRAV13-1, TRAJ52)
CAASKRSAGGTSYVKLTF

SEQ ID NO: 681092 - protein, 11 aa, Homo sapiens
  CDR3 for beta chain variable domain of TCR clone 340546 (TRBV11-2, TRBJ2-2)
CASSLPGELFF

SEQ ID NO: 681093 - protein, 18 aa, Homo sapiens
  CDR3 for alpha chain variable domain of TCR clone 340547 (TRAV17, TRAJ45)
CATSLDLYSGGGADGLTF

SEQ ID NO: 681094 - protein, 15 aa, Homo sapiens
  CDR3 for beta chain variable domain of TCR clone 340547 (TRBV11-2, TRBJ2-1)
RASSKNRGLIYEQFF

SEQ ID NO: 681095 - protein, 17 aa, Homo sapiens
  CDR3 for alpha chain variable domain of TCR clone 340548 (TRAV3, TRAJ12)
CAVRDGGRMDSSYKLIF

SEQ ID NO: 681096 - protein, 14 aa, Homo sapiens
  CDR3 for beta chain variable domain of TCR clone 340548 (TRBV7-9, TRBJ1-2)
CASSRQGANYGYTV

SEQ ID NO: 681097 - protein, 13 aa, Homo sapiens
  CDR3 for alpha chain variable domain of TCR clone 340549 (TRAV22, TRAJ33)
CCEGWGSNYQLIW

SEQ ID NO: 681098 - protein, 15 aa, Homo sapiens
  CDR3 for beta chain variable domain of TCR clone 340549 (TRBV7-2, TRBJ2-7)
CASSLKGALTYEQYF

SEQ ID NO: 681099 - protein, 15 aa, Homo sapiens
  CDR3 for alpha chain variable domain of TCR clone 340550 (TRAV12-3, TRAJ6)
CAMSATTGGSHIPTF

SEQ ID NO: 681100 - protein, 16 aa, Homo sapiens
  CDR3 for beta chain variable domain of TCR clone 340550 (TRBV20-1, TRBJ1-2)
CNASMGQGVANYGYTF

SEQ ID NO: 681101 - protein, 14 aa, Homo sapiens
  CDR3 for alpha chain variable domain of TCR clone 340551 (TRAV17, TRAJ57)
CATDPQGGSEKLVF

SEQ ID NO: 681102 - protein, 13 aa, Homo sapiens
  CDR3 for beta chain variable domain of TCR clone 340551 (TRBV7-3, TRBJ2-5)
CASSFRGGETQYF

SEQ ID NO: 681103 - protein, 13 aa, Homo sapiens
  CDR3 for alpha chain variable domain of TCR clone 340552 (TRAV12-3, TRAJ33)
CAMSVNSNYQLIW

SEQ ID NO: 681104 - protein, 11 aa, Homo sapiens
  CDR3 for beta chain variable domain of TCR clone 340552 (TRBV29-1, TRBJ2-2)
CSATSFGELFF

SEQ ID NO: 681105 - protein, 16 aa, Homo sapiens
  CDR3 for alpha chain variable domain of TCR clone 340553 (TRAV30, TRAJ24)
CGTEIVDADSWGKFQF

SEQ ID NO: 681106 - protein, 15 aa, Homo sapiens
  CDR3 for beta chain variable domain of TCR clone 340553 (TRBV28, TRBJ2-7)
CASSLEAYPIYEQYF

SEQ ID NO: 681107 - protein, 12 aa, Homo sapiens
  CDR3 for alpha chain variable domain of TCR clone 340554 (TRAV21, TRAJ23)
CAVMLRGGKLIF

SEQ ID NO: 681108 - protein, 14 aa, Homo sapiens
  CDR3 for beta chain variable domain of TCR clone 340554 (TRBV7-9, TRBJ1-4)
CAITEGEANEKLFF

SEQ ID NO: 681109 - protein, 11 aa, Homo sapiens
  CDR3 for alpha chain variable domain of TCR clone 340555 (TRAV1-2, TRAJ31)
CAVNNNARPMF

SEQ ID NO: 681110 - protein, 15 aa, Homo sapiens
  CDR3 for beta chain variable domain of TCR clone 340555 (TRBV28, TRBJ2-1)
CAISIIAGGRSEQFF

SEQ ID NO: 681111 - protein, 14 aa, Homo sapiens
  CDR3 for alpha chain variable domain of TCR clone 340556 (TRAV3, TRAJ21)
CAVECQANFNKFYF

SEQ ID NO: 681112 - protein, 18 aa, Homo sapiens
  CDR3 for beta chain variable domain of TCR clone 340556 (TRBV7-9, TRBJ2-1)
CASSLAASGTSGRNEQFF

SEQ ID NO: 681113 - protein, 14 aa, Homo sapiens
  CDR3 for alpha chain variable domain of TCR clone 340557 (TRAV26-1, TRAJ45)
CIIRVVGGADGLTF

SEQ ID NO: 681114 - protein, 16 aa, Homo sapiens
  CDR3 for beta chain variable domain of TCR clone 340557 (TRBV7-9, TRBJ1-1)
CASSLTQVRSNTEAFF

SEQ ID NO: 681115 - protein, 10 aa, Homo sapiens
  CDR3 for alpha chain variable domain of TCR clone 340558 (TRAV1-2, TRAJ23)
YAGQGGKLIF

SEQ ID NO: 681116 - protein, 13 aa, Homo sapiens
  CDR3 for beta chain variable domain of TCR clone 340558 (TRBV7-7, TRBJ2-3)
CASSLSRADTQYF

SEQ ID NO: 681117 - protein, 15 aa, Homo sapiens
  CDR3 for alpha chain variable domain of TCR clone 340559 (TRAV8-2, TRAJ40)
CVVLGTTSGTYKYIF

SEQ ID NO: 681118 - protein, 16 aa, Homo sapiens
  CDR3 for beta chain variable domain of TCR clone 340559 (TRBV7-3, TRBJ2-1)
CVSSLEGYRSYNEQFF

SEQ ID NO: 681119 - protein, 12 aa, Homo sapiens
  CDR3 for alpha chain variable domain of TCR clone 340560 (TRAV3, TRAJ43)
CAVRDPNNDMRF

SEQ ID NO: 681120 - protein, 13 aa, Homo sapiens
  CDR3 for beta chain variable domain of TCR clone 340560 (TRBV15, TRBJ1-6)
CATSGGLNSPLHF

SEQ ID NO: 681121 - protein, 14 aa, Homo sapiens
  CDR3 for alpha chain variable domain of TCR clone 340561 (TRAV3, TRAJ34)
CAVRDINNTHKLIF

SEQ ID NO: 681122 - protein, 14 aa, Homo sapiens
  CDR3 for beta chain variable domain of TCR clone 340561 (TRBV7-2, TRBJ2-2)
CASSLGQNTGELFF

SEQ ID NO: 681123 - protein, 14 aa, Homo sapiens
  CDR3 for alpha chain variable domain of TCR clone 340562 (TRAV16, TRAJ32)
CALKSRGATNKLIF

SEQ ID NO: 681124 - protein, 17 aa, Homo sapiens
  CDR3 for beta chain variable domain of TCR clone 340562 (TRBV20-1, TRBJ2-1)
CSASSSGLAGSYNEQFF

SEQ ID NO: 681125 - protein, 14 aa, Homo sapiens
  CDR3 for alpha chain variable domain of TCR clone 340563 (TRAV13-1, TRAJ3)
CAAEGYSSASKIIF

SEQ ID NO: 681126 - protein, 13 aa, Homo sapiens
  CDR3 for beta chain variable domain of TCR clone 340563 (TRBV7-6, TRBJ1-2)
CASSLVADYGYTF

SEQ ID NO: 681127 - protein, 15 aa, Homo sapiens
  CDR3 for alpha chain variable domain of TCR clone 340564 (TRAV26-1, TRAJ40)
CIVRVTTSGTYKYIF

SEQ ID NO: 681128 - protein, 14 aa, Homo sapiens
  CDR3 for beta chain variable domain of TCR clone 340564 (TRBV7-9, TRBJ2-1)
CASSSMVGFGEQFF

SEQ ID NO: 681129 - protein, 13 aa, Homo sapiens
  CDR3 for alpha chain variable domain of TCR clone 340565 (TRAV3, TRAJ20)
CSVRSLSDYKLSF

SEQ ID NO: 681130 - protein, 13 aa, Homo sapiens
  CDR3 for beta chain variable domain of TCR clone 340565 (TRBV6-1, TRBJ2-1)
CAGMDPTNNEQFF

SEQ ID NO: 681131 - protein, 16 aa, Homo sapiens
  CDR3 for alpha chain variable domain of TCR clone 340566 (TRAV3, TRAJ10)
CAVRDIRAGGGNKLTF

SEQ ID NO: 681132 - protein, 14 aa, Homo sapiens
  CDR3 for beta chain variable domain of TCR clone 340566 (TRBV25-1, TRBJ1-1)
CASTHLGGNTEALF

SEQ ID NO: 681133 - protein, 14 aa, Homo sapiens
  CDR3 for alpha chain variable domain of TCR clone 340567 (TRAV8-2, TRAJ4)
CVVSPSGGYNKLFF

SEQ ID NO: 681134 - protein, 15 aa, Homo sapiens
  CDR3 for beta chain variable domain of TCR clone 340567 (TRBV4-1, TRBJ1-4)
CASSDTGGTNERLFF

SEQ ID NO: 681135 - protein, 11 aa, Homo sapiens
  CDR3 for alpha chain variable domain of TCR clone 340568 (TRAV2, TRAJ33)
CAVDSNYQLIC

SEQ ID NO: 681136 - protein, 15 aa, Homo sapiens
  CDR3 for beta chain variable domain of TCR clone 340568 (TRBV19, TRBJ1-2)
CASSVGQVLNYGCTF

SEQ ID NO: 681137 - protein, 11 aa, Homo sapiens
  CDR3 for alpha chain variable domain of TCR clone 340569 (TRAV13-1, TRAJ6)
CATLGSYIPTF

SEQ ID NO: 681138 - protein, 12 aa, Homo sapiens
  CDR3 for beta chain variable domain of TCR clone 340569 (TRBV11-2, TRBJ2-1)
CASGPGNNEQFC

SEQ ID NO: 681139 - protein, 13 aa, Homo sapiens
  CDR3 for alpha chain variable domain of TCR clone 340570 (TRAV26-1, TRAJ30)
CIVRVESNDKIIF

SEQ ID NO: 681140 - protein, 15 aa, Homo sapiens
  CDR3 for beta chain variable domain of TCR clone 340570 (TRBV6-1, TRBJ2-3)
CASSERGGITDTQYL

SEQ ID NO: 681141 - protein, 14 aa, Homo sapiens
  CDR3 for alpha chain variable domain of TCR clone 340571 (TRAV21, TRAJ57)
CAPHFRGGSEKLVF

SEQ ID NO: 681142 - protein, 14 aa, Homo sapiens
  CDR3 for beta chain variable domain of TCR clone 340571 (TRBV20-1, TRBJ2-7)
CSAKRGRSSYEQYF

SEQ ID NO: 681143 - protein, 15 aa, Homo sapiens
  CDR3 for alpha chain variable domain of TCR clone 340572 (TRAV27, TRAJ38)
CAARRNAGSNRKLIW

SEQ ID NO: 681144 - protein, 13 aa, Homo sapiens
  CDR3 for beta chain variable domain of TCR clone 340572 (TRBV12-5, TRBJ2-3)
CASGDRQSDTRYF

SEQ ID NO: 681145 - protein, 12 aa, Homo sapiens
  CDR3 for alpha chain variable domain of TCR clone 340573 (TRAV12-1, TRAJ31)
CVSWNNNARLMF

SEQ ID NO: 681146 - protein, 15 aa, Homo sapiens
  CDR3 for beta chain variable domain of TCR clone 340573 (TRBV7-2, TRBJ1-5)
CASSLDRGQDKAQHF

SEQ ID NO: 681147 - protein, 13 aa, Homo sapiens
  CDR3 for alpha chain variable domain of TCR clone 340574 (TRAV3, TRAJ20)
CAVRSLNDYKLSF

SEQ ID NO: 681148 - protein, 12 aa, Homo sapiens
  CDR3 for beta chain variable domain of TCR clone 340574 (TRBV2, TRBJ2-5)
CASKEYGETQYF

SEQ ID NO: 681149 - protein, 14 aa, Homo sapiens
  CDR3 for alpha chain variable domain of TCR clone 340575 (TRAV1-2, TRAJ16)
CAGNRFSDGQKLLF

SEQ ID NO: 681150 - protein, 15 aa, Homo sapiens
  CDR3 for beta chain variable domain of TCR clone 340575 (TRBV7-2, TRBJ2-7)
CASSLKGALTYEQYF

SEQ ID NO: 681151 - protein, 14 aa, Homo sapiens
  CDR3 for alpha chain variable domain of TCR clone 340576 (TRAV17, TRAJ37)
CATDGSSNTGKLIF

SEQ ID NO: 681152 - protein, 15 aa, Homo sapiens
  CDR3 for beta chain variable domain of TCR clone 340576 (TRBV7-2, TRBJ2-1)
CASTHGTGIYNEQFF

SEQ ID NO: 681153 - protein, 14 aa, Homo sapiens
  CDR3 for alpha chain variable domain of TCR clone 340577 (TRAV1-2, TRAJ8)
CAVREDTGFPKLGF

SEQ ID NO: 681154 - protein, 14 aa, Homo sapiens
  CDR3 for beta chain variable domain of TCR clone 340577 (TRBV10-3, TRBJ2-2)
CAISEVSHSGELFF

SEQ ID NO: 681155 - protein, 15 aa, Homo sapiens
  CDR3 for alpha chain variable domain of TCR clone 340578 (TRAV27, TRAJ39)
ASTSVRENAGNMLTF

SEQ ID NO: 681156 - protein, 14 aa, Homo sapiens
  CDR3 for beta chain variable domain of TCR clone 340578 (TRBV15, TRBJ2-7)
CATSPDRGLYEQYF

SEQ ID NO: 681157 - protein, 16 aa, Homo sapiens
  CDR3 for alpha chain variable domain of TCR clone 340579 (TRAV30, TRAJ24)
CGTEIVDADSWGKFQF

SEQ ID NO: 681158 - protein, 13 aa, Homo sapiens
  CDR3 for beta chain variable domain of TCR clone 340579 (TRBV19, TRBJ2-2)
CASKVSAAGELFF

SEQ ID NO: 681159 - protein, 12 aa, Homo sapiens
  CDR3 for alpha chain variable domain of TCR clone 340580 (TRAV13-1, TRAJ21)
CAAKEGFNKFYF

SEQ ID NO: 681160 - protein, 20 aa, Homo sapiens
  CDR3 for beta chain variable domain of TCR clone 340580 (TRBV7-8, TRBJ2-2)
CASSHLFHGPTIHITGELFF

SEQ ID NO: 681161 - protein, 12 aa, Homo sapiens
  CDR3 for alpha chain variable domain of TCR clone 340581 (TRAV21, TRAJ31)
CAVWGNNARLMF

SEQ ID NO: 681162 - protein, 12 aa, Homo sapiens
  CDR3 for beta chain variable domain of TCR clone 340581 (TRBV5-5, TRBJ1-2)
CASSALNYGYTF

SEQ ID NO: 681163 - protein, 14 aa, Homo sapiens
  CDR3 for alpha chain variable domain of TCR clone 340582 (TRAV17, TRAJ16)
CATADFSDGQKLLF

SEQ ID NO: 681164 - protein, 15 aa, Homo sapiens
  CDR3 for beta chain variable domain of TCR clone 340582 (TRBV18, TRBJ2-1)
CASSPPSASYIEQFF

SEQ ID NO: 681165 - protein, 15 aa, Homo sapiens
  CDR3 for alpha chain variable domain of TCR clone 340583 (TRAV4, TRAJ36)
FLVGDRQTGANNLFF

SEQ ID NO: 681166 - protein, 15 aa, Homo sapiens
  CDR3 for beta chain variable domain of TCR clone 340583 (TRBV7-6, TRBJ2-1)
CASSSLAGEGNEQFF

SEQ ID NO: 681167 - protein, 13 aa, Homo sapiens
  CDR3 for alpha chain variable domain of TCR clone 340584 (TRAV27, TRAJ17)
CAGAATAGNKLTF

SEQ ID NO: 681168 - protein, 15 aa, Homo sapiens
  CDR3 for beta chain variable domain of TCR clone 340584 (TRBV5-1, TRBJ2-3)
CASRSKAGSTDTQYF

SEQ ID NO: 681169 - protein, 11 aa, Homo sapiens
  CDR3 for alpha chain variable domain of TCR clone 340585 (TRAV22, TRAJ30)
CAGNRDDKIIF

SEQ ID NO: 681170 - protein, 15 aa, Homo sapiens
  CDR3 for beta chain variable domain of TCR clone 340585 (TRBV20-1, TRBJ2-7)
CSARDRVSGMDEQYF

SEQ ID NO: 681171 - protein, 16 aa, Homo sapiens
  CDR3 for alpha chain variable domain of TCR clone 340586 (TRAV30, TRAJ24)
CGAEIVDADSWGKFQF

SEQ ID NO: 681172 - protein, 16 aa, Homo sapiens
  CDR3 for beta chain variable domain of TCR clone 340586 (TRBV7-9, TRBJ2-4)
CASSLAMGVTFSTSAP

SEQ ID NO: 681173 - protein, 16 aa, Homo sapiens
  CDR3 for alpha chain variable domain of TCR clone 340587 (TRAV38-1, TRAJ56)
CAFMKRQTGANSKLTF

SEQ ID NO: 681174 - protein, 14 aa, Homo sapiens
  CDR3 for beta chain variable domain of TCR clone 340587 (TRBV6-1, TRBJ1-3)
CASVQGGGGNTIYF

SEQ ID NO: 681175 - protein, 13 aa, Homo sapiens
  CDR3 for alpha chain variable domain of TCR clone 340588 (TRAV1-2, TRAJ9)
CAVLNTGGFKTIF

SEQ ID NO: 681176 - protein, 17 aa, Homo sapiens
  CDR3 for beta chain variable domain of TCR clone 340588 (TRBV13, TRBJ2-3)
CASSISRVAGGRNTQYF

SEQ ID NO: 681177 - protein, 10 aa, Homo sapiens
  CDR3 for alpha chain variable domain of TCR clone 340589 (TRAV26-1, TRAJ22)
RSGSARQLTF

SEQ ID NO: 681178 - protein, 13 aa, Homo sapiens
  CDR3 for beta chain variable domain of TCR clone 340589 (TRBV7-9, TRBJ1-2)
CASSLKRNYGYTF

SEQ ID NO: 681179 - protein, 15 aa, Homo sapiens
  CDR3 for alpha chain variable domain of TCR clone 340590 (TRAV2, TRAJ9)
CAVEDRGTGGFKTIF

SEQ ID NO: 681180 - protein, 13 aa, Homo sapiens
  CDR3 for beta chain variable domain of TCR clone 340590 (TRBV19, TRBJ1-3)
CASRLSLGNTIYF

SEQ ID NO: 681181 - protein, 14 aa, Homo sapiens
  CDR3 for alpha chain variable domain of TCR clone 340591 (TRAV2, TRAJ37)
CAVEGSSNTGKLIF

SEQ ID NO: 681182 - protein, 15 aa, Homo sapiens
  CDR3 for beta chain variable domain of TCR clone 340591 (TRBV24-1, TRBJ2-4)
CATSDPRDRANTQYF

SEQ ID NO: 681183 - protein, 14 aa, Homo sapiens
  CDR3 for alpha chain variable domain of TCR clone 340592 (TRAV26-1, TRAJ52)
CIPAGGTSYGKLTF

SEQ ID NO: 681184 - protein, 16 aa, Homo sapiens
  CDR3 for beta chain variable domain of TCR clone 340592 (TRBV19, TRBJ2-2)
CASTIGARAGAEELFF

SEQ ID NO: 681185 - protein, 16 aa, Homo sapiens
  CDR3 for alpha chain variable domain of TCR clone 340593 (TRAV12-3, TRAJ53)
CAMRPRSGGSNYKLTF

SEQ ID NO: 681186 - protein, 11 aa, Homo sapiens
  CDR3 for beta chain variable domain of TCR clone 340593 (TRBV29-1, TRBJ2-5)
CSEDRTGTQYF

SEQ ID NO: 681187 - protein, 18 aa, Homo sapiens
  CDR3 for alpha chain variable domain of TCR clone 340594 (TRAV12-3, TRAJ52)
CATSVGGAGGTSYGKLTC

SEQ ID NO: 681188 - protein, 15 aa, Homo sapiens
  CDR3 for beta chain variable domain of TCR clone 340594 (TRBV27, TRBJ1-6)
CASSFDRGLGSPLHF

SEQ ID NO: 681189 - protein, 12 aa, Homo sapiens
  CDR3 for alpha chain variable domain of TCR clone 340595 (TRAV12-3, TRAJ17)
CAMTLTGNKLTF

SEQ ID NO: 681190 - protein, 14 aa, Homo sapiens
  CDR3 for beta chain variable domain of TCR clone 340595 (TRBV6-1, TRBJ2-1)
CASAKDGFYNEQFF

SEQ ID NO: 681191 - protein, 14 aa, Homo sapiens
  CDR3 for alpha chain variable domain of TCR clone 340596 (TRAV16, TRAJ32)
CALKSGGATNKLIF

SEQ ID NO: 681192 - protein, 16 aa, Homo sapiens
  CDR3 for beta chain variable domain of TCR clone 340596 (TRBV7-2, TRBJ1-4)
CASSPVGRFDREKLFF

SEQ ID NO: 681193 - protein, 13 aa, Homo sapiens
  CDR3 for alpha chain variable domain of TCR clone 340597 (TRAV21, TRAJ20)
CAVGLRVDYKLSF

SEQ ID NO: 681194 - protein, 14 aa, Homo sapiens
  CDR3 for beta chain variable domain of TCR clone 340597 (TRBV28, TRBJ1-2)
CASRIQGANYGYTF

SEQ ID NO: 681195 - protein, 15 aa, Homo sapiens
  CDR3 for alpha chain variable domain of TCR clone 340598 (TRAV12-1, TRAJ44)
CVVFVNTGTSSKLTF

SEQ ID NO: 681196 - protein, 17 aa, Homo sapiens
  CDR3 for beta chain variable domain of TCR clone 340598 (TRBV7-8, TRBJ2-6)
CASSAGTGGAGANVLTF

SEQ ID NO: 681197 - protein, 15 aa, Homo sapiens
  CDR3 for alpha chain variable domain of TCR clone 340599 (TRAV38-1, TRAJ45)
CAFMKGGGGADGLAF

SEQ ID NO: 681198 - protein, 13 aa, Homo sapiens
  CDR3 for beta chain variable domain of TCR clone 340599 (TRBV7-9, TRBJ1-2)
CASSLKQNYGYTF

SEQ ID NO: 681199 - protein, 16 aa, Homo sapiens
  CDR3 for alpha chain variable domain of TCR clone 340600 (TRAV17, TRAJ36)
CATVSLNCGKQPLLWD

SEQ ID NO: 681200 - protein, 13 aa, Homo sapiens
  CDR3 for beta chain variable domain of TCR clone 340600 (TRBV4-1, TRBJ1-1)
CASSQLGTGEAFF

SEQ ID NO: 681201 - protein, 15 aa, Homo sapiens
  CDR3 for alpha chain variable domain of TCR clone 340601 (TRAV19, TRAJ53)
CALSSIGGSNYKLTF

SEQ ID NO: 681202 - protein, 14 aa, Homo sapiens
  CDR3 for beta chain variable domain of TCR clone 340601 (TRBV6-1, TRBJ1-3)
CASVQGGGGNTIYF

SEQ ID NO: 681203 - protein, 12 aa, Homo sapiens
  CDR3 for alpha chain variable domain of TCR clone 340602 (TRAV12-3, TRAJ17)
CAMTLTGNKLTF

SEQ ID NO: 681204 - protein, 12 aa, Homo sapiens
  CDR3 for beta chain variable domain of TCR clone 340602 (TRBV11-2, TRBJ2-7)
CASSLPTYEHYF

SEQ ID NO: 681205 - protein, 13 aa, Homo sapiens
  CDR3 for alpha chain variable domain of TCR clone 340603 (TRAV8-6, TRAJ9)
CAVKNTGGFKTIF

SEQ ID NO: 681206 - protein, 14 aa, Homo sapiens
  CDR3 for beta chain variable domain of TCR clone 340603 (TRBV4-2, TRBJ2-1)
CASSRSGGGNEHFF

SEQ ID NO: 681207 - protein, 18 aa, Homo sapiens
  CDR3 for alpha chain variable domain of TCR clone 340604 (TRAV21, TRAJ52)
CAVRPSPAGGPSYGKLTL

SEQ ID NO: 681208 - protein, 12 aa, Homo sapiens
  CDR3 for beta chain variable domain of TCR clone 340604 (TRBV11-2, TRBJ2-2)
CASSLGGGELFF

SEQ ID NO: 681209 - protein, 13 aa, Homo sapiens
  CDR3 for alpha chain variable domain of TCR clone 340605 (TRAV12-1, TRAJ22)
CVVPSGSARQLTF

SEQ ID NO: 681210 - protein, 13 aa, Homo sapiens
  CDR3 for beta chain variable domain of TCR clone 340605 (TRBV10-3, TRBJ2-7)
CASKLAVNYEQYF

SEQ ID NO: 681211 - protein, 16 aa, Homo sapiens
  CDR3 for alpha chain variable domain of TCR clone 340606 (TRAV3, TRAJ21)
CAVRDRSASTHFTLDL

SEQ ID NO: 681212 - protein, 16 aa, Homo sapiens
  CDR3 for beta chain variable domain of TCR clone 340606 (TRBV7-2, TRBJ2-5)
CASSLESAGGRETQYF

SEQ ID NO: 681213 - protein, 17 aa, Homo sapiens
  CDR3 for alpha chain variable domain of TCR clone 340607 (TRAV13-1, TRAJ52)
CAAGRNAGDTSHGKLTF

SEQ ID NO: 681214 - protein, 13 aa, Homo sapiens
  CDR3 for beta chain variable domain of TCR clone 340607 (TRBV7-2, TRBJ1-1)
CASNLKGAKVAFF

SEQ ID NO: 681215 - protein, 12 aa, Homo sapiens
  CDR3 for alpha chain variable domain of TCR clone 340608 (TRAV3, TRAJ20)
CAVRDGDYKLSF

SEQ ID NO: 681216 - protein, 16 aa, Homo sapiens
  CDR3 for beta chain variable domain of TCR clone 340608 (TRBV2, TRBJ2-1)
CASSANPRDWQAEQFF

SEQ ID NO: 681217 - protein, 12 aa, Homo sapiens
  CDR3 for alpha chain variable domain of TCR clone 340609 (TRAV16, TRAJ8)
CAPLGGFQKLVF

SEQ ID NO: 681218 - protein, 12 aa, Homo sapiens
  CDR3 for beta chain variable domain of TCR clone 340609 (TRBV28, TRBJ1-6)
CASSLLRGGIAF

SEQ ID NO: 681219 - protein, 10 aa, Homo sapiens
  CDR3 for alpha chain variable domain of TCR clone 340610 (TRAV1-2, TRAJ31)
CVSEDARLMF

SEQ ID NO: 681220 - protein, 13 aa, Homo sapiens
  CDR3 for beta chain variable domain of TCR clone 340610 (TRBV12-5, TRBJ2-3)
CASGDRQSDTQYF

SEQ ID NO: 681221 - protein, 14 aa, Homo sapiens
  CDR3 for alpha chain variable domain of TCR clone 340611 (TRAV12-1, TRAJ12)
CVVTRMDSSYKLSF

SEQ ID NO: 681222 - protein, 13 aa, Homo sapiens
  CDR3 for beta chain variable domain of TCR clone 340611 (TRBV20-1, TRBJ1-1)
CSARGGGNTEAFF

SEQ ID NO: 681223 - protein, 12 aa, Homo sapiens
  CDR3 for alpha chain variable domain of TCR clone 340612 (TRAV8-3, TRAJ26)
CAGDNYGQNFVF

SEQ ID NO: 681224 - protein, 15 aa, Homo sapiens
  CDR3 for beta chain variable domain of TCR clone 340612 (TRBV5-1, TRBJ2-3)
CASSVNSGSTDTQYF

SEQ ID NO: 681225 - protein, 13 aa, Homo sapiens
  CDR3 for alpha chain variable domain of TCR clone 340613 (TRAV13-1, TRAJ21)
CAASIYNFNKFYF

SEQ ID NO: 681226 - protein, 12 aa, Homo sapiens
  CDR3 for beta chain variable domain of TCR clone 340613 (TRBV12-5, TRBJ2-3)
CASQASTDTQYF

SEQ ID NO: 681227 - protein, 18 aa, Homo sapiens
  CDR3 for alpha chain variable domain of TCR clone 340614 (TRAV26-1, TRAJ23)
CIVRVGLEVWNQGGKPIF

SEQ ID NO: 681228 - protein, 16 aa, Homo sapiens
  CDR3 for beta chain variable domain of TCR clone 340614 (TRBV12-4, TRBJ2-5)
CASSCFVRGRQETQYF

SEQ ID NO: 681229 - protein, 14 aa, Homo sapiens
  CDR3 for alpha chain variable domain of TCR clone 340615 (TRAV21, TRAJ15)
CAVSLNQAGTALIF

SEQ ID NO: 681230 - protein, 11 aa, Homo sapiens
  CDR3 for beta chain variable domain of TCR clone 340615 (TRBV20-1, TRBJ2-7)
CSARTSYEPYF

SEQ ID NO: 681231 - protein, 13 aa, Homo sapiens
  CDR3 for alpha chain variable domain of TCR clone 340616 (TRAV36/DV7, TRAJ54)
CAVLIQGAQKLVF

SEQ ID NO: 681232 - protein, 14 aa, Homo sapiens
  CDR3 for beta chain variable domain of TCR clone 340616 (TRBV23-1, TRBJ2-1)
QSCPAGGGGNEQFF

SEQ ID NO: 681233 - protein, 11 aa, Homo sapiens
  CDR3 for alpha chain variable domain of TCR clone 340617 (TRAV1-2, TRAJ40)
CAVPGTYKYIF

SEQ ID NO: 681234 - protein, 15 aa, Homo sapiens
  CDR3 for beta chain variable domain of TCR clone 340617 (TRBV7-9, TRBJ2-5)
CASSLVAGGLETQYF

SEQ ID NO: 681235 - protein, 12 aa, Homo sapiens
  CDR3 for alpha chain variable domain of TCR clone 340618 (TRAV35, TRAJ53)
CAGLGSNYKLTF

SEQ ID NO: 681236 - protein, 12 aa, Homo sapiens
  CDR3 for beta chain variable domain of TCR clone 340618 (TRBV11-2, TRBJ2-2)
CASSLGGGELFF

SEQ ID NO: 681237 - protein, 10 aa, Homo sapiens
  CDR3 for alpha chain variable domain of TCR clone 340619 (TRAV8-4, TRAJ39)
CAVACNMLTF

SEQ ID NO: 681238 - protein, 16 aa, Homo sapiens
  CDR3 for beta chain variable domain of TCR clone 340619 (TRBV20-1, TRBJ1-4)
CSAPGQGLLTNEKLFF

SEQ ID NO: 681239 - protein, 16 aa, Homo sapiens
  CDR3 for alpha chain variable domain of TCR clone 340620 (TRAV13-1, TRAJ48)
CAASIFGNFGNEKLTF

SEQ ID NO: 681240 - protein, 15 aa, Homo sapiens
  CDR3 for beta chain variable domain of TCR clone 340620 (TRBV5-1, TRBJ2-1)
CASSPPRAPYNEQFF

SEQ ID NO: 681241 - protein, 15 aa, Homo sapiens
  CDR3 for alpha chain variable domain of TCR clone 340621 (TRAV3, TRAJ22)
CAVRDRGGSARQLTF

SEQ ID NO: 681242 - protein, 14 aa, Homo sapiens
  CDR3 for beta chain variable domain of TCR clone 340621 (TRBV12-4, TRBJ1-1)
CASSLGTGGNEAFF

SEQ ID NO: 681243 - protein, 13 aa, Homo sapiens
  CDR3 for alpha chain variable domain of TCR clone 340622 (TRAV21, TRAJ20)
CAVGLRVDYKLSF

SEQ ID NO: 681244 - protein, 13 aa, Homo sapiens
  CDR3 for beta chain variable domain of TCR clone 340622 (TRBV11-2, TRBJ2-1)
CASSLRLTHEQFF

SEQ ID NO: 681245 - protein, 14 aa, Homo sapiens
  CDR3 for alpha chain variable domain of TCR clone 340623 (TRAV35, TRAJ22)
CAGLRPGSARQLTF

SEQ ID NO: 681246 - protein, 13 aa, Homo sapiens
  CDR3 for beta chain variable domain of TCR clone 340623 (TRBV20-1, TRBJ1-6)
CSAPLGVGSPLHF

SEQ ID NO: 681247 - protein, 17 aa, Homo sapiens
  CDR3 for alpha chain variable domain of TCR clone 340624 (TRAV26-1, TRAJ37)
CIVRVITVSSNKGKLIF

SEQ ID NO: 681248 - protein, 15 aa, Homo sapiens
  CDR3 for beta chain variable domain of TCR clone 340624 (TRBV10-1, TRBJ2-3)
CASSATSGGFDTQYF

SEQ ID NO: 681249 - protein, 14 aa, Homo sapiens
  CDR3 for alpha chain variable domain of TCR clone 340625 (TRAV2, TRAJ9)
CAVEDRSGGFKTIF

SEQ ID NO: 681250 - protein, 16 aa, Homo sapiens
  CDR3 for beta chain variable domain of TCR clone 340625 (TRBV7-3, TRBJ2-1)
CASSLGGYRAYNEQFF

SEQ ID NO: 681251 - protein, 14 aa, Homo sapiens
  CDR3 for alpha chain variable domain of TCR clone 340626 (TRAV17, TRAJ57)
CATDPQGGSEKMVF

SEQ ID NO: 681252 - protein, 14 aa, Homo sapiens
  CDR3 for beta chain variable domain of TCR clone 340626 (TRBV7-8, TRBJ2-7)
CASSPRDRVYEQYF

SEQ ID NO: 681253 - protein, 11 aa, Homo sapiens
  CDR3 for alpha chain variable domain of TCR clone 340627 (TRAV12-2, TRAJ49)
CAVDTGNQFYF

SEQ ID NO: 681254 - protein, 14 aa, Homo sapiens
  CDR3 for beta chain variable domain of TCR clone 340627 (TRBV12-4, TRBJ1-1)
CASSLGTGGTEAFF

SEQ ID NO: 681255 - protein, 11 aa, Homo sapiens
  CDR3 for alpha chain variable domain of TCR clone 340628 (TRAV17, TRAJ31)
CATDRTARLMF

SEQ ID NO: 681256 - protein, 11 aa, Homo sapiens
  CDR3 for beta chain variable domain of TCR clone 340628 (TRBV11-2, TRBJ2-2)
CQQLGGGELFF

SEQ ID NO: 681257 - protein, 22 aa, Homo sapiens
  CDR3 for alpha chain variable domain of TCR clone 340629 (TRAV27, TRAJ38)
CAARRNAGNNHIQNPDPAVYQL

SEQ ID NO: 681258 - protein, 15 aa, Homo sapiens
  CDR3 for beta chain variable domain of TCR clone 340629 (TRBV20-1, TRBJ2-5)
CSAEGTGGLQETQYF

SEQ ID NO: 681259 - protein, 14 aa, Homo sapiens
  CDR3 for alpha chain variable domain of TCR clone 340630 (TRAV12-2, TRAJ40)
FAVKIPSGTYKYIF

SEQ ID NO: 681260 - protein, 14 aa, Homo sapiens
  CDR3 for beta chain variable domain of TCR clone 340630 (TRBV20-1, TRBJ1-1)
CSAQTRIGGTEAFC

SEQ ID NO: 681261 - protein, 22 aa, Homo sapiens
  CDR3 for alpha chain variable domain of TCR clone 340631 (TRAV8-1, TRAJ36)
CAVNSPTGANNLFLGLERDSPF

SEQ ID NO: 681262 - protein, 15 aa, Homo sapiens
  CDR3 for beta chain variable domain of TCR clone 340631 (TRBV7-2, TRBJ2-3)
CASSLEQGGTDTQYF

SEQ ID NO: 681263 - protein, 11 aa, Homo sapiens
  CDR3 for alpha chain variable domain of TCR clone 340632 (TRAV25, TRAJ5)
CRGGGRRALTF

SEQ ID NO: 681264 - protein, 15 aa, Homo sapiens
  CDR3 for beta chain variable domain of TCR clone 340632 (TRBV19, TRBJ2-4)
CASRGPRRGENLQYF

SEQ ID NO: 681265 - protein, 12 aa, Homo sapiens
  CDR3 for alpha chain variable domain of TCR clone 340633 (TRAV8-3, TRAJ26)
CAGDNYAQNFVF

SEQ ID NO: 681266 - protein, 18 aa, Homo sapiens
  CDR3 for beta chain variable domain of TCR clone 340633 (TRBV12-4, TRBJ2-2)
CASSLVAGTRGRTGELFF

SEQ ID NO: 681267 - protein, 13 aa, Homo sapiens
  CDR3 for alpha chain variable domain of TCR clone 340634 (TRAV1-2, TRAJ31)
CAVRPNNNARLMF

SEQ ID NO: 681268 - protein, 19 aa, Homo sapiens
  CDR3 for beta chain variable domain of TCR clone 340634 (TRBV25-1, TRBJ2-2)
CAILVYRVDRGRKTGELFF

SEQ ID NO: 681269 - protein, 13 aa, Homo sapiens
  CDR3 for alpha chain variable domain of TCR clone 340635 (TRAV1-2, TRAJ9)
CAALNTGGFKTIF

SEQ ID NO: 681270 - protein, 16 aa, Homo sapiens
  CDR3 for beta chain variable domain of TCR clone 340635 (TRBV7-3, TRBJ2-2)
CASSLKRWTLSGELFF

SEQ ID NO: 681271 - protein, 14 aa, Homo sapiens
  CDR3 for alpha chain variable domain of TCR clone 340636 (TRAV3, TRAJ8)
CAALMNSGFQKLVF

SEQ ID NO: 681272 - protein, 15 aa, Homo sapiens
  CDR3 for beta chain variable domain of TCR clone 340636 (TRBV28, TRBJ2-5)
CASSLGLGNQETQYF

SEQ ID NO: 681273 - protein, 15 aa, Homo sapiens
  CDR3 for alpha chain variable domain of TCR clone 340637 (TRAV13-2, TRAJ16)
CAENDRFSDGQKLLF

SEQ ID NO: 681274 - protein, 14 aa, Homo sapiens
  CDR3 for beta chain variable domain of TCR clone 340637 (TRBV4-2, TRBJ1-5)
CASSRYRGNQPQHF

SEQ ID NO: 681275 - protein, 16 aa, Homo sapiens
  CDR3 for alpha chain variable domain of TCR clone 340638 (TRAV27, TRAJ52)
CAGAPAGGTSYGTLTF

SEQ ID NO: 681276 - protein, 12 aa, Homo sapiens
  CDR3 for beta chain variable domain of TCR clone 340638 (TRBV7-8, TRBJ2-7)
CASSLGDREQYF

SEQ ID NO: 681277 - protein, 15 aa, Homo sapiens
  CDR3 for alpha chain variable domain of TCR clone 340639 (TRAV26-1, TRAJ44)
CIARVTFGTASKLTF

SEQ ID NO: 681278 - protein, 17 aa, Homo sapiens
  CDR3 for beta chain variable domain of TCR clone 340639 (TRBV24-1, TRBJ2-4)
CATSDAEARGVRNIQYF

SEQ ID NO: 681279 - protein, 16 aa, Homo sapiens
  CDR3 for alpha chain variable domain of TCR clone 340640 (TRAV16, TRAJ42)
CALSGYYGGSQGDLIF

SEQ ID NO: 681280 - protein, 14 aa, Homo sapiens
  CDR3 for beta chain variable domain of TCR clone 340640 (TRBV3-1, TRBJ2-5)
CASSQAVRQETQYF

SEQ ID NO: 681281 - protein, 11 aa, Homo sapiens
  CDR3 for alpha chain variable domain of TCR clone 340641 (TRAV2, TRAJ33)
RAVESNYQLIW

SEQ ID NO: 681282 - protein, 15 aa, Homo sapiens
  CDR3 for beta chain variable domain of TCR clone 340641 (TRBV19, TRBJ1-1)
CASTSGQIQNTEAVF

SEQ ID NO: 681283 - protein, 16 aa, Homo sapiens
  CDR3 for alpha chain variable domain of TCR clone 340642 (TRAV1-2, TRAJ16)
CAVNRFQMARSCSLQG

SEQ ID NO: 681284 - protein, 14 aa, Homo sapiens
  CDR3 for beta chain variable domain of TCR clone 340642 (TRBV2, TRBJ1-5)
CASSENRGGQPQHF

SEQ ID NO: 681285 - protein, 14 aa, Homo sapiens
  CDR3 for alpha chain variable domain of TCR clone 340643 (TRAV23/DV6, TRAJ6)
CAASRSGGSYIPTF

SEQ ID NO: 681286 - protein, 17 aa, Homo sapiens
  CDR3 for beta chain variable domain of TCR clone 340643 (TRBV7-3, TRBJ2-2)
CASSLSGTSGGTGELFF

SEQ ID NO: 681287 - protein, 17 aa, Homo sapiens
  CDR3 for alpha chain variable domain of TCR clone 340644 (TRAV13-1, TRAJ28)
CAASPPYSGAGSYQLTF

SEQ ID NO: 681288 - protein, 13 aa, Homo sapiens
  CDR3 for beta chain variable domain of TCR clone 340644 (TRBV10-2, TRBJ2-7)
CASGASGGYEQYF

SEQ ID NO: 681289 - protein, 13 aa, Homo sapiens
  CDR3 for alpha chain variable domain of TCR clone 340645 (TRAV8-1, TRAJ23)
CAWRDNQGGKLIF

SEQ ID NO: 681290 - protein, 14 aa, Homo sapiens
  CDR3 for beta chain variable domain of TCR clone 340645 (TRBV4-1, TRBJ2-2)
CASSQAVNTGELFF

SEQ ID NO: 681291 - protein, 11 aa, Homo sapiens
  CDR3 for alpha chain variable domain of TCR clone 340646 (TRAV2, TRAJ13)
CASGGYQKVTF

SEQ ID NO: 681292 - protein, 15 aa, Homo sapiens
  CDR3 for beta chain variable domain of TCR clone 340646 (TRBV7-3, TRBJ1-1)
CASSLIRQGETEAFF

SEQ ID NO: 681293 - protein, 14 aa, Homo sapiens
  CDR3 for alpha chain variable domain of TCR clone 340647 (TRAV2, TRAJ37)
CAVVFTSKTGKLIF

SEQ ID NO: 681294 - protein, 15 aa, Homo sapiens
  CDR3 for beta chain variable domain of TCR clone 340647 (TRBV20-1, TRBJ1-1)
CSASRGVTGNTEAFF

SEQ ID NO: 681295 - protein, 15 aa, Homo sapiens
  CDR3 for alpha chain variable domain of TCR clone 340648 (TRAV35, TRAJ40)
CAGQLGTSGTYKYIF

SEQ ID NO: 681296 - protein, 19 aa, Homo sapiens
  CDR3 for beta chain variable domain of TCR clone 340648 (TRBV7-3, TRBJ2-6)
CASSLESATVLPGANVLTF

SEQ ID NO: 681297 - protein, 14 aa, Homo sapiens
  CDR3 for alpha chain variable domain of TCR clone 340649 (TRAV12-1, TRAJ17)
CVVNEKAAGNKLTF

SEQ ID NO: 681298 - protein, 17 aa, Homo sapiens
  CDR3 for beta chain variable domain of TCR clone 340649 (TRBV20-1, TRBJ2-1)
CSASSSGLAGSYNEQFF

SEQ ID NO: 681299 - protein, 11 aa, Homo sapiens
  CDR3 for alpha chain variable domain of TCR clone 340650 (TRAV1-1, TRAJ23)
CAVRQGGKLIF

SEQ ID NO: 681300 - protein, 14 aa, Homo sapiens
  CDR3 for beta chain variable domain of TCR clone 340650 (TRBV2, TRBJ1-2)
CASNEGTGPYGYTF

SEQ ID NO: 681301 - protein, 16 aa, Homo sapiens
  CDR3 for alpha chain variable domain of TCR clone 340651 (TRAV17, TRAJ22)
CATGPISSGSARQLTF

SEQ ID NO: 681302 - protein, 17 aa, Homo sapiens
  CDR3 for beta chain variable domain of TCR clone 340651 (TRBV20-1, TRBJ2-7)
CSATRAGGVAGVEEQYF

SEQ ID NO: 681303 - protein, 11 aa, Homo sapiens
  CDR3 for alpha chain variable domain of TCR clone 340652 (TRAV12-2, TRAJ49)
CAVDTGNQLYF

SEQ ID NO: 681304 - protein, 14 aa, Homo sapiens
  CDR3 for beta chain variable domain of TCR clone 340652 (TRBV19, TRBJ2-1)
CASPTFVLSGEQFF

SEQ ID NO: 681305 - protein, 11 aa, Homo sapiens
  CDR3 for alpha chain variable domain of TCR clone 340653 (TRAV8-3, TRAJ49)
CAVNTGNQFYF

SEQ ID NO: 681306 - protein, 15 aa, Homo sapiens
  CDR3 for beta chain variable domain of TCR clone 340653 (TRBV7-2, TRBJ2-5)
CASSFLRGGEETQYF

SEQ ID NO: 681307 - protein, 12 aa, Homo sapiens
  CDR3 for alpha chain variable domain of TCR clone 340654 (TRAV3, TRAJ26)
CAVRDYGQNFVF

SEQ ID NO: 681308 - protein, 16 aa, Homo sapiens
  CDR3 for beta chain variable domain of TCR clone 340654 (TRBV11-2, TRBJ1-2)
CAGSPSGREANYGDTF

SEQ ID NO: 681309 - protein, 14 aa, Homo sapiens
  CDR3 for alpha chain variable domain of TCR clone 340655 (TRAV3, TRAJ17)
CAVRDAAAGNKLTF

SEQ ID NO: 681310 - protein, 14 aa, Homo sapiens
  CDR3 for beta chain variable domain of TCR clone 340655 (TRBV7-2, TRBJ1-1)
CASSFLTGTTEAFF

SEQ ID NO: 681311 - protein, 13 aa, Homo sapiens
  CDR3 for alpha chain variable domain of TCR clone 340656 (TRAV29/DV5, TRAJ31)
CAASRNNNARLMF

SEQ ID NO: 681312 - protein, 15 aa, Homo sapiens
  CDR3 for beta chain variable domain of TCR clone 340656 (TRBV11-2, TRBJ2-1)
CASSPSGQSLNEQFF

SEQ ID NO: 681313 - protein, 15 aa, Homo sapiens
  CDR3 for alpha chain variable domain of TCR clone 340657 (TRAV12-2, TRAJ32)
CAVNHYGGATNKLIF

SEQ ID NO: 681314 - protein, 16 aa, Homo sapiens
  CDR3 for beta chain variable domain of TCR clone 340657 (TRBV19, TRBJ2-2)
CASRSPGTGATGELFF

SEQ ID NO: 681315 - protein, 11 aa, Homo sapiens
  CDR3 for alpha chain variable domain of TCR clone 340658 (TRAV35, TRAJ30)
CAGPGDDKIIF

SEQ ID NO: 681316 - protein, 14 aa, Homo sapiens
  CDR3 for beta chain variable domain of TCR clone 340658 (TRBV7-6, TRBJ1-6)
CASSQAGGGSSLHF

SEQ ID NO: 681317 - protein, 12 aa, Homo sapiens
  CDR3 for alpha chain variable domain of TCR clone 340659 (TRAV3, TRAJ20)
CAVRDGDYKLSF

SEQ ID NO: 681318 - protein, 16 aa, Homo sapiens
  CDR3 for beta chain variable domain of TCR clone 340659 (TRBV5-1, TRBJ1-1)
CASSSGGNSLNTEAFF

SEQ ID NO: 681319 - protein, 12 aa, Homo sapiens
  CDR3 for alpha chain variable domain of TCR clone 340660 (TRAV6, TRAJ41)
CSSPLGRYALNF

SEQ ID NO: 681320 - protein, 12 aa, Homo sapiens
  CDR3 for beta chain variable domain of TCR clone 340660 (TRBV29-1, TRBJ2-2)
CSVDKYTGELFL

SEQ ID NO: 681321 - protein, 13 aa, Homo sapiens
  CDR3 for alpha chain variable domain of TCR clone 340661 (TRAV27, TRAJ49)
CAPRPYTGNQIYF

SEQ ID NO: 681322 - protein, 18 aa, Homo sapiens
  CDR3 for beta chain variable domain of TCR clone 340661 (TRBV7-3, TRBJ2-5)
CASSLGGAAQGRWETQYF

SEQ ID NO: 681323 - protein, 12 aa, Homo sapiens
  CDR3 for alpha chain variable domain of TCR clone 340662 (TRAV12-2, TRAJ16)
CAVNLDGQKMLF

SEQ ID NO: 681324 - protein, 13 aa, Homo sapiens
  CDR3 for beta chain variable domain of TCR clone 340662 (TRBV7-9, TRBJ1-2)
CASSLKQNYGYTF

SEQ ID NO: 681325 - protein, 13 aa, Homo sapiens
  CDR3 for alpha chain variable domain of TCR clone 340663 (TRAV35, TRAJ58)
CAGLETSGSRLTF

SEQ ID NO: 681326 - protein, 15 aa, Homo sapiens
  CDR3 for beta chain variable domain of TCR clone 340663 (TRBV20-1, TRBJ2-1)
CSARFSAGGLSEQFF

SEQ ID NO: 681327 - protein, 15 aa, Homo sapiens
  CDR3 for alpha chain variable domain of TCR clone 340664 (TRAV8-3, TRAJ23)
CAVGDRYNQGGKPIF

SEQ ID NO: 681328 - protein, 17 aa, Homo sapiens
  CDR3 for beta chain variable domain of TCR clone 340664 (TRBV4-1, TRBJ1-4)
CASSQEGPRGVEEKLFF

SEQ ID NO: 681329 - protein, 12 aa, Homo sapiens
  CDR3 for alpha chain variable domain of TCR clone 340665 (TRAV21, TRAJ56)
CAVGVNRSKLTF

SEQ ID NO: 681330 - protein, 12 aa, Homo sapiens
  CDR3 for beta chain variable domain of TCR clone 340665 (TRBV28, TRBJ2-7)
CASSRSGYEQYF

SEQ ID NO: 681331 - protein, 17 aa, Homo sapiens
  CDR3 for alpha chain variable domain of TCR clone 340666 (TRAV27, TRAJ42)
CAERVIYYGGSQGNLIF

SEQ ID NO: 681332 - protein, 15 aa, Homo sapiens
  CDR3 for beta chain variable domain of TCR clone 340666 (TRBV7-2, TRBJ2-3)
CASGLGGGGRDTQYF

SEQ ID NO: 681333 - protein, 13 aa, Homo sapiens
  CDR3 for alpha chain variable domain of TCR clone 340667 (TRAV8-3, TRAJ28)
CAVGAVGSYQLTF

SEQ ID NO: 681334 - protein, 13 aa, Homo sapiens
  CDR3 for beta chain variable domain of TCR clone 340667 (TRBV29-1, TRBJ2-5)
YSVGGTSAETQYF

SEQ ID NO: 681335 - protein, 12 aa, Homo sapiens
  CDR3 for alpha chain variable domain of TCR clone 340668 (TRAV12-3, TRAJ20)
CAMVRGDYTLSF

SEQ ID NO: 681336 - protein, 16 aa, Homo sapiens
  CDR3 for beta chain variable domain of TCR clone 340668 (TRBV5-1, TRBJ2-3)
CASSLGLAVYTDTQYF

SEQ ID NO: 681337 - protein, 15 aa, Homo sapiens
  CDR3 for alpha chain variable domain of TCR clone 340669 (TRAV36/DV7, TRAJ53)
CAVEGSGGSNYKLTF

SEQ ID NO: 681338 - protein, 16 aa, Homo sapiens
  CDR3 for beta chain variable domain of TCR clone 340669 (TRBV7-3, TRBJ2-2)
CASSLKRGTLSGELFF

SEQ ID NO: 681339 - protein, 16 aa, Homo sapiens
  CDR3 for alpha chain variable domain of TCR clone 340670 (TRAV35, TRAJ28)
CAGQRYSGAGSYQLTF

SEQ ID NO: 681340 - protein, 16 aa, Homo sapiens
  CDR3 for beta chain variable domain of TCR clone 340670 (TRBV7-3, TRBJ2-1)
CASSLEGYRSYNEQFF

SEQ ID NO: 681341 - protein, 16 aa, Homo sapiens
  CDR3 for alpha chain variable domain of TCR clone 340671 (TRAV26-1, TRAJ38)
CTVRPLNAGNNRKLIW

SEQ ID NO: 681342 - protein, 13 aa, Homo sapiens
  CDR3 for beta chain variable domain of TCR clone 340671 (TRBV18, TRBJ1-1)
CASSPNGDTEAFF

SEQ ID NO: 681343 - protein, 15 aa, Homo sapiens
  CDR3 for alpha chain variable domain of TCR clone 340672 (TRAV8-3, TRAJ17)
CAVAFLQSCRQQANF

SEQ ID NO: 681344 - protein, 13 aa, Homo sapiens
  CDR3 for beta chain variable domain of TCR clone 340672 (TRBV5-7, TRBJ1-2)
CASSLIRAPGYTL

SEQ ID NO: 681345 - protein, 14 aa, Homo sapiens
  CDR3 for alpha chain variable domain of TCR clone 340673 (TRAV12-3, TRAJ10)
SHLPLTGGGNKLTF

SEQ ID NO: 681346 - protein, 15 aa, Homo sapiens
  CDR3 for beta chain variable domain of TCR clone 340673 (TRBV7-9, TRBJ2-7)
CASSPGGGLTYEQYF

SEQ ID NO: 681347 - protein, 12 aa, Homo sapiens
  CDR3 for alpha chain variable domain of TCR clone 340674 (TRAV8-3, TRAJ20)
CAVGANDYKPRF

SEQ ID NO: 681348 - protein, 16 aa, Homo sapiens
  CDR3 for beta chain variable domain of TCR clone 340674 (TRBV19, TRBJ2-2)
CASRSPGTGATGELFF

SEQ ID NO: 681349 - protein, 15 aa, Homo sapiens
  CDR3 for alpha chain variable domain of TCR clone 340675 (TRAV3, TRAJ5)
CAVRDIDTGRRELTF

SEQ ID NO: 681350 - protein, 13 aa, Homo sapiens
  CDR3 for beta chain variable domain of TCR clone 340675 (TRBV12-4, TRBJ2-7)
CASSPAETYEQYF

SEQ ID NO: 681351 - protein, 14 aa, Homo sapiens
  CDR3 for alpha chain variable domain of TCR clone 340676 (TRAV1-2, TRAJ8)
CAVREDTGFQKLVF

SEQ ID NO: 681352 - protein, 20 aa, Homo sapiens
  CDR3 for beta chain variable domain of TCR clone 340676 (TRBV7-8, TRBJ2-2)
CASSHLFPGTTIHITGELFF

SEQ ID NO: 681353 - protein, 11 aa, Homo sapiens
  CDR3 for alpha chain variable domain of TCR clone 340677 (TRAV2, TRAJ20)
CAVLNDYKLSF

SEQ ID NO: 681354 - protein, 16 aa, Homo sapiens
  CDR3 for beta chain variable domain of TCR clone 340677 (TRBV11-1, TRBJ2-2)
CASSAEGLKNTGGLFF

SEQ ID NO: 681355 - protein, 17 aa, Homo sapiens
  CDR3 for alpha chain variable domain of TCR clone 340678 (TRAV13-1, TRAJ52)
CAASSGAGVTSYGKLTF

SEQ ID NO: 681356 - protein, 11 aa, Homo sapiens
  CDR3 for beta chain variable domain of TCR clone 340678 (TRBV29-1, TRBJ2-5)
CSEDRTGTQYF

SEQ ID NO: 681357 - protein, 17 aa, Homo sapiens
  CDR3 for alpha chain variable domain of TCR clone 340679 (TRAV3, TRAJ28)
CAVREAYSGAGSYQLTF

SEQ ID NO: 681358 - protein, 15 aa, Homo sapiens
  CDR3 for beta chain variable domain of TCR clone 340679 (TRBV7-3, TRBJ2-2)
CASSETGQGTGELFF

SEQ ID NO: 681359 - protein, 19 aa, Homo sapiens
  CDR3 for alpha chain variable domain of TCR clone 340680 (TRAV3, TRAJ37)
CAVREIVGGYPSNTGKLIF

SEQ ID NO: 681360 - protein, 14 aa, Homo sapiens
  CDR3 for beta chain variable domain of TCR clone 340680 (TRBV7-8, TRBJ2-3)
CASSLEAGTDTQYF

SEQ ID NO: 681361 - protein, 17 aa, Homo sapiens
  CDR3 for alpha chain variable domain of TCR clone 340681 (TRAV3, TRAJ17)
DSDLYSPRGAAGNKLTF

SEQ ID NO: 681362 - protein, 16 aa, Homo sapiens
  CDR3 for beta chain variable domain of TCR clone 340681 (TRBV7-6, TRBJ2-1)
CASSAPGPSSYNEQFF

SEQ ID NO: 681363 - protein, 13 aa, Homo sapiens
  CDR3 for alpha chain variable domain of TCR clone 340682 (TRAV8-6, TRAJ8)
CAVSNTGFQKLVF

SEQ ID NO: 681364 - protein, 13 aa, Homo sapiens
  CDR3 for beta chain variable domain of TCR clone 340682 (TRBV2, TRBJ2-7)
CASSVGGSGEQYF

SEQ ID NO: 681365 - protein, 16 aa, Homo sapiens
  CDR3 for alpha chain variable domain of TCR clone 340683 (TRAV21, TRAJ45)
CAVSWGSGGGADGLTF

SEQ ID NO: 681366 - protein, 11 aa, Homo sapiens
  CDR3 for beta chain variable domain of TCR clone 340683 (TRBV11-2, TRBJ2-2)
CASSLPGELFF

SEQ ID NO: 681367 - protein, 16 aa, Homo sapiens
  CDR3 for alpha chain variable domain of TCR clone 340684 (TRAV12-3, TRAJ53)
CAMSQGSGGSDYKLTF

SEQ ID NO: 681368 - protein, 16 aa, Homo sapiens
  CDR3 for beta chain variable domain of TCR clone 340684 (TRBV12-4, TRBJ1-5)
CASSRPVGGSNQPQHF

SEQ ID NO: 681369 - protein, 15 aa, Homo sapiens
  CDR3 for alpha chain variable domain of TCR clone 340685 (TRAV8-3, TRAJ40)
CAAPSLGSGTYKYIF

SEQ ID NO: 681370 - protein, 14 aa, Homo sapiens
  CDR3 for beta chain variable domain of TCR clone 340685 (TRBV7-2, TRBJ2-2)
CASSLNSNTGELFF

SEQ ID NO: 681371 - protein, 14 aa, Homo sapiens
  CDR3 for alpha chain variable domain of TCR clone 340686 (TRAV12-2, TRAJ17)
CAALFQAAGNKLTF

SEQ ID NO: 681372 - protein, 16 aa, Homo sapiens
  CDR3 for beta chain variable domain of TCR clone 340686 (TRBV20-1, TRBJ2-2)
CSASASGIPGAGELFF

SEQ ID NO: 681373 - protein, 10 aa, Homo sapiens
  CDR3 for alpha chain variable domain of TCR clone 340687 (TRAV12-2, TRAJ10)
CAAWTGVETH

SEQ ID NO: 681374 - protein, 15 aa, Homo sapiens
  CDR3 for beta chain variable domain of TCR clone 340687 (TRBV2, TRBJ2-3)
CASSIGPRGVDTQYF

SEQ ID NO: 681375 - protein, 15 aa, Homo sapiens
  CDR3 for alpha chain variable domain of TCR clone 340688 (TRAV12-3, TRAJ49)
CAMTAPGNTGHQFYF

SEQ ID NO: 681376 - protein, 15 aa, Homo sapiens
  CDR3 for beta chain variable domain of TCR clone 340688 (TRBV11-2, TRBJ1-6)
CASSLDPWAVSPLHF

SEQ ID NO: 681377 - protein, 11 aa, Homo sapiens
  CDR3 for alpha chain variable domain of TCR clone 340689 (TRAV12-3, TRAJ43)
CAMSVSNDMRF

SEQ ID NO: 681378 - protein, 15 aa, Homo sapiens
  CDR3 for beta chain variable domain of TCR clone 340689 (TRBV7-3, TRBJ2-2)
CASSETGQGTGELFF

SEQ ID NO: 681379 - protein, 13 aa, Homo sapiens
  CDR3 for alpha chain variable domain of TCR clone 340690 (TRAV1-2, TRAJ29)
CAVRAYQRDTSCL

SEQ ID NO: 681380 - protein, 14 aa, Homo sapiens
  CDR3 for beta chain variable domain of TCR clone 340690 (TRBV3-1, TRBJ2-5)
CASSQGPDQETQYF

SEQ ID NO: 681381 - protein, 13 aa, Homo sapiens
  CDR3 for alpha chain variable domain of TCR clone 340691 (TRAV21, TRAJ27)
CAARPGNAGKSTC

SEQ ID NO: 681382 - protein, 13 aa, Homo sapiens
  CDR3 for beta chain variable domain of TCR clone 340691 (TRBV13, TRBJ2-1)
CASIVGGRGEQFF

SEQ ID NO: 681383 - protein, 14 aa, Homo sapiens
  CDR3 for alpha chain variable domain of TCR clone 340692 (TRAV12-2, TRAJ17)
CAVLFKAAGNKLNF

SEQ ID NO: 681384 - protein, 17 aa, Homo sapiens
  CDR3 for beta chain variable domain of TCR clone 340692 (TRBV11-2, TRBJ2-1)
CASSLYPPGVEYNEQFF

SEQ ID NO: 681385 - protein, 17 aa, Homo sapiens
  CDR3 for alpha chain variable domain of TCR clone 340693 (TRAV3, TRAJ38)
CAVGDCLNAGNNRKLIW

SEQ ID NO: 681386 - protein, 14 aa, Homo sapiens
  CDR3 for beta chain variable domain of TCR clone 340693 (TRBV12-5, TRBJ2-5)
CASGSRTHQETQYF

SEQ ID NO: 681387 - protein, 15 aa, Homo sapiens
  CDR3 for alpha chain variable domain of TCR clone 340694 (TRAV38-1, TRAJ45)
CAFMKGGGGADGITF

SEQ ID NO: 681388 - protein, 13 aa, Homo sapiens
  CDR3 for beta chain variable domain of TCR clone 340694 (TRBV7-9, TRBJ1-2)
CASSLKQNYGYTF

SEQ ID NO: 681389 - protein, 14 aa, Homo sapiens
  CDR3 for alpha chain variable domain of TCR clone 340695 (TRAV13-1, TRAJ40)
CAASMTSVTYKYIF

SEQ ID NO: 681390 - protein, 14 aa, Homo sapiens
  CDR3 for beta chain variable domain of TCR clone 340695 (TRBV4-2, TRBJ2-5)
CASSQDRGRETQYF

SEQ ID NO: 681391 - protein, 19 aa, Homo sapiens
  CDR3 for alpha chain variable domain of TCR clone 340696 (TRAV2, TRAJ20)
ILQVREADAAVYRDRKLSF

SEQ ID NO: 681392 - protein, 14 aa, Homo sapiens
  CDR3 for beta chain variable domain of TCR clone 340696 (TRBV11-2, TRBJ1-2)
CASSLGTANYGYTF

SEQ ID NO: 681393 - protein, 12 aa, Homo sapiens
  CDR3 for alpha chain variable domain of TCR clone 340697 (TRAV12-2, TRAJ40)
CREGTGNLQYIF

SEQ ID NO: 681394 - protein, 15 aa, Homo sapiens
  CDR3 for beta chain variable domain of TCR clone 340697 (TRBV28, TRBJ1-2)
CASSFRDRPSYGYTF

SEQ ID NO: 681395 - protein, 12 aa, Homo sapiens
  CDR3 for alpha chain variable domain of TCR clone 340698 (TRAV22, TRAJ29)
CAPPSGNTPLVF

SEQ ID NO: 681396 - protein, 17 aa, Homo sapiens
  CDR3 for beta chain variable domain of TCR clone 340698 (TRBV11-2, TRBJ2-4)
CASSSVGPGGHRNIQYF

SEQ ID NO: 681397 - protein, 14 aa, Homo sapiens
  CDR3 for alpha chain variable domain of TCR clone 340699 (TRAV12-3, TRAJ10)
SHLPLTGRGNKLTF

SEQ ID NO: 681398 - protein, 15 aa, Homo sapiens
  CDR3 for beta chain variable domain of TCR clone 340699 (TRBV27, TRBJ1-1)
CASSPYADPYTEAFF

SEQ ID NO: 681399 - protein, 15 aa, Homo sapiens
  CDR3 for alpha chain variable domain of TCR clone 340700 (TRAV21, TRAJ53)
CATLNSGGSNYKLTF

SEQ ID NO: 681400 - protein, 15 aa, Homo sapiens
  CDR3 for beta chain variable domain of TCR clone 340700 (TRBV5-5, TRBJ2-2)
CASSRQASGAGELFF

SEQ ID NO: 681401 - protein, 13 aa, Homo sapiens
  CDR3 for alpha chain variable domain of TCR clone 340701 (TRAV16, TRAJ31)
CALSAHNNARLMF

SEQ ID NO: 681402 - protein, 17 aa, Homo sapiens
  CDR3 for beta chain variable domain of TCR clone 340701 (TRBV12-4, TRBJ2-1)
CTSSPGLAGGRISEQFF

SEQ ID NO: 681403 - protein, 11 aa, Homo sapiens
  CDR3 for alpha chain variable domain of TCR clone 340702 (TRAV1-2, TRAJ40)
CAVPGTYKYIF

SEQ ID NO: 681404 - protein, 12 aa, Homo sapiens
  CDR3 for beta chain variable domain of TCR clone 340702 (TRBV3-1, TRBJ2-1)
CASSQGSSGQFF

SEQ ID NO: 681405 - protein, 13 aa, Homo sapiens
  CDR3 for alpha chain variable domain of TCR clone 340703 (TRAV1-2, TRAJ9)
CAALNTGGFEAIF

SEQ ID NO: 681406 - protein, 13 aa, Homo sapiens
  CDR3 for beta chain variable domain of TCR clone 340703 (TRBV7-9, TRBJ1-2)
CASSLKQNYGYTF

SEQ ID NO: 681407 - protein, 11 aa, Homo sapiens
  CDR3 for alpha chain variable domain of TCR clone 340704 (TRAV35, TRAJ30)
CAGPGDDKIIF

SEQ ID NO: 681408 - protein, 18 aa, Homo sapiens
  CDR3 for beta chain variable domain of TCR clone 340704 (TRBV7-6, TRBJ2-1)
CASSPRTSWMSSYNEQFF

SEQ ID NO: 681409 - protein, 14 aa, Homo sapiens
  CDR3 for alpha chain variable domain of TCR clone 340705 (TRAV29/DV5, TRAJ36)
CTARRKTGANNLFF

SEQ ID NO: 681410 - protein, 14 aa, Homo sapiens
  CDR3 for beta chain variable domain of TCR clone 340705 (TRBV12-5, TRBJ2-5)
CASGPRTHQETQYF

SEQ ID NO: 681411 - protein, 13 aa, Homo sapiens
  CDR3 for alpha chain variable domain of TCR clone 340706 (TRAV38-2/DV8, TRAJ34)
WAYRTWNTDKLIF

SEQ ID NO: 681412 - protein, 16 aa, Homo sapiens
  CDR3 for beta chain variable domain of TCR clone 340706 (TRBV19, TRBJ2-1)
CASSKAGPSSYNEQFF

SEQ ID NO: 681413 - protein, 13 aa, Homo sapiens
  CDR3 for alpha chain variable domain of TCR clone 340707 (TRAV12-1, TRAJ26)
CVVRRNYGQNFVF

SEQ ID NO: 681414 - protein, 14 aa, Homo sapiens
  CDR3 for beta chain variable domain of TCR clone 340707 (TRBV6-3, TRBJ1-1)
CAIRYTGESTEAFF

SEQ ID NO: 681415 - protein, 16 aa, Homo sapiens
  CDR3 for alpha chain variable domain of TCR clone 340708 (TRAV16, TRAJ44)
CALSTTGTASNSPLGL

SEQ ID NO: 681416 - protein, 14 aa, Homo sapiens
  CDR3 for beta chain variable domain of TCR clone 340708 (TRBV20-1, TRBJ2-7)
CSAISREASYEQYF

SEQ ID NO: 681417 - protein, 19 aa, Homo sapiens
  CDR3 for alpha chain variable domain of TCR clone 340709 (TRAV26-1, TRAJ22)
CCVQLHRWVFSGSARQLTF

SEQ ID NO: 681418 - protein, 19 aa, Homo sapiens
  CDR3 for beta chain variable domain of TCR clone 340709 (TRBV19, TRBJ2-5)
CASSIGQVTDFFLGETQYF

SEQ ID NO: 681419 - protein, 16 aa, Homo sapiens
  CDR3 for alpha chain variable domain of TCR clone 340710 (TRAV4, TRAJ18)
CCVLLIGGSTLGRLYF

SEQ ID NO: 681420 - protein, 16 aa, Homo sapiens
  CDR3 for beta chain variable domain of TCR clone 340710 (TRBV10-2, TRBJ1-2)
CASSERRGPDNYGYTF

SEQ ID NO: 681421 - protein, 15 aa, Homo sapiens
  CDR3 for alpha chain variable domain of TCR clone 340711 (TRAV17, TRAJ6)
CARDLPSGGSYIPTF

SEQ ID NO: 681422 - protein, 16 aa, Homo sapiens
  CDR3 for beta chain variable domain of TCR clone 340711 (TRBV4-1, TRBJ2-7)
CASSQDPTGYSYEQYF

SEQ ID NO: 681423 - protein, 15 aa, Homo sapiens
  CDR3 for alpha chain variable domain of TCR clone 340712 (TRAV3, TRAJ22)
CAVRDRGGSARPLTF

SEQ ID NO: 681424 - protein, 13 aa, Homo sapiens
  CDR3 for beta chain variable domain of TCR clone 340712 (TRBV10-3, TRBJ2-7)
CASKLAVNYEQYF

SEQ ID NO: 681425 - protein, 16 aa, Homo sapiens
  CDR3 for alpha chain variable domain of TCR clone 340713 (TRAV12-3, TRAJ50)
CAMRDPMKTSYEKVIF

SEQ ID NO: 681426 - protein, 13 aa, Homo sapiens
  CDR3 for beta chain variable domain of TCR clone 340713 (TRBV4-1, TRBJ2-3)
CASSLDFTDTQYF

SEQ ID NO: 681427 - protein, 13 aa, Homo sapiens
  CDR3 for alpha chain variable domain of TCR clone 340714 (TRAV12-3, TRAJ5)
CVMIYTGRRALTF

SEQ ID NO: 681428 - protein, 12 aa, Homo sapiens
  CDR3 for beta chain variable domain of TCR clone 340714 (TRBV18, TRBJ1-4)
CARSPSRDKLFF

SEQ ID NO: 681429 - protein, 20 aa, Homo sapiens
  CDR3 for alpha chain variable domain of TCR clone 340715 (TRAV3, TRAJ33)
HLKKPSALVSDSSSNYQLIW

SEQ ID NO: 681430 - protein, 15 aa, Homo sapiens
  CDR3 for beta chain variable domain of TCR clone 340715 (TRBV20-1, TRBJ1-1)
CSASRGVTGNTEAFF

SEQ ID NO: 681431 - protein, 14 aa, Homo sapiens
  CDR3 for alpha chain variable domain of TCR clone 340716 (TRAV38-1, TRAJ40)
CALRPTSGTYKYIF

SEQ ID NO: 681432 - protein, 14 aa, Homo sapiens
  CDR3 for beta chain variable domain of TCR clone 340716 (TRBV7-2, TRBJ2-7)
CASSLYPGRYEQYF

SEQ ID NO: 681433 - protein, 16 aa, Homo sapiens
  CDR3 for alpha chain variable domain of TCR clone 340717 (TRAV26-1, TRAJ23)
CIVRPHGNNQGGKLIF

SEQ ID NO: 681434 - protein, 17 aa, Homo sapiens
  CDR3 for beta chain variable domain of TCR clone 340717 (TRBV6-1, TRBJ2-1)
CASSEGGRGRGRNEQFF

SEQ ID NO: 681435 - protein, 12 aa, Homo sapiens
  CDR3 for alpha chain variable domain of TCR clone 340718 (TRAV1-1, TRAJ39)
CAVPVVGNMLTF

SEQ ID NO: 681436 - protein, 16 aa, Homo sapiens
  CDR3 for beta chain variable domain of TCR clone 340718 (TRBV6-1, TRBJ2-5)
CASSETLDRGAETQYF

SEQ ID NO: 681437 - protein, 12 aa, Homo sapiens
  CDR3 for alpha chain variable domain of TCR clone 340719 (TRAV2, TRAJ24)
CAATDSWGKFQF

SEQ ID NO: 681438 - protein, 14 aa, Homo sapiens
  CDR3 for beta chain variable domain of TCR clone 340719 (TRBV4-1, TRBJ2-2)
CASSQAVNTGELFF

SEQ ID NO: 681439 - protein, 15 aa, Homo sapiens
  CDR3 for alpha chain variable domain of TCR clone 340720 (TRAV3, TRAJ3)
CCERPRYSSASKIIF

SEQ ID NO: 681440 - protein, 14 aa, Homo sapiens
  CDR3 for beta chain variable domain of TCR clone 340720 (TRBV12-5, TRBJ2-5)
CASGSRTHQETQYF

SEQ ID NO: 681441 - protein, 13 aa, Homo sapiens
  CDR3 for alpha chain variable domain of TCR clone 340721 (TRAV35, TRAJ42)
CAGFPGSQGNLIF

SEQ ID NO: 681442 - protein, 14 aa, Homo sapiens
  CDR3 for beta chain variable domain of TCR clone 340721 (TRBV4-1, TRBJ2-2)
CASSQAVNTGELFS

SEQ ID NO: 681443 - protein, 19 aa, Homo sapiens
  CDR3 for alpha chain variable domain of TCR clone 340722 (TRAV1-2, TRAJ26)
CLLPLCCERPGNYGQNFVF

SEQ ID NO: 681444 - protein, 13 aa, Homo sapiens
  CDR3 for beta chain variable domain of TCR clone 340722 (TRBV4-1, TRBJ1-1)
CASSRKMKTEAFF

SEQ ID NO: 681445 - protein, 13 aa, Homo sapiens
  CDR3 for alpha chain variable domain of TCR clone 340723 (TRAV21, TRAJ20)
CAVGLRVDYKLSF

SEQ ID NO: 681446 - protein, 15 aa, Homo sapiens
  CDR3 for beta chain variable domain of TCR clone 340723 (TRBV29-1, TRBJ2-1)
CSVPTGLASYNEQFF

SEQ ID NO: 681447 - protein, 16 aa, Homo sapiens
  CDR3 for alpha chain variable domain of TCR clone 340724 (TRAV3, TRAJ34)
CAVRARGTPSSSSLGL

SEQ ID NO: 681448 - protein, 15 aa, Homo sapiens
  CDR3 for beta chain variable domain of TCR clone 340724 (TRBV6-3, TRBJ2-7)
CASSSPGTVFYEQYF

SEQ ID NO: 681449 - protein, 13 aa, Homo sapiens
  CDR3 for alpha chain variable domain of TCR clone 340725 (TRAV12-2, TRAJ26)
CAVNDNYGQNFVF

SEQ ID NO: 681450 - protein, 17 aa, Homo sapiens
  CDR3 for beta chain variable domain of TCR clone 340725 (TRBV15, TRBJ1-4)
CATSRYGTGDPNEKLFF

SEQ ID NO: 681451 - protein, 14 aa, Homo sapiens
  CDR3 for alpha chain variable domain of TCR clone 340726 (TRAV8-3, TRAJ48)
CCGCGQFGNEKLTF

SEQ ID NO: 681452 - protein, 15 aa, Homo sapiens
  CDR3 for beta chain variable domain of TCR clone 340726 (TRBV28, TRBJ2-4)
CAAGSGTLLMGNQYF

SEQ ID NO: 681453 - protein, 15 aa, Homo sapiens
  CDR3 for alpha chain variable domain of TCR clone 340727 (TRAV29/DV5, TRAJ29)
CAASERSSGNTPLVF

SEQ ID NO: 681454 - protein, 13 aa, Homo sapiens
  CDR3 for beta chain variable domain of TCR clone 340727 (TRBV7-9, TRBJ2-5)
CASLPSGRETQYF

SEQ ID NO: 681455 - protein, 15 aa, Homo sapiens
  CDR3 for alpha chain variable domain of TCR clone 340728 (TRAV23/DV6, TRAJ13)
CAAWPGGGGYQKVTF

SEQ ID NO: 681456 - protein, 15 aa, Homo sapiens
  CDR3 for beta chain variable domain of TCR clone 340728 (TRBV5-5, TRBJ2-7)
CASSLAAPLSYEQYF

SEQ ID NO: 681457 - protein, 13 aa, Homo sapiens
  CDR3 for alpha chain variable domain of TCR clone 340729 (TRAV8-6, TRAJ48)
CAGVNFGNEKLTF

SEQ ID NO: 681458 - protein, 17 aa, Homo sapiens
  CDR3 for beta chain variable domain of TCR clone 340729 (TRBV13, TRBJ2-3)
CASSLSRVAGGRNTQYF

SEQ ID NO: 681459 - protein, 13 aa, Homo sapiens
  CDR3 for alpha chain variable domain of TCR clone 340730 (TRAV17, TRAJ9)
CATDYTGAFKTIF

SEQ ID NO: 681460 - protein, 16 aa, Homo sapiens
  CDR3 for beta chain variable domain of TCR clone 340730 (TRBV7-7, TRBJ2-1)
CASSLASGTSYNEQFF

SEQ ID NO: 681461 - protein, 14 aa, Homo sapiens
  CDR3 for alpha chain variable domain of TCR clone 340731 (TRAV23/DV6, TRAJ22)
CADISSGSARQLTF

SEQ ID NO: 681462 - protein, 15 aa, Homo sapiens
  CDR3 for beta chain variable domain of TCR clone 340731 (TRBV4-3, TRBJ2-3)
CASSLGTRSSDTQYF

SEQ ID NO: 681463 - protein, 14 aa, Homo sapiens
  CDR3 for alpha chain variable domain of TCR clone 340732 (TRAV35, TRAJ22)
CAGLRPGSARQLTF

SEQ ID NO: 681464 - protein, 13 aa, Homo sapiens
  CDR3 for beta chain variable domain of TCR clone 340732 (TRBV20-1, TRBJ1-1)
CSARGGGNTEPFF

SEQ ID NO: 681465 - protein, 15 aa, Homo sapiens
  CDR3 for alpha chain variable domain of TCR clone 340733 (TRAV4, TRAJ17)
CLVGYIGAAGNKLTF

SEQ ID NO: 681466 - protein, 14 aa, Homo sapiens
  CDR3 for beta chain variable domain of TCR clone 340733 (TRBV6-3, TRBJ2-7)
CASSYSVRVYEQYF

SEQ ID NO: 681467 - protein, 14 aa, Homo sapiens
  CDR3 for alpha chain variable domain of TCR clone 340734 (TRAV8-2, TRAJ37)
CVVSISGNTGKLIF

SEQ ID NO: 681468 - protein, 15 aa, Homo sapiens
  CDR3 for beta chain variable domain of TCR clone 340734 (TRBV7-2, TRBJ2-1)
CASSSGLAGGNKQFF

SEQ ID NO: 681469 - protein, 18 aa, Homo sapiens
  CDR3 for alpha chain variable domain of TCR clone 340735 (TRAV1-2, TRAJ18)
CAVRDMGDRGSTLGRLYF

SEQ ID NO: 681470 - protein, 16 aa, Homo sapiens
  CDR3 for beta chain variable domain of TCR clone 340735 (TRBV29-1, TRBJ1-2)
CSVGANRDIANYGYIF

SEQ ID NO: 681471 - protein, 15 aa, Homo sapiens
  CDR3 for alpha chain variable domain of TCR clone 340736 (TRAV23/DV6, TRAJ45)
CAASARGGGADGLTF

SEQ ID NO: 681472 - protein, 14 aa, Homo sapiens
  CDR3 for beta chain variable domain of TCR clone 340736 (TRBV11-2, TRBJ2-5)
CASSRTGGIETQYF

SEQ ID NO: 681473 - protein, 13 aa, Homo sapiens
  CDR3 for alpha chain variable domain of TCR clone 340737 (TRAV30, TRAJ24)
CGTVTDSWGKLQF

SEQ ID NO: 681474 - protein, 14 aa, Homo sapiens
  CDR3 for beta chain variable domain of TCR clone 340737 (TRBV6-3, TRBJ2-2)
CARTYTPDTGELFF

SEQ ID NO: 681475 - protein, 14 aa, Homo sapiens
  CDR3 for alpha chain variable domain of TCR clone 340738 (TRAV26-1, TRAJ38)
CIADNAGNNRKLIW

SEQ ID NO: 681476 - protein, 15 aa, Homo sapiens
  CDR3 for beta chain variable domain of TCR clone 340738 (TRBV6-1, TRBJ2-5)
CASSEGWGIQETQYF

SEQ ID NO: 681477 - protein, 14 aa, Homo sapiens
  CDR3 for alpha chain variable domain of TCR clone 340739 (TRAV1-2, TRAJ16)
CAVNRFSDGQKLPF

SEQ ID NO: 681478 - protein, 15 aa, Homo sapiens
  CDR3 for beta chain variable domain of TCR clone 340739 (TRBV7-2, TRBJ2-1)
CASTHGTGIYNEQFF

SEQ ID NO: 681479 - protein, 17 aa, Homo sapiens
  CDR3 for alpha chain variable domain of TCR clone 340740 (TRAV12-3, TRAJ6)
CTMSARGGAGGIYIPTF

SEQ ID NO: 681480 - protein, 12 aa, Homo sapiens
  CDR3 for beta chain variable domain of TCR clone 340740 (TRBV12-4, TRBJ2-3)
CASSTLPDTQYF

SEQ ID NO: 681481 - protein, 13 aa, Homo sapiens
  CDR3 for alpha chain variable domain of TCR clone 340741 (TRAV13-1, TRAJ17)
CAADGAAGNKLTF

SEQ ID NO: 681482 - protein, 14 aa, Homo sapiens
  CDR3 for beta chain variable domain of TCR clone 340741 (TRBV11-2, TRBJ1-3)
CASSLTEGRNTIYF

SEQ ID NO: 681483 - protein, 11 aa, Homo sapiens
  CDR3 for alpha chain variable domain of TCR clone 340742 (TRAV2, TRAJ33)
CAVDSNYQLIW

SEQ ID NO: 681484 - protein, 15 aa, Homo sapiens
  CDR3 for beta chain variable domain of TCR clone 340742 (TRBV28, TRBJ2-1)
CASSIIAGGRSEQFF

SEQ ID NO: 681485 - protein, 12 aa, Homo sapiens
  CDR3 for alpha chain variable domain of TCR clone 340743 (TRAV24, TRAJ40)
CACMPGTYKYIF

SEQ ID NO: 681486 - protein, 11 aa, Homo sapiens
  CDR3 for beta chain variable domain of TCR clone 340743 (TRBV10-1, TRBJ2-3)
CASSDSDTQYF

SEQ ID NO: 681487 - protein, 14 aa, Homo sapiens
  CDR3 for alpha chain variable domain of TCR clone 340744 (TRAV17, TRAJ34)
CATDSLEGTDKLIF

SEQ ID NO: 681488 - protein, 14 aa, Homo sapiens
  CDR3 for beta chain variable domain of TCR clone 340744 (TRBV4-1, TRBJ2-2)
CASSHAVNTGELFF

SEQ ID NO: 681489 - protein, 15 aa, Homo sapiens
  CDR3 for alpha chain variable domain of TCR clone 340745 (TRAV26-1, TRAJ29)
CIVRVEGSGKKPLVF

SEQ ID NO: 681490 - protein, 14 aa, Homo sapiens
  CDR3 for beta chain variable domain of TCR clone 340745 (TRBV25-1, TRBJ1-1)
CASTHLGGNTEAFF

SEQ ID NO: 681491 - protein, 14 aa, Homo sapiens
  CDR3 for alpha chain variable domain of TCR clone 340746 (TRAV21, TRAJ58)
CAVGFETSGSRLTF

SEQ ID NO: 681492 - protein, 14 aa, Homo sapiens
  CDR3 for beta chain variable domain of TCR clone 340746 (TRBV27, TRBJ2-1)
CASSYGTRAREQCF

SEQ ID NO: 681493 - protein, 15 aa, Homo sapiens
  CDR3 for alpha chain variable domain of TCR clone 340747 (TRAV29/DV5, TRAJ24)
CAASGATDSWGKFQF

SEQ ID NO: 681494 - protein, 12 aa, Homo sapiens
  CDR3 for beta chain variable domain of TCR clone 340747 (TRBV11-2, TRBJ2-2)
CASSLHTGELFF

SEQ ID NO: 681495 - protein, 18 aa, Homo sapiens
  CDR3 for alpha chain variable domain of TCR clone 340748 (TRAV12-1, TRAJ37)
CVVTGLEWGSGNTGKLIF

SEQ ID NO: 681496 - protein, 13 aa, Homo sapiens
  CDR3 for beta chain variable domain of TCR clone 340748 (TRBV12-4, TRBJ2-5)
CASSPGTEETQYF

SEQ ID NO: 681497 - protein, 14 aa, Homo sapiens
  CDR3 for alpha chain variable domain of TCR clone 340749 (TRAV1-1, TRAJ28)
CAVNSGTGSYQLTF

SEQ ID NO: 681498 - protein, 13 aa, Homo sapiens
  CDR3 for beta chain variable domain of TCR clone 340749 (TRBV10-2, TRBJ2-7)
CASGASGGYKQYF

SEQ ID NO: 681499 - protein, 17 aa, Homo sapiens
  CDR3 for alpha chain variable domain of TCR clone 340750 (TRAV23/DV6, TRAJ58)
CEARLLRGETSGSRLTF

SEQ ID NO: 681500 - protein, 13 aa, Homo sapiens
  CDR3 for beta chain variable domain of TCR clone 340750 (TRBV11-2, TRBJ2-5)
CASSRGPSETQYF

SEQ ID NO: 681501 - protein, 14 aa, Homo sapiens
  CDR3 for alpha chain variable domain of TCR clone 340751 (TRAV12-3, TRAJ10)
SHPPLTGGGNKLTF

SEQ ID NO: 681502 - protein, 15 aa, Homo sapiens
  CDR3 for beta chain variable domain of TCR clone 340751 (TRBV27, TRBJ1-5)
CASSLGTGFDQPQHF

SEQ ID NO: 681503 - protein, 11 aa, Homo sapiens
  CDR3 for alpha chain variable domain of TCR clone 340752 (TRAV21, TRAJ11)
CAVNGYSTLTF

SEQ ID NO: 681504 - protein, 16 aa, Homo sapiens
  CDR3 for beta chain variable domain of TCR clone 340752 (TRBV4-3, TRBJ2-2)
CASSHLQRSGTGELFF

SEQ ID NO: 681505 - protein, 15 aa, Homo sapiens
  CDR3 for alpha chain variable domain of TCR clone 340753 (TRAV17, TRAJ16)
CATALRFSDGQKLLF

SEQ ID NO: 681506 - protein, 15 aa, Homo sapiens
  CDR3 for beta chain variable domain of TCR clone 340753 (TRBV20-1, TRBJ1-1)
CSASRGVTGNTEAVV

SEQ ID NO: 681507 - protein, 14 aa, Homo sapiens
  CDR3 for alpha chain variable domain of TCR clone 340754 (TRAV1-2, TRAJ16)
CAVTRFSDGQKLLF

SEQ ID NO: 681508 - protein, 12 aa, Homo sapiens
  CDR3 for beta chain variable domain of TCR clone 340754 (TRBV7-9, TRBJ2-7)
CASSLEGYEQYF

SEQ ID NO: 681509 - protein, 15 aa, Homo sapiens
  CDR3 for alpha chain variable domain of TCR clone 340755 (TRAV20, TRAJ43)
CAVQAGKSSNNDIRF

SEQ ID NO: 681510 - protein, 13 aa, Homo sapiens
  CDR3 for beta chain variable domain of TCR clone 340755 (TRBV27, TRBJ2-1)
CQRHLGGGKEQFF

SEQ ID NO: 681511 - protein, 13 aa, Homo sapiens
  CDR3 for alpha chain variable domain of TCR clone 340756 (TRAV12-3, TRAJ33)
CAMSVNSNYQLIW

SEQ ID NO: 681512 - protein, 11 aa, Homo sapiens
  CDR3 for beta chain variable domain of TCR clone 340756 (TRBV6-3, TRBJ2-3)
CATGQADTQYF

SEQ ID NO: 681513 - protein, 14 aa, Homo sapiens
  CDR3 for alpha chain variable domain of TCR clone 340757 (TRAV16, TRAJ42)
CALLAGGSQGNLIF

SEQ ID NO: 681514 - protein, 20 aa, Homo sapiens
  CDR3 for beta chain variable domain of TCR clone 340757 (TRBV28, TRBJ2-1)
CASTPIGRSPGLAGGNEQFF

SEQ ID NO: 681515 - protein, 11 aa, Homo sapiens
  CDR3 for alpha chain variable domain of TCR clone 340758 (TRAV3, TRAJ21)
CAVCNFNKFYF

SEQ ID NO: 681516 - protein, 16 aa, Homo sapiens
  CDR3 for beta chain variable domain of TCR clone 340758 (TRBV20-1, TRBJ1-2)
CSASMGQGVANYGYTF

SEQ ID NO: 681517 - protein, 14 aa, Homo sapiens
  CDR3 for alpha chain variable domain of TCR clone 340759 (TRAV1-2, TRAJ16)
CAVNRFSDGQKLPF

SEQ ID NO: 681518 - protein, 13 aa, Homo sapiens
  CDR3 for beta chain variable domain of TCR clone 340759 (TRBV6-4, TRBJ1-5)
CASSADLNQPQHF

SEQ ID NO: 681519 - protein, 13 aa, Homo sapiens
  CDR3 for alpha chain variable domain of TCR clone 340760 (TRAV17, TRAJ9)
CATDYTGGFKTIF

SEQ ID NO: 681520 - protein, 16 aa, Homo sapiens
  CDR3 for beta chain variable domain of TCR clone 340760 (TRBV7-7, TRBJ2-1)
CASSLASGTAYKEQFF

SEQ ID NO: 681521 - protein, 13 aa, Homo sapiens
  CDR3 for alpha chain variable domain of TCR clone 340761 (TRAV25, TRAJ30)
CAGRVDRDDKIIF

SEQ ID NO: 681522 - protein, 15 aa, Homo sapiens
  CDR3 for beta chain variable domain of TCR clone 340761 (TRBV7-9, TRBJ2-7)
CASSSGSPQPYEQYF

SEQ ID NO: 681523 - protein, 18 aa, Homo sapiens
  CDR3 for alpha chain variable domain of TCR clone 340762 (TRAV26-2, TRAJ54)
CILRAVEVGIQGAQKLVF

SEQ ID NO: 681524 - protein, 16 aa, Homo sapiens
  CDR3 for beta chain variable domain of TCR clone 340762 (TRBV6-1, TRBJ2-5)
CASSETLDRGAETQYF

SEQ ID NO: 681525 - protein, 13 aa, Homo sapiens
  CDR3 for alpha chain variable domain of TCR clone 340763 (TRAV8-3, TRAJ28)
CAVGAVGSYQLTF

SEQ ID NO: 681526 - protein, 16 aa, Homo sapiens
  CDR3 for beta chain variable domain of TCR clone 340763 (TRBV7-2, TRBJ2-7)
CASGSQGRRTSSTSGR

SEQ ID NO: 681527 - protein, 16 aa, Homo sapiens
  CDR3 for alpha chain variable domain of TCR clone 340764 (TRAV3, TRAJ6)
RAVRDGMGRRKLHTYI

SEQ ID NO: 681528 - protein, 15 aa, Homo sapiens
  CDR3 for beta chain variable domain of TCR clone 340764 (TRBV9, TRBJ2-1)
CASSLAGSSYNEQFF

SEQ ID NO: 681529 - protein, 13 aa, Homo sapiens
  CDR3 for alpha chain variable domain of TCR clone 340765 (TRAV3, TRAJ15)
CAVRDQAGTALIF

SEQ ID NO: 681530 - protein, 15 aa, Homo sapiens
  CDR3 for beta chain variable domain of TCR clone 340765 (TRBV19, TRBJ1-2)
CASSVGQVLNYGYTF

SEQ ID NO: 681531 - protein, 13 aa, Homo sapiens
  CDR3 for alpha chain variable domain of TCR clone 340766 (TRAV13-1, TRAJ20)
CTARVSNDYKLSF

SEQ ID NO: 681532 - protein, 12 aa, Homo sapiens
  CDR3 for beta chain variable domain of TCR clone 340766 (TRBV20-1, TRBJ2-1)
CSARLGTDEQFF

SEQ ID NO: 681533 - protein, 11 aa, Homo sapiens
  CDR3 for alpha chain variable domain of TCR clone 340767 (TRAV23/DV6, TRAJ21)
CAASSGGGTTS

SEQ ID NO: 681534 - protein, 11 aa, Homo sapiens
  CDR3 for beta chain variable domain of TCR clone 340767 (TRBV7-8, TRBJ2-7)
SASSLSLEQYF

SEQ ID NO: 681535 - protein, 14 aa, Homo sapiens
  CDR3 for alpha chain variable domain of TCR clone 340768 (TRAV26-1, TRAJ38)
CIADNAGNNRKLIW

SEQ ID NO: 681536 - protein, 13 aa, Homo sapiens
  CDR3 for beta chain variable domain of TCR clone 340768 (TRBV20-1, TRBJ1-1)
CSAMGGGNTEAFF

SEQ ID NO: 681537 - protein, 14 aa, Homo sapiens
  CDR3 for alpha chain variable domain of TCR clone 340769 (TRAV12-2, TRAJ11)
CAVEGGSGYSTLTF

SEQ ID NO: 681538 - protein, 11 aa, Homo sapiens
  CDR3 for beta chain variable domain of TCR clone 340769 (TRBV11-2, TRBJ2-2)
CASSLPGELFF

SEQ ID NO: 681539 - protein, 16 aa, Homo sapiens
  CDR3 for alpha chain variable domain of TCR clone 340770 (TRAV3, TRAJ10)
CAVRDMRAGGGNKLTF

SEQ ID NO: 681540 - protein, 17 aa, Homo sapiens
  CDR3 for beta chain variable domain of TCR clone 340770 (TRBV13, TRBJ2-3)
CSSSLSRVAGGRNTQYF

SEQ ID NO: 681541 - protein, 18 aa, Homo sapiens
  CDR3 for alpha chain variable domain of TCR clone 340771 (TRAV26-2, TRAJ45)
CILRLWGYSGGGADGLTF

SEQ ID NO: 681542 - protein, 17 aa, Homo sapiens
  CDR3 for beta chain variable domain of TCR clone 340771 (TRBV28, TRBJ2-3)
CASSPTPAGGRVDTQYL

SEQ ID NO: 681543 - protein, 11 aa, Homo sapiens
  CDR3 for alpha chain variable domain of TCR clone 340772 (TRAV3, TRAJ21)
CAVGNFNKFYF

SEQ ID NO: 681544 - protein, 16 aa, Homo sapiens
  CDR3 for beta chain variable domain of TCR clone 340772 (TRBV19, TRBJ2-1)
CASSKAGQSSYNAQFF

SEQ ID NO: 681545 - protein, 14 aa, Homo sapiens
  CDR3 for alpha chain variable domain of TCR clone 340773 (TRAV9-2, TRAJ39)
CALYIYNAGNMLTF

SEQ ID NO: 681546 - protein, 12 aa, Homo sapiens
  CDR3 for beta chain variable domain of TCR clone 340773 (TRBV19, TRBJ1-2)
CASSRTESGYTF

SEQ ID NO: 681547 - protein, 10 aa, Homo sapiens
  CDR3 for alpha chain variable domain of TCR clone 340774 (TRAV25, TRAJ20)
CAVNDYKLSL

SEQ ID NO: 681548 - protein, 13 aa, Homo sapiens
  CDR3 for beta chain variable domain of TCR clone 340774 (TRBV6-3, TRBJ2-7)
CASSFSGGYEQYF

SEQ ID NO: 681549 - protein, 11 aa, Homo sapiens
  CDR3 for alpha chain variable domain of TCR clone 340775 (TRAV21, TRAJ23)
CAPQRRGKLIF

SEQ ID NO: 681550 - protein, 14 aa, Homo sapiens
  CDR3 for beta chain variable domain of TCR clone 340775 (TRBV12-4, TRBJ1-1)
CARTWTGHDTEAFF

SEQ ID NO: 681551 - protein, 11 aa, Homo sapiens
  CDR3 for alpha chain variable domain of TCR clone 340776 (TRAV12-3, TRAJ49)
CAMSSGNQFYF

SEQ ID NO: 681552 - protein, 17 aa, Homo sapiens
  CDR3 for beta chain variable domain of TCR clone 340776 (TRBV5-7, TRBJ2-7)
CASSLWRVLAGSYERYF

SEQ ID NO: 681553 - protein, 14 aa, Homo sapiens
  CDR3 for alpha chain variable domain of TCR clone 340777 (TRAV29/DV5, TRAJ32)
CAAADGGATNKLIF

SEQ ID NO: 681554 - protein, 15 aa, Homo sapiens
  CDR3 for beta chain variable domain of TCR clone 340777 (TRBV5-1, TRBJ2-1)
WASSPPRAPYNEQFF

SEQ ID NO: 681555 - protein, 11 aa, Homo sapiens
  CDR3 for alpha chain variable domain of TCR clone 340778 (TRAV13-2, TRAJ36)
CAETGANNLFF

SEQ ID NO: 681556 - protein, 13 aa, Homo sapiens
  CDR3 for beta chain variable domain of TCR clone 340778 (TRBV7-9, TRBJ2-4)
RATEGLAGNMQYF

SEQ ID NO: 681557 - protein, 13 aa, Homo sapiens
  CDR3 for alpha chain variable domain of TCR clone 340779 (TRAV12-1, TRAJ33)
CGDAPDSNYQLIW

SEQ ID NO: 681558 - protein, 13 aa, Homo sapiens
  CDR3 for beta chain variable domain of TCR clone 340779 (TRBV20-1, TRBJ1-1)
CSARVGGNTEAFF

SEQ ID NO: 681559 - protein, 15 aa, Homo sapiens
  CDR3 for alpha chain variable domain of TCR clone 340780 (TRAV26-1, TRAJ22)
CIVRVSFWFCKATGL

SEQ ID NO: 681560 - protein, 14 aa, Homo sapiens
  CDR3 for beta chain variable domain of TCR clone 340780 (TRBV19, TRBJ2-3)
CASSVGRGSDTQYF

SEQ ID NO: 681561 - protein, 14 aa, Homo sapiens
  CDR3 for alpha chain variable domain of TCR clone 340781 (TRAV13-2, TRAJ32)
CAENYGGATNKLIF

SEQ ID NO: 681562 - protein, 14 aa, Homo sapiens
  CDR3 for beta chain variable domain of TCR clone 340781 (TRBV19, TRBJ2-1)
CASPTFVLSGEQFF

SEQ ID NO: 681563 - protein, 13 aa, Homo sapiens
  CDR3 for alpha chain variable domain of TCR clone 340782 (TRAV4, TRAJ33)
CLVGDMNNYQLIW

SEQ ID NO: 681564 - protein, 14 aa, Homo sapiens
  CDR3 for beta chain variable domain of TCR clone 340782 (TRBV11-2, TRBJ2-5)
CASRPLAGRETQYF

SEQ ID NO: 681565 - protein, 14 aa, Homo sapiens
  CDR3 for alpha chain variable domain of TCR clone 340783 (TRAV16, TRAJ17)
CALSEGAAGNKLTC

SEQ ID NO: 681566 - protein, 12 aa, Homo sapiens
  CDR3 for beta chain variable domain of TCR clone 340783 (TRBV11-2, TRBJ2-2)
CASSLPTGELFF

SEQ ID NO: 681567 - protein, 13 aa, Homo sapiens
  CDR3 for alpha chain variable domain of TCR clone 340784 (TRAV21, TRAJ52)
CAVRPSPAGGTSY

SEQ ID NO: 681568 - protein, 17 aa, Homo sapiens
  CDR3 for beta chain variable domain of TCR clone 340784 (TRBV7-3, TRBJ2-3)
CASSLMKRMRGADTQYF

SEQ ID NO: 681569 - protein, 14 aa, Homo sapiens
  CDR3 for alpha chain variable domain of TCR clone 340785 (TRAV12-3, TRAJ10)
SHLPLTGGGNKLTF

SEQ ID NO: 681570 - protein, 15 aa, Homo sapiens
  CDR3 for beta chain variable domain of TCR clone 340785 (TRBV27, TRBJ1-5)
CASSLGTGVDQPQHF

SEQ ID NO: 681571 - protein, 12 aa, Homo sapiens
  CDR3 for alpha chain variable domain of TCR clone 340786 (TRAV27, TRAJ35)
CAGADFGNVLHR

SEQ ID NO: 681572 - protein, 17 aa, Homo sapiens
  CDR3 for beta chain variable domain of TCR clone 340786 (TRBV20-1, TRBJ2-1)
CSARDPLAGVWDNEQFF

SEQ ID NO: 681573 - protein, 15 aa, Homo sapiens
  CDR3 for alpha chain variable domain of TCR clone 340787 (TRAV12-3, TRAJ6)
CAMSATTGGSYITTF

SEQ ID NO: 681574 - protein, 15 aa, Homo sapiens
  CDR3 for beta chain variable domain of TCR clone 340787 (TRBV28, TRBJ2-5)
CASSPPWSYQETQYF

SEQ ID NO: 681575 - protein, 11 aa, Homo sapiens
  CDR3 for alpha chain variable domain of TCR clone 340788 (TRAV16, TRAJ33)
CALHSNYQLIW

SEQ ID NO: 681576 - protein, 12 aa, Homo sapiens
  CDR3 for beta chain variable domain of TCR clone 340788 (TRBV4-1, TRBJ2-3)
CASSQGTDTQYF

SEQ ID NO: 681577 - protein, 12 aa, Homo sapiens
  CDR3 for alpha chain variable domain of TCR clone 340789 (TRAV12-3, TRAJ40)
CAMSSGTYKYIF

SEQ ID NO: 681578 - protein, 13 aa, Homo sapiens
  CDR3 for beta chain variable domain of TCR clone 340789 (TRBV7-2, TRBJ2-5)
CASSQTSVETQYF

SEQ ID NO: 681579 - protein, 20 aa, Homo sapiens
  CDR3 for alpha chain variable domain of TCR clone 340790 (TRAV27, TRAJ10)
ASTSVPSRGILTGGGNKLTF

SEQ ID NO: 681580 - protein, 13 aa, Homo sapiens
  CDR3 for beta chain variable domain of TCR clone 340790 (TRBV6-1, TRBJ1-1)
CASSRQGNTEAFF

SEQ ID NO: 681581 - protein, 12 aa, Homo sapiens
  CDR3 for alpha chain variable domain of TCR clone 340791 (TRAV29/DV5, TRAJ15)
CASNQAGTALIV

SEQ ID NO: 681582 - protein, 15 aa, Homo sapiens
  CDR3 for beta chain variable domain of TCR clone 340791 (TRBV11-2, TRBJ2-2)
CASSSDRVNAGELFF

SEQ ID NO: 681583 - protein, 14 aa, Homo sapiens
  CDR3 for alpha chain variable domain of TCR clone 340792 (TRAV4, TRAJ13)
CLVGPSGGYQKVTF

SEQ ID NO: 681584 - protein, 13 aa, Homo sapiens
  CDR3 for beta chain variable domain of TCR clone 340792 (TRBV28, TRBJ2-7)
CASTPGLAGEQYF

SEQ ID NO: 681585 - protein, 11 aa, Homo sapiens
  CDR3 for alpha chain variable domain of TCR clone 340793 (TRAV21, TRAJ9)
CAVTGGFKTIF

SEQ ID NO: 681586 - protein, 20 aa, Homo sapiens
  CDR3 for beta chain variable domain of TCR clone 340793 (TRBV7-9, TRBJ2-5)
RGTRPWISVPLQGAQETQYF

SEQ ID NO: 681587 - protein, 16 aa, Homo sapiens
  CDR3 for alpha chain variable domain of TCR clone 340794 (TRAV29/DV5, TRAJ22)
CAACSRDSGSARQLTF

SEQ ID NO: 681588 - protein, 12 aa, Homo sapiens
  CDR3 for beta chain variable domain of TCR clone 340794 (TRBV12-4, TRBJ1-3)
CASSFSGNTIYF

SEQ ID NO: 681589 - protein, 16 aa, Homo sapiens
  CDR3 for alpha chain variable domain of TCR clone 340795 (TRAV3, TRAJ37)
CAVRGKGSGNTGKLIF

SEQ ID NO: 681590 - protein, 15 aa, Homo sapiens
  CDR3 for beta chain variable domain of TCR clone 340795 (TRBV7-9, TRBJ1-6)
CASSSPGRGNSPPHF

SEQ ID NO: 681591 - protein, 12 aa, Homo sapiens
  CDR3 for alpha chain variable domain of TCR clone 340796 (TRAV12-2, TRAJ43)
CAVNVNNNDKRF

SEQ ID NO: 681592 - protein, 14 aa, Homo sapiens
  CDR3 for beta chain variable domain of TCR clone 340796 (TRBV12-5, TRBJ2-5)
CASGSRTHQETQYF

SEQ ID NO: 681593 - protein, 15 aa, Homo sapiens
  CDR3 for alpha chain variable domain of TCR clone 340797 (TRAV35, TRAJ41)
CAGQLFSNSGYALNF

SEQ ID NO: 681594 - protein, 18 aa, Homo sapiens
  CDR3 for beta chain variable domain of TCR clone 340797 (TRBV7-6, TRBJ2-1)
CASSPRTSGMSSYNEQLF

SEQ ID NO: 681595 - protein, 13 aa, Homo sapiens
  CDR3 for alpha chain variable domain of TCR clone 340798 (TRAV21, TRAJ45)
CAVMGGGADGLTF

SEQ ID NO: 681596 - protein, 14 aa, Homo sapiens
  CDR3 for beta chain variable domain of TCR clone 340798 (TRBV4-3, TRBJ1-4)
CASSQLQRNEKLFF

SEQ ID NO: 681597 - protein, 15 aa, Homo sapiens
  CDR3 for alpha chain variable domain of TCR clone 340799 (TRAV4, TRAJ8)
CLVGEQHTGFPKLVF

SEQ ID NO: 681598 - protein, 15 aa, Homo sapiens
  CDR3 for beta chain variable domain of TCR clone 340799 (TRBV7-9, TRBJ2-5)
CASSNRDYLQETQYF

SEQ ID NO: 681599 - protein, 13 aa, Homo sapiens
  CDR3 for alpha chain variable domain of TCR clone 340800 (TRAV1-2, TRAJ12)
CAVSMDSSYKLIF

SEQ ID NO: 681600 - protein, 15 aa, Homo sapiens
  CDR3 for beta chain variable domain of TCR clone 340800 (TRBV27, TRBJ2-5)
CASSLLPSGGETQYF

SEQ ID NO: 681601 - protein, 18 aa, Homo sapiens
  CDR3 for alpha chain variable domain of TCR clone 340801 (TRAV1-2, TRAJ18)
CAVRDMGDRGSILGRLYF

SEQ ID NO: 681602 - protein, 16 aa, Homo sapiens
  CDR3 for beta chain variable domain of TCR clone 340801 (TRBV29-1, TRBJ1-2)
CSVEANRDIANYGYTF

SEQ ID NO: 681603 - protein, 14 aa, Homo sapiens
  CDR3 for alpha chain variable domain of TCR clone 340802 (TRAV1-2, TRAJ8)
CAVREDTGFQQLVF

SEQ ID NO: 681604 - protein, 16 aa, Homo sapiens
  CDR3 for beta chain variable domain of TCR clone 340802 (TRBV7-3, TRBJ2-2)
CASSLKRGTLSGELFF

SEQ ID NO: 681605 - protein, 14 aa, Homo sapiens
  CDR3 for alpha chain variable domain of TCR clone 340803 (TRAV13-1, TRAJ40)
CAARSTSGTYKYIF

SEQ ID NO: 681606 - protein, 15 aa, Homo sapiens
  CDR3 for beta chain variable domain of TCR clone 340803 (TRBV18, TRBJ1-5)
CASSETGGNNQPQQF

SEQ ID NO: 681607 - protein, 13 aa, Homo sapiens
  CDR3 for alpha chain variable domain of TCR clone 340804 (TRAV14/DV4, TRAJ23)
CAMREAKGGKLIF

SEQ ID NO: 681608 - protein, 15 aa, Homo sapiens
  CDR3 for beta chain variable domain of TCR clone 340804 (TRBV6-3, TRBJ2-1)
CASSYASDSYNEQFF

SEQ ID NO: 681609 - protein, 13 aa, Homo sapiens
  CDR3 for alpha chain variable domain of TCR clone 340805 (TRAV20, TRAJ40)
CAVRTSGTHKYIF

SEQ ID NO: 681610 - protein, 17 aa, Homo sapiens
  CDR3 for beta chain variable domain of TCR clone 340805 (TRBV5-1, TRBJ1-6)
WASSFGEVSSYNSPLHF

SEQ ID NO: 681611 - protein, 14 aa, Homo sapiens
  CDR3 for alpha chain variable domain of TCR clone 340806 (TRAV29/DV5, TRAJ36)
CASRRKTGATNLFF

SEQ ID NO: 681612 - protein, 14 aa, Homo sapiens
  CDR3 for beta chain variable domain of TCR clone 340806 (TRBV12-5, TRBJ2-5)
CASGSRTHQETQYF

SEQ ID NO: 681613 - protein, 10 aa, Homo sapiens
  CDR3 for alpha chain variable domain of TCR clone 340807 (TRAV13-1, TRAJ52)
CAAKTPMLVV

SEQ ID NO: 681614 - protein, 15 aa, Homo sapiens
  CDR3 for beta chain variable domain of TCR clone 340807 (TRBV5-1, TRBJ2-1)
CASSPPRAPYNEQFF

SEQ ID NO: 681615 - protein, 11 aa, Homo sapiens
  CDR3 for alpha chain variable domain of TCR clone 340808 (TRAV17, TRAJ43)
CATPRSNDMRF

SEQ ID NO: 681616 - protein, 20 aa, Homo sapiens
  CDR3 for beta chain variable domain of TCR clone 340808 (TRBV7-8, TRBJ2-2)
CASSHLFPGPTIHITGELFF

SEQ ID NO: 681617 - protein, 14 aa, Homo sapiens
  CDR3 for alpha chain variable domain of TCR clone 340809 (TRAV20, TRAJ42)
CAVQARGRQGNLIF

SEQ ID NO: 681618 - protein, 15 aa, Homo sapiens
  CDR3 for beta chain variable domain of TCR clone 340809 (TRBV2, TRBJ2-1)
CASSELAGSYNEQFF

SEQ ID NO: 681619 - protein, 12 aa, Homo sapiens
  CDR3 for alpha chain variable domain of TCR clone 340810 (TRAV12-3, TRAJ41)
CAMSYSGYALNL

SEQ ID NO: 681620 - protein, 13 aa, Homo sapiens
  CDR3 for beta chain variable domain of TCR clone 340810 (TRBV7-3, TRBJ2-1)
CASSLDSYNEQFF

SEQ ID NO: 681621 - protein, 13 aa, Homo sapiens
  CDR3 for alpha chain variable domain of TCR clone 340811 (TRAV12-2, TRAJ20)
CAVYPSNDYKLSF

SEQ ID NO: 681622 - protein, 14 aa, Homo sapiens
  CDR3 for beta chain variable domain of TCR clone 340811 (TRBV7-2, TRBJ2-7)
CASRSQGAAYEQYF

SEQ ID NO: 681623 - protein, 14 aa, Homo sapiens
  CDR3 for alpha chain variable domain of TCR clone 340812 (TRAV1-2, TRAJ8)
CAVREDTGFQKLVF

SEQ ID NO: 681624 - protein, 19 aa, Homo sapiens
  CDR3 for beta chain variable domain of TCR clone 340812 (TRBV2, TRBJ2-2)
CASSQPGLAGGGNTGELFF

SEQ ID NO: 681625 - protein, 12 aa, Homo sapiens
  CDR3 for alpha chain variable domain of TCR clone 340813 (TRAV12-1, TRAJ40)
CVVYSGTYKDIF

SEQ ID NO: 681626 - protein, 18 aa, Homo sapiens
  CDR3 for beta chain variable domain of TCR clone 340813 (TRBV11-2, TRBJ2-3)
CASSFGGASRGAPNTQYF

SEQ ID NO: 681627 - protein, 12 aa, Homo sapiens
  CDR3 for alpha chain variable domain of TCR clone 340814 (TRAV21, TRAJ20)
CAVRGNDCKLSF

SEQ ID NO: 681628 - protein, 14 aa, Homo sapiens
  CDR3 for beta chain variable domain of TCR clone 340814 (TRBV7-8, TRBJ2-7)
CASSQTQGADEQYF

SEQ ID NO: 681629 - protein, 12 aa, Homo sapiens
  CDR3 for alpha chain variable domain of TCR clone 340815 (TRAV12-1, TRAJ40)
CVVNGETYKYIF

SEQ ID NO: 681630 - protein, 14 aa, Homo sapiens
  CDR3 for beta chain variable domain of TCR clone 340815 (TRBV7-9, TRBJ1-1)
CASSSAKGNTEAFF

SEQ ID NO: 681631 - protein, 17 aa, Homo sapiens
  CDR3 for alpha chain variable domain of TCR clone 340816 (TRAV3, TRAJ6)
CAVRDGPRAGGSYIPTF

SEQ ID NO: 681632 - protein, 14 aa, Homo sapiens
  CDR3 for beta chain variable domain of TCR clone 340816 (TRBV7-7, TRBJ2-7)
CASSLGRGVGEQYF

SEQ ID NO: 681633 - protein, 12 aa, Homo sapiens
  CDR3 for alpha chain variable domain of TCR clone 340817 (TRAV12-3, TRAJ17)
CAMTLTGNKLTF

SEQ ID NO: 681634 - protein, 15 aa, Homo sapiens
  CDR3 for beta chain variable domain of TCR clone 340817 (TRBV19, TRBJ2-1)
CANSTGTSSYNEQFF

SEQ ID NO: 681635 - protein, 13 aa, Homo sapiens
  CDR3 for alpha chain variable domain of TCR clone 340818 (TRAV26-1, TRAJ36)
CIVVGTGANNLFF

SEQ ID NO: 681636 - protein, 16 aa, Homo sapiens
  CDR3 for beta chain variable domain of TCR clone 340818 (TRBV19, TRBJ2-2)
CASRSPGTGATGELFF

SEQ ID NO: 681637 - protein, 14 aa, Homo sapiens
  CDR3 for alpha chain variable domain of TCR clone 340819 (TRAV26-1, TRAJ45)
CIEVTGGGADGLTF

SEQ ID NO: 681638 - protein, 15 aa, Homo sapiens
  CDR3 for beta chain variable domain of TCR clone 340819 (TRBV5-1, TRBJ1-1)
CASSSTTGMNTEAFF

SEQ ID NO: 681639 - protein, 13 aa, Homo sapiens
  CDR3 for alpha chain variable domain of TCR clone 340820 (TRAV30, TRAJ6)
CGTEAGGSYIPTF

SEQ ID NO: 681640 - protein, 12 aa, Homo sapiens
  CDR3 for beta chain variable domain of TCR clone 340820 (TRBV12-4, TRBJ1-3)
CASSFSGNTIYF

SEQ ID NO: 681641 - protein, 12 aa, Homo sapiens
  CDR3 for alpha chain variable domain of TCR clone 340821 (TRAV9-2, TRAJ48)
CALTKGNEKLTF

SEQ ID NO: 681642 - protein, 15 aa, Homo sapiens
  CDR3 for beta chain variable domain of TCR clone 340821 (TRBV5-7, TRBJ2-7)
CASSLGPGRGHEQYF

SEQ ID NO: 681643 - protein, 14 aa, Homo sapiens
  CDR3 for alpha chain variable domain of TCR clone 340822 (TRAV29/DV5, TRAJ36)
CAARRKTGANNLFF

SEQ ID NO: 681644 - protein, 15 aa, Homo sapiens
  CDR3 for beta chain variable domain of TCR clone 340822 (TRBV10-2, TRBJ2-7)
CASWNRGQTTYEQYF

SEQ ID NO: 681645 - protein, 14 aa, Homo sapiens
  CDR3 for alpha chain variable domain of TCR clone 340823 (TRAV13-1, TRAJ53)
CAASISGSNYKLTF

SEQ ID NO: 681646 - protein, 15 aa, Homo sapiens
  CDR3 for beta chain variable domain of TCR clone 340823 (TRBV4-1, TRBJ1-4)
SASSDTGGTNEKLFF

SEQ ID NO: 681647 - protein, 13 aa, Homo sapiens
  CDR3 for alpha chain variable domain of TCR clone 340824 (TRAV1-1, TRAJ31)
FASYLNNNARLMF

SEQ ID NO: 681648 - protein, 14 aa, Homo sapiens
  CDR3 for beta chain variable domain of TCR clone 340824 (TRBV4-1, TRBJ2-5)
CASSRSGSGETQYF

SEQ ID NO: 681649 - protein, 13 aa, Homo sapiens
  CDR3 for alpha chain variable domain of TCR clone 340825 (TRAV38-1, TRAJ20)
CAFMKPNDYKLSF

SEQ ID NO: 681650 - protein, 13 aa, Homo sapiens
  CDR3 for beta chain variable domain of TCR clone 340825 (TRBV7-3, TRBJ1-1)
CASSQDWGAEAFF

SEQ ID NO: 681651 - protein, 12 aa, Homo sapiens
  CDR3 for alpha chain variable domain of TCR clone 340826 (TRAV3, TRAJ20)
CAVRDHDYTLSF

SEQ ID NO: 681652 - protein, 13 aa, Homo sapiens
  CDR3 for beta chain variable domain of TCR clone 340826 (TRBV9, TRBJ2-7)
CASSVGQGGEQYF

SEQ ID NO: 681653 - protein, 11 aa, Homo sapiens
  CDR3 for alpha chain variable domain of TCR clone 340827 (TRAV21, TRAJ34)
CAHCNTDKLIF

SEQ ID NO: 681654 - protein, 16 aa, Homo sapiens
  CDR3 for beta chain variable domain of TCR clone 340827 (TRBV10-2, TRBJ1-1)
CASSEFGEGASTEAFF

SEQ ID NO: 681655 - protein, 17 aa, Homo sapiens
  CDR3 for alpha chain variable domain of TCR clone 340828 (TRAV3, TRAJ13)
CPVRDMRRTGGYQKVTF

SEQ ID NO: 681656 - protein, 15 aa, Homo sapiens
  CDR3 for beta chain variable domain of TCR clone 340828 (TRBV28, TRBJ2-6)
CASTMGGAGANVLTF

SEQ ID NO: 681657 - protein, 18 aa, Homo sapiens
  CDR3 for alpha chain variable domain of TCR clone 340829 (TRAV13-1, TRAJ10)
YAASKGRAVTGGGNILTF

SEQ ID NO: 681658 - protein, 14 aa, Homo sapiens
  CDR3 for beta chain variable domain of TCR clone 340829 (TRBV18, TRBJ2-7)
CASSPRGGAYEQYF

SEQ ID NO: 681659 - protein, 17 aa, Homo sapiens
  CDR3 for alpha chain variable domain of TCR clone 340830 (TRAV3, TRAJ6)
CAVRDGPRAGGRYIPTF

SEQ ID NO: 681660 - protein, 15 aa, Homo sapiens
  CDR3 for beta chain variable domain of TCR clone 340830 (TRBV4-1, TRBJ1-4)
CASSDTGGTNEKLFF

SEQ ID NO: 681661 - protein, 15 aa, Homo sapiens
  CDR3 for alpha chain variable domain of TCR clone 340831 (TRAV3, TRAJ20)
CAVRDIKLSDYKLSF

SEQ ID NO: 681662 - protein, 15 aa, Homo sapiens
  CDR3 for beta chain variable domain of TCR clone 340831 (TRBV7-9, TRBJ1-6)
CASSSSGRGNSPLHF

SEQ ID NO: 681663 - protein, 14 aa, Homo sapiens
  CDR3 for alpha chain variable domain of TCR clone 340832 (TRAV2, TRAJ37)
CAVDSTSNTGKLIF

SEQ ID NO: 681664 - protein, 14 aa, Homo sapiens
  CDR3 for beta chain variable domain of TCR clone 340832 (TRBV7-9, TRBJ2-7)
CASSLGGSSYEQYF

SEQ ID NO: 681665 - protein, 13 aa, Homo sapiens
  CDR3 for alpha chain variable domain of TCR clone 340833 (TRAV8-3, TRAJ6)
CAVGSGGRYIPTF

SEQ ID NO: 681666 - protein, 14 aa, Homo sapiens
  CDR3 for beta chain variable domain of TCR clone 340833 (TRBV11-2, TRBJ1-1)
CASSTQRGRTEAVF

SEQ ID NO: 681667 - protein, 13 aa, Homo sapiens
  CDR3 for alpha chain variable domain of TCR clone 340834 (TRAV8-3, TRAJ6)
CAARRGGSYIPTC

SEQ ID NO: 681668 - protein, 15 aa, Homo sapiens
  CDR3 for beta chain variable domain of TCR clone 340834 (TRBV4-1, TRBJ2-3)
CASSNRAGGRDTQYF

SEQ ID NO: 681669 - protein, 13 aa, Homo sapiens
  CDR3 for alpha chain variable domain of TCR clone 340835 (TRAV2, TRAJ40)
CAVVTSGAYKYIF

SEQ ID NO: 681670 - protein, 14 aa, Homo sapiens
  CDR3 for beta chain variable domain of TCR clone 340835 (TRBV19, TRBJ2-1)
RASPTFVLSGEQFF

SEQ ID NO: 681671 - protein, 16 aa, Homo sapiens
  CDR3 for alpha chain variable domain of TCR clone 340836 (TRAV30, TRAJ24)
CGTEIVDADSWGKFQF

SEQ ID NO: 681672 - protein, 16 aa, Homo sapiens
  CDR3 for beta chain variable domain of TCR clone 340836 (TRBV3-1, TRBJ1-6)
CASSQEFQGSYSPLHF

SEQ ID NO: 681673 - protein, 18 aa, Homo sapiens
  CDR3 for alpha chain variable domain of TCR clone 340837 (TRAV13-1, TRAJ52)
CAAKNPNAGGTSDGKLTF

SEQ ID NO: 681674 - protein, 15 aa, Homo sapiens
  CDR3 for beta chain variable domain of TCR clone 340837 (TRBV28, TRBJ2-1)
CASSIIAGGRSEQFF

SEQ ID NO: 681675 - protein, 12 aa, Homo sapiens
  CDR3 for alpha chain variable domain of TCR clone 340838 (TRAV26-1, TRAJ36)
CIVRVRADNLFF

SEQ ID NO: 681676 - protein, 14 aa, Homo sapiens
  CDR3 for beta chain variable domain of TCR clone 340838 (TRBV14, TRBJ2-3)
CASSRKLAADTQDF

SEQ ID NO: 681677 - protein, 12 aa, Homo sapiens
  CDR3 for alpha chain variable domain of TCR clone 340839 (TRAV17, TRAJ12)
CATLRSSYKLIF

SEQ ID NO: 681678 - protein, 16 aa, Homo sapiens
  CDR3 for beta chain variable domain of TCR clone 340839 (TRBV28, TRBJ2-7)
CASCLFFETGGPEQYF

SEQ ID NO: 681679 - protein, 13 aa, Homo sapiens
  CDR3 for alpha chain variable domain of TCR clone 340840 (TRAV13-1, TRAJ39)
CAASIWAGNMLTF

SEQ ID NO: 681680 - protein, 15 aa, Homo sapiens
  CDR3 for beta chain variable domain of TCR clone 340840 (TRBV7-9, TRBJ1-1)
FASSLLEQGGTEAFF

SEQ ID NO: 681681 - protein, 20 aa, Homo sapiens
  CDR3 for alpha chain variable domain of TCR clone 340841 (TRAV12-1, TRAJ42)
SSVIQPPTSVKGGSQGNLIL

SEQ ID NO: 681682 - protein, 18 aa, Homo sapiens
  CDR3 for beta chain variable domain of TCR clone 340841 (TRBV11-2, TRBJ2-3)
RASSLGGASRGAPNTQYF

SEQ ID NO: 681683 - protein, 10 aa, Homo sapiens
  CDR3 for alpha chain variable domain of TCR clone 340842 (TRAV13-1, TRAJ21)
CAASLNKFYF

SEQ ID NO: 681684 - protein, 13 aa, Homo sapiens
  CDR3 for beta chain variable domain of TCR clone 340842 (TRBV7-9, TRBJ2-7)
CASGFYGSYEQYF

SEQ ID NO: 681685 - protein, 13 aa, Homo sapiens
  CDR3 for alpha chain variable domain of TCR clone 340843 (TRAV8-4, TRAJ48)
CAVSLFGNEKLTF

SEQ ID NO: 681686 - protein, 15 aa, Homo sapiens
  CDR3 for beta chain variable domain of TCR clone 340843 (TRBV20-1, TRBJ2-7)
CSARDRVSGMDEQYF

SEQ ID NO: 681687 - protein, 13 aa, Homo sapiens
  CDR3 for alpha chain variable domain of TCR clone 340844 (TRAV21, TRAJ57)
CALTQGGSEKLVF

SEQ ID NO: 681688 - protein, 17 aa, Homo sapiens
  CDR3 for beta chain variable domain of TCR clone 340844 (TRBV20-1, TRBJ2-2)
CSASGSGQGGLTGELFF

SEQ ID NO: 681689 - protein, 15 aa, Homo sapiens
  CDR3 for alpha chain variable domain of TCR clone 340845 (TRAV3, TRAJ13)
CAVRDIGGGYQKVTF

SEQ ID NO: 681690 - protein, 18 aa, Homo sapiens
  CDR3 for beta chain variable domain of TCR clone 340845 (TRBV11-2, TRBJ2-3)
CASSLGGASRGAPNTQYF

SEQ ID NO: 681691 - protein, 11 aa, Homo sapiens
  CDR3 for alpha chain variable domain of TCR clone 340846 (TRAV36/DV7, TRAJ45)
CAVGGADGLTF

SEQ ID NO: 681692 - protein, 15 aa, Homo sapiens
  CDR3 for beta chain variable domain of TCR clone 340846 (TRBV11-3, TRBJ2-3)
CASLKDGREGDTQYF

SEQ ID NO: 681693 - protein, 14 aa, Homo sapiens
  CDR3 for alpha chain variable domain of TCR clone 340847 (TRAV8-2, TRAJ4)
CVVSPSGGYNKLIF

SEQ ID NO: 681694 - protein, 15 aa, Homo sapiens
  CDR3 for beta chain variable domain of TCR clone 340847 (TRBV19, TRBJ1-6)
CASSTQGAVGSPLHF

SEQ ID NO: 681695 - protein, 16 aa, Homo sapiens
  CDR3 for alpha chain variable domain of TCR clone 340848 (TRAV12-3, TRAJ53)
CAMSPGSGGSNYKLTF

SEQ ID NO: 681696 - protein, 12 aa, Homo sapiens
  CDR3 for beta chain variable domain of TCR clone 340848 (TRBV6-1, TRBJ2-5)
CASSEGRETQYF

SEQ ID NO: 681697 - protein, 13 aa, Homo sapiens
  CDR3 for alpha chain variable domain of TCR clone 340849 (TRAV17, TRAJ5)
CALRGTGRRALTF

SEQ ID NO: 681698 - protein, 15 aa, Homo sapiens
  CDR3 for beta chain variable domain of TCR clone 340849 (TRBV7-6, TRBJ1-5)
CASSQSSGINQPQHF

SEQ ID NO: 681699 - protein, 16 aa, Homo sapiens
  CDR3 for alpha chain variable domain of TCR clone 340850 (TRAV27, TRAJ53)
CAAPEGSGGSNYKLTF

SEQ ID NO: 681700 - protein, 14 aa, Homo sapiens
  CDR3 for beta chain variable domain of TCR clone 340850 (TRBV5-4, TRBJ2-2)
CASSLTSRTGELFF

SEQ ID NO: 681701 - protein, 14 aa, Homo sapiens
  CDR3 for alpha chain variable domain of TCR clone 340851 (TRAV3, TRAJ9)
CAVRLNTGGFKTIF

SEQ ID NO: 681702 - protein, 16 aa, Homo sapiens
  CDR3 for beta chain variable domain of TCR clone 340851 (TRBV12-5, TRBJ2-5)
CASGPRTSGDQETQYF

SEQ ID NO: 681703 - protein, 11 aa, Homo sapiens
  CDR3 for alpha chain variable domain of TCR clone 340852 (TRAV29/DV5, TRAJ49)
CAAVPGYQFYF

SEQ ID NO: 681704 - protein, 13 aa, Homo sapiens
  CDR3 for beta chain variable domain of TCR clone 340852 (TRBV27, TRBJ1-1)
CASSLSIGAEAFF

SEQ ID NO: 681705 - protein, 18 aa, Homo sapiens
  CDR3 for alpha chain variable domain of TCR clone 340853 (TRAV26-1, TRAJ52)
CIVRVAGDGGTSYGKLTF

SEQ ID NO: 681706 - protein, 13 aa, Homo sapiens
  CDR3 for beta chain variable domain of TCR clone 340853 (TRBV7-8, TRBJ1-2)
CASSAQSYYGNAL

SEQ ID NO: 681707 - protein, 13 aa, Homo sapiens
  CDR3 for alpha chain variable domain of TCR clone 340854 (TRAV30, TRAJ34)
CGTVGYNTDKLII

SEQ ID NO: 681708 - protein, 16 aa, Homo sapiens
  CDR3 for beta chain variable domain of TCR clone 340854 (TRBV7-9, TRBJ1-2)
CASSLGFSSGEDGYTF

SEQ ID NO: 681709 - protein, 15 aa, Homo sapiens
  CDR3 for alpha chain variable domain of TCR clone 340855 (TRAV13-1, TRAJ44)
CAASRGGGTASKLTF

SEQ ID NO: 681710 - protein, 12 aa, Homo sapiens
  CDR3 for beta chain variable domain of TCR clone 340855 (TRBV11-2, TRBJ2-2)
CASSLGSGELFF

SEQ ID NO: 681711 - protein, 13 aa, Homo sapiens
  CDR3 for alpha chain variable domain of TCR clone 340856 (TRAV23/DV6, TRAJ22)
CAPYSGSARQLTF

SEQ ID NO: 681712 - protein, 15 aa, Homo sapiens
  CDR3 for beta chain variable domain of TCR clone 340856 (TRBV11-2, TRBJ1-6)
CASSLDPGAGSPHHF

SEQ ID NO: 681713 - protein, 13 aa, Homo sapiens
  CDR3 for alpha chain variable domain of TCR clone 340857 (TRAV17, TRAJ5)
CALRGPGRRALTF

SEQ ID NO: 681714 - protein, 13 aa, Homo sapiens
  CDR3 for beta chain variable domain of TCR clone 340857 (TRBV4-2, TRBJ1-1)
CASSQAGNTEAFF

SEQ ID NO: 681715 - protein, 14 aa, Homo sapiens
  CDR3 for alpha chain variable domain of TCR clone 340858 (TRAV12-2, TRAJ13)
CAVNPSGGYQKVTF

SEQ ID NO: 681716 - protein, 14 aa, Homo sapiens
  CDR3 for beta chain variable domain of TCR clone 340858 (TRBV12-4, TRBJ1-1)
CTSSLGTGGTEAFF

SEQ ID NO: 681717 - protein, 14 aa, Homo sapiens
  CDR3 for alpha chain variable domain of TCR clone 340859 (TRAV12-2, TRAJ17)
CAVLFKAAGNKLTF

SEQ ID NO: 681718 - protein, 13 aa, Homo sapiens
  CDR3 for beta chain variable domain of TCR clone 340859 (TRBV19, TRBJ1-2)
CAISQGQVYGYTF

SEQ ID NO: 681719 - protein, 13 aa, Homo sapiens
  CDR3 for alpha chain variable domain of TCR clone 340860 (TRAV17, TRAJ5)
CALRGTGRRALTF

SEQ ID NO: 681720 - protein, 19 aa, Homo sapiens
  CDR3 for beta chain variable domain of TCR clone 340860 (TRBV19, TRBJ2-5)
CASSIGQVTDFFLGETQYF

SEQ ID NO: 681721 - protein, 14 aa, Homo sapiens
  CDR3 for alpha chain variable domain of TCR clone 340861 (TRAV17, TRAJ39)
CATDPVRAGNMLTF

SEQ ID NO: 681722 - protein, 15 aa, Homo sapiens
  CDR3 for beta chain variable domain of TCR clone 340861 (TRBV13, TRBJ1-5)
FASSFGQGGVQPQHF

SEQ ID NO: 681723 - protein, 14 aa, Homo sapiens
  CDR3 for alpha chain variable domain of TCR clone 340862 (TRAV12-2, TRAJ17)
CAVLFKAAGNKLTF

SEQ ID NO: 681724 - protein, 13 aa, Homo sapiens
  CDR3 for beta chain variable domain of TCR clone 340862 (TRBV6-1, TRBJ1-1)
CASSRQGNTEAFF

SEQ ID NO: 681725 - protein, 14 aa, Homo sapiens
  CDR3 for alpha chain variable domain of TCR clone 340863 (TRAV17, TRAJ57)
CATDPQGGSEKLVF

SEQ ID NO: 681726 - protein, 16 aa, Homo sapiens
  CDR3 for beta chain variable domain of TCR clone 340863 (TRBV10-3, TRBJ1-2)
CAISEPQEGVNYGYIF

SEQ ID NO: 681727 - protein, 14 aa, Homo sapiens
  CDR3 for alpha chain variable domain of TCR clone 340864 (TRAV17, TRAJ57)
CATDPQGGSEKLAF

SEQ ID NO: 681728 - protein, 18 aa, Homo sapiens
  CDR3 for beta chain variable domain of TCR clone 340864 (TRBV6-6, TRBJ1-3)
CASSYSKWGSISGNTIYF

SEQ ID NO: 681729 - protein, 12 aa, Homo sapiens
  CDR3 for alpha chain variable domain of TCR clone 340865 (TRAV20, TRAJ39)
CAVCNAGNMLTF

SEQ ID NO: 681730 - protein, 15 aa, Homo sapiens
  CDR3 for beta chain variable domain of TCR clone 340865 (TRBV27, TRBJ2-1)
CASSNGGGSSNEQFF

SEQ ID NO: 681731 - protein, 16 aa, Homo sapiens
  CDR3 for alpha chain variable domain of TCR clone 340866 (TRAV4, TRAJ18)
CCVLLIGGSTLGRLYF

SEQ ID NO: 681732 - protein, 17 aa, Homo sapiens
  CDR3 for beta chain variable domain of TCR clone 340866 (TRBV20-1, TRBJ2-1)
CSASSSGLAGSYNEQFF

SEQ ID NO: 681733 - protein, 15 aa, Homo sapiens
  CDR3 for alpha chain variable domain of TCR clone 340867 (TRAV8-2, TRAJ16)
CVVSDGFSDGKKLLF

SEQ ID NO: 681734 - protein, 14 aa, Homo sapiens
  CDR3 for beta chain variable domain of TCR clone 340867 (TRBV7-3, TRBJ1-1)
CAGSLGTGYTEAFL

SEQ ID NO: 681735 - protein, 13 aa, Homo sapiens
  CDR3 for alpha chain variable domain of TCR clone 340868 (TRAV20, TRAJ34)
CAVSSYNTHKLIF

SEQ ID NO: 681736 - protein, 13 aa, Homo sapiens
  CDR3 for beta chain variable domain of TCR clone 340868 (TRBV7-9, TRBJ1-2)
CASSLKQNYGYTF

SEQ ID NO: 681737 - protein, 10 aa, Homo sapiens
  CDR3 for alpha chain variable domain of TCR clone 340869 (TRAV3, TRAJ30)
CAVREIEIIF

SEQ ID NO: 681738 - protein, 14 aa, Homo sapiens
  CDR3 for beta chain variable domain of TCR clone 340869 (TRBV6-1, TRBJ1-6)
CASSGTAYNSPLHF

SEQ ID NO: 681739 - protein, 14 aa, Homo sapiens
  CDR3 for alpha chain variable domain of TCR clone 340870 (TRAV12-2, TRAJ13)
CAVKKTGGYQEVTF

SEQ ID NO: 681740 - protein, 16 aa, Homo sapiens
  CDR3 for beta chain variable domain of TCR clone 340870 (TRBV2, TRBJ2-1)
CASRSPAGGKYNEQFF

SEQ ID NO: 681741 - protein, 12 aa, Homo sapiens
  CDR3 for alpha chain variable domain of TCR clone 340871 (TRAV29/DV5, TRAJ49)
CAATDTGNQFYF

SEQ ID NO: 681742 - protein, 10 aa, Homo sapiens
  CDR3 for beta chain variable domain of TCR clone 340871 (TRBV19, TRBJ2-2)
CASRQTGATP

SEQ ID NO: 681743 - protein, 13 aa, Homo sapiens
  CDR3 for alpha chain variable domain of TCR clone 340872 (TRAV13-1, TRAJ40)
CAASKGGTYKYIF

SEQ ID NO: 681744 - protein, 13 aa, Homo sapiens
  CDR3 for beta chain variable domain of TCR clone 340872 (TRBV7-6, TRBJ1-2)
CASSLVAAYGYTF

SEQ ID NO: 681745 - protein, 13 aa, Homo sapiens
  CDR3 for alpha chain variable domain of TCR clone 340873 (TRAV35, TRAJ33)
CAGRHDINYQLIW

SEQ ID NO: 681746 - protein, 19 aa, Homo sapiens
  CDR3 for beta chain variable domain of TCR clone 340873 (TRBV6-3, TRBJ2-1)
CASSYSWTSGRATYNEQFF

SEQ ID NO: 681747 - protein, 17 aa, Homo sapiens
  CDR3 for alpha chain variable domain of TCR clone 340874 (TRAV13-1, TRAJ52)
CAAGRNAGGTSYGKLTF

SEQ ID NO: 681748 - protein, 13 aa, Homo sapiens
  CDR3 for beta chain variable domain of TCR clone 340874 (TRBV7-2, TRBJ1-1)
CASNLKAAKVAFF

SEQ ID NO: 681749 - protein, 15 aa, Homo sapiens
  CDR3 for alpha chain variable domain of TCR clone 340875 (TRAV1-2, TRAJ39)
CAGEGVDNAGNMLTF

SEQ ID NO: 681750 - protein, 13 aa, Homo sapiens
  CDR3 for beta chain variable domain of TCR clone 340875 (TRBV27, TRBJ1-6)
CASRWTGYSPLHF

SEQ ID NO: 681751 - protein, 16 aa, Homo sapiens
  CDR3 for alpha chain variable domain of TCR clone 340876 (TRAV8-6, TRAJ13)
CAAPSSYSGGYQKVTF

SEQ ID NO: 681752 - protein, 13 aa, Homo sapiens
  CDR3 for beta chain variable domain of TCR clone 340876 (TRBV19, TRBJ1-2)
CASSVPGQDGYTF

SEQ ID NO: 681753 - protein, 12 aa, Homo sapiens
  CDR3 for alpha chain variable domain of TCR clone 340877 (TRAV12-2, TRAJ10)
WGVTGGGNKLTF

SEQ ID NO: 681754 - protein, 14 aa, Homo sapiens
  CDR3 for beta chain variable domain of TCR clone 340877 (TRBV15, TRBJ2-5)
CATSRDRGIETQYF

SEQ ID NO: 681755 - protein, 14 aa, Homo sapiens
  CDR3 for alpha chain variable domain of TCR clone 340878 (TRAV8-2, TRAJ4)
CVVSPSGGYNKLIF

SEQ ID NO: 681756 - protein, 14 aa, Homo sapiens
  CDR3 for beta chain variable domain of TCR clone 340878 (TRBV11-2, TRBJ2-5)
CASSRTGGIETQYF

SEQ ID NO: 681757 - protein, 17 aa, Homo sapiens
  CDR3 for alpha chain variable domain of TCR clone 340879 (TRAV13-1, TRAJ28)
CAASRPYSGAGSYQLTF

SEQ ID NO: 681758 - protein, 15 aa, Homo sapiens
  CDR3 for beta chain variable domain of TCR clone 340879 (TRBV6-3, TRBJ2-2)
CASSFLATLTGELFF

SEQ ID NO: 681759 - protein, 14 aa, Homo sapiens
  CDR3 for alpha chain variable domain of TCR clone 340880 (TRAV17, TRAJ57)
CATDPQGGSEKLVF

SEQ ID NO: 681760 - protein, 14 aa, Homo sapiens
  CDR3 for beta chain variable domain of TCR clone 340880 (TRBV10-2, TRBJ2-7)
CASSFGSEGYEQYF

SEQ ID NO: 681761 - protein, 14 aa, Homo sapiens
  CDR3 for alpha chain variable domain of TCR clone 340881 (TRAV30, TRAJ26)
CGTEIVSYGQNFVF

SEQ ID NO: 681762 - protein, 14 aa, Homo sapiens
  CDR3 for beta chain variable domain of TCR clone 340881 (TRBV11-2, TRBJ2-3)
CASSRLARTDTQYF

SEQ ID NO: 681763 - protein, 17 aa, Homo sapiens
  CDR3 for alpha chain variable domain of TCR clone 340882 (TRAV3, TRAJ13)
CAVRDMRRNGGYQKVTF

SEQ ID NO: 681764 - protein, 14 aa, Homo sapiens
  CDR3 for beta chain variable domain of TCR clone 340882 (TRBV12-5, TRBJ2-5)
CASGSRTHQETQYF

SEQ ID NO: 681765 - protein, 14 aa, Homo sapiens
  CDR3 for alpha chain variable domain of TCR clone 340883 (TRAV26-1, TRAJ38)
CIADNAGNNRKLIW

SEQ ID NO: 681766 - protein, 19 aa, Homo sapiens
  CDR3 for beta chain variable domain of TCR clone 340883 (TRBV4-2, TRBJ1-5)
CASSHDVGSGGGLNQPQHF

SEQ ID NO: 681767 - protein, 14 aa, Homo sapiens
  CDR3 for alpha chain variable domain of TCR clone 340884 (TRAV8-4, TRAJ9)
CAARINTGGFKTIF

SEQ ID NO: 681768 - protein, 14 aa, Homo sapiens
  CDR3 for beta chain variable domain of TCR clone 340884 (TRBV5-1, TRBJ1-1)
CASSLQGASTEAFF

SEQ ID NO: 681769 - protein, 16 aa, Homo sapiens
  CDR3 for alpha chain variable domain of TCR clone 340885 (TRAV3, TRAJ23)
CAVKIGIYNQGGKNIF

SEQ ID NO: 681770 - protein, 17 aa, Homo sapiens
  CDR3 for beta chain variable domain of TCR clone 340885 (TRBV10-3, TRBJ2-6)
CAISESTAPSGANDLTF

SEQ ID NO: 681771 - protein, 12 aa, Homo sapiens
  CDR3 for alpha chain variable domain of TCR clone 340886 (TRAV12-2, TRAJ10)
WGVTGGGNKLTF

SEQ ID NO: 681772 - protein, 16 aa, Homo sapiens
  CDR3 for beta chain variable domain of TCR clone 340886 (TRBV6-4, TRBJ1-2)
CSSSEAVGDPNYGYTF

SEQ ID NO: 681773 - protein, 14 aa, Homo sapiens
  CDR3 for alpha chain variable domain of TCR clone 340887 (TRAV12-2, TRAJ13)
CAVKKTGGYQKVTF

SEQ ID NO: 681774 - protein, 10 aa, Homo sapiens
  CDR3 for beta chain variable domain of TCR clone 340887 (TRBV12-4, TRBJ1-2)
CASSSIWLHL

SEQ ID NO: 681775 - protein, 13 aa, Homo sapiens
  CDR3 for alpha chain variable domain of TCR clone 340888 (TRAV12-1, TRAJ11)
CVVNRAGYSTFTF

SEQ ID NO: 681776 - protein, 15 aa, Homo sapiens
  CDR3 for beta chain variable domain of TCR clone 340888 (TRBV7-3, TRBJ2-2)
CASSETGQGTGELFF

SEQ ID NO: 681777 - protein, 12 aa, Homo sapiens
  CDR3 for alpha chain variable domain of TCR clone 340889 (TRAV12-1, TRAJ34)
CVVTFHTDKLIF

SEQ ID NO: 681778 - protein, 14 aa, Homo sapiens
  CDR3 for beta chain variable domain of TCR clone 340889 (TRBV19, TRBJ1-1)
CASLRTGLNTEAFF

SEQ ID NO: 681779 - protein, 12 aa, Homo sapiens
  CDR3 for alpha chain variable domain of TCR clone 340890 (TRAV2, TRAJ33)
CAFMDSNYQLIG

SEQ ID NO: 681780 - protein, 16 aa, Homo sapiens
  CDR3 for beta chain variable domain of TCR clone 340890 (TRBV2, TRBJ2-7)
CASSEPWTGPSYEQYF

SEQ ID NO: 681781 - protein, 16 aa, Homo sapiens
  CDR3 for alpha chain variable domain of TCR clone 340891 (TRAV30, TRAJ24)
FGTEIVDADSWGKFQV

SEQ ID NO: 681782 - protein, 15 aa, Homo sapiens
  CDR3 for beta chain variable domain of TCR clone 340891 (TRBV4-1, TRBJ1-4)
CASSDTGGTNEKLSF

SEQ ID NO: 681783 - protein, 14 aa, Homo sapiens
  CDR3 for alpha chain variable domain of TCR clone 340892 (TRAV12-2, TRAJ13)
GAVKKTGGYQKVTF

SEQ ID NO: 681784 - protein, 16 aa, Homo sapiens
  CDR3 for beta chain variable domain of TCR clone 340892 (TRBV2, TRBJ2-1)
CASRSPAGGKYNEQFF

SEQ ID NO: 681785 - protein, 15 aa, Homo sapiens
  CDR3 for alpha chain variable domain of TCR clone 340893 (TRAV3, TRAJ4)
CAQNMFFGGYNKLIF

SEQ ID NO: 681786 - protein, 14 aa, Homo sapiens
  CDR3 for beta chain variable domain of TCR clone 340893 (TRBV11-2, TRBJ2-5)
CASRPLAGRETHYF

SEQ ID NO: 681787 - protein, 16 aa, Homo sapiens
  CDR3 for alpha chain variable domain of TCR clone 340894 (TRAV3, TRAJ37)
CAVGPHGSGNTGNIIF

SEQ ID NO: 681788 - protein, 15 aa, Homo sapiens
  CDR3 for beta chain variable domain of TCR clone 340894 (TRBV20-1, TRBJ2-7)
CSARDRVSGMDEQYF

SEQ ID NO: 681789 - protein, 11 aa, Homo sapiens
  CDR3 for alpha chain variable domain of TCR clone 340895 (TRAV12-3, TRAJ43)
CAMSVSNDMRF

SEQ ID NO: 681790 - protein, 15 aa, Homo sapiens
  CDR3 for beta chain variable domain of TCR clone 340895 (TRBV4-3, TRBJ1-1)
CASSQELGRGTEAFF

SEQ ID NO: 681791 - protein, 15 aa, Homo sapiens
  CDR3 for alpha chain variable domain of TCR clone 340896 (TRAV3, TRAJ36)
CTVRASQTGANNLFF

SEQ ID NO: 681792 - protein, 13 aa, Homo sapiens
  CDR3 for beta chain variable domain of TCR clone 340896 (TRBV10-3, TRBJ1-2)
CAISERDSYGYTF

SEQ ID NO: 681793 - protein, 13 aa, Homo sapiens
  CDR3 for alpha chain variable domain of TCR clone 340897 (TRAV23/DV6, TRAJ12)
CAPRADSSYKLIF

SEQ ID NO: 681794 - protein, 12 aa, Homo sapiens
  CDR3 for beta chain variable domain of TCR clone 340897 (TRBV7-8, TRBJ2-7)
RASSLGDREQYF

SEQ ID NO: 681795 - protein, 14 aa, Homo sapiens
  CDR3 for alpha chain variable domain of TCR clone 340898 (TRAV23/DV6, TRAJ27)
CAASGDGNAGNSTF

SEQ ID NO: 681796 - protein, 15 aa, Homo sapiens
  CDR3 for beta chain variable domain of TCR clone 340898 (TRBV27, TRBJ2-1)
CASSNGGGSSNEQFF

SEQ ID NO: 681797 - protein, 13 aa, Homo sapiens
  CDR3 for alpha chain variable domain of TCR clone 340899 (TRAV12-1, TRAJ42)
CVVNAPRQGNLIF

SEQ ID NO: 681798 - protein, 15 aa, Homo sapiens
  CDR3 for beta chain variable domain of TCR clone 340899 (TRBV20-1, TRBJ2-3)
CSARESRGQGYTQYF

SEQ ID NO: 681799 - protein, 15 aa, Homo sapiens
  CDR3 for alpha chain variable domain of TCR clone 340900 (TRAV21, TRAJ53)
CATLNSGGSNYKLTF

SEQ ID NO: 681800 - protein, 16 aa, Homo sapiens
  CDR3 for beta chain variable domain of TCR clone 340900 (TRBV20-1, TRBJ1-2)
CSDSMGQGVANYGYTF

SEQ ID NO: 681801 - protein, 11 aa, Homo sapiens
  CDR3 for alpha chain variable domain of TCR clone 340901 (TRAV21, TRAJ23)
CAPQRRGKLIF

SEQ ID NO: 681802 - protein, 14 aa, Homo sapiens
  CDR3 for beta chain variable domain of TCR clone 340901 (TRBV20-1, TRBJ1-1)
CSAQTRIGGTEAFF

SEQ ID NO: 681803 - protein, 12 aa, Homo sapiens
  CDR3 for alpha chain variable domain of TCR clone 340902 (TRAV8-3, TRAJ26)
CAGDNYGQNFAF

SEQ ID NO: 681804 - protein, 15 aa, Homo sapiens
  CDR3 for beta chain variable domain of TCR clone 340902 (TRBV9, TRBJ2-1)
CASRLAGSSYNEQFF

SEQ ID NO: 681805 - protein, 15 aa, Homo sapiens
  CDR3 for alpha chain variable domain of TCR clone 340903 (TRAV35, TRAJ53)
CAGLTQDGSNYKLTF

SEQ ID NO: 681806 - protein, 13 aa, Homo sapiens
  CDR3 for beta chain variable domain of TCR clone 340903 (TRBV20-1, TRBJ1-1)
CSAVDGTLNEAFF

SEQ ID NO: 681807 - protein, 11 aa, Homo sapiens
  CDR3 for alpha chain variable domain of TCR clone 340904 (TRAV1-2, TRAJ20)
CAVANDYKLSF

SEQ ID NO: 681808 - protein, 12 aa, Homo sapiens
  CDR3 for beta chain variable domain of TCR clone 340904 (TRBV20-1, TRBJ2-7)
CSAGRRQSEQYF

SEQ ID NO: 681809 - protein, 10 aa, Homo sapiens
  CDR3 for alpha chain variable domain of TCR clone 340905 (TRAV12-3, TRAJ18)
CAMSAEAQPW

SEQ ID NO: 681810 - protein, 13 aa, Homo sapiens
  CDR3 for beta chain variable domain of TCR clone 340905 (TRBV7-3, TRBJ1-1)
CASSQVWGAEAFF

SEQ ID NO: 681811 - protein, 18 aa, Homo sapiens
  CDR3 for alpha chain variable domain of TCR clone 340906 (TRAV13-1, TRAJ52)
CAAKNPNAGGTSYGKLTF

SEQ ID NO: 681812 - protein, 16 aa, Homo sapiens
  CDR3 for beta chain variable domain of TCR clone 340906 (TRBV7-8, TRBJ2-4)
CASSAERTLAKNIQYF

SEQ ID NO: 681813 - protein, 11 aa, Homo sapiens
  CDR3 for alpha chain variable domain of TCR clone 340907 (TRAV12-2, TRAJ39)
CAVNNMLTFGG

SEQ ID NO: 681814 - protein, 13 aa, Homo sapiens
  CDR3 for beta chain variable domain of TCR clone 340907 (TRBV10-2, TRBJ2-7)
CASGASGGYEQYF

SEQ ID NO: 681815 - protein, 23 aa, Homo sapiens
  CDR3 for alpha chain variable domain of TCR clone 340908 (TRAV12-1, TRAJ44)
SSVIQPPTSVWPTYTGTASKLTF

SEQ ID NO: 681816 - protein, 13 aa, Homo sapiens
  CDR3 for beta chain variable domain of TCR clone 340908 (TRBV6-5, TRBJ2-5)
CASSPQGGETQYF

SEQ ID NO: 681817 - protein, 13 aa, Homo sapiens
  CDR3 for alpha chain variable domain of TCR clone 340909 (TRAV1-2, TRAJ13)
CAVNSGGYQKVTF

SEQ ID NO: 681818 - protein, 14 aa, Homo sapiens
  CDR3 for beta chain variable domain of TCR clone 340909 (TRBV4-1, TRBJ1-5)
CASSPKEDNQPQHF

SEQ ID NO: 681819 - protein, 16 aa, Homo sapiens
  CDR3 for alpha chain variable domain of TCR clone 340910 (TRAV8-2, TRAJ48)
CVVSDVSNFGNEKLSF

SEQ ID NO: 681820 - protein, 16 aa, Homo sapiens
  CDR3 for beta chain variable domain of TCR clone 340910 (TRBV24-1, TRBJ2-1)
CATSGVTGADYNEQFF

SEQ ID NO: 681821 - protein, 14 aa, Homo sapiens
  CDR3 for alpha chain variable domain of TCR clone 340911 (TRAV2, TRAJ22)
SAVEVKRAARQLTF

SEQ ID NO: 681822 - protein, 14 aa, Homo sapiens
  CDR3 for beta chain variable domain of TCR clone 340911 (TRBV19, TRBJ2-2)
CASTPGYSGGELFF

SEQ ID NO: 681823 - protein, 12 aa, Homo sapiens
  CDR3 for alpha chain variable domain of TCR clone 340912 (TRAV8-3, TRAJ4)
PAFSGGYNKLIS

SEQ ID NO: 681824 - protein, 13 aa, Homo sapiens
  CDR3 for beta chain variable domain of TCR clone 340912 (TRBV20-1, TRBJ1-3)
CSAGAYSGNTIYF

SEQ ID NO: 681825 - protein, 14 aa, Homo sapiens
  CDR3 for alpha chain variable domain of TCR clone 340913 (TRAV12-3, TRAJ10)
RHLPLTGGGNKLTF

SEQ ID NO: 681826 - protein, 13 aa, Homo sapiens
  CDR3 for beta chain variable domain of TCR clone 340913 (TRBV27, TRBJ1-1)
CASSLSIGAEAFF

SEQ ID NO: 681827 - protein, 15 aa, Homo sapiens
  CDR3 for alpha chain variable domain of TCR clone 340914 (TRAV21, TRAJ53)
CATLNSGGSNYKLTF

SEQ ID NO: 681828 - protein, 16 aa, Homo sapiens
  CDR3 for beta chain variable domain of TCR clone 340914 (TRBV4-1, TRBJ1-3)
CASSQDELLAGNTIYF

SEQ ID NO: 681829 - protein, 18 aa, Homo sapiens
  CDR3 for alpha chain variable domain of TCR clone 340915 (TRAV13-1, TRAJ52)
CAAKNPNAGGTSYGKLTF

SEQ ID NO: 681830 - protein, 14 aa, Homo sapiens
  CDR3 for beta chain variable domain of TCR clone 340915 (TRBV20-1, TRBJ2-3)
CSARGGTSTDTQYF

SEQ ID NO: 681831 - protein, 14 aa, Homo sapiens
  CDR3 for alpha chain variable domain of TCR clone 340916 (TRAV3, TRAJ21)
CAVESQANFNKFYF

SEQ ID NO: 681832 - protein, 16 aa, Homo sapiens
  CDR3 for beta chain variable domain of TCR clone 340916 (TRBV12-4, TRBJ2-5)
CASSFFVRGRQETQYF

SEQ ID NO: 681833 - protein, 15 aa, Homo sapiens
  CDR3 for alpha chain variable domain of TCR clone 340917 (TRAV23/DV6, TRAJ18)
CAARYRGSTLGRLYF

SEQ ID NO: 681834 - protein, 14 aa, Homo sapiens
  CDR3 for beta chain variable domain of TCR clone 340917 (TRBV7-2, TRBJ1-6)
CASSLQGANSPLHF

SEQ ID NO: 681835 - protein, 18 aa, Homo sapiens
  CDR3 for alpha chain variable domain of TCR clone 340918 (TRAV12-2, )
CAVEDIQNPDPAVYQLRD

SEQ ID NO: 681836 - protein, 14 aa, Homo sapiens
  CDR3 for beta chain variable domain of TCR clone 340918 (TRBV13, TRBJ2-5)
CASSLGPRGETQYF

SEQ ID NO: 681837 - protein, 12 aa, Homo sapiens
  CDR3 for alpha chain variable domain of TCR clone 340919 (TRAV16, TRAJ11)
CALLRGYSTLTF

SEQ ID NO: 681838 - protein, 14 aa, Homo sapiens
  CDR3 for beta chain variable domain of TCR clone 340919 (TRBV4-2, TRBJ2-1)
CASGLDRAYNEQFF

SEQ ID NO: 681839 - protein, 14 aa, Homo sapiens
  CDR3 for alpha chain variable domain of TCR clone 340920 (TRAV9-2, TRAJ38)
CALSNAGNNRKLLW

SEQ ID NO: 681840 - protein, 15 aa, Homo sapiens
  CDR3 for beta chain variable domain of TCR clone 340920 (TRBV9, TRBJ2-1)
CASSLAGSSYNEQFF

SEQ ID NO: 681841 - protein, 13 aa, Homo sapiens
  CDR3 for alpha chain variable domain of TCR clone 340921 (TRAV2, TRAJ29)
CAVEPSGNTPLVF

SEQ ID NO: 681842 - protein, 14 aa, Homo sapiens
  CDR3 for beta chain variable domain of TCR clone 340921 (TRBV4-3, TRBJ1-5)
CASSQGGQGWPQHF

SEQ ID NO: 681843 - protein, 16 aa, Homo sapiens
  CDR3 for alpha chain variable domain of TCR clone 340922 (TRAV14/DV4, TRAJ17)
CAMREAGRAAGNKLTF

SEQ ID NO: 681844 - protein, 15 aa, Homo sapiens
  CDR3 for beta chain variable domain of TCR clone 340922 (TRBV4-1, TRBJ1-4)
CASSDTGGTNEKLFF

SEQ ID NO: 681845 - protein, 13 aa, Homo sapiens
  CDR3 for alpha chain variable domain of TCR clone 340923 (TRAV30, TRAJ34)
CGTVGYNTDKLIF

SEQ ID NO: 681846 - protein, 16 aa, Homo sapiens
  CDR3 for beta chain variable domain of TCR clone 340923 (TRBV7-9, TRBJ1-2)
CASSLGFSSVEDGYTF

SEQ ID NO: 681847 - protein, 13 aa, Homo sapiens
  CDR3 for alpha chain variable domain of TCR clone 340924 (TRAV8-3, TRAJ36)
CAVGATGAVNLFF

SEQ ID NO: 681848 - protein, 15 aa, Homo sapiens
  CDR3 for beta chain variable domain of TCR clone 340924 (TRBV7-2, TRBJ1-2)
CASSPRAGWNYGYTF

SEQ ID NO: 681849 - protein, 11 aa, Homo sapiens
  CDR3 for alpha chain variable domain of TCR clone 340925 (TRAV35, TRAJ30)
CSGPGDDKIIF

SEQ ID NO: 681850 - protein, 18 aa, Homo sapiens
  CDR3 for beta chain variable domain of TCR clone 340925 (TRBV7-6, TRBJ2-1)
CASSPRTSGMGSYNEQFF

SEQ ID NO: 681851 - protein, 15 aa, Homo sapiens
  CDR3 for alpha chain variable domain of TCR clone 340926 (TRAV3, TRAJ4)
CAVRDGTGGYNKLIF

SEQ ID NO: 681852 - protein, 12 aa, Homo sapiens
  CDR3 for beta chain variable domain of TCR clone 340926 (TRBV19, TRBJ1-5)
CASSIAQQPQHF

SEQ ID NO: 681853 - protein, 12 aa, Homo sapiens
  CDR3 for alpha chain variable domain of TCR clone 340927 (TRAV13-2, TRAJ23)
CAERHRGGKLIF

SEQ ID NO: 681854 - protein, 16 aa, Homo sapiens
  CDR3 for beta chain variable domain of TCR clone 340927 (TRBV27, TRBJ2-5)
CASSFGPGGTKETQYF

SEQ ID NO: 681855 - protein, 14 aa, Homo sapiens
  CDR3 for alpha chain variable domain of TCR clone 340928 (TRAV12-2, TRAJ13)
CVVKKTGGYQKVTF

SEQ ID NO: 681856 - protein, 15 aa, Homo sapiens
  CDR3 for beta chain variable domain of TCR clone 340928 (TRBV20-1, TRBJ2-7)
CSARDRVSGMDEQYF

SEQ ID NO: 681857 - protein, 13 aa, Homo sapiens
  CDR3 for alpha chain variable domain of TCR clone 340929 (TRAV35, TRAJ40)
CAGQLSGTYKYIF

SEQ ID NO: 681858 - protein, 14 aa, Homo sapiens
  CDR3 for beta chain variable domain of TCR clone 340929 (TRBV3-1, TRBJ2-5)
CPSSLQLAGETQYF

SEQ ID NO: 681859 - protein, 12 aa, Homo sapiens
  CDR3 for alpha chain variable domain of TCR clone 340930 (TRAV12-2, TRAJ10)
WGVTGGGNKLTF

SEQ ID NO: 681860 - protein, 13 aa, Homo sapiens
  CDR3 for beta chain variable domain of TCR clone 340930 (TRBV7-7, TRBJ2-5)
CASSRSGQETQYF

SEQ ID NO: 681861 - protein, 18 aa, Homo sapiens
  CDR3 for alpha chain variable domain of TCR clone 340931 (TRAV3, TRAJ17)
CAVRARRGGRSCRQQANF

SEQ ID NO: 681862 - protein, 15 aa, Homo sapiens
  CDR3 for beta chain variable domain of TCR clone 340931 (TRBV7-9, TRBJ1-5)
CASSQGHQPNQPQHF

SEQ ID NO: 681863 - protein, 13 aa, Homo sapiens
  CDR3 for alpha chain variable domain of TCR clone 340932 (TRAV2, TRAJ29)
CAAGNSGNTPLVF

SEQ ID NO: 681864 - protein, 13 aa, Homo sapiens
  CDR3 for beta chain variable domain of TCR clone 340932 (TRBV7-9, TRBJ1-2)
CASSLKQNYGYTF

SEQ ID NO: 681865 - protein, 14 aa, Homo sapiens
  CDR3 for alpha chain variable domain of TCR clone 340933 (TRAV1-2, TRAJ8)
CAVREDTGFQKLVF

SEQ ID NO: 681866 - protein, 16 aa, Homo sapiens
  CDR3 for beta chain variable domain of TCR clone 340933 (TRBV7-6, TRBJ2-6)
CASSVPGRSGANVLTF

SEQ ID NO: 681867 - protein, 14 aa, Homo sapiens
  CDR3 for alpha chain variable domain of TCR clone 340934 (TRAV13-1, TRAJ45)
VSVPEGGGADGLTF

SEQ ID NO: 681868 - protein, 13 aa, Homo sapiens
  CDR3 for beta chain variable domain of TCR clone 340934 (TRBV7-2, TRBJ2-7)
CASSSPSGSEQYF

SEQ ID NO: 681869 - protein, 13 aa, Homo sapiens
  CDR3 for alpha chain variable domain of TCR clone 340935 (TRAV26-2, TRAJ54)
CIPRVGGAQKLVF

SEQ ID NO: 681870 - protein, 16 aa, Homo sapiens
  CDR3 for beta chain variable domain of TCR clone 340935 (TRBV4-1, TRBJ1-1)
CASCSMSERPNTEAFF

SEQ ID NO: 681871 - protein, 18 aa, Homo sapiens
  CDR3 for alpha chain variable domain of TCR clone 340936 (TRAV12-3, TRAJ52)
CAMSRTNAGGTGYGKLTF

SEQ ID NO: 681872 - protein, 16 aa, Homo sapiens
  CDR3 for beta chain variable domain of TCR clone 340936 (TRBV7-3, TRBJ2-3)
ELSLMKRMRGADTQYF

SEQ ID NO: 681873 - protein, 15 aa, Homo sapiens
  CDR3 for alpha chain variable domain of TCR clone 340937 (TRAV3, TRAJ5)
CAVRDLDTGRRALTF

SEQ ID NO: 681874 - protein, 13 aa, Homo sapiens
  CDR3 for beta chain variable domain of TCR clone 340937 (TRBV7-3, TRBJ1-1)
CASSQEWGAEAFF

SEQ ID NO: 681875 - protein, 12 aa, Homo sapiens
  CDR3 for alpha chain variable domain of TCR clone 340938 (TRAV12-2, TRAJ8)
CAVATGFQKLVF

SEQ ID NO: 681876 - protein, 15 aa, Homo sapiens
  CDR3 for beta chain variable domain of TCR clone 340938 (TRBV25-1, TRBJ2-5)
CASSDTGTHQETQYF

SEQ ID NO: 681877 - protein, 13 aa, Homo sapiens
  CDR3 for alpha chain variable domain of TCR clone 340939 (TRAV13-1, TRAJ41)
CAAILNSGYALDF

SEQ ID NO: 681878 - protein, 14 aa, Homo sapiens
  CDR3 for beta chain variable domain of TCR clone 340939 (TRBV20-1, TRBJ1-1)
CSARDRRTNTEDFF

SEQ ID NO: 681879 - protein, 14 aa, Homo sapiens
  CDR3 for alpha chain variable domain of TCR clone 340940 (TRAV24, TRAJ42)
CAQNYGGSQGNLIF

SEQ ID NO: 681880 - protein, 15 aa, Homo sapiens
  CDR3 for beta chain variable domain of TCR clone 340940 (TRBV19, TRBJ1-5)
CASSIPGGAGQPQLF

SEQ ID NO: 681881 - protein, 14 aa, Homo sapiens
  CDR3 for alpha chain variable domain of TCR clone 340941 (TRAV35, TRAJ22)
CAGLRPGSARQLTF

SEQ ID NO: 681882 - protein, 15 aa, Homo sapiens
  CDR3 for beta chain variable domain of TCR clone 340941 (TRBV12-4, TRBJ2-5)
GASSPPTGLQETQYF

SEQ ID NO: 681883 - protein, 15 aa, Homo sapiens
  CDR3 for alpha chain variable domain of TCR clone 340942 (TRAV26-1, TRAJ22)
CIVRVSFWFCKATDL

SEQ ID NO: 681884 - protein, 13 aa, Homo sapiens
  CDR3 for beta chain variable domain of TCR clone 340942 (TRBV7-9, TRBJ1-2)
CASSLKQNYGFTF

SEQ ID NO: 681885 - protein, 14 aa, Homo sapiens
  CDR3 for alpha chain variable domain of TCR clone 340943 (TRAV26-1, TRAJ39)
CIVRGSRAGNMLSF

SEQ ID NO: 681886 - protein, 15 aa, Homo sapiens
  CDR3 for beta chain variable domain of TCR clone 340943 (TRBV7-9, TRBJ1-5)
CASSQGHQPNQPQHF

SEQ ID NO: 681887 - protein, 17 aa, Homo sapiens
  CDR3 for alpha chain variable domain of TCR clone 340944 (TRAV36/DV7, TRAJ52)
CAVAQRAGGTSYGKLTF

SEQ ID NO: 681888 - protein, 15 aa, Homo sapiens
  CDR3 for beta chain variable domain of TCR clone 340944 (TRBV7-2, TRBJ1-5)
CASSSNWGAGQPQHF

SEQ ID NO: 681889 - protein, 14 aa, Homo sapiens
  CDR3 for alpha chain variable domain of TCR clone 340945 (TRAV12-1, TRAJ30)
CVVNIGGRDGKIIV

SEQ ID NO: 681890 - protein, 14 aa, Homo sapiens
  CDR3 for beta chain variable domain of TCR clone 340945 (TRBV7-6, TRBJ2-3)
CASSLGTVTDTQYF

SEQ ID NO: 681891 - protein, 15 aa, Homo sapiens
  CDR3 for alpha chain variable domain of TCR clone 340946 (TRAV21, TRAJ24)
CAARSSTDSWGKLQF

SEQ ID NO: 681892 - protein, 12 aa, Homo sapiens
  CDR3 for beta chain variable domain of TCR clone 340946 (TRBV5-1, TRBJ2-7)
CASSLDSYEQYF

SEQ ID NO: 681893 - protein, 15 aa, Homo sapiens
  CDR3 for alpha chain variable domain of TCR clone 340947 (TRAV2, TRAJ28)
CAVPYYGAGSYQLTF

SEQ ID NO: 681894 - protein, 10 aa, Homo sapiens
  CDR3 for beta chain variable domain of TCR clone 340947 (TRBV23-1, TRBJ2-1)
KWSSYNEQYF

SEQ ID NO: 681895 - protein, 11 aa, Homo sapiens
  CDR3 for alpha chain variable domain of TCR clone 340948 (TRAV13-1, TRAJ40)
CAVSGTYKHIF

SEQ ID NO: 681896 - protein, 13 aa, Homo sapiens
  CDR3 for beta chain variable domain of TCR clone 340948 (TRBV19, TRBJ1-5)
CASSIGGNQPQHF

SEQ ID NO: 681897 - protein, 15 aa, Homo sapiens
  CDR3 for alpha chain variable domain of TCR clone 340949 (TRAV13-1, TRAJ17)
CAASIERAAGNKLTF

SEQ ID NO: 681898 - protein, 14 aa, Homo sapiens
  CDR3 for beta chain variable domain of TCR clone 340949 (TRBV19, TRBJ2-7)
CASSIQEWSYEQYF

SEQ ID NO: 681899 - protein, 14 aa, Homo sapiens
  CDR3 for alpha chain variable domain of TCR clone 340950 (TRAV38-1, TRAJ29)
CAFITPSGNTPLVF

SEQ ID NO: 681900 - protein, 16 aa, Homo sapiens
  CDR3 for beta chain variable domain of TCR clone 340950 (TRBV4-3, TRBJ2-2)
CASSHLQGSGTGELFF

SEQ ID NO: 681901 - protein, 13 aa, Homo sapiens
  CDR3 for alpha chain variable domain of TCR clone 340951 (TRAV21, TRAJ45)
CAVMGGGADGLTF

SEQ ID NO: 681902 - protein, 13 aa, Homo sapiens
  CDR3 for beta chain variable domain of TCR clone 340951 (TRBV11-1, TRBJ1-1)
CASSKQGRTEAFF

SEQ ID NO: 681903 - protein, 16 aa, Homo sapiens
  CDR3 for alpha chain variable domain of TCR clone 340952 (TRAV12-1, TRAJ43)
CVVNPHRFGAGTRMTV

SEQ ID NO: 681904 - protein, 14 aa, Homo sapiens
  CDR3 for beta chain variable domain of TCR clone 340952 (TRBV7-2, TRBJ2-7)
CASRSQGAAYEQYF

SEQ ID NO: 681905 - protein, 13 aa, Homo sapiens
  CDR3 for alpha chain variable domain of TCR clone 340953 (TRAV13-1, TRAJ39)
CAASTWAGNMLTF

SEQ ID NO: 681906 - protein, 15 aa, Homo sapiens
  CDR3 for beta chain variable domain of TCR clone 340953 (TRBV11-3, TRBJ2-3)
CASLKDGREGDTQYF

SEQ ID NO: 681907 - protein, 17 aa, Homo sapiens
  CDR3 for alpha chain variable domain of TCR clone 340954 (TRAV26-1, TRAJ53)
CVVRVDDSGGSNYKLTF

SEQ ID NO: 681908 - protein, 18 aa, Homo sapiens
  CDR3 for beta chain variable domain of TCR clone 340954 (TRBV11-2, TRBJ2-3)
CASSLGGASRGAPNTQYF

SEQ ID NO: 681909 - protein, 12 aa, Homo sapiens
  CDR3 for alpha chain variable domain of TCR clone 340955 (TRAV12-3, TRAJ20)
CAMVRGDYKLSF

SEQ ID NO: 681910 - protein, 17 aa, Homo sapiens
  CDR3 for beta chain variable domain of TCR clone 340955 (TRBV27, TRBJ2-7)
CASSPLGGAGLSYEQYF

SEQ ID NO: 681911 - protein, 14 aa, Homo sapiens
  CDR3 for alpha chain variable domain of TCR clone 340956 (TRAV2, TRAJ37)
CAVDFTSNTGKLIF

SEQ ID NO: 681912 - protein, 14 aa, Homo sapiens
  CDR3 for beta chain variable domain of TCR clone 340956 (TRBV5-7, TRBJ1-2)
CASSLVRGDYGYTF

SEQ ID NO: 681913 - protein, 14 aa, Homo sapiens
  CDR3 for alpha chain variable domain of TCR clone 340957 (TRAV16, TRAJ33)
WALSAMDSNYQLIW

SEQ ID NO: 681914 - protein, 15 aa, Homo sapiens
  CDR3 for beta chain variable domain of TCR clone 340957 (TRBV9, TRBJ1-6)
CASSVAGTGDSPLHF

SEQ ID NO: 681915 - protein, 16 aa, Homo sapiens
  CDR3 for alpha chain variable domain of TCR clone 340958 (TRAV12-3, TRAJ53)
CAMSPGSGGSSYKLTF

SEQ ID NO: 681916 - protein, 16 aa, Homo sapiens
  CDR3 for beta chain variable domain of TCR clone 340958 (TRBV28, TRBJ2-7)
CASSFPDRRLTYEQYF

SEQ ID NO: 681917 - protein, 16 aa, Homo sapiens
  CDR3 for alpha chain variable domain of TCR clone 340959 (TRAV21, TRAJ37)
CAVRPRGSSNTGKLIF

SEQ ID NO: 681918 - protein, 14 aa, Homo sapiens
  CDR3 for beta chain variable domain of TCR clone 340959 (TRBV7-9, TRBJ2-5)
CASSATGGQETQYF

SEQ ID NO: 681919 - protein, 11 aa, Homo sapiens
  CDR3 for alpha chain variable domain of TCR clone 340960 (TRAV17, TRAJ9)
CGSTGGFKTVF

SEQ ID NO: 681920 - protein, 14 aa, Homo sapiens
  CDR3 for beta chain variable domain of TCR clone 340960 (TRBV18, TRBJ2-7)
CASSPRGGAYEQYF

SEQ ID NO: 681921 - protein, 17 aa, Homo sapiens
  CDR3 for alpha chain variable domain of TCR clone 340961 (TRAV14/DV4, TRAJ28)
CAMREGYSGAGSYQLTF

SEQ ID NO: 681922 - protein, 16 aa, Homo sapiens
  CDR3 for beta chain variable domain of TCR clone 340961 (TRBV4-1, TRBJ2-1)
CASSQEAGQGSDEQFF

SEQ ID NO: 681923 - protein, 13 aa, Homo sapiens
  CDR3 for alpha chain variable domain of TCR clone 340962 (TRAV20, TRAJ48)
CAVHLFGNEKLTF

SEQ ID NO: 681924 - protein, 15 aa, Homo sapiens
  CDR3 for beta chain variable domain of TCR clone 340962 (TRBV9, TRBJ1-6)
CASSVAGTGDSPLHF

SEQ ID NO: 681925 - protein, 12 aa, Homo sapiens
  CDR3 for alpha chain variable domain of TCR clone 340963 (TRAV8-3, TRAJ20)
CAVGANDYKLSF

SEQ ID NO: 681926 - protein, 18 aa, Homo sapiens
  CDR3 for beta chain variable domain of TCR clone 340963 (TRBV18, TRBJ1-3)
CASSPRGGAGPSGNTIYF

SEQ ID NO: 681927 - protein, 16 aa, Homo sapiens
  CDR3 for alpha chain variable domain of TCR clone 340964 (TRAV8-2, TRAJ45)
WVVSEGTGGGADGLTF

SEQ ID NO: 681928 - protein, 15 aa, Homo sapiens
  CDR3 for beta chain variable domain of TCR clone 340964 (TRBV7-9, TRBJ2-5)
CASSLVAGGLETQYF

SEQ ID NO: 681929 - protein, 15 aa, Homo sapiens
  CDR3 for alpha chain variable domain of TCR clone 340965 (TRAV12-1, TRAJ9)
CVVRFGDTGGFKTIF

SEQ ID NO: 681930 - protein, 19 aa, Homo sapiens
  CDR3 for beta chain variable domain of TCR clone 340965 (TRBV25-1, TRBJ2-2)
CAILVYRVDRGRKTGELFF

SEQ ID NO: 681931 - protein, 13 aa, Homo sapiens
  CDR3 for alpha chain variable domain of TCR clone 340966 (TRAV13-2, TRAJ48)
CAEMHFGNEKLTF

SEQ ID NO: 681932 - protein, 12 aa, Homo sapiens
  CDR3 for beta chain variable domain of TCR clone 340966 (TRBV11-2, TRBJ2-2)
CASSLGGGELFF

SEQ ID NO: 681933 - protein, 11 aa, Homo sapiens
  CDR3 for alpha chain variable domain of TCR clone 340967 (TRAV4, TRAJ31)
CLVGLNARLMF

SEQ ID NO: 681934 - protein, 16 aa, Homo sapiens
  CDR3 for beta chain variable domain of TCR clone 340967 (TRBV15, TRBJ2-6)
CATSVNGGVLANVLTF

SEQ ID NO: 681935 - protein, 14 aa, Homo sapiens
  CDR3 for alpha chain variable domain of TCR clone 340968 (TRAV12-3, TRAJ10)
SRLPLTGGGNKLTF

SEQ ID NO: 681936 - protein, 15 aa, Homo sapiens
  CDR3 for beta chain variable domain of TCR clone 340968 (TRBV5-1, TRBJ2-1)
CASSPPRAPYNEQFF

SEQ ID NO: 681937 - protein, 11 aa, Homo sapiens
  CDR3 for alpha chain variable domain of TCR clone 340969 (TRAV13-1, TRAJ40)
CAVSGTYQYIF

SEQ ID NO: 681938 - protein, 13 aa, Homo sapiens
  CDR3 for beta chain variable domain of TCR clone 340969 (TRBV19, TRBJ1-5)
CASSIGGNQPQHF

SEQ ID NO: 681939 - protein, 21 aa, Homo sapiens
  CDR3 for alpha chain variable domain of TCR clone 340970 (TRAV27, TRAJ24)
ASTSVRNDIPTTTDSWGKLQF

SEQ ID NO: 681940 - protein, 18 aa, Homo sapiens
  CDR3 for beta chain variable domain of TCR clone 340970 (TRBV11-2, TRBJ2-6)
CASSLNPFLGTGANVLTF

SEQ ID NO: 681941 - protein, 16 aa, Homo sapiens
  CDR3 for alpha chain variable domain of TCR clone 340971 (TRAV27, TRAJ53)
CAAPEGSGGSNYKLTF

SEQ ID NO: 681942 - protein, 14 aa, Homo sapiens
  CDR3 for beta chain variable domain of TCR clone 340971 (TRBV4-3, TRBJ1-5)
CASSQGGQGLPQHF

SEQ ID NO: 681943 - protein, 15 aa, Homo sapiens
  CDR3 for alpha chain variable domain of TCR clone 340972 (TRAV17, TRAJ56)
CATDANTGANSKLTF

SEQ ID NO: 681944 - protein, 17 aa, Homo sapiens
  CDR3 for beta chain variable domain of TCR clone 340972 (TRBV28, TRBJ2-5)
CASSRQGGLAGAETQYF

SEQ ID NO: 681945 - protein, 15 aa, Homo sapiens
  CDR3 for alpha chain variable domain of TCR clone 340973 (TRAV8-4, TRAJ53)
CAVSDGRGSNYKLTF

SEQ ID NO: 681946 - protein, 15 aa, Homo sapiens
  CDR3 for beta chain variable domain of TCR clone 340973 (TRBV19, TRBJ2-5)
CASHGLAGAQETQYF

SEQ ID NO: 681947 - protein, 15 aa, Homo sapiens
  CDR3 for alpha chain variable domain of TCR clone 340974 (TRAV17, TRAJ22)
CATAPISGSARQLTF

SEQ ID NO: 681948 - protein, 13 aa, Homo sapiens
  CDR3 for beta chain variable domain of TCR clone 340974 (TRBV27, TRBJ1-1)
CASSLSIGAEAFF

SEQ ID NO: 681949 - protein, 12 aa, Homo sapiens
  CDR3 for alpha chain variable domain of TCR clone 340975 (TRAV29/DV5, TRAJ15)
CASNQAGTALIF

SEQ ID NO: 681950 - protein, 11 aa, Homo sapiens
  CDR3 for beta chain variable domain of TCR clone 340975 (TRBV7-8, TRBJ2-7)
CASSLSLEQYL

SEQ ID NO: 681951 - protein, 13 aa, Homo sapiens
  CDR3 for alpha chain variable domain of TCR clone 340976 (TRAV2, TRAJ10)
CAVETGGGNKLTF

SEQ ID NO: 681952 - protein, 14 aa, Homo sapiens
  CDR3 for beta chain variable domain of TCR clone 340976 (TRBV20-1, TRBJ2-3)
CSARGRRGTDTQYF

SEQ ID NO: 681953 - protein, 15 aa, Homo sapiens
  CDR3 for alpha chain variable domain of TCR clone 340977 (TRAV29/DV5, TRAJ40)
CAASEGTSGTYKYIF

SEQ ID NO: 681954 - protein, 15 aa, Homo sapiens
  CDR3 for beta chain variable domain of TCR clone 340977 (TRBV27, TRBJ1-5)
CASNIQGAGNQPQHF

SEQ ID NO: 681955 - protein, 13 aa, Homo sapiens
  CDR3 for alpha chain variable domain of TCR clone 340978 (TRAV2, TRAJ24)
CAVPTDSWGKLQF

SEQ ID NO: 681956 - protein, 14 aa, Homo sapiens
  CDR3 for beta chain variable domain of TCR clone 340978 (TRBV13, TRBJ2-5)
CASSLGTAQETQYF

SEQ ID NO: 681957 - protein, 12 aa, Homo sapiens
  CDR3 for alpha chain variable domain of TCR clone 340979 (TRAV12-2, TRAJ45)
CASGGGADGLTF

SEQ ID NO: 681958 - protein, 16 aa, Homo sapiens
  CDR3 for beta chain variable domain of TCR clone 340979 (TRBV19, TRBJ2-3)
CASSPGLLASTDKQYF

SEQ ID NO: 681959 - protein, 21 aa, Homo sapiens
  CDR3 for alpha chain variable domain of TCR clone 340980 (TRAV36/DV7, TRAJ39)
TATQTGDSAIYLPNAGNMPTF

SEQ ID NO: 681960 - protein, 14 aa, Homo sapiens
  CDR3 for beta chain variable domain of TCR clone 340980 (TRBV4-1, TRBJ2-2)
CASSQAVNAGELFF

SEQ ID NO: 681961 - protein, 15 aa, Homo sapiens
  CDR3 for alpha chain variable domain of TCR clone 340981 (TRAV27, TRAJ38)
CAARRNACNNRKLIW

SEQ ID NO: 681962 - protein, 13 aa, Homo sapiens
  CDR3 for beta chain variable domain of TCR clone 340981 (TRBV12-5, TRBJ2-3)
CASGDRQSDTQYF

SEQ ID NO: 681963 - protein, 16 aa, Homo sapiens
  CDR3 for alpha chain variable domain of TCR clone 340982 (TRAV27, TRAJ13)
CAGAKSDSGGYQKVTF

SEQ ID NO: 681964 - protein, 14 aa, Homo sapiens
  CDR3 for beta chain variable domain of TCR clone 340982 (TRBV7-6, TRBJ2-3)
CASSLGTVTDTQYL

SEQ ID NO: 681965 - protein, 13 aa, Homo sapiens
  CDR3 for alpha chain variable domain of TCR clone 340983 (TRAV12-1, TRAJ21)
CVVIGDNFNNFYF

SEQ ID NO: 681966 - protein, 13 aa, Homo sapiens
  CDR3 for beta chain variable domain of TCR clone 340983 (TRBV4-2, TRBJ1-1)
CASSQAGNTEAFF

SEQ ID NO: 681967 - protein, 14 aa, Homo sapiens
  CDR3 for alpha chain variable domain of TCR clone 340984 (TRAV35, TRAJ13)
CAGSTSGGYQKVTF

SEQ ID NO: 681968 - protein, 17 aa, Homo sapiens
  CDR3 for beta chain variable domain of TCR clone 340984 (TRBV7-6, TRBJ2-5)
CASSPGLADPWGETQYF

SEQ ID NO: 681969 - protein, 10 aa, Homo sapiens
  CDR3 for alpha chain variable domain of TCR clone 340985 (TRAV26-1, TRAJ40)
CIAGTYKYIF

SEQ ID NO: 681970 - protein, 15 aa, Homo sapiens
  CDR3 for beta chain variable domain of TCR clone 340985 (TRBV7-3, TRBJ2-1)
CASSLSSGSFDEQFF

SEQ ID NO: 681971 - protein, 14 aa, Homo sapiens
  CDR3 for alpha chain variable domain of TCR clone 340986 (TRAV9-2, TRAJ23)
CALSDGNQGGKLIF

SEQ ID NO: 681972 - protein, 15 aa, Homo sapiens
  CDR3 for beta chain variable domain of TCR clone 340986 (TRBV7-2, TRBJ1-1)
CASSFAGDRDTEAFS

SEQ ID NO: 681973 - protein, 16 aa, Homo sapiens
  CDR3 for alpha chain variable domain of TCR clone 340987 (TRAV30, TRAJ24)
CGTEIVDADSWGKFQF

SEQ ID NO: 681974 - protein, 15 aa, Homo sapiens
  CDR3 for beta chain variable domain of TCR clone 340987 (TRBV19, TRBJ2-1)
CASSRPGQNYNEQFF

SEQ ID NO: 681975 - protein, 16 aa, Homo sapiens
  CDR3 for alpha chain variable domain of TCR clone 340988 (TRAV26-1, TRAJ48)
IASSDLSNFGKEKLTF

SEQ ID NO: 681976 - protein, 14 aa, Homo sapiens
  CDR3 for beta chain variable domain of TCR clone 340988 (TRBV13, TRBJ2-7)
CASSLKGASYEQYF

SEQ ID NO: 681977 - protein, 15 aa, Homo sapiens
  CDR3 for alpha chain variable domain of TCR clone 340989 (TRAV27, TRAJ38)
CAGRFNAGNKRKLIW

SEQ ID NO: 681978 - protein, 14 aa, Homo sapiens
  CDR3 for beta chain variable domain of TCR clone 340989 (TRBV5-1, TRBJ2-5)
CASSFWGAQETQYF

SEQ ID NO: 681979 - protein, 13 aa, Homo sapiens
  CDR3 for alpha chain variable domain of TCR clone 340990 (TRAV12-3, TRAJ49)
CAMSLNTGNQFYF

SEQ ID NO: 681980 - protein, 16 aa, Homo sapiens
  CDR3 for beta chain variable domain of TCR clone 340990 (TRBV5-8, TRBJ2-2)
CASSLINPGGAGELFF

SEQ ID NO: 681981 - protein, 13 aa, Homo sapiens
  CDR3 for alpha chain variable domain of TCR clone 340991 (TRAV1-2, TRAJ9)
CAALNTGGFKTIF

SEQ ID NO: 681982 - protein, 13 aa, Homo sapiens
  CDR3 for beta chain variable domain of TCR clone 340991 (TRBV6-5, TRBJ2-7)
CASSGGSFYEQYF

SEQ ID NO: 681983 - protein, 14 aa, Homo sapiens
  CDR3 for alpha chain variable domain of TCR clone 340992 (TRAV38-1, TRAJ40)
CALRPTSGTYKYIF

SEQ ID NO: 681984 - protein, 14 aa, Homo sapiens
  CDR3 for beta chain variable domain of TCR clone 340992 (TRBV25-1, TRBJ1-1)
CGSTHLGGNTEAFF

SEQ ID NO: 681985 - protein, 14 aa, Homo sapiens
  CDR3 for alpha chain variable domain of TCR clone 340993 (TRAV12-2, TRAJ17)
CAVLFKAAGNKLTF

SEQ ID NO: 681986 - protein, 14 aa, Homo sapiens
  CDR3 for beta chain variable domain of TCR clone 340993 (TRBV5-1, TRBJ1-6)
CASARDRHNSPLHF

SEQ ID NO: 681987 - protein, 10 aa, Homo sapiens
  CDR3 for alpha chain variable domain of TCR clone 340994 (TRAV26-1, TRAJ22)
CIVSLNFFWF

SEQ ID NO: 681988 - protein, 15 aa, Homo sapiens
  CDR3 for beta chain variable domain of TCR clone 340994 (TRBV4-2, TRBJ1-2)
CASSQRTGGRDGCTF

SEQ ID NO: 681989 - protein, 23 aa, Homo sapiens
  CDR3 for alpha chain variable domain of TCR clone 340995 (TRAV26-1, TRAJ38)
CIADNAGNNHIQNPDPAVYQLRD

SEQ ID NO: 681990 - protein, 13 aa, Homo sapiens
  CDR3 for beta chain variable domain of TCR clone 340995 (TRBV27, TRBJ2-1)
CASRTLGVGEQFF

SEQ ID NO: 681991 - protein, 15 aa, Homo sapiens
  CDR3 for alpha chain variable domain of TCR clone 340996 (TRAV8-3, TRAJ23)
CAVGDRYNQGGKLIF

SEQ ID NO: 681992 - protein, 14 aa, Homo sapiens
  CDR3 for beta chain variable domain of TCR clone 340996 (TRBV7-9, TRBJ2-5)
CASSFPQGVETQYF

SEQ ID NO: 681993 - protein, 12 aa, Homo sapiens
  CDR3 for alpha chain variable domain of TCR clone 340997 (TRAV3, TRAJ31)
CAVRPRGPRLMF

SEQ ID NO: 681994 - protein, 17 aa, Homo sapiens
  CDR3 for beta chain variable domain of TCR clone 340997 (TRBV7-9, TRBJ1-5)
CASSASQGGYSNEPQHF

SEQ ID NO: 681995 - protein, 16 aa, Homo sapiens
  CDR3 for alpha chain variable domain of TCR clone 340998 (TRAV3, TRAJ18)
CAVRDGRGSTLGRLYF

SEQ ID NO: 681996 - protein, 15 aa, Homo sapiens
  CDR3 for beta chain variable domain of TCR clone 340998 (TRBV7-9, TRBJ1-6)
CASSSPGRGNPPLHF

SEQ ID NO: 681997 - protein, 16 aa, Homo sapiens
  CDR3 for alpha chain variable domain of TCR clone 340999 (TRAV16, TRAJ4)
CALRRMFSGGYNKLIF

SEQ ID NO: 681998 - protein, 16 aa, Homo sapiens
  CDR3 for beta chain variable domain of TCR clone 340999 (TRBV24-1, TRBJ2-3)
CATSDPGTGAPDTQYF

SEQ ID NO: 681999 - protein, 13 aa, Homo sapiens
  CDR3 for alpha chain variable domain of TCR clone 341000 (TRAV8-3, TRAJ48)
CAVVPFGNEKLTF

SEQ ID NO: 682000 - protein, 14 aa, Homo sapiens
  CDR3 for beta chain variable domain of TCR clone 341000 (TRBV12-5, TRBJ2-5)
CASGSRTQQETQYF

SEQ ID NO: 682001 - protein, 14 aa, Homo sapiens
  CDR3 for alpha chain variable domain of TCR clone 341001 (TRAV8-3, TRAJ10)
CAVGNAGGGNKLTF

SEQ ID NO: 682002 - protein, 13 aa, Homo sapiens
  CDR3 for beta chain variable domain of TCR clone 341001 (TRBV20-1, TRBJ1-1)
CSAPLGGGTEAFF

SEQ ID NO: 682003 - protein, 15 aa, Homo sapiens
  CDR3 for alpha chain variable domain of TCR clone 341002 (TRAV8-3, TRAJ45)
CASSYSGGGADGLTF

SEQ ID NO: 682004 - protein, 15 aa, Homo sapiens
  CDR3 for beta chain variable domain of TCR clone 341002 (TRBV20-1, TRBJ2-7)
CSDRDRVSGMDEQYF

SEQ ID NO: 682005 - protein, 16 aa, Homo sapiens
  CDR3 for alpha chain variable domain of TCR clone 341003 (TRAV30, TRAJ24)
CGTEIVDADSWGKFQF

SEQ ID NO: 682006 - protein, 15 aa, Homo sapiens
  CDR3 for beta chain variable domain of TCR clone 341003 (TRBV20-1, TRBJ2-6)
CSAGDRGPGANVLTF

SEQ ID NO: 682007 - protein, 13 aa, Homo sapiens
  CDR3 for alpha chain variable domain of TCR clone 341004 (TRAV12-3, TRAJ7)
CAMTPYGNNRLAF

SEQ ID NO: 682008 - protein, 16 aa, Homo sapiens
  CDR3 for beta chain variable domain of TCR clone 341004 (TRBV20-1, TRBJ1-4)
CSARPYGGEPNENLFF

SEQ ID NO: 682009 - protein, 13 aa, Homo sapiens
  CDR3 for alpha chain variable domain of TCR clone 341005 (TRAV1-2, TRAJ9)
CAVLNTGGFKTIF

SEQ ID NO: 682010 - protein, 17 aa, Homo sapiens
  CDR3 for beta chain variable domain of TCR clone 341005 (TRBV13, TRBJ2-3)
CASSLSRVAGGRNTQYL

SEQ ID NO: 682011 - protein, 14 aa, Homo sapiens
  CDR3 for alpha chain variable domain of TCR clone 341006 (TRAV12-2, TRAJ13)
CAVKKTGGYKKVTF

SEQ ID NO: 682012 - protein, 15 aa, Homo sapiens
  CDR3 for beta chain variable domain of TCR clone 341006 (TRBV5-1, TRBJ2-5)
CASSLGLAEQETQYF

SEQ ID NO: 682013 - protein, 12 aa, Homo sapiens
  CDR3 for alpha chain variable domain of TCR clone 341007 (TRAV24, TRAJ47)
CAFGEYGNKLVF

SEQ ID NO: 682014 - protein, 12 aa, Homo sapiens
  CDR3 for beta chain variable domain of TCR clone 341007 (TRBV27, TRBJ2-5)
CASSPTGETQYF

SEQ ID NO: 682015 - protein, 12 aa, Homo sapiens
  CDR3 for alpha chain variable domain of TCR clone 341008 (TRAV12-2, TRAJ34)
CAVAYNTDKLIF

SEQ ID NO: 682016 - protein, 16 aa, Homo sapiens
  CDR3 for beta chain variable domain of TCR clone 341008 (TRBV27, TRBJ2-5)
CASSYGPGGQKETQYF

SEQ ID NO: 682017 - protein, 15 aa, Homo sapiens
  CDR3 for alpha chain variable domain of TCR clone 341009 (TRAV2, TRAJ35)
CAVEPEGGFGNVLHC

SEQ ID NO: 682018 - protein, 19 aa, Homo sapiens
  CDR3 for beta chain variable domain of TCR clone 341009 (TRBV5-1, TRBJ2-3)
CASSLWLAGGITTTDTQYF

SEQ ID NO: 682019 - protein, 14 aa, Homo sapiens
  CDR3 for alpha chain variable domain of TCR clone 341010 (TRAV26-1, TRAJ38)
CIADNAGNNRKLIW

SEQ ID NO: 682020 - protein, 14 aa, Homo sapiens
  CDR3 for beta chain variable domain of TCR clone 341010 (TRBV7-9, TRBJ2-1)
CASSPRDSLYEQFF

SEQ ID NO: 682021 - protein, 14 aa, Homo sapiens
  CDR3 for alpha chain variable domain of TCR clone 341011 (TRAV8-3, TRAJ39)
CAVGANNAGNMLTF

SEQ ID NO: 682022 - protein, 15 aa, Homo sapiens
  CDR3 for beta chain variable domain of TCR clone 341011 (TRBV4-3, TRBJ1-1)
CASSQELGLGTEAFF

SEQ ID NO: 682023 - protein, 14 aa, Homo sapiens
  CDR3 for alpha chain variable domain of TCR clone 341012 (TRAV1-2, TRAJ16)
CAVNRLSDGQKLLF

SEQ ID NO: 682024 - protein, 12 aa, Homo sapiens
  CDR3 for beta chain variable domain of TCR clone 341012 (TRBV28, TRBJ2-6)
CAIQAGANVLTF

SEQ ID NO: 682025 - protein, 11 aa, Homo sapiens
  CDR3 for alpha chain variable domain of TCR clone 341013 (TRAV2, TRAJ21)
CAVFNFNKFYF

SEQ ID NO: 682026 - protein, 14 aa, Homo sapiens
  CDR3 for beta chain variable domain of TCR clone 341013 (TRBV12-5, TRBJ2-5)
CASGSRTHQETQYF

SEQ ID NO: 682027 - protein, 11 aa, Homo sapiens
  CDR3 for alpha chain variable domain of TCR clone 341014 (TRAV1-1, TRAJ23)
CAVRQGGKLIF

SEQ ID NO: 682028 - protein, 15 aa, Homo sapiens
  CDR3 for beta chain variable domain of TCR clone 341014 (TRBV10-3, TRBJ2-7)
CAISAQAGGPYEQYF

SEQ ID NO: 682029 - protein, 15 aa, Homo sapiens
  CDR3 for alpha chain variable domain of TCR clone 341015 (TRAV27, TRAJ38)
CAARRNAGNNRKLIL

SEQ ID NO: 682030 - protein, 16 aa, Homo sapiens
  CDR3 for beta chain variable domain of TCR clone 341015 (TRBV2, TRBJ2-1)
CASSVGGSLSYNEQFF

SEQ ID NO: 682031 - protein, 12 aa, Homo sapiens
  CDR3 for alpha chain variable domain of TCR clone 341016 (TRAV13-2, TRAJ23)
CAERHRGGKLIF

SEQ ID NO: 682032 - protein, 15 aa, Homo sapiens
  CDR3 for beta chain variable domain of TCR clone 341016 (TRBV6-3, TRBJ2-7)
CASSSPGTVFYDQYF

SEQ ID NO: 682033 - protein, 14 aa, Homo sapiens
  CDR3 for alpha chain variable domain of TCR clone 341017 (TRAV1-2, TRAJ8)
CAVREDTGFQKLVF

SEQ ID NO: 682034 - protein, 16 aa, Homo sapiens
  CDR3 for beta chain variable domain of TCR clone 341017 (TRBV12-4, TRBJ1-5)
CASSRPVGGSNQPQHV

SEQ ID NO: 682035 - protein, 21 aa, Homo sapiens
  CDR3 for alpha chain variable domain of TCR clone 341018 (TRAV29/DV5, TRAJ52)
CSVLLCSKREAGGTSYGKLKF

SEQ ID NO: 682036 - protein, 15 aa, Homo sapiens
  CDR3 for beta chain variable domain of TCR clone 341018 (TRBV6-1, TRBJ2-1)
CASSELRGQYNEQFF

SEQ ID NO: 682037 - protein, 14 aa, Homo sapiens
  CDR3 for alpha chain variable domain of TCR clone 341019 (TRAV12-3, TRAJ10)
SHLPLTGGGNKLTF

SEQ ID NO: 682038 - protein, 15 aa, Homo sapiens
  CDR3 for beta chain variable domain of TCR clone 341019 (TRBV7-2, TRBJ2-1)
CASSFGLAGGNEQFF

SEQ ID NO: 682039 - protein, 15 aa, Homo sapiens
  CDR3 for alpha chain variable domain of TCR clone 341020 (TRAV8-3, TRAJ27)
CAVGPSKTNAGKSTF

SEQ ID NO: 682040 - protein, 14 aa, Homo sapiens
  CDR3 for beta chain variable domain of TCR clone 341020 (TRBV7-2, TRBJ1-6)
CASSLQGANSPLHF

SEQ ID NO: 682041 - protein, 13 aa, Homo sapiens
  CDR3 for alpha chain variable domain of TCR clone 341021 (TRAV12-1, TRAJ39)
CVALNNAGNMLTF

SEQ ID NO: 682042 - protein, 16 aa, Homo sapiens
  CDR3 for beta chain variable domain of TCR clone 341021 (TRBV12-4, TRBJ2-5)
CASSFFVRGRQETQYF

SEQ ID NO: 682043 - protein, 12 aa, Homo sapiens
  CDR3 for alpha chain variable domain of TCR clone 341022 (TRAV21, TRAJ11)
CAATSGYSTLTF

SEQ ID NO: 682044 - protein, 17 aa, Homo sapiens
  CDR3 for beta chain variable domain of TCR clone 341022 (TRBV13, TRBJ2-3)
CASSLSRVAGGRNTQYF

SEQ ID NO: 682045 - protein, 19 aa, Homo sapiens
  CDR3 for alpha chain variable domain of TCR clone 341023 (TRAV26-1, TRAJ28)
CIVRVAHAYSGAGSYQLTF

SEQ ID NO: 682046 - protein, 15 aa, Homo sapiens
  CDR3 for beta chain variable domain of TCR clone 341023 (TRBV20-1, TRBJ1-1)
CSASRGVTGTTEAFF

SEQ ID NO: 682047 - protein, 15 aa, Homo sapiens
  CDR3 for alpha chain variable domain of TCR clone 341024 (TRAV1-2, TRAJ35)
CAVRDREGFGNVLHC

SEQ ID NO: 682048 - protein, 16 aa, Homo sapiens
  CDR3 for beta chain variable domain of TCR clone 341024 (TRBV12-4, TRBJ1-5)
CASSRPVGGSNQPQHF

SEQ ID NO: 682049 - protein, 12 aa, Homo sapiens
  CDR3 for alpha chain variable domain of TCR clone 341025 (TRAV12-2, TRAJ47)
GAVAEYGNKLVF

SEQ ID NO: 682050 - protein, 14 aa, Homo sapiens
  CDR3 for beta chain variable domain of TCR clone 341025 (TRBV20-1, TRBJ1-1)
CSAMGGTANTEAFF

SEQ ID NO: 682051 - protein, 13 aa, Homo sapiens
  CDR3 for alpha chain variable domain of TCR clone 341026 (TRAV17, TRAJ9)
CATDYTGGFKTIF

SEQ ID NO: 682052 - protein, 13 aa, Homo sapiens
  CDR3 for beta chain variable domain of TCR clone 341026 (TRBV23-1, TRBJ1-4)
CAGRGKFNEKLFF

SEQ ID NO: 682053 - protein, 14 aa, Homo sapiens
  CDR3 for alpha chain variable domain of TCR clone 341027 (TRAV8-4, TRAJ37)
CAVSEPSNTGKLIF

SEQ ID NO: 682054 - protein, 14 aa, Homo sapiens
  CDR3 for beta chain variable domain of TCR clone 341027 (TRBV28, TRBJ2-1)
YAIHRTGARTEQFF

SEQ ID NO: 682055 - protein, 15 aa, Homo sapiens
  CDR3 for alpha chain variable domain of TCR clone 341028 (TRAV12-3, TRAJ6)
CAMSPTTGGSYIPTF

SEQ ID NO: 682056 - protein, 15 aa, Homo sapiens
  CDR3 for beta chain variable domain of TCR clone 341028 (TRBV28, TRBJ2-1)
CASSIIAGGRSEQFF

SEQ ID NO: 682057 - protein, 16 aa, Homo sapiens
  CDR3 for alpha chain variable domain of TCR clone 341029 (TRAV8-3, TRAJ44)
CAVGASNTGNASKLTF

SEQ ID NO: 682058 - protein, 15 aa, Homo sapiens
  CDR3 for beta chain variable domain of TCR clone 341029 (TRBV27, TRBJ1-5)
CASTFNRGSNQPQHF

SEQ ID NO: 682059 - protein, 12 aa, Homo sapiens
  CDR3 for alpha chain variable domain of TCR clone 341030 (TRAV29/DV5, TRAJ49)
CAATDTGNQFYF

SEQ ID NO: 682060 - protein, 12 aa, Homo sapiens
  CDR3 for beta chain variable domain of TCR clone 341030 (TRBV12-4, TRBJ2-7)
CASSLGDYEQYF

SEQ ID NO: 682061 - protein, 15 aa, Homo sapiens
  CDR3 for alpha chain variable domain of TCR clone 341031 (TRAV20, TRAJ58)
CAVHDLETSGSRLTF

SEQ ID NO: 682062 - protein, 13 aa, Homo sapiens
  CDR3 for beta chain variable domain of TCR clone 341031 (TRBV20-1, TRBJ1-1)
CSARGGGNTEAFF

SEQ ID NO: 682063 - protein, 12 aa, Homo sapiens
  CDR3 for alpha chain variable domain of TCR clone 341032 (TRAV1-1, TRAJ23)
CAVTNQGRKLIF

SEQ ID NO: 682064 - protein, 15 aa, Homo sapiens
  CDR3 for beta chain variable domain of TCR clone 341032 (TRBV11-3, TRBJ2-3)
CASLKDGREGDTQYF

SEQ ID NO: 682065 - protein, 16 aa, Homo sapiens
  CDR3 for alpha chain variable domain of TCR clone 341033 (TRAV8-6, TRAJ39)
CAVMPMNNNAGNMLTF

SEQ ID NO: 682066 - protein, 16 aa, Homo sapiens
  CDR3 for beta chain variable domain of TCR clone 341033 (TRBV15, TRBJ2-5)
CATSGYLEAAQETQYF

SEQ ID NO: 682067 - protein, 17 aa, Homo sapiens
  CDR3 for alpha chain variable domain of TCR clone 341034 (TRAV3, TRAJ6)
CAVRDGPRAGGSYIPTF

SEQ ID NO: 682068 - protein, 16 aa, Homo sapiens
  CDR3 for beta chain variable domain of TCR clone 341034 (TRBV6-1, TRBJ2-1)
CASSDLPGQLNNEQFF

SEQ ID NO: 682069 - protein, 15 aa, Homo sapiens
  CDR3 for alpha chain variable domain of TCR clone 341035 (TRAV21, TRAJ53)
CATLNSGGSNYKLTF

SEQ ID NO: 682070 - protein, 15 aa, Homo sapiens
  CDR3 for beta chain variable domain of TCR clone 341035 (TRBV2, TRBJ2-3)
CASSDFEKATDTQYF

SEQ ID NO: 682071 - protein, 16 aa, Homo sapiens
  CDR3 for alpha chain variable domain of TCR clone 341036 (TRAV12-3, TRAJ53)
CAMSPGSGGSNYKLTF

SEQ ID NO: 682072 - protein, 16 aa, Homo sapiens
  CDR3 for beta chain variable domain of TCR clone 341036 (TRBV7-9, TRBJ1-2)
CASSLGFSSGEDGYTV

SEQ ID NO: 682073 - protein, 14 aa, Homo sapiens
  CDR3 for alpha chain variable domain of TCR clone 341037 (TRAV1-2, TRAJ16)
CAVNRFSDGQKLLF

SEQ ID NO: 682074 - protein, 15 aa, Homo sapiens
  CDR3 for beta chain variable domain of TCR clone 341037 (TRBV11-2, TRBJ2-1)
CASSSSTISYNAQFF

SEQ ID NO: 682075 - protein, 13 aa, Homo sapiens
  CDR3 for alpha chain variable domain of TCR clone 341038 (TRAV8-3, TRAJ20)
CAVGRPNDYNLSF

SEQ ID NO: 682076 - protein, 14 aa, Homo sapiens
  CDR3 for beta chain variable domain of TCR clone 341038 (TRBV12-5, TRBJ2-5)
CASGSRTHQETQYF

SEQ ID NO: 682077 - protein, 16 aa, Homo sapiens
  CDR3 for alpha chain variable domain of TCR clone 341039 (TRAV3, TRAJ10)
CAVRDMNAGGGNKLTF

SEQ ID NO: 682078 - protein, 15 aa, Homo sapiens
  CDR3 for beta chain variable domain of TCR clone 341039 (TRBV7-2, TRBJ2-1)
CASRKTGSSYNEQFF

SEQ ID NO: 682079 - protein, 11 aa, Homo sapiens
  CDR3 for alpha chain variable domain of TCR clone 341040 (TRAV12-3, TRAJ43)
CAMSVSNDMRF

SEQ ID NO: 682080 - protein, 16 aa, Homo sapiens
  CDR3 for beta chain variable domain of TCR clone 341040 (TRBV20-1, TRBJ2-1)
CSARDSLGTVYNEQFF

SEQ ID NO: 682081 - protein, 14 aa, Homo sapiens
  CDR3 for alpha chain variable domain of TCR clone 341041 (TRAV8-2, TRAJ11)
CVVSGKSGYSTLTF

SEQ ID NO: 682082 - protein, 16 aa, Homo sapiens
  CDR3 for beta chain variable domain of TCR clone 341041 (TRBV28, TRBJ2-1)
CASSSPEYPGDNEQFF

SEQ ID NO: 682083 - protein, 14 aa, Homo sapiens
  CDR3 for alpha chain variable domain of TCR clone 341042 (TRAV12-1, TRAJ43)
CVVNGRSNNNDMRF

SEQ ID NO: 682084 - protein, 13 aa, Homo sapiens
  CDR3 for beta chain variable domain of TCR clone 341042 (TRBV10-3, TRBJ2-7)
CASKLAVDYEQYF

SEQ ID NO: 682085 - protein, 15 aa, Homo sapiens
  CDR3 for alpha chain variable domain of TCR clone 341043 (TRAV13-2, TRAJ45)
CAEHHSGGGADGLTF

SEQ ID NO: 682086 - protein, 15 aa, Homo sapiens
  CDR3 for beta chain variable domain of TCR clone 341043 (TRBV7-2, TRBJ2-7)
CAISLALGSAYEQYF

SEQ ID NO: 682087 - protein, 18 aa, Homo sapiens
  CDR3 for alpha chain variable domain of TCR clone 341044 (TRAV9-2, TRAJ52)
CALSRHNAGGTSYGKLTF

SEQ ID NO: 682088 - protein, 14 aa, Homo sapiens
  CDR3 for beta chain variable domain of TCR clone 341044 (TRBV7-9, TRBJ2-2)
CASSGLADTGELFF

SEQ ID NO: 682089 - protein, 16 aa, Homo sapiens
  CDR3 for alpha chain variable domain of TCR clone 341045 (TRAV12-2, TRAJ45)
CAVNRGSGGGADGLTF

SEQ ID NO: 682090 - protein, 15 aa, Homo sapiens
  CDR3 for beta chain variable domain of TCR clone 341045 (TRBV19, TRBJ2-7)
CASSPAGSGEALRYF

SEQ ID NO: 682091 - protein, 16 aa, Homo sapiens
  CDR3 for alpha chain variable domain of TCR clone 341046 (TRAV8-3, TRAJ8)
CAVPRDGNTGFQKLVL

SEQ ID NO: 682092 - protein, 15 aa, Homo sapiens
  CDR3 for beta chain variable domain of TCR clone 341046 (TRBV19, TRBJ1-5)
CASSIVWADNQPQHF

SEQ ID NO: 682093 - protein, 15 aa, Homo sapiens
  CDR3 for alpha chain variable domain of TCR clone 341047 (TRAV34, TRAJ38)
CGADFTPGNNRKLIC

SEQ ID NO: 682094 - protein, 12 aa, Homo sapiens
  CDR3 for beta chain variable domain of TCR clone 341047 (TRBV7-9, TRBJ2-7)
CATRTDAYEQYF

SEQ ID NO: 682095 - protein, 18 aa, Homo sapiens
  CDR3 for alpha chain variable domain of TCR clone 341048 (TRAV26-1, TRAJ30)
CCVLFHRQSTNRDDKIIF

SEQ ID NO: 682096 - protein, 18 aa, Homo sapiens
  CDR3 for beta chain variable domain of TCR clone 341048 (TRBV4-1, TRBJ1-5)
CASSQDPRGQGLNQPQHF

SEQ ID NO: 682097 - protein, 17 aa, Homo sapiens
  CDR3 for alpha chain variable domain of TCR clone 341049 (TRAV3, TRAJ6)
CAVRDGPRAGGSYIPTF

SEQ ID NO: 682098 - protein, 15 aa, Homo sapiens
  CDR3 for beta chain variable domain of TCR clone 341049 (TRBV4-1, TRBJ2-3)
CASSRGQGIPDTQYF

SEQ ID NO: 682099 - protein, 12 aa, Homo sapiens
  CDR3 for alpha chain variable domain of TCR clone 341050 (TRAV3, TRAJ43)
CAVRDPNNDMRF

SEQ ID NO: 682100 - protein, 13 aa, Homo sapiens
  CDR3 for beta chain variable domain of TCR clone 341050 (TRBV19, TRBJ1-2)
CASSVHGQDGYTF

SEQ ID NO: 682101 - protein, 14 aa, Homo sapiens
  CDR3 for alpha chain variable domain of TCR clone 341051 (TRAV12-2, TRAJ13)
CAVKKTGGYKKVTF

SEQ ID NO: 682102 - protein, 14 aa, Homo sapiens
  CDR3 for beta chain variable domain of TCR clone 341051 (TRBV25-1, TRBJ1-1)
CASTHLGGNTEAFF

SEQ ID NO: 682103 - protein, 13 aa, Homo sapiens
  CDR3 for alpha chain variable domain of TCR clone 341052 (TRAV12-2, TRAJ15)
CAVFNQAGTALIF

SEQ ID NO: 682104 - protein, 23 aa, Homo sapiens
  CDR3 for beta chain variable domain of TCR clone 341052 (TRBV7-8, TRBJ1-5)
RRPPPCISVPAAGGGGADQPQHF

SEQ ID NO: 682105 - protein, 12 aa, Homo sapiens
  CDR3 for alpha chain variable domain of TCR clone 341053 (TRAV2, TRAJ33)
CAFMDSNYQLIW

SEQ ID NO: 682106 - protein, 16 aa, Homo sapiens
  CDR3 for beta chain variable domain of TCR clone 341053 (TRBV2, TRBJ2-7)
CASSEPWTAPSYEQYF

SEQ ID NO: 682107 - protein, 13 aa, Homo sapiens
  CDR3 for alpha chain variable domain of TCR clone 341054 (TRAV27, TRAJ41)
CAGEGNSGHALNF

SEQ ID NO: 682108 - protein, 14 aa, Homo sapiens
  CDR3 for beta chain variable domain of TCR clone 341054 (TRBV11-2, TRBJ2-7)
CASSLGAGAYEQYF

SEQ ID NO: 682109 - protein, 11 aa, Homo sapiens
  CDR3 for alpha chain variable domain of TCR clone 341055 (TRAV12-3, TRAJ43)
CAMSVSNDMRF

SEQ ID NO: 682110 - protein, 13 aa, Homo sapiens
  CDR3 for beta chain variable domain of TCR clone 341055 (TRBV20-1, TRBJ1-1)
SSAPLGGGTEAFF

SEQ ID NO: 682111 - protein, 15 aa, Homo sapiens
  CDR3 for alpha chain variable domain of TCR clone 341056 (TRAV35, TRAJ33)
CAGQPPRYSNYQLIW

SEQ ID NO: 682112 - protein, 16 aa, Homo sapiens
  CDR3 for beta chain variable domain of TCR clone 341056 (TRBV12-4, TRBJ2-3)
CASSFPSNTNTDTQYF

SEQ ID NO: 682113 - protein, 17 aa, Homo sapiens
  CDR3 for alpha chain variable domain of TCR clone 341057 (TRAV12-2, TRAJ52)
CAVNPYAGGTSYGKLTF

SEQ ID NO: 682114 - protein, 16 aa, Homo sapiens
  CDR3 for beta chain variable domain of TCR clone 341057 (TRBV19, TRBJ2-3)
CASIPGAASRTDTQYF

SEQ ID NO: 682115 - protein, 14 aa, Homo sapiens
  CDR3 for alpha chain variable domain of TCR clone 341058 (TRAV38-1, TRAJ40)
CALRPTSGTYKYVF

SEQ ID NO: 682116 - protein, 14 aa, Homo sapiens
  CDR3 for beta chain variable domain of TCR clone 341058 (TRBV20-1, TRBJ1-3)
CSASPTGAGNTIYF

SEQ ID NO: 682117 - protein, 12 aa, Homo sapiens
  CDR3 for alpha chain variable domain of TCR clone 341059 (TRAV16, TRAJ56)
CAPSGANSKLTF

SEQ ID NO: 682118 - protein, 17 aa, Homo sapiens
  CDR3 for beta chain variable domain of TCR clone 341059 (TRBV27, TRBJ2-6)
CASSLTGFASGANVLTF

SEQ ID NO: 682119 - protein, 12 aa, Homo sapiens
  CDR3 for alpha chain variable domain of TCR clone 341060 (TRAV1-2, TRAJ42)
CVAGGSQGNLIF

SEQ ID NO: 682120 - protein, 12 aa, Homo sapiens
  CDR3 for beta chain variable domain of TCR clone 341060 (TRBV24-1, TRBJ1-1)
CATSGSDRGAFF

SEQ ID NO: 682121 - protein, 15 aa, Homo sapiens
  CDR3 for alpha chain variable domain of TCR clone 341061 (TRAV17, TRAJ16)
CATALRFSDGQKLLF

SEQ ID NO: 682122 - protein, 13 aa, Homo sapiens
  CDR3 for beta chain variable domain of TCR clone 341061 (TRBV7-3, TRBJ1-1)
CASSQDWGAEASF

SEQ ID NO: 682123 - protein, 14 aa, Homo sapiens
  CDR3 for alpha chain variable domain of TCR clone 341062 (TRAV16, TRAJ33)
CALSDMDSNYQLIW

SEQ ID NO: 682124 - protein, 17 aa, Homo sapiens
  CDR3 for beta chain variable domain of TCR clone 341062 (TRBV25-1, TRBJ2-7)
CASSDARVVFSSYEQYF

SEQ ID NO: 682125 - protein, 13 aa, Homo sapiens
  CDR3 for alpha chain variable domain of TCR clone 341063 (TRAV3, TRAJ26)
CAVSRGYGQNFVF

SEQ ID NO: 682126 - protein, 15 aa, Homo sapiens
  CDR3 for beta chain variable domain of TCR clone 341063 (TRBV2, TRBJ2-3)
CASSDFEKATDTQYF

SEQ ID NO: 682127 - protein, 12 aa, Homo sapiens
  CDR3 for alpha chain variable domain of TCR clone 341064 (TRAV8-3, TRAJ34)
CAVLTNTDKLIF

SEQ ID NO: 682128 - protein, 16 aa, Homo sapiens
  CDR3 for beta chain variable domain of TCR clone 341064 (TRBV7-3, TRBJ2-2)
CASSLKRGTLSGELFF

SEQ ID NO: 682129 - protein, 15 aa, Homo sapiens
  CDR3 for alpha chain variable domain of TCR clone 341065 (TRAV8-3, TRAJ11)
CAVGLLNSGYSTLTF

SEQ ID NO: 682130 - protein, 16 aa, Homo sapiens
  CDR3 for beta chain variable domain of TCR clone 341065 (TRBV4-1, TRBJ2-1)
CASSPYAGGHDNEQFF

SEQ ID NO: 682131 - protein, 14 aa, Homo sapiens
  CDR3 for alpha chain variable domain of TCR clone 341066 (TRAV26-1, TRAJ38)
CIADNDGNNRKLIW

SEQ ID NO: 682132 - protein, 14 aa, Homo sapiens
  CDR3 for beta chain variable domain of TCR clone 341066 (TRBV20-1, TRBJ1-1)
CSAQTRIGGTEAFF

SEQ ID NO: 682133 - protein, 14 aa, Homo sapiens
  CDR3 for alpha chain variable domain of TCR clone 341067 (TRAV12-2, TRAJ13)
CAVKKTGGYQKVTF

SEQ ID NO: 682134 - protein, 15 aa, Homo sapiens
  CDR3 for beta chain variable domain of TCR clone 341067 (TRBV4-3, TRBJ2-3)
CASSLQAGATDTQYF

SEQ ID NO: 682135 - protein, 11 aa, Homo sapiens
  CDR3 for alpha chain variable domain of TCR clone 341068 (TRAV12-3, TRAJ43)
CAMSVSNDMRF

SEQ ID NO: 682136 - protein, 16 aa, Homo sapiens
  CDR3 for beta chain variable domain of TCR clone 341068 (TRBV20-1, TRBJ2-1)
CSARDSLGAVYNEQVF

SEQ ID NO: 682137 - protein, 14 aa, Homo sapiens
  CDR3 for alpha chain variable domain of TCR clone 341069 (TRAV8-3, TRAJ39)
CAVGANNAGNMLTF

SEQ ID NO: 682138 - protein, 14 aa, Homo sapiens
  CDR3 for beta chain variable domain of TCR clone 341069 (TRBV11-2, TRBJ1-2)
CASSLYRGNYGYTF

SEQ ID NO: 682139 - protein, 15 aa, Homo sapiens
  CDR3 for alpha chain variable domain of TCR clone 341070 (TRAV16, TRAJ57)
CALSGGQGGSEKLVF

SEQ ID NO: 682140 - protein, 17 aa, Homo sapiens
  CDR3 for beta chain variable domain of TCR clone 341070 (TRBV13, TRBJ2-3)
CASSLSRVAGGRNTQYF

SEQ ID NO: 682141 - protein, 14 aa, Homo sapiens
  CDR3 for alpha chain variable domain of TCR clone 341071 (TRAV8-4, TRAJ48)
CAVSETFGNEKLTF

SEQ ID NO: 682142 - protein, 14 aa, Homo sapiens
  CDR3 for beta chain variable domain of TCR clone 341071 (TRBV13, TRBJ2-7)
CASSLKGAGYEQYF

SEQ ID NO: 682143 - protein, 13 aa, Homo sapiens
  CDR3 for alpha chain variable domain of TCR clone 341072 (TRAV23/DV6, TRAJ16)
CAASISDGQKLLF

SEQ ID NO: 682144 - protein, 14 aa, Homo sapiens
  CDR3 for beta chain variable domain of TCR clone 341072 (TRBV7-2, TRBJ1-1)
CASSFLTGTTEAFF

SEQ ID NO: 682145 - protein, 12 aa, Homo sapiens
  CDR3 for alpha chain variable domain of TCR clone 341073 (TRAV16, TRAJ10)
CSSTGGGNKLTF

SEQ ID NO: 682146 - protein, 12 aa, Homo sapiens
  CDR3 for beta chain variable domain of TCR clone 341073 (TRBV11-3, TRBJ1-1)
CASSHRQGEAFF

SEQ ID NO: 682147 - protein, 14 aa, Homo sapiens
  CDR3 for alpha chain variable domain of TCR clone 341074 (TRAV12-3, TRAJ29)
CAMILLSGTKPLVF

SEQ ID NO: 682148 - protein, 15 aa, Homo sapiens
  CDR3 for beta chain variable domain of TCR clone 341074 (TRBV28, TRBJ1-3)
CASSMGWASGNTIYF

SEQ ID NO: 682149 - protein, 14 aa, Homo sapiens
  CDR3 for alpha chain variable domain of TCR clone 341075 (TRAV12-2, TRAJ11)
CAVNRESGYSTLTF

SEQ ID NO: 682150 - protein, 10 aa, Homo sapiens
  CDR3 for beta chain variable domain of TCR clone 341075 (TRBV20-1, TRBJ2-7)
CSARFETQYF

SEQ ID NO: 682151 - protein, 14 aa, Homo sapiens
  CDR3 for alpha chain variable domain of TCR clone 341076 (TRAV14/DV4, TRAJ26)
CAMREGTYGQNFVF

SEQ ID NO: 682152 - protein, 17 aa, Homo sapiens
  CDR3 for beta chain variable domain of TCR clone 341076 (TRBV20-1, TRBJ2-1)
CSASSSGLAGSYNEQFF

SEQ ID NO: 682153 - protein, 13 aa, Homo sapiens
  CDR3 for alpha chain variable domain of TCR clone 341077 (TRAV21, TRAJ15)
CAVANQAGTALIF

SEQ ID NO: 682154 - protein, 14 aa, Homo sapiens
  CDR3 for beta chain variable domain of TCR clone 341077 (TRBV27, TRBJ2-2)
CASSLGAATGELFL

SEQ ID NO: 682155 - protein, 13 aa, Homo sapiens
  CDR3 for alpha chain variable domain of TCR clone 341078 (TRAV17, TRAJ9)
CATYGTGGFKTIF

SEQ ID NO: 682156 - protein, 17 aa, Homo sapiens
  CDR3 for beta chain variable domain of TCR clone 341078 (TRBV6-5, TRBJ2-7)
CASSYSFWGQGSYEQYF

SEQ ID NO: 682157 - protein, 18 aa, Homo sapiens
  CDR3 for alpha chain variable domain of TCR clone 341079 (TRAV13-2, TRAJ52)
CADTPLNAGGTSYGKLTF

SEQ ID NO: 682158 - protein, 15 aa, Homo sapiens
  CDR3 for beta chain variable domain of TCR clone 341079 (TRBV7-2, TRBJ2-7)
CASSLKGALTYEQYF

SEQ ID NO: 682159 - protein, 15 aa, Homo sapiens
  CDR3 for alpha chain variable domain of TCR clone 341080 (TRAV20, TRAJ41)
CAVQANSNSGYVLNF

SEQ ID NO: 682160 - protein, 18 aa, Homo sapiens
  CDR3 for beta chain variable domain of TCR clone 341080 (TRBV7-9, TRBJ2-7)
CASSLTTSGSRTWYEQYF

SEQ ID NO: 682161 - protein, 18 aa, Homo sapiens
  CDR3 for alpha chain variable domain of TCR clone 341081 (TRAV13-1, TRAJ52)
CAAKNPNAGGTSYGKLTF

SEQ ID NO: 682162 - protein, 15 aa, Homo sapiens
  CDR3 for beta chain variable domain of TCR clone 341081 (TRBV7-8, TRBJ2-1)
CASSPGGQNYNEQFF

SEQ ID NO: 682163 - protein, 15 aa, Homo sapiens
  CDR3 for alpha chain variable domain of TCR clone 341082 (TRAV12-3, TRAJ6)
CAMSAASGGSYIPTF

SEQ ID NO: 682164 - protein, 13 aa, Homo sapiens
  CDR3 for beta chain variable domain of TCR clone 341082 (TRBV20-1, TRBJ1-2)
CSTSTARIYGYTF

SEQ ID NO: 682165 - protein, 14 aa, Homo sapiens
  CDR3 for alpha chain variable domain of TCR clone 341083 (TRAV1-2, TRAJ16)
CAVNRFSDGQKLLF

SEQ ID NO: 682166 - protein, 15 aa, Homo sapiens
  CDR3 for beta chain variable domain of TCR clone 341083 (TRBV5-1, TRBJ2-2)
CASSYQGGNTGELFF

SEQ ID NO: 682167 - protein, 15 aa, Homo sapiens
  CDR3 for alpha chain variable domain of TCR clone 341084 (TRAV29/DV5, TRAJ24)
CAASGATDSWGKFQF

SEQ ID NO: 682168 - protein, 12 aa, Homo sapiens
  CDR3 for beta chain variable domain of TCR clone 341084 (TRBV11-2, TRBJ2-2)
CASILPTGELFF

SEQ ID NO: 682169 - protein, 12 aa, Homo sapiens
  CDR3 for alpha chain variable domain of TCR clone 341085 (TRAV13-1, TRAJ48)
CAANFGNEKLTF

SEQ ID NO: 682170 - protein, 14 aa, Homo sapiens
  CDR3 for beta chain variable domain of TCR clone 341085 (TRBV18, TRBJ1-1)
CASSPPTGRTEAFF

SEQ ID NO: 682171 - protein, 17 aa, Homo sapiens
  CDR3 for alpha chain variable domain of TCR clone 341086 (TRAV3, TRAJ6)
CAVRDGPRAGGSYIHPF

SEQ ID NO: 682172 - protein, 14 aa, Homo sapiens
  CDR3 for beta chain variable domain of TCR clone 341086 (TRBV7-2, TRBJ2-7)
CASSPKTSFYEQYF

SEQ ID NO: 682173 - protein, 13 aa, Homo sapiens
  CDR3 for alpha chain variable domain of TCR clone 341087 (TRAV21, TRAJ27)
CAQWGGNAGKSTF

SEQ ID NO: 682174 - protein, 14 aa, Homo sapiens
  CDR3 for beta chain variable domain of TCR clone 341087 (TRBV2, TRBJ2-3)
CAVGRTISTDTQYF

SEQ ID NO: 682175 - protein, 14 aa, Homo sapiens
  CDR3 for alpha chain variable domain of TCR clone 341088 (TRAV1-2, TRAJ16)
CSVNRFSDGQKLLF

SEQ ID NO: 682176 - protein, 13 aa, Homo sapiens
  CDR3 for beta chain variable domain of TCR clone 341088 (TRBV4-2, TRBJ1-1)
CASSQAGNTEAFF

SEQ ID NO: 682177 - protein, 10 aa, Homo sapiens
  CDR3 for alpha chain variable domain of TCR clone 341089 (TRAV26-1, TRAJ28)
SGAGSYQLTF

SEQ ID NO: 682178 - protein, 16 aa, Homo sapiens
  CDR3 for beta chain variable domain of TCR clone 341089 (TRBV20-1, TRBJ1-2)
CSASMGQGVANYGYTF

SEQ ID NO: 682179 - protein, 14 aa, Homo sapiens
  CDR3 for alpha chain variable domain of TCR clone 341090 (TRAV35, TRAJ33)
CAGSSQDSNYQLIW

SEQ ID NO: 682180 - protein, 17 aa, Homo sapiens
  CDR3 for beta chain variable domain of TCR clone 341090 (TRBV4-1, TRBJ1-4)
CASSQEGPRGVEEKLFF

SEQ ID NO: 682181 - protein, 15 aa, Homo sapiens
  CDR3 for alpha chain variable domain of TCR clone 341091 (TRAV34, TRAJ38)
CGADFTPGNNRKLIW

SEQ ID NO: 682182 - protein, 16 aa, Homo sapiens
  CDR3 for beta chain variable domain of TCR clone 341091 (TRBV12-5, TRBJ2-5)
CPSGPRTSGNQETQYF

SEQ ID NO: 682183 - protein, 16 aa, Homo sapiens
  CDR3 for alpha chain variable domain of TCR clone 341092 (TRAV8-3, TRAJ10)
CAVGPGVTGGGNELTF

SEQ ID NO: 682184 - protein, 13 aa, Homo sapiens
  CDR3 for beta chain variable domain of TCR clone 341092 (TRBV18, TRBJ1-1)
CASSPGPSGEAFF

SEQ ID NO: 682185 - protein, 13 aa, Homo sapiens
  CDR3 for alpha chain variable domain of TCR clone 341093 (TRAV3, TRAJ15)
CAVRDQAVTALIF

SEQ ID NO: 682186 - protein, 15 aa, Homo sapiens
  CDR3 for beta chain variable domain of TCR clone 341093 (TRBV11-1, TRBJ2-7)
CASSLNYGASYEQYF

SEQ ID NO: 682187 - protein, 14 aa, Homo sapiens
  CDR3 for alpha chain variable domain of TCR clone 341094 (TRAV3, TRAJ21)
CALGRGSTNFTLDL

SEQ ID NO: 682188 - protein, 14 aa, Homo sapiens
  CDR3 for beta chain variable domain of TCR clone 341094 (TRBV7-9, TRBJ2-4)
CAISLAMGGNIQYF

SEQ ID NO: 682189 - protein, 10 aa, Homo sapiens
  CDR3 for alpha chain variable domain of TCR clone 341095 (TRAV30, TRAJ48)
CGIGNEKLTF

SEQ ID NO: 682190 - protein, 15 aa, Homo sapiens
  CDR3 for beta chain variable domain of TCR clone 341095 (TRBV28, TRBJ2-5)
CASSPSWSYQETQYF

SEQ ID NO: 682191 - protein, 23 aa, Homo sapiens
  CDR3 for alpha chain variable domain of TCR clone 341096 (TRAV26-1, TRAJ38)
CIADNAGNNHIQNPDPAVYQLRD

SEQ ID NO: 682192 - protein, 14 aa, Homo sapiens
  CDR3 for beta chain variable domain of TCR clone 341096 (TRBV4-2, TRBJ2-3)
CASSQERGTDTQYF

SEQ ID NO: 682193 - protein, 11 aa, Homo sapiens
  CDR3 for alpha chain variable domain of TCR clone 341097 (TRAV3, TRAJ21)
CAVGNFNKFYF

SEQ ID NO: 682194 - protein, 13 aa, Homo sapiens
  CDR3 for beta chain variable domain of TCR clone 341097 (TRBV4-1, TRBJ1-1)
CASSRKMNTEAFF

SEQ ID NO: 682195 - protein, 13 aa, Homo sapiens
  CDR3 for alpha chain variable domain of TCR clone 341098 (TRAV17, TRAJ26)
CATVDNYGQNFFF

SEQ ID NO: 682196 - protein, 14 aa, Homo sapiens
  CDR3 for beta chain variable domain of TCR clone 341098 (TRBV2, TRBJ2-7)
CASSLTSGGYEQYF

SEQ ID NO: 682197 - protein, 17 aa, Homo sapiens
  CDR3 for alpha chain variable domain of TCR clone 341099 (TRAV19, TRAJ28)
CALSEASSGAGSYQLTF

SEQ ID NO: 682198 - protein, 14 aa, Homo sapiens
  CDR3 for beta chain variable domain of TCR clone 341099 (TRBV19, TRBJ2-1)
CARGARSFQWEQFF

SEQ ID NO: 682199 - protein, 14 aa, Homo sapiens
  CDR3 for alpha chain variable domain of TCR clone 341100 (TRAV38-1, TRAJ45)
CAYYSGGGADGLTF

SEQ ID NO: 682200 - protein, 13 aa, Homo sapiens
  CDR3 for beta chain variable domain of TCR clone 341100 (TRBV12-5, TRBJ2-3)
CASQNRGTDTQYF

SEQ ID NO: 682201 - protein, 10 aa, Homo sapiens
  CDR3 for alpha chain variable domain of TCR clone 341101 (TRAV20, TRAJ22)
CAAPARKLTF

SEQ ID NO: 682202 - protein, 14 aa, Homo sapiens
  CDR3 for beta chain variable domain of TCR clone 341101 (TRBV19, TRBJ2-1)
CASSMGSGATEQFF

SEQ ID NO: 682203 - protein, 13 aa, Homo sapiens
  CDR3 for alpha chain variable domain of TCR clone 341102 (TRAV38-2/DV8, TRAJ34)
CAYRNYNTDKLIF

SEQ ID NO: 682204 - protein, 13 aa, Homo sapiens
  CDR3 for beta chain variable domain of TCR clone 341102 (TRBV20-1, TRBJ1-2)
CSATGIQGSGYTF

SEQ ID NO: 682205 - protein, 10 aa, Homo sapiens
  CDR3 for alpha chain variable domain of TCR clone 341103 (TRAV23/DV6, TRAJ57)
CAASSTLSQG

SEQ ID NO: 682206 - protein, 17 aa, Homo sapiens
  CDR3 for beta chain variable domain of TCR clone 341103 (TRBV4-1, TRBJ2-7)
CASSRDPLGVRGGEQYF

SEQ ID NO: 682207 - protein, 10 aa, Homo sapiens
  CDR3 for alpha chain variable domain of TCR clone 341104 (TRAV12-3, TRAJ43)
CAMSASDMRF

SEQ ID NO: 682208 - protein, 15 aa, Homo sapiens
  CDR3 for beta chain variable domain of TCR clone 341104 (TRBV5-1, TRBJ2-7)
CASSLNGGPAREQYF

SEQ ID NO: 682209 - protein, 12 aa, Homo sapiens
  CDR3 for alpha chain variable domain of TCR clone 341105 (TRAV12-2, TRAJ21)
CAPSDNFNKFYF

SEQ ID NO: 682210 - protein, 15 aa, Homo sapiens
  CDR3 for beta chain variable domain of TCR clone 341105 (TRBV9, TRBJ1-6)
CASSVAGTGDSPLHF

SEQ ID NO: 682211 - protein, 16 aa, Homo sapiens
  CDR3 for alpha chain variable domain of TCR clone 341106 (TRAV26-1, TRAJ37)
CIVRGDGSGNTGKLIF

SEQ ID NO: 682212 - protein, 13 aa, Homo sapiens
  CDR3 for beta chain variable domain of TCR clone 341106 (TRBV10-3, TRBJ2-7)
CASKLAVNYERYF

SEQ ID NO: 682213 - protein, 14 aa, Homo sapiens
  CDR3 for alpha chain variable domain of TCR clone 341107 (TRAV38-1, TRAJ40)
CALRPTSGTYKYIF

SEQ ID NO: 682214 - protein, 12 aa, Homo sapiens
  CDR3 for beta chain variable domain of TCR clone 341107 (TRBV7-8, TRBJ2-1)
CASSALAGRVFF

SEQ ID NO: 682215 - protein, 13 aa, Homo sapiens
  CDR3 for alpha chain variable domain of TCR clone 341108 (TRAV8-1, TRAJ28)
CAVSGARSYQLTF

SEQ ID NO: 682216 - protein, 14 aa, Homo sapiens
  CDR3 for beta chain variable domain of TCR clone 341108 (TRBV7-2, TRBJ2-2)
CASRGQGAAGELFF

SEQ ID NO: 682217 - protein, 13 aa, Homo sapiens
  CDR3 for alpha chain variable domain of TCR clone 341109 (TRAV2, TRAJ29)
CAAWNSGNTPLVF

SEQ ID NO: 682218 - protein, 16 aa, Homo sapiens
  CDR3 for beta chain variable domain of TCR clone 341109 (TRBV7-9, TRBJ1-2)
CASSPGGGAINYGYTF

SEQ ID NO: 682219 - protein, 12 aa, Homo sapiens
  CDR3 for alpha chain variable domain of TCR clone 341110 (TRAV12-3, TRAJ34)
CAMGYNTDKLIF

SEQ ID NO: 682220 - protein, 15 aa, Homo sapiens
  CDR3 for beta chain variable domain of TCR clone 341110 (TRBV28, TRBJ2-1)
CASSIIAGGRSKQFF

SEQ ID NO: 682221 - protein, 14 aa, Homo sapiens
  CDR3 for alpha chain variable domain of TCR clone 341111 (TRAV21, TRAJ58)
CAVKRETSGSRLTF

SEQ ID NO: 682222 - protein, 15 aa, Homo sapiens
  CDR3 for beta chain variable domain of TCR clone 341111 (TRBV7-9, TRBJ2-3)
CASSSSGGATDTQYF

SEQ ID NO: 682223 - protein, 14 aa, Homo sapiens
  CDR3 for alpha chain variable domain of TCR clone 341112 (TRAV27, TRAJ38)
CAARRNAGNNRKLI

SEQ ID NO: 682224 - protein, 14 aa, Homo sapiens
  CDR3 for beta chain variable domain of TCR clone 341112 (TRBV7-2, TRBJ2-7)
CASSPRDGAYEQYF

SEQ ID NO: 682225 - protein, 17 aa, Homo sapiens
  CDR3 for alpha chain variable domain of TCR clone 341113 (TRAV8-6, TRAJ58)
CAVSSWVGETNGSMLTF

SEQ ID NO: 682226 - protein, 14 aa, Homo sapiens
  CDR3 for beta chain variable domain of TCR clone 341113 (TRBV20-1, TRBJ2-1)
CSAQIGGSANEQFF

SEQ ID NO: 682227 - protein, 12 aa, Homo sapiens
  CDR3 for alpha chain variable domain of TCR clone 341114 (TRAV12-3, TRAJ40)
CAMSSGTYKYIF

SEQ ID NO: 682228 - protein, 17 aa, Homo sapiens
  CDR3 for beta chain variable domain of TCR clone 341114 (TRBV4-1, TRBJ2-3)
CASSQVLQGGGTDTQYF

SEQ ID NO: 682229 - protein, 14 aa, Homo sapiens
  CDR3 for alpha chain variable domain of TCR clone 341115 (TRAV12-2, TRAJ5)
CAVNRSTGRRALTL

SEQ ID NO: 682230 - protein, 14 aa, Homo sapiens
  CDR3 for beta chain variable domain of TCR clone 341115 (TRBV11-2, TRBJ1-5)
CASSLDRGRQPQHF

SEQ ID NO: 682231 - protein, 14 aa, Homo sapiens
  CDR3 for alpha chain variable domain of TCR clone 341116 (TRAV12-3, TRAJ10)
CHLPLTGGGNKITF

SEQ ID NO: 682232 - protein, 14 aa, Homo sapiens
  CDR3 for beta chain variable domain of TCR clone 341116 (TRBV7-9, TRBJ2-2)
CASSFDRGTGELFF

SEQ ID NO: 682233 - protein, 21 aa, Homo sapiens
  CDR3 for alpha chain variable domain of TCR clone 341117 (TRAV26-1, TRAJ38)
CIADNAGNNHIQNPDPAGYQL

SEQ ID NO: 682234 - protein, 13 aa, Homo sapiens
  CDR3 for beta chain variable domain of TCR clone 341117 (TRBV20-1, TRBJ1-1)
CSARGGGNTEAFF

SEQ ID NO: 682235 - protein, 13 aa, Homo sapiens
  CDR3 for alpha chain variable domain of TCR clone 341118 (TRAV12-3, TRAJ33)
CAMSVNSNYQLMW

SEQ ID NO: 682236 - protein, 13 aa, Homo sapiens
  CDR3 for beta chain variable domain of TCR clone 341118 (TRBV7-2, TRBJ2-2)
CASSLAVTGELFF

SEQ ID NO: 682237 - protein, 11 aa, Homo sapiens
  CDR3 for alpha chain variable domain of TCR clone 341119 (TRAV12-3, TRAJ49)
CAANTGNQFYF

SEQ ID NO: 682238 - protein, 15 aa, Homo sapiens
  CDR3 for beta chain variable domain of TCR clone 341119 (TRBV7-6, TRBJ1-1)
CASSPQGGANTEAFF

SEQ ID NO: 682239 - protein, 22 aa, Homo sapiens
  CDR3 for alpha chain variable domain of TCR clone 341120 (TRAV2, TRAJ10)
ILQVREADAAVYYTGGGNKLTV

SEQ ID NO: 682240 - protein, 16 aa, Homo sapiens
  CDR3 for beta chain variable domain of TCR clone 341120 (TRBV29-1, TRBJ2-5)
CSVEDLAGDYQENQYF

SEQ ID NO: 682241 - protein, 12 aa, Homo sapiens
  CDR3 for alpha chain variable domain of TCR clone 341121 (TRAV3, TRAJ20)
CAVRDPDYKLSF

SEQ ID NO: 682242 - protein, 20 aa, Homo sapiens
  CDR3 for beta chain variable domain of TCR clone 341121 (TRBV28, TRBJ2-1)
CASTPIGRSPGLAGGNEQFF

SEQ ID NO: 682243 - protein, 14 aa, Homo sapiens
  CDR3 for alpha chain variable domain of TCR clone 341122 (TRAV26-1, TRAJ49)
CIVRLTNTCNQFYF

SEQ ID NO: 682244 - protein, 13 aa, Homo sapiens
  CDR3 for beta chain variable domain of TCR clone 341122 (TRBV4-1, TRBJ2-7)
CASSQGQAYEQYF

SEQ ID NO: 682245 - protein, 14 aa, Homo sapiens
  CDR3 for alpha chain variable domain of TCR clone 341123 (TRAV38-1, TRAJ31)
CAFMKDDNNARLMF

SEQ ID NO: 682246 - protein, 16 aa, Homo sapiens
  CDR3 for beta chain variable domain of TCR clone 341123 (TRBV23-1, TRBJ2-1)
CISAPATGPTYNEQFF

SEQ ID NO: 682247 - protein, 15 aa, Homo sapiens
  CDR3 for alpha chain variable domain of TCR clone 341124 (TRAV8-3, TRAJ27)
CAVGPSKTNAGKSTI

SEQ ID NO: 682248 - protein, 15 aa, Homo sapiens
  CDR3 for beta chain variable domain of TCR clone 341124 (TRBV7-2, TRBJ2-1)
CASSSGLAGGNEQLF

SEQ ID NO: 682249 - protein, 12 aa, Homo sapiens
  CDR3 for alpha chain variable domain of TCR clone 341125 (TRAV1-2, TRAJ24)
CAVGGSWGKFQF

SEQ ID NO: 682250 - protein, 13 aa, Homo sapiens
  CDR3 for beta chain variable domain of TCR clone 341125 (TRBV12-4, TRBJ1-2)
CASRLRQGKGYTF

SEQ ID NO: 682251 - protein, 12 aa, Homo sapiens
  CDR3 for alpha chain variable domain of TCR clone 341126 (TRAV3, TRAJ39)
CAVIEWSDMLTF

SEQ ID NO: 682252 - protein, 13 aa, Homo sapiens
  CDR3 for beta chain variable domain of TCR clone 341126 (TRBV7-8, TRBJ2-3)
CQQLPDGQDTQYF

SEQ ID NO: 682253 - protein, 13 aa, Homo sapiens
  CDR3 for alpha chain variable domain of TCR clone 341127 (TRAV8-3, TRAJ4)
WVFYSGGYNKLIF

SEQ ID NO: 682254 - protein, 14 aa, Homo sapiens
  CDR3 for beta chain variable domain of TCR clone 341127 (TRBV4-2, TRBJ2-1)
CASGLDRAYNEQFF

SEQ ID NO: 682255 - protein, 13 aa, Homo sapiens
  CDR3 for alpha chain variable domain of TCR clone 341128 (TRAV35, TRAJ22)
CAGLSGSARQLIF

SEQ ID NO: 682256 - protein, 16 aa, Homo sapiens
  CDR3 for beta chain variable domain of TCR clone 341128 (TRBV7-9, TRBJ2-1)
CASSLVLTGQGNEQFF

SEQ ID NO: 682257 - protein, 13 aa, Homo sapiens
  CDR3 for alpha chain variable domain of TCR clone 341129 (TRAV21, TRAJ27)
CAARPGNAGKSTF

SEQ ID NO: 682258 - protein, 13 aa, Homo sapiens
  CDR3 for beta chain variable domain of TCR clone 341129 (TRBV7-9, TRBJ2-1)
CASSLDVGNEQFF

SEQ ID NO: 682259 - protein, 14 aa, Homo sapiens
  CDR3 for alpha chain variable domain of TCR clone 341130 (TRAV12-1, TRAJ45)
CVVNSGGGADGLTF

SEQ ID NO: 682260 - protein, 16 aa, Homo sapiens
  CDR3 for beta chain variable domain of TCR clone 341130 (TRBV5-4, TRBJ2-3)
CASQQPGAGGADTQYF

SEQ ID NO: 682261 - protein, 14 aa, Homo sapiens
  CDR3 for alpha chain variable domain of TCR clone 341131 (TRAV13-2, TRAJ29)
CAENIEPGNTTLVF

SEQ ID NO: 682262 - protein, 14 aa, Homo sapiens
  CDR3 for beta chain variable domain of TCR clone 341131 (TRBV19, TRBJ2-2)
CATTGHANTGELFF

SEQ ID NO: 682263 - protein, 11 aa, Homo sapiens
  CDR3 for alpha chain variable domain of TCR clone 341132 (TRAV35, TRAJ34)
CWARSTDKLIF

SEQ ID NO: 682264 - protein, 15 aa, Homo sapiens
  CDR3 for beta chain variable domain of TCR clone 341132 (TRBV12-4, TRBJ2-5)
CASSPPTGLQETQYF

SEQ ID NO: 682265 - protein, 19 aa, Homo sapiens
  CDR3 for alpha chain variable domain of TCR clone 341133 (TRAV38-1, TRAJ53)
CAFMRHGLESGGSNYKLTF

SEQ ID NO: 682266 - protein, 13 aa, Homo sapiens
  CDR3 for beta chain variable domain of TCR clone 341133 (TRBV19, TRBJ2-7)
CASSPRQSYEQYF

SEQ ID NO: 682267 - protein, 13 aa, Homo sapiens
  CDR3 for alpha chain variable domain of TCR clone 341134 (TRAV17, TRAJ5)
CAPMDTGRRARTF

SEQ ID NO: 682268 - protein, 14 aa, Homo sapiens
  CDR3 for beta chain variable domain of TCR clone 341134 (TRBV19, TRBJ2-1)
CASPTFVLSGEQFF

SEQ ID NO: 682269 - protein, 14 aa, Homo sapiens
  CDR3 for alpha chain variable domain of TCR clone 341135 (TRAV26-1, TRAJ38)
CIADNAVNNRKLIW

SEQ ID NO: 682270 - protein, 15 aa, Homo sapiens
  CDR3 for beta chain variable domain of TCR clone 341135 (TRBV20-1, TRBJ2-7)
CSARDRVSGMDEQYF

SEQ ID NO: 682271 - protein, 12 aa, Homo sapiens
  CDR3 for alpha chain variable domain of TCR clone 341136 (TRAV23/DV6, TRAJ36)
CAASNEANNLFF

SEQ ID NO: 682272 - protein, 12 aa, Homo sapiens
  CDR3 for beta chain variable domain of TCR clone 341136 (TRBV7-8, TRBJ2-7)
CASSLGDREQYF

SEQ ID NO: 682273 - protein, 16 aa, Homo sapiens
  CDR3 for alpha chain variable domain of TCR clone 341137 (TRAV38-1, TRAJ56)
CAFMKRQTGANSKLTL

SEQ ID NO: 682274 - protein, 15 aa, Homo sapiens
  CDR3 for beta chain variable domain of TCR clone 341137 (TRBV20-1, TRBJ2-7)
CSARDRVSGMDEQYF

SEQ ID NO: 682275 - protein, 22 aa, Homo sapiens
  CDR3 for alpha chain variable domain of TCR clone 341138 (TRAV3, TRAJ38)
CAVRDCLNAGNNHIQNPDHAVY

SEQ ID NO: 682276 - protein, 15 aa, Homo sapiens
  CDR3 for beta chain variable domain of TCR clone 341138 (TRBV6-5, TRBJ2-1)
CASSYDAGAGNEQFF

SEQ ID NO: 682277 - protein, 10 aa, Homo sapiens
  CDR3 for alpha chain variable domain of TCR clone 341139 (TRAV30, TRAJ48)
CGIGNEKLTF

SEQ ID NO: 682278 - protein, 16 aa, Homo sapiens
  CDR3 for beta chain variable domain of TCR clone 341139 (TRBV7-6, TRBJ1-1)
CASSRLPGQGNTEAFF

SEQ ID NO: 682279 - protein, 12 aa, Homo sapiens
  CDR3 for alpha chain variable domain of TCR clone 341140 (TRAV13-1, TRAJ49)
CAASPMGNQFHF

SEQ ID NO: 682280 - protein, 17 aa, Homo sapiens
  CDR3 for beta chain variable domain of TCR clone 341140 (TRBV11-2, TRBJ2-1)
CASSLYPPGVEYNEQFF

SEQ ID NO: 682281 - protein, 23 aa, Homo sapiens
  CDR3 for alpha chain variable domain of TCR clone 341141 (TRAV26-1, TRAJ38)
CIADNAGNNHIQNPDPAVYQLRD

SEQ ID NO: 682282 - protein, 13 aa, Homo sapiens
  CDR3 for beta chain variable domain of TCR clone 341141 (TRBV7-8, TRBJ2-7)
CASSLTGGREQYF

SEQ ID NO: 682283 - protein, 16 aa, Homo sapiens
  CDR3 for alpha chain variable domain of TCR clone 341142 (TRAV26-1, TRAJ37)
CIVRGDGSGNPGKLIF

SEQ ID NO: 682284 - protein, 17 aa, Homo sapiens
  CDR3 for beta chain variable domain of TCR clone 341142 (TRBV4-1, TRBJ2-7)
CASSGDPLGVRGGEQYF

SEQ ID NO: 682285 - protein, 14 aa, Homo sapiens
  CDR3 for alpha chain variable domain of TCR clone 341143 (TRAV17, TRAJ53)
CATDAGGSAYKLTF

SEQ ID NO: 682286 - protein, 16 aa, Homo sapiens
  CDR3 for beta chain variable domain of TCR clone 341143 (TRBV4-1, TRBJ1-1)
CASSQDAGMGNTEAFF

SEQ ID NO: 682287 - protein, 12 aa, Homo sapiens
  CDR3 for alpha chain variable domain of TCR clone 341144 (TRAV13-1, TRAJ21)
CAAKEGFNKFYF

SEQ ID NO: 682288 - protein, 14 aa, Homo sapiens
  CDR3 for beta chain variable domain of TCR clone 341144 (TRBV7-2, TRBJ2-7)
CASSPKTSFYEQYF

SEQ ID NO: 682289 - protein, 15 aa, Homo sapiens
  CDR3 for alpha chain variable domain of TCR clone 341145 (TRAV26-1, TRAJ29)
CIVRVEGSGNAPLVF

SEQ ID NO: 682290 - protein, 15 aa, Homo sapiens
  CDR3 for beta chain variable domain of TCR clone 341145 (TRBV7-9, TRBJ1-5)
CASSQGHRPNQPQHF

SEQ ID NO: 682291 - protein, 12 aa, Homo sapiens
  CDR3 for alpha chain variable domain of TCR clone 341146 (TRAV12-3, TRAJ17)
CAMTLTGNKLTF

SEQ ID NO: 682292 - protein, 15 aa, Homo sapiens
  CDR3 for beta chain variable domain of TCR clone 341146 (TRBV20-1, TRBJ2-7)
CSARDWVSGMDKQYF

SEQ ID NO: 682293 - protein, 15 aa, Homo sapiens
  CDR3 for alpha chain variable domain of TCR clone 341147 (TRAV13-1, TRAJ8)
CAASIPNTVFQKLVF

SEQ ID NO: 682294 - protein, 13 aa, Homo sapiens
  CDR3 for beta chain variable domain of TCR clone 341147 (TRBV12-4, TRBJ2-7)
CASSLSGVYEQYF

SEQ ID NO: 682295 - protein, 13 aa, Homo sapiens
  CDR3 for alpha chain variable domain of TCR clone 341148 (TRAV35, TRAJ57)
CAGSQGGSEKLVF

SEQ ID NO: 682296 - protein, 11 aa, Homo sapiens
  CDR3 for beta chain variable domain of TCR clone 341148 (TRBV12-4, TRBJ2-2)
CASSSAGELFF

SEQ ID NO: 682297 - protein, 13 aa, Homo sapiens
  CDR3 for alpha chain variable domain of TCR clone 341149 (TRAV5, TRAJ30)
CADIANRDDKIIF

SEQ ID NO: 682298 - protein, 14 aa, Homo sapiens
  CDR3 for beta chain variable domain of TCR clone 341149 (TRBV4-1, TRBJ2-2)
CASSQAVNTGELFF

SEQ ID NO: 682299 - protein, 12 aa, Homo sapiens
  CDR3 for alpha chain variable domain of TCR clone 341150 (TRAV17, TRAJ12)
CATLRSSYKLIF

SEQ ID NO: 682300 - protein, 16 aa, Homo sapiens
  CDR3 for beta chain variable domain of TCR clone 341150 (TRBV28, TRBJ2-7)
CASSLFFETWGPEQYF

SEQ ID NO: 682301 - protein, 14 aa, Homo sapiens
  CDR3 for alpha chain variable domain of TCR clone 341151 (TRAV23/DV6, TRAJ22)
CADISSGSARQLTF

SEQ ID NO: 682302 - protein, 16 aa, Homo sapiens
  CDR3 for beta chain variable domain of TCR clone 341151 (TRBV5-7, TRBJ2-5)
RASIRGQTGYQETQYF

SEQ ID NO: 682303 - protein, 14 aa, Homo sapiens
  CDR3 for alpha chain variable domain of TCR clone 341152 (TRAV36/DV7, TRAJ44)
CCGANTGTASKLTF

SEQ ID NO: 682304 - protein, 16 aa, Homo sapiens
  CDR3 for beta chain variable domain of TCR clone 341152 (TRBV7-9, TRBJ1-2)
CASSLGFSSGGDGYTF

SEQ ID NO: 682305 - protein, 12 aa, Homo sapiens
  CDR3 for alpha chain variable domain of TCR clone 341153 (TRAV12-3, TRAJ40)
CAMSSGTYKYIF

SEQ ID NO: 682306 - protein, 15 aa, Homo sapiens
  CDR3 for beta chain variable domain of TCR clone 341153 (TRBV7-3, TRBJ2-2)
FASSETGQGTGELFF

SEQ ID NO: 682307 - protein, 14 aa, Homo sapiens
  CDR3 for alpha chain variable domain of TCR clone 341154 (TRAV12-1, TRAJ40)
CVVNRDSGTYKYIF

SEQ ID NO: 682308 - protein, 16 aa, Homo sapiens
  CDR3 for beta chain variable domain of TCR clone 341154 (TRBV19, TRBJ2-1)
CASSIQAGGSYNEQFF

SEQ ID NO: 682309 - protein, 10 aa, Homo sapiens
  CDR3 for alpha chain variable domain of TCR clone 341155 (TRAV23/DV6, TRAJ57)
CAASSTLSQG

SEQ ID NO: 682310 - protein, 14 aa, Homo sapiens
  CDR3 for beta chain variable domain of TCR clone 341155 (TRBV20-1, TRBJ2-7)
CSAKRGSSSYEQYF

SEQ ID NO: 682311 - protein, 13 aa, Homo sapiens
  CDR3 for alpha chain variable domain of TCR clone 341156 (TRAV3, TRAJ20)
CAVRDTGDYKLSF

SEQ ID NO: 682312 - protein, 17 aa, Homo sapiens
  CDR3 for beta chain variable domain of TCR clone 341156 (TRBV7-9, TRBJ2-3)
CASSPTVAGDLTDTQYF

SEQ ID NO: 682313 - protein, 16 aa, Homo sapiens
  CDR3 for alpha chain variable domain of TCR clone 341157 (TRAV8-6, TRAJ39)
CAVMPMNNNEGNMLTF

SEQ ID NO: 682314 - protein, 16 aa, Homo sapiens
  CDR3 for beta chain variable domain of TCR clone 341157 (TRBV15, TRBJ2-5)
CATSRYLEAAQETQYF

SEQ ID NO: 682315 - protein, 14 aa, Homo sapiens
  CDR3 for alpha chain variable domain of TCR clone 341158 (TRAV29/DV5, TRAJ36)
CAARRKTGANNLFF

SEQ ID NO: 682316 - protein, 14 aa, Homo sapiens
  CDR3 for beta chain variable domain of TCR clone 341158 (TRBV20-1, TRBJ1-3)
CSASPTGAGNTIYF

SEQ ID NO: 682317 - protein, 14 aa, Homo sapiens
  CDR3 for alpha chain variable domain of TCR clone 341159 (TRAV13-1, TRAJ17)
LSSRSKAAGNKLTF

SEQ ID NO: 682318 - protein, 14 aa, Homo sapiens
  CDR3 for beta chain variable domain of TCR clone 341159 (TRBV7-9, TRBJ2-1)
CASRSMVGFGEQFF

SEQ ID NO: 682319 - protein, 11 aa, Homo sapiens
  CDR3 for alpha chain variable domain of TCR clone 341160 (TRAV21, TRAJ9)
CAVPGGFKSIF

SEQ ID NO: 682320 - protein, 12 aa, Homo sapiens
  CDR3 for beta chain variable domain of TCR clone 341160 (TRBV20-1, TRBJ2-3)
CSARVGTDTQYF

SEQ ID NO: 682321 - protein, 14 aa, Homo sapiens
  CDR3 for alpha chain variable domain of TCR clone 341161 (TRAV20, TRAJ54)
CAVQAGRGAQKLVF

SEQ ID NO: 682322 - protein, 14 aa, Homo sapiens
  CDR3 for beta chain variable domain of TCR clone 341161 (TRBV4-1, TRBJ2-2)
CASSQAVNTGELFF

SEQ ID NO: 682323 - protein, 18 aa, Homo sapiens
  CDR3 for alpha chain variable domain of TCR clone 341162 (TRAV13-1, TRAJ52)
CSAKDPNAGGTSYGKLTF

SEQ ID NO: 682324 - protein, 14 aa, Homo sapiens
  CDR3 for beta chain variable domain of TCR clone 341162 (TRBV7-2, TRBJ2-7)
CASRSQGAAYEQYF

SEQ ID NO: 682325 - protein, 16 aa, Homo sapiens
  CDR3 for alpha chain variable domain of TCR clone 341163 (TRAV26-1, TRAJ56)
CIVRVAETGANSKLKF

SEQ ID NO: 682326 - protein, 15 aa, Homo sapiens
  CDR3 for beta chain variable domain of TCR clone 341163 (TRBV5-7, TRBJ1-4)
CASSLWHQGGEKLFF

SEQ ID NO: 682327 - protein, 14 aa, Homo sapiens
  CDR3 for alpha chain variable domain of TCR clone 341164 (TRAV3, TRAJ27)
CAVRDNTNAGKSTF

SEQ ID NO: 682328 - protein, 14 aa, Homo sapiens
  CDR3 for beta chain variable domain of TCR clone 341164 (TRBV7-9, TRBJ1-1)
CASTPLQSYTEAFF

SEQ ID NO: 682329 - protein, 13 aa, Homo sapiens
  CDR3 for alpha chain variable domain of TCR clone 341165 (TRAV2, TRAJ40)
CAVVPSGTYKYIF

SEQ ID NO: 682330 - protein, 13 aa, Homo sapiens
  CDR3 for beta chain variable domain of TCR clone 341165 (TRBV6-3, TRBJ1-6)
CASSEGTGPPLHF

SEQ ID NO: 682331 - protein, 16 aa, Homo sapiens
  CDR3 for alpha chain variable domain of TCR clone 341166 (TRAV3, TRAJ21)
CAVRDIERGNFNKFYF

SEQ ID NO: 682332 - protein, 12 aa, Homo sapiens
  CDR3 for beta chain variable domain of TCR clone 341166 (TRBV12-4, TRBJ1-3)
CASSFSGNTIYF

SEQ ID NO: 682333 - protein, 15 aa, Homo sapiens
  CDR3 for alpha chain variable domain of TCR clone 341167 (TRAV13-1, TRAJ52)
SYYNAGGTSYGKLTF

SEQ ID NO: 682334 - protein, 14 aa, Homo sapiens
  CDR3 for beta chain variable domain of TCR clone 341167 (TRBV19, TRBJ2-1)
CASPTFVLSGEQFF

SEQ ID NO: 682335 - protein, 15 aa, Homo sapiens
  CDR3 for alpha chain variable domain of TCR clone 341168 (TRAV26-1, TRAJ29)
CIVRVEGSGNTPLVF

SEQ ID NO: 682336 - protein, 14 aa, Homo sapiens
  CDR3 for beta chain variable domain of TCR clone 341168 (TRBV6-6, TRBJ1-4)
CASRTDREYEKLFF

SEQ ID NO: 682337 - protein, 12 aa, Homo sapiens
  CDR3 for alpha chain variable domain of TCR clone 341169 (TRAV12-2, TRAJ20)
CAVDWNDYKLSF

SEQ ID NO: 682338 - protein, 12 aa, Homo sapiens
  CDR3 for beta chain variable domain of TCR clone 341169 (TRBV7-9, TRBJ1-4)
CASSTDREKLFF

SEQ ID NO: 682339 - protein, 13 aa, Homo sapiens
  CDR3 for alpha chain variable domain of TCR clone 341170 (TRAV23/DV6, TRAJ58)
WAASEIGGSRLTF

SEQ ID NO: 682340 - protein, 13 aa, Homo sapiens
  CDR3 for beta chain variable domain of TCR clone 341170 (TRBV3-1, TRBJ1-5)
CASSQFGDQPQHF

SEQ ID NO: 682341 - protein, 16 aa, Homo sapiens
  CDR3 for alpha chain variable domain of TCR clone 341171 (TRAV16, TRAJ18)
CALSDDRGSTLGRLYF

SEQ ID NO: 682342 - protein, 15 aa, Homo sapiens
  CDR3 for beta chain variable domain of TCR clone 341171 (TRBV14, TRBJ2-3)
CASSQEMLAGATQYF

SEQ ID NO: 682343 - protein, 12 aa, Homo sapiens
  CDR3 for alpha chain variable domain of TCR clone 341172 (TRAV12-3, TRAJ21)
CAMLNNFNKFYF

SEQ ID NO: 682344 - protein, 16 aa, Homo sapiens
  CDR3 for beta chain variable domain of TCR clone 341172 (TRBV7-9, TRBJ1-2)
CASSLAPLRAAYGCTF

SEQ ID NO: 682345 - protein, 15 aa, Homo sapiens
  CDR3 for alpha chain variable domain of TCR clone 341173 (TRAV3, TRAJ47)
CAVRDIGEYGNKLVF

SEQ ID NO: 682346 - protein, 14 aa, Homo sapiens
  CDR3 for beta chain variable domain of TCR clone 341173 (TRBV13, TRBJ2-5)
WASSLERVGETQYF

SEQ ID NO: 682347 - protein, 15 aa, Homo sapiens
  CDR3 for alpha chain variable domain of TCR clone 341174 (TRAV27, TRAJ38)
CAARRNAGNNRKLIW

SEQ ID NO: 682348 - protein, 14 aa, Homo sapiens
  CDR3 for beta chain variable domain of TCR clone 341174 (TRBV7-2, TRBJ2-7)
CASSTRDAAYEQYF

SEQ ID NO: 682349 - protein, 12 aa, Homo sapiens
  CDR3 for alpha chain variable domain of TCR clone 341175 (TRAV2, TRAJ33)
CAVPDSNYQLIW

SEQ ID NO: 682350 - protein, 16 aa, Homo sapiens
  CDR3 for beta chain variable domain of TCR clone 341175 (TRBV19, TRBJ2-1)
CASSMGGGSSYNEQFF

SEQ ID NO: 682351 - protein, 13 aa, Homo sapiens
  CDR3 for alpha chain variable domain of TCR clone 341176 (TRAV4, TRAJ42)
CLVGGGSQGNLIF

SEQ ID NO: 682352 - protein, 12 aa, Homo sapiens
  CDR3 for beta chain variable domain of TCR clone 341176 (TRBV5-1, TRBJ2-3)
CASSLAEGTQYS

SEQ ID NO: 682353 - protein, 16 aa, Homo sapiens
  CDR3 for alpha chain variable domain of TCR clone 341177 (TRAV12-2, TRAJ52)
CRLANAGGTSYGKLTF

SEQ ID NO: 682354 - protein, 15 aa, Homo sapiens
  CDR3 for beta chain variable domain of TCR clone 341177 (TRBV7-2, TRBJ2-2)
CASSTRTGYTGKLFF

SEQ ID NO: 682355 - protein, 14 aa, Homo sapiens
  CDR3 for alpha chain variable domain of TCR clone 341178 (TRAV3, TRAJ17)
CAVRDAAAGNKLTF

SEQ ID NO: 682356 - protein, 18 aa, Homo sapiens
  CDR3 for beta chain variable domain of TCR clone 341178 (TRBV7-9, TRBJ2-7)
CASSLTTSGSRTWYEQYF

SEQ ID NO: 682357 - protein, 14 aa, Homo sapiens
  CDR3 for alpha chain variable domain of TCR clone 341179 (TRAV13-1, TRAJ44)
CAAKATGTASKLTF

SEQ ID NO: 682358 - protein, 11 aa, Homo sapiens
  CDR3 for beta chain variable domain of TCR clone 341179 (TRBV13, TRBJ2-3)
CASGNADTQYF

SEQ ID NO: 682359 - protein, 14 aa, Homo sapiens
  CDR3 for alpha chain variable domain of TCR clone 341180 (TRAV26-1, TRAJ38)
CIADNAGNNRKLIR

SEQ ID NO: 682360 - protein, 17 aa, Homo sapiens
  CDR3 for beta chain variable domain of TCR clone 341180 (TRBV7-9, TRBJ2-3)
CASSPTVAGDLTDTQYF

SEQ ID NO: 682361 - protein, 12 aa, Homo sapiens
  CDR3 for alpha chain variable domain of TCR clone 341181 (TRAV36/DV7, TRAJ40)
CAVGTGTYKYIF

SEQ ID NO: 682362 - protein, 15 aa, Homo sapiens
  CDR3 for beta chain variable domain of TCR clone 341181 (TRBV20-1, TRBJ1-5)
CSAFKNGQRNQPQHF

SEQ ID NO: 682363 - protein, 11 aa, Homo sapiens
  CDR3 for alpha chain variable domain of TCR clone 341182 (TRAV17, TRAJ43)
CATPRSNDMSF

SEQ ID NO: 682364 - protein, 15 aa, Homo sapiens
  CDR3 for beta chain variable domain of TCR clone 341182 (TRBV11-2, TRBJ2-1)
CASSLGTSGLNEQFF

SEQ ID NO: 682365 - protein, 12 aa, Homo sapiens
  CDR3 for alpha chain variable domain of TCR clone 341183 (TRAV16, TRAJ10)
CSRTGGGNKLTF

SEQ ID NO: 682366 - protein, 14 aa, Homo sapiens
  CDR3 for beta chain variable domain of TCR clone 341183 (TRBV19, TRBJ2-5)
CASSMTGQQETQYF

SEQ ID NO: 682367 - protein, 10 aa, Homo sapiens
  CDR3 for alpha chain variable domain of TCR clone 341184 (TRAV12-1, TRAJ37)
ARGNTGKLIF

SEQ ID NO: 682368 - protein, 17 aa, Homo sapiens
  CDR3 for beta chain variable domain of TCR clone 341184 (TRBV20-1, TRBJ2-2)
CSASGSGQGGLTGELFF

SEQ ID NO: 682369 - protein, 15 aa, Homo sapiens
  CDR3 for alpha chain variable domain of TCR clone 341185 (TRAV8-4, TRAJ40)
CAVSDDTSGTYKYIF

SEQ ID NO: 682370 - protein, 15 aa, Homo sapiens
  CDR3 for beta chain variable domain of TCR clone 341185 (TRBV20-1, TRBJ2-7)
CSARDRVSGMDEQYF

SEQ ID NO: 682371 - protein, 13 aa, Homo sapiens
  CDR3 for alpha chain variable domain of TCR clone 341186 (TRAV12-2, TRAJ9)
CAVLETGGSKTIF

SEQ ID NO: 682372 - protein, 15 aa, Homo sapiens
  CDR3 for beta chain variable domain of TCR clone 341186 (TRBV6-3, TRBJ2-7)
CASSRTGVNLYEQYF

SEQ ID NO: 682373 - protein, 17 aa, Homo sapiens
  CDR3 for alpha chain variable domain of TCR clone 341187 (TRAV8-6, TRAJ58)
CAVSSWVGETSGSRLTC

SEQ ID NO: 682374 - protein, 14 aa, Homo sapiens
  CDR3 for beta chain variable domain of TCR clone 341187 (TRBV4-3, TRBJ2-1)
CASGLDRAYNEQFF

SEQ ID NO: 682375 - protein, 13 aa, Homo sapiens
  CDR3 for alpha chain variable domain of TCR clone 341188 (TRAV21, TRAJ27)
CAARPGNAGKSTF

SEQ ID NO: 682376 - protein, 15 aa, Homo sapiens
  CDR3 for beta chain variable domain of TCR clone 341188 (TRBV2, TRBJ2-3)
CASSDAGGPPDTQYC

SEQ ID NO: 682377 - protein, 13 aa, Homo sapiens
  CDR3 for alpha chain variable domain of TCR clone 341189 (TRAV1-2, TRAJ9)
CAALNTGGFKTIF

SEQ ID NO: 682378 - protein, 14 aa, Homo sapiens
  CDR3 for beta chain variable domain of TCR clone 341189 (TRBV11-2, TRBJ2-7)
CASSPGQGLYEQYF

SEQ ID NO: 682379 - protein, 11 aa, Homo sapiens
  CDR3 for alpha chain variable domain of TCR clone 341190 (TRAV17, TRAJ9)
CGFTGGFKTIF

SEQ ID NO: 682380 - protein, 14 aa, Homo sapiens
  CDR3 for beta chain variable domain of TCR clone 341190 (TRBV7-9, TRBJ2-1)
CASSPRDSLYEQFF

SEQ ID NO: 682381 - protein, 15 aa, Homo sapiens
  CDR3 for alpha chain variable domain of TCR clone 341191 (TRAV26-1, TRAJ44)
CIVRANTGTASKLTF

SEQ ID NO: 682382 - protein, 15 aa, Homo sapiens
  CDR3 for beta chain variable domain of TCR clone 341191 (TRBV7-6, TRBJ1-5)
CASSQSSGINQPQHF

SEQ ID NO: 682383 - protein, 14 aa, Homo sapiens
  CDR3 for alpha chain variable domain of TCR clone 341192 (TRAV21, TRAJ21)
CAVKGFGNFNKFYF

SEQ ID NO: 682384 - protein, 13 aa, Homo sapiens
  CDR3 for beta chain variable domain of TCR clone 341192 (TRBV18, TRBJ1-1)
SASSPETKPEAFF

SEQ ID NO: 682385 - protein, 13 aa, Homo sapiens
  CDR3 for alpha chain variable domain of TCR clone 341193 (TRAV12-2, TRAJ42)
CAVKRGSQGNLIF

SEQ ID NO: 682386 - protein, 13 aa, Homo sapiens
  CDR3 for beta chain variable domain of TCR clone 341193 (TRBV9, TRBJ2-3)
CASSWGRTDTQYF

SEQ ID NO: 682387 - protein, 14 aa, Homo sapiens
  CDR3 for alpha chain variable domain of TCR clone 341194 (TRAV35, TRAJ22)
CAGLRPGSARPLTF

SEQ ID NO: 682388 - protein, 15 aa, Homo sapiens
  CDR3 for beta chain variable domain of TCR clone 341194 (TRBV12-4, TRBJ2-5)
CASRPPTGLQETQYF

SEQ ID NO: 682389 - protein, 17 aa, Homo sapiens
  CDR3 for alpha chain variable domain of TCR clone 341195 (TRAV3, TRAJ6)
CAVRDGPRAGGSYIPTF

SEQ ID NO: 682390 - protein, 14 aa, Homo sapiens
  CDR3 for beta chain variable domain of TCR clone 341195 (TRBV28, TRBJ1-2)
CASSRDRKNYGYTF

SEQ ID NO: 682391 - protein, 12 aa, Homo sapiens
  CDR3 for alpha chain variable domain of TCR clone 341196 (TRAV12-1, TRAJ40)
CVVYSGTYKYIF

SEQ ID NO: 682392 - protein, 17 aa, Homo sapiens
  CDR3 for beta chain variable domain of TCR clone 341196 (TRBV11-3, TRBJ1-5)
CASSPLTGLRGKQPQHF

SEQ ID NO: 682393 - protein, 23 aa, Homo sapiens
  CDR3 for alpha chain variable domain of TCR clone 341197 (TRAV20, TRAJ32)
CAVDGMVVLQTSSSLELDPCLLS

SEQ ID NO: 682394 - protein, 16 aa, Homo sapiens
  CDR3 for beta chain variable domain of TCR clone 341197 (TRBV19, TRBJ2-2)
CASRSPGTGATGELFF

SEQ ID NO: 682395 - protein, 14 aa, Homo sapiens
  CDR3 for alpha chain variable domain of TCR clone 341198 (TRAV12-3, TRAJ10)
SHLPLTGGGNKLTF

SEQ ID NO: 682396 - protein, 16 aa, Homo sapiens
  CDR3 for beta chain variable domain of TCR clone 341198 (TRBV19, TRBJ1-1)
CASRFGGTVTGTEAFF

SEQ ID NO: 682397 - protein, 10 aa, Homo sapiens
  CDR3 for alpha chain variable domain of TCR clone 341199 (TRAV12-1, TRAJ37)
ARGNTGKLIF

SEQ ID NO: 682398 - protein, 15 aa, Homo sapiens
  CDR3 for beta chain variable domain of TCR clone 341199 (TRBV20-1, TRBJ1-1)
CSASRGVTGNTEAFF

SEQ ID NO: 682399 - protein, 13 aa, Homo sapiens
  CDR3 for alpha chain variable domain of TCR clone 341200 (TRAV2, TRAJ15)
CAVASQVGTALIF

SEQ ID NO: 682400 - protein, 14 aa, Homo sapiens
  CDR3 for beta chain variable domain of TCR clone 341200 (TRBV25-1, TRBJ1-1)
CASTHLGGNTEAFF

SEQ ID NO: 682401 - protein, 16 aa, Homo sapiens
  CDR3 for alpha chain variable domain of TCR clone 341201 (TRAV12-2, TRAJ43)
CAGTDMRFGAGTRLTV

SEQ ID NO: 682402 - protein, 16 aa, Homo sapiens
  CDR3 for beta chain variable domain of TCR clone 341201 (TRBV2, TRBJ2-4)
CASSEAPGGEQNNQYF

SEQ ID NO: 682403 - protein, 13 aa, Homo sapiens
  CDR3 for alpha chain variable domain of TCR clone 341202 (TRAV2, TRAJ40)
CAVVTSGTYKYIF

SEQ ID NO: 682404 - protein, 14 aa, Homo sapiens
  CDR3 for beta chain variable domain of TCR clone 341202 (TRBV7-6, TRBJ2-1)
CARRLGGGADEQFF

SEQ ID NO: 682405 - protein, 14 aa, Homo sapiens
  CDR3 for alpha chain variable domain of TCR clone 341203 (TRAV3, TRAJ27)
CAVRDDTNAGKSTF

SEQ ID NO: 682406 - protein, 15 aa, Homo sapiens
  CDR3 for beta chain variable domain of TCR clone 341203 (TRBV7-9, TRBJ1-6)
CASSSPGRGNSPLHF

SEQ ID NO: 682407 - protein, 16 aa, Homo sapiens
  CDR3 for alpha chain variable domain of TCR clone 341204 (TRAV26-1, TRAJ3)
CCVLLHRQSIASKIIF

SEQ ID NO: 682408 - protein, 15 aa, Homo sapiens
  CDR3 for beta chain variable domain of TCR clone 341204 (TRBV3-1, TRBJ2-2)
CASSTTTGPTGELFF

SEQ ID NO: 682409 - protein, 14 aa, Homo sapiens
  CDR3 for alpha chain variable domain of TCR clone 341205 (TRAV12-2, TRAJ13)
CAVKKTGGYQTVTF

SEQ ID NO: 682410 - protein, 12 aa, Homo sapiens
  CDR3 for beta chain variable domain of TCR clone 341205 (TRBV12-4, TRBJ1-2)
CASSFIWLHLRF

SEQ ID NO: 682411 - protein, 11 aa, Homo sapiens
  CDR3 for alpha chain variable domain of TCR clone 341206 (TRAV17, TRAJ9)
CATTGGFKSIF

SEQ ID NO: 682412 - protein, 14 aa, Homo sapiens
  CDR3 for beta chain variable domain of TCR clone 341206 (TRBV7-9, TRBJ2-2)
CARSGLADTGELFF

SEQ ID NO: 682413 - protein, 14 aa, Homo sapiens
  CDR3 for alpha chain variable domain of TCR clone 341207 (TRAV12-3, TRAJ9)
CAMSPNTGGFKTIF

SEQ ID NO: 682414 - protein, 16 aa, Homo sapiens
  CDR3 for beta chain variable domain of TCR clone 341207 (TRBV12-5, TRBJ2-5)
CASGPRTSGNQETQYF

SEQ ID NO: 682415 - protein, 16 aa, Homo sapiens
  CDR3 for alpha chain variable domain of TCR clone 341208 (TRAV23/DV6, TRAJ57)
CKSSTLSQGGSEKLVV

SEQ ID NO: 682416 - protein, 15 aa, Homo sapiens
  CDR3 for beta chain variable domain of TCR clone 341208 (TRBV28, TRBJ1-1)
CASRIKGGLNTEAFF

SEQ ID NO: 682417 - protein, 13 aa, Homo sapiens
  CDR3 for alpha chain variable domain of TCR clone 341209 (TRAV26-1, TRAJ40)
CIVATSGTYKYIF

SEQ ID NO: 682418 - protein, 16 aa, Homo sapiens
  CDR3 for beta chain variable domain of TCR clone 341209 (TRBV7-2, TRBJ2-2)
CASSLYGGPNTGELFF

SEQ ID NO: 682419 - protein, 14 aa, Homo sapiens
  CDR3 for alpha chain variable domain of TCR clone 341210 (TRAV1-2, TRAJ16)
CAVNRFSDGRKLLF

SEQ ID NO: 682420 - protein, 15 aa, Homo sapiens
  CDR3 for beta chain variable domain of TCR clone 341210 (TRBV11-2, TRBJ1-3)
CASSLDGTVGNTIYF

SEQ ID NO: 682421 - protein, 13 aa, Homo sapiens
  CDR3 for alpha chain variable domain of TCR clone 341211 (TRAV13-2, TRAJ40)
CAEFTSGTYKYIF

SEQ ID NO: 682422 - protein, 12 aa, Homo sapiens
  CDR3 for beta chain variable domain of TCR clone 341211 (TRBV11-2, TRBJ2-2)
CASSLGGGDLFF

SEQ ID NO: 682423 - protein, 13 aa, Homo sapiens
  CDR3 for alpha chain variable domain of TCR clone 341212 (TRAV3, TRAJ20)
CALRPLNDYKLSF

SEQ ID NO: 682424 - protein, 12 aa, Homo sapiens
  CDR3 for beta chain variable domain of TCR clone 341212 (TRBV6-1, TRBJ2-1)
CATYGLNNEQFF

SEQ ID NO: 682425 - protein, 16 aa, Homo sapiens
  CDR3 for alpha chain variable domain of TCR clone 341213 (TRAV30, TRAJ24)
CGTEIVDADSWGKFQF

SEQ ID NO: 682426 - protein, 16 aa, Homo sapiens
  CDR3 for beta chain variable domain of TCR clone 341213 (TRBV5-7, TRBJ2-7)
PAANEGGGRGSYEQYF

SEQ ID NO: 682427 - protein, 14 aa, Homo sapiens
  CDR3 for alpha chain variable domain of TCR clone 341214 (TRAV35, TRAJ50)
CAGHRKTSYDKVIL

SEQ ID NO: 682428 - protein, 13 aa, Homo sapiens
  CDR3 for beta chain variable domain of TCR clone 341214 (TRBV7-7, TRBJ2-3)
CASSLSRADTQDF

SEQ ID NO: 682429 - protein, 11 aa, Homo sapiens
  CDR3 for alpha chain variable domain of TCR clone 341215 (TRAV1-2, TRAJ31)
CAVNNNARLMF

SEQ ID NO: 682430 - protein, 15 aa, Homo sapiens
  CDR3 for beta chain variable domain of TCR clone 341215 (TRBV7-9, TRBJ1-5)
CASSQGHQPNQPQHF

SEQ ID NO: 682431 - protein, 14 aa, Homo sapiens
  CDR3 for alpha chain variable domain of TCR clone 341216 (TRAV12-2, TRAJ9)
CAVNMEGGGFKTIF

SEQ ID NO: 682432 - protein, 13 aa, Homo sapiens
  CDR3 for beta chain variable domain of TCR clone 341216 (TRBV20-1, TRBJ1-1)
CSAGTVGNTEAFF

SEQ ID NO: 682433 - protein, 17 aa, Homo sapiens
  CDR3 for alpha chain variable domain of TCR clone 341217 (TRAV17, TRAJ52)
CATDANAGGTSYGKLTF

SEQ ID NO: 682434 - protein, 18 aa, Homo sapiens
  CDR3 for beta chain variable domain of TCR clone 341217 (TRBV6-5, TRBJ1-1)
CASSYSAPGGTGGTEAFF

SEQ ID NO: 682435 - protein, 13 aa, Homo sapiens
  CDR3 for alpha chain variable domain of TCR clone 341218 (TRAV12-2, TRAJ20)
CAVNRFDDYKLSF

SEQ ID NO: 682436 - protein, 15 aa, Homo sapiens
  CDR3 for beta chain variable domain of TCR clone 341218 (TRBV12-4, TRBJ2-5)
CASSPPTGLQETQYF

SEQ ID NO: 682437 - protein, 13 aa, Homo sapiens
  CDR3 for alpha chain variable domain of TCR clone 341219 (TRAV21, TRAJ20)
CAVGLRVDYKLSF

SEQ ID NO: 682438 - protein, 16 aa, Homo sapiens
  CDR3 for beta chain variable domain of TCR clone 341219 (TRBV7-2, TRBJ2-6)
CASSLAGRSGANVLTF

SEQ ID NO: 682439 - protein, 12 aa, Homo sapiens
  CDR3 for alpha chain variable domain of TCR clone 341220 (TRAV2, TRAJ24)
CAATYSWGKFQF

SEQ ID NO: 682440 - protein, 13 aa, Homo sapiens
  CDR3 for beta chain variable domain of TCR clone 341220 (TRBV5-8, TRBJ1-1)
CASRLGGGTEAFF

SEQ ID NO: 682441 - protein, 18 aa, Homo sapiens
  CDR3 for alpha chain variable domain of TCR clone 341221 (TRAV12-3, TRAJ52)
CAMSRTNAGGTSYGKLTF

SEQ ID NO: 682442 - protein, 16 aa, Homo sapiens
  CDR3 for beta chain variable domain of TCR clone 341221 (TRBV11-1, TRBJ2-7)
CASSAQTGTLSYEQYF

SEQ ID NO: 682443 - protein, 15 aa, Homo sapiens
  CDR3 for alpha chain variable domain of TCR clone 341222 (TRAV26-2, TRAJ45)
CILRERVDQEEVLTD

SEQ ID NO: 682444 - protein, 15 aa, Homo sapiens
  CDR3 for beta chain variable domain of TCR clone 341222 (TRBV7-6, TRBJ2-5)
CASSKPTGPKETQYF

SEQ ID NO: 682445 - protein, 14 aa, Homo sapiens
  CDR3 for alpha chain variable domain of TCR clone 341223 (TRAV1-2, TRAJ16)
CAVNRFSDGQKLLF

SEQ ID NO: 682446 - protein, 14 aa, Homo sapiens
  CDR3 for beta chain variable domain of TCR clone 341223 (TRBV7-9, TRBJ1-2)
CASKRGTLTYGYTF

SEQ ID NO: 682447 - protein, 13 aa, Homo sapiens
  CDR3 for alpha chain variable domain of TCR clone 341224 (TRAV12-1, TRAJ7)
CVVNMRCNNRLAF

SEQ ID NO: 682448 - protein, 15 aa, Homo sapiens
  CDR3 for beta chain variable domain of TCR clone 341224 (TRBV27, TRBJ2-3)
CASGLGLAATDTQYF

SEQ ID NO: 682449 - protein, 13 aa, Homo sapiens
  CDR3 for alpha chain variable domain of TCR clone 341225 (TRAV8-3, TRAJ30)
CAVGGWSDDKIIF

SEQ ID NO: 682450 - protein, 14 aa, Homo sapiens
  CDR3 for beta chain variable domain of TCR clone 341225 (TRBV20-1, TRBJ1-1)
CSAPPADMNTEAFF

SEQ ID NO: 682451 - protein, 13 aa, Homo sapiens
  CDR3 for alpha chain variable domain of TCR clone 341226 (TRAV22, TRAJ29)
CVVGGSGNTPLVF

SEQ ID NO: 682452 - protein, 13 aa, Homo sapiens
  CDR3 for beta chain variable domain of TCR clone 341226 (TRBV4-2, TRBJ1-1)
CASSQAGNTEAFF

SEQ ID NO: 682453 - protein, 14 aa, Homo sapiens
  CDR3 for alpha chain variable domain of TCR clone 341227 (TRAV12-2, TRAJ13)
CAVNKTGGYQKVTF

SEQ ID NO: 682454 - protein, 15 aa, Homo sapiens
  CDR3 for beta chain variable domain of TCR clone 341227 (TRBV5-1, TRBJ2-7)
CASSPQGRPLDEQYF

SEQ ID NO: 682455 - protein, 13 aa, Homo sapiens
  CDR3 for alpha chain variable domain of TCR clone 341228 (TRAV2, TRAJ40)
CAVVTSGTYKYIF

SEQ ID NO: 682456 - protein, 15 aa, Homo sapiens
  CDR3 for beta chain variable domain of TCR clone 341228 (TRBV7-3, TRBJ2-1)
CASSPTGGGVVEQFF

SEQ ID NO: 682457 - protein, 16 aa, Homo sapiens
  CDR3 for alpha chain variable domain of TCR clone 341229 (TRAV12-3, TRAJ53)
CAMSPGSGGSNYKLTL

SEQ ID NO: 682458 - protein, 16 aa, Homo sapiens
  CDR3 for beta chain variable domain of TCR clone 341229 (TRBV11-3, TRBJ2-5)
CASSSVVAGSTETQYF

SEQ ID NO: 682459 - protein, 14 aa, Homo sapiens
  CDR3 for alpha chain variable domain of TCR clone 341230 (TRAV13-1, TRAJ35)
CAASKGGFGNVLHC

SEQ ID NO: 682460 - protein, 15 aa, Homo sapiens
  CDR3 for beta chain variable domain of TCR clone 341230 (TRBV3-1, TRBJ2-5)
CASSANLGGPETQYF

SEQ ID NO: 682461 - protein, 13 aa, Homo sapiens
  CDR3 for alpha chain variable domain of TCR clone 341231 (TRAV12-1, TRAJ16)
CVVNTRNGQKLLF

SEQ ID NO: 682462 - protein, 16 aa, Homo sapiens
  CDR3 for beta chain variable domain of TCR clone 341231 (TRBV24-1, TRBJ2-3)
CATSDPGTGATDTQYF

SEQ ID NO: 682463 - protein, 11 aa, Homo sapiens
  CDR3 for alpha chain variable domain of TCR clone 341232 (TRAV4, TRAJ28)
CLVGDNRAETL

SEQ ID NO: 682464 - protein, 15 aa, Homo sapiens
  CDR3 for beta chain variable domain of TCR clone 341232 (TRBV27, TRBJ2-1)
CASSNGGGSSNEQFF

SEQ ID NO: 682465 - protein, 14 aa, Homo sapiens
  CDR3 for alpha chain variable domain of TCR clone 341233 (TRAV12-2, TRAJ45)
CAVNIGGGADGLTL

SEQ ID NO: 682466 - protein, 13 aa, Homo sapiens
  CDR3 for beta chain variable domain of TCR clone 341233 (TRBV19, TRBJ2-2)
CASSIWGTGELFF

SEQ ID NO: 682467 - protein, 13 aa, Homo sapiens
  CDR3 for alpha chain variable domain of TCR clone 341234 (TRAV35, TRAJ43)
CAGYPYNNKDMRF

SEQ ID NO: 682468 - protein, 15 aa, Homo sapiens
  CDR3 for beta chain variable domain of TCR clone 341234 (TRBV25-1, TRBJ1-4)
CASSKRIATNEKLFF

SEQ ID NO: 682469 - protein, 13 aa, Homo sapiens
  CDR3 for alpha chain variable domain of TCR clone 341235 (TRAV23/DV6, TRAJ15)
CAALPAGRNCPDL

SEQ ID NO: 682470 - protein, 14 aa, Homo sapiens
  CDR3 for beta chain variable domain of TCR clone 341235 (TRBV7-9, TRBJ1-2)
CASSRQAANYGYTF

SEQ ID NO: 682471 - protein, 14 aa, Homo sapiens
  CDR3 for alpha chain variable domain of TCR clone 341236 (TRAV12-2, TRAJ13)
CAVKKTGGYQKVTF

SEQ ID NO: 682472 - protein, 16 aa, Homo sapiens
  CDR3 for beta chain variable domain of TCR clone 341236 (TRBV7-2, TRBJ1-5)
CASSLGGILTSQPQHF

SEQ ID NO: 682473 - protein, 16 aa, Homo sapiens
  CDR3 for alpha chain variable domain of TCR clone 341237 (TRAV30, TRAJ24)
CGTEIVDADSWGKFQV

SEQ ID NO: 682474 - protein, 14 aa, Homo sapiens
  CDR3 for beta chain variable domain of TCR clone 341237 (TRBV12-5, TRBJ2-5)
CASGSRAHQETQYF

SEQ ID NO: 682475 - protein, 13 aa, Homo sapiens
  CDR3 for alpha chain variable domain of TCR clone 341238 (TRAV21, TRAJ20)
CAVSRLGDYKLSF

SEQ ID NO: 682476 - protein, 16 aa, Homo sapiens
  CDR3 for beta chain variable domain of TCR clone 341238 (TRBV7-3, TRBJ2-3)
CQQLFTSSLNTDTQYF

SEQ ID NO: 682477 - protein, 12 aa, Homo sapiens
  CDR3 for alpha chain variable domain of TCR clone 341239 (TRAV23/DV6, TRAJ24)
CAANDSWGKLQF

SEQ ID NO: 682478 - protein, 20 aa, Homo sapiens
  CDR3 for beta chain variable domain of TCR clone 341239 (TRBV12-4, TRBJ2-5)
CASSLSTSGGKETSTSGQAR

SEQ ID NO: 682479 - protein, 16 aa, Homo sapiens
  CDR3 for alpha chain variable domain of TCR clone 341240 (TRAV12-3, TRAJ58)
CAMTDTEETSGSRLTF

SEQ ID NO: 682480 - protein, 13 aa, Homo sapiens
  CDR3 for beta chain variable domain of TCR clone 341240 (TRBV7-3, TRBJ1-1)
CASSQDWGAEAFF

SEQ ID NO: 682481 - protein, 18 aa, Homo sapiens
  CDR3 for alpha chain variable domain of TCR clone 341241 (TRAV29/DV5, TRAJ52)
CAAGFRGAGGTSYGKLTF

SEQ ID NO: 682482 - protein, 14 aa, Homo sapiens
  CDR3 for beta chain variable domain of TCR clone 341241 (TRBV6-3, TRBJ2-1)
CASLHSAYYNEQFF

SEQ ID NO: 682483 - protein, 13 aa, Homo sapiens
  CDR3 for alpha chain variable domain of TCR clone 341242 (TRAV21, TRAJ20)
CAVGLRVDYKLSF

SEQ ID NO: 682484 - protein, 16 aa, Homo sapiens
  CDR3 for beta chain variable domain of TCR clone 341242 (TRBV19, TRBJ2-1)
CASSRAGPSSYNEQFF

SEQ ID NO: 682485 - protein, 13 aa, Homo sapiens
  CDR3 for alpha chain variable domain of TCR clone 341243 (TRAV17, TRAJ33)
CATDADSNYQLIW

SEQ ID NO: 682486 - protein, 17 aa, Homo sapiens
  CDR3 for beta chain variable domain of TCR clone 341243 (TRBV20-1, TRBJ2-3)
CSAVSPGPAGGQDTQYF

SEQ ID NO: 682487 - protein, 16 aa, Homo sapiens
  CDR3 for alpha chain variable domain of TCR clone 341244 (TRAV16, TRAJ52)
CALSSAGGTSYGKLKF

SEQ ID NO: 682488 - protein, 12 aa, Homo sapiens
  CDR3 for beta chain variable domain of TCR clone 341244 (TRBV12-4, TRBJ1-3)
CASSFSGNTIYF

SEQ ID NO: 682489 - protein, 14 aa, Homo sapiens
  CDR3 for alpha chain variable domain of TCR clone 341245 (TRAV8-3, TRAJ39)
CAVGANNAGNMLTF

SEQ ID NO: 682490 - protein, 14 aa, Homo sapiens
  CDR3 for beta chain variable domain of TCR clone 341245 (TRBV7-2, TRBJ2-2)
CASRGQGAAGELFF

SEQ ID NO: 682491 - protein, 16 aa, Homo sapiens
  CDR3 for alpha chain variable domain of TCR clone 341246 (TRAV3, TRAJ18)
CAVRDGRGSTLGRLYF

SEQ ID NO: 682492 - protein, 17 aa, Homo sapiens
  CDR3 for beta chain variable domain of TCR clone 341246 (TRBV5-1, TRBJ2-3)
CASSRIGLVYRTDTQYF

SEQ ID NO: 682493 - protein, 15 aa, Homo sapiens
  CDR3 for alpha chain variable domain of TCR clone 341247 (TRAV3, TRAJ13)
CAVRVYSGGYQKVTF

SEQ ID NO: 682494 - protein, 16 aa, Homo sapiens
  CDR3 for beta chain variable domain of TCR clone 341247 (TRBV19, TRBJ2-3)
CASSPGAASRTDTQYF

SEQ ID NO: 682495 - protein, 12 aa, Homo sapiens
  CDR3 for alpha chain variable domain of TCR clone 341248 (TRAV3, TRAJ20)
CAVRDPDYKLSF

SEQ ID NO: 682496 - protein, 16 aa, Homo sapiens
  CDR3 for beta chain variable domain of TCR clone 341248 (TRBV15, TRBJ2-7)
CATSRGRAGGTYEQYF

SEQ ID NO: 682497 - protein, 13 aa, Homo sapiens
  CDR3 for alpha chain variable domain of TCR clone 341249 (TRAV21, TRAJ27)
CAVRPGNAGKSTF

SEQ ID NO: 682498 - protein, 12 aa, Homo sapiens
  CDR3 for beta chain variable domain of TCR clone 341249 (TRBV6-3, TRBJ2-7)
CASSLTPYEQYF

SEQ ID NO: 682499 - protein, 15 aa, Homo sapiens
  CDR3 for alpha chain variable domain of TCR clone 341250 (TRAV21, TRAJ53)
CATLNSGGSNYKLTC

SEQ ID NO: 682500 - protein, 16 aa, Homo sapiens
  CDR3 for beta chain variable domain of TCR clone 341250 (TRBV20-1, TRBJ1-4)
CSAPGQGLLTNEKLFF

SEQ ID NO: 682501 - protein, 15 aa, Homo sapiens
  CDR3 for alpha chain variable domain of TCR clone 341251 (TRAV35, TRAJ40)
CAGQLGTAGTYKYIF

SEQ ID NO: 682502 - protein, 14 aa, Homo sapiens
  CDR3 for beta chain variable domain of TCR clone 341251 (TRBV7-3, TRBJ2-1)
CASGLAGGTNEQFF

SEQ ID NO: 682503 - protein, 11 aa, Homo sapiens
  CDR3 for alpha chain variable domain of TCR clone 341252 (TRAV12-3, TRAJ27)
CAMANAGKSTF

SEQ ID NO: 682504 - protein, 12 aa, Homo sapiens
  CDR3 for beta chain variable domain of TCR clone 341252 (TRBV12-4, TRBJ2-3)
CASSTLPDTQYF

SEQ ID NO: 682505 - protein, 14 aa, Homo sapiens
  CDR3 for alpha chain variable domain of TCR clone 341253 (TRAV8-6, TRAJ4)
CAVTVSGGYNKLIF

SEQ ID NO: 682506 - protein, 16 aa, Homo sapiens
  CDR3 for beta chain variable domain of TCR clone 341253 (TRBV12-4, TRBJ1-5)
CASSRPVGGSNQPQHF

SEQ ID NO: 682507 - protein, 15 aa, Homo sapiens
  CDR3 for alpha chain variable domain of TCR clone 341254 (TRAV27, TRAJ38)
CAARRNAGNNRKLIW

SEQ ID NO: 682508 - protein, 16 aa, Homo sapiens
  CDR3 for beta chain variable domain of TCR clone 341254 (TRBV7-9, TRBJ2-1)
CASSSLRQPDYNEQFF

SEQ ID NO: 682509 - protein, 18 aa, Homo sapiens
  CDR3 for alpha chain variable domain of TCR clone 341255 (TRAV29/DV5, TRAJ52)
CAAGFRGAVGTSYGKLTF

SEQ ID NO: 682510 - protein, 14 aa, Homo sapiens
  CDR3 for beta chain variable domain of TCR clone 341255 (TRBV19, TRBJ2-1)
CASPTFVLSGEQFF

SEQ ID NO: 682511 - protein, 15 aa, Homo sapiens
  CDR3 for alpha chain variable domain of TCR clone 341256 (TRAV3, TRAJ22)
CAVRDRGGSARQLTF

SEQ ID NO: 682512 - protein, 15 aa, Homo sapiens
  CDR3 for beta chain variable domain of TCR clone 341256 (TRBV11-2, TRBJ1-1)
CASSSRSSLLPSLGK

SEQ ID NO: 682513 - protein, 19 aa, Homo sapiens
  CDR3 for alpha chain variable domain of TCR clone 341257 (TRAV8-3, TRAJ4)
LSTSVLWPACSGGYNKLIF

SEQ ID NO: 682514 - protein, 13 aa, Homo sapiens
  CDR3 for beta chain variable domain of TCR clone 341257 (TRBV20-1, TRBJ1-3)
CSAGAYSGNTMYF

SEQ ID NO: 682515 - protein, 11 aa, Homo sapiens
  CDR3 for alpha chain variable domain of TCR clone 341258 (TRAV1-2, TRAJ11)
CAVRGYSTLTF

SEQ ID NO: 682516 - protein, 15 aa, Homo sapiens
  CDR3 for beta chain variable domain of TCR clone 341258 (TRBV12-4, TRBJ2-5)
CASSPPTGLQETQYF

SEQ ID NO: 682517 - protein, 13 aa, Homo sapiens
  CDR3 for alpha chain variable domain of TCR clone 341259 (TRAV27, TRAJ6)
CAGGTRGSYIPTF

SEQ ID NO: 682518 - protein, 15 aa, Homo sapiens
  CDR3 for beta chain variable domain of TCR clone 341259 (TRBV5-5, TRBJ2-7)
CPSSLAAPLSYEQYF

SEQ ID NO: 682519 - protein, 15 aa, Homo sapiens
  CDR3 for alpha chain variable domain of TCR clone 341260 (TRAV12-2, TRAJ43)
CAFDMRFGAGTRLTV

SEQ ID NO: 682520 - protein, 17 aa, Homo sapiens
  CDR3 for beta chain variable domain of TCR clone 341260 (TRBV13, TRBJ2-3)
CASSLSRVAWGRNTQYF

SEQ ID NO: 682521 - protein, 12 aa, Homo sapiens
  CDR3 for alpha chain variable domain of TCR clone 341261 (TRAV8-3, TRAJ40)
CAVTSGTYKCIF

SEQ ID NO: 682522 - protein, 14 aa, Homo sapiens
  CDR3 for beta chain variable domain of TCR clone 341261 (TRBV12-4, TRBJ2-3)
CASSGQGSTDTQYF

SEQ ID NO: 682523 - protein, 12 aa, Homo sapiens
  CDR3 for alpha chain variable domain of TCR clone 341262 (TRAV8-3, TRAJ20)
CAVGAHDYKLSF

SEQ ID NO: 682524 - protein, 16 aa, Homo sapiens
  CDR3 for beta chain variable domain of TCR clone 341262 (TRBV19, TRBJ2-2)
CASRSPGTVATGELFF

SEQ ID NO: 682525 - protein, 12 aa, Homo sapiens
  CDR3 for alpha chain variable domain of TCR clone 341263 (TRAV14/DV4, TRAJ11)
CAMSLYDSTLTF

SEQ ID NO: 682526 - protein, 15 aa, Homo sapiens
  CDR3 for beta chain variable domain of TCR clone 341263 (TRBV19, TRBJ2-1)
RASSRPGQNYNEQFF

SEQ ID NO: 682527 - protein, 17 aa, Homo sapiens
  CDR3 for alpha chain variable domain of TCR clone 341264 (TRAV4, TRAJ13)
CLVGVQGSSGGCQKVTF

SEQ ID NO: 682528 - protein, 15 aa, Homo sapiens
  CDR3 for beta chain variable domain of TCR clone 341264 (TRBV9, TRBJ1-6)
CASSVAGTGDSPLHF

SEQ ID NO: 682529 - protein, 15 aa, Homo sapiens
  CDR3 for alpha chain variable domain of TCR clone 341265 (TRAV35, TRAJ52)
CAGPRGGTSYGKLTF

SEQ ID NO: 682530 - protein, 14 aa, Homo sapiens
  CDR3 for beta chain variable domain of TCR clone 341265 (TRBV20-1, TRBJ2-7)
CSAWTALSSNEQYF

SEQ ID NO: 682531 - protein, 16 aa, Homo sapiens
  CDR3 for alpha chain variable domain of TCR clone 341266 (TRAV3, TRAJ37)
CAVRGKGSGNTGKLIF

SEQ ID NO: 682532 - protein, 13 aa, Homo sapiens
  CDR3 for beta chain variable domain of TCR clone 341266 (TRBV19, TRBJ1-2)
CASSVAGQDGYTF

SEQ ID NO: 682533 - protein, 15 aa, Homo sapiens
  CDR3 for alpha chain variable domain of TCR clone 341267 (TRAV17, TRAJ57)
CATGPSQGGSENLFF

SEQ ID NO: 682534 - protein, 16 aa, Homo sapiens
  CDR3 for beta chain variable domain of TCR clone 341267 (TRBV12-4, TRBJ1-5)
CASSRPVGGSNQPQHF

SEQ ID NO: 682535 - protein, 14 aa, Homo sapiens
  CDR3 for alpha chain variable domain of TCR clone 341268 (TRAV2, TRAJ9)
CAVEDRSGGFKTIF

SEQ ID NO: 682536 - protein, 17 aa, Homo sapiens
  CDR3 for beta chain variable domain of TCR clone 341268 (TRBV6-5, TRBJ2-7)
CASSYSFWGQGSYEQYF

SEQ ID NO: 682537 - protein, 16 aa, Homo sapiens
  CDR3 for alpha chain variable domain of TCR clone 341269 (TRAV30, TRAJ24)
CGTEIVDADSWGKFQF

SEQ ID NO: 682538 - protein, 15 aa, Homo sapiens
  CDR3 for beta chain variable domain of TCR clone 341269 (TRBV15, TRBJ2-7)
CATSSGTTTTYEQYF

SEQ ID NO: 682539 - protein, 16 aa, Homo sapiens
  CDR3 for alpha chain variable domain of TCR clone 341270 (TRAV21, TRAJ52)
CAVTKAGGTSYRKLTF

SEQ ID NO: 682540 - protein, 11 aa, Homo sapiens
  CDR3 for beta chain variable domain of TCR clone 341270 (TRBV2, TRBJ1-1)
CASREGTEAFF

SEQ ID NO: 682541 - protein, 17 aa, Homo sapiens
  CDR3 for alpha chain variable domain of TCR clone 341271 (TRAV3, TRAJ12)
CCERRDGTMDSSYKLIF

SEQ ID NO: 682542 - protein, 17 aa, Homo sapiens
  CDR3 for beta chain variable domain of TCR clone 341271 (TRBV5-5, TRBJ1-5)
CASSLKGGGEQPPILVM

SEQ ID NO: 682543 - protein, 18 aa, Homo sapiens
  CDR3 for alpha chain variable domain of TCR clone 341272 (TRAV13-1, TRAJ52)
CAAKNPNAGGTSYGKLTF

SEQ ID NO: 682544 - protein, 15 aa, Homo sapiens
  CDR3 for beta chain variable domain of TCR clone 341272 (TRBV19, TRBJ1-2)
CASSVGQVLNYGYTF

SEQ ID NO: 682545 - protein, 13 aa, Homo sapiens
  CDR3 for alpha chain variable domain of TCR clone 341273 (TRAV21, TRAJ27)
CAARPGNAGQSPF

SEQ ID NO: 682546 - protein, 14 aa, Homo sapiens
  CDR3 for beta chain variable domain of TCR clone 341273 (TRBV11-2, TRBJ2-7)
CASSLGAGAYEQYF

SEQ ID NO: 682547 - protein, 13 aa, Homo sapiens
  CDR3 for alpha chain variable domain of TCR clone 341274 (TRAV8-1, TRAJ39)
CVVANNAGNMLTF

SEQ ID NO: 682548 - protein, 15 aa, Homo sapiens
  CDR3 for beta chain variable domain of TCR clone 341274 (TRBV7-2, TRBJ2-1)
CASSLNRGAYNEQFF

SEQ ID NO: 682549 - protein, 17 aa, Homo sapiens
  CDR3 for alpha chain variable domain of TCR clone 341275 (TRAV26-2, TRAJ42)
CILRDESYGGSQGNRIF

SEQ ID NO: 682550 - protein, 15 aa, Homo sapiens
  CDR3 for beta chain variable domain of TCR clone 341275 (TRBV6-6, TRBJ2-7)
CASSYSYGGSYEQYF

SEQ ID NO: 682551 - protein, 13 aa, Homo sapiens
  CDR3 for alpha chain variable domain of TCR clone 341276 (TRAV21, TRAJ56)
CAVRTGANSKLTF

SEQ ID NO: 682552 - protein, 15 aa, Homo sapiens
  CDR3 for beta chain variable domain of TCR clone 341276 (TRBV7-9, TRBJ1-1)
CASSHRGTVNTEAFY

SEQ ID NO: 682553 - protein, 17 aa, Homo sapiens
  CDR3 for alpha chain variable domain of TCR clone 341277 (TRAV3, TRAJ6)
CAVRDGPRAGGSHIPTF

SEQ ID NO: 682554 - protein, 19 aa, Homo sapiens
  CDR3 for beta chain variable domain of TCR clone 341277 (TRBV7-2, TRBJ2-3)
CASSFLSRNWGGGTDTQYF

SEQ ID NO: 682555 - protein, 13 aa, Homo sapiens
  CDR3 for alpha chain variable domain of TCR clone 341278 (TRAV21, TRAJ37)
CAVSSGNTGKLIF

SEQ ID NO: 682556 - protein, 13 aa, Homo sapiens
  CDR3 for beta chain variable domain of TCR clone 341278 (TRBV7-9, TRBJ1-2)
CASSPSNFWGYTF

SEQ ID NO: 682557 - protein, 13 aa, Homo sapiens
  CDR3 for alpha chain variable domain of TCR clone 341279 (TRAV21, TRAJ15)
CAVCNQAGTALIF

SEQ ID NO: 682558 - protein, 16 aa, Homo sapiens
  CDR3 for beta chain variable domain of TCR clone 341279 (TRBV12-4, TRBJ1-5)
CASSRPVGGSNQHQHF

SEQ ID NO: 682559 - protein, 13 aa, Homo sapiens
  CDR3 for alpha chain variable domain of TCR clone 341280 (TRAV9-2, TRAJ53)
CALSGGSNYKLTF

SEQ ID NO: 682560 - protein, 16 aa, Homo sapiens
  CDR3 for beta chain variable domain of TCR clone 341280 (TRBV19, TRBJ2-7)
CASSTPGQASSYEQYF

SEQ ID NO: 682561 - protein, 16 aa, Homo sapiens
  CDR3 for alpha chain variable domain of TCR clone 341281 (TRAV30, TRAJ24)
CGTQIVDADSWGKFQF

SEQ ID NO: 682562 - protein, 12 aa, Homo sapiens
  CDR3 for beta chain variable domain of TCR clone 341281 (TRBV14, TRBJ2-5)
CASSQLKETQYF

SEQ ID NO: 682563 - protein, 13 aa, Homo sapiens
  CDR3 for alpha chain variable domain of TCR clone 341282 (TRAV27, TRAJ29)
CAGAHSGNIPLVF

SEQ ID NO: 682564 - protein, 14 aa, Homo sapiens
  CDR3 for beta chain variable domain of TCR clone 341282 (TRBV7-9, TRBJ2-7)
CACSIGQGAGEQYF

SEQ ID NO: 682565 - protein, 16 aa, Homo sapiens
  CDR3 for alpha chain variable domain of TCR clone 341283 (TRAV3, TRAJ10)
CAVRDMKAGGGNKLTF

SEQ ID NO: 682566 - protein, 15 aa, Homo sapiens
  CDR3 for beta chain variable domain of TCR clone 341283 (TRBV11-2, TRBJ1-6)
CASTGFGTAVSPLHV

SEQ ID NO: 682567 - protein, 13 aa, Homo sapiens
  CDR3 for alpha chain variable domain of TCR clone 341284 (TRAV29/DV5, TRAJ34)
CAARVDNTDKLIF

SEQ ID NO: 682568 - protein, 17 aa, Homo sapiens
  CDR3 for beta chain variable domain of TCR clone 341284 (TRBV7-3, TRBJ2-5)
CASSLGIGRSGSETQYF

SEQ ID NO: 682569 - protein, 12 aa, Homo sapiens
  CDR3 for alpha chain variable domain of TCR clone 341285 (TRAV12-1, TRAJ40)
CVVSSGTYKYIF

SEQ ID NO: 682570 - protein, 15 aa, Homo sapiens
  CDR3 for beta chain variable domain of TCR clone 341285 (TRBV2, TRBJ2-1)
CASSELAGSYNEQFF

SEQ ID NO: 682571 - protein, 12 aa, Homo sapiens
  CDR3 for alpha chain variable domain of TCR clone 341286 (TRAV2, TRAJ33)
CAAPDSNYQLIW

SEQ ID NO: 682572 - protein, 15 aa, Homo sapiens
  CDR3 for beta chain variable domain of TCR clone 341286 (TRBV15, TRBJ1-5)
CATSRDPVSNQPQHF

SEQ ID NO: 682573 - protein, 10 aa, Homo sapiens
  CDR3 for alpha chain variable domain of TCR clone 341287 (TRAV3, TRAJ20)
CAVRPSVTTK

SEQ ID NO: 682574 - protein, 15 aa, Homo sapiens
  CDR3 for beta chain variable domain of TCR clone 341287 (TRBV19, TRBJ2-6)
CASVRRDSGANVLTF

SEQ ID NO: 682575 - protein, 12 aa, Homo sapiens
  CDR3 for alpha chain variable domain of TCR clone 341288 (TRAV8-3, TRAJ26)
CAGDNYGQNFVF

SEQ ID NO: 682576 - protein, 18 aa, Homo sapiens
  CDR3 for beta chain variable domain of TCR clone 341288 (TRBV4-1, TRBJ2-3)
CASSHQLAGGRSTDTQYF

SEQ ID NO: 682577 - protein, 14 aa, Homo sapiens
  CDR3 for alpha chain variable domain of TCR clone 341289 (TRAV1-1, TRAJ27)
CAVIYNTNAGKSNF

SEQ ID NO: 682578 - protein, 15 aa, Homo sapiens
  CDR3 for beta chain variable domain of TCR clone 341289 (TRBV19, TRBJ1-2)
CASSVGQVLNYGYTF

SEQ ID NO: 682579 - protein, 15 aa, Homo sapiens
  CDR3 for alpha chain variable domain of TCR clone 341290 (TRAV23/DV6, TRAJ37)
CAAGEGSSNTGKLIF

SEQ ID NO: 682580 - protein, 17 aa, Homo sapiens
  CDR3 for beta chain variable domain of TCR clone 341290 (TRBV20-1, TRBJ2-7)
CGATRAGGVAGVEEQYF

SEQ ID NO: 682581 - protein, 13 aa, Homo sapiens
  CDR3 for alpha chain variable domain of TCR clone 341291 (TRAV25, TRAJ24)
CAGGTDSWGKFHF

SEQ ID NO: 682582 - protein, 16 aa, Homo sapiens
  CDR3 for beta chain variable domain of TCR clone 341291 (TRBV28, TRBJ2-3)
CASSLFTGVSTDTQYF

SEQ ID NO: 682583 - protein, 13 aa, Homo sapiens
  CDR3 for alpha chain variable domain of TCR clone 341292 (TRAV1-2, TRAJ12)
CAVSMDSSYKLIF

SEQ ID NO: 682584 - protein, 15 aa, Homo sapiens
  CDR3 for beta chain variable domain of TCR clone 341292 (TRBV27, TRBJ2-5)
CASSLIPSGRETQYF

SEQ ID NO: 682585 - protein, 13 aa, Homo sapiens
  CDR3 for alpha chain variable domain of TCR clone 341293 (TRAV8-3, TRAJ28)
CAVGAGGSYQRTF

SEQ ID NO: 682586 - protein, 15 aa, Homo sapiens
  CDR3 for beta chain variable domain of TCR clone 341293 (TRBV7-9, TRBJ1-5)
CASSQGHQPNQPQHF

SEQ ID NO: 682587 - protein, 12 aa, Homo sapiens
  CDR3 for alpha chain variable domain of TCR clone 341294 (TRAV17, TRAJ9)
CATDSRGFKTIF

SEQ ID NO: 682588 - protein, 17 aa, Homo sapiens
  CDR3 for beta chain variable domain of TCR clone 341294 (TRBV19, TRBJ2-6)
CASSSGTVFSGANVLTF

SEQ ID NO: 682589 - protein, 14 aa, Homo sapiens
  CDR3 for alpha chain variable domain of TCR clone 341295 (TRAV2, TRAJ9)
CAVEDRSGGFKTIF

SEQ ID NO: 682590 - protein, 17 aa, Homo sapiens
  CDR3 for beta chain variable domain of TCR clone 341295 (TRBV25-1, TRBJ2-7)
CASSDARVVFSSYEQYF

SEQ ID NO: 682591 - protein, 12 aa, Homo sapiens
  CDR3 for alpha chain variable domain of TCR clone 341296 (TRAV12-3, TRAJ17)
CAMTLTGNKLTL

SEQ ID NO: 682592 - protein, 11 aa, Homo sapiens
  CDR3 for beta chain variable domain of TCR clone 341296 (TRBV29-1, TRBJ2-5)
CSEDRTGTQYF

SEQ ID NO: 682593 - protein, 15 aa, Homo sapiens
  CDR3 for alpha chain variable domain of TCR clone 341297 (TRAV3, TRAJ5)
CAVRDLDTGRRALTF

SEQ ID NO: 682594 - protein, 13 aa, Homo sapiens
  CDR3 for beta chain variable domain of TCR clone 341297 (TRBV7-3, TRBJ2-1)
CQQLSGGTNEQFF

SEQ ID NO: 682595 - protein, 14 aa, Homo sapiens
  CDR3 for alpha chain variable domain of TCR clone 341298 (TRAV8-3, TRAJ27)
CAGGRNTNAGKSTF

SEQ ID NO: 682596 - protein, 15 aa, Homo sapiens
  CDR3 for beta chain variable domain of TCR clone 341298 (TRBV11-3, TRBJ2-5)
CARSLRGRVQETQYF

SEQ ID NO: 682597 - protein, 13 aa, Homo sapiens
  CDR3 for alpha chain variable domain of TCR clone 341299 (TRAV8-3, TRAJ21)
CAVGASNFNKFYF

SEQ ID NO: 682598 - protein, 16 aa, Homo sapiens
  CDR3 for beta chain variable domain of TCR clone 341299 (TRBV19, TRBJ2-1)
CASSMGGGSSYNEQFF

SEQ ID NO: 682599 - protein, 12 aa, Homo sapiens
  CDR3 for alpha chain variable domain of TCR clone 341300 (TRAV27, TRAJ41)
CAGRNSGYAPNF

SEQ ID NO: 682600 - protein, 15 aa, Homo sapiens
  CDR3 for beta chain variable domain of TCR clone 341300 (TRBV6-3, TRBJ2-7)
CASSSPGTVFYEQYF

SEQ ID NO: 682601 - protein, 13 aa, Homo sapiens
  CDR3 for alpha chain variable domain of TCR clone 341301 (TRAV38-2/DV8, TRAJ49)
CAYRSAIGNQFYF

SEQ ID NO: 682602 - protein, 18 aa, Homo sapiens
  CDR3 for beta chain variable domain of TCR clone 341301 (TRBV4-1, TRBJ1-5)
CASSQDPRGQGLNQPQHF

SEQ ID NO: 682603 - protein, 14 aa, Homo sapiens
  CDR3 for alpha chain variable domain of TCR clone 341302 (TRAV12-3, TRAJ54)
CAMSALQGAQKLVF

SEQ ID NO: 682604 - protein, 14 aa, Homo sapiens
  CDR3 for beta chain variable domain of TCR clone 341302 (TRBV7-2, TRBJ2-7)
CASRSQGAAYEQYF

SEQ ID NO: 682605 - protein, 15 aa, Homo sapiens
  CDR3 for alpha chain variable domain of TCR clone 341303 (TRAV25, TRAJ52)
CAGRPGGTSYGKLTF

SEQ ID NO: 682606 - protein, 13 aa, Homo sapiens
  CDR3 for beta chain variable domain of TCR clone 341303 (TRBV2, TRBJ1-4)
CASSELGVEKLFF

SEQ ID NO: 682607 - protein, 12 aa, Homo sapiens
  CDR3 for alpha chain variable domain of TCR clone 341304 (TRAV35, TRAJ39)
LAPNNAGNMLTF

SEQ ID NO: 682608 - protein, 15 aa, Homo sapiens
  CDR3 for beta chain variable domain of TCR clone 341304 (TRBV27, TRBJ1-5)
YASSLGQGSVQPQHF

SEQ ID NO: 682609 - protein, 17 aa, Homo sapiens
  CDR3 for alpha chain variable domain of TCR clone 341305 (TRAV3, TRAJ28)
CAVREAYSGAGSYQLTL

SEQ ID NO: 682610 - protein, 18 aa, Homo sapiens
  CDR3 for beta chain variable domain of TCR clone 341305 (TRBV27, TRBJ2-1)
CAFGNRAVGVGSKNEQFF

SEQ ID NO: 682611 - protein, 16 aa, Homo sapiens
  CDR3 for alpha chain variable domain of TCR clone 341306 (TRAV12-3, TRAJ53)
CAMSPGSGGSNYKLTF

SEQ ID NO: 682612 - protein, 13 aa, Homo sapiens
  CDR3 for beta chain variable domain of TCR clone 341306 (TRBV7-9, TRBJ2-7)
CASSLKAGQEQYF

SEQ ID NO: 682613 - protein, 16 aa, Homo sapiens
  CDR3 for alpha chain variable domain of TCR clone 341307 (TRAV35, TRAJ28)
CAGQKYSGAGCYQLTF

SEQ ID NO: 682614 - protein, 12 aa, Homo sapiens
  CDR3 for beta chain variable domain of TCR clone 341307 (TRBV11-2, TRBJ2-2)
CASSLGGGELFF

SEQ ID NO: 682615 - protein, 23 aa, Homo sapiens
  CDR3 for alpha chain variable domain of TCR clone 341308 (TRAV3, TRAJ22)
CAVRDRGGFARQLAFGSVSPLTV

SEQ ID NO: 682616 - protein, 16 aa, Homo sapiens
  CDR3 for beta chain variable domain of TCR clone 341308 (TRBV5-4, TRBJ2-3)
CASQQPGAGGSDTQYF

SEQ ID NO: 682617 - protein, 12 aa, Homo sapiens
  CDR3 for alpha chain variable domain of TCR clone 341309 (TRAV12-3, TRAJ20)
CATVRGDYKLSF

SEQ ID NO: 682618 - protein, 13 aa, Homo sapiens
  CDR3 for beta chain variable domain of TCR clone 341309 (TRBV23-1, TRBJ1-4)
CASRGKFNEKLFF

SEQ ID NO: 682619 - protein, 15 aa, Homo sapiens
  CDR3 for alpha chain variable domain of TCR clone 341310 (TRAV17, TRAJ57)
CATGPSQGGSEKLVF

SEQ ID NO: 682620 - protein, 14 aa, Homo sapiens
  CDR3 for beta chain variable domain of TCR clone 341310 (TRBV12-5, TRBJ2-5)
CASGSRTHQETQSL

SEQ ID NO: 682621 - protein, 14 aa, Homo sapiens
  CDR3 for alpha chain variable domain of TCR clone 341311 (TRAV12-2, TRAJ45)
CAVYSGGGAAGLTF

SEQ ID NO: 682622 - protein, 15 aa, Homo sapiens
  CDR3 for beta chain variable domain of TCR clone 341311 (TRBV4-1, TRBJ1-4)
CASSDTGGTNEKLFF

SEQ ID NO: 682623 - protein, 14 aa, Homo sapiens
  CDR3 for alpha chain variable domain of TCR clone 341312 (TRAV29/DV5, TRAJ34)
CAASASRETDKFIF

SEQ ID NO: 682624 - protein, 15 aa, Homo sapiens
  CDR3 for beta chain variable domain of TCR clone 341312 (TRBV7-8, TRBJ2-7)
CASSLERAGSYEQYF

SEQ ID NO: 682625 - protein, 11 aa, Homo sapiens
  CDR3 for alpha chain variable domain of TCR clone 341313 (TRAV2, TRAJ33)
CAVDSNYQLIW

SEQ ID NO: 682626 - protein, 15 aa, Homo sapiens
  CDR3 for beta chain variable domain of TCR clone 341313 (TRBV19, TRBJ2-1)
CASSIVRGEVREQSF

SEQ ID NO: 682627 - protein, 14 aa, Homo sapiens
  CDR3 for alpha chain variable domain of TCR clone 341314 (TRAV13-1, TRAJ44)
CAAKATGTASKLTF

SEQ ID NO: 682628 - protein, 22 aa, Homo sapiens
  CDR3 for beta chain variable domain of TCR clone 341314 (TRBV19, TRBJ2-1)
CASSVRDRVTGTSGRIYNEQFV

SEQ ID NO: 682629 - protein, 13 aa, Homo sapiens
  CDR3 for alpha chain variable domain of TCR clone 341315 (TRAV35, TRAJ57)
CAGSQGGSEKLVF

SEQ ID NO: 682630 - protein, 15 aa, Homo sapiens
  CDR3 for beta chain variable domain of TCR clone 341315 (TRBV11-3, TRBJ2-3)
CASLKDGREGDTQYF

SEQ ID NO: 682631 - protein, 20 aa, Homo sapiens
  CDR3 for alpha chain variable domain of TCR clone 341316 (TRAV12-3, TRAJ41)
SLFIRDSQPSDSATPEALNF

SEQ ID NO: 682632 - protein, 14 aa, Homo sapiens
  CDR3 for beta chain variable domain of TCR clone 341316 (TRBV7-2, TRBJ1-1)
CASSFLTGTTEAFF

SEQ ID NO: 682633 - protein, 18 aa, Homo sapiens
  CDR3 for alpha chain variable domain of TCR clone 341317 (TRAV8-3, TRAJ4)
WVRDPTSNDPGSYNKLIF

SEQ ID NO: 682634 - protein, 13 aa, Homo sapiens
  CDR3 for beta chain variable domain of TCR clone 341317 (TRBV20-1, TRBJ1-2)
CSATGIQGSGYTF

SEQ ID NO: 682635 - protein, 16 aa, Homo sapiens
  CDR3 for alpha chain variable domain of TCR clone 341318 (TRAV14/DV4, TRAJ20)
CAMREGRSRDDYKLSF

SEQ ID NO: 682636 - protein, 11 aa, Homo sapiens
  CDR3 for beta chain variable domain of TCR clone 341318 (TRBV29-1, TRBJ2-5)
CSEDRTGTQYF

SEQ ID NO: 682637 - protein, 14 aa, Homo sapiens
  CDR3 for alpha chain variable domain of TCR clone 341319 (TRAV29/DV5, TRAJ48)
CAAVALFGNEKLTF

SEQ ID NO: 682638 - protein, 15 aa, Homo sapiens
  CDR3 for beta chain variable domain of TCR clone 341319 (TRBV7-2, TRBJ2-1)
CASTHGTGIYNEQFF

SEQ ID NO: 682639 - protein, 14 aa, Homo sapiens
  CDR3 for alpha chain variable domain of TCR clone 341320 (TRAV12-1, TRAJ17)
CVVNYKAAGNKITF

SEQ ID NO: 682640 - protein, 17 aa, Homo sapiens
  CDR3 for beta chain variable domain of TCR clone 341320 (TRBV20-1, TRBJ2-1)
CSASSSGLAGSYNGQFF

SEQ ID NO: 682641 - protein, 18 aa, Homo sapiens
  CDR3 for alpha chain variable domain of TCR clone 341321 (TRAV13-1, TRAJ52)
CAASKRSAGGTSYGKRTF

SEQ ID NO: 682642 - protein, 12 aa, Homo sapiens
  CDR3 for beta chain variable domain of TCR clone 341321 (TRBV20-1, TRBJ2-3)
CSARVGTDTQYF

SEQ ID NO: 682643 - protein, 14 aa, Homo sapiens
  CDR3 for alpha chain variable domain of TCR clone 341322 (TRAV16, TRAJ13)
CALRRSGGYQKGTF

SEQ ID NO: 682644 - protein, 14 aa, Homo sapiens
  CDR3 for beta chain variable domain of TCR clone 341322 (TRBV2, TRBJ2-7)
CASTVGRSSYEQYF

SEQ ID NO: 682645 - protein, 13 aa, Homo sapiens
  CDR3 for alpha chain variable domain of TCR clone 341323 (TRAV3, TRAJ21)
CAVRETDFNKFYF

SEQ ID NO: 682646 - protein, 19 aa, Homo sapiens
  CDR3 for beta chain variable domain of TCR clone 341323 (TRBV5-1, TRBJ2-4)
FAPAASRLVGEWTKNIQYF

SEQ ID NO: 682647 - protein, 18 aa, Homo sapiens
  CDR3 for alpha chain variable domain of TCR clone 341324 (TRAV26-2, TRAJ54)
CILRDVEVGIQGAQTLVF

SEQ ID NO: 682648 - protein, 17 aa, Homo sapiens
  CDR3 for beta chain variable domain of TCR clone 341324 (TRBV20-1, TRBJ1-5)
CSASLSPGQGGNQPQHF

SEQ ID NO: 682649 - protein, 11 aa, Homo sapiens
  CDR3 for alpha chain variable domain of TCR clone 341325 (TRAV3, TRAJ21)
CAVGNFNKFYF

SEQ ID NO: 682650 - protein, 14 aa, Homo sapiens
  CDR3 for beta chain variable domain of TCR clone 341325 (TRBV7-2, TRBJ2-1)
CASSLGVGYNEQFF

SEQ ID NO: 682651 - protein, 13 aa, Homo sapiens
  CDR3 for alpha chain variable domain of TCR clone 341326 (TRAV30, TRAJ49)
CGTESQPVTSSIL

SEQ ID NO: 682652 - protein, 14 aa, Homo sapiens
  CDR3 for beta chain variable domain of TCR clone 341326 (TRBV20-1, TRBJ2-7)
CSAKRGRSSYEQYF

SEQ ID NO: 682653 - protein, 14 aa, Homo sapiens
  CDR3 for alpha chain variable domain of TCR clone 341327 (TRAV1-2, TRAJ16)
CAVNRFSDGQKLLF

SEQ ID NO: 682654 - protein, 16 aa, Homo sapiens
  CDR3 for beta chain variable domain of TCR clone 341327 (TRBV11-2, TRBJ2-4)
CASSQEGRGGLDIQYF

SEQ ID NO: 682655 - protein, 12 aa, Homo sapiens
  CDR3 for alpha chain variable domain of TCR clone 341328 (TRAV3, TRAJ20)
CAVRDPDYKLSF

SEQ ID NO: 682656 - protein, 13 aa, Homo sapiens
  CDR3 for beta chain variable domain of TCR clone 341328 (TRBV19, TRBJ1-2)
CASSVPEQDGYTF

SEQ ID NO: 682657 - protein, 15 aa, Homo sapiens
  CDR3 for alpha chain variable domain of TCR clone 341329 (TRAV8-2, TRAJ28)
CVVSESGAGSYQLTF

SEQ ID NO: 682658 - protein, 11 aa, Homo sapiens
  CDR3 for beta chain variable domain of TCR clone 341329 (TRBV11-2, TRBJ2-2)
CASSLPGELFF

SEQ ID NO: 682659 - protein, 15 aa, Homo sapiens
  CDR3 for alpha chain variable domain of TCR clone 341330 (TRAV12-3, TRAJ6)
CAMSATTGGSYIPTF

SEQ ID NO: 682660 - protein, 16 aa, Homo sapiens
  CDR3 for beta chain variable domain of TCR clone 341330 (TRBV19, TRBJ2-1)
CASSIGGGSSYNEQFF

SEQ ID NO: 682661 - protein, 12 aa, Homo sapiens
  CDR3 for alpha chain variable domain of TCR clone 341331 (TRAV21, TRAJ11)
CAATSGYSTLTF

SEQ ID NO: 682662 - protein, 14 aa, Homo sapiens
  CDR3 for beta chain variable domain of TCR clone 341331 (TRBV20-1, TRBJ2-7)
RSAPELAGVREQYF

SEQ ID NO: 682663 - protein, 15 aa, Homo sapiens
  CDR3 for alpha chain variable domain of TCR clone 341332 (TRAV2, TRAJ22)
CAVPSRGGSARQLTF

SEQ ID NO: 682664 - protein, 11 aa, Homo sapiens
  CDR3 for beta chain variable domain of TCR clone 341332 (TRBV19, TRBJ2-5)
CASSIKETQYF

SEQ ID NO: 682665 - protein, 13 aa, Homo sapiens
  CDR3 for alpha chain variable domain of TCR clone 341333 (TRAV8-3, TRAJ36)
CPVGATGANNLFF

SEQ ID NO: 682666 - protein, 15 aa, Homo sapiens
  CDR3 for beta chain variable domain of TCR clone 341333 (TRBV7-2, TRBJ1-2)
CASSPRAGWNYGYTF

SEQ ID NO: 682667 - protein, 11 aa, Homo sapiens
  CDR3 for alpha chain variable domain of TCR clone 341334 (TRAV12-1, TRAJ33)
CVVNMNYQLIW

SEQ ID NO: 682668 - protein, 19 aa, Homo sapiens
  CDR3 for beta chain variable domain of TCR clone 341334 (TRBV25-1, TRBJ2-2)
CAILVYRVDRGRKTGELFF

SEQ ID NO: 682669 - protein, 15 aa, Homo sapiens
  CDR3 for alpha chain variable domain of TCR clone 341335 (TRAV12-3, TRAJ27)
CAMRAYNTNAGKSTF

SEQ ID NO: 682670 - protein, 19 aa, Homo sapiens
  CDR3 for beta chain variable domain of TCR clone 341335 (TRBV28, TRBJ2-7)
CASSYSGTSRLGWVYEQYF

SEQ ID NO: 682671 - protein, 14 aa, Homo sapiens
  CDR3 for alpha chain variable domain of TCR clone 341336 (TRAV1-2, TRAJ16)
CAVNRFSDVQTLLF

SEQ ID NO: 682672 - protein, 16 aa, Homo sapiens
  CDR3 for beta chain variable domain of TCR clone 341336 (TRBV5-1, TRBJ2-2)
CASSLWDTTNTGELFF

SEQ ID NO: 682673 - protein, 16 aa, Homo sapiens
  CDR3 for alpha chain variable domain of TCR clone 341337 (TRAV3, TRAJ5)
CAVRNLMVTGGRALTF

SEQ ID NO: 682674 - protein, 16 aa, Homo sapiens
  CDR3 for beta chain variable domain of TCR clone 341337 (TRBV12-5, TRBJ2-5)
CASGPRTSGNQETQYF

SEQ ID NO: 682675 - protein, 12 aa, Homo sapiens
  CDR3 for alpha chain variable domain of TCR clone 341338 (TRAV25, TRAJ35)
CAGIGFGNVLRC

SEQ ID NO: 682676 - protein, 15 aa, Homo sapiens
  CDR3 for beta chain variable domain of TCR clone 341338 (TRBV20-1, TRBJ2-5)
CSAPPRTGFGETQYF

SEQ ID NO: 682677 - protein, 14 aa, Homo sapiens
  CDR3 for alpha chain variable domain of TCR clone 341339 (TRAV1-2, TRAJ24)
CAVLTTDSWGKFQF

SEQ ID NO: 682678 - protein, 21 aa, Homo sapiens
  CDR3 for beta chain variable domain of TCR clone 341339 (TRBV6-5, TRBJ1-3)
CASSYWEKIAQGMSSGNTVYF

SEQ ID NO: 682679 - protein, 12 aa, Homo sapiens
  CDR3 for alpha chain variable domain of TCR clone 341340 (TRAV12-3, TRAJ17)
CAMTLTGNKLTF

SEQ ID NO: 682680 - protein, 15 aa, Homo sapiens
  CDR3 for beta chain variable domain of TCR clone 341340 (TRBV20-1, TRBJ2-7)
CSARDRVPGVDEQYF

SEQ ID NO: 682681 - protein, 14 aa, Homo sapiens
  CDR3 for alpha chain variable domain of TCR clone 341341 (TRAV1-2, TRAJ8)
CAVREDTGFQKLVF

SEQ ID NO: 682682 - protein, 16 aa, Homo sapiens
  CDR3 for beta chain variable domain of TCR clone 341341 (TRBV4-1, TRBJ1-4)
CASSKDLRRGGEKLFF

SEQ ID NO: 682683 - protein, 14 aa, Homo sapiens
  CDR3 for alpha chain variable domain of TCR clone 341342 (TRAV3, TRAJ37)
CAVKESGNTGKLIF

SEQ ID NO: 682684 - protein, 14 aa, Homo sapiens
  CDR3 for beta chain variable domain of TCR clone 341342 (TRBV12-5, TRBJ2-5)
CASGSRTHQETQYF

SEQ ID NO: 682685 - protein, 11 aa, Homo sapiens
  CDR3 for alpha chain variable domain of TCR clone 341343 (TRAV13-1, TRAJ39)
CASHAGNMLTF

SEQ ID NO: 682686 - protein, 14 aa, Homo sapiens
  CDR3 for beta chain variable domain of TCR clone 341343 (TRBV7-8, TRBJ1-3)
CASSSDRVRNTIYF

SEQ ID NO: 682687 - protein, 10 aa, Homo sapiens
  CDR3 for alpha chain variable domain of TCR clone 341344 (TRAV26-1, TRAJ40)
CIAGTYKYIF

SEQ ID NO: 682688 - protein, 12 aa, Homo sapiens
  CDR3 for beta chain variable domain of TCR clone 341344 (TRBV7-9, TRBJ2-7)
CASSIKREEQYF

SEQ ID NO: 682689 - protein, 15 aa, Homo sapiens
  CDR3 for alpha chain variable domain of TCR clone 341345 (TRAV4, TRAJ39)
CHVGPNNNAGNMLTF

SEQ ID NO: 682690 - protein, 13 aa, Homo sapiens
  CDR3 for beta chain variable domain of TCR clone 341345 (TRBV11-2, TRBJ2-5)
CASSSTGEETQYF

SEQ ID NO: 682691 - protein, 16 aa, Homo sapiens
  CDR3 for alpha chain variable domain of TCR clone 341346 (TRAV20, TRAJ38)
CAVQASNAGNNRKLIW

SEQ ID NO: 682692 - protein, 14 aa, Homo sapiens
  CDR3 for beta chain variable domain of TCR clone 341346 (TRBV27, TRBJ2-7)
CASATGTERREQYF

SEQ ID NO: 682693 - protein, 13 aa, Homo sapiens
  CDR3 for alpha chain variable domain of TCR clone 341347 (TRAV36/DV7, TRAJ49)
CAGDSNTGNQFYF

SEQ ID NO: 682694 - protein, 14 aa, Homo sapiens
  CDR3 for beta chain variable domain of TCR clone 341347 (TRBV5-4, TRBJ1-1)
CASSLDSRRDEAFF

SEQ ID NO: 682695 - protein, 16 aa, Homo sapiens
  CDR3 for alpha chain variable domain of TCR clone 341348 (TRAV1-2, TRAJ10)
CAVRGVLTGGGNKLTF

SEQ ID NO: 682696 - protein, 13 aa, Homo sapiens
  CDR3 for beta chain variable domain of TCR clone 341348 (TRBV24-1, TRBJ2-2)
CATTATSTGELFF

SEQ ID NO: 682697 - protein, 15 aa, Homo sapiens
  CDR3 for alpha chain variable domain of TCR clone 341349 (TRAV8-3, TRAJ40)
CAAPSLGSGTYKYIF

SEQ ID NO: 682698 - protein, 13 aa, Homo sapiens
  CDR3 for beta chain variable domain of TCR clone 341349 (TRBV12-4, TRBJ1-2)
CASSLRQGKGYTF

SEQ ID NO: 682699 - protein, 16 aa, Homo sapiens
  CDR3 for alpha chain variable domain of TCR clone 341350 (TRAV22, TRAJ45)
CAVERGNRGGADGLTF

SEQ ID NO: 682700 - protein, 17 aa, Homo sapiens
  CDR3 for beta chain variable domain of TCR clone 341350 (TRBV20-1, TRBJ1-5)
CSAREIPQGVGNQPQHF

SEQ ID NO: 682701 - protein, 17 aa, Homo sapiens
  CDR3 for alpha chain variable domain of TCR clone 341351 (TRAV3, TRAJ42)
CAVRDRDYGGSQGNIIF

SEQ ID NO: 682702 - protein, 16 aa, Homo sapiens
  CDR3 for beta chain variable domain of TCR clone 341351 (TRBV9, TRBJ2-1)
CASSVGGGGNYNEQFF

SEQ ID NO: 682703 - protein, 13 aa, Homo sapiens
  CDR3 for alpha chain variable domain of TCR clone 341352 (TRAV3, TRAJ27)
CAVRPLGAGKSTF

SEQ ID NO: 682704 - protein, 16 aa, Homo sapiens
  CDR3 for beta chain variable domain of TCR clone 341352 (TRBV20-1, TRBJ1-1)
CSARALTQGVNTEAFF

SEQ ID NO: 682705 - protein, 15 aa, Homo sapiens
  CDR3 for alpha chain variable domain of TCR clone 341353 (TRAV14/DV4, TRAJ22)
CAMSRLSGSARQLTF

SEQ ID NO: 682706 - protein, 16 aa, Homo sapiens
  CDR3 for beta chain variable domain of TCR clone 341353 (TRBV4-2, TRBJ2-3)
CASSQELAGDTDTQYF

SEQ ID NO: 682707 - protein, 12 aa, Homo sapiens
  CDR3 for alpha chain variable domain of TCR clone 341354 (TRAV12-3, TRAJ17)
CAMTLTGNKLTF

SEQ ID NO: 682708 - protein, 15 aa, Homo sapiens
  CDR3 for beta chain variable domain of TCR clone 341354 (TRBV9, TRBJ1-6)
CASSVAGTGDSPLLF

SEQ ID NO: 682709 - protein, 14 aa, Homo sapiens
  CDR3 for alpha chain variable domain of TCR clone 341355 (TRAV20, TRAJ42)
CSVQAGGSQGNLIF

SEQ ID NO: 682710 - protein, 14 aa, Homo sapiens
  CDR3 for beta chain variable domain of TCR clone 341355 (TRBV7-3, TRBJ2-2)
CASSSGGYTGELFF

SEQ ID NO: 682711 - protein, 14 aa, Homo sapiens
  CDR3 for alpha chain variable domain of TCR clone 341356 (TRAV38-1, TRAJ29)
CAFITPSGNTPLVF

SEQ ID NO: 682712 - protein, 15 aa, Homo sapiens
  CDR3 for beta chain variable domain of TCR clone 341356 (TRBV15, TRBJ1-5)
CATSRDPVSNQPQHF

SEQ ID NO: 682713 - protein, 11 aa, Homo sapiens
  CDR3 for alpha chain variable domain of TCR clone 341357 (TRAV3, TRAJ21)
CAVGNFNKFYF

SEQ ID NO: 682714 - protein, 15 aa, Homo sapiens
  CDR3 for beta chain variable domain of TCR clone 341357 (TRBV11-2, TRBJ2-3)
CASSPGGGATDTQYF

SEQ ID NO: 682715 - protein, 14 aa, Homo sapiens
  CDR3 for alpha chain variable domain of TCR clone 341358 (TRAV8-4, TRAJ17)
CAVSEGAAGNKLTF

SEQ ID NO: 682716 - protein, 13 aa, Homo sapiens
  CDR3 for beta chain variable domain of TCR clone 341358 (TRBV19, TRBJ2-1)
CASSMYRVNGQFF

SEQ ID NO: 682717 - protein, 16 aa, Homo sapiens
  CDR3 for alpha chain variable domain of TCR clone 341359 (TRAV1-2, TRAJ10)
CSVRGVLTGGGNKLTF

SEQ ID NO: 682718 - protein, 17 aa, Homo sapiens
  CDR3 for beta chain variable domain of TCR clone 341359 (TRBV15, TRBJ1-5)
CATSRAPPGTRNQPQHF

SEQ ID NO: 682719 - protein, 15 aa, Homo sapiens
  CDR3 for alpha chain variable domain of TCR clone 341360 (TRAV13-1, TRAJ52)
CAATSPRTSYGKLTS

SEQ ID NO: 682720 - protein, 12 aa, Homo sapiens
  CDR3 for beta chain variable domain of TCR clone 341360 (TRBV7-8, TRBJ2-7)
CASSLGDREQYF

SEQ ID NO: 682721 - protein, 16 aa, Homo sapiens
  CDR3 for alpha chain variable domain of TCR clone 341361 (TRAV13-1, TRAJ48)
CSKYRESNFGNEKLNF

SEQ ID NO: 682722 - protein, 17 aa, Homo sapiens
  CDR3 for beta chain variable domain of TCR clone 341361 (TRBV28, TRBJ2-1)
CASSSARQALTYNEQFF

SEQ ID NO: 682723 - protein, 16 aa, Homo sapiens
  CDR3 for alpha chain variable domain of TCR clone 341362 (TRAV3, TRAJ37)
CAVRVKGSGNTGKLIF

SEQ ID NO: 682724 - protein, 15 aa, Homo sapiens
  CDR3 for beta chain variable domain of TCR clone 341362 (TRBV20-1, TRBJ2-1)
CSARGGTRYYNEQFF

SEQ ID NO: 682725 - protein, 13 aa, Homo sapiens
  CDR3 for alpha chain variable domain of TCR clone 341363 (TRAV27, TRAJ56)
CAGKPGANSKLTL

SEQ ID NO: 682726 - protein, 18 aa, Homo sapiens
  CDR3 for beta chain variable domain of TCR clone 341363 (TRBV11-2, TRBJ2-3)
CASSLGGASRGAPNTQYF

SEQ ID NO: 682727 - protein, 15 aa, Homo sapiens
  CDR3 for alpha chain variable domain of TCR clone 341364 (TRAV2, TRAJ15)
CAVEDREQAGTALIF

SEQ ID NO: 682728 - protein, 13 aa, Homo sapiens
  CDR3 for beta chain variable domain of TCR clone 341364 (TRBV7-9, TRBJ2-3)
CASSPGSTDTQYF

SEQ ID NO: 682729 - protein, 16 aa, Homo sapiens
  CDR3 for alpha chain variable domain of TCR clone 341365 (TRAV3, TRAJ10)
CAVRDMRAGGGNNLTF

SEQ ID NO: 682730 - protein, 13 aa, Homo sapiens
  CDR3 for beta chain variable domain of TCR clone 341365 (TRBV4-2, TRBJ1-1)
CASSQAGNTEAFF

SEQ ID NO: 682731 - protein, 10 aa, Homo sapiens
  CDR3 for alpha chain variable domain of TCR clone 341366 (TRAV23/DV6, TRAJ3)
CAATTFALGG

SEQ ID NO: 682732 - protein, 15 aa, Homo sapiens
  CDR3 for beta chain variable domain of TCR clone 341366 (TRBV19, TRBJ1-6)
CARSTQGAVGSPLHF

SEQ ID NO: 682733 - protein, 12 aa, Homo sapiens
  CDR3 for alpha chain variable domain of TCR clone 341367 (TRAV30, TRAJ31)
CGTAKHNARLMF

SEQ ID NO: 682734 - protein, 14 aa, Homo sapiens
  CDR3 for beta chain variable domain of TCR clone 341367 (TRBV12-5, TRBJ2-5)
CASGSRTHQETQYF

SEQ ID NO: 682735 - protein, 14 aa, Homo sapiens
  CDR3 for alpha chain variable domain of TCR clone 341368 (TRAV17, TRAJ17)
CATDHRAAGNKLTF

SEQ ID NO: 682736 - protein, 13 aa, Homo sapiens
  CDR3 for beta chain variable domain of TCR clone 341368 (TRBV20-1, TRBJ1-1)
CSARVGGNTEAFF

SEQ ID NO: 682737 - protein, 16 aa, Homo sapiens
  CDR3 for alpha chain variable domain of TCR clone 341369 (TRAV29/DV5, TRAJ36)
CAASAGVETGANNLFC

SEQ ID NO: 682738 - protein, 16 aa, Homo sapiens
  CDR3 for beta chain variable domain of TCR clone 341369 (TRBV5-1, TRBJ2-3)
CASSLGLAVYTDTQYF

SEQ ID NO: 682739 - protein, 12 aa, Homo sapiens
  CDR3 for alpha chain variable domain of TCR clone 341370 (TRAV13-1, TRAJ21)
CAAKEGFNKFYF

SEQ ID NO: 682740 - protein, 11 aa, Homo sapiens
  CDR3 for beta chain variable domain of TCR clone 341370 (TRBV12-4, TRBJ2-2)
CASSSAGELFF

SEQ ID NO: 682741 - protein, 14 aa, Homo sapiens
  CDR3 for alpha chain variable domain of TCR clone 341371 (TRAV12-2, TRAJ13)
CAVKKNGGYQKVTF

SEQ ID NO: 682742 - protein, 13 aa, Homo sapiens
  CDR3 for beta chain variable domain of TCR clone 341371 (TRBV10-3, TRBJ2-7)
CASKLAVNYEQYF

SEQ ID NO: 682743 - protein, 14 aa, Homo sapiens
  CDR3 for alpha chain variable domain of TCR clone 341372 (TRAV26-1, TRAJ39)
CIVRGSRAGNMLTF

SEQ ID NO: 682744 - protein, 17 aa, Homo sapiens
  CDR3 for beta chain variable domain of TCR clone 341372 (TRBV13, TRBJ2-3)
CASSLSMVAGGRNTQYF

SEQ ID NO: 682745 - protein, 12 aa, Homo sapiens
  CDR3 for alpha chain variable domain of TCR clone 341373 (TRAV12-2, TRAJ43)
CSVNVNNNDMRF

SEQ ID NO: 682746 - protein, 14 aa, Homo sapiens
  CDR3 for beta chain variable domain of TCR clone 341373 (TRBV25-1, TRBJ2-2)
CASSELGLPGELFF

SEQ ID NO: 682747 - protein, 11 aa, Homo sapiens
  CDR3 for alpha chain variable domain of TCR clone 341374 (TRAV2, TRAJ13)
CASGGYQKVTF

SEQ ID NO: 682748 - protein, 16 aa, Homo sapiens
  CDR3 for beta chain variable domain of TCR clone 341374 (TRBV11-3, TRBJ2-3)
CASSSGSGGGTDTQYF

SEQ ID NO: 682749 - protein, 16 aa, Homo sapiens
  CDR3 for alpha chain variable domain of TCR clone 341375 (TRAV30, TRAJ24)
SGTEIVDADSWGKFQF

SEQ ID NO: 682750 - protein, 12 aa, Homo sapiens
  CDR3 for beta chain variable domain of TCR clone 341375 (TRBV27, TRBJ2-1)
CASRGFYNEQFF

SEQ ID NO: 682751 - protein, 12 aa, Homo sapiens
  CDR3 for alpha chain variable domain of TCR clone 341376 (TRAV36/DV7, TRAJ54)
CAVVRGAQKLGF

SEQ ID NO: 682752 - protein, 14 aa, Homo sapiens
  CDR3 for beta chain variable domain of TCR clone 341376 (TRBV7-3, TRBJ1-1)
CASSLKGGNTEAVF

SEQ ID NO: 682753 - protein, 13 aa, Homo sapiens
  CDR3 for alpha chain variable domain of TCR clone 341377 (TRAV8-3, TRAJ44)
CAVVPGTASKLTC

SEQ ID NO: 682754 - protein, 14 aa, Homo sapiens
  CDR3 for beta chain variable domain of TCR clone 341377 (TRBV11-2, TRBJ2-3)
CASRRLARTDTQYF

SEQ ID NO: 682755 - protein, 14 aa, Homo sapiens
  CDR3 for alpha chain variable domain of TCR clone 341378 (TRAV13-1, TRAJ44)
CAANATGTASKLTF

SEQ ID NO: 682756 - protein, 17 aa, Homo sapiens
  CDR3 for beta chain variable domain of TCR clone 341378 (TRBV7-3, TRBJ2-3)
RASSLMKRMWGADTQYF

SEQ ID NO: 682757 - protein, 14 aa, Homo sapiens
  CDR3 for alpha chain variable domain of TCR clone 341379 (TRAV17, TRAJ57)
YATDASGGSEKLVF

SEQ ID NO: 682758 - protein, 14 aa, Homo sapiens
  CDR3 for beta chain variable domain of TCR clone 341379 (TRBV4-2, TRBJ2-1)
CASGLDRAYNEQFF

SEQ ID NO: 682759 - protein, 17 aa, Homo sapiens
  CDR3 for alpha chain variable domain of TCR clone 341380 (TRAV35, TRAJ52)
CAGGEDAGGTSYGKLTF

SEQ ID NO: 682760 - protein, 13 aa, Homo sapiens
  CDR3 for beta chain variable domain of TCR clone 341380 (TRBV13, TRBJ2-2)
CASSSINTGELFF

SEQ ID NO: 682761 - protein, 15 aa, Homo sapiens
  CDR3 for alpha chain variable domain of TCR clone 341381 (TRAV8-3, TRAJ45)
CASSYSGGGADGLTF

SEQ ID NO: 682762 - protein, 17 aa, Homo sapiens
  CDR3 for beta chain variable domain of TCR clone 341381 (TRBV5-1, TRBJ2-2)
CASSPRTGGMNTGELFF

SEQ ID NO: 682763 - protein, 12 aa, Homo sapiens
  CDR3 for alpha chain variable domain of TCR clone 341382 (TRAV27, TRAJ13)
CAGVRGYQKVTF

SEQ ID NO: 682764 - protein, 15 aa, Homo sapiens
  CDR3 for beta chain variable domain of TCR clone 341382 (TRBV27, TRBJ2-5)
CASSLIPSGGETQYF

SEQ ID NO: 682765 - protein, 15 aa, Homo sapiens
  CDR3 for alpha chain variable domain of TCR clone 341383 (TRAV26-1, TRAJ40)
CIVRVTTSGTYKYIF

SEQ ID NO: 682766 - protein, 12 aa, Homo sapiens
  CDR3 for beta chain variable domain of TCR clone 341383 (TRBV7-8, TRBJ2-7)
CASSLGDREQYF

SEQ ID NO: 682767 - protein, 14 aa, Homo sapiens
  CDR3 for alpha chain variable domain of TCR clone 341384 (TRAV13-1, TRAJ44)
CAAKATGTASNLTF

SEQ ID NO: 682768 - protein, 16 aa, Homo sapiens
  CDR3 for beta chain variable domain of TCR clone 341384 (TRBV7-9, TRBJ2-6)
CASSLKGPLRANVLTL

SEQ ID NO: 682769 - protein, 16 aa, Homo sapiens
  CDR3 for alpha chain variable domain of TCR clone 341385 (TRAV12-3, TRAJ50)
CAMRDPMKTSYDKVIF

SEQ ID NO: 682770 - protein, 13 aa, Homo sapiens
  CDR3 for beta chain variable domain of TCR clone 341385 (TRBV4-1, TRBJ2-3)
CASSLDFTDTHYF

SEQ ID NO: 682771 - protein, 15 aa, Homo sapiens
  CDR3 for alpha chain variable domain of TCR clone 341386 (TRAV27, TRAJ38)
CAARRNAGNNRKLTW

SEQ ID NO: 682772 - protein, 13 aa, Homo sapiens
  CDR3 for beta chain variable domain of TCR clone 341386 (TRBV12-5, TRBJ2-3)
CASGDRQSDTQYV

SEQ ID NO: 682773 - protein, 12 aa, Homo sapiens
  CDR3 for alpha chain variable domain of TCR clone 341387 (TRAV13-1, TRAJ3)
CAATGVQQCFQD

SEQ ID NO: 682774 - protein, 14 aa, Homo sapiens
  CDR3 for beta chain variable domain of TCR clone 341387 (TRBV4-1, TRBJ2-2)
CASSQAVNTGELFF

SEQ ID NO: 682775 - protein, 16 aa, Homo sapiens
  CDR3 for alpha chain variable domain of TCR clone 341388 (TRAV3, TRAJ6)
CAVRDGMGRRKLHTYI

SEQ ID NO: 682776 - protein, 15 aa, Homo sapiens
  CDR3 for beta chain variable domain of TCR clone 341388 (TRBV9, TRBJ2-1)
CVSSLAGSSYNEQFF

SEQ ID NO: 682777 - protein, 14 aa, Homo sapiens
  CDR3 for alpha chain variable domain of TCR clone 341389 (TRAV1-2, TRAJ16)
CAVNRFSDGQKLLF

SEQ ID NO: 682778 - protein, 16 aa, Homo sapiens
  CDR3 for beta chain variable domain of TCR clone 341389 (TRBV28, TRBJ2-1)
YASSSPEYPRDNEQFF

SEQ ID NO: 682779 - protein, 13 aa, Homo sapiens
  CDR3 for alpha chain variable domain of TCR clone 341390 (TRAV29/DV5, TRAJ31)
CAASRNNNARLMF

SEQ ID NO: 682780 - protein, 15 aa, Homo sapiens
  CDR3 for beta chain variable domain of TCR clone 341390 (TRBV7-2, TRBJ2-2)
CASRRPGQNTGELFF

SEQ ID NO: 682781 - protein, 17 aa, Homo sapiens
  CDR3 for alpha chain variable domain of TCR clone 341391 (TRAV13-1, TRAJ28)
CAASPPYSGAGSYQLTF

SEQ ID NO: 682782 - protein, 17 aa, Homo sapiens
  CDR3 for beta chain variable domain of TCR clone 341391 (TRBV15, TRBJ1-5)
CATSRAPPGTRNQPQHF

SEQ ID NO: 682783 - protein, 16 aa, Homo sapiens
  CDR3 for alpha chain variable domain of TCR clone 341392 (TRAV35, TRAJ28)
CAGQRYSGAGSYQLNF

SEQ ID NO: 682784 - protein, 13 aa, Homo sapiens
  CDR3 for beta chain variable domain of TCR clone 341392 (TRBV19, TRBJ1-2)
CASSQGQVYGYTF

SEQ ID NO: 682785 - protein, 23 aa, Homo sapiens
  CDR3 for alpha chain variable domain of TCR clone 341393 (TRAV8-6, TRAJ38)
CAVRNAGNNHIQNPDPALYHLRY

SEQ ID NO: 682786 - protein, 15 aa, Homo sapiens
  CDR3 for beta chain variable domain of TCR clone 341393 (TRBV4-1, TRBJ2-2)
CASSEGQGITGELFF

SEQ ID NO: 682787 - protein, 12 aa, Homo sapiens
  CDR3 for alpha chain variable domain of TCR clone 341394 (TRAV8-3, TRAJ43)
CAVGAGNNDMLL

SEQ ID NO: 682788 - protein, 14 aa, Homo sapiens
  CDR3 for beta chain variable domain of TCR clone 341394 (TRBV4-2, TRBJ1-5)
CASSRDRGNQPQHF

SEQ ID NO: 682789 - protein, 15 aa, Homo sapiens
  CDR3 for alpha chain variable domain of TCR clone 341395 (TRAV12-1, TRAJ44)
CVVFVNTGTASKLTF

SEQ ID NO: 682790 - protein, 17 aa, Homo sapiens
  CDR3 for beta chain variable domain of TCR clone 341395 (TRBV7-8, TRBJ2-6)
CASSAGTGGSGANVLTF

SEQ ID NO: 682791 - protein, 11 aa, Homo sapiens
  CDR3 for alpha chain variable domain of TCR clone 341396 (TRAV2, TRAJ33)
CAGDSNYQLIW

SEQ ID NO: 682792 - protein, 17 aa, Homo sapiens
  CDR3 for beta chain variable domain of TCR clone 341396 (TRBV20-1, TRBJ2-3)
CSARDGWNAKERDTQYF

SEQ ID NO: 682793 - protein, 12 aa, Homo sapiens
  CDR3 for alpha chain variable domain of TCR clone 341397 (TRAV6, TRAJ20)
CALDRGDYNLSF

SEQ ID NO: 682794 - protein, 13 aa, Homo sapiens
  CDR3 for beta chain variable domain of TCR clone 341397 (TRBV5-1, TRBJ1-2)
CASSFQDGYGYTF

SEQ ID NO: 682795 - protein, 13 aa, Homo sapiens
  CDR3 for alpha chain variable domain of TCR clone 341398 (TRAV1-1, TRAJ30)
CAVRSDRDDKIIF

SEQ ID NO: 682796 - protein, 15 aa, Homo sapiens
  CDR3 for beta chain variable domain of TCR clone 341398 (TRBV7-3, TRBJ2-1)
CASSPTGGGEVEQFF

SEQ ID NO: 682797 - protein, 14 aa, Homo sapiens
  CDR3 for alpha chain variable domain of TCR clone 341399 (TRAV26-1, TRAJ32)
CIAQYGGATNKLIF

SEQ ID NO: 682798 - protein, 15 aa, Homo sapiens
  CDR3 for beta chain variable domain of TCR clone 341399 (TRBV9, TRBJ1-6)
CASSVAGTGDSPLHF

SEQ ID NO: 682799 - protein, 15 aa, Homo sapiens
  CDR3 for alpha chain variable domain of TCR clone 341400 (TRAV8-4, TRAJ37)
CAVSVSPSNTGKLIF

SEQ ID NO: 682800 - protein, 15 aa, Homo sapiens
  CDR3 for beta chain variable domain of TCR clone 341400 (TRBV4-1, TRBJ2-2)
CASSEGQGITGELFF

SEQ ID NO: 682801 - protein, 17 aa, Homo sapiens
  CDR3 for alpha chain variable domain of TCR clone 341401 (TRAV3, TRAJ42)
CAVRDRDYGGSQGNLIF

SEQ ID NO: 682802 - protein, 14 aa, Homo sapiens
  CDR3 for beta chain variable domain of TCR clone 341401 (TRBV7-2, TRBJ2-7)
CASSLYPGRYEQYF

SEQ ID NO: 682803 - protein, 17 aa, Homo sapiens
  CDR3 for alpha chain variable domain of TCR clone 341402 (TRAV3, TRAJ6)
CAVRDGPRAGGSYIPTF

SEQ ID NO: 682804 - protein, 14 aa, Homo sapiens
  CDR3 for beta chain variable domain of TCR clone 341402 (TRBV7-3, TRBJ2-1)
FASSTSGGWDEQFF

SEQ ID NO: 682805 - protein, 10 aa, Homo sapiens
  CDR3 for alpha chain variable domain of TCR clone 341403 (TRAV1-2, TRAJ20)
CACNDYKLSF

SEQ ID NO: 682806 - protein, 16 aa, Homo sapiens
  CDR3 for beta chain variable domain of TCR clone 341403 (TRBV20-1, TRBJ2-1)
CSARDLKQGMNNEQCF

SEQ ID NO: 682807 - protein, 18 aa, Homo sapiens
  CDR3 for alpha chain variable domain of TCR clone 341404 (TRAV21, TRAJ52)
CAVRPPPAGGTSYGKLTF

SEQ ID NO: 682808 - protein, 14 aa, Homo sapiens
  CDR3 for beta chain variable domain of TCR clone 341404 (TRBV28, TRBJ1-1)
CASSPRTRWAEAFF

SEQ ID NO: 682809 - protein, 14 aa, Homo sapiens
  CDR3 for alpha chain variable domain of TCR clone 341405 (TRAV3, TRAJ33)
CAVRDMDSNYQLIW

SEQ ID NO: 682810 - protein, 13 aa, Homo sapiens
  CDR3 for beta chain variable domain of TCR clone 341405 (TRBV2, TRBJ2-7)
CASSVGGSGEQYF

SEQ ID NO: 682811 - protein, 15 aa, Homo sapiens
  CDR3 for alpha chain variable domain of TCR clone 341406 (TRAV38-2/DV8, TRAJ48)
CAYRSGGFGKEKLTF

SEQ ID NO: 682812 - protein, 16 aa, Homo sapiens
  CDR3 for beta chain variable domain of TCR clone 341406 (TRBV28, TRBJ2-7)
CASSPWVATGDLSQYF

SEQ ID NO: 682813 - protein, 12 aa, Homo sapiens
  CDR3 for alpha chain variable domain of TCR clone 341407 (TRAV12-2, TRAJ10)
WGVTGGGNKLTF

SEQ ID NO: 682814 - protein, 15 aa, Homo sapiens
  CDR3 for beta chain variable domain of TCR clone 341407 (TRBV15, TRBJ1-5)
CATSREQGGNQPQHF

SEQ ID NO: 682815 - protein, 15 aa, Homo sapiens
  CDR3 for alpha chain variable domain of TCR clone 341408 (TRAV3, TRAJ32)
CAVSSYGGATNKLIF

SEQ ID NO: 682816 - protein, 13 aa, Homo sapiens
  CDR3 for beta chain variable domain of TCR clone 341408 (TRBV20-1, TRBJ2-7)
CRARPSTNYEQYF

SEQ ID NO: 682817 - protein, 13 aa, Homo sapiens
  CDR3 for alpha chain variable domain of TCR clone 341409 (TRAV20, TRAJ37)
CAGCSSNTGKLIF

SEQ ID NO: 682818 - protein, 15 aa, Homo sapiens
  CDR3 for beta chain variable domain of TCR clone 341409 (TRBV11-2, TRBJ2-2)
CASSSDRVNAGELFF

SEQ ID NO: 682819 - protein, 16 aa, Homo sapiens
  CDR3 for alpha chain variable domain of TCR clone 341410 (TRAV30, TRAJ24)
CGTEIVDADSWGHFPF

SEQ ID NO: 682820 - protein, 14 aa, Homo sapiens
  CDR3 for beta chain variable domain of TCR clone 341410 (TRBV12-5, TRBJ2-5)
CASGSRTHQETQYF

SEQ ID NO: 682821 - protein, 12 aa, Homo sapiens
  CDR3 for alpha chain variable domain of TCR clone 341411 (TRAV12-2, TRAJ7)
CAVMRGNNRLAF

SEQ ID NO: 682822 - protein, 12 aa, Homo sapiens
  CDR3 for beta chain variable domain of TCR clone 341411 (TRBV7-8, TRBJ2-7)
CASSLGDREQYF

SEQ ID NO: 682823 - protein, 14 aa, Homo sapiens
  CDR3 for alpha chain variable domain of TCR clone 341412 (TRAV38-1, TRAJ45)
CASHSGGGADGLTF

SEQ ID NO: 682824 - protein, 15 aa, Homo sapiens
  CDR3 for beta chain variable domain of TCR clone 341412 (TRBV5-1, TRBJ1-2)
CASSLGQVSGRGYTF

SEQ ID NO: 682825 - protein, 17 aa, Homo sapiens
  CDR3 for alpha chain variable domain of TCR clone 341413 (TRAV3, TRAJ6)
CAVRDGPRAGGSSIPTL

SEQ ID NO: 682826 - protein, 20 aa, Homo sapiens
  CDR3 for beta chain variable domain of TCR clone 341413 (TRBV28, TRBJ2-1)
CASTPIGRSPGLAGGNEQFF

SEQ ID NO: 682827 - protein, 18 aa, Homo sapiens
  CDR3 for alpha chain variable domain of TCR clone 341414 (TRAV21, TRAJ52)
CAVRPSPAGGTGYGKLTF

SEQ ID NO: 682828 - protein, 13 aa, Homo sapiens
  CDR3 for beta chain variable domain of TCR clone 341414 (TRBV19, TRBJ1-2)
CASSVPGQDGYTF

SEQ ID NO: 682829 - protein, 14 aa, Homo sapiens
  CDR3 for alpha chain variable domain of TCR clone 341415 (TRAV8-4, TRAJ9)
CAVRINTGGFKTIF

SEQ ID NO: 682830 - protein, 15 aa, Homo sapiens
  CDR3 for beta chain variable domain of TCR clone 341415 (TRBV18, TRBJ2-2)
CASSPPVGFTGELFF

SEQ ID NO: 682831 - protein, 13 aa, Homo sapiens
  CDR3 for alpha chain variable domain of TCR clone 341416 (TRAV21, TRAJ57)
CTVTQGGSEKRVF

SEQ ID NO: 682832 - protein, 16 aa, Homo sapiens
  CDR3 for beta chain variable domain of TCR clone 341416 (TRBV29-1, TRBJ2-7)
CSVEDAEDGTAYEQYF

SEQ ID NO: 682833 - protein, 17 aa, Homo sapiens
  CDR3 for alpha chain variable domain of TCR clone 341417 (TRAV3, TRAJ13)
CAVRDMRGTGGYQKVTF

SEQ ID NO: 682834 - protein, 14 aa, Homo sapiens
  CDR3 for beta chain variable domain of TCR clone 341417 (TRBV12-5, TRBJ2-5)
CASGSRTHQETQYF

SEQ ID NO: 682835 - protein, 15 aa, Homo sapiens
  CDR3 for alpha chain variable domain of TCR clone 341418 (TRAV3, TRAJ47)
CAVRDIGEYGNKLVF

SEQ ID NO: 682836 - protein, 12 aa, Homo sapiens
  CDR3 for beta chain variable domain of TCR clone 341418 (TRBV7-3, TRBJ2-5)
CASSSPGGTQYF

SEQ ID NO: 682837 - protein, 15 aa, Homo sapiens
  CDR3 for alpha chain variable domain of TCR clone 341419 (TRAV8-1, TRAJ23)
CAVNSHYNQGGKLIF

SEQ ID NO: 682838 - protein, 15 aa, Homo sapiens
  CDR3 for beta chain variable domain of TCR clone 341419 (TRBV6-6, TRBJ2-7)
CASSYSYGGSYEQYF

SEQ ID NO: 682839 - protein, 17 aa, Homo sapiens
  CDR3 for alpha chain variable domain of TCR clone 341420 (TRAV3, TRAJ6)
CAVRDGPMAGGSYIPTF

SEQ ID NO: 682840 - protein, 12 aa, Homo sapiens
  CDR3 for beta chain variable domain of TCR clone 341420 (TRBV11-2, TRBJ2-1)
CASSPGNNEQFF

SEQ ID NO: 682841 - protein, 14 aa, Homo sapiens
  CDR3 for alpha chain variable domain of TCR clone 341421 (TRAV12-2, TRAJ32)
CAHPESGATNKLIF

SEQ ID NO: 682842 - protein, 14 aa, Homo sapiens
  CDR3 for beta chain variable domain of TCR clone 341421 (TRBV4-2, TRBJ2-3)
CASRETRAPGVQYF

SEQ ID NO: 682843 - protein, 13 aa, Homo sapiens
  CDR3 for alpha chain variable domain of TCR clone 341422 (TRAV8-6, TRAJ8)
CAVSNTGFQKLVF

SEQ ID NO: 682844 - protein, 13 aa, Homo sapiens
  CDR3 for beta chain variable domain of TCR clone 341422 (TRBV7-3, TRBJ1-1)
CASSQDWGAEAFF

SEQ ID NO: 682845 - protein, 14 aa, Homo sapiens
  CDR3 for alpha chain variable domain of TCR clone 341423 (TRAV12-2, TRAJ17)
CAVIFKAAGNELTF

SEQ ID NO: 682846 - protein, 14 aa, Homo sapiens
  CDR3 for beta chain variable domain of TCR clone 341423 (TRBV7-8, TRBJ2-5)
CASSATGGQETQYV

SEQ ID NO: 682847 - protein, 12 aa, Homo sapiens
  CDR3 for alpha chain variable domain of TCR clone 341424 (TRAV21, TRAJ49)
CAVTNTGNQFYF

SEQ ID NO: 682848 - protein, 15 aa, Homo sapiens
  CDR3 for beta chain variable domain of TCR clone 341424 (TRBV29-1, TRBJ2-7)
CSVEFFDRGSYEQYF

SEQ ID NO: 682849 - protein, 16 aa, Homo sapiens
  CDR3 for alpha chain variable domain of TCR clone 341425 (TRAV8-3, TRAJ13)
CAVCAYPSGGYQKVTF

SEQ ID NO: 682850 - protein, 14 aa, Homo sapiens
  CDR3 for beta chain variable domain of TCR clone 341425 (TRBV18, TRBJ2-5)
CASSPRASSETQYF

SEQ ID NO: 682851 - protein, 12 aa, Homo sapiens
  CDR3 for alpha chain variable domain of TCR clone 341426 (TRAV1-2, TRAJ33)
CAALDSNYQLIW

SEQ ID NO: 682852 - protein, 14 aa, Homo sapiens
  CDR3 for beta chain variable domain of TCR clone 341426 (TRBV28, TRBJ2-3)
CASRSRDSTDTQYF

SEQ ID NO: 682853 - protein, 14 aa, Homo sapiens
  CDR3 for alpha chain variable domain of TCR clone 341427 (TRAV16, TRAJ17)
CVLSGRAAGNKLTF

SEQ ID NO: 682854 - protein, 15 aa, Homo sapiens
  CDR3 for beta chain variable domain of TCR clone 341427 (TRBV3-1, TRBJ1-2)
CASSPTRLPDGGYTF

SEQ ID NO: 682855 - protein, 14 aa, Homo sapiens
  CDR3 for alpha chain variable domain of TCR clone 341428 (TRAV12-3, TRAJ9)
CAMSPNTVGFKTIF

SEQ ID NO: 682856 - protein, 12 aa, Homo sapiens
  CDR3 for beta chain variable domain of TCR clone 341428 (TRBV11-2, TRBJ2-2)
CASSLGGGELFF

SEQ ID NO: 682857 - protein, 23 aa, Homo sapiens
  CDR3 for alpha chain variable domain of TCR clone 341429 (TRAV8-4, )
CARLTAGNNHIQNPDPAVYQLRD

SEQ ID NO: 682858 - protein, 12 aa, Homo sapiens
  CDR3 for beta chain variable domain of TCR clone 341429 (TRBV6-1, TRBJ2-7)
CASSEPLYEQYF

SEQ ID NO: 682859 - protein, 12 aa, Homo sapiens
  CDR3 for alpha chain variable domain of TCR clone 341430 (TRAV13-1, TRAJ21)
CAAKEGFNKFYF

SEQ ID NO: 682860 - protein, 20 aa, Homo sapiens
  CDR3 for beta chain variable domain of TCR clone 341430 (TRBV7-8, TRBJ2-2)
CASSHLFPGPTIHITGELFF

SEQ ID NO: 682861 - protein, 12 aa, Homo sapiens
  CDR3 for alpha chain variable domain of TCR clone 341431 (TRAV21, TRAJ33)
CAKMDSNYQLIW

SEQ ID NO: 682862 - protein, 15 aa, Homo sapiens
  CDR3 for beta chain variable domain of TCR clone 341431 (TRBV9, TRBJ1-6)
CASSVAGTGDSALHF

SEQ ID NO: 682863 - protein, 10 aa, Homo sapiens
  CDR3 for alpha chain variable domain of TCR clone 341432 (TRAV1-2, TRAJ31)
CAFFRCQTHV

SEQ ID NO: 682864 - protein, 14 aa, Homo sapiens
  CDR3 for beta chain variable domain of TCR clone 341432 (TRBV7-2, TRBJ2-7)
CASRSQGAAYEQYF

SEQ ID NO: 682865 - protein, 11 aa, Homo sapiens
  CDR3 for alpha chain variable domain of TCR clone 341433 (TRAV8-6, TRAJ34)
CAVWNTDKLIF

SEQ ID NO: 682866 - protein, 18 aa, Homo sapiens
  CDR3 for beta chain variable domain of TCR clone 341433 (TRBV5-1, TRBJ2-7)
CASSYASTSSGASSTSGR

SEQ ID NO: 682867 - protein, 11 aa, Homo sapiens
  CDR3 for alpha chain variable domain of TCR clone 341434 (TRAV21, TRAJ34)
CAVTNTDKLIF

SEQ ID NO: 682868 - protein, 12 aa, Homo sapiens
  CDR3 for beta chain variable domain of TCR clone 341434 (TRBV7-9, TRBJ1-1)
CASSLVRGKAFF

SEQ ID NO: 682869 - protein, 13 aa, Homo sapiens
  CDR3 for alpha chain variable domain of TCR clone 341435 (TRAV3, TRAJ21)
CAVREPDFNKFYF

SEQ ID NO: 682870 - protein, 17 aa, Homo sapiens
  CDR3 for beta chain variable domain of TCR clone 341435 (TRBV7-3, TRBJ2-3)
CASSLMKRMRGADTQYF

SEQ ID NO: 682871 - protein, 17 aa, Homo sapiens
  CDR3 for alpha chain variable domain of TCR clone 341436 (TRAV4, TRAJ20)
CTTASWVKGNNDYKLSF

SEQ ID NO: 682872 - protein, 16 aa, Homo sapiens
  CDR3 for beta chain variable domain of TCR clone 341436 (TRBV11-2, TRBJ2-1)
CASSLLLLSSYNEQFF

SEQ ID NO: 682873 - protein, 13 aa, Homo sapiens
  CDR3 for alpha chain variable domain of TCR clone 341437 (TRAV12-1, TRAJ39)
CVALNNAGNMLTF

SEQ ID NO: 682874 - protein, 15 aa, Homo sapiens
  CDR3 for beta chain variable domain of TCR clone 341437 (TRBV14, TRBJ2-5)
CASSRRGGVQQTQYF

SEQ ID NO: 682875 - protein, 13 aa, Homo sapiens
  CDR3 for alpha chain variable domain of TCR clone 341438 (TRAV27, TRAJ41)
CAGEGNSGYALNF

SEQ ID NO: 682876 - protein, 17 aa, Homo sapiens
  CDR3 for beta chain variable domain of TCR clone 341438 (TRBV20-1, TRBJ2-1)
CSARDPLAGVWDNEQFF

SEQ ID NO: 682877 - protein, 12 aa, Homo sapiens
  CDR3 for alpha chain variable domain of TCR clone 341439 (TRAV4, TRAJ26)
CLVGDYGQNFVF

SEQ ID NO: 682878 - protein, 14 aa, Homo sapiens
  CDR3 for beta chain variable domain of TCR clone 341439 (TRBV19, TRBJ2-7)
CASSMGQGAIEQYF

SEQ ID NO: 682879 - protein, 14 aa, Homo sapiens
  CDR3 for alpha chain variable domain of TCR clone 341440 (TRAV12-3, TRAJ29)
CAMILLAGNTPLVF

SEQ ID NO: 682880 - protein, 16 aa, Homo sapiens
  CDR3 for beta chain variable domain of TCR clone 341440 (TRBV28, TRBJ2-7)
CASSSGTSGRGYEQYF

SEQ ID NO: 682881 - protein, 13 aa, Homo sapiens
  CDR3 for alpha chain variable domain of TCR clone 341441 (TRAV1-2, TRAJ9)
CAALNTGGFKTIF

SEQ ID NO: 682882 - protein, 14 aa, Homo sapiens
  CDR3 for beta chain variable domain of TCR clone 341441 (TRBV7-9, TRBJ2-5)
CASSLDTAQETQYF

SEQ ID NO: 682883 - protein, 15 aa, Homo sapiens
  CDR3 for alpha chain variable domain of TCR clone 341442 (TRAV13-1, TRAJ5)
CAAHLMDTGRRALTF

SEQ ID NO: 682884 - protein, 14 aa, Homo sapiens
  CDR3 for beta chain variable domain of TCR clone 341442 (TRBV6-1, TRBJ1-3)
CASVQGGGGNTIYF

SEQ ID NO: 682885 - protein, 13 aa, Homo sapiens
  CDR3 for alpha chain variable domain of TCR clone 341443 (TRAV12-3, TRAJ53)
CAMRGGSNYKLTF

SEQ ID NO: 682886 - protein, 15 aa, Homo sapiens
  CDR3 for beta chain variable domain of TCR clone 341443 (TRBV2, TRBJ2-1)
CATQARLVMIGEQFC

SEQ ID NO: 682887 - protein, 13 aa, Homo sapiens
  CDR3 for alpha chain variable domain of TCR clone 341444 (TRAV12-2, TRAJ42)
CAGKRGSQGNPIF

SEQ ID NO: 682888 - protein, 14 aa, Homo sapiens
  CDR3 for beta chain variable domain of TCR clone 341444 (TRBV19, TRBJ2-1)
CASPTFVLSGEQFF

SEQ ID NO: 682889 - protein, 18 aa, Homo sapiens
  CDR3 for alpha chain variable domain of TCR clone 341445 (TRAV12-1, TRAJ26)
SSVIQPPTSVPYGQNFVF

SEQ ID NO: 682890 - protein, 14 aa, Homo sapiens
  CDR3 for beta chain variable domain of TCR clone 341445 (TRBV5-4, TRBJ2-1)
CASSLDQGMNEQFF

SEQ ID NO: 682891 - protein, 19 aa, Homo sapiens
  CDR3 for alpha chain variable domain of TCR clone 341446 (TRAV38-1, TRAJ53)
CAFMKQGLDSGGSNYKLTF

SEQ ID NO: 682892 - protein, 13 aa, Homo sapiens
  CDR3 for beta chain variable domain of TCR clone 341446 (TRBV19, TRBJ2-7)
CASSPRQSYEQYF

SEQ ID NO: 682893 - protein, 12 aa, Homo sapiens
  CDR3 for alpha chain variable domain of TCR clone 341447 (TRAV27, TRAJ33)
CAGDGSNYQLIW

SEQ ID NO: 682894 - protein, 12 aa, Homo sapiens
  CDR3 for beta chain variable domain of TCR clone 341447 (TRBV10-3, TRBJ2-7)
CAHGADSGEQYF

SEQ ID NO: 682895 - protein, 16 aa, Homo sapiens
  CDR3 for alpha chain variable domain of TCR clone 341448 (TRAV30, TRAJ24)
CGTEIVDADSWGKFQF

SEQ ID NO: 682896 - protein, 12 aa, Homo sapiens
  CDR3 for beta chain variable domain of TCR clone 341448 (TRBV29-1, TRBJ2-2)
CSVDKYTGELFF

SEQ ID NO: 682897 - protein, 17 aa, Homo sapiens
  CDR3 for alpha chain variable domain of TCR clone 341449 (TRAV14/DV4, TRAJ4)
CAMREASGRGGYNKLIF

SEQ ID NO: 682898 - protein, 14 aa, Homo sapiens
  CDR3 for beta chain variable domain of TCR clone 341449 (TRBV19, TRBJ2-7)
CASSMGQGAIEQHF

SEQ ID NO: 682899 - protein, 14 aa, Homo sapiens
  CDR3 for alpha chain variable domain of TCR clone 341450 (TRAV12-1, TRAJ23)
CVVIVYNQGGKLIF

SEQ ID NO: 682900 - protein, 15 aa, Homo sapiens
  CDR3 for beta chain variable domain of TCR clone 341450 (TRBV20-1, TRBJ1-5)
CSAKPPGQGPQPKHF

SEQ ID NO: 682901 - protein, 16 aa, Homo sapiens
  CDR3 for alpha chain variable domain of TCR clone 341451 (TRAV1-2, TRAJ10)
CAVRGVLTGGGNKITF

SEQ ID NO: 682902 - protein, 13 aa, Homo sapiens
  CDR3 for beta chain variable domain of TCR clone 341451 (TRBV12-4, TRBJ1-1)
CASSPGTGFEAFF

SEQ ID NO: 682903 - protein, 13 aa, Homo sapiens
  CDR3 for alpha chain variable domain of TCR clone 341452 (TRAV12-3, TRAJ31)
CAMSANKSARLMF

SEQ ID NO: 682904 - protein, 16 aa, Homo sapiens
  CDR3 for beta chain variable domain of TCR clone 341452 (TRBV7-9, TRBJ1-2)
CASSLGFSSGEDGYTF

SEQ ID NO: 682905 - protein, 13 aa, Homo sapiens
  CDR3 for alpha chain variable domain of TCR clone 341453 (TRAV12-3, TRAJ53)
CAMRGGSNYKLTF

SEQ ID NO: 682906 - protein, 14 aa, Homo sapiens
  CDR3 for beta chain variable domain of TCR clone 341453 (TRBV7-2, TRBJ2-7)
CASSPKTSFYEQYF

SEQ ID NO: 682907 - protein, 13 aa, Homo sapiens
  CDR3 for alpha chain variable domain of TCR clone 341454 (TRAV8-4, TRAJ3)
CAVSDSGASTIIF

SEQ ID NO: 682908 - protein, 16 aa, Homo sapiens
  CDR3 for beta chain variable domain of TCR clone 341454 (TRBV7-9, TRBJ2-7)
CASSNHGGQEKYEQYF

SEQ ID NO: 682909 - protein, 15 aa, Homo sapiens
  CDR3 for alpha chain variable domain of TCR clone 341455 (TRAV13-1, TRAJ52)
CAATSPRTSYGKLTF

SEQ ID NO: 682910 - protein, 15 aa, Homo sapiens
  CDR3 for beta chain variable domain of TCR clone 341455 (TRBV4-1, TRBJ2-5)
CASSQWDLYQETQYF

SEQ ID NO: 682911 - protein, 14 aa, Homo sapiens
  CDR3 for alpha chain variable domain of TCR clone 341456 (TRAV38-1, TRAJ45)
CAYYSGGGADGLTF

SEQ ID NO: 682912 - protein, 15 aa, Homo sapiens
  CDR3 for beta chain variable domain of TCR clone 341456 (TRBV25-1, TRBJ1-4)
CASSKRIATNEKLFF

SEQ ID NO: 682913 - protein, 13 aa, Homo sapiens
  CDR3 for alpha chain variable domain of TCR clone 341457 (TRAV8-1, TRAJ43)
CAVTSYGNNDMRF

SEQ ID NO: 682914 - protein, 12 aa, Homo sapiens
  CDR3 for beta chain variable domain of TCR clone 341457 (TRBV7-8, TRBJ2-7)
CASSLGDREQYF

SEQ ID NO: 682915 - protein, 17 aa, Homo sapiens
  CDR3 for alpha chain variable domain of TCR clone 341458 (TRAV12-2, TRAJ48)
CASNERLTFGTGTRLTI

SEQ ID NO: 682916 - protein, 14 aa, Homo sapiens
  CDR3 for beta chain variable domain of TCR clone 341458 (TRBV5-1, TRBJ2-5)
CASSLAGKQETQYF

SEQ ID NO: 682917 - protein, 12 aa, Homo sapiens
  CDR3 for alpha chain variable domain of TCR clone 341459 (TRAV12-2, TRAJ16)
CAVAPDGQKLLF

SEQ ID NO: 682918 - protein, 15 aa, Homo sapiens
  CDR3 for beta chain variable domain of TCR clone 341459 (TRBV12-4, TRBJ2-1)
CASSLLATGNNEQFF

SEQ ID NO: 682919 - protein, 11 aa, Homo sapiens
  CDR3 for alpha chain variable domain of TCR clone 341460 (TRAV2, TRAJ13)
CASGGYQKVTF

SEQ ID NO: 682920 - protein, 17 aa, Homo sapiens
  CDR3 for beta chain variable domain of TCR clone 341460 (TRBV20-1, TRBJ2-7)
CSAAGTSGWGSSYEQYF

SEQ ID NO: 682921 - protein, 13 aa, Homo sapiens
  CDR3 for alpha chain variable domain of TCR clone 341461 (TRAV27, TRAJ6)
CAGGTRGSYIPTF

SEQ ID NO: 682922 - protein, 17 aa, Homo sapiens
  CDR3 for beta chain variable domain of TCR clone 341461 (TRBV6-1, TRBJ1-2)
CASSGTHSQRGNYGYTF

SEQ ID NO: 682923 - protein, 17 aa, Homo sapiens
  CDR3 for alpha chain variable domain of TCR clone 341462 (TRAV16, TRAJ58)
CITVLSNGETSGSRLTF

SEQ ID NO: 682924 - protein, 16 aa, Homo sapiens
  CDR3 for beta chain variable domain of TCR clone 341462 (TRBV11-2, TRBJ2-7)
CASSPTTGGVSYEQYF

SEQ ID NO: 682925 - protein, 17 aa, Homo sapiens
  CDR3 for alpha chain variable domain of TCR clone 341463 (TRAV3, TRAJ6)
CAVRDGPRAGGSYIPTF

SEQ ID NO: 682926 - protein, 11 aa, Homo sapiens
  CDR3 for beta chain variable domain of TCR clone 341463 (TRBV12-4, TRBJ2-3)
CAGTATDTQYF

SEQ ID NO: 682927 - protein, 15 aa, Homo sapiens
  CDR3 for alpha chain variable domain of TCR clone 341464 (TRAV27, TRAJ28)
ASTSHSGAGSYQLTF

SEQ ID NO: 682928 - protein, 17 aa, Homo sapiens
  CDR3 for beta chain variable domain of TCR clone 341464 (TRBV13, TRBJ2-3)
CASSLSRVAGGRDTQYL

SEQ ID NO: 682929 - protein, 17 aa, Homo sapiens
  CDR3 for alpha chain variable domain of TCR clone 341465 (TRAV26-2, TRAJ28)
CILRPLLIVAGSYQLTF

SEQ ID NO: 682930 - protein, 14 aa, Homo sapiens
  CDR3 for beta chain variable domain of TCR clone 341465 (TRBV7-2, TRBJ2-7)
CASSPKTSFYEKYF

SEQ ID NO: 682931 - protein, 13 aa, Homo sapiens
  CDR3 for alpha chain variable domain of TCR clone 341466 (TRAV12-1, TRAJ31)
CVVIPNNNARLMF

SEQ ID NO: 682932 - protein, 15 aa, Homo sapiens
  CDR3 for beta chain variable domain of TCR clone 341466 (TRBV6-3, TRBJ2-7)
CASSSPGTVFYEQCF

SEQ ID NO: 682933 - protein, 13 aa, Homo sapiens
  CDR3 for alpha chain variable domain of TCR clone 341467 (TRAV8-2, TRAJ34)
CVVRDRRTDKLIF

SEQ ID NO: 682934 - protein, 15 aa, Homo sapiens
  CDR3 for beta chain variable domain of TCR clone 341467 (TRBV20-1, TRBJ2-3)
CSARVVGGSTDTQYF

SEQ ID NO: 682935 - protein, 14 aa, Homo sapiens
  CDR3 for alpha chain variable domain of TCR clone 341468 (TRAV35, TRAJ33)
CSGSSQDSNYQLIL

SEQ ID NO: 682936 - protein, 15 aa, Homo sapiens
  CDR3 for beta chain variable domain of TCR clone 341468 (TRBV20-1, TRBJ2-7)
CSAESGTSGAYEQYF

SEQ ID NO: 682937 - protein, 12 aa, Homo sapiens
  CDR3 for alpha chain variable domain of TCR clone 341469 (TRAV12-1, TRAJ16)
CVVFRDGQKLLF

SEQ ID NO: 682938 - protein, 15 aa, Homo sapiens
  CDR3 for beta chain variable domain of TCR clone 341469 (TRBV2, TRBJ2-1)
CASSELAGSYNEQFF

SEQ ID NO: 682939 - protein, 12 aa, Homo sapiens
  CDR3 for alpha chain variable domain of TCR clone 341470 (TRAV26-1, TRAJ54)
CIGGWGAPKLVF

SEQ ID NO: 682940 - protein, 14 aa, Homo sapiens
  CDR3 for beta chain variable domain of TCR clone 341470 (TRBV11-2, TRBJ1-2)
CASSSGQAGDGYTF

SEQ ID NO: 682941 - protein, 14 aa, Homo sapiens
  CDR3 for alpha chain variable domain of TCR clone 341471 (TRAV8-3, TRAJ4)
CAVGAAGGYNKLLF

SEQ ID NO: 682942 - protein, 12 aa, Homo sapiens
  CDR3 for beta chain variable domain of TCR clone 341471 (TRBV19, TRBJ1-5)
CASSIAQQPQHF

SEQ ID NO: 682943 - protein, 11 aa, Homo sapiens
  CDR3 for alpha chain variable domain of TCR clone 341472 (TRAV2, TRAJ13)
CASGGYQKVTF

SEQ ID NO: 682944 - protein, 13 aa, Homo sapiens
  CDR3 for beta chain variable domain of TCR clone 341472 (TRBV20-1, TRBJ2-7)
CSATPWRRYEQYF

SEQ ID NO: 682945 - protein, 15 aa, Homo sapiens
  CDR3 for alpha chain variable domain of TCR clone 341473 (TRAV3, TRAJ5)
CAVRDRKTGRRARTF

SEQ ID NO: 682946 - protein, 12 aa, Homo sapiens
  CDR3 for beta chain variable domain of TCR clone 341473 (TRBV11-2, TRBJ2-1)
CASSPGNNEQFF

SEQ ID NO: 682947 - protein, 13 aa, Homo sapiens
  CDR3 for alpha chain variable domain of TCR clone 341474 (TRAV26-2, TRAJ43)
CILRAVNNNDMRF

SEQ ID NO: 682948 - protein, 15 aa, Homo sapiens
  CDR3 for beta chain variable domain of TCR clone 341474 (TRBV19, TRBJ1-1)
CASTSGQIQNTEAVF

SEQ ID NO: 682949 - protein, 14 aa, Homo sapiens
  CDR3 for alpha chain variable domain of TCR clone 341475 (TRAV8-6, TRAJ13)
CAGGSSGGYQKVTF

SEQ ID NO: 682950 - protein, 17 aa, Homo sapiens
  CDR3 for beta chain variable domain of TCR clone 341475 (TRBV7-8, TRBJ2-6)
CASSAGTGGAGANVLTF

SEQ ID NO: 682951 - protein, 13 aa, Homo sapiens
  CDR3 for alpha chain variable domain of TCR clone 341476 (TRAV26-1, TRAJ29)
CIVRRSGNTPLVF

SEQ ID NO: 682952 - protein, 17 aa, Homo sapiens
  CDR3 for beta chain variable domain of TCR clone 341476 (TRBV11-2, TRBJ2-1)
CASSLYPPGVEYNDQFF

SEQ ID NO: 682953 - protein, 16 aa, Homo sapiens
  CDR3 for alpha chain variable domain of TCR clone 341477 (TRAV26-1, TRAJ36)
CIVRVSCQTGANNLFF

SEQ ID NO: 682954 - protein, 13 aa, Homo sapiens
  CDR3 for beta chain variable domain of TCR clone 341477 (TRBV5-5, TRBJ1-5)
CASSLGIGGDQHF

SEQ ID NO: 682955 - protein, 12 aa, Homo sapiens
  CDR3 for alpha chain variable domain of TCR clone 341478 (TRAV21, TRAJ11)
CAVRGGNSTLTF

SEQ ID NO: 682956 - protein, 15 aa, Homo sapiens
  CDR3 for beta chain variable domain of TCR clone 341478 (TRBV6-1, TRBJ2-7)
CAISEPIAATTEQYF

SEQ ID NO: 682957 - protein, 13 aa, Homo sapiens
  CDR3 for alpha chain variable domain of TCR clone 341479 (TRAV2, TRAJ15)
CAVGSQAGTALIF

SEQ ID NO: 682958 - protein, 17 aa, Homo sapiens
  CDR3 for beta chain variable domain of TCR clone 341479 (TRBV20-1, TRBJ2-2)
CSASGSGQGGLTGELFF

SEQ ID NO: 682959 - protein, 15 aa, Homo sapiens
  CDR3 for alpha chain variable domain of TCR clone 341480 (TRAV26-1, TRAJ22)
CIVRVSFWFCKATYL

SEQ ID NO: 682960 - protein, 12 aa, Homo sapiens
  CDR3 for beta chain variable domain of TCR clone 341480 (TRBV11-2, TRBJ2-2)
CASSLGGGELFF

SEQ ID NO: 682961 - protein, 15 aa, Homo sapiens
  CDR3 for alpha chain variable domain of TCR clone 341481 (TRAV12-3, TRAJ6)
CAMSATTGGSYITTF

SEQ ID NO: 682962 - protein, 14 aa, Homo sapiens
  CDR3 for beta chain variable domain of TCR clone 341481 (TRBV7-9, TRBJ2-1)
CASSPRDSLYEQFF

SEQ ID NO: 682963 - protein, 15 aa, Homo sapiens
  CDR3 for alpha chain variable domain of TCR clone 341482 (TRAV17, TRAJ22)
CATAALQGSARQLTF

SEQ ID NO: 682964 - protein, 13 aa, Homo sapiens
  CDR3 for beta chain variable domain of TCR clone 341482 (TRBV29-1, TRBJ2-3)
CSVVPQGGDTQYF

SEQ ID NO: 682965 - protein, 13 aa, Homo sapiens
  CDR3 for alpha chain variable domain of TCR clone 341483 (TRAV3, TRAJ15)
CAVRDQAGTALRF

SEQ ID NO: 682966 - protein, 15 aa, Homo sapiens
  CDR3 for beta chain variable domain of TCR clone 341483 (TRBV11-1, TRBJ2-7)
CASSLNYGASYEQYF

SEQ ID NO: 682967 - protein, 12 aa, Homo sapiens
  CDR3 for alpha chain variable domain of TCR clone 341484 (TRAV30, TRAJ39)
CGRGNAGNMLTL

SEQ ID NO: 682968 - protein, 15 aa, Homo sapiens
  CDR3 for beta chain variable domain of TCR clone 341484 (TRBV5-1, TRBJ1-1)
CASSWTGRGNTEAFF

SEQ ID NO: 682969 - protein, 14 aa, Homo sapiens
  CDR3 for alpha chain variable domain of TCR clone 341485 (TRAV26-1, TRAJ38)
CIADNAGNNRKLIW

SEQ ID NO: 682970 - protein, 15 aa, Homo sapiens
  CDR3 for beta chain variable domain of TCR clone 341485 (TRBV9, TRBJ2-1)
CASSLAGSSYNEQCF

SEQ ID NO: 682971 - protein, 10 aa, Homo sapiens
  CDR3 for alpha chain variable domain of TCR clone 341486 (TRAV30, TRAJ20)
CGTDDYKLSF

SEQ ID NO: 682972 - protein, 14 aa, Homo sapiens
  CDR3 for beta chain variable domain of TCR clone 341486 (TRBV20-1, TRBJ1-2)
CSASEQGAVYGYTF

SEQ ID NO: 682973 - protein, 13 aa, Homo sapiens
  CDR3 for alpha chain variable domain of TCR clone 341487 (TRAV13-2, TRAJ31)
CAENLSNNARLMF

SEQ ID NO: 682974 - protein, 15 aa, Homo sapiens
  CDR3 for beta chain variable domain of TCR clone 341487 (TRBV5-4, TRBJ2-1)
CASSREGLPYNEQFF

SEQ ID NO: 682975 - protein, 14 aa, Homo sapiens
  CDR3 for alpha chain variable domain of TCR clone 341488 (TRAV14/DV4, TRAJ54)
CAMREAPGAQKLVF

SEQ ID NO: 682976 - protein, 16 aa, Homo sapiens
  CDR3 for beta chain variable domain of TCR clone 341488 (TRBV19, TRBJ2-2)
CASRSPGTGATGELFF

SEQ ID NO: 682977 - protein, 13 aa, Homo sapiens
  CDR3 for alpha chain variable domain of TCR clone 341489 (TRAV21, TRAJ57)
CAVTQGGSEKLVF

SEQ ID NO: 682978 - protein, 17 aa, Homo sapiens
  CDR3 for beta chain variable domain of TCR clone 341489 (TRBV20-1, TRBJ2-2)
CSASGSGQGGLTGELLF

SEQ ID NO: 682979 - protein, 15 aa, Homo sapiens
  CDR3 for alpha chain variable domain of TCR clone 341490 (TRAV8-3, TRAJ45)
CASSYSGGGADGLTF

SEQ ID NO: 682980 - protein, 16 aa, Homo sapiens
  CDR3 for beta chain variable domain of TCR clone 341490 (TRBV29-1, TRBJ1-2)
CSVEANRDIANYGYTF

SEQ ID NO: 682981 - protein, 18 aa, Homo sapiens
  CDR3 for alpha chain variable domain of TCR clone 341491 (TRAV21, TRAJ52)
CAVRPSPAGGTSYGKLTF

SEQ ID NO: 682982 - protein, 15 aa, Homo sapiens
  CDR3 for beta chain variable domain of TCR clone 341491 (TRBV9, TRBJ1-6)
CASSVAGTGDSHLHF

SEQ ID NO: 682983 - protein, 13 aa, Homo sapiens
  CDR3 for alpha chain variable domain of TCR clone 341492 (TRAV30, TRAJ24)
CGTVTDSWGKLQF

SEQ ID NO: 682984 - protein, 15 aa, Homo sapiens
  CDR3 for beta chain variable domain of TCR clone 341492 (TRBV9, TRBJ1-6)
SASSVAGTGDSPLHF

SEQ ID NO: 682985 - protein, 15 aa, Homo sapiens
  CDR3 for alpha chain variable domain of TCR clone 341493 (TRAV3, TRAJ16)
CAVRDGVSDGQKLLF

SEQ ID NO: 682986 - protein, 17 aa, Homo sapiens
  CDR3 for beta chain variable domain of TCR clone 341493 (TRBV6-1, TRBJ2-3)
CASRTRGLAQSTDTQYF

SEQ ID NO: 682987 - protein, 14 aa, Homo sapiens
  CDR3 for alpha chain variable domain of TCR clone 341494 (TRAV17, TRAJ57)
CATDPQGGSEKLVF

SEQ ID NO: 682988 - protein, 16 aa, Homo sapiens
  CDR3 for beta chain variable domain of TCR clone 341494 (TRBV4-1, TRBJ2-3)
CASSQRAGGLTDTQYF

SEQ ID NO: 682989 - protein, 14 aa, Homo sapiens
  CDR3 for alpha chain variable domain of TCR clone 341495 (TRAV2, TRAJ9)
CAVEDRSGGFKTIF

SEQ ID NO: 682990 - protein, 14 aa, Homo sapiens
  CDR3 for beta chain variable domain of TCR clone 341495 (TRBV7-9, TRBJ2-7)
CVSSPSGGQNEQYF

SEQ ID NO: 682991 - protein, 15 aa, Homo sapiens
  CDR3 for alpha chain variable domain of TCR clone 341496 (TRAV29/DV5, TRAJ8)
CAASGRNTGFQKLVF

SEQ ID NO: 682992 - protein, 15 aa, Homo sapiens
  CDR3 for beta chain variable domain of TCR clone 341496 (TRBV20-1, TRBJ2-1)
CSARGIGGTYNEQFF

SEQ ID NO: 682993 - protein, 14 aa, Homo sapiens
  CDR3 for alpha chain variable domain of TCR clone 341497 (TRAV8-3, TRAJ9)
CAVVFNTGGFKTIF

SEQ ID NO: 682994 - protein, 14 aa, Homo sapiens
  CDR3 for beta chain variable domain of TCR clone 341497 (TRBV7-3, TRBJ2-2)
CASSSGGYTGELFF

SEQ ID NO: 682995 - protein, 14 aa, Homo sapiens
  CDR3 for alpha chain variable domain of TCR clone 341498 (TRAV12-3, TRAJ58)
FAMSTETSGSRLTF

SEQ ID NO: 682996 - protein, 13 aa, Homo sapiens
  CDR3 for beta chain variable domain of TCR clone 341498 (TRBV27, TRBJ2-3)
CASSWGRTDTQYF

SEQ ID NO: 682997 - protein, 12 aa, Homo sapiens
  CDR3 for alpha chain variable domain of TCR clone 341499 (TRAV27, TRAJ33)
CAGDGSNYQLIG

SEQ ID NO: 682998 - protein, 15 aa, Homo sapiens
  CDR3 for beta chain variable domain of TCR clone 341499 (TRBV6-5, TRBJ2-7)
CASSYSTSGNYEQYF

SEQ ID NO: 682999 - protein, 14 aa, Homo sapiens
  CDR3 for alpha chain variable domain of TCR clone 341500 (TRAV1-2, TRAJ16)
CAVNRFSDGQKLLF

SEQ ID NO: 683000 - protein, 13 aa, Homo sapiens
  CDR3 for beta chain variable domain of TCR clone 341500 (TRBV10-3, TRBJ2-1)
CDTGLADNNEQFF

SEQ ID NO: 683001 - protein, 12 aa, Homo sapiens
  CDR3 for alpha chain variable domain of TCR clone 341501 (TRAV13-1, TRAJ21)
CAAKEGFKKFYF

SEQ ID NO: 683002 - protein, 15 aa, Homo sapiens
  CDR3 for beta chain variable domain of TCR clone 341501 (TRBV15, TRBJ1-5)
CATSRDPVSNQPQHF

SEQ ID NO: 683003 - protein, 14 aa, Homo sapiens
  CDR3 for alpha chain variable domain of TCR clone 341502 (TRAV4, TRAJ26)
CLVGPHNYGQNFVF

SEQ ID NO: 683004 - protein, 14 aa, Homo sapiens
  CDR3 for beta chain variable domain of TCR clone 341502 (TRBV7-9, TRBJ1-1)
CASTPLQSYTEAFF

SEQ ID NO: 683005 - protein, 13 aa, Homo sapiens
  CDR3 for alpha chain variable domain of TCR clone 341503 (TRAV36/DV7, TRAJ54)
CAVDIQGAQKLVF

SEQ ID NO: 683006 - protein, 16 aa, Homo sapiens
  CDR3 for beta chain variable domain of TCR clone 341503 (TRBV7-9, TRBJ1-2)
CASSLGFSSGEDGYTF

SEQ ID NO: 683007 - protein, 15 aa, Homo sapiens
  CDR3 for alpha chain variable domain of TCR clone 341504 (TRAV23/DV6, TRAJ27)
CAASKPMQGNQPLGM

SEQ ID NO: 683008 - protein, 14 aa, Homo sapiens
  CDR3 for beta chain variable domain of TCR clone 341504 (TRBV5-4, TRBJ1-1)
CASSLDSRRDEAFF

SEQ ID NO: 683009 - protein, 16 aa, Homo sapiens
  CDR3 for alpha chain variable domain of TCR clone 341505 (TRAV3, TRAJ10)
CAVRDMRAGGGNKLTF

SEQ ID NO: 683010 - protein, 13 aa, Homo sapiens
  CDR3 for beta chain variable domain of TCR clone 341505 (TRBV2, TRBJ1-1)
CASSVLMNTEAFF

SEQ ID NO: 683011 - protein, 17 aa, Homo sapiens
  CDR3 for alpha chain variable domain of TCR clone 341506 (TRAV3, TRAJ42)
CAVRDRDYGGSQGNLIF

SEQ ID NO: 683012 - protein, 17 aa, Homo sapiens
  CDR3 for beta chain variable domain of TCR clone 341506 (TRBV6-6, TRBJ2-3)
CASSLSRVAGGRNTQYF

SEQ ID NO: 683013 - protein, 15 aa, Homo sapiens
  CDR3 for alpha chain variable domain of TCR clone 341507 (TRAV26-1, TRAJ12)
IASSELMDSSYKLIF

SEQ ID NO: 683014 - protein, 11 aa, Homo sapiens
  CDR3 for beta chain variable domain of TCR clone 341507 (TRBV7-9, TRBJ2-3)
CASSPADTQYF

SEQ ID NO: 683015 - protein, 14 aa, Homo sapiens
  CDR3 for alpha chain variable domain of TCR clone 341508 (TRAV12-3, TRAJ58)
CATSTETSGPRLTF

SEQ ID NO: 683016 - protein, 13 aa, Homo sapiens
  CDR3 for beta chain variable domain of TCR clone 341508 (TRBV27, TRBJ2-3)
CASSWGRTDTQYF

SEQ ID NO: 683017 - protein, 17 aa, Homo sapiens
  CDR3 for alpha chain variable domain of TCR clone 341509 (TRAV1-1, TRAJ32)
CAVRVDELWWCYKQAHL

SEQ ID NO: 683018 - protein, 13 aa, Homo sapiens
  CDR3 for beta chain variable domain of TCR clone 341509 (TRBV19, TRBJ1-2)
CASSVPGQDGYTF

SEQ ID NO: 683019 - protein, 15 aa, Homo sapiens
  CDR3 for alpha chain variable domain of TCR clone 341510 (TRAV19, TRAJ56)
CALSSSPGANSKLTF

SEQ ID NO: 683020 - protein, 13 aa, Homo sapiens
  CDR3 for beta chain variable domain of TCR clone 341510 (TRBV20-1, TRBJ2-1)
CSAHGSSYNEQFF

SEQ ID NO: 683021 - protein, 11 aa, Homo sapiens
  CDR3 for alpha chain variable domain of TCR clone 341511 (TRAV12-1, TRAJ30)
CVVNGQDKIIF

SEQ ID NO: 683022 - protein, 15 aa, Homo sapiens
  CDR3 for beta chain variable domain of TCR clone 341511 (TRBV28, TRBJ2-5)
CASSSGRTIQDTQYF

SEQ ID NO: 683023 - protein, 15 aa, Homo sapiens
  CDR3 for alpha chain variable domain of TCR clone 341512 (TRAV34, TRAJ38)
CGADFTPGNNRKLIW

SEQ ID NO: 683024 - protein, 14 aa, Homo sapiens
  CDR3 for beta chain variable domain of TCR clone 341512 (TRBV4-2, TRBJ2-1)
CASGLDRAYNEQFF

SEQ ID NO: 683025 - protein, 12 aa, Homo sapiens
  CDR3 for alpha chain variable domain of TCR clone 341513 (TRAV25, TRAJ20)
CAGRSKDYKLSF

SEQ ID NO: 683026 - protein, 15 aa, Homo sapiens
  CDR3 for beta chain variable domain of TCR clone 341513 (TRBV7-6, TRBJ2-7)
CASSGRRDTFGEQYF

SEQ ID NO: 683027 - protein, 15 aa, Homo sapiens
  CDR3 for alpha chain variable domain of TCR clone 341514 (TRAV21, TRAJ24)
CAARSSTDSWGKLQF

SEQ ID NO: 683028 - protein, 13 aa, Homo sapiens
  CDR3 for beta chain variable domain of TCR clone 341514 (TRBV20-1, TRBJ1-2)
CSATGIQGSGYTF

SEQ ID NO: 683029 - protein, 15 aa, Homo sapiens
  CDR3 for alpha chain variable domain of TCR clone 341515 (TRAV21, TRAJ24)
CAARSSTDSRGKLQF

SEQ ID NO: 683030 - protein, 15 aa, Homo sapiens
  CDR3 for beta chain variable domain of TCR clone 341515 (TRBV5-1, TRBJ2-1)
CASSPPRAPYNEQFF

SEQ ID NO: 683031 - protein, 14 aa, Homo sapiens
  CDR3 for alpha chain variable domain of TCR clone 341516 (TRAV38-1, TRAJ40)
CALRPTSGTYKYIF

SEQ ID NO: 683032 - protein, 14 aa, Homo sapiens
  CDR3 for beta chain variable domain of TCR clone 341516 (TRBV25-1, TRBJ1-1)
CASTHLGGNPEAFF

SEQ ID NO: 683033 - protein, 11 aa, Homo sapiens
  CDR3 for alpha chain variable domain of TCR clone 341517 (TRAV2, TRAJ13)
CASGGYQKVTF

SEQ ID NO: 683034 - protein, 18 aa, Homo sapiens
  CDR3 for beta chain variable domain of TCR clone 341517 (TRBV7-3, TRBJ2-1)
CASSLTLASGRAMVSSSS

SEQ ID NO: 683035 - protein, 14 aa, Homo sapiens
  CDR3 for alpha chain variable domain of TCR clone 341518 (TRAV22, TRAJ6)
CAGVGPGGSYIPTF

SEQ ID NO: 683036 - protein, 13 aa, Homo sapiens
  CDR3 for beta chain variable domain of TCR clone 341518 (TRBV7-9, TRBJ2-7)
CASSLGLVGEQYF

SEQ ID NO: 683037 - protein, 18 aa, Homo sapiens
  CDR3 for alpha chain variable domain of TCR clone 341519 (TRAV26-1, TRAJ23)
CIVRVGLEVWNQGGKLIF

SEQ ID NO: 683038 - protein, 16 aa, Homo sapiens
  CDR3 for beta chain variable domain of TCR clone 341519 (TRBV12-4, TRBJ2-5)
CASSCFVRGRQATQYF

SEQ ID NO: 683039 - protein, 13 aa, Homo sapiens
  CDR3 for alpha chain variable domain of TCR clone 341520 (TRAV17, TRAJ5)
CAPMDTGRRELTF

SEQ ID NO: 683040 - protein, 15 aa, Homo sapiens
  CDR3 for beta chain variable domain of TCR clone 341520 (TRBV6-6, TRBJ2-5)
CASSLGGGLEETQYF

SEQ ID NO: 683041 - protein, 10 aa, Homo sapiens
  CDR3 for alpha chain variable domain of TCR clone 341521 (TRAV1-2, TRAJ34)
CAVNTDKLIF

SEQ ID NO: 683042 - protein, 12 aa, Homo sapiens
  CDR3 for beta chain variable domain of TCR clone 341521 (TRBV28, TRBJ2-3)
CASSLYRDTQYF

SEQ ID NO: 683043 - protein, 10 aa, Homo sapiens
  CDR3 for alpha chain variable domain of TCR clone 341522 (TRAV8-4, TRAJ43)
CAVSADDMRF

SEQ ID NO: 683044 - protein, 16 aa, Homo sapiens
  CDR3 for beta chain variable domain of TCR clone 341522 (TRBV4-2, TRBJ2-3)
CASSQELAGDTDTQYL

SEQ ID NO: 683045 - protein, 13 aa, Homo sapiens
  CDR3 for alpha chain variable domain of TCR clone 341523 (TRAV21, TRAJ27)
CSARPGRAGKSTF

SEQ ID NO: 683046 - protein, 14 aa, Homo sapiens
  CDR3 for beta chain variable domain of TCR clone 341523 (TRBV7-6, TRBJ2-3)
CASSLGTVTDTQYF

SEQ ID NO: 683047 - protein, 14 aa, Homo sapiens
  CDR3 for alpha chain variable domain of TCR clone 341524 (TRAV12-2, TRAJ13)
CAVKKTGGYQKVTF

SEQ ID NO: 683048 - protein, 11 aa, Homo sapiens
  CDR3 for beta chain variable domain of TCR clone 341524 (TRBV29-1, TRBJ2-5)
CSEDGTGTQYF

SEQ ID NO: 683049 - protein, 14 aa, Homo sapiens
  CDR3 for alpha chain variable domain of TCR clone 341525 (TRAV8-3, TRAJ11)
CAVGSNPGYSTLTF

SEQ ID NO: 683050 - protein, 14 aa, Homo sapiens
  CDR3 for beta chain variable domain of TCR clone 341525 (TRBV5-1, TRBJ2-7)
CASSLTSGGYEQYF

SEQ ID NO: 683051 - protein, 13 aa, Homo sapiens
  CDR3 for alpha chain variable domain of TCR clone 341526 (TRAV2, TRAJ15)
CAVASQAGTALIF

SEQ ID NO: 683052 - protein, 16 aa, Homo sapiens
  CDR3 for beta chain variable domain of TCR clone 341526 (TRBV4-1, TRBJ2-7)
CASSQEWTSGPLEQYF

SEQ ID NO: 683053 - protein, 15 aa, Homo sapiens
  CDR3 for alpha chain variable domain of TCR clone 341527 (TRAV17, TRAJ57)
CATGPSQSGSEKLVF

SEQ ID NO: 683054 - protein, 16 aa, Homo sapiens
  CDR3 for beta chain variable domain of TCR clone 341527 (TRBV12-4, TRBJ1-5)
CARSRPVGGSNQPQHF

SEQ ID NO: 683055 - protein, 12 aa, Homo sapiens
  CDR3 for alpha chain variable domain of TCR clone 341528 (TRAV13-1, TRAJ21)
CAAKEGFNKFYF

SEQ ID NO: 683056 - protein, 18 aa, Homo sapiens
  CDR3 for beta chain variable domain of TCR clone 341528 (TRBV20-1, TRBJ2-6)
FSAETTPTHGSGANVLTF

SEQ ID NO: 683057 - protein, 16 aa, Homo sapiens
  CDR3 for alpha chain variable domain of TCR clone 341529 (TRAV30, TRAJ24)
CGTEIVDADSWGKFQF

SEQ ID NO: 683058 - protein, 16 aa, Homo sapiens
  CDR3 for beta chain variable domain of TCR clone 341529 (TRBV19, TRBJ2-1)
CASSRAGPSSYNEQFF

SEQ ID NO: 683059 - protein, 13 aa, Homo sapiens
  CDR3 for alpha chain variable domain of TCR clone 341530 (TRAV26-1, TRAJ36)
CIVVGPGANNLFF

SEQ ID NO: 683060 - protein, 15 aa, Homo sapiens
  CDR3 for beta chain variable domain of TCR clone 341530 (TRBV27, TRBJ2-1)
CASSNGGGSSNEQFF

SEQ ID NO: 683061 - protein, 14 aa, Homo sapiens
  CDR3 for alpha chain variable domain of TCR clone 341531 (TRAV17, TRAJ57)
CATDASGGSEKLVF

SEQ ID NO: 683062 - protein, 20 aa, Homo sapiens
  CDR3 for beta chain variable domain of TCR clone 341531 (TRBV7-8, TRBJ2-2)
CASSHLFPGPTIHITGELFF

SEQ ID NO: 683063 - protein, 13 aa, Homo sapiens
  CDR3 for alpha chain variable domain of TCR clone 341532 (TRAV8-3, TRAJ48)
CAVVPFGNEKLAF

SEQ ID NO: 683064 - protein, 15 aa, Homo sapiens
  CDR3 for beta chain variable domain of TCR clone 341532 (TRBV11-2, TRBJ2-1)
CASSSPSTRYNEQFF

SEQ ID NO: 683065 - protein, 14 aa, Homo sapiens
  CDR3 for alpha chain variable domain of TCR clone 341533 (TRAV1-2, TRAJ8)
CPVREDTGFQKLVF

SEQ ID NO: 683066 - protein, 15 aa, Homo sapiens
  CDR3 for beta chain variable domain of TCR clone 341533 (TRBV11-3, TRBJ2-3)
CASLKDGREGDTQYF

SEQ ID NO: 683067 - protein, 12 aa, Homo sapiens
  CDR3 for alpha chain variable domain of TCR clone 341534 (TRAV25, TRAJ16)
CAGQQDGQKLLF

SEQ ID NO: 683068 - protein, 16 aa, Homo sapiens
  CDR3 for beta chain variable domain of TCR clone 341534 (TRBV19, TRBJ2-1)
CASSVQAGGSYNEQFF

SEQ ID NO: 683069 - protein, 10 aa, Homo sapiens
  CDR3 for alpha chain variable domain of TCR clone 341535 (TRAV12-1, TRAJ37)
ARGNTGKLIF

SEQ ID NO: 683070 - protein, 15 aa, Homo sapiens
  CDR3 for beta chain variable domain of TCR clone 341535 (TRBV7-2, TRBJ2-3)
CASSLEQWGTDTQYF

SEQ ID NO: 683071 - protein, 16 aa, Homo sapiens
  CDR3 for alpha chain variable domain of TCR clone 341536 (TRAV30, TRAJ24)
CGTEIVDADGWGKFQF

SEQ ID NO: 683072 - protein, 14 aa, Homo sapiens
  CDR3 for beta chain variable domain of TCR clone 341536 (TRBV12-5, TRBJ2-5)
CASGSRTHQETHHF

SEQ ID NO: 683073 - protein, 18 aa, Homo sapiens
  CDR3 for alpha chain variable domain of TCR clone 341537 (TRAV13-1, TRAJ52)
CAASKRSAGGTSYGKLNF

SEQ ID NO: 683074 - protein, 13 aa, Homo sapiens
  CDR3 for beta chain variable domain of TCR clone 341537 (TRBV12-4, TRBJ1-2)
CASSLRQGKGYTF

SEQ ID NO: 683075 - protein, 23 aa, Homo sapiens
  CDR3 for alpha chain variable domain of TCR clone 341538 (TRAV26-1, )
CIADNAGNNHIQNPDPAVYQLTD

SEQ ID NO: 683076 - protein, 16 aa, Homo sapiens
  CDR3 for beta chain variable domain of TCR clone 341538 (TRBV7-9, TRBJ1-2)
CASSLGFSSGEDGYTF

SEQ ID NO: 683077 - protein, 12 aa, Homo sapiens
  CDR3 for alpha chain variable domain of TCR clone 341539 (TRAV3, TRAJ43)
CAVRDPKNDMRF

SEQ ID NO: 683078 - protein, 15 aa, Homo sapiens
  CDR3 for beta chain variable domain of TCR clone 341539 (TRBV27, TRBJ1-5)
CASSLGTGFDQPQHF

SEQ ID NO: 683079 - protein, 14 aa, Homo sapiens
  CDR3 for alpha chain variable domain of TCR clone 341540 (TRAV12-2, TRAJ13)
CAVKKTGGYQKVTF

SEQ ID NO: 683080 - protein, 15 aa, Homo sapiens
  CDR3 for beta chain variable domain of TCR clone 341540 (TRBV20-1, TRBJ2-7)
CSARDRVSRMDEQYF

SEQ ID NO: 683081 - protein, 18 aa, Homo sapiens
  CDR3 for alpha chain variable domain of TCR clone 341541 (TRAV21, TRAJ52)
FAVRPSPAGGPSYGKLTF

SEQ ID NO: 683082 - protein, 17 aa, Homo sapiens
  CDR3 for beta chain variable domain of TCR clone 341541 (TRBV13, TRBJ2-3)
CASSLSRVAGGRNTQYF

SEQ ID NO: 683083 - protein, 10 aa, Homo sapiens
  CDR3 for alpha chain variable domain of TCR clone 341542 (TRAV12-3, TRAJ49)
CAMNDDQFYF

SEQ ID NO: 683084 - protein, 15 aa, Homo sapiens
  CDR3 for beta chain variable domain of TCR clone 341542 (TRBV27, TRBJ2-7)
CASSTAGTGSYEQYF

SEQ ID NO: 683085 - protein, 13 aa, Homo sapiens
  CDR3 for alpha chain variable domain of TCR clone 341543 (TRAV12-3, TRAJ7)
CAMSASRNNRLAF

SEQ ID NO: 683086 - protein, 14 aa, Homo sapiens
  CDR3 for beta chain variable domain of TCR clone 341543 (TRBV13, TRBJ2-5)
CASNLGPRGETQYF

SEQ ID NO: 683087 - protein, 12 aa, Homo sapiens
  CDR3 for alpha chain variable domain of TCR clone 341544 (TRAV21, TRAJ31)
CVLAGNNARLMF

SEQ ID NO: 683088 - protein, 15 aa, Homo sapiens
  CDR3 for beta chain variable domain of TCR clone 341544 (TRBV6-3, TRBJ2-7)
CASSSPGTVFYEQYF

SEQ ID NO: 683089 - protein, 12 aa, Homo sapiens
  CDR3 for alpha chain variable domain of TCR clone 341545 (TRAV8-3, TRAJ20)
CAVGANDYKLSF

SEQ ID NO: 683090 - protein, 14 aa, Homo sapiens
  CDR3 for beta chain variable domain of TCR clone 341545 (TRBV11-2, TRBJ2-1)
CASSLEFANNEQFF

SEQ ID NO: 683091 - protein, 15 aa, Homo sapiens
  CDR3 for alpha chain variable domain of TCR clone 341546 (TRAV26-1, TRAJ44)
CIVRANPGTASKLTF

SEQ ID NO: 683092 - protein, 15 aa, Homo sapiens
  CDR3 for beta chain variable domain of TCR clone 341546 (TRBV15, TRBJ1-5)
CATSREQGGNQPQHF

SEQ ID NO: 683093 - protein, 16 aa, Homo sapiens
  CDR3 for alpha chain variable domain of TCR clone 341547 (TRAV26-1, TRAJ36)
CIVRVSYQTGANNTFF

SEQ ID NO: 683094 - protein, 13 aa, Homo sapiens
  CDR3 for beta chain variable domain of TCR clone 341547 (TRBV5-5, TRBJ1-5)
CASSLGIGGDQHF

SEQ ID NO: 683095 - protein, 17 aa, Homo sapiens
  CDR3 for alpha chain variable domain of TCR clone 341548 (TRAV8-6, TRAJ58)
CAVSSWVGETSGSRLTF

SEQ ID NO: 683096 - protein, 13 aa, Homo sapiens
  CDR3 for beta chain variable domain of TCR clone 341548 (TRBV2, TRBJ2-3)
CASIIPASDTQYF

SEQ ID NO: 683097 - protein, 14 aa, Homo sapiens
  CDR3 for alpha chain variable domain of TCR clone 341549 (TRAV26-1, TRAJ39)
CIVFTNNAGNMLTF

SEQ ID NO: 683098 - protein, 15 aa, Homo sapiens
  CDR3 for beta chain variable domain of TCR clone 341549 (TRBV19, TRBJ2-4)
CASILTGLTKNIQYF

SEQ ID NO: 683099 - protein, 15 aa, Homo sapiens
  CDR3 for alpha chain variable domain of TCR clone 341550 (TRAV12-1, TRAJ35)
CVVKPGGGFGNVLHC

SEQ ID NO: 683100 - protein, 14 aa, Homo sapiens
  CDR3 for beta chain variable domain of TCR clone 341550 (TRBV12-5, TRBJ2-5)
CASGSRTHQETQYF

SEQ ID NO: 683101 - protein, 16 aa, Homo sapiens
  CDR3 for alpha chain variable domain of TCR clone 341551 (TRAV38-1, TRAJ45)
CAFMKGSGGGADGLTF

SEQ ID NO: 683102 - protein, 15 aa, Homo sapiens
  CDR3 for beta chain variable domain of TCR clone 341551 (TRBV20-1, TRBJ2-7)
CSAREGRDSRYEQYF

SEQ ID NO: 683103 - protein, 14 aa, Homo sapiens
  CDR3 for alpha chain variable domain of TCR clone 341552 (TRAV1-2, TRAJ8)
CAVREDTGFQTPVF

SEQ ID NO: 683104 - protein, 15 aa, Homo sapiens
  CDR3 for beta chain variable domain of TCR clone 341552 (TRBV6-3, TRBJ2-7)
CASSSPGTVFYEQYF

SEQ ID NO: 683105 - protein, 12 aa, Homo sapiens
  CDR3 for alpha chain variable domain of TCR clone 341553 (TRAV16, TRAJ8)
CAPLGGFQKLVF

SEQ ID NO: 683106 - protein, 16 aa, Homo sapiens
  CDR3 for beta chain variable domain of TCR clone 341553 (TRBV19, TRBJ2-2)
CASRSPGTGATGELFF

SEQ ID NO: 683107 - protein, 13 aa, Homo sapiens
  CDR3 for alpha chain variable domain of TCR clone 341554 (TRAV12-3, TRAJ50)
CARGGTSYDKVIF

SEQ ID NO: 683108 - protein, 14 aa, Homo sapiens
  CDR3 for beta chain variable domain of TCR clone 341554 (TRBV6-5, TRBJ1-1)
CASSYGQGDADAFF

SEQ ID NO: 683109 - protein, 16 aa, Homo sapiens
  CDR3 for alpha chain variable domain of TCR clone 341555 (TRAV3, TRAJ37)
CAVRGKGCGNTGKLIF

SEQ ID NO: 683110 - protein, 15 aa, Homo sapiens
  CDR3 for beta chain variable domain of TCR clone 341555 (TRBV4-1, IGHJ2)
CASSQTGGQAEKLFF

SEQ ID NO: 683111 - protein, 15 aa, Homo sapiens
  CDR3 for alpha chain variable domain of TCR clone 341556 (TRAV1-2, TRAJ6)
CAVRATSGGSYIPTF

SEQ ID NO: 683112 - protein, 13 aa, Homo sapiens
  CDR3 for beta chain variable domain of TCR clone 341556 (TRBV2, TRBJ2-7)
CASTGGSSYEQYF

SEQ ID NO: 683113 - protein, 13 aa, Homo sapiens
  CDR3 for alpha chain variable domain of TCR clone 341557 (TRAV26-1, TRAJ9)
CIATYTGGFKTIF

SEQ ID NO: 683114 - protein, 16 aa, Homo sapiens
  CDR3 for beta chain variable domain of TCR clone 341557 (TRBV18, TRBJ1-5)
CASSPSTGNSNQPQHF

SEQ ID NO: 683115 - protein, 14 aa, Homo sapiens
  CDR3 for alpha chain variable domain of TCR clone 341558 (TRAV12-2, TRAJ40)
CAVKIPSGTYKYIF

SEQ ID NO: 683116 - protein, 18 aa, Homo sapiens
  CDR3 for beta chain variable domain of TCR clone 341558 (TRBV12-4, TRBJ2-2)
CASRPFGAGALNTGELFF

SEQ ID NO: 683117 - protein, 14 aa, Homo sapiens
  CDR3 for alpha chain variable domain of TCR clone 341559 (TRAV1-2, TRAJ16)
CAVNRFSDGQKLLF

SEQ ID NO: 683118 - protein, 11 aa, Homo sapiens
  CDR3 for beta chain variable domain of TCR clone 341559 (TRBV20-1, TRBJ1-5)
QCPGWDQPQHF

SEQ ID NO: 683119 - protein, 12 aa, Homo sapiens
  CDR3 for alpha chain variable domain of TCR clone 341560 (TRAV20, TRAJ39)
CAVGNAGNMPTF

SEQ ID NO: 683120 - protein, 16 aa, Homo sapiens
  CDR3 for beta chain variable domain of TCR clone 341560 (TRBV15, TRBJ1-2)
CTTSRGPRTGGGGYTF

SEQ ID NO: 683121 - protein, 12 aa, Homo sapiens
  CDR3 for alpha chain variable domain of TCR clone 341561 (TRAV16, TRAJ10)
CSRTGGGNKLTF

SEQ ID NO: 683122 - protein, 13 aa, Homo sapiens
  CDR3 for beta chain variable domain of TCR clone 341561 (TRBV10-2, TRBJ2-7)
CASGASGGYEQYF

SEQ ID NO: 683123 - protein, 15 aa, Homo sapiens
  CDR3 for alpha chain variable domain of TCR clone 341562 (TRAV16, TRAJ16)
CALQVGGLDGQKLLF

SEQ ID NO: 683124 - protein, 15 aa, Homo sapiens
  CDR3 for beta chain variable domain of TCR clone 341562 (TRBV20-1, TRBJ2-7)
CSARDRVSGMDEQYF

SEQ ID NO: 683125 - protein, 13 aa, Homo sapiens
  CDR3 for alpha chain variable domain of TCR clone 341563 (TRAV8-3, TRAJ43)
CAMGPDNNNDMRF

SEQ ID NO: 683126 - protein, 12 aa, Homo sapiens
  CDR3 for beta chain variable domain of TCR clone 341563 (TRBV7-2, TRBJ1-6)
CASSLSSPPLHF

SEQ ID NO: 683127 - protein, 14 aa, Homo sapiens
  CDR3 for alpha chain variable domain of TCR clone 341564 (TRAV1-2, TRAJ8)
CAVREDTGFQKIVC

SEQ ID NO: 683128 - protein, 15 aa, Homo sapiens
  CDR3 for beta chain variable domain of TCR clone 341564 (TRBV6-3, TRBJ2-7)
CASSSPGTVFYEQYF

SEQ ID NO: 683129 - protein, 16 aa, Homo sapiens
  CDR3 for alpha chain variable domain of TCR clone 341565 (TRAV16, TRAJ52)
CALSAAGGTSYGKLTF

SEQ ID NO: 683130 - protein, 13 aa, Homo sapiens
  CDR3 for beta chain variable domain of TCR clone 341565 (TRBV12-4, TRBJ2-5)
CASRLAVQETQYF

SEQ ID NO: 683131 - protein, 14 aa, Homo sapiens
  CDR3 for alpha chain variable domain of TCR clone 341566 (TRAV17, TRAJ31)
CATDAEDNNDRLMF

SEQ ID NO: 683132 - protein, 13 aa, Homo sapiens
  CDR3 for beta chain variable domain of TCR clone 341566 (TRBV20-1, TRBJ2-3)
CSARLAGTDTQYF

SEQ ID NO: 683133 - protein, 11 aa, Homo sapiens
  CDR3 for alpha chain variable domain of TCR clone 341567 (TRAV36/DV7, TRAJ20)
CAANNDYKLSF

SEQ ID NO: 683134 - protein, 14 aa, Homo sapiens
  CDR3 for beta chain variable domain of TCR clone 341567 (TRBV11-2, TRBJ1-2)
CASSLGTANYGYTF

SEQ ID NO: 683135 - protein, 12 aa, Homo sapiens
  CDR3 for alpha chain variable domain of TCR clone 341568 (TRAV13-1, TRAJ8)
CAALTGFQKLVF

SEQ ID NO: 683136 - protein, 17 aa, Homo sapiens
  CDR3 for beta chain variable domain of TCR clone 341568 (TRBV7-9, TRBJ2-6)
CASSFGAGYSGANVLTF

SEQ ID NO: 683137 - protein, 14 aa, Homo sapiens
  CDR3 for alpha chain variable domain of TCR clone 341569 (TRAV36/DV7, TRAJ33)
CAVLPRDSNYPLIW

SEQ ID NO: 683138 - protein, 17 aa, Homo sapiens
  CDR3 for beta chain variable domain of TCR clone 341569 (TRBV23-1, TRBJ2-5)
CASSPTLNVIGVETQYF

SEQ ID NO: 683139 - protein, 14 aa, Homo sapiens
  CDR3 for alpha chain variable domain of TCR clone 341570 (TRAV13-1, TRAJ3)
CAATGVQQCFQDNL

SEQ ID NO: 683140 - protein, 16 aa, Homo sapiens
  CDR3 for beta chain variable domain of TCR clone 341570 (TRBV7-3, TRBJ2-2)
CASSLKRGTLSGELFF

SEQ ID NO: 683141 - protein, 15 aa, Homo sapiens
  CDR3 for alpha chain variable domain of TCR clone 341571 (TRAV8-3, TRAJ27)
CAVGPSKTNAGKSTF

SEQ ID NO: 683142 - protein, 16 aa, Homo sapiens
  CDR3 for beta chain variable domain of TCR clone 341571 (TRBV15, TRBJ2-3)
CATSRDLGIVTDTQYF

SEQ ID NO: 683143 - protein, 14 aa, Homo sapiens
  CDR3 for alpha chain variable domain of TCR clone 341572 (TRAV14/DV4, TRAJ48)
CAMRGLFGNEKLTF

SEQ ID NO: 683144 - protein, 20 aa, Homo sapiens
  CDR3 for beta chain variable domain of TCR clone 341572 (TRBV7-8, TRBJ2-2)
CASSHLFPGPTIHITGELFF

SEQ ID NO: 683145 - protein, 12 aa, Homo sapiens
  CDR3 for alpha chain variable domain of TCR clone 341573 (TRAV8-3, TRAJ43)
CAVGAGNNYMRF

SEQ ID NO: 683146 - protein, 14 aa, Homo sapiens
  CDR3 for beta chain variable domain of TCR clone 341573 (TRBV4-2, TRBJ1-5)
CASSRDRGNEPQHF

SEQ ID NO: 683147 - protein, 13 aa, Homo sapiens
  CDR3 for alpha chain variable domain of TCR clone 341574 (TRAV8-3, TRAJ15)
CAVGIQAGTALIF

SEQ ID NO: 683148 - protein, 17 aa, Homo sapiens
  CDR3 for beta chain variable domain of TCR clone 341574 (TRBV20-1, TRBJ2-1)
CSARYPLAGVSYNEQFF

SEQ ID NO: 683149 - protein, 14 aa, Homo sapiens
  CDR3 for alpha chain variable domain of TCR clone 341575 (TRAV13-1, TRAJ35)
CAASKGGFGNVLHC

SEQ ID NO: 683150 - protein, 16 aa, Homo sapiens
  CDR3 for beta chain variable domain of TCR clone 341575 (TRBV2, TRBJ1-4)
CASNLFQGATNEKLFF

SEQ ID NO: 683151 - protein, 15 aa, Homo sapiens
  CDR3 for alpha chain variable domain of TCR clone 341576 (TRAV25, TRAJ52)
CAGRPGGTGYGKLTF

SEQ ID NO: 683152 - protein, 15 aa, Homo sapiens
  CDR3 for beta chain variable domain of TCR clone 341576 (TRBV6-5, TRBJ2-1)
CASSYDAGAGNEQFF

SEQ ID NO: 683153 - protein, 14 aa, Homo sapiens
  CDR3 for alpha chain variable domain of TCR clone 341577 (TRAV12-1, TRAJ38)
CGELKAGNNRKLIW

SEQ ID NO: 683154 - protein, 13 aa, Homo sapiens
  CDR3 for beta chain variable domain of TCR clone 341577 (TRBV4-2, TRBJ1-1)
CASSRAGNTEAFF

SEQ ID NO: 683155 - protein, 18 aa, Homo sapiens
  CDR3 for alpha chain variable domain of TCR clone 341578 (TRAV26-1, TRAJ52)
CIVRVAGAGGNSYGKLTF

SEQ ID NO: 683156 - protein, 13 aa, Homo sapiens
  CDR3 for beta chain variable domain of TCR clone 341578 (TRBV7-8, TRBJ1-2)
CASSAQSYYGYTF

SEQ ID NO: 683157 - protein, 14 aa, Homo sapiens
  CDR3 for alpha chain variable domain of TCR clone 341579 (TRAV27, TRAJ22)
CAGLPSGSARQLTF

SEQ ID NO: 683158 - protein, 16 aa, Homo sapiens
  CDR3 for beta chain variable domain of TCR clone 341579 (TRBV28, TRBJ2-3)
CASSLFTGVSTDTQYF

SEQ ID NO: 683159 - protein, 19 aa, Homo sapiens
  CDR3 for alpha chain variable domain of TCR clone 341580 (TRAV21, TRAJ20)
SLVTQPPTSVLPNDHKLSF

SEQ ID NO: 683160 - protein, 16 aa, Homo sapiens
  CDR3 for beta chain variable domain of TCR clone 341580 (TRBV12-5, TRBJ2-5)
CASGPRTSGNQETQYF

SEQ ID NO: 683161 - protein, 14 aa, Homo sapiens
  CDR3 for alpha chain variable domain of TCR clone 341581 (TRAV1-2, TRAJ16)
CAVNRFSDGQKLLF

SEQ ID NO: 683162 - protein, 15 aa, Homo sapiens
  CDR3 for beta chain variable domain of TCR clone 341581 (TRBV9, TRBJ1-6)
WASSVAGTGDSPLHF

SEQ ID NO: 683163 - protein, 14 aa, Homo sapiens
  CDR3 for alpha chain variable domain of TCR clone 341582 (TRAV12-2, TRAJ53)
CRERGGGSNYKLTF

SEQ ID NO: 683164 - protein, 13 aa, Homo sapiens
  CDR3 for beta chain variable domain of TCR clone 341582 (TRBV12-4, TRBJ2-1)
CASSLSPSNEQFF

SEQ ID NO: 683165 - protein, 15 aa, Homo sapiens
  CDR3 for alpha chain variable domain of TCR clone 341583 (TRAV12-2, TRAJ53)
CAVNGGGGSNYKLTF

SEQ ID NO: 683166 - protein, 17 aa, Homo sapiens
  CDR3 for beta chain variable domain of TCR clone 341583 (TRBV7-3, TRBJ2-3)
RASSLMKKMRGADTQYF

SEQ ID NO: 683167 - protein, 23 aa, Homo sapiens
  CDR3 for alpha chain variable domain of TCR clone 341584 (TRAV8-4, TRAJ38)
CARLNAGNNHIQNPDPAVYQLRD

SEQ ID NO: 683168 - protein, 12 aa, Homo sapiens
  CDR3 for beta chain variable domain of TCR clone 341584 (TRBV6-1, TRBJ2-7)
CASSEPLYERYF

SEQ ID NO: 683169 - protein, 13 aa, Homo sapiens
  CDR3 for alpha chain variable domain of TCR clone 341585 (TRAV1-2, TRAJ9)
CAALNTGGFKTNF

SEQ ID NO: 683170 - protein, 16 aa, Homo sapiens
  CDR3 for beta chain variable domain of TCR clone 341585 (TRBV28, TRBJ1-4)
CASSSRTGAANDKLFF

SEQ ID NO: 683171 - protein, 18 aa, Homo sapiens
  CDR3 for alpha chain variable domain of TCR clone 341586 (TRAV21, TRAJ52)
CAVSPSPAGGTNYGKLTF

SEQ ID NO: 683172 - protein, 17 aa, Homo sapiens
  CDR3 for beta chain variable domain of TCR clone 341586 (TRBV13, TRBJ2-3)
CARSLYRVAGGRNTQYF

SEQ ID NO: 683173 - protein, 15 aa, Homo sapiens
  CDR3 for alpha chain variable domain of TCR clone 341587 (TRAV8-2, TRAJ24)
CVVSDRTDSWGKLQF

SEQ ID NO: 683174 - protein, 13 aa, Homo sapiens
  CDR3 for beta chain variable domain of TCR clone 341587 (TRBV7-9, TRBJ1-2)
CASSLKRNYGYTF

SEQ ID NO: 683175 - protein, 14 aa, Homo sapiens
  CDR3 for alpha chain variable domain of TCR clone 341588 (TRAV12-2, TRAJ40)
CAVKIPSGTYKYIF

SEQ ID NO: 683176 - protein, 17 aa, Homo sapiens
  CDR3 for beta chain variable domain of TCR clone 341588 (TRBV11-2, TRBJ2-1)
CASSLYPPGGEYNEQFF

SEQ ID NO: 683177 - protein, 15 aa, Homo sapiens
  CDR3 for alpha chain variable domain of TCR clone 341589 (TRAV21, TRAJ53)
CAPLNSVGSNYKLTF

SEQ ID NO: 683178 - protein, 14 aa, Homo sapiens
  CDR3 for beta chain variable domain of TCR clone 341589 (TRBV15, TRBJ1-2)
CATSRASVNYGYTF

SEQ ID NO: 683179 - protein, 18 aa, Homo sapiens
  CDR3 for alpha chain variable domain of TCR clone 341590 (TRAV13-1, TRAJ52)
CAARNPNAGCTSYGKLTF

SEQ ID NO: 683180 - protein, 15 aa, Homo sapiens
  CDR3 for beta chain variable domain of TCR clone 341590 (TRBV6-1, TRBJ2-3)
CASSERGGITDTQYF

SEQ ID NO: 683181 - protein, 13 aa, Homo sapiens
  CDR3 for alpha chain variable domain of TCR clone 341591 (TRAV1-1, TRAJ38)
CASNAGNNRKLIW

SEQ ID NO: 683182 - protein, 14 aa, Homo sapiens
  CDR3 for beta chain variable domain of TCR clone 341591 (TRBV15, TRBJ2-1)
CATSGVEDYNAQFF

SEQ ID NO: 683183 - protein, 13 aa, Homo sapiens
  CDR3 for alpha chain variable domain of TCR clone 341592 (TRAV17, TRAJ5)
CALRGPGRRALTF

SEQ ID NO: 683184 - protein, 13 aa, Homo sapiens
  CDR3 for beta chain variable domain of TCR clone 341592 (TRBV6-1, TRBJ1-1)
CASSRQGNTEAFF

SEQ ID NO: 683185 - protein, 14 aa, Homo sapiens
  CDR3 for alpha chain variable domain of TCR clone 341593 (TRAV1-2, TRAJ8)
CAVREDTGFQKLVF

SEQ ID NO: 683186 - protein, 15 aa, Homo sapiens
  CDR3 for beta chain variable domain of TCR clone 341593 (TRBV11-3, TRBJ2-3)
CASLKDGRDGDTQYF

SEQ ID NO: 683187 - protein, 12 aa, Homo sapiens
  CDR3 for alpha chain variable domain of TCR clone 341594 (TRAV13-1, TRAJ21)
CAAKEGFNKFYF

SEQ ID NO: 683188 - protein, 15 aa, Homo sapiens
  CDR3 for beta chain variable domain of TCR clone 341594 (TRBV28, TRBJ1-4)
CASSASGVPNEKLFF

SEQ ID NO: 683189 - protein, 12 aa, Homo sapiens
  CDR3 for alpha chain variable domain of TCR clone 341595 (TRAV12-2, TRAJ52)
IGGGTSYGKLTF

SEQ ID NO: 683190 - protein, 13 aa, Homo sapiens
  CDR3 for beta chain variable domain of TCR clone 341595 (TRBV12-4, TRBJ1-1)
YASSPGTGFEAFF

SEQ ID NO: 683191 - protein, 15 aa, Homo sapiens
  CDR3 for alpha chain variable domain of TCR clone 341596 (TRAV21, TRAJ24)
CAARSSTDSWGKLQF

SEQ ID NO: 683192 - protein, 13 aa, Homo sapiens
  CDR3 for beta chain variable domain of TCR clone 341596 (TRBV7-9, TRBJ2-1)
CASSWESYNEQFF

SEQ ID NO: 683193 - protein, 14 aa, Homo sapiens
  CDR3 for alpha chain variable domain of TCR clone 341597 (TRAV17, TRAJ57)
CATDPQGGSEKLVF

SEQ ID NO: 683194 - protein, 16 aa, Homo sapiens
  CDR3 for beta chain variable domain of TCR clone 341597 (TRBV4-2, TRBJ1-4)
CASSQARGPTNEKLFF

SEQ ID NO: 683195 - protein, 19 aa, Homo sapiens
  CDR3 for alpha chain variable domain of TCR clone 341598 (TRAV4, TRAJ13)
CIVGVQGSSGVTGKLPLEL

SEQ ID NO: 683196 - protein, 18 aa, Homo sapiens
  CDR3 for beta chain variable domain of TCR clone 341598 (TRBV15, TRBJ2-3)
CATSRDGARSWDTDTQYF

SEQ ID NO: 683197 - protein, 14 aa, Homo sapiens
  CDR3 for alpha chain variable domain of TCR clone 341599 (TRAV12-2, TRAJ13)
CAVKKTGGYQKVTF

SEQ ID NO: 683198 - protein, 12 aa, Homo sapiens
  CDR3 for beta chain variable domain of TCR clone 341599 (TRBV29-1, TRBJ1-1)
CSEADGNTEAFF

SEQ ID NO: 683199 - protein, 18 aa, Homo sapiens
  CDR3 for alpha chain variable domain of TCR clone 341600 (TRAV21, TRAJ52)
CAVRPSPAGGTSYGKLTF

SEQ ID NO: 683200 - protein, 13 aa, Homo sapiens
  CDR3 for beta chain variable domain of TCR clone 341600 (TRBV24-1, TRBJ1-2)
CATSGTALDGYTF

SEQ ID NO: 683201 - protein, 14 aa, Homo sapiens
  CDR3 for alpha chain variable domain of TCR clone 341601 (TRAV8-4, TRAJ13)
CAVTLSGGYQKVTF

SEQ ID NO: 683202 - protein, 16 aa, Homo sapiens
  CDR3 for beta chain variable domain of TCR clone 341601 (TRBV5-7, TRBJ1-4)
CASSPSGGLKTENLFF

SEQ ID NO: 683203 - protein, 15 aa, Homo sapiens
  CDR3 for alpha chain variable domain of TCR clone 341602 (TRAV17, TRAJ57)
CATGPSQTGSEKLVF

SEQ ID NO: 683204 - protein, 15 aa, Homo sapiens
  CDR3 for beta chain variable domain of TCR clone 341602 (TRBV25-1, TRBJ1-4)
CASSPGDSTNEKLFF

SEQ ID NO: 683205 - protein, 10 aa, Homo sapiens
  CDR3 for alpha chain variable domain of TCR clone 341603 (TRAV12-3, TRAJ49)
CSMNGDQFYF

SEQ ID NO: 683206 - protein, 13 aa, Homo sapiens
  CDR3 for beta chain variable domain of TCR clone 341603 (TRBV12-4, TRBJ1-1)
CASSPGTGFEAFF

SEQ ID NO: 683207 - protein, 15 aa, Homo sapiens
  CDR3 for alpha chain variable domain of TCR clone 341604 (TRAV8-3, TRAJ27)
CAVGPSKTNAGKSTF

SEQ ID NO: 683208 - protein, 14 aa, Homo sapiens
  CDR3 for beta chain variable domain of TCR clone 341604 (TRBV7-9, TRBJ1-1)
CASSSTKGNTEAFF

SEQ ID NO: 683209 - protein, 14 aa, Homo sapiens
  CDR3 for alpha chain variable domain of TCR clone 341605 (TRAV8-3, TRAJ15)
CAVGAPNQAGTADL

SEQ ID NO: 683210 - protein, 14 aa, Homo sapiens
  CDR3 for beta chain variable domain of TCR clone 341605 (TRBV20-1, TRBJ2-1)
CSPNDEASYNEQFF

SEQ ID NO: 683211 - protein, 15 aa, Homo sapiens
  CDR3 for alpha chain variable domain of TCR clone 341606 (TRAV1-2, TRAJ26)
CAVRDLITMVRILSW

SEQ ID NO: 683212 - protein, 11 aa, Homo sapiens
  CDR3 for beta chain variable domain of TCR clone 341606 (TRBV29-1, TRBJ2-5)
CSEDRTGTQYF

SEQ ID NO: 683213 - protein, 15 aa, Homo sapiens
  CDR3 for alpha chain variable domain of TCR clone 341607 (TRAV27, TRAJ38)
CAARRNAGNNRKLLW

SEQ ID NO: 683214 - protein, 15 aa, Homo sapiens
  CDR3 for beta chain variable domain of TCR clone 341607 (TRBV18, TRBJ2-5)
CASSPDPGLQETQYF

SEQ ID NO: 683215 - protein, 17 aa, Homo sapiens
  CDR3 for alpha chain variable domain of TCR clone 341608 (TRAV3, TRAJ28)
CAVGPLYSGAGSYQLTF

SEQ ID NO: 683216 - protein, 14 aa, Homo sapiens
  CDR3 for beta chain variable domain of TCR clone 341608 (TRBV7-2, TRBJ1-1)
CASSFLTGTTEAFF

SEQ ID NO: 683217 - protein, 12 aa, Homo sapiens
  CDR3 for alpha chain variable domain of TCR clone 341609 (TRAV12-2, TRAJ8)
CAVNTGFQTLVF

SEQ ID NO: 683218 - protein, 15 aa, Homo sapiens
  CDR3 for beta chain variable domain of TCR clone 341609 (TRBV7-8, TRBJ1-5)
CASSLERRGLEPHHF

SEQ ID NO: 683219 - protein, 17 aa, Homo sapiens
  CDR3 for alpha chain variable domain of TCR clone 341610 (TRAV17, TRAJ28)
CATDPRRGGAGSFQLPF

SEQ ID NO: 683220 - protein, 16 aa, Homo sapiens
  CDR3 for beta chain variable domain of TCR clone 341610 (TRBV25-1, TRBJ1-1)
CASSGDRDRGRIEAFF

SEQ ID NO: 683221 - protein, 14 aa, Homo sapiens
  CDR3 for alpha chain variable domain of TCR clone 341611 (TRAV13-1, TRAJ35)
CAASKGGFGDVLHC

SEQ ID NO: 683222 - protein, 14 aa, Homo sapiens
  CDR3 for beta chain variable domain of TCR clone 341611 (TRBV7-3, TRBJ2-2)
CASSLVQDTGELFF

SEQ ID NO: 683223 - protein, 14 aa, Homo sapiens
  CDR3 for alpha chain variable domain of TCR clone 341612 (TRAV1-2, TRAJ16)
CAVNGFLDGKKLLF

SEQ ID NO: 683224 - protein, 14 aa, Homo sapiens
  CDR3 for beta chain variable domain of TCR clone 341612 (TRBV25-1, TRBJ1-1)
CASTHLGGNTEAFF

SEQ ID NO: 683225 - protein, 15 aa, Homo sapiens
  CDR3 for alpha chain variable domain of TCR clone 341613 (TRAV26-1, TRAJ29)
CIVRVEGSGSTHLVF

SEQ ID NO: 683226 - protein, 14 aa, Homo sapiens
  CDR3 for beta chain variable domain of TCR clone 341613 (TRBV18, TRBJ2-5)
CASSPGVSQETQYF

SEQ ID NO: 683227 - protein, 15 aa, Homo sapiens
  CDR3 for alpha chain variable domain of TCR clone 341614 (TRAV21, TRAJ24)
YAARSSTDSWGKLQF

SEQ ID NO: 683228 - protein, 15 aa, Homo sapiens
  CDR3 for beta chain variable domain of TCR clone 341614 (TRBV4-1, TRBJ2-7)
CASSQNTGRLYEQYF

SEQ ID NO: 683229 - protein, 17 aa, Homo sapiens
  CDR3 for alpha chain variable domain of TCR clone 341615 (TRAV8-6, TRAJ58)
CAVSSWVGETSGSRLTF

SEQ ID NO: 683230 - protein, 15 aa, Homo sapiens
  CDR3 for beta chain variable domain of TCR clone 341615 (TRBV7-9, TRBJ2-7)
CASSSSGLAVYEQYI

SEQ ID NO: 683231 - protein, 11 aa, Homo sapiens
  CDR3 for alpha chain variable domain of TCR clone 341616 (TRAV21, TRAJ34)
CAHYNTDKLLF

SEQ ID NO: 683232 - protein, 15 aa, Homo sapiens
  CDR3 for beta chain variable domain of TCR clone 341616 (TRBV6-3, TRBJ2-7)
CASSSPGTVFYEQYF

SEQ ID NO: 683233 - protein, 18 aa, Homo sapiens
  CDR3 for alpha chain variable domain of TCR clone 341617 (TRAV1-2, TRAJ18)
CAVRDMGDRGSTLGRLYF

SEQ ID NO: 683234 - protein, 14 aa, Homo sapiens
  CDR3 for beta chain variable domain of TCR clone 341617 (TRBV18, TRBJ2-5)
CASSPGVSQETQYF

SEQ ID NO: 683235 - protein, 11 aa, Homo sapiens
  CDR3 for alpha chain variable domain of TCR clone 341618 (TRAV21, TRAJ34)
CAVTNTDKLIF

SEQ ID NO: 683236 - protein, 16 aa, Homo sapiens
  CDR3 for beta chain variable domain of TCR clone 341618 (TRBV18, TRBJ1-1)
CASSPGVGGRGGEAFI

SEQ ID NO: 683237 - protein, 15 aa, Homo sapiens
  CDR3 for alpha chain variable domain of TCR clone 341619 (TRAV16, TRAJ16)
CALQGGGSDGQKLLF

SEQ ID NO: 683238 - protein, 13 aa, Homo sapiens
  CDR3 for beta chain variable domain of TCR clone 341619 (TRBV27, TRBJ2-7)
CASSLTTGYEQYF

SEQ ID NO: 683239 - protein, 14 aa, Homo sapiens
  CDR3 for alpha chain variable domain of TCR clone 341620 (TRAV1-2, TRAJ8)
CAVREDKGFQKLVF

SEQ ID NO: 683240 - protein, 14 aa, Homo sapiens
  CDR3 for beta chain variable domain of TCR clone 341620 (TRBV11-2, TRBJ2-3)
CASSRLARTDTQYF

SEQ ID NO: 683241 - protein, 14 aa, Homo sapiens
  CDR3 for alpha chain variable domain of TCR clone 341621 (TRAV20, TRAJ22)
CAVALGGSARQLTF

SEQ ID NO: 683242 - protein, 13 aa, Homo sapiens
  CDR3 for beta chain variable domain of TCR clone 341621 (TRBV20-1, TRBJ1-1)
CSARGGGNTEAFF

SEQ ID NO: 683243 - protein, 14 aa, Homo sapiens
  CDR3 for alpha chain variable domain of TCR clone 341622 (TRAV26-1, TRAJ38)
CIADSAGNNRKLIW

SEQ ID NO: 683244 - protein, 15 aa, Homo sapiens
  CDR3 for beta chain variable domain of TCR clone 341622 (TRBV20-1, TRBJ2-7)
CSARDRFSGMDEQYF

SEQ ID NO: 683245 - protein, 14 aa, Homo sapiens
  CDR3 for alpha chain variable domain of TCR clone 341623 (TRAV1-2, TRAJ16)
CAVNRFSDGQKLHF

SEQ ID NO: 683246 - protein, 17 aa, Homo sapiens
  CDR3 for beta chain variable domain of TCR clone 341623 (TRBV13, TRBJ2-3)
CASSLSRVAGGRNTQYF

SEQ ID NO: 683247 - protein, 11 aa, Homo sapiens
  CDR3 for alpha chain variable domain of TCR clone 341624 (TRAV17, TRAJ31)
CATPNNARLMF

SEQ ID NO: 683248 - protein, 16 aa, Homo sapiens
  CDR3 for beta chain variable domain of TCR clone 341624 (TRBV7-8, TRBJ2-4)
CASSAERTLAKNIQYV

SEQ ID NO: 683249 - protein, 12 aa, Homo sapiens
  CDR3 for alpha chain variable domain of TCR clone 341625 (TRAV8-3, TRAJ27)
CAVGAEAGKSTF

SEQ ID NO: 683250 - protein, 15 aa, Homo sapiens
  CDR3 for beta chain variable domain of TCR clone 341625 (TRBV11-2, TRBJ2-2)
CASSSDRVNAGELFF

SEQ ID NO: 683251 - protein, 14 aa, Homo sapiens
  CDR3 for alpha chain variable domain of TCR clone 341626 (TRAV12-1, TRAJ13)
CVVIDSGGYQKVTF

SEQ ID NO: 683252 - protein, 15 aa, Homo sapiens
  CDR3 for beta chain variable domain of TCR clone 341626 (TRBV7-3, TRBJ2-1)
CASSLSSGSFDEQFF

SEQ ID NO: 683253 - protein, 13 aa, Homo sapiens
  CDR3 for alpha chain variable domain of TCR clone 341627 (TRAV8-2, TRAJ43)
CVVSDQGDNDMRF

SEQ ID NO: 683254 - protein, 18 aa, Homo sapiens
  CDR3 for beta chain variable domain of TCR clone 341627 (TRBV7-2, TRBJ2-3)
CASSLKREGSGITDTQYF

SEQ ID NO: 683255 - protein, 12 aa, Homo sapiens
  CDR3 for alpha chain variable domain of TCR clone 341628 (TRAV16, TRAJ21)
CALLGNFNNFYF

SEQ ID NO: 683256 - protein, 15 aa, Homo sapiens
  CDR3 for beta chain variable domain of TCR clone 341628 (TRBV3-1, TRBJ2-2)
CASSQAVRETGELFF

SEQ ID NO: 683257 - protein, 14 aa, Homo sapiens
  CDR3 for alpha chain variable domain of TCR clone 341629 (TRAV8-3, TRAJ4)
CAVGAAGGYNKLIF

SEQ ID NO: 683258 - protein, 15 aa, Homo sapiens
  CDR3 for beta chain variable domain of TCR clone 341629 (TRBV6-5, TRBJ2-1)
CASSYAAGAGNEQFF

SEQ ID NO: 683259 - protein, 13 aa, Homo sapiens
  CDR3 for alpha chain variable domain of TCR clone 341630 (TRAV1-1, TRAJ20)
CAVRGSNDYKLSF

SEQ ID NO: 683260 - protein, 15 aa, Homo sapiens
  CDR3 for beta chain variable domain of TCR clone 341630 (TRBV6-3, TRBJ2-2)
CASRGMTVDTGELFF

SEQ ID NO: 683261 - protein, 17 aa, Homo sapiens
  CDR3 for alpha chain variable domain of TCR clone 341631 (TRAV36/DV7, TRAJ52)
CAVAQRAGGTSYGKLTF

SEQ ID NO: 683262 - protein, 17 aa, Homo sapiens
  CDR3 for beta chain variable domain of TCR clone 341631 (TRBV14, TRBJ2-1)
CASSQDRRVTSYNEQFF

SEQ ID NO: 683263 - protein, 16 aa, Homo sapiens
  CDR3 for alpha chain variable domain of TCR clone 341632 (TRAV30, TRAJ24)
CGTEIVDADSWGKFQF

SEQ ID NO: 683264 - protein, 13 aa, Homo sapiens
  CDR3 for beta chain variable domain of TCR clone 341632 (TRBV11-2, TRBJ2-5)
CARSSTGEETQYF

SEQ ID NO: 683265 - protein, 14 aa, Homo sapiens
  CDR3 for alpha chain variable domain of TCR clone 341633 (TRAV3, TRAJ22)
CAVRDYGSARQLTF

SEQ ID NO: 683266 - protein, 14 aa, Homo sapiens
  CDR3 for beta chain variable domain of TCR clone 341633 (TRBV19, TRBJ1-2)
CASSIGAGSYGYTF

SEQ ID NO: 683267 - protein, 14 aa, Homo sapiens
  CDR3 for alpha chain variable domain of TCR clone 341634 (TRAV12-1, TRAJ29)
CVVTEGSGNTPLVF

SEQ ID NO: 683268 - protein, 13 aa, Homo sapiens
  CDR3 for beta chain variable domain of TCR clone 341634 (TRBV7-9, TRBJ2-3)
CASSPGSTDTQYF

SEQ ID NO: 683269 - protein, 14 aa, Homo sapiens
  CDR3 for alpha chain variable domain of TCR clone 341635 (TRAV13-2, TRAJ43)
CAEIHTYNNNEMRF

SEQ ID NO: 683270 - protein, 15 aa, Homo sapiens
  CDR3 for beta chain variable domain of TCR clone 341635 (TRBV7-9, TRBJ2-2)
CASGPLDTFPGELFF

SEQ ID NO: 683271 - protein, 20 aa, Homo sapiens
  CDR3 for alpha chain variable domain of TCR clone 341636 (TRAV4, TRAJ9)
CCVLLPRGYPNRPGGFKTIF

SEQ ID NO: 683272 - protein, 16 aa, Homo sapiens
  CDR3 for beta chain variable domain of TCR clone 341636 (TRBV28, TRBJ1-4)
CASSPPYRGRSEKLFF

SEQ ID NO: 683273 - protein, 14 aa, Homo sapiens
  CDR3 for alpha chain variable domain of TCR clone 341637 (TRAV26-1, TRAJ34)
CIVRVAYNSDKLIF

SEQ ID NO: 683274 - protein, 15 aa, Homo sapiens
  CDR3 for beta chain variable domain of TCR clone 341637 (TRBV20-1, TRBJ2-7)
CSARVPAAYFNEQYF

SEQ ID NO: 683275 - protein, 16 aa, Homo sapiens
  CDR3 for alpha chain variable domain of TCR clone 341638 (TRAV12-1, TRAJ21)
CVVLSGYFGSGTNLNV

SEQ ID NO: 683276 - protein, 13 aa, Homo sapiens
  CDR3 for beta chain variable domain of TCR clone 341638 (TRBV7-3, TRBJ1-1)
CASSQDWGAEAFF

SEQ ID NO: 683277 - protein, 15 aa, Homo sapiens
  CDR3 for alpha chain variable domain of TCR clone 341639 (TRAV13-1, TRAJ43)
CAATPELGGNSEMRF

SEQ ID NO: 683278 - protein, 15 aa, Homo sapiens
  CDR3 for beta chain variable domain of TCR clone 341639 (TRBV10-2, TRBJ2-6)
CASSEQGTGANVLTF

SEQ ID NO: 683279 - protein, 16 aa, Homo sapiens
  CDR3 for alpha chain variable domain of TCR clone 341640 (TRAV26-1, TRAJ48)
CIVREPLNFGNEKLTF

SEQ ID NO: 683280 - protein, 12 aa, Homo sapiens
  CDR3 for beta chain variable domain of TCR clone 341640 (TRBV19, TRBJ2-1)
CASSRQGAEQFF

SEQ ID NO: 683281 - protein, 14 aa, Homo sapiens
  CDR3 for alpha chain variable domain of TCR clone 341641 (TRAV26-1, TRAJ38)
CIADNAGNNRKLIW

SEQ ID NO: 683282 - protein, 13 aa, Homo sapiens
  CDR3 for beta chain variable domain of TCR clone 341641 (TRBV20-1, TRBJ1-1)
CGARGVGNTEAFF

SEQ ID NO: 683283 - protein, 14 aa, Homo sapiens
  CDR3 for alpha chain variable domain of TCR clone 341642 (TRAV2, TRAJ9)
CAAEDRSGGFKTIF

SEQ ID NO: 683284 - protein, 14 aa, Homo sapiens
  CDR3 for beta chain variable domain of TCR clone 341642 (TRBV7-9, TRBJ2-7)
CASSPSGGQNEQYF

SEQ ID NO: 683285 - protein, 11 aa, Homo sapiens
  CDR3 for alpha chain variable domain of TCR clone 341643 (TRAV2, TRAJ33)
CAVDSNYQLIW

SEQ ID NO: 683286 - protein, 12 aa, Homo sapiens
  CDR3 for beta chain variable domain of TCR clone 341643 (TRBV19, TRBJ1-2)
CASSVGQSLTMA

SEQ ID NO: 683287 - protein, 14 aa, Homo sapiens
  CDR3 for alpha chain variable domain of TCR clone 341644 (TRAV1-2, TRAJ17)
CAVRDMTACNKLTF

SEQ ID NO: 683288 - protein, 15 aa, Homo sapiens
  CDR3 for beta chain variable domain of TCR clone 341644 (TRBV20-1, TRBJ2-7)
CSARDRVSGMDEQYF

SEQ ID NO: 683289 - protein, 17 aa, Homo sapiens
  CDR3 for alpha chain variable domain of TCR clone 341645 (TRAV13-1, TRAJ28)
CAASPPTLGLGVTNSLS

SEQ ID NO: 683290 - protein, 15 aa, Homo sapiens
  CDR3 for beta chain variable domain of TCR clone 341645 (TRBV6-3, TRBJ2-2)
CASSFLATLTGELFF

SEQ ID NO: 683291 - protein, 14 aa, Homo sapiens
  CDR3 for alpha chain variable domain of TCR clone 341646 (TRAV23/DV6, TRAJ8)
CAASKNTGFQKLVF

SEQ ID NO: 683292 - protein, 16 aa, Homo sapiens
  CDR3 for beta chain variable domain of TCR clone 341646 (TRBV4-1, TRBJ2-6)
CASSQGGDPGANDLTF

SEQ ID NO: 683293 - protein, 12 aa, Homo sapiens
  CDR3 for alpha chain variable domain of TCR clone 341647 (TRAV36/DV7, TRAJ54)
CAVVRGAQKLVF

SEQ ID NO: 683294 - protein, 16 aa, Homo sapiens
  CDR3 for beta chain variable domain of TCR clone 341647 (TRBV15, TRBJ2-3)
CATRRDLGIVTDTQFF

SEQ ID NO: 683295 - protein, 13 aa, Homo sapiens
  CDR3 for alpha chain variable domain of TCR clone 341648 (TRAV2, TRAJ40)
CAVVTSGTYKYIF

SEQ ID NO: 683296 - protein, 12 aa, Homo sapiens
  CDR3 for beta chain variable domain of TCR clone 341648 (TRBV5-1, TRBJ2-3)
CASSLAADTQYF

SEQ ID NO: 683297 - protein, 23 aa, Homo sapiens
  CDR3 for alpha chain variable domain of TCR clone 341649 (TRAV8-4, TRAJ38)
CARLNAGNNHIQNPDPPVYQLRD

SEQ ID NO: 683298 - protein, 14 aa, Homo sapiens
  CDR3 for beta chain variable domain of TCR clone 341649 (TRBV7-8, TRBJ2-3)
CASSLEAGTDTQYF

SEQ ID NO: 683299 - protein, 14 aa, Homo sapiens
  CDR3 for alpha chain variable domain of TCR clone 341650 (TRAV12-2, TRAJ6)
CVPLRPGGSYLPAF

SEQ ID NO: 683300 - protein, 18 aa, Homo sapiens
  CDR3 for beta chain variable domain of TCR clone 341650 (TRBV4-1, TRBJ2-3)
CASSLPPNRGPFTDTQYF

SEQ ID NO: 683301 - protein, 13 aa, Homo sapiens
  CDR3 for alpha chain variable domain of TCR clone 341651 (TRAV36/DV7, TRAJ38)
CVANAGNNRKLIW

SEQ ID NO: 683302 - protein, 14 aa, Homo sapiens
  CDR3 for beta chain variable domain of TCR clone 341651 (TRBV7-2, TRBJ2-7)
CASSLRWEVNEQYL

SEQ ID NO: 683303 - protein, 12 aa, Homo sapiens
  CDR3 for alpha chain variable domain of TCR clone 341652 (TRAV12-3, TRAJ17)
CAMTLTGTKLTF

SEQ ID NO: 683304 - protein, 16 aa, Homo sapiens
  CDR3 for beta chain variable domain of TCR clone 341652 (TRBV29-1, TRBJ2-7)
CSVEDAEDGTAYEQYF

SEQ ID NO: 683305 - protein, 13 aa, Homo sapiens
  CDR3 for alpha chain variable domain of TCR clone 341653 (TRAV8-6, TRAJ50)
CAVIKTSYDKVIF

SEQ ID NO: 683306 - protein, 10 aa, Homo sapiens
  CDR3 for beta chain variable domain of TCR clone 341653 (TRBV7-2, TRBJ2-2)
CASRRPGQTP

SEQ ID NO: 683307 - protein, 17 aa, Homo sapiens
  CDR3 for alpha chain variable domain of TCR clone 341654 (TRAV3, TRAJ22)
CAVRPFISSGSARHLTF

SEQ ID NO: 683308 - protein, 16 aa, Homo sapiens
  CDR3 for beta chain variable domain of TCR clone 341654 (TRBV7-6, TRBJ2-3)
CASSPLAGGSTDTQYF

SEQ ID NO: 683309 - protein, 14 aa, Homo sapiens
  CDR3 for alpha chain variable domain of TCR clone 341655 (TRAV16, TRAJ57)
CALPTQGGSEKLVF

SEQ ID NO: 683310 - protein, 23 aa, Homo sapiens
  CDR3 for beta chain variable domain of TCR clone 341655 (TRBV28, TRBJ1-3)
CASWGGASLWKHHVFWRGKLAHC

SEQ ID NO: 683311 - protein, 16 aa, Homo sapiens
  CDR3 for alpha chain variable domain of TCR clone 341656 (TRAV12-3, TRAJ53)
CAMSPGSGGSNYKLTF

SEQ ID NO: 683312 - protein, 13 aa, Homo sapiens
  CDR3 for beta chain variable domain of TCR clone 341656 (TRBV19, TRBJ1-2)
YASSVPGQDGYTF

SEQ ID NO: 683313 - protein, 11 aa, Homo sapiens
  CDR3 for alpha chain variable domain of TCR clone 341657 (TRAV8-6, TRAJ13)
CALGIYQKVTF

SEQ ID NO: 683314 - protein, 14 aa, Homo sapiens
  CDR3 for beta chain variable domain of TCR clone 341657 (TRBV18, TRBJ2-7)
CASSPRGGAYEQYF

SEQ ID NO: 683315 - protein, 11 aa, Homo sapiens
  CDR3 for alpha chain variable domain of TCR clone 341658 (TRAV1-1, TRAJ20)
CAVFNDYKLSF

SEQ ID NO: 683316 - protein, 16 aa, Homo sapiens
  CDR3 for beta chain variable domain of TCR clone 341658 (TRBV29-1, TRBJ2-2)
CSVETTSEGNTGELFF

SEQ ID NO: 683317 - protein, 14 aa, Homo sapiens
  CDR3 for alpha chain variable domain of TCR clone 341659 (TRAV24, TRAJ37)
CASDGSSNTGKLIF

SEQ ID NO: 683318 - protein, 14 aa, Homo sapiens
  CDR3 for beta chain variable domain of TCR clone 341659 (TRBV4-2, TRBJ2-1)
CASGLDRAYNEQFF

SEQ ID NO: 683319 - protein, 13 aa, Homo sapiens
  CDR3 for alpha chain variable domain of TCR clone 341660 (TRAV38-2/DV8, TRAJ45)
CAYGGGGADGLTF

SEQ ID NO: 683320 - protein, 13 aa, Homo sapiens
  CDR3 for beta chain variable domain of TCR clone 341660 (TRBV29-1, TRBJ2-1)
CSVEGGRVNEQFF

SEQ ID NO: 683321 - protein, 12 aa, Homo sapiens
  CDR3 for alpha chain variable domain of TCR clone 341661 (TRAV36/DV7, TRAJ54)
CAVVRGAQKLVL

SEQ ID NO: 683322 - protein, 14 aa, Homo sapiens
  CDR3 for beta chain variable domain of TCR clone 341661 (TRBV7-3, TRBJ1-1)
CASSSKGGNTEAFF

SEQ ID NO: 683323 - protein, 16 aa, Homo sapiens
  CDR3 for alpha chain variable domain of TCR clone 341662 (TRAV38-2/DV8, TRAJ45)
CAYRGNSGGCADGLTF

SEQ ID NO: 683324 - protein, 17 aa, Homo sapiens
  CDR3 for beta chain variable domain of TCR clone 341662 (TRBV11-3, TRBJ2-5)
CASSLPGVRGGKETQYF

SEQ ID NO: 683325 - protein, 17 aa, Homo sapiens
  CDR3 for alpha chain variable domain of TCR clone 341663 (TRAV8-6, TRAJ22)
CAVSLYPSSGSARQLTF

SEQ ID NO: 683326 - protein, 15 aa, Homo sapiens
  CDR3 for beta chain variable domain of TCR clone 341663 (TRBV7-2, TRBJ2-1)
CASSSGLAGGNEQFF

SEQ ID NO: 683327 - protein, 12 aa, Homo sapiens
  CDR3 for alpha chain variable domain of TCR clone 341664 (TRAV13-1, TRAJ21)
CAAKECFNKFYF

SEQ ID NO: 683328 - protein, 17 aa, Homo sapiens
  CDR3 for beta chain variable domain of TCR clone 341664 (TRBV19, TRBJ2-7)
CASSISFYDSYPYEQYF

SEQ ID NO: 683329 - protein, 11 aa, Homo sapiens
  CDR3 for alpha chain variable domain of TCR clone 341665 (TRAV12-2, TRAJ31)
CAVTRWARLMF

SEQ ID NO: 683330 - protein, 15 aa, Homo sapiens
  CDR3 for beta chain variable domain of TCR clone 341665 (TRBV19, TRBJ2-7)
CASSIGVGRVNEQYF

SEQ ID NO: 683331 - protein, 14 aa, Homo sapiens
  CDR3 for alpha chain variable domain of TCR clone 341666 (TRAV12-2, TRAJ13)
CAVKKTGGYQKVTF

SEQ ID NO: 683332 - protein, 15 aa, Homo sapiens
  CDR3 for beta chain variable domain of TCR clone 341666 (TRBV28, TRBJ2-4)
CAAGSGTLLMGMQYF

SEQ ID NO: 683333 - protein, 13 aa, Homo sapiens
  CDR3 for alpha chain variable domain of TCR clone 341667 (TRAV26-1, TRAJ34)
CIVRPWITDKIIF

SEQ ID NO: 683334 - protein, 16 aa, Homo sapiens
  CDR3 for beta chain variable domain of TCR clone 341667 (TRBV12-4, TRBJ1-4)
CASSRQGANEKLFLAV

SEQ ID NO: 683335 - protein, 17 aa, Homo sapiens
  CDR3 for alpha chain variable domain of TCR clone 341668 (TRAV12-2, TRAJ52)
CAVNPDAGGTSYGKLTF

SEQ ID NO: 683336 - protein, 16 aa, Homo sapiens
  CDR3 for beta chain variable domain of TCR clone 341668 (TRBV5-5, TRBJ2-2)
CASSGRREGATGELFF

SEQ ID NO: 683337 - protein, 13 aa, Homo sapiens
  CDR3 for alpha chain variable domain of TCR clone 341669 (TRAV25, TRAJ30)
CAGREDRDDKIIF

SEQ ID NO: 683338 - protein, 17 aa, Homo sapiens
  CDR3 for beta chain variable domain of TCR clone 341669 (TRBV7-9, TRBJ2-6)
CASSFGAGYSGANVLTF

SEQ ID NO: 683339 - protein, 14 aa, Homo sapiens
  CDR3 for alpha chain variable domain of TCR clone 341670 (TRAV8-4, TRAJ17)
CAVSEGAAGNKLLL

SEQ ID NO: 683340 - protein, 13 aa, Homo sapiens
  CDR3 for beta chain variable domain of TCR clone 341670 (TRBV19, TRBJ2-1)
CASSMYRVNEQFF

SEQ ID NO: 683341 - protein, 14 aa, Homo sapiens
  CDR3 for alpha chain variable domain of TCR clone 341671 (TRAV1-1, TRAJ27)
CAVIYNTNAGKSTF

SEQ ID NO: 683342 - protein, 18 aa, Homo sapiens
  CDR3 for beta chain variable domain of TCR clone 341671 (TRBV7-3, TRBJ2-1)
CASSLKLASGRAMVSSSS

SEQ ID NO: 683343 - protein, 13 aa, Homo sapiens
  CDR3 for alpha chain variable domain of TCR clone 341672 (TRAV3, TRAJ21)
CAVREPDFNKFYF

SEQ ID NO: 683344 - protein, 17 aa, Homo sapiens
  CDR3 for beta chain variable domain of TCR clone 341672 (TRBV7-8, TRBJ2-6)
CASSAGTGGAGANILTF

SEQ ID NO: 683345 - protein, 11 aa, Homo sapiens
  CDR3 for alpha chain variable domain of TCR clone 341673 (TRAV27, TRAJ13)
AGVRGYQKVTF

SEQ ID NO: 683346 - protein, 16 aa, Homo sapiens
  CDR3 for beta chain variable domain of TCR clone 341673 (TRBV28, TRBJ2-1)
CASSSSYSGSLNEQFF

SEQ ID NO: 683347 - protein, 14 aa, Homo sapiens
  CDR3 for alpha chain variable domain of TCR clone 341674 (TRAV12-1, TRAJ40)
CVVNRVSGTYKYIF

SEQ ID NO: 683348 - protein, 15 aa, Homo sapiens
  CDR3 for beta chain variable domain of TCR clone 341674 (TRBV12-4, TRBJ2-5)
CASTLNSGRGETQYF

SEQ ID NO: 683349 - protein, 14 aa, Homo sapiens
  CDR3 for alpha chain variable domain of TCR clone 341675 (TRAV8-2, TRAJ37)
CVVSDLGNTGKLIF

SEQ ID NO: 683350 - protein, 18 aa, Homo sapiens
  CDR3 for beta chain variable domain of TCR clone 341675 (TRBV7-2, TRBJ2-7)
CASSLSGRGLAGGYEQCF

SEQ ID NO: 683351 - protein, 15 aa, Homo sapiens
  CDR3 for alpha chain variable domain of TCR clone 341676 (TRAV8-3, TRAJ45)
CASSYSGGGADGLTF

SEQ ID NO: 683352 - protein, 16 aa, Homo sapiens
  CDR3 for beta chain variable domain of TCR clone 341676 (TRBV7-2, TRBJ2-5)
CASSPFPTGGEETQYF

SEQ ID NO: 683353 - protein, 12 aa, Homo sapiens
  CDR3 for alpha chain variable domain of TCR clone 341677 (TRAV4, TRAJ26)
CLVGDYGQNFVF

SEQ ID NO: 683354 - protein, 13 aa, Homo sapiens
  CDR3 for beta chain variable domain of TCR clone 341677 (TRBV19, TRBJ2-7)
CASSPRQSYEQYF

SEQ ID NO: 683355 - protein, 13 aa, Homo sapiens
  CDR3 for alpha chain variable domain of TCR clone 341678 (TRAV2, TRAJ5)
CAVPDTGRRARTF

SEQ ID NO: 683356 - protein, 18 aa, Homo sapiens
  CDR3 for beta chain variable domain of TCR clone 341678 (TRBV12-4, TRBJ2-2)
CASSLVAGTRGRTGELFF

SEQ ID NO: 683357 - protein, 13 aa, Homo sapiens
  CDR3 for alpha chain variable domain of TCR clone 341679 (TRAV1-2, TRAJ9)
CAVLNTGGFKTIF

SEQ ID NO: 683358 - protein, 18 aa, Homo sapiens
  CDR3 for beta chain variable domain of TCR clone 341679 (TRBV19, TRBJ1-5)
CASSKGQVSMHSNQPQHF

SEQ ID NO: 683359 - protein, 14 aa, Homo sapiens
  CDR3 for alpha chain variable domain of TCR clone 341680 (TRAV29/DV5, TRAJ36)
CAARRQTGANNLFF

SEQ ID NO: 683360 - protein, 13 aa, Homo sapiens
  CDR3 for beta chain variable domain of TCR clone 341680 (TRBV7-3, TRBJ1-1)
CASSQDWGAEAFF

SEQ ID NO: 683361 - protein, 14 aa, Homo sapiens
  CDR3 for alpha chain variable domain of TCR clone 341681 (TRAV12-2, TRAJ40)
CAVKIPPGTYKYIF

SEQ ID NO: 683362 - protein, 15 aa, Homo sapiens
  CDR3 for beta chain variable domain of TCR clone 341681 (TRBV20-1, TRBJ1-4)
CSARREWGVNEKLFF

SEQ ID NO: 683363 - protein, 14 aa, Homo sapiens
  CDR3 for alpha chain variable domain of TCR clone 341682 (TRAV2, TRAJ9)
CAVEDRSGGFKTIF

SEQ ID NO: 683364 - protein, 14 aa, Homo sapiens
  CDR3 for beta chain variable domain of TCR clone 341682 (TRBV11-1, TRBJ2-4)
CASSPVIGKNIQYF

SEQ ID NO: 683365 - protein, 13 aa, Homo sapiens
  CDR3 for alpha chain variable domain of TCR clone 341683 (TRAV13-2, TRAJ13)
CAERPGGYQKVTF

SEQ ID NO: 683366 - protein, 14 aa, Homo sapiens
  CDR3 for beta chain variable domain of TCR clone 341683 (TRBV7-2, TRBJ1-2)
CASSQTGSTYGYTF

SEQ ID NO: 683367 - protein, 16 aa, Homo sapiens
  CDR3 for alpha chain variable domain of TCR clone 341684 (TRAV21, TRAJ37)
CAVRPRGSSNTGKLIF

SEQ ID NO: 683368 - protein, 13 aa, Homo sapiens
  CDR3 for beta chain variable domain of TCR clone 341684 (TRBV7-9, TRBJ2-5)
CASLSPAQETQYF

SEQ ID NO: 683369 - protein, 16 aa, Homo sapiens
  CDR3 for alpha chain variable domain of TCR clone 341685 (TRAV16, TRAJ52)
CALSAAGGTSYGKLTF

SEQ ID NO: 683370 - protein, 17 aa, Homo sapiens
  CDR3 for beta chain variable domain of TCR clone 341685 (TRBV11-2, TRBJ2-1)
CASSFYPPGVEYNEQFF

SEQ ID NO: 683371 - protein, 15 aa, Homo sapiens
  CDR3 for alpha chain variable domain of TCR clone 341686 (TRAV12-2, TRAJ26)
CSVNSHSNYGQNFVF

SEQ ID NO: 683372 - protein, 14 aa, Homo sapiens
  CDR3 for beta chain variable domain of TCR clone 341686 (TRBV5-1, TRBJ2-7)
CASSLEGRTYEQYF

SEQ ID NO: 683373 - protein, 14 aa, Homo sapiens
  CDR3 for alpha chain variable domain of TCR clone 341687 (TRAV13-1, TRAJ35)
CAASKGGFGNVLHG

SEQ ID NO: 683374 - protein, 15 aa, Homo sapiens
  CDR3 for beta chain variable domain of TCR clone 341687 (TRBV2, TRBJ2-7)
CASTLLGSGATEQYF

SEQ ID NO: 683375 - protein, 20 aa, Homo sapiens
  CDR3 for alpha chain variable domain of TCR clone 341688 (TRAV13-1, )
CAASPMDIQSPDPAVYQLRD

SEQ ID NO: 683376 - protein, 13 aa, Homo sapiens
  CDR3 for beta chain variable domain of TCR clone 341688 (TRBV20-1, TRBJ2-2)
CSASAAGTGELFF

SEQ ID NO: 683377 - protein, 14 aa, Homo sapiens
  CDR3 for alpha chain variable domain of TCR clone 341689 (TRAV12-1, TRAJ8)
CVVNSNTGFQKLVF

SEQ ID NO: 683378 - protein, 15 aa, Homo sapiens
  CDR3 for beta chain variable domain of TCR clone 341689 (TRBV20-1, TRBJ2-1)
CSARSPGGPGNEQFF

SEQ ID NO: 683379 - protein, 14 aa, Homo sapiens
  CDR3 for alpha chain variable domain of TCR clone 341690 (TRAV12-3, TRAJ54)
CAMRIIQGAQKLVF

SEQ ID NO: 683380 - protein, 16 aa, Homo sapiens
  CDR3 for beta chain variable domain of TCR clone 341690 (TRBV28, TRBJ2-1)
YASRVPASGRIGEQFF

SEQ ID NO: 683381 - protein, 11 aa, Homo sapiens
  CDR3 for alpha chain variable domain of TCR clone 341691 (TRAV12-3, TRAJ17)
CAMTLRQQANF

SEQ ID NO: 683382 - protein, 15 aa, Homo sapiens
  CDR3 for beta chain variable domain of TCR clone 341691 (TRBV20-1, TRBJ2-7)
CSARYRVSGMDEQYF

SEQ ID NO: 683383 - protein, 12 aa, Homo sapiens
  CDR3 for alpha chain variable domain of TCR clone 341692 (TRAV1-1, TRAJ9)
CAVDTGGFKTIF

SEQ ID NO: 683384 - protein, 12 aa, Homo sapiens
  CDR3 for beta chain variable domain of TCR clone 341692 (TRBV7-9, TRBJ2-7)
CASSLEGYEQYF

SEQ ID NO: 683385 - protein, 14 aa, Homo sapiens
  CDR3 for alpha chain variable domain of TCR clone 341693 (TRAV13-2, TRAJ10)
CAETFTGGGNKLTF

SEQ ID NO: 683386 - protein, 16 aa, Homo sapiens
  CDR3 for beta chain variable domain of TCR clone 341693 (TRBV18, TRBJ2-7)
CASSPRSQGIAYEQYF

SEQ ID NO: 683387 - protein, 11 aa, Homo sapiens
  CDR3 for alpha chain variable domain of TCR clone 341694 (TRAV3, TRAJ21)
CAVGNFDKFYF

SEQ ID NO: 683388 - protein, 14 aa, Homo sapiens
  CDR3 for beta chain variable domain of TCR clone 341694 (TRBV18, TRBJ2-5)
CASSPGVSQETQYF

SEQ ID NO: 683389 - protein, 14 aa, Homo sapiens
  CDR3 for alpha chain variable domain of TCR clone 341695 (TRAV8-4, TRAJ4)
CAVSPLGGYNKLIF

SEQ ID NO: 683390 - protein, 16 aa, Homo sapiens
  CDR3 for beta chain variable domain of TCR clone 341695 (TRBV19, TRBJ1-2)
CASSIGSNRDGYGYTF

SEQ ID NO: 683391 - protein, 10 aa, Homo sapiens
  CDR3 for alpha chain variable domain of TCR clone 341696 (TRAV12-3, TRAJ18)
CSMSAEAQPW

SEQ ID NO: 683392 - protein, 13 aa, Homo sapiens
  CDR3 for beta chain variable domain of TCR clone 341696 (TRBV15, TRBJ1-6)
CATSGGLNSPLHF

SEQ ID NO: 683393 - protein, 11 aa, Homo sapiens
  CDR3 for alpha chain variable domain of TCR clone 341697 (TRAV2, TRAJ13)
CASGGYQKVTF

SEQ ID NO: 683394 - protein, 14 aa, Homo sapiens
  CDR3 for beta chain variable domain of TCR clone 341697 (TRBV7-2, TRBJ2-7)
CASSLRWEVNEQYF

SEQ ID NO: 683395 - protein, 15 aa, Homo sapiens
  CDR3 for alpha chain variable domain of TCR clone 341698 (TRAV12-2, TRAJ57)
CAVSRGQGGSEKMVF

SEQ ID NO: 683396 - protein, 15 aa, Homo sapiens
  CDR3 for beta chain variable domain of TCR clone 341698 (TRBV20-1, TRBJ2-7)
CSARDRVSGMDEQCF

SEQ ID NO: 683397 - protein, 15 aa, Homo sapiens
  CDR3 for alpha chain variable domain of TCR clone 341699 (TRAV12-3, TRAJ6)
CAMSATTGGSYIPTF

SEQ ID NO: 683398 - protein, 17 aa, Homo sapiens
  CDR3 for beta chain variable domain of TCR clone 341699 (TRBV13, TRBJ2-3)
CASSLSRVAGRRNTQYF

SEQ ID NO: 683399 - protein, 14 aa, Homo sapiens
  CDR3 for alpha chain variable domain of TCR clone 341700 (TRAV26-1, TRAJ38)
CIADNAGNNRNLIW

SEQ ID NO: 683400 - protein, 15 aa, Homo sapiens
  CDR3 for beta chain variable domain of TCR clone 341700 (TRBV7-6, TRBJ1-4)
CASSLGAGAGEKLFF

SEQ ID NO: 683401 - protein, 12 aa, Homo sapiens
  CDR3 for alpha chain variable domain of TCR clone 341701 (TRAV8-4, TRAJ33)
CAVSDSNYQLIW

SEQ ID NO: 683402 - protein, 15 aa, Homo sapiens
  CDR3 for beta chain variable domain of TCR clone 341701 (TRBV2, TRBJ2-5)
CASSEQGLIGETQYF

SEQ ID NO: 683403 - protein, 15 aa, Homo sapiens
  CDR3 for alpha chain variable domain of TCR clone 341702 (TRAV8-3, TRAJ23)
CAVGDRYNQGGTLTL

SEQ ID NO: 683404 - protein, 22 aa, Homo sapiens
  CDR3 for beta chain variable domain of TCR clone 341702 (TRBV29-1, TRBJ2-5)
TVSNMSPEDSSIYLCSAGTQYF

SEQ ID NO: 683405 - protein, 14 aa, Homo sapiens
  CDR3 for alpha chain variable domain of TCR clone 341703 (TRAV8-4, TRAJ35)
CAVSEPGFGNVLHC

SEQ ID NO: 683406 - protein, 16 aa, Homo sapiens
  CDR3 for beta chain variable domain of TCR clone 341703 (TRBV2, TRBJ2-1)
CASSVGGSLSYNEQFF

SEQ ID NO: 683407 - protein, 14 aa, Homo sapiens
  CDR3 for alpha chain variable domain of TCR clone 341704 (TRAV17, TRAJ40)
CATALTSGTYKYIF

SEQ ID NO: 683408 - protein, 13 aa, Homo sapiens
  CDR3 for beta chain variable domain of TCR clone 341704 (TRBV27, TRBJ2-1)
CASSSGSCNEQFF

SEQ ID NO: 683409 - protein, 12 aa, Homo sapiens
  CDR3 for alpha chain variable domain of TCR clone 341705 (TRAV12-3, TRAJ17)
CAMTLTGNTLTF

SEQ ID NO: 683410 - protein, 15 aa, Homo sapiens
  CDR3 for beta chain variable domain of TCR clone 341705 (TRBV20-1, TRBJ2-7)
CSARDRVSGIDEQSF

SEQ ID NO: 683411 - protein, 16 aa, Homo sapiens
  CDR3 for alpha chain variable domain of TCR clone 341706 (TRAV38-1, TRAJ56)
CAFMKRQTGANSKLTF

SEQ ID NO: 683412 - protein, 15 aa, Homo sapiens
  CDR3 for beta chain variable domain of TCR clone 341706 (TRBV7-3, TRBJ2-1)
CASSLKASEYNERFF

SEQ ID NO: 683413 - protein, 15 aa, Homo sapiens
  CDR3 for alpha chain variable domain of TCR clone 341707 (TRAV17, TRAJ4)
CATGTWSGGYNKLIF

SEQ ID NO: 683414 - protein, 13 aa, Homo sapiens
  CDR3 for beta chain variable domain of TCR clone 341707 (TRBV6-6, TRBJ2-7)
CASSQKHLAEQYF

SEQ ID NO: 683415 - protein, 15 aa, Homo sapiens
  CDR3 for alpha chain variable domain of TCR clone 341708 (TRAV12-1, TRAJ44)
CVVFVNTGTASKLTF

SEQ ID NO: 683416 - protein, 13 aa, Homo sapiens
  CDR3 for beta chain variable domain of TCR clone 341708 (TRBV11-2, TRBJ2-5)
CASSFSSQETQYF

SEQ ID NO: 683417 - protein, 13 aa, Homo sapiens
  CDR3 for alpha chain variable domain of TCR clone 341709 (TRAV27, TRAJ29)
CAGAHPGNTPLVF

SEQ ID NO: 683418 - protein, 15 aa, Homo sapiens
  CDR3 for beta chain variable domain of TCR clone 341709 (TRBV15, TRBJ1-4)
CATSRDMGSYEKLLF

SEQ ID NO: 683419 - protein, 13 aa, Homo sapiens
  CDR3 for alpha chain variable domain of TCR clone 341710 (TRAV12-1, TRAJ49)
CVVGANTGNQFYF

SEQ ID NO: 683420 - protein, 14 aa, Homo sapiens
  CDR3 for beta chain variable domain of TCR clone 341710 (TRBV7-6, TRBJ2-3)
CASSLGTVTDTQYF

SEQ ID NO: 683421 - protein, 11 aa, Homo sapiens
  CDR3 for alpha chain variable domain of TCR clone 341711 (TRAV30, TRAJ24)
WMLTAGGKFQF

SEQ ID NO: 683422 - protein, 15 aa, Homo sapiens
  CDR3 for beta chain variable domain of TCR clone 341711 (TRBV27, TRBJ2-1)
CASSNGGGSSNEQFF

SEQ ID NO: 683423 - protein, 16 aa, Homo sapiens
  CDR3 for alpha chain variable domain of TCR clone 341712 (TRAV21, TRAJ37)
CAVRTAGSSNTGKLIF

SEQ ID NO: 683424 - protein, 13 aa, Homo sapiens
  CDR3 for beta chain variable domain of TCR clone 341712 (TRBV7-9, TRBJ2-5)
CASLPSVRGTQYF

SEQ ID NO: 683425 - protein, 18 aa, Homo sapiens
  CDR3 for alpha chain variable domain of TCR clone 341713 (TRAV26-1, TRAJ52)
CIVRVAGAGGTSFGKLTF

SEQ ID NO: 683426 - protein, 13 aa, Homo sapiens
  CDR3 for beta chain variable domain of TCR clone 341713 (TRBV7-8, TRBJ1-2)
CASSAQSYYGYTL

SEQ ID NO: 683427 - protein, 16 aa, Homo sapiens
  CDR3 for alpha chain variable domain of TCR clone 341714 (TRAV30, TRAJ24)
CGTEIVDADSWGKFQF

SEQ ID NO: 683428 - protein, 18 aa, Homo sapiens
  CDR3 for beta chain variable domain of TCR clone 341714 (TRBV25-1, TRBJ1-2)
CASSGLQNGQGLIFGYAF

SEQ ID NO: 683429 - protein, 13 aa, Homo sapiens
  CDR3 for alpha chain variable domain of TCR clone 341715 (TRAV38-2/DV8, TRAJ34)
CAYRTWNTDKLIF

SEQ ID NO: 683430 - protein, 15 aa, Homo sapiens
  CDR3 for beta chain variable domain of TCR clone 341715 (TRBV7-9, TRBJ1-4)
RASSRTGGFNEKLFF

SEQ ID NO: 683431 - protein, 13 aa, Homo sapiens
  CDR3 for alpha chain variable domain of TCR clone 341716 (TRAV21, TRAJ37)
CAVSSGSTGKLIF

SEQ ID NO: 683432 - protein, 17 aa, Homo sapiens
  CDR3 for beta chain variable domain of TCR clone 341716 (TRBV5-1, TRBJ2-5)
CASSLLGLAANQETQYF

SEQ ID NO: 683433 - protein, 14 aa, Homo sapiens
  CDR3 for alpha chain variable domain of TCR clone 341717 (TRAV27, TRAJ40)
CAGSLPRGTYKNIF

SEQ ID NO: 683434 - protein, 15 aa, Homo sapiens
  CDR3 for beta chain variable domain of TCR clone 341717 (TRBV6-3, TRBJ1-4)
CASSSPGQENEKLFF

SEQ ID NO: 683435 - protein, 12 aa, Homo sapiens
  CDR3 for alpha chain variable domain of TCR clone 341718 (TRAV12-2, TRAJ10)
WGVTGGGNKLTF

SEQ ID NO: 683436 - protein, 16 aa, Homo sapiens
  CDR3 for beta chain variable domain of TCR clone 341718 (TRBV15, TRBJ2-3)
CATSRDLGIVTDTQYF

SEQ ID NO: 683437 - protein, 14 aa, Homo sapiens
  CDR3 for alpha chain variable domain of TCR clone 341719 (TRAV26-1, TRAJ31)
CIALPPNNNARLMF

SEQ ID NO: 683438 - protein, 16 aa, Homo sapiens
  CDR3 for beta chain variable domain of TCR clone 341719 (TRBV10-2, TRBJ2-7)
CASSESPGSSGFEQNF

SEQ ID NO: 683439 - protein, 15 aa, Homo sapiens
  CDR3 for alpha chain variable domain of TCR clone 341720 (TRAV17, TRAJ23)
CATDAEDNQGGKLIF

SEQ ID NO: 683440 - protein, 13 aa, Homo sapiens
  CDR3 for beta chain variable domain of TCR clone 341720 (TRBV10-2, TRBJ2-7)
CASGASGGYEQYF

SEQ ID NO: 683441 - protein, 14 aa, Homo sapiens
  CDR3 for alpha chain variable domain of TCR clone 341721 (TRAV2, TRAJ37)
CAVDFTSNTAKLIF

SEQ ID NO: 683442 - protein, 12 aa, Homo sapiens
  CDR3 for beta chain variable domain of TCR clone 341721 (TRBV12-4, TRBJ2-7)
CASNPGGGEQYF

SEQ ID NO: 683443 - protein, 14 aa, Homo sapiens
  CDR3 for alpha chain variable domain of TCR clone 341722 (TRAV29/DV5, TRAJ45)
CAASFRGGADGLTF

SEQ ID NO: 683444 - protein, 15 aa, Homo sapiens
  CDR3 for beta chain variable domain of TCR clone 341722 (TRBV9, TRBJ1-6)
CASSVSGTGDSPLHF

SEQ ID NO: 683445 - protein, 13 aa, Homo sapiens
  CDR3 for alpha chain variable domain of TCR clone 341723 (TRAV36/DV7, TRAJ37)
CAVFSINTGKLIF

SEQ ID NO: 683446 - protein, 15 aa, Homo sapiens
  CDR3 for beta chain variable domain of TCR clone 341723 (TRBV12-4, TRBJ2-5)
CQQFFVRGRQETQYF

SEQ ID NO: 683447 - protein, 12 aa, Homo sapiens
  CDR3 for alpha chain variable domain of TCR clone 341724 (TRAV1-2, TRAJ33)
CAALDSNYQLIW

SEQ ID NO: 683448 - protein, 15 aa, Homo sapiens
  CDR3 for beta chain variable domain of TCR clone 341724 (TRBV11-3, TRBJ2-7)
CASSLLSGSSYEQYF

SEQ ID NO: 683449 - protein, 14 aa, Homo sapiens
  CDR3 for alpha chain variable domain of TCR clone 341725 (TRAV1-2, TRAJ6)
CAVRLSGGSYIPTF

SEQ ID NO: 683450 - protein, 15 aa, Homo sapiens
  CDR3 for beta chain variable domain of TCR clone 341725 (TRBV28, TRBJ2-7)
CASSPRGRGFYEQYF

SEQ ID NO: 683451 - protein, 15 aa, Homo sapiens
  CDR3 for alpha chain variable domain of TCR clone 341726 (TRAV17, TRAJ37)
CATDGGSSNTGTLIF

SEQ ID NO: 683452 - protein, 15 aa, Homo sapiens
  CDR3 for beta chain variable domain of TCR clone 341726 (TRBV28, TRBJ2-5)
CASSSGRTIQETQYF

SEQ ID NO: 683453 - protein, 20 aa, Homo sapiens
  CDR3 for alpha chain variable domain of TCR clone 341727 (TRAV21, TRAJ22)
SLVTQPPTLKSSGSARQLTF

SEQ ID NO: 683454 - protein, 17 aa, Homo sapiens
  CDR3 for beta chain variable domain of TCR clone 341727 (TRBV6-3, TRBJ2-1)
CASSYSSGTRGLDEQFF

SEQ ID NO: 683455 - protein, 14 aa, Homo sapiens
  CDR3 for alpha chain variable domain of TCR clone 341728 (TRAV2, TRAJ37)
CAVDCTSNTGKLIF

SEQ ID NO: 683456 - protein, 14 aa, Homo sapiens
  CDR3 for beta chain variable domain of TCR clone 341728 (TRBV7-2, TRBJ2-7)
CASSPKASFYEQYF

SEQ ID NO: 683457 - protein, 14 aa, Homo sapiens
  CDR3 for alpha chain variable domain of TCR clone 341729 (TRAV1-2, TRAJ16)
CAVNRFSDGQKLLF

SEQ ID NO: 683458 - protein, 17 aa, Homo sapiens
  CDR3 for beta chain variable domain of TCR clone 341729 (TRBV13, TRBJ2-3)
YASSLSRVAGGRNTQYF

SEQ ID NO: 683459 - protein, 14 aa, Homo sapiens
  CDR3 for alpha chain variable domain of TCR clone 341730 (TRAV12-2, TRAJ13)
CAMKKSGGNQKVTF

SEQ ID NO: 683460 - protein, 15 aa, Homo sapiens
  CDR3 for beta chain variable domain of TCR clone 341730 (TRBV27, TRBJ2-1)
CASSNGGGSSNEQFF

SEQ ID NO: 683461 - protein, 10 aa, Homo sapiens
  CDR3 for alpha chain variable domain of TCR clone 341731 (TRAV38-2/DV8, TRAJ40)
CASGTYKYIF

SEQ ID NO: 683462 - protein, 14 aa, Homo sapiens
  CDR3 for beta chain variable domain of TCR clone 341731 (TRBV7-9, TRBJ2-1)
CASSPRDSLYAQFF

SEQ ID NO: 683463 - protein, 13 aa, Homo sapiens
  CDR3 for alpha chain variable domain of TCR clone 341732 (TRAV12-2, TRAJ10)
CAVPTGGGNKLTF

SEQ ID NO: 683464 - protein, 13 aa, Homo sapiens
  CDR3 for beta chain variable domain of TCR clone 341732 (TRBV7-2, TRBJ2-2)
CASSLAVTGELFF

SEQ ID NO: 683465 - protein, 12 aa, Homo sapiens
  CDR3 for alpha chain variable domain of TCR clone 341733 (TRAV38-1, TRAJ34)
CAFMKETDKLIF

SEQ ID NO: 683466 - protein, 17 aa, Homo sapiens
  CDR3 for beta chain variable domain of TCR clone 341733 (TRBV9, TRBJ2-1)
CASSVRSLSGGNNEQFF

SEQ ID NO: 683467 - protein, 13 aa, Homo sapiens
  CDR3 for alpha chain variable domain of TCR clone 341734 (TRAV3, TRAJ27)
CAVRPLGAGKSTF

SEQ ID NO: 683468 - protein, 15 aa, Homo sapiens
  CDR3 for beta chain variable domain of TCR clone 341734 (TRBV4-3, TRBJ1-2)
CASSRGQGRNYGYTF

SEQ ID NO: 683469 - protein, 13 aa, Homo sapiens
  CDR3 for alpha chain variable domain of TCR clone 341735 (TRAV12-3, TRAJ54)
CAMFAQGVQKLVF

SEQ ID NO: 683470 - protein, 16 aa, Homo sapiens
  CDR3 for beta chain variable domain of TCR clone 341735 (TRBV7-6, TRBJ2-3)
CASSPRRGGLGDTQYF

SEQ ID NO: 683471 - protein, 16 aa, Homo sapiens
  CDR3 for alpha chain variable domain of TCR clone 341736 (TRAV26-1, TRAJ58)
IASSESGETSGSRLTF

SEQ ID NO: 683472 - protein, 16 aa, Homo sapiens
  CDR3 for beta chain variable domain of TCR clone 341736 (TRBV7-2, TRBJ2-5)
CQQPRQGRKSGETQYF

SEQ ID NO: 683473 - protein, 21 aa, Homo sapiens
  CDR3 for alpha chain variable domain of TCR clone 341737 (TRAV26-1, TRAJ47)
CCVLLHRPSLLYMEYGNKLVF

SEQ ID NO: 683474 - protein, 14 aa, Homo sapiens
  CDR3 for beta chain variable domain of TCR clone 341737 (TRBV7-3, TRBJ1-5)
RASSFSGCNQPQHF

SEQ ID NO: 683475 - protein, 12 aa, Homo sapiens
  CDR3 for alpha chain variable domain of TCR clone 341738 (TRAV8-6, TRAJ43)
CALSHNNNDMRF

SEQ ID NO: 683476 - protein, 14 aa, Homo sapiens
  CDR3 for beta chain variable domain of TCR clone 341738 (TRBV10-3, TRBJ1-1)
CAISDGSGVTEAFF

SEQ ID NO: 683477 - protein, 15 aa, Homo sapiens
  CDR3 for alpha chain variable domain of TCR clone 341739 (TRAV26-2, TRAJ26)
CILRDFDNYGKNFVF

SEQ ID NO: 683478 - protein, 14 aa, Homo sapiens
  CDR3 for beta chain variable domain of TCR clone 341739 (TRBV29-1, TRBJ2-5)
CSFWTPYAGETQYC

SEQ ID NO: 683479 - protein, 14 aa, Homo sapiens
  CDR3 for alpha chain variable domain of TCR clone 341740 (TRAV13-1, TRAJ35)
CAASKGGFGNVLHC

SEQ ID NO: 683480 - protein, 13 aa, Homo sapiens
  CDR3 for beta chain variable domain of TCR clone 341740 (TRBV7-3, TRBJ1-1)
CASSQDWGAEPFF

SEQ ID NO: 683481 - protein, 16 aa, Homo sapiens
  CDR3 for alpha chain variable domain of TCR clone 341741 (TRAV13-1, TRAJ48)
CAASIFGNFGNDKLTF

SEQ ID NO: 683482 - protein, 14 aa, Homo sapiens
  CDR3 for beta chain variable domain of TCR clone 341741 (TRBV24-1, TRBJ1-1)
CATSIPRGDTEAFF

SEQ ID NO: 683483 - protein, 15 aa, Homo sapiens
  CDR3 for alpha chain variable domain of TCR clone 341742 (TRAV13-1, TRAJ11)
CAASNRNSGYSTLTF

SEQ ID NO: 683484 - protein, 11 aa, Homo sapiens
  CDR3 for beta chain variable domain of TCR clone 341742 (TRBV20-1, TRBJ2-7)
CSARLSDEQYF

SEQ ID NO: 683485 - protein, 15 aa, Homo sapiens
  CDR3 for alpha chain variable domain of TCR clone 341743 (TRAV2, TRAJ39)
CAVEDRRNAGNMPTL

SEQ ID NO: 683486 - protein, 16 aa, Homo sapiens
  CDR3 for beta chain variable domain of TCR clone 341743 (TRBV7-8, TRBJ2-7)
CASSLASGTSVYEQYF

SEQ ID NO: 683487 - protein, 11 aa, Homo sapiens
  CDR3 for alpha chain variable domain of TCR clone 341744 (TRAV2, TRAJ37)
CAVDNTGKLIF

SEQ ID NO: 683488 - protein, 16 aa, Homo sapiens
  CDR3 for beta chain variable domain of TCR clone 341744 (TRBV7-6, TRBJ2-1)
CASSAPGPSSYNEQFF

SEQ ID NO: 683489 - protein, 13 aa, Homo sapiens
  CDR3 for alpha chain variable domain of TCR clone 341745 (TRAV12-2, TRAJ10)
CAVPTGGGNKHTF

SEQ ID NO: 683490 - protein, 13 aa, Homo sapiens
  CDR3 for beta chain variable domain of TCR clone 341745 (TRBV27, TRBJ2-7)
CASSFVSSYEQYF

SEQ ID NO: 683491 - protein, 14 aa, Homo sapiens
  CDR3 for alpha chain variable domain of TCR clone 341746 (TRAV12-3, TRAJ12)
CAMSRMDSSYKLIF

SEQ ID NO: 683492 - protein, 13 aa, Homo sapiens
  CDR3 for beta chain variable domain of TCR clone 341746 (TRBV7-2, TRBJ2-2)
CASSLAVTGELFF

SEQ ID NO: 683493 - protein, 11 aa, Homo sapiens
  CDR3 for alpha chain variable domain of TCR clone 341747 (TRAV35, TRAJ34)
CWARNSDKLIF

SEQ ID NO: 683494 - protein, 14 aa, Homo sapiens
  CDR3 for beta chain variable domain of TCR clone 341747 (TRBV5-1, TRBJ2-7)
CASSRGESLYEQYF

SEQ ID NO: 683495 - protein, 11 aa, Homo sapiens
  CDR3 for alpha chain variable domain of TCR clone 341748 (TRAV13-1, TRAJ21)
CSKGRLQQILL

SEQ ID NO: 683496 - protein, 14 aa, Homo sapiens
  CDR3 for beta chain variable domain of TCR clone 341748 (TRBV5-4, TRBJ1-1)
CASSLDSRRDEALF

SEQ ID NO: 683497 - protein, 15 aa, Homo sapiens
  CDR3 for alpha chain variable domain of TCR clone 341749 (TRAV3, TRAJ4)
CAVRDGTGGYNKLIL

SEQ ID NO: 683498 - protein, 13 aa, Homo sapiens
  CDR3 for beta chain variable domain of TCR clone 341749 (TRBV12-5, TRBJ1-2)
CASGVRTGNGYTF

SEQ ID NO: 683499 - protein, 14 aa, Homo sapiens
  CDR3 for alpha chain variable domain of TCR clone 341750 (TRAV1-2, TRAJ27)
CAPAEYTNAGKSTF

SEQ ID NO: 683500 - protein, 18 aa, Homo sapiens
  CDR3 for beta chain variable domain of TCR clone 341750 (TRBV28, TRBJ1-2)
CASRQQQGKRGSNYGCTF

SEQ ID NO: 683501 - protein, 13 aa, Homo sapiens
  CDR3 for alpha chain variable domain of TCR clone 341751 (TRAV12-3, TRAJ13)
CAMSSGGYQKVTF

SEQ ID NO: 683502 - protein, 14 aa, Homo sapiens
  CDR3 for beta chain variable domain of TCR clone 341751 (TRBV5-1, TRBJ2-7)
CASSRGESLYEQYF

SEQ ID NO: 683503 - protein, 16 aa, Homo sapiens
  CDR3 for alpha chain variable domain of TCR clone 341752 (TRAV3, TRAJ21)
CAVRDIERGNFNKFYF

SEQ ID NO: 683504 - protein, 13 aa, Homo sapiens
  CDR3 for beta chain variable domain of TCR clone 341752 (TRBV28, TRBJ2-5)
CASSSRNQETQFF

SEQ ID NO: 683505 - protein, 13 aa, Homo sapiens
  CDR3 for alpha chain variable domain of TCR clone 341753 (TRAV23/DV6, TRAJ16)
CAASISDGQKLLL

SEQ ID NO: 683506 - protein, 15 aa, Homo sapiens
  CDR3 for beta chain variable domain of TCR clone 341753 (TRBV2, TRBJ2-2)
CASSRETVGTGELFL

SEQ ID NO: 683507 - protein, 13 aa, Homo sapiens
  CDR3 for alpha chain variable domain of TCR clone 341754 (TRAV8-4, TRAJ30)
GAVSVNRDDKIIF

SEQ ID NO: 683508 - protein, 15 aa, Homo sapiens
  CDR3 for beta chain variable domain of TCR clone 341754 (TRBV20-1, TRBJ2-7)
CSARDRVSGMDGQYF

SEQ ID NO: 683509 - protein, 15 aa, Homo sapiens
  CDR3 for alpha chain variable domain of TCR clone 341755 (TRAV3, TRAJ7)
FAVRDKDNGNNRLAF

SEQ ID NO: 683510 - protein, 19 aa, Homo sapiens
  CDR3 for beta chain variable domain of TCR clone 341755 (TRBV5-8, TRBJ2-3)
CASSFFGTSGSHRTDTQYF

SEQ ID NO: 683511 - protein, 17 aa, Homo sapiens
  CDR3 for alpha chain variable domain of TCR clone 341756 (TRAV3, TRAJ42)
CAVRDRDYGGSQGKPIF

SEQ ID NO: 683512 - protein, 14 aa, Homo sapiens
  CDR3 for beta chain variable domain of TCR clone 341756 (TRBV25-1, TRBJ1-1)
CASTHLGGNTEAFF

SEQ ID NO: 683513 - protein, 11 aa, Homo sapiens
  CDR3 for alpha chain variable domain of TCR clone 341757 (TRAV1-1, TRAJ23)
CAVRQGGKLIF

SEQ ID NO: 683514 - protein, 13 aa, Homo sapiens
  CDR3 for beta chain variable domain of TCR clone 341757 (TRBV7-8, TRBJ2-2)
GASSHLFPGRLSI

SEQ ID NO: 683515 - protein, 16 aa, Homo sapiens
  CDR3 for alpha chain variable domain of TCR clone 341758 (TRAV30, TRAJ24)
CGTEIVDADSWGKFQF

SEQ ID NO: 683516 - protein, 18 aa, Homo sapiens
  CDR3 for beta chain variable domain of TCR clone 341758 (TRBV11-2, TRBJ2-1)
CASSTTPGPSGANNEQFF

SEQ ID NO: 683517 - protein, 13 aa, Homo sapiens
  CDR3 for alpha chain variable domain of TCR clone 341759 (TRAV27, TRAJ6)
CAGGTRGSYTPTF

SEQ ID NO: 683518 - protein, 15 aa, Homo sapiens
  CDR3 for beta chain variable domain of TCR clone 341759 (TRBV10-2, TRBJ2-6)
CASSEQGTGANVLTF

SEQ ID NO: 683519 - protein, 14 aa, Homo sapiens
  CDR3 for alpha chain variable domain of TCR clone 341760 (TRAV3, TRAJ36)
CAVRDGTGANNLFF

SEQ ID NO: 683520 - protein, 16 aa, Homo sapiens
  CDR3 for beta chain variable domain of TCR clone 341760 (TRBV7-3, TRBJ2-5)
CASIRAGGSVQETQYF

SEQ ID NO: 683521 - protein, 14 aa, Homo sapiens
  CDR3 for alpha chain variable domain of TCR clone 341761 (TRAV1-2, TRAJ8)
CAVREGTGFQKLVF

SEQ ID NO: 683522 - protein, 20 aa, Homo sapiens
  CDR3 for beta chain variable domain of TCR clone 341761 (TRBV19, TRBJ2-1)
CASSISRTVTSTRLNNEQFF

SEQ ID NO: 683523 - protein, 14 aa, Homo sapiens
  CDR3 for alpha chain variable domain of TCR clone 341762 (TRAV12-3, TRAJ9)
CAMSGGTGGFKTIF

SEQ ID NO: 683524 - protein, 15 aa, Homo sapiens
  CDR3 for beta chain variable domain of TCR clone 341762 (TRBV6-6, TRBJ2-7)
CASSYPQGTENEQYF

SEQ ID NO: 683525 - protein, 16 aa, Homo sapiens
  CDR3 for alpha chain variable domain of TCR clone 341763 (TRAV27, TRAJ48)
TAAQPGDTGLYLPLTF

SEQ ID NO: 683526 - protein, 12 aa, Homo sapiens
  CDR3 for beta chain variable domain of TCR clone 341763 (TRBV7-3, TRBJ1-2)
CASSKKGVPVTF

SEQ ID NO: 683527 - protein, 14 aa, Homo sapiens
  CDR3 for alpha chain variable domain of TCR clone 341764 (TRAV8-6, TRAJ29)
CAVSRASGNTPLVF

SEQ ID NO: 683528 - protein, 13 aa, Homo sapiens
  CDR3 for beta chain variable domain of TCR clone 341764 (TRBV19, TRBJ1-5)
CASSEGSTQPQHF

SEQ ID NO: 683529 - protein, 16 aa, Homo sapiens
  CDR3 for alpha chain variable domain of TCR clone 341765 (TRAV4, TRAJ18)
CCVLLIGGSTLVRLYF

SEQ ID NO: 683530 - protein, 14 aa, Homo sapiens
  CDR3 for beta chain variable domain of TCR clone 341765 (TRBV18, TRBJ1-2)
CASSPSGRDYGYTF

SEQ ID NO: 683531 - protein, 14 aa, Homo sapiens
  CDR3 for alpha chain variable domain of TCR clone 341766 (TRAV8-3, TRAJ35)
CAVVPQGFGNVLHC

SEQ ID NO: 683532 - protein, 16 aa, Homo sapiens
  CDR3 for beta chain variable domain of TCR clone 341766 (TRBV20-1, TRBJ2-3)
CSARLHSAGAIDTQYF

SEQ ID NO: 683533 - protein, 13 aa, Homo sapiens
  CDR3 for alpha chain variable domain of TCR clone 341767 (TRAV27, TRAJ41)
CAGEGNSGHALNC

SEQ ID NO: 683534 - protein, 14 aa, Homo sapiens
  CDR3 for beta chain variable domain of TCR clone 341767 (TRBV7-2, TRBJ1-1)
CASSFLTGTTEAFF

SEQ ID NO: 683535 - protein, 15 aa, Homo sapiens
  CDR3 for alpha chain variable domain of TCR clone 341768 (TRAV12-1, TRAJ44)
CVVDTPQGTASKLTF

SEQ ID NO: 683536 - protein, 13 aa, Homo sapiens
  CDR3 for beta chain variable domain of TCR clone 341768 (TRBV24-1, TRBJ2-2)
CATSDWSTGELFF

SEQ ID NO: 683537 - protein, 16 aa, Homo sapiens
  CDR3 for alpha chain variable domain of TCR clone 341769 (TRAV17, TRAJ52)
CATGIIGGTSYGKLTF

SEQ ID NO: 683538 - protein, 12 aa, Homo sapiens
  CDR3 for beta chain variable domain of TCR clone 341769 (TRBV7-3, TRBJ2-1)
CASSFINDEQFY

SEQ ID NO: 683539 - protein, 16 aa, Homo sapiens
  CDR3 for alpha chain variable domain of TCR clone 341770 (TRAV30, TRAJ24)
CGTEIVDADSCGKFQF

SEQ ID NO: 683540 - protein, 18 aa, Homo sapiens
  CDR3 for beta chain variable domain of TCR clone 341770 (TRBV11-2, TRBJ2-6)
CASSLNPFLGTGANVLTF

SEQ ID NO: 683541 - protein, 14 aa, Homo sapiens
  CDR3 for alpha chain variable domain of TCR clone 341771 (TRAV1-2, TRAJ8)
CAVREDTGFQKLVF

SEQ ID NO: 683542 - protein, 15 aa, Homo sapiens
  CDR3 for beta chain variable domain of TCR clone 341771 (TRBV9, TRBJ1-6)
CASSVAGTGDSTLYF

SEQ ID NO: 683543 - protein, 13 aa, Homo sapiens
  CDR3 for alpha chain variable domain of TCR clone 341772 (TRAV1-2, TRAJ20)
CAVRDGNDYKLSF

SEQ ID NO: 683544 - protein, 15 aa, Homo sapiens
  CDR3 for beta chain variable domain of TCR clone 341772 (TRBV7-2, TRBJ2-3)
FASRLGGGGRDTQYF

SEQ ID NO: 683545 - protein, 14 aa, Homo sapiens
  CDR3 for alpha chain variable domain of TCR clone 341773 (TRAV29/DV5, TRAJ36)
CAARHKTGANNLFF

SEQ ID NO: 683546 - protein, 12 aa, Homo sapiens
  CDR3 for beta chain variable domain of TCR clone 341773 (TRBV11-2, TRBJ2-1)
CASSPGNNEQFF

SEQ ID NO: 683547 - protein, 15 aa, Homo sapiens
  CDR3 for alpha chain variable domain of TCR clone 341774 (TRAV3, TRAJ22)
CAVRDRGGSARQLTF

SEQ ID NO: 683548 - protein, 14 aa, Homo sapiens
  CDR3 for beta chain variable domain of TCR clone 341774 (TRBV20-1, TRBJ2-5)
CSALVPGYQENQYF

SEQ ID NO: 683549 - protein, 18 aa, Homo sapiens
  CDR3 for alpha chain variable domain of TCR clone 341775 (TRAV12-1, TRAJ42)
CVVMRMNYGGSRKSHLWK

SEQ ID NO: 683550 - protein, 13 aa, Homo sapiens
  CDR3 for beta chain variable domain of TCR clone 341775 (TRBV7-2, TRBJ1-1)
CASSLARPAEAFF

SEQ ID NO: 683551 - protein, 14 aa, Homo sapiens
  CDR3 for alpha chain variable domain of TCR clone 341776 (TRAV13-1, TRAJ3)
CSNAGVQQCFKIIF

SEQ ID NO: 683552 - protein, 15 aa, Homo sapiens
  CDR3 for beta chain variable domain of TCR clone 341776 (TRBV20-1, TRBJ2-7)
CSARDRVSGMDEQYF

SEQ ID NO: 683553 - protein, 16 aa, Homo sapiens
  CDR3 for alpha chain variable domain of TCR clone 341777 (TRAV8-3, TRAJ44)
CAVGTLMTGTASKLTF

SEQ ID NO: 683554 - protein, 13 aa, Homo sapiens
  CDR3 for beta chain variable domain of TCR clone 341777 (TRBV7-9, TRBJ1-2)
CASSLKQNYGYTF

SEQ ID NO: 683555 - protein, 13 aa, Homo sapiens
  CDR3 for alpha chain variable domain of TCR clone 341778 (TRAV21, TRAJ20)
CAVGLRVDSKLSF

SEQ ID NO: 683556 - protein, 11 aa, Homo sapiens
  CDR3 for beta chain variable domain of TCR clone 341778 (TRBV25-1, TRBJ2-1)
CATTRISEQFF

SEQ ID NO: 683557 - protein, 17 aa, Homo sapiens
  CDR3 for alpha chain variable domain of TCR clone 341779 (TRAV8-3, TRAJ50)
CAVVAVDTETSYDKVIF

SEQ ID NO: 683558 - protein, 13 aa, Homo sapiens
  CDR3 for beta chain variable domain of TCR clone 341779 (TRBV7-9, TRBJ2-2)
CASSSAGTGELFF

SEQ ID NO: 683559 - protein, 11 aa, Homo sapiens
  CDR3 for alpha chain variable domain of TCR clone 341780 (TRAV21, TRAJ34)
CAVTNTDKLIF

SEQ ID NO: 683560 - protein, 15 aa, Homo sapiens
  CDR3 for beta chain variable domain of TCR clone 341780 (TRBV20-1, TRBJ2-7)
CSARDRVSGRDEQYF

SEQ ID NO: 683561 - protein, 13 aa, Homo sapiens
  CDR3 for alpha chain variable domain of TCR clone 341781 (TRAV12-1, TRAJ6)
CVVFPGGSYIPTF

SEQ ID NO: 683562 - protein, 14 aa, Homo sapiens
  CDR3 for beta chain variable domain of TCR clone 341781 (TRBV7-2, TRBJ2-7)
CASRSQGAAYEQYF

SEQ ID NO: 683563 - protein, 16 aa, Homo sapiens
  CDR3 for alpha chain variable domain of TCR clone 341782 (TRAV30, TRAJ24)
CGTEIVDADSWGKFQV

SEQ ID NO: 683564 - protein, 14 aa, Homo sapiens
  CDR3 for beta chain variable domain of TCR clone 341782 (TRBV12-5, TRBJ2-5)
FASGSRTHQETQYF

SEQ ID NO: 683565 - protein, 13 aa, Homo sapiens
  CDR3 for alpha chain variable domain of TCR clone 341783 (TRAV3, TRAJ20)
CAVRDTPRYKLSF

SEQ ID NO: 683566 - protein, 16 aa, Homo sapiens
  CDR3 for beta chain variable domain of TCR clone 341783 (TRBV7-3, TRBJ2-1)
CASSLEGYRSYNEQFF

SEQ ID NO: 683567 - protein, 14 aa, Homo sapiens
  CDR3 for alpha chain variable domain of TCR clone 341784 (TRAV12-2, TRAJ13)
CAVKKTGGYQKVTF

SEQ ID NO: 683568 - protein, 15 aa, Homo sapiens
  CDR3 for beta chain variable domain of TCR clone 341784 (TRBV27, TRBJ2-1)
CSSSDGGGSSNEQFF

SEQ ID NO: 683569 - protein, 16 aa, Homo sapiens
  CDR3 for alpha chain variable domain of TCR clone 341785 (TRAV30, TRAJ24)
CGTEIGDADSWGKFQF

SEQ ID NO: 683570 - protein, 13 aa, Homo sapiens
  CDR3 for beta chain variable domain of TCR clone 341785 (TRBV7-3, TRBJ1-1)
CASSQDWGAEAFF

SEQ ID NO: 683571 - protein, 13 aa, Homo sapiens
  CDR3 for alpha chain variable domain of TCR clone 341786 (TRAV17, TRAJ31)
CATDENNNARLMF

SEQ ID NO: 683572 - protein, 13 aa, Homo sapiens
  CDR3 for beta chain variable domain of TCR clone 341786 (TRBV10-3, TRBJ2-7)
CASKLAVNYEQYF

SEQ ID NO: 683573 - protein, 12 aa, Homo sapiens
  CDR3 for alpha chain variable domain of TCR clone 341787 (TRAV8-4, TRAJ31)
CAVSDRNARLMF

SEQ ID NO: 683574 - protein, 15 aa, Homo sapiens
  CDR3 for beta chain variable domain of TCR clone 341787 (TRBV27, TRBJ2-7)
CASRFWGQGADEQYF

SEQ ID NO: 683575 - protein, 13 aa, Homo sapiens
  CDR3 for alpha chain variable domain of TCR clone 341788 (TRAV27, TRAJ49)
CAPRPYTGNQFYF

SEQ ID NO: 683576 - protein, 14 aa, Homo sapiens
  CDR3 for beta chain variable domain of TCR clone 341788 (TRBV12-5, TRBJ2-5)
CASGSRTHQETQYF

SEQ ID NO: 683577 - protein, 18 aa, Homo sapiens
  CDR3 for alpha chain variable domain of TCR clone 341789 (TRAV13-1, TRAJ52)
CAASKRSAGGTSYGELTF

SEQ ID NO: 683578 - protein, 23 aa, Homo sapiens
  CDR3 for beta chain variable domain of TCR clone 341789 (TRBV7-9, TRBJ1-2)
EAQLEKSRLLSDRFSSGEDGYTF

SEQ ID NO: 683579 - protein, 16 aa, Homo sapiens
  CDR3 for alpha chain variable domain of TCR clone 341790 (TRAV38-1, TRAJ32)
CAFMKGGGGDTNKLIF

SEQ ID NO: 683580 - protein, 13 aa, Homo sapiens
  CDR3 for beta chain variable domain of TCR clone 341790 (TRBV20-1, TRBJ2-5)
CSARETFQETQYF

SEQ ID NO: 683581 - protein, 12 aa, Homo sapiens
  CDR3 for alpha chain variable domain of TCR clone 341791 (TRAV3, TRAJ43)
CAVRDPNNDMRF

SEQ ID NO: 683582 - protein, 14 aa, Homo sapiens
  CDR3 for beta chain variable domain of TCR clone 341791 (TRBV19, TRBJ2-5)
CASSMTGQQETQHF

SEQ ID NO: 683583 - protein, 15 aa, Homo sapiens
  CDR3 for alpha chain variable domain of TCR clone 341792 (TRAV17, TRAJ57)
CATGPSQGGSEKLVF

SEQ ID NO: 683584 - protein, 18 aa, Homo sapiens
  CDR3 for beta chain variable domain of TCR clone 341792 (TRBV7-9, TRBJ2-7)
CASSLTTSGGRTWYEQYF

SEQ ID NO: 683585 - protein, 13 aa, Homo sapiens
  CDR3 for alpha chain variable domain of TCR clone 341793 (TRAV12-1, TRAJ21)
CVVTLYNFNKFYF

SEQ ID NO: 683586 - protein, 20 aa, Homo sapiens
  CDR3 for beta chain variable domain of TCR clone 341793 (TRBV7-8, TRBJ2-1)
CAISLAHRLAGVRSYNEQFF

SEQ ID NO: 683587 - protein, 14 aa, Homo sapiens
  CDR3 for alpha chain variable domain of TCR clone 341794 (TRAV38-1, TRAJ40)
CALRPTSGTYKYIF

SEQ ID NO: 683588 - protein, 14 aa, Homo sapiens
  CDR3 for beta chain variable domain of TCR clone 341794 (TRBV5-5, TRBJ1-2)
CASSLDHYNYGYTF

SEQ ID NO: 683589 - protein, 14 aa, Homo sapiens
  CDR3 for alpha chain variable domain of TCR clone 341795 (TRAV17, TRAJ11)
CATDARSGYSTLTF

SEQ ID NO: 683590 - protein, 17 aa, Homo sapiens
  CDR3 for beta chain variable domain of TCR clone 341795 (TRBV20-1, TRBJ2-1)
CSAPPRLAGTRYNEQFF

SEQ ID NO: 683591 - protein, 16 aa, Homo sapiens
  CDR3 for alpha chain variable domain of TCR clone 341796 (TRAV12-3, TRAJ53)
CAMSPGSGGSNYKLTF

SEQ ID NO: 683592 - protein, 13 aa, Homo sapiens
  CDR3 for beta chain variable domain of TCR clone 341796 (TRBV7-3, TRBJ1-1)
CASSQDWGAEDFF

SEQ ID NO: 683593 - protein, 12 aa, Homo sapiens
  CDR3 for alpha chain variable domain of TCR clone 341797 (TRAV12-3, TRAJ17)
CAMTLTSNKLTF

SEQ ID NO: 683594 - protein, 12 aa, Homo sapiens
  CDR3 for beta chain variable domain of TCR clone 341797 (TRBV11-2, TRBJ2-7)
CASSLPTYEQYF

SEQ ID NO: 683595 - protein, 14 aa, Homo sapiens
  CDR3 for alpha chain variable domain of TCR clone 341798 (TRAV16, TRAJ26)
CALSSANYGQNFGF

SEQ ID NO: 683596 - protein, 16 aa, Homo sapiens
  CDR3 for beta chain variable domain of TCR clone 341798 (TRBV20-1, TRBJ1-4)
CSAPGQGLLTNEKLFF

SEQ ID NO: 683597 - protein, 11 aa, Homo sapiens
  CDR3 for alpha chain variable domain of TCR clone 341799 (TRAV2, TRAJ13)
CASGGCQKVTF

SEQ ID NO: 683598 - protein, 15 aa, Homo sapiens
  CDR3 for beta chain variable domain of TCR clone 341799 (TRBV7-2, TRBJ2-1)
CASSSGLAGGNEQFF

SEQ ID NO: 683599 - protein, 12 aa, Homo sapiens
  CDR3 for alpha chain variable domain of TCR clone 341800 (TRAV26-2, TRAJ21)
CILKGNFNKFYF

SEQ ID NO: 683600 - protein, 18 aa, Homo sapiens
  CDR3 for beta chain variable domain of TCR clone 341800 (TRBV7-9, TRBJ2-7)
CASSLTTSGSRTWYEQYF

SEQ ID NO: 683601 - protein, 15 aa, Homo sapiens
  CDR3 for alpha chain variable domain of TCR clone 341801 (TRAV21, TRAJ52)
CAVRGGGTSYGKLTF

SEQ ID NO: 683602 - protein, 15 aa, Homo sapiens
  CDR3 for beta chain variable domain of TCR clone 341801 (TRBV2, TRBJ2-7)
CASSEGLARSYEQYF

SEQ ID NO: 683603 - protein, 19 aa, Homo sapiens
  CDR3 for alpha chain variable domain of TCR clone 341802 (TRAV25, TRAJ20)
TATQTTDVGILPHDYKLSF

SEQ ID NO: 683604 - protein, 15 aa, Homo sapiens
  CDR3 for beta chain variable domain of TCR clone 341802 (TRBV11-2, TRBJ2-1)
CASSKNRGLIYEQFF

SEQ ID NO: 683605 - protein, 14 aa, Homo sapiens
  CDR3 for alpha chain variable domain of TCR clone 341803 (TRAV12-2, TRAJ13)
CAVKKTGGYQRVTF

SEQ ID NO: 683606 - protein, 16 aa, Homo sapiens
  CDR3 for beta chain variable domain of TCR clone 341803 (TRBV11-2, TRBJ2-7)
CASSLAPTGVNYEQYF

SEQ ID NO: 683607 - protein, 16 aa, Homo sapiens
  CDR3 for alpha chain variable domain of TCR clone 341804 (TRAV12-1, TRAJ48)
CVVKMRDNFGNEKLTF

SEQ ID NO: 683608 - protein, 16 aa, Homo sapiens
  CDR3 for beta chain variable domain of TCR clone 341804 (TRBV7-6, TRBJ2-1)
CASSSVVAGTYNEQFF

SEQ ID NO: 683609 - protein, 14 aa, Homo sapiens
  CDR3 for alpha chain variable domain of TCR clone 341805 (TRAV17, TRAJ56)
CATSHTGANSKLTF

SEQ ID NO: 683610 - protein, 15 aa, Homo sapiens
  CDR3 for beta chain variable domain of TCR clone 341805 (TRBV9, TRBJ1-6)
CASSVAGTGDSPLHF

SEQ ID NO: 683611 - protein, 15 aa, Homo sapiens
  CDR3 for alpha chain variable domain of TCR clone 341806 (TRAV27, TRAJ45)
CAVRYSGGGADGLTF

SEQ ID NO: 683612 - protein, 13 aa, Homo sapiens
  CDR3 for beta chain variable domain of TCR clone 341806 (TRBV24-1, TRBJ2-2)
CATSDWSTGELFF

SEQ ID NO: 683613 - protein, 12 aa, Homo sapiens
  CDR3 for alpha chain variable domain of TCR clone 341807 (TRAV17, TRAJ12)
CATLRSSCKLIF

SEQ ID NO: 683614 - protein, 14 aa, Homo sapiens
  CDR3 for beta chain variable domain of TCR clone 341807 (TRBV4-2, TRBJ2-1)
CASGLDRAYNEQFF

SEQ ID NO: 683615 - protein, 14 aa, Homo sapiens
  CDR3 for alpha chain variable domain of TCR clone 341808 (TRAV9-2, TRAJ39)
CALYIYNAGNMLTF

SEQ ID NO: 683616 - protein, 14 aa, Homo sapiens
  CDR3 for beta chain variable domain of TCR clone 341808 (TRBV6-1, TRBJ1-3)
CASGQGGGGNTIYF

SEQ ID NO: 683617 - protein, 11 aa, Homo sapiens
  CDR3 for alpha chain variable domain of TCR clone 341809 (TRAV12-1, TRAJ34)
CVVNKGRELIF

SEQ ID NO: 683618 - protein, 16 aa, Homo sapiens
  CDR3 for beta chain variable domain of TCR clone 341809 (TRBV12-4, TRBJ2-5)
CASSFFVRGRQETQYF

SEQ ID NO: 683619 - protein, 14 aa, Homo sapiens
  CDR3 for alpha chain variable domain of TCR clone 341810 (TRAV1-2, TRAJ16)
CAVNRFSAGQKLLF

SEQ ID NO: 683620 - protein, 10 aa, Homo sapiens
  CDR3 for beta chain variable domain of TCR clone 341810 (TRBV20-1, TRBJ1-4)
PQGANEKLFF

SEQ ID NO: 683621 - protein, 15 aa, Homo sapiens
  CDR3 for alpha chain variable domain of TCR clone 341811 (TRAV8-2, TRAJ24)
RVVSDRTDSWGKLQF

SEQ ID NO: 683622 - protein, 13 aa, Homo sapiens
  CDR3 for beta chain variable domain of TCR clone 341811 (TRBV7-9, TRBJ1-2)
CASSLKQTYGYTF

SEQ ID NO: 683623 - protein, 15 aa, Homo sapiens
  CDR3 for alpha chain variable domain of TCR clone 341812 (TRAV23/DV6, TRAJ18)
CAARYRGSTLGRLYF

SEQ ID NO: 683624 - protein, 14 aa, Homo sapiens
  CDR3 for beta chain variable domain of TCR clone 341812 (TRBV7-2, TRBJ2-7)
CASSLYPGRYEQYF

SEQ ID NO: 683625 - protein, 14 aa, Homo sapiens
  CDR3 for alpha chain variable domain of TCR clone 341813 (TRAV4, TRAJ9)
CLVGSGTGGFKTIF

SEQ ID NO: 683626 - protein, 13 aa, Homo sapiens
  CDR3 for beta chain variable domain of TCR clone 341813 (TRBV20-1, TRBJ2-7)
CSARAGSPYEQYF

SEQ ID NO: 683627 - protein, 14 aa, Homo sapiens
  CDR3 for alpha chain variable domain of TCR clone 341814 (TRAV12-2, TRAJ13)
CAVKKTGGYKKITF

SEQ ID NO: 683628 - protein, 15 aa, Homo sapiens
  CDR3 for beta chain variable domain of TCR clone 341814 (TRBV27, TRBJ2-1)
CASSNGGGSSNEQFF

SEQ ID NO: 683629 - protein, 13 aa, Homo sapiens
  CDR3 for alpha chain variable domain of TCR clone 341815 (TRAV2, TRAJ15)
CAVASQAGTALIL

SEQ ID NO: 683630 - protein, 15 aa, Homo sapiens
  CDR3 for beta chain variable domain of TCR clone 341815 (TRBV7-3, TRBJ2-2)
CASSETGQGTGELFF

SEQ ID NO: 683631 - protein, 13 aa, Homo sapiens
  CDR3 for alpha chain variable domain of TCR clone 341816 (TRAV1-1, TRAJ9)
CAAKNTGGFKTIF

SEQ ID NO: 683632 - protein, 13 aa, Homo sapiens
  CDR3 for beta chain variable domain of TCR clone 341816 (TRBV12-5, TRBJ2-3)
CASGDRQSDTQYF

SEQ ID NO: 683633 - protein, 12 aa, Homo sapiens
  CDR3 for alpha chain variable domain of TCR clone 341817 (TRAV2, TRAJ40)
CCGYLRNLQIIF

SEQ ID NO: 683634 - protein, 14 aa, Homo sapiens
  CDR3 for beta chain variable domain of TCR clone 341817 (TRBV19, TRBJ2-1)
CASPTFVLSGEQFF

SEQ ID NO: 683635 - protein, 12 aa, Homo sapiens
  CDR3 for alpha chain variable domain of TCR clone 341818 (TRAV12-2, TRAJ8)
CAVNTGFQKLVF

SEQ ID NO: 683636 - protein, 15 aa, Homo sapiens
  CDR3 for beta chain variable domain of TCR clone 341818 (TRBV7-8, TRBJ1-5)
CASSLDRRGLEPQHF

SEQ ID NO: 683637 - protein, 13 aa, Homo sapiens
  CDR3 for alpha chain variable domain of TCR clone 341819 (TRAV2, TRAJ47)
CAVDREYGNKLVF

SEQ ID NO: 683638 - protein, 17 aa, Homo sapiens
  CDR3 for beta chain variable domain of TCR clone 341819 (TRBV15, TRBJ1-5)
CATSRVKGIYSNQPQHV

SEQ ID NO: 683639 - protein, 16 aa, Homo sapiens
  CDR3 for alpha chain variable domain of TCR clone 341820 (TRAV12-2, TRAJ18)
CAVTTARGSTLGRLYF

SEQ ID NO: 683640 - protein, 14 aa, Homo sapiens
  CDR3 for beta chain variable domain of TCR clone 341820 (TRBV4-2, TRBJ1-5)
CASSQDSINQPQHF

SEQ ID NO: 683641 - protein, 12 aa, Homo sapiens
  CDR3 for alpha chain variable domain of TCR clone 341821 (TRAV29/DV5, TRAJ15)
CASNQAGTALIF

SEQ ID NO: 683642 - protein, 15 aa, Homo sapiens
  CDR3 for beta chain variable domain of TCR clone 341821 (TRBV11-2, TRBJ2-2)
CASSSDGVNAGELFF

SEQ ID NO: 683643 - protein, 13 aa, Homo sapiens
  CDR3 for alpha chain variable domain of TCR clone 341822 (TRAV3, TRAJ20)
CAVRETGDYKLSF

SEQ ID NO: 683644 - protein, 15 aa, Homo sapiens
  CDR3 for beta chain variable domain of TCR clone 341822 (TRBV6-1, TRBJ2-7)
CASSEGGGVSYEQYF

SEQ ID NO: 683645 - protein, 15 aa, Homo sapiens
  CDR3 for alpha chain variable domain of TCR clone 341823 (TRAV25, TRAJ52)
CAGTSGGTSYGKLTS

SEQ ID NO: 683646 - protein, 16 aa, Homo sapiens
  CDR3 for beta chain variable domain of TCR clone 341823 (TRBV15, TRBJ1-2)
CATSRGPRTGGGGYTF

SEQ ID NO: 683647 - protein, 13 aa, Homo sapiens
  CDR3 for alpha chain variable domain of TCR clone 341824 (TRAV12-3, TRAJ43)
CAMIRPNNKDMRF

SEQ ID NO: 683648 - protein, 12 aa, Homo sapiens
  CDR3 for beta chain variable domain of TCR clone 341824 (TRBV11-2, TRBJ2-5)
CASSLGQETQYF

SEQ ID NO: 683649 - protein, 13 aa, Homo sapiens
  CDR3 for alpha chain variable domain of TCR clone 341825 (TRAV8-3, TRAJ6)
CAVEKGGSYIPTF

SEQ ID NO: 683650 - protein, 15 aa, Homo sapiens
  CDR3 for beta chain variable domain of TCR clone 341825 (TRBV28, TRBJ2-5)
CASSADRGRGETQFF

SEQ ID NO: 683651 - protein, 20 aa, Homo sapiens
  CDR3 for alpha chain variable domain of TCR clone 341826 (TRAV27, TRAJ53)
QATTSVQEEVGGGSNYKLTF

SEQ ID NO: 683652 - protein, 17 aa, Homo sapiens
  CDR3 for beta chain variable domain of TCR clone 341826 (TRBV11-2, TRBJ2-1)
CASSLYPPGVEYNEQFF

SEQ ID NO: 683653 - protein, 11 aa, Homo sapiens
  CDR3 for alpha chain variable domain of TCR clone 341827 (TRAV12-1, TRAJ37)
CVVNTPGKIIF

SEQ ID NO: 683654 - protein, 13 aa, Homo sapiens
  CDR3 for beta chain variable domain of TCR clone 341827 (TRBV12-4, TRBJ1-5)
CASSPDRAQPQHF

SEQ ID NO: 683655 - protein, 11 aa, Homo sapiens
  CDR3 for alpha chain variable domain of TCR clone 341828 (TRAV13-1, TRAJ15)
CAATPGPALIF

SEQ ID NO: 683656 - protein, 13 aa, Homo sapiens
  CDR3 for beta chain variable domain of TCR clone 341828 (TRBV7-2, TRBJ2-1)
CASSLGVYNEQFF

SEQ ID NO: 683657 - protein, 15 aa, Homo sapiens
  CDR3 for alpha chain variable domain of TCR clone 341829 (TRAV3, TRAJ32)
CAVSSYGGATTKLIF

SEQ ID NO: 683658 - protein, 16 aa, Homo sapiens
  CDR3 for beta chain variable domain of TCR clone 341829 (TRBV5-1, TRBJ2-5)
CASSLSLAGAQETQYF

SEQ ID NO: 683659 - protein, 13 aa, Homo sapiens
  CDR3 for alpha chain variable domain of TCR clone 341830 (TRAV13-1, TRAJ6)
YAASPGGSYIPTF

SEQ ID NO: 683660 - protein, 13 aa, Homo sapiens
  CDR3 for beta chain variable domain of TCR clone 341830 (TRBV7-9, TRBJ2-1)
CASSLDVGNEQFF

SEQ ID NO: 683661 - protein, 16 aa, Homo sapiens
  CDR3 for alpha chain variable domain of TCR clone 341831 (TRAV12-3, TRAJ53)
CAMSPGSGGSNYKLTF

SEQ ID NO: 683662 - protein, 16 aa, Homo sapiens
  CDR3 for beta chain variable domain of TCR clone 341831 (TRBV5-1, TRBJ2-3)
CASSVEGGSFTDTQYF

SEQ ID NO: 683663 - protein, 13 aa, Homo sapiens
  CDR3 for alpha chain variable domain of TCR clone 341832 (TRAV21, TRAJ27)
CAALNTNAGKSTF

SEQ ID NO: 683664 - protein, 12 aa, Homo sapiens
  CDR3 for beta chain variable domain of TCR clone 341832 (TRBV7-9, TRBJ1-4)
CASSTDREKLFF

SEQ ID NO: 683665 - protein, 13 aa, Homo sapiens
  CDR3 for alpha chain variable domain of TCR clone 341833 (TRAV36/DV7, TRAJ34)
CAVGEVNTDKLIF

SEQ ID NO: 683666 - protein, 16 aa, Homo sapiens
  CDR3 for beta chain variable domain of TCR clone 341833 (TRBV27, TRBJ2-5)
CASSYGPGGQKETQYF

SEQ ID NO: 683667 - protein, 19 aa, Homo sapiens
  CDR3 for alpha chain variable domain of TCR clone 341834 (TRAV1-2, TRAJ26)
CLLPLCCERPDNYGQNFVF

SEQ ID NO: 683668 - protein, 15 aa, Homo sapiens
  CDR3 for beta chain variable domain of TCR clone 341834 (TRBV7-2, TRBJ2-1)
CASSSGLAGGNEQFF

SEQ ID NO: 683669 - protein, 14 aa, Homo sapiens
  CDR3 for alpha chain variable domain of TCR clone 341835 (TRAV8-4, TRAJ13)
CSVTLSGGYQKVTF

SEQ ID NO: 683670 - protein, 14 aa, Homo sapiens
  CDR3 for beta chain variable domain of TCR clone 341835 (TRBV7-2, TRBJ1-2)
CASSQTGATYGYTF

SEQ ID NO: 683671 - protein, 12 aa, Homo sapiens
  CDR3 for alpha chain variable domain of TCR clone 341836 (TRAV21, TRAJ12)
CAVMDSSYKLIF

SEQ ID NO: 683672 - protein, 16 aa, Homo sapiens
  CDR3 for beta chain variable domain of TCR clone 341836 (TRBV7-9, TRBJ2-5)
CASRLEIGTRKETQFF

SEQ ID NO: 683673 - protein, 13 aa, Homo sapiens
  CDR3 for alpha chain variable domain of TCR clone 341837 (TRAV3, TRAJ20)
CAVRSLNDYKLSF

SEQ ID NO: 683674 - protein, 12 aa, Homo sapiens
  CDR3 for beta chain variable domain of TCR clone 341837 (TRBV6-1, TRBJ2-1)
CVSYSTYNEQFF

SEQ ID NO: 683675 - protein, 12 aa, Homo sapiens
  CDR3 for alpha chain variable domain of TCR clone 341838 (TRAV26-1, TRAJ43)
CIVRPRGDDMRF

SEQ ID NO: 683676 - protein, 14 aa, Homo sapiens
  CDR3 for beta chain variable domain of TCR clone 341838 (TRBV20-1, TRBJ1-1)
CSAQTRIGGTEAFF

SEQ ID NO: 683677 - protein, 14 aa, Homo sapiens
  CDR3 for alpha chain variable domain of TCR clone 341839 (TRAV12-2, TRAJ17)
CAVNIKPAGNKLTF

SEQ ID NO: 683678 - protein, 16 aa, Homo sapiens
  CDR3 for beta chain variable domain of TCR clone 341839 (TRBV20-1, TRBJ2-6)
CSASSQGYDGANVLTF

SEQ ID NO: 683679 - protein, 14 aa, Homo sapiens
  CDR3 for alpha chain variable domain of TCR clone 341840 (TRAV38-1, TRAJ40)
CALRPTSGTYKYIF

SEQ ID NO: 683680 - protein, 16 aa, Homo sapiens
  CDR3 for beta chain variable domain of TCR clone 341840 (TRBV27, TRBJ2-2)
CASSSSGVSNTGELFF

SEQ ID NO: 683681 - protein, 12 aa, Homo sapiens
  CDR3 for alpha chain variable domain of TCR clone 341841 (TRAV12-2, TRAJ16)
CAVAPDGQKLLF

SEQ ID NO: 683682 - protein, 14 aa, Homo sapiens
  CDR3 for beta chain variable domain of TCR clone 341841 (TRBV13, TRBJ2-3)
CASSLGGPQRHQYF

SEQ ID NO: 683683 - protein, 16 aa, Homo sapiens
  CDR3 for alpha chain variable domain of TCR clone 341842 (TRAV17, TRAJ28)
CASYAYSGAGRYQLTF

SEQ ID NO: 683684 - protein, 15 aa, Homo sapiens
  CDR3 for beta chain variable domain of TCR clone 341842 (TRBV4-2, TRBJ2-1)
CASSPCGGLYNEQFF

SEQ ID NO: 683685 - protein, 15 aa, Homo sapiens
  CDR3 for alpha chain variable domain of TCR clone 341843 (TRAV23/DV6, TRAJ13)
CAAWPGGGGYQTVTF

SEQ ID NO: 683686 - protein, 17 aa, Homo sapiens
  CDR3 for beta chain variable domain of TCR clone 341843 (TRBV19, TRBJ2-7)
CASSISFYYSYPYEQYF

SEQ ID NO: 683687 - protein, 15 aa, Homo sapiens
  CDR3 for alpha chain variable domain of TCR clone 341844 (TRAV3, TRAJ17)
CAVRDTGAAGNKLTF

SEQ ID NO: 683688 - protein, 14 aa, Homo sapiens
  CDR3 for beta chain variable domain of TCR clone 341844 (TRBV6-3, TRBJ1-1)
FASSNLLPGAEAFF

SEQ ID NO: 683689 - protein, 10 aa, Homo sapiens
  CDR3 for alpha chain variable domain of TCR clone 341845 (TRAV2, TRAJ34)
CAVVNDKLIF

SEQ ID NO: 683690 - protein, 13 aa, Homo sapiens
  CDR3 for beta chain variable domain of TCR clone 341845 (TRBV7-7, TRBJ2-2)
CASSLTSAGELFF

SEQ ID NO: 683691 - protein, 18 aa, Homo sapiens
  CDR3 for alpha chain variable domain of TCR clone 341846 (TRAV21, TRAJ52)
CAARPSPAGGTSYGKLTF

SEQ ID NO: 683692 - protein, 13 aa, Homo sapiens
  CDR3 for beta chain variable domain of TCR clone 341846 (TRBV20-1, TRBJ1-1)
CSARVGGNTEAFF

SEQ ID NO: 683693 - protein, 12 aa, Homo sapiens
  CDR3 for alpha chain variable domain of TCR clone 341847 (TRAV12-2, TRAJ10)
WGGTGGGNKLTF

SEQ ID NO: 683694 - protein, 14 aa, Homo sapiens
  CDR3 for beta chain variable domain of TCR clone 341847 (TRBV12-4, TRBJ1-4)
CASSRQGANEKLFF

SEQ ID NO: 683695 - protein, 14 aa, Homo sapiens
  CDR3 for alpha chain variable domain of TCR clone 341848 (TRAV1-2, TRAJ8)
CAVREDTGFQKLVF

SEQ ID NO: 683696 - protein, 14 aa, Homo sapiens
  CDR3 for beta chain variable domain of TCR clone 341848 (TRBV7-2, TRBJ1-5)
CASSTQGAGQPQHF

SEQ ID NO: 683697 - protein, 12 aa, Homo sapiens
  CDR3 for alpha chain variable domain of TCR clone 341849 (TRAV9-2, TRAJ26)
FALRGYGQNFVF

SEQ ID NO: 683698 - protein, 12 aa, Homo sapiens
  CDR3 for beta chain variable domain of TCR clone 341849 (TRBV29-1, TRBJ2-3)
CSVTGGADTQYF

SEQ ID NO: 683699 - protein, 12 aa, Homo sapiens
  CDR3 for alpha chain variable domain of TCR clone 341850 (TRAV12-3, TRAJ20)
CAMVRGDYKLSI

SEQ ID NO: 683700 - protein, 14 aa, Homo sapiens
  CDR3 for beta chain variable domain of TCR clone 341850 (TRBV5-5, TRBJ1-5)
CASSGQGVDQPQHF

SEQ ID NO: 683701 - protein, 14 aa, Homo sapiens
  CDR3 for alpha chain variable domain of TCR clone 341851 (TRAV2, TRAJ9)
CAVEDRSGVFKTIF

SEQ ID NO: 683702 - protein, 19 aa, Homo sapiens
  CDR3 for beta chain variable domain of TCR clone 341851 (TRBV25-1, TRBJ2-2)
CAILVYRVDRGRKTGELFF

SEQ ID NO: 683703 - protein, 14 aa, Homo sapiens
  CDR3 for alpha chain variable domain of TCR clone 341852 (TRAV8-1, TRAJ5)
CAVRTDTGRRALTF

SEQ ID NO: 683704 - protein, 16 aa, Homo sapiens
  CDR3 for beta chain variable domain of TCR clone 341852 (TRBV27, TRBJ2-5)
CASSYGPGGQKETQYF

SEQ ID NO: 683705 - protein, 13 aa, Homo sapiens
  CDR3 for alpha chain variable domain of TCR clone 341853 (TRAV38-2/DV8, TRAJ34)
CAYRTWNTDKLIF

SEQ ID NO: 683706 - protein, 14 aa, Homo sapiens
  CDR3 for beta chain variable domain of TCR clone 341853 (TRBV19, TRBJ1-5)
CASSKMTGPQPQRF

SEQ ID NO: 683707 - protein, 11 aa, Homo sapiens
  CDR3 for alpha chain variable domain of TCR clone 341854 (TRAV2, TRAJ30)
CAANRDDKIIF

SEQ ID NO: 683708 - protein, 14 aa, Homo sapiens
  CDR3 for beta chain variable domain of TCR clone 341854 (TRBV12-4, TRBJ1-1)
CASSLGTGGTEAFF

SEQ ID NO: 683709 - protein, 18 aa, Homo sapiens
  CDR3 for alpha chain variable domain of TCR clone 341855 (TRAV21, TRAJ52)
CAVRPSPAGGTSYGKLTF

SEQ ID NO: 683710 - protein, 16 aa, Homo sapiens
  CDR3 for beta chain variable domain of TCR clone 341855 (TRBV29-1, TRBJ2-2)
CSVEKTSEGNTGELFF

SEQ ID NO: 683711 - protein, 14 aa, Homo sapiens
  CDR3 for alpha chain variable domain of TCR clone 341856 (TRAV16, TRAJ30)
CALSLMNRDDKIIF

SEQ ID NO: 683712 - protein, 15 aa, Homo sapiens
  CDR3 for beta chain variable domain of TCR clone 341856 (TRBV6-3, TRBJ2-7)
CASSSPGTVFYEQYF

SEQ ID NO: 683713 - protein, 14 aa, Homo sapiens
  CDR3 for alpha chain variable domain of TCR clone 341857 (TRAV1-2, TRAJ8)
CAVREDTGFQKLVF

SEQ ID NO: 683714 - protein, 14 aa, Homo sapiens
  CDR3 for beta chain variable domain of TCR clone 341857 (TRBV11-3, TRBJ2-3)
CASSRLVRTDTQYF

SEQ ID NO: 683715 - protein, 12 aa, Homo sapiens
  CDR3 for alpha chain variable domain of TCR clone 341858 (TRAV17, TRAJ12)
CATFRSSYKLIF

SEQ ID NO: 683716 - protein, 16 aa, Homo sapiens
  CDR3 for beta chain variable domain of TCR clone 341858 (TRBV28, TRBJ2-7)
CASSLFFETGGPEQYF

SEQ ID NO: 683717 - protein, 11 aa, Homo sapiens
  CDR3 for alpha chain variable domain of TCR clone 341859 (TRAV3, TRAJ32)
CAVREGIMVVL

SEQ ID NO: 683718 - protein, 15 aa, Homo sapiens
  CDR3 for beta chain variable domain of TCR clone 341859 (TRBV2, TRBJ1-1)
CASSEGGNTEALLDK

SEQ ID NO: 683719 - protein, 13 aa, Homo sapiens
  CDR3 for alpha chain variable domain of TCR clone 341860 (TRAV12-3, TRAJ33)
CAMSVNSNYQFIW

SEQ ID NO: 683720 - protein, 15 aa, Homo sapiens
  CDR3 for beta chain variable domain of TCR clone 341860 (TRBV20-1, TRBJ2-7)
CSARDRVSGMDEQYF

SEQ ID NO: 683721 - protein, 12 aa, Homo sapiens
  CDR3 for alpha chain variable domain of TCR clone 341861 (TRAV21, TRAJ33)
CAKMDSNYQLIW

SEQ ID NO: 683722 - protein, 16 aa, Homo sapiens
  CDR3 for beta chain variable domain of TCR clone 341861 (TRBV9, TRBJ2-7)
CASSVGLGGGTYEQYF

SEQ ID NO: 683723 - protein, 14 aa, Homo sapiens
  CDR3 for alpha chain variable domain of TCR clone 341862 (TRAV8-3, TRAJ44)
CAVGNTGTASKLTF

SEQ ID NO: 683724 - protein, 15 aa, Homo sapiens
  CDR3 for beta chain variable domain of TCR clone 341862 (TRBV28, TRBJ2-7)
CASSFRGQGRYKQYF

SEQ ID NO: 683725 - protein, 14 aa, Homo sapiens
  CDR3 for alpha chain variable domain of TCR clone 341863 (TRAV1-2, TRAJ16)
CAVNRFSDGQKPLF

SEQ ID NO: 683726 - protein, 14 aa, Homo sapiens
  CDR3 for beta chain variable domain of TCR clone 341863 (TRBV19, TRBJ2-5)
CASSMTGQQETQYF

SEQ ID NO: 683727 - protein, 13 aa, Homo sapiens
  CDR3 for alpha chain variable domain of TCR clone 341864 (TRAV8-4, TRAJ30)
CAGSVNRDDKIIF

SEQ ID NO: 683728 - protein, 13 aa, Homo sapiens
  CDR3 for beta chain variable domain of TCR clone 341864 (TRBV3-1, TRBJ2-2)
CASLAGGSGELFF

SEQ ID NO: 683729 - protein, 15 aa, Homo sapiens
  CDR3 for alpha chain variable domain of TCR clone 341865 (TRAV8-3, TRAJ37)
CAVGARASNTGKLIF

SEQ ID NO: 683730 - protein, 13 aa, Homo sapiens
  CDR3 for beta chain variable domain of TCR clone 341865 (TRBV13, TRBJ2-7)
CASSFTGRYEQYF

SEQ ID NO: 683731 - protein, 13 aa, Homo sapiens
  CDR3 for alpha chain variable domain of TCR clone 341866 (TRAV12-3, TRAJ7)
CAMTPYGNNRLAF

SEQ ID NO: 683732 - protein, 16 aa, Homo sapiens
  CDR3 for beta chain variable domain of TCR clone 341866 (TRBV20-1, TRBJ1-4)
CSASPYGGELNENLFF

SEQ ID NO: 683733 - protein, 16 aa, Homo sapiens
  CDR3 for alpha chain variable domain of TCR clone 341867 (TRAV3, TRAJ10)
CAVRDMRAGGGNKLIF

SEQ ID NO: 683734 - protein, 19 aa, Homo sapiens
  CDR3 for beta chain variable domain of TCR clone 341867 (TRBV6-3, TRBJ1-2)
CASSYSKGRTGPPNYGYTF

SEQ ID NO: 683735 - protein, 13 aa, Homo sapiens
  CDR3 for alpha chain variable domain of TCR clone 341868 (TRAV23/DV6, TRAJ16)
CAARSSDGQKLLF

SEQ ID NO: 683736 - protein, 15 aa, Homo sapiens
  CDR3 for beta chain variable domain of TCR clone 341868 (TRBV2, TRBJ2-2)
CASSRETVGTGELFF

SEQ ID NO: 683737 - protein, 15 aa, Homo sapiens
  CDR3 for alpha chain variable domain of TCR clone 341869 (TRAV12-1, TRAJ44)
CVADLPTGTASKLTF

SEQ ID NO: 683738 - protein, 13 aa, Homo sapiens
  CDR3 for beta chain variable domain of TCR clone 341869 (TRBV12-4, TRBJ1-2)
CASSLRQGKGYTF

SEQ ID NO: 683739 - protein, 11 aa, Homo sapiens
  CDR3 for alpha chain variable domain of TCR clone 341870 (TRAV8-4, TRAJ20)
CCVLNDYKLSF

SEQ ID NO: 683740 - protein, 12 aa, Homo sapiens
  CDR3 for beta chain variable domain of TCR clone 341870 (TRBV11-2, TRBJ2-1)
CASRQAHNEQFF

SEQ ID NO: 683741 - protein, 16 aa, Homo sapiens
  CDR3 for alpha chain variable domain of TCR clone 341871 (TRAV30, TRAJ24)
CGTEIVEADSWGTFQF

SEQ ID NO: 683742 - protein, 14 aa, Homo sapiens
  CDR3 for beta chain variable domain of TCR clone 341871 (TRBV12-5, TRBJ2-5)
CASGSRTHQETQYF

SEQ ID NO: 683743 - protein, 16 aa, Homo sapiens
  CDR3 for alpha chain variable domain of TCR clone 341872 (TRAV30, TRAJ24)
CGTEIVGADSWGKFQF

SEQ ID NO: 683744 - protein, 14 aa, Homo sapiens
  CDR3 for beta chain variable domain of TCR clone 341872 (TRBV20-1, TRBJ2-7)
CSAKTGTGGYEQYF

SEQ ID NO: 683745 - protein, 13 aa, Homo sapiens
  CDR3 for alpha chain variable domain of TCR clone 341873 (TRAV17, TRAJ15)
CATDARAGTALIF

SEQ ID NO: 683746 - protein, 16 aa, Homo sapiens
  CDR3 for beta chain variable domain of TCR clone 341873 (TRBV7-3, TRBJ2-1)
CASSLEGYRSYNEQFF

SEQ ID NO: 683747 - protein, 14 aa, Homo sapiens
  CDR3 for alpha chain variable domain of TCR clone 341874 (TRAV12-2, TRAJ13)
CAVRKTGGCQKVTF

SEQ ID NO: 683748 - protein, 15 aa, Homo sapiens
  CDR3 for beta chain variable domain of TCR clone 341874 (TRBV27, TRBJ2-1)
CASSNGGGSSNEQFF

SEQ ID NO: 683749 - protein, 12 aa, Homo sapiens
  CDR3 for alpha chain variable domain of TCR clone 341875 (TRAV13-2, TRAJ23)
CAERHRGGKLIF

SEQ ID NO: 683750 - protein, 15 aa, Homo sapiens
  CDR3 for beta chain variable domain of TCR clone 341875 (TRBV9, TRBJ1-6)
CASSVAGTGDSHLHF

SEQ ID NO: 683751 - protein, 14 aa, Homo sapiens
  CDR3 for alpha chain variable domain of TCR clone 341876 (TRAV29/DV5, TRAJ45)
CAASFRGGAAGLPF

SEQ ID NO: 683752 - protein, 11 aa, Homo sapiens
  CDR3 for beta chain variable domain of TCR clone 341876 (TRBV11-2, TRBJ2-2)
CASSLPGELFF

SEQ ID NO: 683753 - protein, 21 aa, Homo sapiens
  CDR3 for alpha chain variable domain of TCR clone 341877 (TRAV2, TRAJ20)
AAHPQVREADAAVYRDCKLSF

SEQ ID NO: 683754 - protein, 13 aa, Homo sapiens
  CDR3 for beta chain variable domain of TCR clone 341877 (TRBV15, TRBJ1-6)
CATSGGLNSPLHF

SEQ ID NO: 683755 - protein, 16 aa, Homo sapiens
  CDR3 for alpha chain variable domain of TCR clone 341878 (TRAV4, TRAJ9)
CLVGDPNRPGGFKTIF

SEQ ID NO: 683756 - protein, 17 aa, Homo sapiens
  CDR3 for beta chain variable domain of TCR clone 341878 (TRBV4-1, TRBJ2-7)
CASSRDPLGVRGGEQYF

SEQ ID NO: 683757 - protein, 15 aa, Homo sapiens
  CDR3 for alpha chain variable domain of TCR clone 341879 (TRAV8-3, TRAJ45)
FASSYSGGGADGLTF

SEQ ID NO: 683758 - protein, 16 aa, Homo sapiens
  CDR3 for beta chain variable domain of TCR clone 341879 (TRBV20-1, TRBJ2-2)
CSASASGIPGAGELFF

SEQ ID NO: 683759 - protein, 14 aa, Homo sapiens
  CDR3 for alpha chain variable domain of TCR clone 341880 (TRAV9-2, TRAJ39)
CALYIYNAGNMLTF

SEQ ID NO: 683760 - protein, 13 aa, Homo sapiens
  CDR3 for beta chain variable domain of TCR clone 341880 (TRBV28, TRBJ2-7)
CASSLPSRYEQYF

SEQ ID NO: 683761 - protein, 14 aa, Homo sapiens
  CDR3 for alpha chain variable domain of TCR clone 341881 (TRAV35, TRAJ42)
CAGRYGGSQGNLIF

SEQ ID NO: 683762 - protein, 18 aa, Homo sapiens
  CDR3 for beta chain variable domain of TCR clone 341881 (TRBV7-9, TRBJ2-3)
CASSLGGASRGAPNTQYF

SEQ ID NO: 683763 - protein, 16 aa, Homo sapiens
  CDR3 for alpha chain variable domain of TCR clone 341882 (TRAV23/DV6, )
CAADIQNPDPAVYQLR

SEQ ID NO: 683764 - protein, 14 aa, Homo sapiens
  CDR3 for beta chain variable domain of TCR clone 341882 (TRBV5-7, TRBJ1-6)
CASSFAGHNSPLHF

SEQ ID NO: 683765 - protein, 18 aa, Homo sapiens
  CDR3 for alpha chain variable domain of TCR clone 341883 (TRAV12-2, )
CAVEDIQNPDPAVYQLRD

SEQ ID NO: 683766 - protein, 18 aa, Homo sapiens
  CDR3 for beta chain variable domain of TCR clone 341883 (TRBV6-1, TRBJ1-2)
CASSGAWQGRSHGYTLVR

SEQ ID NO: 683767 - protein, 13 aa, Homo sapiens
  CDR3 for alpha chain variable domain of TCR clone 341884 (TRAV2, TRAJ40)
CAEVTSGTYKYIF

SEQ ID NO: 683768 - protein, 14 aa, Homo sapiens
  CDR3 for beta chain variable domain of TCR clone 341884 (TRBV19, TRBJ2-1)
CASPTFALSGEQFF

SEQ ID NO: 683769 - protein, 15 aa, Homo sapiens
  CDR3 for alpha chain variable domain of TCR clone 341885 (TRAV8-2, TRAJ44)
CVVSPNTGTASKPTF

SEQ ID NO: 683770 - protein, 12 aa, Homo sapiens
  CDR3 for beta chain variable domain of TCR clone 341885 (TRBV11-2, TRBJ2-2)
CAVPRNTGELFF

SEQ ID NO: 683771 - protein, 14 aa, Homo sapiens
  CDR3 for alpha chain variable domain of TCR clone 341886 (TRAV35, TRAJ13)
CAGSPSGGYQKVTF

SEQ ID NO: 683772 - protein, 13 aa, Homo sapiens
  CDR3 for beta chain variable domain of TCR clone 341886 (TRBV29-1, TRBJ1-1)
CSVRDSRNTDAFF

SEQ ID NO: 683773 - protein, 15 aa, Homo sapiens
  CDR3 for alpha chain variable domain of TCR clone 341887 (TRAV3, TRAJ15)
CAVRPANQAGTALIF

SEQ ID NO: 683774 - protein, 15 aa, Homo sapiens
  CDR3 for beta chain variable domain of TCR clone 341887 (TRBV7-6, TRBJ1-5)
CASSQSSGINQPQHF

SEQ ID NO: 683775 - protein, 13 aa, Homo sapiens
  CDR3 for alpha chain variable domain of TCR clone 341888 (TRAV12-1, TRAJ7)
CVVNMRGNNRLAF

SEQ ID NO: 683776 - protein, 15 aa, Homo sapiens
  CDR3 for beta chain variable domain of TCR clone 341888 (TRBV27, TRBJ2-3)
RASSLGLAATDTQYF

SEQ ID NO: 683777 - protein, 13 aa, Homo sapiens
  CDR3 for alpha chain variable domain of TCR clone 341889 (TRAV2, TRAJ40)
CAVVTSGTYKYIF

SEQ ID NO: 683778 - protein, 15 aa, Homo sapiens
  CDR3 for beta chain variable domain of TCR clone 341889 (TRBV10-3, TRBJ2-2)
CAISPGRTNTGELFF

SEQ ID NO: 683779 - protein, 19 aa, Homo sapiens
  CDR3 for alpha chain variable domain of TCR clone 341890 (TRAV16, TRAJ26)
CAPEELWSEFCLWSRNLIV

SEQ ID NO: 683780 - protein, 15 aa, Homo sapiens
  CDR3 for beta chain variable domain of TCR clone 341890 (TRBV7-2, TRBJ2-3)
CASSLTGTSTDTQYF

SEQ ID NO: 683781 - protein, 12 aa, Homo sapiens
  CDR3 for alpha chain variable domain of TCR clone 341891 (TRAV21, TRAJ39)
CAADNAGNMLTF

SEQ ID NO: 683782 - protein, 13 aa, Homo sapiens
  CDR3 for beta chain variable domain of TCR clone 341891 (TRBV12-4, TRBJ1-1)
CASSPGTGFEAFF

SEQ ID NO: 683783 - protein, 13 aa, Homo sapiens
  CDR3 for alpha chain variable domain of TCR clone 341892 (TRAV30, TRAJ24)
CGTVTDSWGKLQF

SEQ ID NO: 683784 - protein, 15 aa, Homo sapiens
  CDR3 for beta chain variable domain of TCR clone 341892 (TRBV25-1, TRBJ1-4)
CASSPGGSTNEKLFF

SEQ ID NO: 683785 - protein, 13 aa, Homo sapiens
  CDR3 for alpha chain variable domain of TCR clone 341893 (TRAV21, TRAJ57)
CAVTQGGAGKLVF

SEQ ID NO: 683786 - protein, 11 aa, Homo sapiens
  CDR3 for beta chain variable domain of TCR clone 341893 (TRBV11-2, TRBJ2-2)
CASSLPGELFF

SEQ ID NO: 683787 - protein, 14 aa, Homo sapiens
  CDR3 for alpha chain variable domain of TCR clone 341894 (TRAV12-2, TRAJ13)
CAVKKTGCYQKVTF

SEQ ID NO: 683788 - protein, 15 aa, Homo sapiens
  CDR3 for beta chain variable domain of TCR clone 341894 (TRBV20-1, TRBJ2-1)
CSARGIGGTYNEQFF

SEQ ID NO: 683789 - protein, 11 aa, Homo sapiens
  CDR3 for alpha chain variable domain of TCR clone 341895 (TRAV12-2, TRAJ29)
YAVTLRSPLVF

SEQ ID NO: 683790 - protein, 16 aa, Homo sapiens
  CDR3 for beta chain variable domain of TCR clone 341895 (TRBV19, TRBJ1-5)
CASSIDRGGPRQPQHF

SEQ ID NO: 683791 - protein, 10 aa, Homo sapiens
  CDR3 for alpha chain variable domain of TCR clone 341896 (TRAV26-1, TRAJ40)
CIAGTYKYIF

SEQ ID NO: 683792 - protein, 13 aa, Homo sapiens
  CDR3 for beta chain variable domain of TCR clone 341896 (TRBV7-9, TRBJ1-1)
CASSLSGETEAFF

SEQ ID NO: 683793 - protein, 14 aa, Homo sapiens
  CDR3 for alpha chain variable domain of TCR clone 341897 (TRAV27, TRAJ36)
CAGPPKRGANNLFF

SEQ ID NO: 683794 - protein, 14 aa, Homo sapiens
  CDR3 for beta chain variable domain of TCR clone 341897 (TRBV18, TRBJ2-7)
PSSPASTPNYEQYF

SEQ ID NO: 683795 - protein, 15 aa, Homo sapiens
  CDR3 for alpha chain variable domain of TCR clone 341898 (TRAV38-2/DV8, TRAJ57)
CSYGRVFGKGTKLTV

SEQ ID NO: 683796 - protein, 18 aa, Homo sapiens
  CDR3 for beta chain variable domain of TCR clone 341898 (TRBV18, TRBJ1-1)
CASSLPGAPQGAGTEAFF

SEQ ID NO: 683797 - protein, 12 aa, Homo sapiens
  CDR3 for alpha chain variable domain of TCR clone 341899 (TRAV1-2, TRAJ37)
CAFPGNTGKLIL

SEQ ID NO: 683798 - protein, 17 aa, Homo sapiens
  CDR3 for beta chain variable domain of TCR clone 341899 (TRBV4-2, TRBJ1-1)
CASSQVATGGMNTEAFF

SEQ ID NO: 683799 - protein, 15 aa, Homo sapiens
  CDR3 for alpha chain variable domain of TCR clone 341900 (TRAV21, TRAJ24)
CALGLQLTAGGNCSL

SEQ ID NO: 683800 - protein, 13 aa, Homo sapiens
  CDR3 for beta chain variable domain of TCR clone 341900 (TRBV11-2, TRBJ2-5)
CASSSTGEETQYF

SEQ ID NO: 683801 - protein, 15 aa, Homo sapiens
  CDR3 for alpha chain variable domain of TCR clone 341901 (TRAV27, TRAJ38)
CAARRNAGNNRKLIW

SEQ ID NO: 683802 - protein, 16 aa, Homo sapiens
  CDR3 for beta chain variable domain of TCR clone 341901 (TRBV2, TRBJ1-1)
CASSPPNRGMNTEAFF

SEQ ID NO: 683803 - protein, 12 aa, Homo sapiens
  CDR3 for alpha chain variable domain of TCR clone 341902 (TRAV16, TRAJ10)
RSRTGGGNKLTF

SEQ ID NO: 683804 - protein, 13 aa, Homo sapiens
  CDR3 for beta chain variable domain of TCR clone 341902 (TRBV15, TRBJ2-7)
CATSTTGHYEQYF

SEQ ID NO: 683805 - protein, 14 aa, Homo sapiens
  CDR3 for alpha chain variable domain of TCR clone 341903 (TRAV1-2, TRAJ16)
CAVNRFSDGQKLLF

SEQ ID NO: 683806 - protein, 17 aa, Homo sapiens
  CDR3 for beta chain variable domain of TCR clone 341903 (TRBV19, TRBJ2-2)
CASSRNPGGFGTGELFF

SEQ ID NO: 683807 - protein, 12 aa, Homo sapiens
  CDR3 for alpha chain variable domain of TCR clone 341904 (TRAV12-3, TRAJ17)
CAMTLTGNKLTF

SEQ ID NO: 683808 - protein, 13 aa, Homo sapiens
  CDR3 for beta chain variable domain of TCR clone 341904 (TRBV2, TRBJ1-2)
CASTWTGEDGYTF

SEQ ID NO: 683809 - protein, 14 aa, Homo sapiens
  CDR3 for alpha chain variable domain of TCR clone 341905 (TRAV12-1, TRAJ27)
CGEHIITNAGKSTF

SEQ ID NO: 683810 - protein, 15 aa, Homo sapiens
  CDR3 for beta chain variable domain of TCR clone 341905 (TRBV19, TRBJ1-1)
CASTSGQIQNTEAFF

SEQ ID NO: 683811 - protein, 15 aa, Homo sapiens
  CDR3 for alpha chain variable domain of TCR clone 341906 (TRAV12-2, TRAJ53)
CAVNGGGGSNYKLTF

SEQ ID NO: 683812 - protein, 15 aa, Homo sapiens
  CDR3 for beta chain variable domain of TCR clone 341906 (TRBV9, TRBJ2-1)
CASSLAGSSYNEQFF

SEQ ID NO: 683813 - protein, 16 aa, Homo sapiens
  CDR3 for alpha chain variable domain of TCR clone 341907 (TRAV26-1, TRAJ36)
CIVRVPDQTGANNLFF

SEQ ID NO: 683814 - protein, 15 aa, Homo sapiens
  CDR3 for beta chain variable domain of TCR clone 341907 (TRBV9, TRBJ1-6)
CASSVAGTGDSPLHF

SEQ ID NO: 683815 - protein, 12 aa, Homo sapiens
  CDR3 for alpha chain variable domain of TCR clone 341908 (TRAV12-2, TRAJ47)
CAVAEYGNKLVF

SEQ ID NO: 683816 - protein, 12 aa, Homo sapiens
  CDR3 for beta chain variable domain of TCR clone 341908 (TRBV11-2, TRBJ2-2)
CASSLGGGELFF

SEQ ID NO: 683817 - protein, 15 aa, Homo sapiens
  CDR3 for alpha chain variable domain of TCR clone 341909 (TRAV8-6, TRAJ10)
CAGSDQAGGGNKLTF

SEQ ID NO: 683818 - protein, 13 aa, Homo sapiens
  CDR3 for beta chain variable domain of TCR clone 341909 (TRBV10-2, TRBJ2-3)
CASSESGDHTQYF

SEQ ID NO: 683819 - protein, 15 aa, Homo sapiens
  CDR3 for alpha chain variable domain of TCR clone 341910 (TRAV3, TRAJ47)
CAVSDIGEFGNKLGF

SEQ ID NO: 683820 - protein, 14 aa, Homo sapiens
  CDR3 for beta chain variable domain of TCR clone 341910 (TRBV13, TRBJ2-5)
CASSLERVGETQYF

SEQ ID NO: 683821 - protein, 13 aa, Homo sapiens
  CDR3 for alpha chain variable domain of TCR clone 341911 (TRAV21, TRAJ20)
CAVSRIGDYKLSF

SEQ ID NO: 683822 - protein, 13 aa, Homo sapiens
  CDR3 for beta chain variable domain of TCR clone 341911 (TRBV7-3, TRBJ1-1)
CASSPAGGREAFF

SEQ ID NO: 683823 - protein, 12 aa, Homo sapiens
  CDR3 for alpha chain variable domain of TCR clone 341912 (TRAV2, TRAJ33)
CAVPDSNYQLIW

SEQ ID NO: 683824 - protein, 15 aa, Homo sapiens
  CDR3 for beta chain variable domain of TCR clone 341912 (TRBV15, TRBJ1-5)
CDTSRDPVSNQPQHF

SEQ ID NO: 683825 - protein, 17 aa, Homo sapiens
  CDR3 for alpha chain variable domain of TCR clone 341913 (TRAV3, TRAJ6)
CAVRDGPRAGGSYIPTF

SEQ ID NO: 683826 - protein, 14 aa, Homo sapiens
  CDR3 for beta chain variable domain of TCR clone 341913 (TRBV7-2, TRBJ2-7)
CASSPKTSVYEQHF

SEQ ID NO: 683827 - protein, 11 aa, Homo sapiens
  CDR3 for alpha chain variable domain of TCR clone 341914 (TRAV17, TRAJ31)
CATSNNARLMF

SEQ ID NO: 683828 - protein, 12 aa, Homo sapiens
  CDR3 for beta chain variable domain of TCR clone 341914 (TRBV19, TRBJ1-5)
CASSIAQQPQHF

SEQ ID NO: 683829 - protein, 12 aa, Homo sapiens
  CDR3 for alpha chain variable domain of TCR clone 341915 (TRAV17, TRAJ57)
CATDGGSEKLVF

SEQ ID NO: 683830 - protein, 13 aa, Homo sapiens
  CDR3 for beta chain variable domain of TCR clone 341915 (TRBV7-9, TRBJ2-7)
CASSFAGAYEEYF

SEQ ID NO: 683831 - protein, 14 aa, Homo sapiens
  CDR3 for alpha chain variable domain of TCR clone 341916 (TRAV12-1, TRAJ17)
CVGNYKAAGNKLTF

SEQ ID NO: 683832 - protein, 14 aa, Homo sapiens
  CDR3 for beta chain variable domain of TCR clone 341916 (TRBV20-1, TRBJ2-2)
CSAPDTANTGELFF

SEQ ID NO: 683833 - protein, 14 aa, Homo sapiens
  CDR3 for alpha chain variable domain of TCR clone 341917 (TRAV3, TRAJ33)
CAVRDMGSNYQLIW

SEQ ID NO: 683834 - protein, 17 aa, Homo sapiens
  CDR3 for beta chain variable domain of TCR clone 341917 (TRBV19, TRBJ2-1)
CASSIWSAQPTHNEQLF

SEQ ID NO: 683835 - protein, 18 aa, Homo sapiens
  CDR3 for alpha chain variable domain of TCR clone 341918 (TRAV26-2, TRAJ54)
CILRDGEVGIQGAQKLVF

SEQ ID NO: 683836 - protein, 16 aa, Homo sapiens
  CDR3 for beta chain variable domain of TCR clone 341918 (TRBV6-1, TRBJ2-5)
CASSETLDRGAENQYF

SEQ ID NO: 683837 - protein, 15 aa, Homo sapiens
  CDR3 for alpha chain variable domain of TCR clone 341919 (TRAV12-3, TRAJ6)
CAMSATTGGSYIPTF

SEQ ID NO: 683838 - protein, 13 aa, Homo sapiens
  CDR3 for beta chain variable domain of TCR clone 341919 (TRBV11-2, TRBJ2-7)
CASSGTRPYEQYF

SEQ ID NO: 683839 - protein, 14 aa, Homo sapiens
  CDR3 for alpha chain variable domain of TCR clone 341920 (TRAV1-2, TRAJ16)
CAVNRFSDGEKLLF

SEQ ID NO: 683840 - protein, 15 aa, Homo sapiens
  CDR3 for beta chain variable domain of TCR clone 341920 (TRBV7-9, TRBJ2-2)
CASGPLDTFPGELFF

SEQ ID NO: 683841 - protein, 15 aa, Homo sapiens
  CDR3 for alpha chain variable domain of TCR clone 341921 (TRAV23/DV6, TRAJ18)
CAARYRGSTLGRLYF

SEQ ID NO: 683842 - protein, 17 aa, Homo sapiens
  CDR3 for beta chain variable domain of TCR clone 341921 (TRBV28, TRBJ2-1)
CASSLSVAGGPVDEQFF

SEQ ID NO: 683843 - protein, 15 aa, Homo sapiens
  CDR3 for alpha chain variable domain of TCR clone 341922 (TRAV8-3, TRAJ45)
CASSYSGGGADGLTF

SEQ ID NO: 683844 - protein, 15 aa, Homo sapiens
  CDR3 for beta chain variable domain of TCR clone 341922 (TRBV12-4, TRBJ2-1)
CASSLLVTGNNEQFF

SEQ ID NO: 683845 - protein, 14 aa, Homo sapiens
  CDR3 for alpha chain variable domain of TCR clone 341923 (TRAV1-2, TRAJ8)
CAVREETGFQKLVF

SEQ ID NO: 683846 - protein, 16 aa, Homo sapiens
  CDR3 for beta chain variable domain of TCR clone 341923 (TRBV27, TRBJ2-2)
CASSFRGLVRTGELFF

SEQ ID NO: 683847 - protein, 17 aa, Homo sapiens
  CDR3 for alpha chain variable domain of TCR clone 341924 (TRAV8-6, TRAJ58)
CAVSSWVGETSGSRLTF

SEQ ID NO: 683848 - protein, 13 aa, Homo sapiens
  CDR3 for beta chain variable domain of TCR clone 341924 (TRBV19, TRBJ2-2)
CASSIWSTGELFF

SEQ ID NO: 683849 - protein, 13 aa, Homo sapiens
  CDR3 for alpha chain variable domain of TCR clone 341925 (TRAV27, TRAJ8)
FAGGPTGFQKLAF

SEQ ID NO: 683850 - protein, 15 aa, Homo sapiens
  CDR3 for beta chain variable domain of TCR clone 341925 (TRBV6-1, TRBJ2-7)
CASSESMGDFYEQYF

SEQ ID NO: 683851 - protein, 13 aa, Homo sapiens
  CDR3 for alpha chain variable domain of TCR clone 341926 (TRAV12-1, TRAJ16)
CVVNGPDGQKLLF

SEQ ID NO: 683852 - protein, 13 aa, Homo sapiens
  CDR3 for beta chain variable domain of TCR clone 341926 (TRBV2, TRBJ1-1)
CARNPTGGFHAFS

SEQ ID NO: 683853 - protein, 11 aa, Homo sapiens
  CDR3 for alpha chain variable domain of TCR clone 341927 (TRAV8-3, TRAJ16)
CAVVPCQKLLF

SEQ ID NO: 683854 - protein, 12 aa, Homo sapiens
  CDR3 for beta chain variable domain of TCR clone 341927 (TRBV3-1, TRBJ1-1)
CASSQDPTEAFF

SEQ ID NO: 683855 - protein, 11 aa, Homo sapiens
  CDR3 for alpha chain variable domain of TCR clone 341928 (TRAV4, TRAJ28)
CLVGDNRAETL

SEQ ID NO: 683856 - protein, 15 aa, Homo sapiens
  CDR3 for beta chain variable domain of TCR clone 341928 (TRBV20-1, TRBJ2-7)
CSARERVSGMDEQYF

SEQ ID NO: 683857 - protein, 14 aa, Homo sapiens
  CDR3 for alpha chain variable domain of TCR clone 341929 (TRAV8-3, TRAJ3)
CAVVPRSSASKTIF

SEQ ID NO: 683858 - protein, 16 aa, Homo sapiens
  CDR3 for beta chain variable domain of TCR clone 341929 (TRBV4-1, TRBJ2-3)
CASSQLTSGGGDTQYF

SEQ ID NO: 683859 - protein, 13 aa, Homo sapiens
  CDR3 for alpha chain variable domain of TCR clone 341930 (TRAV21, TRAJ40)
CAVRPSRAYKYIV

SEQ ID NO: 683860 - protein, 15 aa, Homo sapiens
  CDR3 for beta chain variable domain of TCR clone 341930 (TRBV5-1, TRBJ2-7)
CASSLYPDGGYEQYF

SEQ ID NO: 683861 - protein, 12 aa, Homo sapiens
  CDR3 for alpha chain variable domain of TCR clone 341931 (TRAV17, TRAJ20)
CATDGDDYKLSF

SEQ ID NO: 683862 - protein, 15 aa, Homo sapiens
  CDR3 for beta chain variable domain of TCR clone 341931 (TRBV11-3, TRBJ2-3)
CASLKDGREGDTQYF

SEQ ID NO: 683863 - protein, 13 aa, Homo sapiens
  CDR3 for alpha chain variable domain of TCR clone 341932 (TRAV16, TRAJ34)
CALSPYNTDKLIF

SEQ ID NO: 683864 - protein, 13 aa, Homo sapiens
  CDR3 for beta chain variable domain of TCR clone 341932 (TRBV19, TRBJ1-2)
CASSVPGQDGYTF

SEQ ID NO: 683865 - protein, 15 aa, Homo sapiens
  CDR3 for alpha chain variable domain of TCR clone 341933 (TRAV17, TRAJ57)
CATGPSPGGSEQLVF

SEQ ID NO: 683866 - protein, 16 aa, Homo sapiens
  CDR3 for beta chain variable domain of TCR clone 341933 (TRBV12-4, TRBJ1-5)
CASSRPVGGSNQPQHF

SEQ ID NO: 683867 - protein, 16 aa, Homo sapiens
  CDR3 for alpha chain variable domain of TCR clone 341934 (TRAV21, TRAJ37)
CAVRTAGSSNTGKLIF

SEQ ID NO: 683868 - protein, 13 aa, Homo sapiens
  CDR3 for beta chain variable domain of TCR clone 341934 (TRBV7-9, TRBJ2-5)
CASLPSGRETQYS

SEQ ID NO: 683869 - protein, 15 aa, Homo sapiens
  CDR3 for alpha chain variable domain of TCR clone 341935 (TRAV12-2, TRAJ53)
CAVNGGGGSNYKLKF

SEQ ID NO: 683870 - protein, 17 aa, Homo sapiens
  CDR3 for beta chain variable domain of TCR clone 341935 (TRBV7-3, TRBJ2-3)
RARSLMKRMRGADTQYF

SEQ ID NO: 683871 - protein, 12 aa, Homo sapiens
  CDR3 for alpha chain variable domain of TCR clone 341936 (TRAV13-1, TRAJ49)
CAAPNTGNQFYF

SEQ ID NO: 683872 - protein, 20 aa, Homo sapiens
  CDR3 for beta chain variable domain of TCR clone 341936 (TRBV5-7, TRBJ2-2)
CASSLGTSGRGWLDTGELFF

SEQ ID NO: 683873 - protein, 13 aa, Homo sapiens
  CDR3 for alpha chain variable domain of TCR clone 341937 (TRAV12-3, TRAJ54)
RALVPQGAQKLVF

SEQ ID NO: 683874 - protein, 15 aa, Homo sapiens
  CDR3 for beta chain variable domain of TCR clone 341937 (TRBV4-1, TRBJ2-2)
CASSQDSRGTGELLF

SEQ ID NO: 683875 - protein, 23 aa, Homo sapiens
  CDR3 for alpha chain variable domain of TCR clone 341938 (TRAV1-1, TRAJ4)
LTMELQMKDSASYFCVLYNKLIF

SEQ ID NO: 683876 - protein, 16 aa, Homo sapiens
  CDR3 for beta chain variable domain of TCR clone 341938 (TRBV7-3, TRBJ2-2)
CASSLKRGTLSGELFF

SEQ ID NO: 683877 - protein, 12 aa, Homo sapiens
  CDR3 for alpha chain variable domain of TCR clone 341939 (TRAV2, TRAJ33)
CAVPDSNYHLIW

SEQ ID NO: 683878 - protein, 15 aa, Homo sapiens
  CDR3 for beta chain variable domain of TCR clone 341939 (TRBV15, TRBJ1-5)
CATSRDPVSNQPQHF

SEQ ID NO: 683879 - protein, 16 aa, Homo sapiens
  CDR3 for alpha chain variable domain of TCR clone 341940 (TRAV21, TRAJ37)
CAVRPRGFSNTSKLIF

SEQ ID NO: 683880 - protein, 16 aa, Homo sapiens
  CDR3 for beta chain variable domain of TCR clone 341940 (TRBV2, TRBJ2-1)
CASSVGGSLSYNEQFF

SEQ ID NO: 683881 - protein, 13 aa, Homo sapiens
  CDR3 for alpha chain variable domain of TCR clone 341941 (TRAV8-2, TRAJ34)
CVVSDRSTDKLIF

SEQ ID NO: 683882 - protein, 15 aa, Homo sapiens
  CDR3 for beta chain variable domain of TCR clone 341941 (TRBV20-1, TRBJ2-3)
CSARVVGGSTDTQYF

SEQ ID NO: 683883 - protein, 16 aa, Homo sapiens
  CDR3 for alpha chain variable domain of TCR clone 341942 (TRAV20, TRAJ53)
CAVQGNSGGSNYKLTF

SEQ ID NO: 683884 - protein, 14 aa, Homo sapiens
  CDR3 for beta chain variable domain of TCR clone 341942 (TRBV7-2, TRBJ1-1)
CASSFLTGTTEAFF

SEQ ID NO: 683885 - protein, 12 aa, Homo sapiens
  CDR3 for alpha chain variable domain of TCR clone 341943 (TRAV13-1, TRAJ21)
CAAKEGFNKFYF

SEQ ID NO: 683886 - protein, 18 aa, Homo sapiens
  CDR3 for beta chain variable domain of TCR clone 341943 (TRBV10-3, TRBJ2-3)
CAISESRVGPMRGDTQYF

SEQ ID NO: 683887 - protein, 16 aa, Homo sapiens
  CDR3 for alpha chain variable domain of TCR clone 341944 (TRAV3, TRAJ37)
CAVRGKGSGSTGKLFF

SEQ ID NO: 683888 - protein, 13 aa, Homo sapiens
  CDR3 for beta chain variable domain of TCR clone 341944 (TRBV14, TRBJ2-7)
CASSQDRRYEQYF

SEQ ID NO: 683889 - protein, 13 aa, Homo sapiens
  CDR3 for alpha chain variable domain of TCR clone 341945 (TRAV12-2, TRAJ18)
CAVRGSTLGRLYF

SEQ ID NO: 683890 - protein, 15 aa, Homo sapiens
  CDR3 for beta chain variable domain of TCR clone 341945 (TRBV7-8, TRBJ2-5)
CASSYAGGEQETQYF

SEQ ID NO: 683891 - protein, 12 aa, Homo sapiens
  CDR3 for alpha chain variable domain of TCR clone 341946 (TRAV12-1, TRAJ40)
CVFYSGTYKYVF

SEQ ID NO: 683892 - protein, 18 aa, Homo sapiens
  CDR3 for beta chain variable domain of TCR clone 341946 (TRBV12-4, TRBJ2-2)
CASSLVAGTRGRTGELFF

SEQ ID NO: 683893 - protein, 15 aa, Homo sapiens
  CDR3 for alpha chain variable domain of TCR clone 341947 (TRAV8-3, TRAJ20)
CAVEAKGSNDYKLSL

SEQ ID NO: 683894 - protein, 15 aa, Homo sapiens
  CDR3 for beta chain variable domain of TCR clone 341947 (TRBV19, TRBJ1-1)
CASTSGQIQNTEAFF

SEQ ID NO: 683895 - protein, 15 aa, Homo sapiens
  CDR3 for alpha chain variable domain of TCR clone 341948 (TRAV38-1, TRAJ37)
CAFIFGSGNTGKLIF

SEQ ID NO: 683896 - protein, 13 aa, Homo sapiens
  CDR3 for beta chain variable domain of TCR clone 341948 (TRBV19, TRBJ1-2)
CASSVPGQDGYAF

SEQ ID NO: 683897 - protein, 12 aa, Homo sapiens
  CDR3 for alpha chain variable domain of TCR clone 341949 (TRAV3, TRAJ20)
CAVRDPDYKLSF

SEQ ID NO: 683898 - protein, 13 aa, Homo sapiens
  CDR3 for beta chain variable domain of TCR clone 341949 (TRBV9, TRBJ2-1)
CASSVGPGGEQFF

SEQ ID NO: 683899 - protein, 11 aa, Homo sapiens
  CDR3 for alpha chain variable domain of TCR clone 341950 (TRAV21, TRAJ31)
CAVRNNARLMF

SEQ ID NO: 683900 - protein, 15 aa, Homo sapiens
  CDR3 for beta chain variable domain of TCR clone 341950 (TRBV20-1, TRBJ2-7)
CSARDRVSGVDEQYF

SEQ ID NO: 683901 - protein, 14 aa, Homo sapiens
  CDR3 for alpha chain variable domain of TCR clone 341951 (TRAV27, TRAJ44)
CAASFTGTASKLTF

SEQ ID NO: 683902 - protein, 14 aa, Homo sapiens
  CDR3 for beta chain variable domain of TCR clone 341951 (TRBV11-2, TRBJ2-7)
CASSLGAGAYEQYF

SEQ ID NO: 683903 - protein, 14 aa, Homo sapiens
  CDR3 for alpha chain variable domain of TCR clone 341952 (TRAV35, TRAJ42)
CAGPHGGSQGNPIF

SEQ ID NO: 683904 - protein, 14 aa, Homo sapiens
  CDR3 for beta chain variable domain of TCR clone 341952 (TRBV7-2, TRBJ2-7)
CASSPKTSFYEQYF

SEQ ID NO: 683905 - protein, 14 aa, Homo sapiens
  CDR3 for alpha chain variable domain of TCR clone 341953 (TRAV13-1, TRAJ35)
CAASKGGSGNVLTC

SEQ ID NO: 683906 - protein, 13 aa, Homo sapiens
  CDR3 for beta chain variable domain of TCR clone 341953 (TRBV7-3, TRBJ1-1)
CASSQDWGAEAFF

SEQ ID NO: 683907 - protein, 12 aa, Homo sapiens
  CDR3 for alpha chain variable domain of TCR clone 341954 (TRAV4, TRAJ21)
CRVGDNFNKFYF

SEQ ID NO: 683908 - protein, 17 aa, Homo sapiens
  CDR3 for beta chain variable domain of TCR clone 341954 (TRBV3-1, TRBJ2-7)
CASSQDLTGLSSYEQYF

SEQ ID NO: 683909 - protein, 14 aa, Homo sapiens
  CDR3 for alpha chain variable domain of TCR clone 341955 (TRAV13-1, TRAJ35)
CAASKGGFGNVLHC

SEQ ID NO: 683910 - protein, 15 aa, Homo sapiens
  CDR3 for beta chain variable domain of TCR clone 341955 (TRBV28, TRBJ2-1)
CASSGLAEVDNEQLF

SEQ ID NO: 683911 - protein, 16 aa, Homo sapiens
  CDR3 for alpha chain variable domain of TCR clone 341956 (TRAV3, TRAJ37)
CAVRPHGSGKTGKLIF

SEQ ID NO: 683912 - protein, 14 aa, Homo sapiens
  CDR3 for beta chain variable domain of TCR clone 341956 (TRBV25-1, TRBJ1-1)
CASTHLGGNTEAFF

SEQ ID NO: 683913 - protein, 14 aa, Homo sapiens
  CDR3 for alpha chain variable domain of TCR clone 341957 (TRAV3, TRAJ37)
CAVKESGNKGKLIF

SEQ ID NO: 683914 - protein, 14 aa, Homo sapiens
  CDR3 for beta chain variable domain of TCR clone 341957 (TRBV2, TRBJ1-5)
CASSENRGGQPQHF

SEQ ID NO: 683915 - protein, 11 aa, Homo sapiens
  CDR3 for alpha chain variable domain of TCR clone 341958 (TRAV3, TRAJ17)
PRGAAGNKLTF

SEQ ID NO: 683916 - protein, 16 aa, Homo sapiens
  CDR3 for beta chain variable domain of TCR clone 341958 (TRBV7-6, TRBJ2-1)
CASSAPGRSSYNEQFF

SEQ ID NO: 683917 - protein, 14 aa, Homo sapiens
  CDR3 for alpha chain variable domain of TCR clone 341959 (TRAV12-2, TRAJ6)
CAVNITGGSYIPTF

SEQ ID NO: 683918 - protein, 14 aa, Homo sapiens
  CDR3 for beta chain variable domain of TCR clone 341959 (TRBV20-1, TRBJ2-7)
CSARDPTGLDEQYF

SEQ ID NO: 683919 - protein, 18 aa, Homo sapiens
  CDR3 for alpha chain variable domain of TCR clone 341960 (TRAV26-1, TRAJ5)
CIVRVVPPRDTGRRALTF

SEQ ID NO: 683920 - protein, 15 aa, Homo sapiens
  CDR3 for beta chain variable domain of TCR clone 341960 (TRBV7-9, TRBJ2-7)
CASSLPMGQANEPYF

SEQ ID NO: 683921 - protein, 16 aa, Homo sapiens
  CDR3 for alpha chain variable domain of TCR clone 341961 (TRAV3, TRAJ37)
CAVRPHGSGNTGKLIF

SEQ ID NO: 683922 - protein, 16 aa, Homo sapiens
  CDR3 for beta chain variable domain of TCR clone 341961 (TRBV7-3, TRBJ2-2)
CASSFKRGTLSGELFF

SEQ ID NO: 683923 - protein, 14 aa, Homo sapiens
  CDR3 for alpha chain variable domain of TCR clone 341962 (TRAV9-2, TRAJ6)
CALGASGGIYIPTF

SEQ ID NO: 683924 - protein, 14 aa, Homo sapiens
  CDR3 for beta chain variable domain of TCR clone 341962 (TRBV12-4, TRBJ1-1)
CASSLGTGGTEAFF

SEQ ID NO: 683925 - protein, 12 aa, Homo sapiens
  CDR3 for alpha chain variable domain of TCR clone 341963 (TRAV12-2, TRAJ33)
CAVGDSNYQLIW

SEQ ID NO: 683926 - protein, 16 aa, Homo sapiens
  CDR3 for beta chain variable domain of TCR clone 341963 (TRBV12-5, TRBJ2-5)
CASGPRTSGNQETQYF

SEQ ID NO: 683927 - protein, 13 aa, Homo sapiens
  CDR3 for alpha chain variable domain of TCR clone 341964 (TRAV13-1, TRAJ5)
CAASDTGRRALTF

SEQ ID NO: 683928 - protein, 17 aa, Homo sapiens
  CDR3 for beta chain variable domain of TCR clone 341964 (TRBV15, TRBJ1-4)
CATSRYGTGDPNEKLFF

SEQ ID NO: 683929 - protein, 14 aa, Homo sapiens
  CDR3 for alpha chain variable domain of TCR clone 341965 (TRAV8-4, TRAJ9)
CAVRIRTGGFKTIF

SEQ ID NO: 683930 - protein, 15 aa, Homo sapiens
  CDR3 for beta chain variable domain of TCR clone 341965 (TRBV10-2, TRBJ2-6)
CASSEQGTGANVLTF

SEQ ID NO: 683931 - protein, 13 aa, Homo sapiens
  CDR3 for alpha chain variable domain of TCR clone 341966 (TRAV3, TRAJ27)
CAGRPLGAGKSTC

SEQ ID NO: 683932 - protein, 13 aa, Homo sapiens
  CDR3 for beta chain variable domain of TCR clone 341966 (TRBV7-9, TRBJ2-3)
CASSPGSTDTQYF

SEQ ID NO: 683933 - protein, 17 aa, Homo sapiens
  CDR3 for alpha chain variable domain of TCR clone 341967 (TRAV3, TRAJ6)
RAVRDGPRAGGSYIPTF

SEQ ID NO: 683934 - protein, 13 aa, Homo sapiens
  CDR3 for beta chain variable domain of TCR clone 341967 (TRBV27, TRBJ1-1)
CASSVSIGAEAFF

SEQ ID NO: 683935 - protein, 13 aa, Homo sapiens
  CDR3 for alpha chain variable domain of TCR clone 341968 (TRAV14/DV4, TRAJ23)
CAMREVKGGKLIF

SEQ ID NO: 683936 - protein, 14 aa, Homo sapiens
  CDR3 for beta chain variable domain of TCR clone 341968 (TRBV11-2, TRBJ2-5)
CASSRTGGIETQYF

SEQ ID NO: 683937 - protein, 14 aa, Homo sapiens
  CDR3 for alpha chain variable domain of TCR clone 341969 (TRAV1-2, TRAJ16)
CAVNRFSDGQKLLF

SEQ ID NO: 683938 - protein, 13 aa, Homo sapiens
  CDR3 for beta chain variable domain of TCR clone 341969 (TRBV19, TRBJ2-1)
CASTNSDVGEQFF

SEQ ID NO: 683939 - protein, 15 aa, Homo sapiens
  CDR3 for alpha chain variable domain of TCR clone 341970 (TRAV25, TRAJ52)
CAGTSGGTSYGKLTF

SEQ ID NO: 683940 - protein, 16 aa, Homo sapiens
  CDR3 for beta chain variable domain of TCR clone 341970 (TRBV4-3, TRBJ2-2)
CASSHLQGSGTGELFF

SEQ ID NO: 683941 - protein, 16 aa, Homo sapiens
  CDR3 for alpha chain variable domain of TCR clone 341971 (TRAV3, TRAJ10)
CAVRDMRAGGGNKLTI

SEQ ID NO: 683942 - protein, 12 aa, Homo sapiens
  CDR3 for beta chain variable domain of TCR clone 341971 (TRBV20-1, TRBJ2-7)
CSAGLKMGEQYF

SEQ ID NO: 683943 - protein, 16 aa, Homo sapiens
  CDR3 for alpha chain variable domain of TCR clone 341972 (TRAV1-1, TRAJ28)
CAVRDDSGAGSYQLTF

SEQ ID NO: 683944 - protein, 12 aa, Homo sapiens
  CDR3 for beta chain variable domain of TCR clone 341972 (TRBV11-2, TRBJ2-5)
CASSLDTQTQYF

SEQ ID NO: 683945 - protein, 12 aa, Homo sapiens
  CDR3 for alpha chain variable domain of TCR clone 341973 (TRAV2, TRAJ32)
CAVGGDTNKLIF

SEQ ID NO: 683946 - protein, 15 aa, Homo sapiens
  CDR3 for beta chain variable domain of TCR clone 341973 (TRBV7-2, TRBJ2-1)
CASSSRTSREDEQFF

SEQ ID NO: 683947 - protein, 16 aa, Homo sapiens
  CDR3 for alpha chain variable domain of TCR clone 341974 (TRAV23/DV6, TRAJ21)
CAASSGGGTTSTNFIL

SEQ ID NO: 683948 - protein, 11 aa, Homo sapiens
  CDR3 for beta chain variable domain of TCR clone 341974 (TRBV7-8, TRBJ2-7)
CASSLSLEQYF

SEQ ID NO: 683949 - protein, 14 aa, Homo sapiens
  CDR3 for alpha chain variable domain of TCR clone 341975 (TRAV29/DV5, TRAJ36)
CAARRKTGANNLFF

SEQ ID NO: 683950 - protein, 13 aa, Homo sapiens
  CDR3 for beta chain variable domain of TCR clone 341975 (TRBV7-9, TRBJ2-1)
CASSLDVGNEQFF

SEQ ID NO: 683951 - protein, 13 aa, Homo sapiens
  CDR3 for alpha chain variable domain of TCR clone 341976 (TRAV21, TRAJ57)
CAVTQGGSEKLVF

SEQ ID NO: 683952 - protein, 16 aa, Homo sapiens
  CDR3 for beta chain variable domain of TCR clone 341976 (TRBV29-1, TRBJ2-7)
CSVEDAEDGTANEQYF

SEQ ID NO: 683953 - protein, 14 aa, Homo sapiens
  CDR3 for alpha chain variable domain of TCR clone 341977 (TRAV1-2, TRAJ16)
CAVNRFSDGQKLLF

SEQ ID NO: 683954 - protein, 14 aa, Homo sapiens
  CDR3 for beta chain variable domain of TCR clone 341977 (TRBV7-9, TRBJ1-1)
CASSLGGANTEAFF

SEQ ID NO: 683955 - protein, 15 aa, Homo sapiens
  CDR3 for alpha chain variable domain of TCR clone 341978 (TRAV3, TRAJ57)
CAASNTKGGSEKLVF

SEQ ID NO: 683956 - protein, 16 aa, Homo sapiens
  CDR3 for beta chain variable domain of TCR clone 341978 (TRBV19, TRBJ2-1)
CASSKAGPSSYNEQFF

SEQ ID NO: 683957 - protein, 14 aa, Homo sapiens
  CDR3 for alpha chain variable domain of TCR clone 341979 (TRAV16, TRAJ32)
CALKSGGATNKLIF

SEQ ID NO: 683958 - protein, 13 aa, Homo sapiens
  CDR3 for beta chain variable domain of TCR clone 341979 (TRBV2, TRBJ1-1)
CASSEGGNTEAFF

SEQ ID NO: 683959 - protein, 12 aa, Homo sapiens
  CDR3 for alpha chain variable domain of TCR clone 341980 (TRAV27, TRAJ48)
CAGARGNEKLTF

SEQ ID NO: 683960 - protein, 14 aa, Homo sapiens
  CDR3 for beta chain variable domain of TCR clone 341980 (TRBV12-5, TRBJ2-5)
CASGSRTHQETQYL

SEQ ID NO: 683961 - protein, 13 aa, Homo sapiens
  CDR3 for alpha chain variable domain of TCR clone 341981 (TRAV35, TRAJ57)
CAGSQGGSEKLVF

SEQ ID NO: 683962 - protein, 14 aa, Homo sapiens
  CDR3 for beta chain variable domain of TCR clone 341981 (TRBV25-1, TRBJ1-1)
CASTQLGGNTEAFF

SEQ ID NO: 683963 - protein, 13 aa, Homo sapiens
  CDR3 for alpha chain variable domain of TCR clone 341982 (TRAV26-1, TRAJ36)
CIVVGTGANNLFF

SEQ ID NO: 683964 - protein, 13 aa, Homo sapiens
  CDR3 for beta chain variable domain of TCR clone 341982 (TRBV6-5, TRBJ2-6)
CASSTYGPLRLDF

SEQ ID NO: 683965 - protein, 12 aa, Homo sapiens
  CDR3 for alpha chain variable domain of TCR clone 341983 (TRAV2, TRAJ40)
CCGTSGTYKYIF

SEQ ID NO: 683966 - protein, 17 aa, Homo sapiens
  CDR3 for beta chain variable domain of TCR clone 341983 (TRBV13, TRBJ2-3)
CASSLSRVAGGRNTQYF

SEQ ID NO: 683967 - protein, 11 aa, Homo sapiens
  CDR3 for alpha chain variable domain of TCR clone 341984 (TRAV1-1, TRAJ23)
CAVRQGGKLIF

SEQ ID NO: 683968 - protein, 14 aa, Homo sapiens
  CDR3 for beta chain variable domain of TCR clone 341984 (TRBV11-3, TRBJ2-1)
CASSATTSGSIQFF

SEQ ID NO: 683969 - protein, 15 aa, Homo sapiens
  CDR3 for alpha chain variable domain of TCR clone 341985 (TRAV29/DV5, TRAJ8)
CAASGRDTGFQKLVF

SEQ ID NO: 683970 - protein, 15 aa, Homo sapiens
  CDR3 for beta chain variable domain of TCR clone 341985 (TRBV5-1, TRBJ2-1)
CASTGSGRTYNEQFF

SEQ ID NO: 683971 - protein, 12 aa, Homo sapiens
  CDR3 for alpha chain variable domain of TCR clone 341986 (TRAV17, TRAJ20)
CATDENDYKLSF

SEQ ID NO: 683972 - protein, 16 aa, Homo sapiens
  CDR3 for beta chain variable domain of TCR clone 341986 (TRBV24-1, TRBJ2-5)
CATRLAEGCWEKTQYF

SEQ ID NO: 683973 - protein, 12 aa, Homo sapiens
  CDR3 for alpha chain variable domain of TCR clone 341987 (TRAV21, TRAJ39)
CAADNAGNMLTF

SEQ ID NO: 683974 - protein, 15 aa, Homo sapiens
  CDR3 for beta chain variable domain of TCR clone 341987 (TRBV20-1, TRBJ2-7)
CSARVPAAYFYEQYF

SEQ ID NO: 683975 - protein, 12 aa, Homo sapiens
  CDR3 for alpha chain variable domain of TCR clone 341988 (TRAV29/DV5, TRAJ49)
CAATDTGNQFHF

SEQ ID NO: 683976 - protein, 15 aa, Homo sapiens
  CDR3 for beta chain variable domain of TCR clone 341988 (TRBV20-1, TRBJ1-5)
CSAREGGYSNQPQHF

SEQ ID NO: 683977 - protein, 15 aa, Homo sapiens
  CDR3 for alpha chain variable domain of TCR clone 341989 (TRAV26-1, TRAJ29)
CIVRVEGSGNTPLVF

SEQ ID NO: 683978 - protein, 14 aa, Homo sapiens
  CDR3 for beta chain variable domain of TCR clone 341989 (TRBV13, TRBJ2-5)
CASSLERVGETQYF

SEQ ID NO: 683979 - protein, 14 aa, Homo sapiens
  CDR3 for alpha chain variable domain of TCR clone 341990 (TRAV29/DV5, TRAJ44)
CAAFLVGTASKLTF

SEQ ID NO: 683980 - protein, 15 aa, Homo sapiens
  CDR3 for beta chain variable domain of TCR clone 341990 (TRBV7-3, TRBJ2-2)
CTSSETGQGTGELFF

SEQ ID NO: 683981 - protein, 11 aa, Homo sapiens
  CDR3 for alpha chain variable domain of TCR clone 341991 (TRAV13-2, TRAJ54)
RAVQGAQKLVF

SEQ ID NO: 683982 - protein, 13 aa, Homo sapiens
  CDR3 for beta chain variable domain of TCR clone 341991 (TRBV11-2, TRBJ1-2)
CASSLDSPSGYTF

SEQ ID NO: 683983 - protein, 18 aa, Homo sapiens
  CDR3 for alpha chain variable domain of TCR clone 341992 (TRAV26-2, TRAJ45)
CILRVDKYSGGDADGLTF

SEQ ID NO: 683984 - protein, 15 aa, Homo sapiens
  CDR3 for beta chain variable domain of TCR clone 341992 (TRBV9, TRBJ1-6)
CASSVAGTGDSPLHF

SEQ ID NO: 683985 - protein, 12 aa, Homo sapiens
  CDR3 for alpha chain variable domain of TCR clone 341993 (TRAV12-2, TRAJ10)
LGVTGGGNKLTF

SEQ ID NO: 683986 - protein, 16 aa, Homo sapiens
  CDR3 for beta chain variable domain of TCR clone 341993 (TRBV6-4, TRBJ1-2)
CASSEAVVDPNYGYTF

SEQ ID NO: 683987 - protein, 13 aa, Homo sapiens
  CDR3 for alpha chain variable domain of TCR clone 341994 (TRAV2, TRAJ21)
CAVEDLNFNKFYF

SEQ ID NO: 683988 - protein, 13 aa, Homo sapiens
  CDR3 for beta chain variable domain of TCR clone 341994 (TRBV11-2, TRBJ2-5)
CASSSTGEETQYF

SEQ ID NO: 683989 - protein, 23 aa, Homo sapiens
  CDR3 for alpha chain variable domain of TCR clone 341995 (TRAV1-1, TRAJ11)
LLQELQMKDSASYFCAGYSTLTF

SEQ ID NO: 683990 - protein, 17 aa, Homo sapiens
  CDR3 for beta chain variable domain of TCR clone 341995 (TRBV7-3, TRBJ2-3)
CASSPRGQGYGTDTQYF

SEQ ID NO: 683991 - protein, 13 aa, Homo sapiens
  CDR3 for alpha chain variable domain of TCR clone 341996 (TRAV8-3, TRAJ43)
CSVVPYNNNDMRF

SEQ ID NO: 683992 - protein, 16 aa, Homo sapiens
  CDR3 for beta chain variable domain of TCR clone 341996 (TRBV7-2, TRBJ2-5)
CASSPFPTGGEETQYF

SEQ ID NO: 683993 - protein, 13 aa, Homo sapiens
  CDR3 for alpha chain variable domain of TCR clone 341997 (TRAV35, TRAJ44)
CAGLSGTASKLTF

SEQ ID NO: 683994 - protein, 17 aa, Homo sapiens
  CDR3 for beta chain variable domain of TCR clone 341997 (TRBV7-8, TRBJ1-2)
CASSLRHLQGHLYGYTF

SEQ ID NO: 683995 - protein, 15 aa, Homo sapiens
  CDR3 for alpha chain variable domain of TCR clone 341998 (TRAV12-1, TRAJ44)
CVVFVNTGTASKLTF

SEQ ID NO: 683996 - protein, 17 aa, Homo sapiens
  CDR3 for beta chain variable domain of TCR clone 341998 (TRBV7-8, TRBJ2-6)
CASIAGTGGAGANVLTF

SEQ ID NO: 683997 - protein, 12 aa, Homo sapiens
  CDR3 for alpha chain variable domain of TCR clone 341999 (TRAV13-1, TRAJ21)
CAAREGFNKFYF

SEQ ID NO: 683998 - protein, 13 aa, Homo sapiens
  CDR3 for beta chain variable domain of TCR clone 341999 (TRBV19, TRBJ2-7)
CASSPRQSYEQYF

SEQ ID NO: 683999 - protein, 13 aa, Homo sapiens
  CDR3 for alpha chain variable domain of TCR clone 342000 (TRAV2, TRAJ40)
CAVVTSGTYKYIF

SEQ ID NO: 684000 - protein, 17 aa, Homo sapiens
  CDR3 for beta chain variable domain of TCR clone 342000 (TRBV5-1, TRBJ2-5)
CASSPVALGQNQETQYF

SEQ ID NO: 684001 - protein, 12 aa, Homo sapiens
  CDR3 for alpha chain variable domain of TCR clone 342001 (TRAV12-3, TRAJ17)
CAMTLTGNKLTF

SEQ ID NO: 684002 - protein, 19 aa, Homo sapiens
  CDR3 for beta chain variable domain of TCR clone 342001 (TRBV11-3, TRBJ2-2)
CASSTRPGAKTTNTGELFF

SEQ ID NO: 684003 - protein, 12 aa, Homo sapiens
  CDR3 for alpha chain variable domain of TCR clone 342002 (TRAV12-3, TRAJ3)
CAIDSSASKINF

SEQ ID NO: 684004 - protein, 17 aa, Homo sapiens
  CDR3 for beta chain variable domain of TCR clone 342002 (TRBV7-9, TRBJ2-3)
CASSLEEAGAYPDTQYF

SEQ ID NO: 684005 - protein, 18 aa, Homo sapiens
  CDR3 for alpha chain variable domain of TCR clone 342003 (TRAV26-1, TRAJ23)
CIVRVGLEVWNQGGKRIF

SEQ ID NO: 684006 - protein, 15 aa, Homo sapiens
  CDR3 for beta chain variable domain of TCR clone 342003 (TRBV12-4, TRBJ2-5)
CQQFFVRGRQETQYF

SEQ ID NO: 684007 - protein, 17 aa, Homo sapiens
  CDR3 for alpha chain variable domain of TCR clone 342004 (TRAV17, TRAJ7)
CPTLGRLAFGKGNQVVV

SEQ ID NO: 684008 - protein, 13 aa, Homo sapiens
  CDR3 for beta chain variable domain of TCR clone 342004 (TRBV12-4, TRBJ2-7)
CASSLERVREQYF

SEQ ID NO: 684009 - protein, 15 aa, Homo sapiens
  CDR3 for alpha chain variable domain of TCR clone 342005 (TRAV20, TRAJ43)
CAVQAGKSSNNDMRF

SEQ ID NO: 684010 - protein, 17 aa, Homo sapiens
  CDR3 for beta chain variable domain of TCR clone 342005 (TRBV15, TRBJ1-5)
CATSRAPPGTRNQPQHF

SEQ ID NO: 684011 - protein, 16 aa, Homo sapiens
  CDR3 for alpha chain variable domain of TCR clone 342006 (TRAV12-2, TRAJ45)
CAVKRNPGGCADGLTF

SEQ ID NO: 684012 - protein, 12 aa, Homo sapiens
  CDR3 for beta chain variable domain of TCR clone 342006 (TRBV6-1, TRBJ2-5)
CASSEGRETQYF

SEQ ID NO: 684013 - protein, 13 aa, Homo sapiens
  CDR3 for alpha chain variable domain of TCR clone 342007 (TRAV23/DV6, TRAJ22)
CAPWGGSARQLTF

SEQ ID NO: 684014 - protein, 14 aa, Homo sapiens
  CDR3 for beta chain variable domain of TCR clone 342007 (TRBV18, TRBJ2-7)
CASSPTSGGYKQYF

SEQ ID NO: 684015 - protein, 14 aa, Homo sapiens
  CDR3 for alpha chain variable domain of TCR clone 342008 (TRAV26-1, TRAJ21)
CIVRPPYNFNKFYF

SEQ ID NO: 684016 - protein, 15 aa, Homo sapiens
  CDR3 for beta chain variable domain of TCR clone 342008 (TRBV10-3, TRBJ2-1)
CAIRNGTSGHNEQFF

SEQ ID NO: 684017 - protein, 14 aa, Homo sapiens
  CDR3 for alpha chain variable domain of TCR clone 342009 (TRAV2, TRAJ37)
CAVDFTSNTGKLIF

SEQ ID NO: 684018 - protein, 13 aa, Homo sapiens
  CDR3 for beta chain variable domain of TCR clone 342009 (TRBV4-1, TRBJ2-2)
CASSQESTGELFF

SEQ ID NO: 684019 - protein, 14 aa, Homo sapiens
  CDR3 for alpha chain variable domain of TCR clone 342010 (TRAV12-2, TRAJ13)
CAVKKTGGYQKVTF

SEQ ID NO: 684020 - protein, 12 aa, Homo sapiens
  CDR3 for beta chain variable domain of TCR clone 342010 (TRBV6-3, TRBJ2-7)
CASSLTPYKQYF

SEQ ID NO: 684021 - protein, 15 aa, Homo sapiens
  CDR3 for alpha chain variable domain of TCR clone 342011 (TRAV13-1, TRAJ32)
CAASIDGGATNKLIF

SEQ ID NO: 684022 - protein, 14 aa, Homo sapiens
  CDR3 for beta chain variable domain of TCR clone 342011 (TRBV7-9, TRBJ2-1)
CASSLASGSNEQFF

SEQ ID NO: 684023 - protein, 15 aa, Homo sapiens
  CDR3 for alpha chain variable domain of TCR clone 342012 (TRAV3, TRAJ22)
CAVRDRGGSARQLTC

SEQ ID NO: 684024 - protein, 14 aa, Homo sapiens
  CDR3 for beta chain variable domain of TCR clone 342012 (TRBV19, TRBJ2-1)
CASSRLASINEQFF

SEQ ID NO: 684025 - protein, 12 aa, Homo sapiens
  CDR3 for alpha chain variable domain of TCR clone 342013 (TRAV12-3, TRAJ17)
CAMTLTGNKLNF

SEQ ID NO: 684026 - protein, 15 aa, Homo sapiens
  CDR3 for beta chain variable domain of TCR clone 342013 (TRBV12-4, TRBJ2-5)
CASSPPTGLQETQYF

SEQ ID NO: 684027 - protein, 16 aa, Homo sapiens
  CDR3 for alpha chain variable domain of TCR clone 342014 (TRAV17, TRAJ22)
CATDAISYGSARQLTF

SEQ ID NO: 684028 - protein, 15 aa, Homo sapiens
  CDR3 for beta chain variable domain of TCR clone 342014 (TRBV5-1, TRBJ2-1)
FASSPPRAPYNEQFF

SEQ ID NO: 684029 - protein, 14 aa, Homo sapiens
  CDR3 for alpha chain variable domain of TCR clone 342015 (TRAV13-1, TRAJ40)
CAARSTSVTYKYIF

SEQ ID NO: 684030 - protein, 15 aa, Homo sapiens
  CDR3 for beta chain variable domain of TCR clone 342015 (TRBV18, TRBJ1-5)
CASSETGGNNQPQHF

SEQ ID NO: 684031 - protein, 15 aa, Homo sapiens
  CDR3 for alpha chain variable domain of TCR clone 342016 (TRAV26-1, TRAJ29)
CIVRVEGSGNTPLVF

SEQ ID NO: 684032 - protein, 15 aa, Homo sapiens
  CDR3 for beta chain variable domain of TCR clone 342016 (TRBV12-4, TRBJ1-1)
CQQQDRVVANTEDFF

SEQ ID NO: 684033 - protein, 13 aa, Homo sapiens
  CDR3 for alpha chain variable domain of TCR clone 342017 (TRAV6, TRAJ23)
CALYQNQGGKLIF

SEQ ID NO: 684034 - protein, 15 aa, Homo sapiens
  CDR3 for beta chain variable domain of TCR clone 342017 (TRBV28, TRBJ1-2)
CASSGSEQRAFGYTF

SEQ ID NO: 684035 - protein, 15 aa, Homo sapiens
  CDR3 for alpha chain variable domain of TCR clone 342018 (TRAV29/DV5, TRAJ44)
CAASAGTGTASKLTF

SEQ ID NO: 684036 - protein, 12 aa, Homo sapiens
  CDR3 for beta chain variable domain of TCR clone 342018 (TRBV11-2, TRBJ2-2)
CASSLGGGELFV

SEQ ID NO: 684037 - protein, 18 aa, Homo sapiens
  CDR3 for alpha chain variable domain of TCR clone 342019 (TRAV1-2, TRAJ18)
CAVRDMGDRGSTLGRLYF

SEQ ID NO: 684038 - protein, 16 aa, Homo sapiens
  CDR3 for beta chain variable domain of TCR clone 342019 (TRBV29-1, TRBJ1-2)
CSVEANRDVANYGYTF

SEQ ID NO: 684039 - protein, 12 aa, Homo sapiens
  CDR3 for alpha chain variable domain of TCR clone 342020 (TRAV13-2, TRAJ23)
CAERHMGGKLIF

SEQ ID NO: 684040 - protein, 16 aa, Homo sapiens
  CDR3 for beta chain variable domain of TCR clone 342020 (TRBV2, TRBJ2-3)
CASSTSVEGVTDTQYF

SEQ ID NO: 684041 - protein, 14 aa, Homo sapiens
  CDR3 for alpha chain variable domain of TCR clone 342021 (TRAV38-2/DV8, TRAJ47)
CAYRTLEYGNKLVF

SEQ ID NO: 684042 - protein, 15 aa, Homo sapiens
  CDR3 for beta chain variable domain of TCR clone 342021 (TRBV10-2, TRBJ2-5)
CASRGSGGPQETQYF

SEQ ID NO: 684043 - protein, 16 aa, Homo sapiens
  CDR3 for alpha chain variable domain of TCR clone 342022 (TRAV14/DV4, TRAJ54)
CAMREGRIQGAQKLVF

SEQ ID NO: 684044 - protein, 17 aa, Homo sapiens
  CDR3 for beta chain variable domain of TCR clone 342022 (TRBV18, TRBJ1-3)
CQLTARGAGPSGNTIYF

SEQ ID NO: 684045 - protein, 16 aa, Homo sapiens
  CDR3 for alpha chain variable domain of TCR clone 342023 (TRAV29/DV5, TRAJ36)
CAASAGVETGANNLFF

SEQ ID NO: 684046 - protein, 12 aa, Homo sapiens
  CDR3 for beta chain variable domain of TCR clone 342023 (TRBV11-2, TRBJ2-2)
CASSLPTGELFF

SEQ ID NO: 684047 - protein, 12 aa, Homo sapiens
  CDR3 for alpha chain variable domain of TCR clone 342024 (TRAV27, TRAJ35)
CAGADFGKVLHC

SEQ ID NO: 684048 - protein, 16 aa, Homo sapiens
  CDR3 for beta chain variable domain of TCR clone 342024 (TRBV6-1, TRBJ2-1)
CASISRQGSSYKEQFF

SEQ ID NO: 684049 - protein, 14 aa, Homo sapiens
  CDR3 for alpha chain variable domain of TCR clone 342025 (TRAV8-4, TRAJ16)
CAVSPVGRWPEVAL

SEQ ID NO: 684050 - protein, 15 aa, Homo sapiens
  CDR3 for beta chain variable domain of TCR clone 342025 (TRBV11-3, TRBJ2-7)
CASSLGPASSYEQYF

SEQ ID NO: 684051 - protein, 14 aa, Homo sapiens
  CDR3 for alpha chain variable domain of TCR clone 342026 (TRAV3, TRAJ17)
CAVRDAAAGNKITF

SEQ ID NO: 684052 - protein, 16 aa, Homo sapiens
  CDR3 for beta chain variable domain of TCR clone 342026 (TRBV20-1, TRBJ1-2)
CSASMGQGVANYGYTF

SEQ ID NO: 684053 - protein, 12 aa, Homo sapiens
  CDR3 for alpha chain variable domain of TCR clone 342027 (TRAV8-3, TRAJ26)
CAGENYGQNFVF

SEQ ID NO: 684054 - protein, 13 aa, Homo sapiens
  CDR3 for beta chain variable domain of TCR clone 342027 (TRBV20-1, TRBJ2-5)
CSARGDYQETQYF

SEQ ID NO: 684055 - protein, 15 aa, Homo sapiens
  CDR3 for alpha chain variable domain of TCR clone 342028 (TRAV23/DV6, TRAJ33)
CAASNSGGGNYQLIW

SEQ ID NO: 684056 - protein, 14 aa, Homo sapiens
  CDR3 for beta chain variable domain of TCR clone 342028 (TRBV7-2, TRBJ2-7)
CASSLYPGRYEQYF

SEQ ID NO: 684057 - protein, 14 aa, Homo sapiens
  CDR3 for alpha chain variable domain of TCR clone 342029 (TRAV20, TRAJ47)
CAVTFGEYGNKLVF

SEQ ID NO: 684058 - protein, 14 aa, Homo sapiens
  CDR3 for beta chain variable domain of TCR clone 342029 (TRBV11-2, TRBJ2-3)
CASSRLARTDTQYF

SEQ ID NO: 684059 - protein, 13 aa, Homo sapiens
  CDR3 for alpha chain variable domain of TCR clone 342030 (TRAV13-2, TRAJ13)
CAERPGGYQKVTF

SEQ ID NO: 684060 - protein, 16 aa, Homo sapiens
  CDR3 for beta chain variable domain of TCR clone 342030 (TRBV18, TRBJ2-5)
CASSPPSSGGSKTQYF

SEQ ID NO: 684061 - protein, 17 aa, Homo sapiens
  CDR3 for alpha chain variable domain of TCR clone 342031 (TRAV3, TRAJ42)
CAVRDRDYGGSQGNLIF

SEQ ID NO: 684062 - protein, 16 aa, Homo sapiens
  CDR3 for beta chain variable domain of TCR clone 342031 (TRBV6-1, TRBJ2-5)
CASSETLDRGAETQYF

SEQ ID NO: 684063 - protein, 15 aa, Homo sapiens
  CDR3 for alpha chain variable domain of TCR clone 342032 (TRAV8-4, TRAJ52)
CAVSDGGTSYVKLTF

SEQ ID NO: 684064 - protein, 12 aa, Homo sapiens
  CDR3 for beta chain variable domain of TCR clone 342032 (TRBV29-1, TRBJ2-3)
CSVTSGGDTQYL

SEQ ID NO: 684065 - protein, 13 aa, Homo sapiens
  CDR3 for alpha chain variable domain of TCR clone 342033 (TRAV27, TRAJ54)
CAGAGQGAQKLVF

SEQ ID NO: 684066 - protein, 15 aa, Homo sapiens
  CDR3 for beta chain variable domain of TCR clone 342033 (TRBV18, TRBJ2-6)
CAGSPAYAGANVLTF

SEQ ID NO: 684067 - protein, 13 aa, Homo sapiens
  CDR3 for alpha chain variable domain of TCR clone 342034 (TRAV12-2, TRAJ15)
CAVFNQEGTALIF

SEQ ID NO: 684068 - protein, 15 aa, Homo sapiens
  CDR3 for beta chain variable domain of TCR clone 342034 (TRBV7-8, TRBJ1-5)
CASSRGGGADQPQHF

SEQ ID NO: 684069 - protein, 14 aa, Homo sapiens
  CDR3 for alpha chain variable domain of TCR clone 342035 (TRAV8-4, TRAJ13)
CAVTLSGGYQKVTF

SEQ ID NO: 684070 - protein, 15 aa, Homo sapiens
  CDR3 for beta chain variable domain of TCR clone 342035 (TRBV5-7, TRBJ1-5)
CAGSYGKLWDQPQHF

SEQ ID NO: 684071 - protein, 17 aa, Homo sapiens
  CDR3 for alpha chain variable domain of TCR clone 342036 (TRAV13-1, TRAJ31)
CAPRDRLMFGDGTQLVV

SEQ ID NO: 684072 - protein, 16 aa, Homo sapiens
  CDR3 for beta chain variable domain of TCR clone 342036 (TRBV2, TRBJ2-3)
CASSTSVEGVTDTQYF

SEQ ID NO: 684073 - protein, 12 aa, Homo sapiens
  CDR3 for alpha chain variable domain of TCR clone 342037 (TRAV8-3, TRAJ20)
CAVGANDYTISF

SEQ ID NO: 684074 - protein, 16 aa, Homo sapiens
  CDR3 for beta chain variable domain of TCR clone 342037 (TRBV19, TRBJ2-2)
CASRSPGTGATGELFF

SEQ ID NO: 684075 - protein, 13 aa, Homo sapiens
  CDR3 for alpha chain variable domain of TCR clone 342038 (TRAV3, TRAJ21)
CAVREPDFNKFYF

SEQ ID NO: 684076 - protein, 16 aa, Homo sapiens
  CDR3 for beta chain variable domain of TCR clone 342038 (TRBV27, TRBJ2-2)
CASSFRGLVRTWELFF

SEQ ID NO: 684077 - protein, 13 aa, Homo sapiens
  CDR3 for alpha chain variable domain of TCR clone 342039 (TRAV8-3, TRAJ43)
CAVGHDNNNDMRF

SEQ ID NO: 684078 - protein, 12 aa, Homo sapiens
  CDR3 for beta chain variable domain of TCR clone 342039 (TRBV7-2, TRBJ1-6)
CASSLSSSPLHF

SEQ ID NO: 684079 - protein, 14 aa, Homo sapiens
  CDR3 for alpha chain variable domain of TCR clone 342040 (TRAV13-1, TRAJ10)
CAALFTGGGNKLTS

SEQ ID NO: 684080 - protein, 15 aa, Homo sapiens
  CDR3 for beta chain variable domain of TCR clone 342040 (TRBV10-3, TRBJ2-2)
CAISEGDRAAGELFF

SEQ ID NO: 684081 - protein, 14 aa, Homo sapiens
  CDR3 for alpha chain variable domain of TCR clone 342041 (TRAV12-3, TRAJ10)
SHLPLTGGGNNLTF

SEQ ID NO: 684082 - protein, 11 aa, Homo sapiens
  CDR3 for beta chain variable domain of TCR clone 342041 (TRBV20-1, TRBJ2-5)
CSADRAETQYF

SEQ ID NO: 684083 - protein, 12 aa, Homo sapiens
  CDR3 for alpha chain variable domain of TCR clone 342042 (TRAV12-3, TRAJ17)
CALTLTGNKLTF

SEQ ID NO: 684084 - protein, 15 aa, Homo sapiens
  CDR3 for beta chain variable domain of TCR clone 342042 (TRBV7-2, TRBJ2-1)
CASSSGLAGGNEQFF

SEQ ID NO: 684085 - protein, 15 aa, Homo sapiens
  CDR3 for alpha chain variable domain of TCR clone 342043 (TRAV13-1, TRAJ57)
CAASNTQGASEKLVF

SEQ ID NO: 684086 - protein, 14 aa, Homo sapiens
  CDR3 for beta chain variable domain of TCR clone 342043 (TRBV11-2, TRBJ1-2)
CASSLGTANYGYTF

SEQ ID NO: 684087 - protein, 10 aa, Homo sapiens
  CDR3 for alpha chain variable domain of TCR clone 342044 (TRAV1-2, TRAJ20)
CACNDYKLSF

SEQ ID NO: 684088 - protein, 16 aa, Homo sapiens
  CDR3 for beta chain variable domain of TCR clone 342044 (TRBV20-1, TRBJ2-1)
CSARDLKQGRNNEQFF

SEQ ID NO: 684089 - protein, 13 aa, Homo sapiens
  CDR3 for alpha chain variable domain of TCR clone 342045 (TRAV13-2, TRAJ48)
CAEMDFGNEKLTF

SEQ ID NO: 684090 - protein, 15 aa, Homo sapiens
  CDR3 for beta chain variable domain of TCR clone 342045 (TRBV7-9, TRBJ1-6)
CASSSPGRGNTPLHF

SEQ ID NO: 684091 - protein, 12 aa, Homo sapiens
  CDR3 for alpha chain variable domain of TCR clone 342046 (TRAV22, TRAJ29)
CAPPSGNTPLVF

SEQ ID NO: 684092 - protein, 14 aa, Homo sapiens
  CDR3 for beta chain variable domain of TCR clone 342046 (TRBV12-4, TRBJ1-1)
CASASSEFYTEAFF

SEQ ID NO: 684093 - protein, 13 aa, Homo sapiens
  CDR3 for alpha chain variable domain of TCR clone 342047 (TRAV1-1, TRAJ9)
FAAKNTGCFKTIF

SEQ ID NO: 684094 - protein, 13 aa, Homo sapiens
  CDR3 for beta chain variable domain of TCR clone 342047 (TRBV7-9, TRBJ1-2)
CASSLKQNYGYTF

SEQ ID NO: 684095 - protein, 14 aa, Homo sapiens
  CDR3 for alpha chain variable domain of TCR clone 342048 (TRAV4, TRAJ6)
CLVGEAGGSDIPTF

SEQ ID NO: 684096 - protein, 16 aa, Homo sapiens
  CDR3 for beta chain variable domain of TCR clone 342048 (TRBV7-6, TRBJ2-1)
CASSLNDGPSYNEQFF

SEQ ID NO: 684097 - protein, 12 aa, Homo sapiens
  CDR3 for alpha chain variable domain of TCR clone 342049 (TRAV8-3, TRAJ20)
CAVDSNDYKLSF

SEQ ID NO: 684098 - protein, 17 aa, Homo sapiens
  CDR3 for beta chain variable domain of TCR clone 342049 (TRBV7-8, TRBJ2-6)
CASSAGTGGAGANVLTF

SEQ ID NO: 684099 - protein, 16 aa, Homo sapiens
  CDR3 for alpha chain variable domain of TCR clone 342050 (TRAV27, TRAJ53)
CASPEGSGGSNYKLTF

SEQ ID NO: 684100 - protein, 12 aa, Homo sapiens
  CDR3 for beta chain variable domain of TCR clone 342050 (TRBV29-1, TRBJ2-3)
CSVTGGADTQYF

SEQ ID NO: 684101 - protein, 14 aa, Homo sapiens
  CDR3 for alpha chain variable domain of TCR clone 342051 (TRAV17, TRAJ32)
CATDPGGATNKLIF

SEQ ID NO: 684102 - protein, 14 aa, Homo sapiens
  CDR3 for beta chain variable domain of TCR clone 342051 (TRBV2, TRBJ1-5)
CASSENRGGQRQHF

SEQ ID NO: 684103 - protein, 15 aa, Homo sapiens
  CDR3 for alpha chain variable domain of TCR clone 342052 (TRAV12-3, TRAJ11)
CAMSEENSGYSTLTF

SEQ ID NO: 684104 - protein, 15 aa, Homo sapiens
  CDR3 for beta chain variable domain of TCR clone 342052 (TRBV7-9, TRBJ1-4)
CASSARTGGNEKLFF

SEQ ID NO: 684105 - protein, 14 aa, Homo sapiens
  CDR3 for alpha chain variable domain of TCR clone 342053 (TRAV23/DV6, TRAJ57)
CVASNQGGSEKLVF

SEQ ID NO: 684106 - protein, 13 aa, Homo sapiens
  CDR3 for beta chain variable domain of TCR clone 342053 (TRBV11-2, TRBJ2-7)
CASSSYPSYEQYF

SEQ ID NO: 684107 - protein, 11 aa, Homo sapiens
  CDR3 for alpha chain variable domain of TCR clone 342054 (TRAV2, TRAJ13)
CASGGYQKVTF

SEQ ID NO: 684108 - protein, 15 aa, Homo sapiens
  CDR3 for beta chain variable domain of TCR clone 342054 (TRBV20-1, TRBJ2-7)
CSARVPAAYFYEKYF

SEQ ID NO: 684109 - protein, 12 aa, Homo sapiens
  CDR3 for alpha chain variable domain of TCR clone 342055 (TRAV23/DV6, TRAJ27)
CSASKSAGKSTF

SEQ ID NO: 684110 - protein, 13 aa, Homo sapiens
  CDR3 for beta chain variable domain of TCR clone 342055 (TRBV6-3, TRBJ1-2)
CASSRQGGYGYTF

SEQ ID NO: 684111 - protein, 14 aa, Homo sapiens
  CDR3 for alpha chain variable domain of TCR clone 342056 (TRAV12-2, TRAJ44)
CAVNPAGTASKLTF

SEQ ID NO: 684112 - protein, 14 aa, Homo sapiens
  CDR3 for beta chain variable domain of TCR clone 342056 (TRBV28, TRBJ2-4)
CASRATGGENIQYF

SEQ ID NO: 684113 - protein, 16 aa, Homo sapiens
  CDR3 for alpha chain variable domain of TCR clone 342057 (TRAV3, TRAJ37)
CAVRPHGSGNTGKLIF

SEQ ID NO: 684114 - protein, 14 aa, Homo sapiens
  CDR3 for beta chain variable domain of TCR clone 342057 (TRBV25-1, TRBJ1-1)
CASIQLGGNTEAFF

SEQ ID NO: 684115 - protein, 12 aa, Homo sapiens
  CDR3 for alpha chain variable domain of TCR clone 342058 (TRAV21, TRAJ8)
CAVNTGFQKLVF

SEQ ID NO: 684116 - protein, 16 aa, Homo sapiens
  CDR3 for beta chain variable domain of TCR clone 342058 (TRBV28, TRBJ2-7)
CASSLFFETGSPEQYF

SEQ ID NO: 684117 - protein, 14 aa, Homo sapiens
  CDR3 for alpha chain variable domain of TCR clone 342059 (TRAV27, TRAJ40)
CAGSRLRGTYKYIF

SEQ ID NO: 684118 - protein, 15 aa, Homo sapiens
  CDR3 for beta chain variable domain of TCR clone 342059 (TRBV6-3, TRBJ1-4)
CASSSPGQENEKLFF

SEQ ID NO: 684119 - protein, 14 aa, Homo sapiens
  CDR3 for alpha chain variable domain of TCR clone 342060 (TRAV8-3, TRAJ36)
CAGGRITGANNLFF

SEQ ID NO: 684120 - protein, 15 aa, Homo sapiens
  CDR3 for beta chain variable domain of TCR clone 342060 (TRBV4-1, TRBJ2-1)
CASSQDPGNYNEQFF

SEQ ID NO: 684121 - protein, 14 aa, Homo sapiens
  CDR3 for alpha chain variable domain of TCR clone 342061 (TRAV13-2, TRAJ43)
CAEIPTYNNNDMRF

SEQ ID NO: 684122 - protein, 20 aa, Homo sapiens
  CDR3 for beta chain variable domain of TCR clone 342061 (TRBV4-1, TRBJ2-2)
CASSQASPPGLASNTGELFF

SEQ ID NO: 684123 - protein, 18 aa, Homo sapiens
  CDR3 for alpha chain variable domain of TCR clone 342062 (TRAV21, TRAJ52)
CAVRPSPAGGTIYGKLTF

SEQ ID NO: 684124 - protein, 14 aa, Homo sapiens
  CDR3 for beta chain variable domain of TCR clone 342062 (TRBV6-1, TRBJ1-3)
CASVQGGGGNTIYF

SEQ ID NO: 684125 - protein, 11 aa, Homo sapiens
  CDR3 for alpha chain variable domain of TCR clone 342063 (TRAV35, TRAJ22)
CAGPGVGQLTF

SEQ ID NO: 684126 - protein, 16 aa, Homo sapiens
  CDR3 for beta chain variable domain of TCR clone 342063 (TRBV28, TRBJ2-7)
CASSLFFETGGPEQYF

SEQ ID NO: 684127 - protein, 11 aa, Homo sapiens
  CDR3 for alpha chain variable domain of TCR clone 342064 (TRAV1-2, TRAJ20)
CAVANDYKLSF

SEQ ID NO: 684128 - protein, 13 aa, Homo sapiens
  CDR3 for beta chain variable domain of TCR clone 342064 (TRBV7-9, TRBJ2-3)
CASSPGSTDTQYF

SEQ ID NO: 684129 - protein, 14 aa, Homo sapiens
  CDR3 for alpha chain variable domain of TCR clone 342065 (TRAV8-3, TRAJ9)
CAVVYNTGGFKTIF

SEQ ID NO: 684130 - protein, 16 aa, Homo sapiens
  CDR3 for beta chain variable domain of TCR clone 342065 (TRBV7-3, TRBJ2-2)
CASSLKRGTLSGELFF

SEQ ID NO: 684131 - protein, 12 aa, Homo sapiens
  CDR3 for alpha chain variable domain of TCR clone 342066 (TRAV8-3, TRAJ26)
CAGDNYGQNFVF

SEQ ID NO: 684132 - protein, 14 aa, Homo sapiens
  CDR3 for beta chain variable domain of TCR clone 342066 (TRBV9, TRBJ2-1)
CASSLAGSYNEQFF

SEQ ID NO: 684133 - protein, 12 aa, Homo sapiens
  CDR3 for alpha chain variable domain of TCR clone 342067 (TRAV12-3, TRAJ17)
CAMTLTCNKLTF

SEQ ID NO: 684134 - protein, 18 aa, Homo sapiens
  CDR3 for beta chain variable domain of TCR clone 342067 (TRBV28, TRBJ2-6)
CASSLAGRAVSGANVLTF

SEQ ID NO: 684135 - protein, 14 aa, Homo sapiens
  CDR3 for alpha chain variable domain of TCR clone 342068 (TRAV9-2, TRAJ39)
WALYIYNAGNMLTF

SEQ ID NO: 684136 - protein, 15 aa, Homo sapiens
  CDR3 for beta chain variable domain of TCR clone 342068 (TRBV27, TRBJ1-6)
CASSFDRGLGSPLHF

SEQ ID NO: 684137 - protein, 16 aa, Homo sapiens
  CDR3 for alpha chain variable domain of TCR clone 342069 (TRAV8-3, TRAJ18)
CAVGARRGSSLGRLYF

SEQ ID NO: 684138 - protein, 14 aa, Homo sapiens
  CDR3 for beta chain variable domain of TCR clone 342069 (TRBV5-4, TRBJ1-3)
CASSSQSAGNTIYF

SEQ ID NO: 684139 - protein, 17 aa, Homo sapiens
  CDR3 for alpha chain variable domain of TCR clone 342070 (TRAV3, TRAJ12)
CAVRAGGRMDSSYKLIF

SEQ ID NO: 684140 - protein, 13 aa, Homo sapiens
  CDR3 for beta chain variable domain of TCR clone 342070 (TRBV15, TRBJ1-6)
CATSGGLNSPLHV

SEQ ID NO: 684141 - protein, 15 aa, Homo sapiens
  CDR3 for alpha chain variable domain of TCR clone 342071 (TRAV29/DV5, TRAJ53)
CAASASGGSNYKLTF

SEQ ID NO: 684142 - protein, 16 aa, Homo sapiens
  CDR3 for beta chain variable domain of TCR clone 342071 (TRBV27, TRBJ2-2)
CASSFRGLVRTGELFF

SEQ ID NO: 684143 - protein, 15 aa, Homo sapiens
  CDR3 for alpha chain variable domain of TCR clone 342072 (TRAV26-1, TRAJ23)
CIVRVAGYQGGKLIF

SEQ ID NO: 684144 - protein, 15 aa, Homo sapiens
  CDR3 for beta chain variable domain of TCR clone 342072 (TRBV7-2, TRBJ2-2)
CASSLGQGVAGELFF

SEQ ID NO: 684145 - protein, 11 aa, Homo sapiens
  CDR3 for alpha chain variable domain of TCR clone 342073 (TRAV12-1, TRAJ8)
CVVTGFQKLVF

SEQ ID NO: 684146 - protein, 14 aa, Homo sapiens
  CDR3 for beta chain variable domain of TCR clone 342073 (TRBV7-8, TRBJ1-2)
CASSPDSLSYGYTF

SEQ ID NO: 684147 - protein, 14 aa, Homo sapiens
  CDR3 for alpha chain variable domain of TCR clone 342074 (TRAV13-1, TRAJ9)
CAASALTGGFKTIF

SEQ ID NO: 684148 - protein, 14 aa, Homo sapiens
  CDR3 for beta chain variable domain of TCR clone 342074 (TRBV20-1, TRBJ2-3)
CSASSGGSTDTQYF

SEQ ID NO: 684149 - protein, 13 aa, Homo sapiens
  CDR3 for alpha chain variable domain of TCR clone 342075 (TRAV26-1, )
CIVIHRVEGFWNQ

SEQ ID NO: 684150 - protein, 14 aa, Homo sapiens
  CDR3 for beta chain variable domain of TCR clone 342075 (TRBV20-1, TRBJ2-7)
CSAWTALSSYEQYF

SEQ ID NO: 684151 - protein, 17 aa, Homo sapiens
  CDR3 for alpha chain variable domain of TCR clone 342076 (TRAV26-1, TRAJ56)
CIVRVARLAGANSKLTF

SEQ ID NO: 684152 - protein, 16 aa, Homo sapiens
  CDR3 for beta chain variable domain of TCR clone 342076 (TRBV7-3, TRBJ2-2)
CASSLKRGTLSGELFF

SEQ ID NO: 684153 - protein, 14 aa, Homo sapiens
  CDR3 for alpha chain variable domain of TCR clone 342077 (TRAV17, TRAJ31)
CATVLRNNNARLMF

SEQ ID NO: 684154 - protein, 15 aa, Homo sapiens
  CDR3 for beta chain variable domain of TCR clone 342077 (TRBV2, TRBJ2-3)
CASSDLEKATDTQYF

SEQ ID NO: 684155 - protein, 13 aa, Homo sapiens
  CDR3 for alpha chain variable domain of TCR clone 342078 (TRAV8-3, TRAJ21)
CAVGAYNFNKFYF

SEQ ID NO: 684156 - protein, 16 aa, Homo sapiens
  CDR3 for beta chain variable domain of TCR clone 342078 (TRBV12-4, TRBJ1-5)
CASSRPVGGYNQPQHF

SEQ ID NO: 684157 - protein, 14 aa, Homo sapiens
  CDR3 for alpha chain variable domain of TCR clone 342079 (TRAV12-3, TRAJ56)
CAMSVTGANSKLTF

SEQ ID NO: 684158 - protein, 17 aa, Homo sapiens
  CDR3 for beta chain variable domain of TCR clone 342079 (TRBV20-1, TRBJ2-3)
GSASLLGRGGSADTQFF

SEQ ID NO: 684159 - protein, 14 aa, Homo sapiens
  CDR3 for alpha chain variable domain of TCR clone 342080 (TRAV12-3, TRAJ29)
CAMSPYSGNTPLVF

SEQ ID NO: 684160 - protein, 12 aa, Homo sapiens
  CDR3 for beta chain variable domain of TCR clone 342080 (TRBV11-2, TRBJ2-2)
CASSLPTGELFF

SEQ ID NO: 684161 - protein, 12 aa, Homo sapiens
  CDR3 for alpha chain variable domain of TCR clone 342081 (TRAV29/DV5, TRAJ34)
CAASGNTDKLIF

SEQ ID NO: 684162 - protein, 13 aa, Homo sapiens
  CDR3 for beta chain variable domain of TCR clone 342081 (TRBV4-2, TRBJ1-1)
CASSQAGNTEAFF

SEQ ID NO: 684163 - protein, 15 aa, Homo sapiens
  CDR3 for alpha chain variable domain of TCR clone 342082 (TRAV14/DV4, TRAJ39)
CAMRAVNNAGNMLTF

SEQ ID NO: 684164 - protein, 17 aa, Homo sapiens
  CDR3 for beta chain variable domain of TCR clone 342082 (TRBV20-1, TRBJ1-2)
CSARERGERGGSGGYTF

SEQ ID NO: 684165 - protein, 15 aa, Homo sapiens
  CDR3 for alpha chain variable domain of TCR clone 342083 (TRAV12-3, TRAJ6)
CAMSATTGGSYIPTF

SEQ ID NO: 684166 - protein, 16 aa, Homo sapiens
  CDR3 for beta chain variable domain of TCR clone 342083 (TRBV5-7, TRBJ2-5)
CASIRGQTGYQETQYF

SEQ ID NO: 684167 - protein, 16 aa, Homo sapiens
  CDR3 for alpha chain variable domain of TCR clone 342084 (TRAV3, TRAJ37)
CAVRGKGSGNTVKLIF

SEQ ID NO: 684168 - protein, 13 aa, Homo sapiens
  CDR3 for beta chain variable domain of TCR clone 342084 (TRBV14, TRBJ2-7)
SASSQDRRYEQYF

SEQ ID NO: 684169 - protein, 13 aa, Homo sapiens
  CDR3 for alpha chain variable domain of TCR clone 342085 (TRAV13-2, TRAJ53)
CAENMGSNYKLTF

SEQ ID NO: 684170 - protein, 16 aa, Homo sapiens
  CDR3 for beta chain variable domain of TCR clone 342085 (TRBV20-1, TRBJ2-6)
CSASSQGYDGANVLTF

SEQ ID NO: 684171 - protein, 14 aa, Homo sapiens
  CDR3 for alpha chain variable domain of TCR clone 342086 (TRAV35, TRAJ41)
CAGQASVRRNALNY

SEQ ID NO: 684172 - protein, 14 aa, Homo sapiens
  CDR3 for beta chain variable domain of TCR clone 342086 (TRBV20-1, TRBJ1-2)
CSASEQGAVYGYTF

SEQ ID NO: 684173 - protein, 14 aa, Homo sapiens
  CDR3 for alpha chain variable domain of TCR clone 342087 (TRAV16, TRAJ33)
CALSAMDSNYQLIW

SEQ ID NO: 684174 - protein, 13 aa, Homo sapiens
  CDR3 for beta chain variable domain of TCR clone 342087 (TRBV6-1, TRBJ1-2)
CASSAREGYGYTF

SEQ ID NO: 684175 - protein, 14 aa, Homo sapiens
  CDR3 for alpha chain variable domain of TCR clone 342088 (TRAV1-2, TRAJ6)
CAVSLSGGSYIPTF

SEQ ID NO: 684176 - protein, 15 aa, Homo sapiens
  CDR3 for beta chain variable domain of TCR clone 342088 (TRBV28, TRBJ2-7)
CASSPGGRGFYEHYF

SEQ ID NO: 684177 - protein, 14 aa, Homo sapiens
  CDR3 for alpha chain variable domain of TCR clone 342089 (TRAV1-2, TRAJ8)
CAVRGDTGFQKLVF

SEQ ID NO: 684178 - protein, 16 aa, Homo sapiens
  CDR3 for beta chain variable domain of TCR clone 342089 (TRBV19, TRBJ2-1)
CASSKAGPSSYNEQFF

SEQ ID NO: 684179 - protein, 16 aa, Homo sapiens
  CDR3 for alpha chain variable domain of TCR clone 342090 (TRAV23/DV6, TRAJ9)
CAASIGGNTGGFKTIF

SEQ ID NO: 684180 - protein, 14 aa, Homo sapiens
  CDR3 for beta chain variable domain of TCR clone 342090 (TRBV19, TRBJ2-7)
CASTVQGRPYEQYS

SEQ ID NO: 684181 - protein, 15 aa, Homo sapiens
  CDR3 for alpha chain variable domain of TCR clone 342091 (TRAV34, TRAJ38)
CGADFTPGNNRKLIW

SEQ ID NO: 684182 - protein, 14 aa, Homo sapiens
  CDR3 for beta chain variable domain of TCR clone 342091 (TRBV12-4, TRBJ2-1)
CASSHQGTLNEQFF

SEQ ID NO: 684183 - protein, 13 aa, Homo sapiens
  CDR3 for alpha chain variable domain of TCR clone 342092 (TRAV2, TRAJ40)
CAVVTSGTYKYIF

SEQ ID NO: 684184 - protein, 16 aa, Homo sapiens
  CDR3 for beta chain variable domain of TCR clone 342092 (TRBV6-6, TRBJ2-1)
CASSWGGQGPYNEQFF

SEQ ID NO: 684185 - protein, 13 aa, Homo sapiens
  CDR3 for alpha chain variable domain of TCR clone 342093 (TRAV25, TRAJ26)
CAGMDNYGQYFVF

SEQ ID NO: 684186 - protein, 15 aa, Homo sapiens
  CDR3 for beta chain variable domain of TCR clone 342093 (TRBV10-3, TRBJ2-1)
CAIRNGTSGHNEQFF

SEQ ID NO: 684187 - protein, 16 aa, Homo sapiens
  CDR3 for alpha chain variable domain of TCR clone 342094 (TRAV8-3, TRAJ13)
CAVVAYPSGRYQKVTF

SEQ ID NO: 684188 - protein, 14 aa, Homo sapiens
  CDR3 for beta chain variable domain of TCR clone 342094 (TRBV18, TRBJ2-5)
CASSPRASSETQYF

SEQ ID NO: 684189 - protein, 14 aa, Homo sapiens
  CDR3 for alpha chain variable domain of TCR clone 342095 (TRAV1-2, TRAJ27)
CAPAEYTNAGKSTF

SEQ ID NO: 684190 - protein, 16 aa, Homo sapiens
  CDR3 for beta chain variable domain of TCR clone 342095 (TRBV4-3, TRBJ2-1)
CASSPALDRGVNEQFF

SEQ ID NO: 684191 - protein, 14 aa, Homo sapiens
  CDR3 for alpha chain variable domain of TCR clone 342096 (TRAV3, TRAJ7)
CAVREEGREQKTRF

SEQ ID NO: 684192 - protein, 12 aa, Homo sapiens
  CDR3 for beta chain variable domain of TCR clone 342096 (TRBV7-8, TRBJ2-7)
CASSLGDREQYF

SEQ ID NO: 684193 - protein, 13 aa, Homo sapiens
  CDR3 for alpha chain variable domain of TCR clone 342097 (TRAV8-3, TRAJ28)
CAVGAVGSYQLPF

SEQ ID NO: 684194 - protein, 17 aa, Homo sapiens
  CDR3 for beta chain variable domain of TCR clone 342097 (TRBV11-2, TRBJ2-1)
CASSLYPPGVEYNEQFF

SEQ ID NO: 684195 - protein, 15 aa, Homo sapiens
  CDR3 for alpha chain variable domain of TCR clone 342098 (TRAV8-2, TRAJ40)
CVVLGTTSGTYKYIF

SEQ ID NO: 684196 - protein, 13 aa, Homo sapiens
  CDR3 for beta chain variable domain of TCR clone 342098 (TRBV12-5, TRBJ2-1)
CASGLGRGNEQFF

SEQ ID NO: 684197 - protein, 15 aa, Homo sapiens
  CDR3 for alpha chain variable domain of TCR clone 342099 (TRAV26-1, TRAJ23)
CIVRVLNNQGGKLIF

SEQ ID NO: 684198 - protein, 15 aa, Homo sapiens
  CDR3 for beta chain variable domain of TCR clone 342099 (TRBV7-3, TRBJ2-1)
CASSFGRSNYNEQFF

SEQ ID NO: 684199 - protein, 16 aa, Homo sapiens
  CDR3 for alpha chain variable domain of TCR clone 342100 (TRAV4, TRAJ18)
CCVLLIGGSTLGRLYF

SEQ ID NO: 684200 - protein, 15 aa, Homo sapiens
  CDR3 for beta chain variable domain of TCR clone 342100 (TRBV5-1, TRBJ2-7)
CASSLGDFTTYEQYF

SEQ ID NO: 684201 - protein, 11 aa, Homo sapiens
  CDR3 for alpha chain variable domain of TCR clone 342101 (TRAV21, TRAJ34)
CAVTNTDKLLF

SEQ ID NO: 684202 - protein, 17 aa, Homo sapiens
  CDR3 for beta chain variable domain of TCR clone 342101 (TRBV20-1, TRBJ2-1)
CSARSPSGGPPTMSSSS

SEQ ID NO: 684203 - protein, 14 aa, Homo sapiens
  CDR3 for alpha chain variable domain of TCR clone 342102 (TRAV6, TRAJ40)
CALDATSGTYTYIF

SEQ ID NO: 684204 - protein, 16 aa, Homo sapiens
  CDR3 for beta chain variable domain of TCR clone 342102 (TRBV7-8, TRBJ2-5)
CASSPAGGRNQETQYF

SEQ ID NO: 684205 - protein, 17 aa, Homo sapiens
  CDR3 for alpha chain variable domain of TCR clone 342103 (TRAV12-3, TRAJ6)
CAMSARGGAGGSYIPTF

SEQ ID NO: 684206 - protein, 15 aa, Homo sapiens
  CDR3 for beta chain variable domain of TCR clone 342103 (TRBV5-1, TRBJ2-7)
CASSLMTSGSNEQYF

SEQ ID NO: 684207 - protein, 16 aa, Homo sapiens
  CDR3 for alpha chain variable domain of TCR clone 342104 (TRAV14/DV4, TRAJ53)
CAMREGGGGSNYKLTF

SEQ ID NO: 684208 - protein, 20 aa, Homo sapiens
  CDR3 for beta chain variable domain of TCR clone 342104 (TRBV3-1, TRBJ2-6)
CASSPRPGLEGGAGANVLTF

SEQ ID NO: 684209 - protein, 12 aa, Homo sapiens
  CDR3 for alpha chain variable domain of TCR clone 342105 (TRAV12-1, TRAJ40)
CVVYSGTYKYIF

SEQ ID NO: 684210 - protein, 17 aa, Homo sapiens
  CDR3 for beta chain variable domain of TCR clone 342105 (TRBV11-3, TRBJ1-5)
CASSPLTGLRGNQPQHL

SEQ ID NO: 684211 - protein, 15 aa, Homo sapiens
  CDR3 for alpha chain variable domain of TCR clone 342106 (TRAV20, TRAJ58)
CAVQDLETSGSRLTF

SEQ ID NO: 684212 - protein, 13 aa, Homo sapiens
  CDR3 for beta chain variable domain of TCR clone 342106 (TRBV20-1, TRBJ1-1)
CSARGGGNTEAFF

SEQ ID NO: 684213 - protein, 14 aa, Homo sapiens
  CDR3 for alpha chain variable domain of TCR clone 342107 (TRAV2, TRAJ3)
CAVRPYSIASKIIF

SEQ ID NO: 684214 - protein, 17 aa, Homo sapiens
  CDR3 for beta chain variable domain of TCR clone 342107 (TRBV7-6, TRBJ2-5)
CASSSPQAGDPSETQYF

SEQ ID NO: 684215 - protein, 13 aa, Homo sapiens
  CDR3 for alpha chain variable domain of TCR clone 342108 (TRAV12-2, TRAJ52)
CAVSGTSYGKLTF

SEQ ID NO: 684216 - protein, 13 aa, Homo sapiens
  CDR3 for beta chain variable domain of TCR clone 342108 (TRBV7-3, TRBJ1-1)
CASSQDWGAEAFF

SEQ ID NO: 684217 - protein, 17 aa, Homo sapiens
  CDR3 for alpha chain variable domain of TCR clone 342109 (TRAV8-4, TRAJ13)
CAVSDRGGVTRKLPLEL

SEQ ID NO: 684218 - protein, 16 aa, Homo sapiens
  CDR3 for beta chain variable domain of TCR clone 342109 (TRBV6-4, TRBJ1-2)
CASSEAVGDPNYGYTF

SEQ ID NO: 684219 - protein, 12 aa, Homo sapiens
  CDR3 for alpha chain variable domain of TCR clone 342110 (TRAV1-1, TRAJ8)
CAGGTGFQKLVF

SEQ ID NO: 684220 - protein, 17 aa, Homo sapiens
  CDR3 for beta chain variable domain of TCR clone 342110 (TRBV29-1, TRBJ2-1)
CSVVGLAGAYSYNEQFF

SEQ ID NO: 684221 - protein, 15 aa, Homo sapiens
  CDR3 for alpha chain variable domain of TCR clone 342111 (TRAV23/DV6, TRAJ33)
CAASNSGGGNYQLIW

SEQ ID NO: 684222 - protein, 14 aa, Homo sapiens
  CDR3 for beta chain variable domain of TCR clone 342111 (TRBV12-5, TRBJ2-5)
CASGSRTHQETQYF

SEQ ID NO: 684223 - protein, 12 aa, Homo sapiens
  CDR3 for alpha chain variable domain of TCR clone 342112 (TRAV13-1, TRAJ21)
CAAKEGFNKFYF

SEQ ID NO: 684224 - protein, 17 aa, Homo sapiens
  CDR3 for beta chain variable domain of TCR clone 342112 (TRBV19, TRBJ2-7)
CASSISFYDSHPYEQYF

SEQ ID NO: 684225 - protein, 14 aa, Homo sapiens
  CDR3 for alpha chain variable domain of TCR clone 342113 (TRAV1-2, TRAJ8)
CAVREDTGLQKLVF

SEQ ID NO: 684226 - protein, 15 aa, Homo sapiens
  CDR3 for beta chain variable domain of TCR clone 342113 (TRBV2, TRBJ2-3)
CASSDFEKATDTQYF

SEQ ID NO: 684227 - protein, 17 aa, Homo sapiens
  CDR3 for alpha chain variable domain of TCR clone 342114 (TRAV23/DV6, TRAJ58)
CAARLLRGETSSSRLTF

SEQ ID NO: 684228 - protein, 13 aa, Homo sapiens
  CDR3 for beta chain variable domain of TCR clone 342114 (TRBV6-4, TRBJ1-5)
CASSADLNQPQHF

SEQ ID NO: 684229 - protein, 12 aa, Homo sapiens
  CDR3 for alpha chain variable domain of TCR clone 342115 (TRAV8-3, TRAJ26)
CAGDNYVQNFVF

SEQ ID NO: 684230 - protein, 18 aa, Homo sapiens
  CDR3 for beta chain variable domain of TCR clone 342115 (TRBV12-4, TRBJ2-2)
CASSLVAGTRGRTGELFF

SEQ ID NO: 684231 - protein, 15 aa, Homo sapiens
  CDR3 for alpha chain variable domain of TCR clone 342116 (TRAV3, TRAJ13)
CAVRDIGGGYQKVTF

SEQ ID NO: 684232 - protein, 13 aa, Homo sapiens
  CDR3 for beta chain variable domain of TCR clone 342116 (TRBV6-1, TRBJ1-1)
CASSEVFGTEAFF

SEQ ID NO: 684233 - protein, 16 aa, Homo sapiens
  CDR3 for alpha chain variable domain of TCR clone 342117 (TRAV3, TRAJ22)
CAVRDMGSGSARQLTF

SEQ ID NO: 684234 - protein, 13 aa, Homo sapiens
  CDR3 for beta chain variable domain of TCR clone 342117 (TRBV19, TRBJ1-2)
CASSVPGQDGYTF

SEQ ID NO: 684235 - protein, 14 aa, Homo sapiens
  CDR3 for alpha chain variable domain of TCR clone 342118 (TRAV1-1, TRAJ27)
CAVIYNTNAGKSTI

SEQ ID NO: 684236 - protein, 15 aa, Homo sapiens
  CDR3 for beta chain variable domain of TCR clone 342118 (TRBV7-2, TRBJ2-1)
RASSSGLAGGNEQFF

SEQ ID NO: 684237 - protein, 14 aa, Homo sapiens
  CDR3 for alpha chain variable domain of TCR clone 342119 (TRAV8-3, TRAJ4)
CAVGAAGGYNKLIF

SEQ ID NO: 684238 - protein, 15 aa, Homo sapiens
  CDR3 for beta chain variable domain of TCR clone 342119 (TRBV11-3, TRBJ2-3)
CAGLKDGREGDTQYF

SEQ ID NO: 684239 - protein, 15 aa, Homo sapiens
  CDR3 for alpha chain variable domain of TCR clone 342120 (TRAV12-3, TRAJ6)
CAMSATTGGSYIPTF

SEQ ID NO: 684240 - protein, 16 aa, Homo sapiens
  CDR3 for beta chain variable domain of TCR clone 342120 (TRBV7-9, TRBJ2-5)
CASSPSGQGVKGTQYF

SEQ ID NO: 684241 - protein, 11 aa, Homo sapiens
  CDR3 for alpha chain variable domain of TCR clone 342121 (TRAV17, TRAJ49)
CATDAGNQFYF

SEQ ID NO: 684242 - protein, 16 aa, Homo sapiens
  CDR3 for beta chain variable domain of TCR clone 342121 (TRBV7-2, TRBJ1-2)
CASRPTSGTSLGGYTF

SEQ ID NO: 684243 - protein, 14 aa, Homo sapiens
  CDR3 for alpha chain variable domain of TCR clone 342122 (TRAV1-2, TRAJ16)
CAVNRFSDGQKLVF

SEQ ID NO: 684244 - protein, 15 aa, Homo sapiens
  CDR3 for beta chain variable domain of TCR clone 342122 (TRBV9, TRBJ1-6)
CASSAAGTGDSPLHF

SEQ ID NO: 684245 - protein, 15 aa, Homo sapiens
  CDR3 for alpha chain variable domain of TCR clone 342123 (TRAV8-3, TRAJ37)
CAVGGLSSKTGKLIF

SEQ ID NO: 684246 - protein, 15 aa, Homo sapiens
  CDR3 for beta chain variable domain of TCR clone 342123 (TRBV10-3, TRBJ2-7)
CATREQGLRSYEQYF

SEQ ID NO: 684247 - protein, 17 aa, Homo sapiens
  CDR3 for alpha chain variable domain of TCR clone 342124 (TRAV3, TRAJ6)
CAVRDGPRAGGSYLPTF

SEQ ID NO: 684248 - protein, 18 aa, Homo sapiens
  CDR3 for beta chain variable domain of TCR clone 342124 (TRBV25-1, TRBJ1-2)
CASSGLQNGQGLIFGYTF

SEQ ID NO: 684249 - protein, 14 aa, Homo sapiens
  CDR3 for alpha chain variable domain of TCR clone 342125 (TRAV1-1, TRAJ28)
CAAPSGAGSYQLTF

SEQ ID NO: 684250 - protein, 15 aa, Homo sapiens
  CDR3 for beta chain variable domain of TCR clone 342125 (TRBV7-2, TRBJ1-2)
CASSLVSGGYYGYTF

SEQ ID NO: 684251 - protein, 13 aa, Homo sapiens
  CDR3 for alpha chain variable domain of TCR clone 342126 (TRAV16, TRAJ10)
CAPAREEETNSPL

SEQ ID NO: 684252 - protein, 13 aa, Homo sapiens
  CDR3 for beta chain variable domain of TCR clone 342126 (TRBV15, TRBJ2-7)
CATSTTGHYEQYF

SEQ ID NO: 684253 - protein, 15 aa, Homo sapiens
  CDR3 for alpha chain variable domain of TCR clone 342127 (TRAV25, TRAJ52)
CAGSPGGTSYGKLTF

SEQ ID NO: 684254 - protein, 15 aa, Homo sapiens
  CDR3 for beta chain variable domain of TCR clone 342127 (TRBV7-8, TRBJ1-1)
CASSLGDSRNTEAFF

SEQ ID NO: 684255 - protein, 14 aa, Homo sapiens
  CDR3 for alpha chain variable domain of TCR clone 342128 (TRAV30, TRAJ33)
CGTVAPRSNYQLIW

SEQ ID NO: 684256 - protein, 14 aa, Homo sapiens
  CDR3 for beta chain variable domain of TCR clone 342128 (TRBV2, TRBJ2-1)
CASRTGSSYNEQFF

SEQ ID NO: 684257 - protein, 16 aa, Homo sapiens
  CDR3 for alpha chain variable domain of TCR clone 342129 (TRAV1-2, TRAJ10)
CAVRGVLTGGGNKLTF

SEQ ID NO: 684258 - protein, 14 aa, Homo sapiens
  CDR3 for beta chain variable domain of TCR clone 342129 (TRBV11-1, TRBJ2-7)
CASTSAVPSYEQYF

SEQ ID NO: 684259 - protein, 14 aa, Homo sapiens
  CDR3 for alpha chain variable domain of TCR clone 342130 (TRAV3, TRAJ21)
CALGRGSTNFTLDL

SEQ ID NO: 684260 - protein, 16 aa, Homo sapiens
  CDR3 for beta chain variable domain of TCR clone 342130 (TRBV6-1, TRBJ2-5)
CASSETLDRGAETQYF

SEQ ID NO: 684261 - protein, 12 aa, Homo sapiens
  CDR3 for alpha chain variable domain of TCR clone 342131 (TRAV2, TRAJ9)
CAVGAGGFKTIF

SEQ ID NO: 684262 - protein, 15 aa, Homo sapiens
  CDR3 for beta chain variable domain of TCR clone 342131 (TRBV13, TRBJ2-2)
SSSPRTGEHTGELFF

SEQ ID NO: 684263 - protein, 14 aa, Homo sapiens
  CDR3 for alpha chain variable domain of TCR clone 342132 (TRAV1-2, TRAJ26)
TSVVRPNYGQNFVF

SEQ ID NO: 684264 - protein, 14 aa, Homo sapiens
  CDR3 for beta chain variable domain of TCR clone 342132 (TRBV4-1, TRBJ2-5)
CASSQDLALETQYF

SEQ ID NO: 684265 - protein, 13 aa, Homo sapiens
  CDR3 for alpha chain variable domain of TCR clone 342133 (TRAV21, TRAJ57)
CAVIQGGSEKLVF

SEQ ID NO: 684266 - protein, 16 aa, Homo sapiens
  CDR3 for beta chain variable domain of TCR clone 342133 (TRBV29-1, TRBJ2-7)
CSVEDAEDGTAYEQYF

SEQ ID NO: 684267 - protein, 13 aa, Homo sapiens
  CDR3 for alpha chain variable domain of TCR clone 342134 (TRAV36/DV7, TRAJ54)
CAVGIQGAQKLVF

SEQ ID NO: 684268 - protein, 16 aa, Homo sapiens
  CDR3 for beta chain variable domain of TCR clone 342134 (TRBV19, TRBJ2-1)
CASSKAGPSSYNEQFF

SEQ ID NO: 684269 - protein, 14 aa, Homo sapiens
  CDR3 for alpha chain variable domain of TCR clone 342135 (TRAV13-1, TRAJ44)
CAAKATGTASQLTF

SEQ ID NO: 684270 - protein, 17 aa, Homo sapiens
  CDR3 for beta chain variable domain of TCR clone 342135 (TRBV7-3, TRBJ2-3)
CASSLMKRMRGADTQYF

SEQ ID NO: 684271 - protein, 12 aa, Homo sapiens
  CDR3 for alpha chain variable domain of TCR clone 342136 (TRAV21, TRAJ33)
CAVQDSDYQLIW

SEQ ID NO: 684272 - protein, 14 aa, Homo sapiens
  CDR3 for beta chain variable domain of TCR clone 342136 (TRBV28, TRBJ2-1)
CASSPGEGGNEQFC

SEQ ID NO: 684273 - protein, 14 aa, Homo sapiens
  CDR3 for alpha chain variable domain of TCR clone 342137 (TRAV1-2, TRAJ16)
CAVNRFSDGKKLLF

SEQ ID NO: 684274 - protein, 11 aa, Homo sapiens
  CDR3 for beta chain variable domain of TCR clone 342137 (TRBV7-9, TRBJ2-3)
CASSPTDTQYF

SEQ ID NO: 684275 - protein, 14 aa, Homo sapiens
  CDR3 for alpha chain variable domain of TCR clone 342138 (TRAV35, TRAJ22)
CAGLRPGSARQLTF

SEQ ID NO: 684276 - protein, 15 aa, Homo sapiens
  CDR3 for beta chain variable domain of TCR clone 342138 (TRBV12-4, TRBJ2-5)
CASSPPTGLQESQYF

SEQ ID NO: 684277 - protein, 15 aa, Homo sapiens
  CDR3 for alpha chain variable domain of TCR clone 342139 (TRAV21, TRAJ53)
CATLNSGGSNYKLTF

SEQ ID NO: 684278 - protein, 14 aa, Homo sapiens
  CDR3 for beta chain variable domain of TCR clone 342139 (TRBV7-2, TRBJ2-7)
CASSPKTSFYERYF

SEQ ID NO: 684279 - protein, 18 aa, Homo sapiens
  CDR3 for alpha chain variable domain of TCR clone 342140 (TRAV12-1, TRAJ52)
CVVNPLGAGGTSYGKLTF

SEQ ID NO: 684280 - protein, 15 aa, Homo sapiens
  CDR3 for beta chain variable domain of TCR clone 342140 (TRBV5-1, TRBJ1-2)
CASSYPGTGSSGYTF

SEQ ID NO: 684281 - protein, 14 aa, Homo sapiens
  CDR3 for alpha chain variable domain of TCR clone 342141 (TRAV36/DV7, TRAJ44)
CRGANTGTASKLTF

SEQ ID NO: 684282 - protein, 14 aa, Homo sapiens
  CDR3 for beta chain variable domain of TCR clone 342141 (TRBV20-1, TRBJ1-3)
CSASPTGAGNTIYF

SEQ ID NO: 684283 - protein, 17 aa, Homo sapiens
  CDR3 for alpha chain variable domain of TCR clone 342142 (TRAV27, TRAJ36)
RLVIQASTPAGANNLFF

SEQ ID NO: 684284 - protein, 13 aa, Homo sapiens
  CDR3 for beta chain variable domain of TCR clone 342142 (TRBV7-9, TRBJ2-3)
CASSPGSTDTQYF

SEQ ID NO: 684285 - protein, 14 aa, Homo sapiens
  CDR3 for alpha chain variable domain of TCR clone 342143 (TRAV12-3, TRAJ10)
RHLPLTGGGNKLTF

SEQ ID NO: 684286 - protein, 15 aa, Homo sapiens
  CDR3 for beta chain variable domain of TCR clone 342143 (TRBV3-1, TRBJ2-5)
CASSANLGGPETQYF

SEQ ID NO: 684287 - protein, 12 aa, Homo sapiens
  CDR3 for alpha chain variable domain of TCR clone 342144 (TRAV17, TRAJ57)
CATDGGSEKLVV

SEQ ID NO: 684288 - protein, 13 aa, Homo sapiens
  CDR3 for beta chain variable domain of TCR clone 342144 (TRBV7-9, TRBJ2-7)
CVSSFAGAYEQYF

SEQ ID NO: 684289 - protein, 23 aa, Homo sapiens
  CDR3 for alpha chain variable domain of TCR clone 342145 (TRAV26-1, )
CIADNAGNNHIQNPDPAVYQLRE

SEQ ID NO: 684290 - protein, 13 aa, Homo sapiens
  CDR3 for beta chain variable domain of TCR clone 342145 (TRBV20-1, TRBJ1-1)
CSARGGGNTEAFF

SEQ ID NO: 684291 - protein, 14 aa, Homo sapiens
  CDR3 for alpha chain variable domain of TCR clone 342146 (TRAV2, TRAJ37)
CAVAFTSNTGKLIF

SEQ ID NO: 684292 - protein, 14 aa, Homo sapiens
  CDR3 for beta chain variable domain of TCR clone 342146 (TRBV7-2, TRBJ2-7)
CASSPKTSFYEQYF

SEQ ID NO: 684293 - protein, 10 aa, Homo sapiens
  CDR3 for alpha chain variable domain of TCR clone 342147 (TRAV21, TRAJ43)
CAVRTGDMRF

SEQ ID NO: 684294 - protein, 13 aa, Homo sapiens
  CDR3 for beta chain variable domain of TCR clone 342147 (TRBV20-1, TRBJ2-7)
CSAPGLADYEHYF

SEQ ID NO: 684295 - protein, 13 aa, Homo sapiens
  CDR3 for alpha chain variable domain of TCR clone 342148 (TRAV2, TRAJ21)
CAVEDLNFNKFYF

SEQ ID NO: 684296 - protein, 15 aa, Homo sapiens
  CDR3 for beta chain variable domain of TCR clone 342148 (TRBV28, TRBJ2-5)
CTSSPGQVSIETQYF

SEQ ID NO: 684297 - protein, 13 aa, Homo sapiens
  CDR3 for alpha chain variable domain of TCR clone 342149 (TRAV16, TRAJ34)
CALTGYNTDKLIF

SEQ ID NO: 684298 - protein, 13 aa, Homo sapiens
  CDR3 for beta chain variable domain of TCR clone 342149 (TRBV6-1, TRBJ2-1)
CASREVGGHEQFF

SEQ ID NO: 684299 - protein, 13 aa, Homo sapiens
  CDR3 for alpha chain variable domain of TCR clone 342150 (TRAV1-1, TRAJ9)
CAAKNTGGFKTIF

SEQ ID NO: 684300 - protein, 15 aa, Homo sapiens
  CDR3 for beta chain variable domain of TCR clone 342150 (TRBV2, TRBJ2-3)
CASSDFEKATDTQYF

SEQ ID NO: 684301 - protein, 13 aa, Homo sapiens
  CDR3 for alpha chain variable domain of TCR clone 342151 (TRAV21, TRAJ15)
CAVANQAGTALIF

SEQ ID NO: 684302 - protein, 14 aa, Homo sapiens
  CDR3 for beta chain variable domain of TCR clone 342151 (TRBV12-4, TRBJ1-1)
CASSFSQMNTEAFF

SEQ ID NO: 684303 - protein, 12 aa, Homo sapiens
  CDR3 for alpha chain variable domain of TCR clone 342152 (TRAV16, TRAJ26)
CSLRSYVQNFVF

SEQ ID NO: 684304 - protein, 14 aa, Homo sapiens
  CDR3 for beta chain variable domain of TCR clone 342152 (TRBV10-3, TRBJ2-1)
CAISSDLAYNEQFS

SEQ ID NO: 684305 - protein, 14 aa, Homo sapiens
  CDR3 for alpha chain variable domain of TCR clone 342153 (TRAV20, TRAJ20)
YAVRRGYNDYKLSF

SEQ ID NO: 684306 - protein, 13 aa, Homo sapiens
  CDR3 for beta chain variable domain of TCR clone 342153 (TRBV19, TRBJ2-5)
CASSETAPETQYF

SEQ ID NO: 684307 - protein, 16 aa, Homo sapiens
  CDR3 for alpha chain variable domain of TCR clone 342154 (TRAV3, TRAJ21)
CAVRDIERGNLNKFYF

SEQ ID NO: 684308 - protein, 17 aa, Homo sapiens
  CDR3 for beta chain variable domain of TCR clone 342154 (TRBV13, TRBJ2-3)
CASSLSRVAGGRNTQYF

SEQ ID NO: 684309 - protein, 14 aa, Homo sapiens
  CDR3 for alpha chain variable domain of TCR clone 342155 (TRAV1-2, TRAJ16)
CAVNRFSDGQRLRF

SEQ ID NO: 684310 - protein, 14 aa, Homo sapiens
  CDR3 for beta chain variable domain of TCR clone 342155 (TRBV7-9, TRBJ2-2)
CASSLGHRTGELFF

SEQ ID NO: 684311 - protein, 12 aa, Homo sapiens
  CDR3 for alpha chain variable domain of TCR clone 342156 (TRAV8-6, TRAJ43)
CAVSNNNNDMRF

SEQ ID NO: 684312 - protein, 15 aa, Homo sapiens
  CDR3 for beta chain variable domain of TCR clone 342156 (TRBV7-3, TRBJ2-6)
CASSLGGAGANVLIF

SEQ ID NO: 684313 - protein, 14 aa, Homo sapiens
  CDR3 for alpha chain variable domain of TCR clone 342157 (TRAV8-1, TRAJ23)
CAVGTYNKGGKLIF

SEQ ID NO: 684314 - protein, 16 aa, Homo sapiens
  CDR3 for beta chain variable domain of TCR clone 342157 (TRBV18, TRBJ1-5)
CARSPSTGNSNQPQHF

SEQ ID NO: 684315 - protein, 13 aa, Homo sapiens
  CDR3 for alpha chain variable domain of TCR clone 342158 (TRAV26-1, TRAJ36)
CIAVRRGANNLFF

SEQ ID NO: 684316 - protein, 16 aa, Homo sapiens
  CDR3 for beta chain variable domain of TCR clone 342158 (TRBV4-2, TRBJ2-3)
CASSQELAGDTDTQYF

SEQ ID NO: 684317 - protein, 13 aa, Homo sapiens
  CDR3 for alpha chain variable domain of TCR clone 342159 (TRAV29/DV5, TRAJ31)
CAASRNSNAILMF

SEQ ID NO: 684318 - protein, 14 aa, Homo sapiens
  CDR3 for beta chain variable domain of TCR clone 342159 (TRBV20-1, TRBJ1-5)
CSARDVTGFQPQHF

SEQ ID NO: 684319 - protein, 15 aa, Homo sapiens
  CDR3 for alpha chain variable domain of TCR clone 342160 (TRAV21, TRAJ32)
CAVLNYGGATNKLIF

SEQ ID NO: 684320 - protein, 13 aa, Homo sapiens
  CDR3 for beta chain variable domain of TCR clone 342160 (TRBV7-3, TRBJ2-5)
CASSVMLGGTQYF

SEQ ID NO: 684321 - protein, 11 aa, Homo sapiens
  CDR3 for alpha chain variable domain of TCR clone 342161 (TRAV21, TRAJ11)
CAVNGYSTLTF

SEQ ID NO: 684322 - protein, 12 aa, Homo sapiens
  CDR3 for beta chain variable domain of TCR clone 342161 (TRBV28, TRBJ2-1)
CASSVQINEQFF

SEQ ID NO: 684323 - protein, 13 aa, Homo sapiens
  CDR3 for alpha chain variable domain of TCR clone 342162 (TRAV8-3, TRAJ36)
CAVGATGANNLFF

SEQ ID NO: 684324 - protein, 16 aa, Homo sapiens
  CDR3 for beta chain variable domain of TCR clone 342162 (TRBV27, TRBJ2-2)
CASSFRGLVRTGELFF

SEQ ID NO: 684325 - protein, 14 aa, Homo sapiens
  CDR3 for alpha chain variable domain of TCR clone 342163 (TRAV12-3, TRAJ10)
SHLPLPGGGNKLTF

SEQ ID NO: 684326 - protein, 15 aa, Homo sapiens
  CDR3 for beta chain variable domain of TCR clone 342163 (TRBV27, TRBJ2-1)
CASSNGGGSSNEQFF

SEQ ID NO: 684327 - protein, 12 aa, Homo sapiens
  CDR3 for alpha chain variable domain of TCR clone 342164 (TRAV12-1, TRAJ34)
CVVTGATDKLIF

SEQ ID NO: 684328 - protein, 16 aa, Homo sapiens
  CDR3 for beta chain variable domain of TCR clone 342164 (TRBV7-2, TRBJ1-2)
CASSSNQDRRGHGYTF

SEQ ID NO: 684329 - protein, 14 aa, Homo sapiens
  CDR3 for alpha chain variable domain of TCR clone 342165 (TRAV2, TRAJ9)
CAVEDRSGGFKTIF

SEQ ID NO: 684330 - protein, 14 aa, Homo sapiens
  CDR3 for beta chain variable domain of TCR clone 342165 (TRBV7-6, TRBJ2-3)
CASSLGTVTDTPYF

SEQ ID NO: 684331 - protein, 16 aa, Homo sapiens
  CDR3 for alpha chain variable domain of TCR clone 342166 (TRAV21, TRAJ33)
CAVSPASMDSNYQLIW

SEQ ID NO: 684332 - protein, 17 aa, Homo sapiens
  CDR3 for beta chain variable domain of TCR clone 342166 (TRBV2, TRBJ1-4)
CVSSKRELTQGEEKLFF

SEQ ID NO: 684333 - protein, 14 aa, Homo sapiens
  CDR3 for alpha chain variable domain of TCR clone 342167 (TRAV12-2, TRAJ45)
CAVNIGGGADGHTF

SEQ ID NO: 684334 - protein, 11 aa, Homo sapiens
  CDR3 for beta chain variable domain of TCR clone 342167 (TRBV27, TRBJ2-2)
CASPPRLAKHR

SEQ ID NO: 684335 - protein, 15 aa, Homo sapiens
  CDR3 for alpha chain variable domain of TCR clone 342168 (TRAV2, TRAJ24)
CAVVRLKNSWGKLQF

SEQ ID NO: 684336 - protein, 15 aa, Homo sapiens
  CDR3 for beta chain variable domain of TCR clone 342168 (TRBV28, TRBJ1-1)
CASTSTRGLNTEAFF

SEQ ID NO: 684337 - protein, 13 aa, Homo sapiens
  CDR3 for alpha chain variable domain of TCR clone 342169 (TRAV8-6, TRAJ21)
CAVSPSSLNKFYF

SEQ ID NO: 684338 - protein, 14 aa, Homo sapiens
  CDR3 for beta chain variable domain of TCR clone 342169 (TRBV7-9, TRBJ2-5)
CASSLDTTQETQYF

SEQ ID NO: 684339 - protein, 13 aa, Homo sapiens
  CDR3 for alpha chain variable domain of TCR clone 342170 (TRAV12-3, TRAJ6)
CANPSGGSYIPTF

SEQ ID NO: 684340 - protein, 13 aa, Homo sapiens
  CDR3 for beta chain variable domain of TCR clone 342170 (TRBV7-9, TRBJ1-2)
CASSLKQNYGYTF

SEQ ID NO: 684341 - protein, 14 aa, Homo sapiens
  CDR3 for alpha chain variable domain of TCR clone 342171 (TRAV8-2, TRAJ4)
CVVSPSGGYNKLSF

SEQ ID NO: 684342 - protein, 15 aa, Homo sapiens
  CDR3 for beta chain variable domain of TCR clone 342171 (TRBV2, TRBJ2-1)
CASSEARSAYNEQFF

SEQ ID NO: 684343 - protein, 15 aa, Homo sapiens
  CDR3 for alpha chain variable domain of TCR clone 342172 (TRAV3, TRAJ32)
CAVSSYGGATNKLIF

SEQ ID NO: 684344 - protein, 12 aa, Homo sapiens
  CDR3 for beta chain variable domain of TCR clone 342172 (TRBV5-5, TRBJ2-5)
CASSYFGETQYF

SEQ ID NO: 684345 - protein, 11 aa, Homo sapiens
  CDR3 for alpha chain variable domain of TCR clone 342173 (TRAV17, TRAJ43)
CATPRSNDIRF

SEQ ID NO: 684346 - protein, 15 aa, Homo sapiens
  CDR3 for beta chain variable domain of TCR clone 342173 (TRBV11-2, TRBJ2-1)
CASSLGTSGLNEQLF

SEQ ID NO: 684347 - protein, 16 aa, Homo sapiens
  CDR3 for alpha chain variable domain of TCR clone 342174 (TRAV38-2/DV8, TRAJ33)
CAYRTGLFDSNYQLIL

SEQ ID NO: 684348 - protein, 13 aa, Homo sapiens
  CDR3 for beta chain variable domain of TCR clone 342174 (TRBV27, TRBJ1-4)
CASSLMGDEKLFF

SEQ ID NO: 684349 - protein, 14 aa, Homo sapiens
  CDR3 for alpha chain variable domain of TCR clone 342175 (TRAV12-3, TRAJ9)
CAMSPNTGGFKTIF

SEQ ID NO: 684350 - protein, 12 aa, Homo sapiens
  CDR3 for beta chain variable domain of TCR clone 342175 (TRBV19, TRBJ1-5)
CAISIAQQPQHF

SEQ ID NO: 684351 - protein, 15 aa, Homo sapiens
  CDR3 for alpha chain variable domain of TCR clone 342176 (TRAV8-1, TRAJ13)
CAVNPRSGGYQKVTF

SEQ ID NO: 684352 - protein, 17 aa, Homo sapiens
  CDR3 for beta chain variable domain of TCR clone 342176 (TRBV11-2, TRBJ2-1)
CASSLYPPGVEYNEQFF

SEQ ID NO: 684353 - protein, 13 aa, Homo sapiens
  CDR3 for alpha chain variable domain of TCR clone 342177 (TRAV20, TRAJ37)
CAGCSSNTGKLIF

SEQ ID NO: 684354 - protein, 16 aa, Homo sapiens
  CDR3 for beta chain variable domain of TCR clone 342177 (TRBV7-3, TRBJ2-1)
CASSLEGYRSYNEQFF

SEQ ID NO: 684355 - protein, 13 aa, Homo sapiens
  CDR3 for alpha chain variable domain of TCR clone 342178 (TRAV13-1, TRAJ52)
CAAGGTSYGKLTF

SEQ ID NO: 684356 - protein, 16 aa, Homo sapiens
  CDR3 for beta chain variable domain of TCR clone 342178 (TRBV4-3, TRBJ2-2)
CASSHLQGSGTGELFF

SEQ ID NO: 684357 - protein, 13 aa, Homo sapiens
  CDR3 for alpha chain variable domain of TCR clone 342179 (TRAV13-2, TRAJ48)
CAEMDFGNEKLTF

SEQ ID NO: 684358 - protein, 14 aa, Homo sapiens
  CDR3 for beta chain variable domain of TCR clone 342179 (TRBV19, TRBJ1-5)
CASGTEVDNQPQHF

SEQ ID NO: 684359 - protein, 10 aa, Homo sapiens
  CDR3 for alpha chain variable domain of TCR clone 342180 (TRAV3, TRAJ6)
CAVRDGPGQE

SEQ ID NO: 684360 - protein, 14 aa, Homo sapiens
  CDR3 for beta chain variable domain of TCR clone 342180 (TRBV7-2, TRBJ2-7)
CASSPKTSFYEQYF

SEQ ID NO: 684361 - protein, 15 aa, Homo sapiens
  CDR3 for alpha chain variable domain of TCR clone 342181 (TRAV4, TRAJ39)
CLVGPNNNACRMLTF

SEQ ID NO: 684362 - protein, 13 aa, Homo sapiens
  CDR3 for beta chain variable domain of TCR clone 342181 (TRBV11-2, TRBJ2-5)
CASSSTGEETQYF

SEQ ID NO: 684363 - protein, 14 aa, Homo sapiens
  CDR3 for alpha chain variable domain of TCR clone 342182 (TRAV29/DV5, TRAJ20)
CAATIRSNDYKLSF

SEQ ID NO: 684364 - protein, 13 aa, Homo sapiens
  CDR3 for beta chain variable domain of TCR clone 342182 (TRBV10-3, TRBJ2-7)
CASKLAVNYEQYF

SEQ ID NO: 684365 - protein, 13 aa, Homo sapiens
  CDR3 for alpha chain variable domain of TCR clone 342183 (TRAV21, TRAJ20)
CAVGLRVDYKLSF

SEQ ID NO: 684366 - protein, 15 aa, Homo sapiens
  CDR3 for beta chain variable domain of TCR clone 342183 (TRBV2, TRBJ1-5)
CASSSGPTGNQPQHF

SEQ ID NO: 684367 - protein, 14 aa, Homo sapiens
  CDR3 for alpha chain variable domain of TCR clone 342184 (TRAV30, TRAJ26)
CGTEIVSYGKNFVF

SEQ ID NO: 684368 - protein, 13 aa, Homo sapiens
  CDR3 for beta chain variable domain of TCR clone 342184 (TRBV19, TRBJ1-3)
CASRLSLGNTMYF

SEQ ID NO: 684369 - protein, 19 aa, Homo sapiens
  CDR3 for alpha chain variable domain of TCR clone 342185 (TRAV38-1, TRAJ53)
CAFMKHGLESGGSNCKLTF

SEQ ID NO: 684370 - protein, 13 aa, Homo sapiens
  CDR3 for beta chain variable domain of TCR clone 342185 (TRBV19, TRBJ2-7)
CASSPRQSYEQYF

SEQ ID NO: 684371 - protein, 12 aa, Homo sapiens
  CDR3 for alpha chain variable domain of TCR clone 342186 (TRAV38-1, TRAJ36)
FAFETGANNLFF

SEQ ID NO: 684372 - protein, 14 aa, Homo sapiens
  CDR3 for beta chain variable domain of TCR clone 342186 (TRBV7-2, TRBJ2-7)
CASRSQGAAYEQYF

SEQ ID NO: 684373 - protein, 14 aa, Homo sapiens
  CDR3 for alpha chain variable domain of TCR clone 342187 (TRAV26-1, TRAJ5)
CIFRVRFNRRALTF

SEQ ID NO: 684374 - protein, 17 aa, Homo sapiens
  CDR3 for beta chain variable domain of TCR clone 342187 (TRBV29-1, TRBJ2-3)
CSVEVLAGETSTDTQYF

SEQ ID NO: 684375 - protein, 15 aa, Homo sapiens
  CDR3 for alpha chain variable domain of TCR clone 342188 (TRAV26-1, TRAJ29)
CIVRVEGSGNTPLVF

SEQ ID NO: 684376 - protein, 15 aa, Homo sapiens
  CDR3 for beta chain variable domain of TCR clone 342188 (TRBV7-9, TRBJ1-5)
CASSQGHQTSQPQHF

SEQ ID NO: 684377 - protein, 13 aa, Homo sapiens
  CDR3 for alpha chain variable domain of TCR clone 342189 (TRAV21, TRAJ20)
CAVGLRVDYKLSF

SEQ ID NO: 684378 - protein, 13 aa, Homo sapiens
  CDR3 for beta chain variable domain of TCR clone 342189 (TRBV6-1, TRBJ1-1)
CANSRQGNTGAFF

SEQ ID NO: 684379 - protein, 13 aa, Homo sapiens
  CDR3 for alpha chain variable domain of TCR clone 342190 (TRAV3, TRAJ21)
CAVREPDFNKFHF

SEQ ID NO: 684380 - protein, 14 aa, Homo sapiens
  CDR3 for beta chain variable domain of TCR clone 342190 (TRBV19, TRBJ2-7)
CASSMGQGAIEQYF

SEQ ID NO: 684381 - protein, 15 aa, Homo sapiens
  CDR3 for alpha chain variable domain of TCR clone 342191 (TRAV23/DV6, TRAJ18)
CAARYRGSTLGRLYF

SEQ ID NO: 684382 - protein, 13 aa, Homo sapiens
  CDR3 for beta chain variable domain of TCR clone 342191 (TRBV7-2, TRBJ2-7)
CASSSISGSEQYF

SEQ ID NO: 684383 - protein, 13 aa, Homo sapiens
  CDR3 for alpha chain variable domain of TCR clone 342192 (TRAV8-6, TRAJ8)
CAVSNTGFQKLVF

SEQ ID NO: 684384 - protein, 14 aa, Homo sapiens
  CDR3 for beta chain variable domain of TCR clone 342192 (TRBV5-1, TRBJ2-7)
CASSGGESLYEQYF

SEQ ID NO: 684385 - protein, 14 aa, Homo sapiens
  CDR3 for alpha chain variable domain of TCR clone 342193 (TRAV1-2, TRAJ8)
CSVREDTGFQKLVF

SEQ ID NO: 684386 - protein, 15 aa, Homo sapiens
  CDR3 for beta chain variable domain of TCR clone 342193 (TRBV5-5, TRBJ1-5)
CASISTPGSNQPQHF

SEQ ID NO: 684387 - protein, 13 aa, Homo sapiens
  CDR3 for alpha chain variable domain of TCR clone 342194 (TRAV21, TRAJ57)
FAVTQGGSEKLVF

SEQ ID NO: 684388 - protein, 15 aa, Homo sapiens
  CDR3 for beta chain variable domain of TCR clone 342194 (TRBV5-1, TRBJ1-1)
CASSSTTGTNTEAFF

SEQ ID NO: 684389 - protein, 17 aa, Homo sapiens
  CDR3 for alpha chain variable domain of TCR clone 342195 (TRAV21, TRAJ53)
CAVRLRNSGGSNYKLTF

SEQ ID NO: 684390 - protein, 11 aa, Homo sapiens
  CDR3 for beta chain variable domain of TCR clone 342195 (TRBV7-9, TRBJ1-6)
CASSLSLPLHF

SEQ ID NO: 684391 - protein, 15 aa, Homo sapiens
  CDR3 for alpha chain variable domain of TCR clone 342196 (TRAV38-1, TRAJ37)
CAFIFGSGNTGKLIF

SEQ ID NO: 684392 - protein, 12 aa, Homo sapiens
  CDR3 for beta chain variable domain of TCR clone 342196 (TRBV7-9, TRBJ2-7)
CASSLYGYEQYF

SEQ ID NO: 684393 - protein, 15 aa, Homo sapiens
  CDR3 for alpha chain variable domain of TCR clone 342197 (TRAV13-1, TRAJ27)
CAARELNTNAGKSPF

SEQ ID NO: 684394 - protein, 15 aa, Homo sapiens
  CDR3 for beta chain variable domain of TCR clone 342197 (TRBV20-1, TRBJ2-1)
CSASSAGSSYNEQFF

SEQ ID NO: 684395 - protein, 12 aa, Homo sapiens
  CDR3 for alpha chain variable domain of TCR clone 342198 (TRAV21, TRAJ11)
CAATSGYSTLTF

SEQ ID NO: 684396 - protein, 15 aa, Homo sapiens
  CDR3 for beta chain variable domain of TCR clone 342198 (TRBV7-2, TRBJ2-5)
CASSAARSLTETQYF

SEQ ID NO: 684397 - protein, 15 aa, Homo sapiens
  CDR3 for alpha chain variable domain of TCR clone 342199 (TRAV35, TRAJ38)
CAGFSNAGNNRKLIC

SEQ ID NO: 684398 - protein, 18 aa, Homo sapiens
  CDR3 for beta chain variable domain of TCR clone 342199 (TRBV3-1, TRBJ1-2)
CASSQDVIGWNGDYGYTF

SEQ ID NO: 684399 - protein, 12 aa, Homo sapiens
  CDR3 for alpha chain variable domain of TCR clone 342200 (TRAV13-1, TRAJ20)
CAASRGDYKLSF

SEQ ID NO: 684400 - protein, 14 aa, Homo sapiens
  CDR3 for beta chain variable domain of TCR clone 342200 (TRBV2, TRBJ2-1)
CASSEARQGVSEFF

SEQ ID NO: 684401 - protein, 13 aa, Homo sapiens
  CDR3 for alpha chain variable domain of TCR clone 342201 (TRAV1-2, TRAJ11)
CAVRDSGYSTLTF

SEQ ID NO: 684402 - protein, 13 aa, Homo sapiens
  CDR3 for beta chain variable domain of TCR clone 342201 (TRBV27, TRBJ2-1)
CASSSGSYNEQFF

SEQ ID NO: 684403 - protein, 13 aa, Homo sapiens
  CDR3 for alpha chain variable domain of TCR clone 342202 (TRAV12-2, TRAJ37)
CAGGSGNTGKLIF

SEQ ID NO: 684404 - protein, 15 aa, Homo sapiens
  CDR3 for beta chain variable domain of TCR clone 342202 (TRBV6-3, TRBJ2-7)
CASSSPGTVFYEQYF

SEQ ID NO: 684405 - protein, 13 aa, Homo sapiens
  CDR3 for alpha chain variable domain of TCR clone 342203 (TRAV12-1, TRAJ7)
CVVNMRGNNRLAF

SEQ ID NO: 684406 - protein, 12 aa, Homo sapiens
  CDR3 for beta chain variable domain of TCR clone 342203 (TRBV11-2, TRBJ2-2)
CASSLGGGELFF

SEQ ID NO: 684407 - protein, 11 aa, Homo sapiens
  CDR3 for alpha chain variable domain of TCR clone 342204 (TRAV16, TRAJ42)
CALASQGNLIF

SEQ ID NO: 684408 - protein, 15 aa, Homo sapiens
  CDR3 for beta chain variable domain of TCR clone 342204 (TRBV14, TRBJ1-1)
CASSQDGMGRREAFF

SEQ ID NO: 684409 - protein, 14 aa, Homo sapiens
  CDR3 for alpha chain variable domain of TCR clone 342205 (TRAV1-2, TRAJ16)
CAVNRFSDGQKLLF

SEQ ID NO: 684410 - protein, 11 aa, Homo sapiens
  CDR3 for beta chain variable domain of TCR clone 342205 (TRBV13, TRBJ2-2)
CASSPRTGEHT

SEQ ID NO: 684411 - protein, 17 aa, Homo sapiens
  CDR3 for alpha chain variable domain of TCR clone 342206 (TRAV4, TRAJ13)
CLVGVQGSSGGYQKVTF

SEQ ID NO: 684412 - protein, 16 aa, Homo sapiens
  CDR3 for beta chain variable domain of TCR clone 342206 (TRBV7-9, TRBJ2-1)
CASSDVAGGSYNEQFF

SEQ ID NO: 684413 - protein, 14 aa, Homo sapiens
  CDR3 for alpha chain variable domain of TCR clone 342207 (TRAV12-2, TRAJ45)
CAVYSGGGADGLTF

SEQ ID NO: 684414 - protein, 13 aa, Homo sapiens
  CDR3 for beta chain variable domain of TCR clone 342207 (TRBV20-1, TRBJ1-1)
CSAPLGGGTEAFF

SEQ ID NO: 684415 - protein, 13 aa, Homo sapiens
  CDR3 for alpha chain variable domain of TCR clone 342208 (TRAV8-1, TRAJ32)
CAAEGGATNKLIF

SEQ ID NO: 684416 - protein, 18 aa, Homo sapiens
  CDR3 for beta chain variable domain of TCR clone 342208 (TRBV18, TRBJ2-3)
CASSYTSGAAGGTDTQYF

SEQ ID NO: 684417 - protein, 14 aa, Homo sapiens
  CDR3 for alpha chain variable domain of TCR clone 342209 (TRAV1-2, TRAJ16)
CAVNRFSDGQELLF

SEQ ID NO: 684418 - protein, 14 aa, Homo sapiens
  CDR3 for beta chain variable domain of TCR clone 342209 (TRBV12-4, TRBJ1-1)
CASSLGTGGTEAFF

SEQ ID NO: 684419 - protein, 15 aa, Homo sapiens
  CDR3 for alpha chain variable domain of TCR clone 342210 (TRAV8-3, TRAJ45)
CASSYSGGGADGLTF

SEQ ID NO: 684420 - protein, 13 aa, Homo sapiens
  CDR3 for beta chain variable domain of TCR clone 342210 (TRBV11-2, TRBJ1-6)
CASSLAGTSPLHF

SEQ ID NO: 684421 - protein, 12 aa, Homo sapiens
  CDR3 for alpha chain variable domain of TCR clone 342211 (TRAV12-3, TRAJ17)
CAMTLTGNKLTF

SEQ ID NO: 684422 - protein, 13 aa, Homo sapiens
  CDR3 for beta chain variable domain of TCR clone 342211 (TRBV11-3, TRBJ1-1)
CASTGSLNTEAFF

SEQ ID NO: 684423 - protein, 14 aa, Homo sapiens
  CDR3 for alpha chain variable domain of TCR clone 342212 (TRAV17, TRAJ9)
CATDENTGGFKTIF

SEQ ID NO: 684424 - protein, 19 aa, Homo sapiens
  CDR3 for beta chain variable domain of TCR clone 342212 (TRBV28, TRBJ2-1)
CASSFSIRGSGRTRYEQFF

SEQ ID NO: 684425 - protein, 16 aa, Homo sapiens
  CDR3 for alpha chain variable domain of TCR clone 342213 (TRAV12-3, TRAJ53)
CAMSPGSGGSNYKLTF

SEQ ID NO: 684426 - protein, 15 aa, Homo sapiens
  CDR3 for beta chain variable domain of TCR clone 342213 (TRBV20-1, TRBJ2-7)
CSAREGRDSLYEQYF

SEQ ID NO: 684427 - protein, 14 aa, Homo sapiens
  CDR3 for alpha chain variable domain of TCR clone 342214 (TRAV8-4, TRAJ13)
CAVTLSGGYQKVTF

SEQ ID NO: 684428 - protein, 14 aa, Homo sapiens
  CDR3 for beta chain variable domain of TCR clone 342214 (TRBV7-2, TRBJ1-2)
CASCQTGSTYGYTF

SEQ ID NO: 684429 - protein, 15 aa, Homo sapiens
  CDR3 for alpha chain variable domain of TCR clone 342215 (TRAV12-3, TRAJ6)
CAMSATTGGSYIPKF

SEQ ID NO: 684430 - protein, 13 aa, Homo sapiens
  CDR3 for beta chain variable domain of TCR clone 342215 (TRBV7-9, TRBJ1-2)
CASSLKQNYGYTF

SEQ ID NO: 684431 - protein, 18 aa, Homo sapiens
  CDR3 for alpha chain variable domain of TCR clone 342216 (TRAV21, TRAJ52)
CAVRPSPAGGTSFGKLTF

SEQ ID NO: 684432 - protein, 13 aa, Homo sapiens
  CDR3 for beta chain variable domain of TCR clone 342216 (TRBV2, TRBJ1-5)
CATAGPGNQPQHF

SEQ ID NO: 684433 - protein, 13 aa, Homo sapiens
  CDR3 for alpha chain variable domain of TCR clone 342217 (TRAV17, TRAJ33)
CATDADSNYQLIW

SEQ ID NO: 684434 - protein, 17 aa, Homo sapiens
  CDR3 for beta chain variable domain of TCR clone 342217 (TRBV20-1, TRBJ2-3)
CSAVSPGRAGGQDTQYF

SEQ ID NO: 684435 - protein, 12 aa, Homo sapiens
  CDR3 for alpha chain variable domain of TCR clone 342218 (TRAV10, TRAJ9)
CGAYTGGFKTIF

SEQ ID NO: 684436 - protein, 16 aa, Homo sapiens
  CDR3 for beta chain variable domain of TCR clone 342218 (TRBV7-3, TRBJ2-2)
CASSLKRGTLSGELFF

SEQ ID NO: 684437 - protein, 11 aa, Homo sapiens
  CDR3 for alpha chain variable domain of TCR clone 342219 (TRAV21, TRAJ11)
CAVNGYNTLTF

SEQ ID NO: 684438 - protein, 11 aa, Homo sapiens
  CDR3 for beta chain variable domain of TCR clone 342219 (TRBV19, TRBJ1-1)
CASSIGSEALF

SEQ ID NO: 684439 - protein, 12 aa, Homo sapiens
  CDR3 for alpha chain variable domain of TCR clone 342220 (TRAV21, TRAJ11)
CAATSGYSTLTF

SEQ ID NO: 684440 - protein, 15 aa, Homo sapiens
  CDR3 for beta chain variable domain of TCR clone 342220 (TRBV10-2, TRBJ2-6)
CASSEQGTGANVLTF

SEQ ID NO: 684441 - protein, 14 aa, Homo sapiens
  CDR3 for alpha chain variable domain of TCR clone 342221 (TRAV13-1, TRAJ20)
CAARPGSNDYMLSF

SEQ ID NO: 684442 - protein, 13 aa, Homo sapiens
  CDR3 for beta chain variable domain of TCR clone 342221 (TRBV20-1, TRBJ1-1)
CSAPPGGHTEAFF

SEQ ID NO: 684443 - protein, 11 aa, Homo sapiens
  CDR3 for alpha chain variable domain of TCR clone 342222 (TRAV35, TRAJ34)
CWARNTDKLIF

SEQ ID NO: 684444 - protein, 14 aa, Homo sapiens
  CDR3 for beta chain variable domain of TCR clone 342222 (TRBV20-1, TRBJ2-1)
CSPNDEASYNEQFF

SEQ ID NO: 684445 - protein, 12 aa, Homo sapiens
  CDR3 for alpha chain variable domain of TCR clone 342223 (TRAV8-3, TRAJ7)
CAVEGGNNRLAF

SEQ ID NO: 684446 - protein, 15 aa, Homo sapiens
  CDR3 for beta chain variable domain of TCR clone 342223 (TRBV10-3, TRBJ2-1)
CAISDVQDRAYEQCF

SEQ ID NO: 684447 - protein, 14 aa, Homo sapiens
  CDR3 for alpha chain variable domain of TCR clone 342224 (TRAV20, TRAJ56)
CAVQFGGANSKLTF

SEQ ID NO: 684448 - protein, 16 aa, Homo sapiens
  CDR3 for beta chain variable domain of TCR clone 342224 (TRBV20-1, TRBJ2-7)
CSAKRGRSSYSSTSGR

SEQ ID NO: 684449 - protein, 12 aa, Homo sapiens
  CDR3 for alpha chain variable domain of TCR clone 342225 (TRAV12-3, TRAJ17)
CALTLTGNKLTF

SEQ ID NO: 684450 - protein, 15 aa, Homo sapiens
  CDR3 for beta chain variable domain of TCR clone 342225 (TRBV4-1, TRBJ1-4)
CASSDTGGTNEKLFF

SEQ ID NO: 684451 - protein, 15 aa, Homo sapiens
  CDR3 for alpha chain variable domain of TCR clone 342226 (TRAV2, TRAJ9)
CAVAALNTGGFKTIF

SEQ ID NO: 684452 - protein, 15 aa, Homo sapiens
  CDR3 for beta chain variable domain of TCR clone 342226 (TRBV7-9, TRBJ1-6)
CASSSPGRGNSPLHF

SEQ ID NO: 684453 - protein, 16 aa, Homo sapiens
  CDR3 for alpha chain variable domain of TCR clone 342227 (TRAV20, TRAJ22)
CAVQASSSGSARQLTF

SEQ ID NO: 684454 - protein, 16 aa, Homo sapiens
  CDR3 for beta chain variable domain of TCR clone 342227 (TRBV7-2, TRBJ2-6)
CAILSGVSSGANVLTF

SEQ ID NO: 684455 - protein, 14 aa, Homo sapiens
  CDR3 for alpha chain variable domain of TCR clone 342228 (TRAV1-2, TRAJ8)
CAMREDTGFQKLVF

SEQ ID NO: 684456 - protein, 15 aa, Homo sapiens
  CDR3 for beta chain variable domain of TCR clone 342228 (TRBV4-1, TRBJ2-7)
CASSQNTGRLYEQYF

SEQ ID NO: 684457 - protein, 14 aa, Homo sapiens
  CDR3 for alpha chain variable domain of TCR clone 342229 (TRAV12-2, TRAJ15)
CAPHTGQAGTALIF

SEQ ID NO: 684458 - protein, 14 aa, Homo sapiens
  CDR3 for beta chain variable domain of TCR clone 342229 (TRBV11-2, TRBJ2-7)
CASSLGAGAYEQYF

SEQ ID NO: 684459 - protein, 14 aa, Homo sapiens
  CDR3 for alpha chain variable domain of TCR clone 342230 (TRAV41, TRAJ32)
CCPNYGGATNKLIF

SEQ ID NO: 684460 - protein, 12 aa, Homo sapiens
  CDR3 for beta chain variable domain of TCR clone 342230 (TRBV7-8, TRBJ2-7)
CASSLGDREQYF

SEQ ID NO: 684461 - protein, 13 aa, Homo sapiens
  CDR3 for alpha chain variable domain of TCR clone 342231 (TRAV3, TRAJ27)
CAVRPLGAGTSTF

SEQ ID NO: 684462 - protein, 17 aa, Homo sapiens
  CDR3 for beta chain variable domain of TCR clone 342231 (TRBV27, TRBJ2-6)
CASSLTGFASGANVLTF

SEQ ID NO: 684463 - protein, 12 aa, Homo sapiens
  CDR3 for alpha chain variable domain of TCR clone 342232 (TRAV13-1, TRAJ20)
CAAPMGFTSAAL

SEQ ID NO: 684464 - protein, 14 aa, Homo sapiens
  CDR3 for beta chain variable domain of TCR clone 342232 (TRBV28, TRBJ2-5)
CASTGAGGVETQYF

SEQ ID NO: 684465 - protein, 11 aa, Homo sapiens
  CDR3 for alpha chain variable domain of TCR clone 342233 (TRAV3, TRAJ17)
CAEAAGNKQTF

SEQ ID NO: 684466 - protein, 15 aa, Homo sapiens
  CDR3 for beta chain variable domain of TCR clone 342233 (TRBV12-4, TRBJ2-7)
CASSLGSGGPYEQYF

SEQ ID NO: 684467 - protein, 14 aa, Homo sapiens
  CDR3 for alpha chain variable domain of TCR clone 342234 (TRAV12-3, TRAJ10)
SHLPLTGGGNKLTF

SEQ ID NO: 684468 - protein, 17 aa, Homo sapiens
  CDR3 for beta chain variable domain of TCR clone 342234 (TRBV6-5, TRBJ2-3)
CVSSYGTSLYKSDTQYF

SEQ ID NO: 684469 - protein, 17 aa, Homo sapiens
  CDR3 for alpha chain variable domain of TCR clone 342235 (TRAV3, TRAJ42)
CAVRDRDYGGSQGNLIF

SEQ ID NO: 684470 - protein, 15 aa, Homo sapiens
  CDR3 for beta chain variable domain of TCR clone 342235 (TRBV2, TRBJ2-7)
CASSEGLARSYEQYC

SEQ ID NO: 684471 - protein, 14 aa, Homo sapiens
  CDR3 for alpha chain variable domain of TCR clone 342236 (TRAV13-1, TRAJ9)
CAASALTGGFKTIF

SEQ ID NO: 684472 - protein, 16 aa, Homo sapiens
  CDR3 for beta chain variable domain of TCR clone 342236 (TRBV12-4, TRBJ2-3)
CASSCGTGGISDTQYF

SEQ ID NO: 684473 - protein, 12 aa, Homo sapiens
  CDR3 for alpha chain variable domain of TCR clone 342237 (TRAV2, TRAJ33)
CAVPDSNYQLIW

SEQ ID NO: 684474 - protein, 17 aa, Homo sapiens
  CDR3 for beta chain variable domain of TCR clone 342237 (TRBV6-5, TRBJ2-3)
CASSSGTSLYKSDTQYF

SEQ ID NO: 684475 - protein, 14 aa, Homo sapiens
  CDR3 for alpha chain variable domain of TCR clone 342238 (TRAV12-3, TRAJ10)
SHLPLTGGGNKLTF

SEQ ID NO: 684476 - protein, 13 aa, Homo sapiens
  CDR3 for beta chain variable domain of TCR clone 342238 (TRBV7-9, TRBJ1-1)
CASSLVSASEAFF

SEQ ID NO: 684477 - protein, 15 aa, Homo sapiens
  CDR3 for alpha chain variable domain of TCR clone 342239 (TRAV26-1, TRAJ29)
CIVRVEGSGNTPLVF

SEQ ID NO: 684478 - protein, 14 aa, Homo sapiens
  CDR3 for beta chain variable domain of TCR clone 342239 (TRBV18, TRBJ2-5)
CASPPGVSQETQYC

SEQ ID NO: 684479 - protein, 14 aa, Homo sapiens
  CDR3 for alpha chain variable domain of TCR clone 342240 (TRAV29/DV5, TRAJ36)
CAARRKTGANNLFL

SEQ ID NO: 684480 - protein, 14 aa, Homo sapiens
  CDR3 for beta chain variable domain of TCR clone 342240 (TRBV12-4, TRBJ2-5)
CASSLWQKQETQYF

SEQ ID NO: 684481 - protein, 16 aa, Homo sapiens
  CDR3 for alpha chain variable domain of TCR clone 342241 (TRAV23/DV6, TRAJ9)
CSKPFPPNTGGFKTIF

SEQ ID NO: 684482 - protein, 14 aa, Homo sapiens
  CDR3 for beta chain variable domain of TCR clone 342241 (TRBV11-2, TRBJ2-5)
CASSRTGGIETQYF

SEQ ID NO: 684483 - protein, 14 aa, Homo sapiens
  CDR3 for alpha chain variable domain of TCR clone 342242 (TRAV17, TRAJ40)
CATALTSGTYKYIF

SEQ ID NO: 684484 - protein, 17 aa, Homo sapiens
  CDR3 for beta chain variable domain of TCR clone 342242 (TRBV13, TRBJ2-3)
CASSLSRVAGGRNTQYF

SEQ ID NO: 684485 - protein, 14 aa, Homo sapiens
  CDR3 for alpha chain variable domain of TCR clone 342243 (TRAV3, TRAJ21)
CAVRDAYNFNKFYF

SEQ ID NO: 684486 - protein, 13 aa, Homo sapiens
  CDR3 for beta chain variable domain of TCR clone 342243 (TRBV7-3, TRBJ1-1)
CASSQDWGAEAFF

SEQ ID NO: 684487 - protein, 13 aa, Homo sapiens
  CDR3 for alpha chain variable domain of TCR clone 342244 (TRAV12-2, TRAJ39)
CAVNNNAGNMFTF

SEQ ID NO: 684488 - protein, 13 aa, Homo sapiens
  CDR3 for beta chain variable domain of TCR clone 342244 (TRBV2, TRBJ1-5)
CATAGPGNQPQHF

SEQ ID NO: 684489 - protein, 11 aa, Homo sapiens
  CDR3 for alpha chain variable domain of TCR clone 342245 (TRAV12-1, TRAJ30)
CVVNGQDKIIF

SEQ ID NO: 684490 - protein, 16 aa, Homo sapiens
  CDR3 for beta chain variable domain of TCR clone 342245 (TRBV4-2, TRBJ2-5)
CASSQELVGSQETQYF

SEQ ID NO: 684491 - protein, 15 aa, Homo sapiens
  CDR3 for alpha chain variable domain of TCR clone 342246 (TRAV26-1, TRAJ29)
CIVRVEGSGNIPLVF

SEQ ID NO: 684492 - protein, 14 aa, Homo sapiens
  CDR3 for beta chain variable domain of TCR clone 342246 (TRBV18, TRBJ2-5)
CASSPGVSQETLYF

SEQ ID NO: 684493 - protein, 15 aa, Homo sapiens
  CDR3 for alpha chain variable domain of TCR clone 342247 (TRAV3, TRAJ22)
CAVRDRGGSARQLTF

SEQ ID NO: 684494 - protein, 17 aa, Homo sapiens
  CDR3 for beta chain variable domain of TCR clone 342247 (TRBV13, TRBJ2-3)
CARSLSRVAGGRNTQYF

SEQ ID NO: 684495 - protein, 14 aa, Homo sapiens
  CDR3 for alpha chain variable domain of TCR clone 342248 (TRAV29/DV5, TRAJ36)
CAARRKTGANTLFF

SEQ ID NO: 684496 - protein, 14 aa, Homo sapiens
  CDR3 for beta chain variable domain of TCR clone 342248 (TRBV12-5, TRBJ2-5)
CASGSRTHQGTQYF

SEQ ID NO: 684497 - protein, 15 aa, Homo sapiens
  CDR3 for alpha chain variable domain of TCR clone 342249 (TRAV8-3, TRAJ45)
CASSSSGGGADGLTF

SEQ ID NO: 684498 - protein, 14 aa, Homo sapiens
  CDR3 for beta chain variable domain of TCR clone 342249 (TRBV18, TRBJ2-5)
CASSPGVSQETQYF

SEQ ID NO: 684499 - protein, 17 aa, Homo sapiens
  CDR3 for alpha chain variable domain of TCR clone 342250 (TRAV4, TRAJ13)
CLVGVQGSYGGYQKVTF

SEQ ID NO: 684500 - protein, 18 aa, Homo sapiens
  CDR3 for beta chain variable domain of TCR clone 342250 (TRBV15, TRBJ2-3)
CATSRDGARSWDTDTQYF

SEQ ID NO: 684501 - protein, 13 aa, Homo sapiens
  CDR3 for alpha chain variable domain of TCR clone 342251 (TRAV1-2, TRAJ9)
CAALNTGGFKTIL

SEQ ID NO: 684502 - protein, 13 aa, Homo sapiens
  CDR3 for beta chain variable domain of TCR clone 342251 (TRBV19, TRBJ1-2)
CASSVPGQDGYTF

SEQ ID NO: 684503 - protein, 14 aa, Homo sapiens
  CDR3 for alpha chain variable domain of TCR clone 342252 (TRAV16, TRAJ42)
CALLAGGSQGNLIF

SEQ ID NO: 684504 - protein, 15 aa, Homo sapiens
  CDR3 for beta chain variable domain of TCR clone 342252 (TRBV2, TRBJ2-7)
CASSEGLARSYEQYI

SEQ ID NO: 684505 - protein, 14 aa, Homo sapiens
  CDR3 for alpha chain variable domain of TCR clone 342253 (TRAV12-2, TRAJ17)
CAVNIKAAGNKLTF

SEQ ID NO: 684506 - protein, 16 aa, Homo sapiens
  CDR3 for beta chain variable domain of TCR clone 342253 (TRBV20-1, TRBJ2-6)
CSASSQGYDGANILTF

SEQ ID NO: 684507 - protein, 13 aa, Homo sapiens
  CDR3 for alpha chain variable domain of TCR clone 342254 (TRAV38-1, TRAJ42)
CARRGGSQGNLIF

SEQ ID NO: 684508 - protein, 16 aa, Homo sapiens
  CDR3 for beta chain variable domain of TCR clone 342254 (TRBV20-1, TRBJ1-4)
CSARPYGGELNEKLFF

SEQ ID NO: 684509 - protein, 21 aa, Homo sapiens
  CDR3 for alpha chain variable domain of TCR clone 342255 (TRAV25, TRAJ47)
TATQTTDVGTSFWEYGNKLVF

SEQ ID NO: 684510 - protein, 16 aa, Homo sapiens
  CDR3 for beta chain variable domain of TCR clone 342255 (TRBV6-6, TRBJ2-1)
CASSWGGQGPYNEQFF

SEQ ID NO: 684511 - protein, 16 aa, Homo sapiens
  CDR3 for alpha chain variable domain of TCR clone 342256 (TRAV26-1, TRAJ33)
CIVPFWGEDSNYQLIM

SEQ ID NO: 684512 - protein, 14 aa, Homo sapiens
  CDR3 for beta chain variable domain of TCR clone 342256 (TRBV6-3, TRBJ1-1)
CASSYHSKNTEAFF

SEQ ID NO: 684513 - protein, 17 aa, Homo sapiens
  CDR3 for alpha chain variable domain of TCR clone 342257 (TRAV3, TRAJ42)
CAVRDRDDGGSQGNLTF

SEQ ID NO: 684514 - protein, 20 aa, Homo sapiens
  CDR3 for beta chain variable domain of TCR clone 342257 (TRBV28, TRBJ2-1)
CASTPIGRSPGLAGGNEQFF

SEQ ID NO: 684515 - protein, 14 aa, Homo sapiens
  CDR3 for alpha chain variable domain of TCR clone 342258 (TRAV34, TRAJ44)
CGADGTGTASTLTF

SEQ ID NO: 684516 - protein, 15 aa, Homo sapiens
  CDR3 for beta chain variable domain of TCR clone 342258 (TRBV5-1, TRBJ2-1)
CASSPPRAPYNEQFF

SEQ ID NO: 684517 - protein, 11 aa, Homo sapiens
  CDR3 for alpha chain variable domain of TCR clone 342259 (TRAV3, TRAJ17)
PRGAAGNKLTF

SEQ ID NO: 684518 - protein, 15 aa, Homo sapiens
  CDR3 for beta chain variable domain of TCR clone 342259 (TRBV5-1, TRBJ2-3)
CASSVTSGSTDTQYF

SEQ ID NO: 684519 - protein, 14 aa, Homo sapiens
  CDR3 for alpha chain variable domain of TCR clone 342260 (TRAV35, TRAJ13)
CAGRSPGGYQKDTF

SEQ ID NO: 684520 - protein, 14 aa, Homo sapiens
  CDR3 for beta chain variable domain of TCR clone 342260 (TRBV19, TRBJ2-2)
CASSMVGLSGELFF

SEQ ID NO: 684521 - protein, 10 aa, Homo sapiens
  CDR3 for alpha chain variable domain of TCR clone 342261 (TRAV38-1, TRAJ34)
CAFMGDKLIF

SEQ ID NO: 684522 - protein, 17 aa, Homo sapiens
  CDR3 for beta chain variable domain of TCR clone 342261 (TRBV11-3, TRBJ2-3)
CASSLGLTGGGTDTQYF

SEQ ID NO: 684523 - protein, 13 aa, Homo sapiens
  CDR3 for alpha chain variable domain of TCR clone 342262 (TRAV8-6, TRAJ49)
CAVITNTGNQFYF

SEQ ID NO: 684524 - protein, 13 aa, Homo sapiens
  CDR3 for beta chain variable domain of TCR clone 342262 (TRBV7-9, TRBJ1-2)
CASSLKQNYGDTF

SEQ ID NO: 684525 - protein, 16 aa, Homo sapiens
  CDR3 for alpha chain variable domain of TCR clone 342263 (TRAV30, TRAJ24)
CGTEIVDADCWGKFQF

SEQ ID NO: 684526 - protein, 18 aa, Homo sapiens
  CDR3 for beta chain variable domain of TCR clone 342263 (TRBV7-9, TRBJ2-7)
CASSLTTSGSRTWYEQYF

SEQ ID NO: 684527 - protein, 12 aa, Homo sapiens
  CDR3 for alpha chain variable domain of TCR clone 342264 (TRAV12-3, TRAJ17)
CAMTLTGKKLTF

SEQ ID NO: 684528 - protein, 15 aa, Homo sapiens
  CDR3 for beta chain variable domain of TCR clone 342264 (TRBV19, TRBJ2-1)
CASSILGEGRNEQFF

SEQ ID NO: 684529 - protein, 14 aa, Homo sapiens
  CDR3 for alpha chain variable domain of TCR clone 342265 (TRAV12-2, TRAJ45)
CAVYSGGGADGLTF

SEQ ID NO: 684530 - protein, 17 aa, Homo sapiens
  CDR3 for beta chain variable domain of TCR clone 342265 (TRBV20-1, TRBJ2-1)
CSASSSGLAGSYNEQFF

SEQ ID NO: 684531 - protein, 13 aa, Homo sapiens
  CDR3 for alpha chain variable domain of TCR clone 342266 (TRAV12-3, TRAJ47)
CAMKKEYGNKLVF

SEQ ID NO: 684532 - protein, 13 aa, Homo sapiens
  CDR3 for beta chain variable domain of TCR clone 342266 (TRBV19, TRBJ2-1)
CASSIGTGNEQFF

SEQ ID NO: 684533 - protein, 14 aa, Homo sapiens
  CDR3 for alpha chain variable domain of TCR clone 342267 (TRAV23/DV6, TRAJ37)
CAASTSSNKGKLIF

SEQ ID NO: 684534 - protein, 17 aa, Homo sapiens
  CDR3 for beta chain variable domain of TCR clone 342267 (TRBV13, TRBJ2-3)
CASNLSRVAGGRNTQYF

SEQ ID NO: 684535 - protein, 11 aa, Homo sapiens
  CDR3 for alpha chain variable domain of TCR clone 342268 (TRAV12-3, TRAJ43)
CAMSVSNDMRF

SEQ ID NO: 684536 - protein, 13 aa, Homo sapiens
  CDR3 for beta chain variable domain of TCR clone 342268 (TRBV20-1, TRBJ1-1)
CSVPLGGCTEAFF

SEQ ID NO: 684537 - protein, 17 aa, Homo sapiens
  CDR3 for alpha chain variable domain of TCR clone 342269 (TRAV3, TRAJ6)
CAVRDGPRAGGSYIPTF

SEQ ID NO: 684538 - protein, 15 aa, Homo sapiens
  CDR3 for beta chain variable domain of TCR clone 342269 (TRBV7-2, TRBJ1-2)
CASSLEGVQRNGYTF

SEQ ID NO: 684539 - protein, 14 aa, Homo sapiens
  CDR3 for alpha chain variable domain of TCR clone 342270 (TRAV26-1, TRAJ38)
CIPDNAGNNRKLIL

SEQ ID NO: 684540 - protein, 17 aa, Homo sapiens
  CDR3 for beta chain variable domain of TCR clone 342270 (TRBV15, TRBJ1-1)
CATSRVGGADGDTEAFF

SEQ ID NO: 684541 - protein, 10 aa, Homo sapiens
  CDR3 for alpha chain variable domain of TCR clone 342271 (TRAV5, TRAJ34)
CAEDTDKLIF

SEQ ID NO: 684542 - protein, 12 aa, Homo sapiens
  CDR3 for beta chain variable domain of TCR clone 342271 (TRBV11-2, TRBJ2-2)
CPSSLGGGELFF

SEQ ID NO: 684543 - protein, 14 aa, Homo sapiens
  CDR3 for alpha chain variable domain of TCR clone 342272 (TRAV8-4, TRAJ39)
CAVSEGNAGNMLTF

SEQ ID NO: 684544 - protein, 11 aa, Homo sapiens
  CDR3 for beta chain variable domain of TCR clone 342272 (TRBV29-1, TRBJ2-5)
CSEDRTGTQYF

SEQ ID NO: 684545 - protein, 12 aa, Homo sapiens
  CDR3 for alpha chain variable domain of TCR clone 342273 (TRAV12-3, TRAJ17)
CAMTLTGNTLTF

SEQ ID NO: 684546 - protein, 16 aa, Homo sapiens
  CDR3 for beta chain variable domain of TCR clone 342273 (TRBV5-1, TRBJ2-3)
CASSLGLAVYTDTQYF

SEQ ID NO: 684547 - protein, 15 aa, Homo sapiens
  CDR3 for alpha chain variable domain of TCR clone 342274 (TRAV25, TRAJ53)
CAATGGGGSNYTLTF

SEQ ID NO: 684548 - protein, 11 aa, Homo sapiens
  CDR3 for beta chain variable domain of TCR clone 342274 (TRBV11-3, TRBJ2-2)
CASSSGGELFF

SEQ ID NO: 684549 - protein, 17 aa, Homo sapiens
  CDR3 for alpha chain variable domain of TCR clone 342275 (TRAV3, TRAJ6)
CAVRYGPRAGGSYIPTF

SEQ ID NO: 684550 - protein, 13 aa, Homo sapiens
  CDR3 for beta chain variable domain of TCR clone 342275 (TRBV27, TRBJ2-1)
CASRTLGVGEQFF

SEQ ID NO: 684551 - protein, 15 aa, Homo sapiens
  CDR3 for alpha chain variable domain of TCR clone 342276 (TRAV25, TRAJ52)
CAGTSGGTSYGKLTF

SEQ ID NO: 684552 - protein, 13 aa, Homo sapiens
  CDR3 for beta chain variable domain of TCR clone 342276 (TRBV6-5, TRBJ2-5)
CASSPQGGETLYF

SEQ ID NO: 684553 - protein, 16 aa, Homo sapiens
  CDR3 for alpha chain variable domain of TCR clone 342277 (TRAV20, TRAJ22)
CAVQASSSGSARQLTF

SEQ ID NO: 684554 - protein, 13 aa, Homo sapiens
  CDR3 for beta chain variable domain of TCR clone 342277 (TRBV19, TRBJ2-7)
CASSTSGSYEQYF

SEQ ID NO: 684555 - protein, 13 aa, Homo sapiens
  CDR3 for alpha chain variable domain of TCR clone 342278 (TRAV16, TRAJ22)
SAMLAGSARQLTF

SEQ ID NO: 684556 - protein, 15 aa, Homo sapiens
  CDR3 for beta chain variable domain of TCR clone 342278 (TRBV15, TRBJ1-5)
CATSKEITIGQPQHF

SEQ ID NO: 684557 - protein, 14 aa, Homo sapiens
  CDR3 for alpha chain variable domain of TCR clone 342279 (TRAV4, TRAJ17)
FLVGDMAAGNKLTF

SEQ ID NO: 684558 - protein, 14 aa, Homo sapiens
  CDR3 for beta chain variable domain of TCR clone 342279 (TRBV4-1, TRBJ2-7)
CASSPVAGGDEQYF

SEQ ID NO: 684559 - protein, 12 aa, Homo sapiens
  CDR3 for alpha chain variable domain of TCR clone 342280 (TRAV12-2, TRAJ52)
IGGGTSYGKLTF

SEQ ID NO: 684560 - protein, 13 aa, Homo sapiens
  CDR3 for beta chain variable domain of TCR clone 342280 (TRBV7-2, TRBJ1-1)
CASNLKGAKVAFF

SEQ ID NO: 684561 - protein, 13 aa, Homo sapiens
  CDR3 for alpha chain variable domain of TCR clone 342281 (TRAV27, TRAJ6)
CAGGTRGSYIPTF

SEQ ID NO: 684562 - protein, 15 aa, Homo sapiens
  CDR3 for beta chain variable domain of TCR clone 342281 (TRBV12-4, TRBJ1-2)
CASSPITGGGYGYTF

SEQ ID NO: 684563 - protein, 14 aa, Homo sapiens
  CDR3 for alpha chain variable domain of TCR clone 342282 (TRAV17, TRAJ35)
CATDRPGFGNVLHC

SEQ ID NO: 684564 - protein, 15 aa, Homo sapiens
  CDR3 for beta chain variable domain of TCR clone 342282 (TRBV29-1, TRBJ2-1)
CSGRDRKSSYNEQFF

SEQ ID NO: 684565 - protein, 15 aa, Homo sapiens
  CDR3 for alpha chain variable domain of TCR clone 342283 (TRAV12-2, TRAJ43)
CAFDMRFGAGTRLTV

SEQ ID NO: 684566 - protein, 17 aa, Homo sapiens
  CDR3 for beta chain variable domain of TCR clone 342283 (TRBV20-1, TRBJ2-3)
QCPRTSGGPGTTDTQYF

SEQ ID NO: 684567 - protein, 18 aa, Homo sapiens
  CDR3 for alpha chain variable domain of TCR clone 342284 (TRAV2, TRAJ9)
CCLLLSVEDRSGGFKTIF

SEQ ID NO: 684568 - protein, 18 aa, Homo sapiens
  CDR3 for beta chain variable domain of TCR clone 342284 (TRBV11-2, TRBJ2-3)
CASSLGGASRGAPNTQYF

SEQ ID NO: 684569 - protein, 12 aa, Homo sapiens
  CDR3 for alpha chain variable domain of TCR clone 342285 (TRAV13-1, TRAJ49)
CAASPMGNQLYF

SEQ ID NO: 684570 - protein, 13 aa, Homo sapiens
  CDR3 for beta chain variable domain of TCR clone 342285 (TRBV24-1, TRBJ2-2)
CATSDWSTGELFF

SEQ ID NO: 684571 - protein, 13 aa, Homo sapiens
  CDR3 for alpha chain variable domain of TCR clone 342286 (TRAV27, TRAJ41)
CAGEGNSGYALNF

SEQ ID NO: 684572 - protein, 16 aa, Homo sapiens
  CDR3 for beta chain variable domain of TCR clone 342286 (TRBV2, TRBJ2-7)
CASKSPPGQGPYEQYF

SEQ ID NO: 684573 - protein, 14 aa, Homo sapiens
  CDR3 for alpha chain variable domain of TCR clone 342287 (TRAV8-4, TRAJ17)
CAVSDQAAGNKLTF

SEQ ID NO: 684574 - protein, 14 aa, Homo sapiens
  CDR3 for beta chain variable domain of TCR clone 342287 (TRBV19, TRBJ2-1)
CASPTFVLSGEQFF

SEQ ID NO: 684575 - protein, 13 aa, Homo sapiens
  CDR3 for alpha chain variable domain of TCR clone 342288 (TRAV1-2, TRAJ7)
CAGPYYGNNRLAF

SEQ ID NO: 684576 - protein, 15 aa, Homo sapiens
  CDR3 for beta chain variable domain of TCR clone 342288 (TRBV4-1, TRBJ1-4)
CASSDTGGTNEKLFF

SEQ ID NO: 684577 - protein, 15 aa, Homo sapiens
  CDR3 for alpha chain variable domain of TCR clone 342289 (TRAV26-1, TRAJ29)
CIVRVEGSGNTPLVL

SEQ ID NO: 684578 - protein, 12 aa, Homo sapiens
  CDR3 for beta chain variable domain of TCR clone 342289 (TRBV29-1, TRBJ2-3)
CSVTGGADTQYF

SEQ ID NO: 684579 - protein, 14 aa, Homo sapiens
  CDR3 for alpha chain variable domain of TCR clone 342290 (TRAV12-3, TRAJ22)
CAMSLFGSAMQLTF

SEQ ID NO: 684580 - protein, 11 aa, Homo sapiens
  CDR3 for beta chain variable domain of TCR clone 342290 (TRBV12-4, TRBJ2-2)
CASSSAGELFF

SEQ ID NO: 684581 - protein, 16 aa, Homo sapiens
  CDR3 for alpha chain variable domain of TCR clone 342291 (TRAV3, TRAJ37)
CAVRPHGSGNTGKLII

SEQ ID NO: 684582 - protein, 16 aa, Homo sapiens
  CDR3 for beta chain variable domain of TCR clone 342291 (TRBV9, TRBJ1-2)
CASSVEEKVCPYGYTF

SEQ ID NO: 684583 - protein, 16 aa, Homo sapiens
  CDR3 for alpha chain variable domain of TCR clone 342292 (TRAV16, TRAJ42)
CARKMNYGGSQGNLIF

SEQ ID NO: 684584 - protein, 13 aa, Homo sapiens
  CDR3 for beta chain variable domain of TCR clone 342292 (TRBV20-1, TRBJ2-7)
CSASLPSSYEQYV

SEQ ID NO: 684585 - protein, 13 aa, Homo sapiens
  CDR3 for alpha chain variable domain of TCR clone 342293 (TRAV10, TRAJ45)
CVGSGGGADGLTF

SEQ ID NO: 684586 - protein, 15 aa, Homo sapiens
  CDR3 for beta chain variable domain of TCR clone 342293 (TRBV5-1, TRBJ2-7)
CASSLYPEGGYEQYF

SEQ ID NO: 684587 - protein, 14 aa, Homo sapiens
  CDR3 for alpha chain variable domain of TCR clone 342294 (TRAV9-2, TRAJ39)
CALYIYNAGNMITF

SEQ ID NO: 684588 - protein, 15 aa, Homo sapiens
  CDR3 for beta chain variable domain of TCR clone 342294 (TRBV28, TRBJ1-3)
CASSMGWASGNTIYF

SEQ ID NO: 684589 - protein, 17 aa, Homo sapiens
  CDR3 for alpha chain variable domain of TCR clone 342295 (TRAV26-2, TRAJ42)
CILRDVGYGGSQGNLIF

SEQ ID NO: 684590 - protein, 16 aa, Homo sapiens
  CDR3 for beta chain variable domain of TCR clone 342295 (TRBV12-4, TRBJ2-7)
CASSLIGGRGTYEQYF

SEQ ID NO: 684591 - protein, 16 aa, Homo sapiens
  CDR3 for alpha chain variable domain of TCR clone 342296 (TRAV30, TRAJ24)
CGTEIVDADSWGKFQF

SEQ ID NO: 684592 - protein, 12 aa, Homo sapiens
  CDR3 for beta chain variable domain of TCR clone 342296 (TRBV19, TRBJ1-4)
CASSNSLEKLFF

SEQ ID NO: 684593 - protein, 19 aa, Homo sapiens
  CDR3 for alpha chain variable domain of TCR clone 342297 (TRAV2, TRAJ20)
ILQVREADAAVYRDCKLSC

SEQ ID NO: 684594 - protein, 12 aa, Homo sapiens
  CDR3 for beta chain variable domain of TCR clone 342297 (TRBV11-2, TRBJ2-1)
CASSPGNNEQFF

SEQ ID NO: 684595 - protein, 18 aa, Homo sapiens
  CDR3 for alpha chain variable domain of TCR clone 342298 (TRAV9-2, TRAJ52)
CALSRHNAGGTSYGKLTF

SEQ ID NO: 684596 - protein, 13 aa, Homo sapiens
  CDR3 for beta chain variable domain of TCR clone 342298 (TRBV7-9, TRBJ1-2)
CASSVKQNYGHTF

SEQ ID NO: 684597 - protein, 13 aa, Homo sapiens
  CDR3 for alpha chain variable domain of TCR clone 342299 (TRAV30, TRAJ24)
CGTVTDSWGKLQF

SEQ ID NO: 684598 - protein, 12 aa, Homo sapiens
  CDR3 for beta chain variable domain of TCR clone 342299 (TRBV12-4, TRBJ2-1)
CASSPGRNEQFV

SEQ ID NO: 684599 - protein, 14 aa, Homo sapiens
  CDR3 for alpha chain variable domain of TCR clone 342300 (TRAV1-2, TRAJ16)
CAVNRFSYGQKLLF

SEQ ID NO: 684600 - protein, 15 aa, Homo sapiens
  CDR3 for beta chain variable domain of TCR clone 342300 (TRBV20-1, TRBJ1-5)
CSAFKNGQRNQPQHF

SEQ ID NO: 684601 - protein, 14 aa, Homo sapiens
  CDR3 for alpha chain variable domain of TCR clone 342301 (TRAV12-1, TRAJ10)
CVVNFAGGGNKLTF

SEQ ID NO: 684602 - protein, 14 aa, Homo sapiens
  CDR3 for beta chain variable domain of TCR clone 342301 (TRBV12-4, TRBJ1-1)
CASSLGTGGTEAFF

SEQ ID NO: 684603 - protein, 11 aa, Homo sapiens
  CDR3 for alpha chain variable domain of TCR clone 342302 (TRAV12-3, TRAJ43)
CAMSVSNDMRF

SEQ ID NO: 684604 - protein, 16 aa, Homo sapiens
  CDR3 for beta chain variable domain of TCR clone 342302 (TRBV27, TRBJ2-5)
CASSYGPGGQKETQYF

SEQ ID NO: 684605 - protein, 14 aa, Homo sapiens
  CDR3 for alpha chain variable domain of TCR clone 342303 (TRAV8-2, TRAJ26)
CVVSDWHYGQNFVF

SEQ ID NO: 684606 - protein, 12 aa, Homo sapiens
  CDR3 for beta chain variable domain of TCR clone 342303 (TRBV5-4, TRBJ2-5)
CASNRAGETQYF

SEQ ID NO: 684607 - protein, 16 aa, Homo sapiens
  CDR3 for alpha chain variable domain of TCR clone 342304 (TRAV3, TRAJ13)
CAVRDPDSGGYQKVTF

SEQ ID NO: 684608 - protein, 13 aa, Homo sapiens
  CDR3 for beta chain variable domain of TCR clone 342304 (TRBV7-9, TRBJ2-7)
CASSLQGSYEQYF

SEQ ID NO: 684609 - protein, 19 aa, Homo sapiens
  CDR3 for alpha chain variable domain of TCR clone 342305 (TRAV2, TRAJ20)
ILQVREADAAVYRDCKLSF

SEQ ID NO: 684610 - protein, 12 aa, Homo sapiens
  CDR3 for beta chain variable domain of TCR clone 342305 (TRBV11-2, TRBJ2-2)
CASSLGGGKLFL

SEQ ID NO: 684611 - protein, 14 aa, Homo sapiens
  CDR3 for alpha chain variable domain of TCR clone 342306 (TRAV1-2, TRAJ16)
CAVNRFSDGQKLLF

SEQ ID NO: 684612 - protein, 13 aa, Homo sapiens
  CDR3 for beta chain variable domain of TCR clone 342306 (TRBV7-3, TRBJ1-1)
CACSQDWGAEAFF

SEQ ID NO: 684613 - protein, 15 aa, Homo sapiens
  CDR3 for alpha chain variable domain of TCR clone 342307 (TRAV4, TRAJ39)
CLVGPNNTAGNMLTF

SEQ ID NO: 684614 - protein, 14 aa, Homo sapiens
  CDR3 for beta chain variable domain of TCR clone 342307 (TRBV19, TRBJ2-7)
CASNFRDTFTGMYF

SEQ ID NO: 684615 - protein, 16 aa, Homo sapiens
  CDR3 for alpha chain variable domain of TCR clone 342308 (TRAV1-2, TRAJ10)
CAVRGVLTGGGNKLTF

SEQ ID NO: 684616 - protein, 13 aa, Homo sapiens
  CDR3 for beta chain variable domain of TCR clone 342308 (TRBV9, TRBJ2-1)
CASSPSGGNEQFF

SEQ ID NO: 684617 - protein, 12 aa, Homo sapiens
  CDR3 for alpha chain variable domain of TCR clone 342309 (TRAV12-3, TRAJ17)
CAMTLIGNKLTF

SEQ ID NO: 684618 - protein, 12 aa, Homo sapiens
  CDR3 for beta chain variable domain of TCR clone 342309 (TRBV2, TRBJ2-1)
CAYGPPGNEQFF

SEQ ID NO: 684619 - protein, 14 aa, Homo sapiens
  CDR3 for alpha chain variable domain of TCR clone 342310 (TRAV12-2, TRAJ40)
CAVKIPSGTYKYIF

SEQ ID NO: 684620 - protein, 13 aa, Homo sapiens
  CDR3 for beta chain variable domain of TCR clone 342310 (TRBV18, TRBJ1-2)
CASSASATEGYTF

SEQ ID NO: 684621 - protein, 13 aa, Homo sapiens
  CDR3 for alpha chain variable domain of TCR clone 342311 (TRAV27, TRAJ29)
CAGAHSGNTPLVF

SEQ ID NO: 684622 - protein, 14 aa, Homo sapiens
  CDR3 for beta chain variable domain of TCR clone 342311 (TRBV11-1, TRBJ2-7)
CASSFRQGSYEQYF

SEQ ID NO: 684623 - protein, 13 aa, Homo sapiens
  CDR3 for alpha chain variable domain of TCR clone 342312 (TRAV21, TRAJ57)
CAVTQGGSEKLVF

SEQ ID NO: 684624 - protein, 11 aa, Homo sapiens
  CDR3 for beta chain variable domain of TCR clone 342312 (TRBV11-2, TRBJ2-2)
CASSLPEELFF

SEQ ID NO: 684625 - protein, 10 aa, Homo sapiens
  CDR3 for alpha chain variable domain of TCR clone 342313 (TRAV12-3, TRAJ49)
CAMNDDQFYF

SEQ ID NO: 684626 - protein, 16 aa, Homo sapiens
  CDR3 for beta chain variable domain of TCR clone 342313 (TRBV2, TRBJ1-2)
CASTRGDSGFNYGYTF

SEQ ID NO: 684627 - protein, 12 aa, Homo sapiens
  CDR3 for alpha chain variable domain of TCR clone 342314 (TRAV12-1, TRAJ40)
CVVYSGTYRYIF

SEQ ID NO: 684628 - protein, 18 aa, Homo sapiens
  CDR3 for beta chain variable domain of TCR clone 342314 (TRBV11-3, TRBJ2-3)
CASSLGGASRGAPNTQYF

SEQ ID NO: 684629 - protein, 15 aa, Homo sapiens
  CDR3 for alpha chain variable domain of TCR clone 342315 (TRAV26-1, TRAJ22)
CIVRVSFWICKATDL

SEQ ID NO: 684630 - protein, 13 aa, Homo sapiens
  CDR3 for beta chain variable domain of TCR clone 342315 (TRBV7-9, TRBJ1-2)
CASSLKQNYGYTF

SEQ ID NO: 684631 - protein, 16 aa, Homo sapiens
  CDR3 for alpha chain variable domain of TCR clone 342316 (TRAV30, TRAJ24)
CGTEIVDADSWGKFKL

SEQ ID NO: 684632 - protein, 14 aa, Homo sapiens
  CDR3 for beta chain variable domain of TCR clone 342316 (TRBV12-5, TRBJ2-5)
CAGGSRTHQETQYF

SEQ ID NO: 684633 - protein, 13 aa, Homo sapiens
  CDR3 for alpha chain variable domain of TCR clone 342317 (TRAV12-2, TRAJ15)
CAVFNQAGTALIF

SEQ ID NO: 684634 - protein, 15 aa, Homo sapiens
  CDR3 for beta chain variable domain of TCR clone 342317 (TRBV7-8, TRBJ1-5)
CASRRGGGADQTQHF

SEQ ID NO: 684635 - protein, 14 aa, Homo sapiens
  CDR3 for alpha chain variable domain of TCR clone 342318 (TRAV3, TRAJ21)
CALGRGSTNFTLDL

SEQ ID NO: 684636 - protein, 14 aa, Homo sapiens
  CDR3 for beta chain variable domain of TCR clone 342318 (TRBV7-9, TRBJ2-4)
CASSLAMGGNIKYF

SEQ ID NO: 684637 - protein, 14 aa, Homo sapiens
  CDR3 for alpha chain variable domain of TCR clone 342319 (TRAV1-2, TRAJ16)
CAVNRISDGQKLLL

SEQ ID NO: 684638 - protein, 15 aa, Homo sapiens
  CDR3 for beta chain variable domain of TCR clone 342319 (TRBV9, TRBJ1-6)
CASSVAGTGDSPLHF

SEQ ID NO: 684639 - protein, 13 aa, Homo sapiens
  CDR3 for alpha chain variable domain of TCR clone 342320 (TRAV21, TRAJ27)
CAERPGNAGKSTF

SEQ ID NO: 684640 - protein, 15 aa, Homo sapiens
  CDR3 for beta chain variable domain of TCR clone 342320 (TRBV6-3, TRBJ2-7)
CASSSPGTVFYEQYF

SEQ ID NO: 684641 - protein, 15 aa, Homo sapiens
  CDR3 for alpha chain variable domain of TCR clone 342321 (TRAV8-3, TRAJ11)
CAVGLLNSGYSTLTF

SEQ ID NO: 684642 - protein, 14 aa, Homo sapiens
  CDR3 for beta chain variable domain of TCR clone 342321 (TRBV4-1, TRBJ2-5)
CASSRGGSGETQYF

SEQ ID NO: 684643 - protein, 13 aa, Homo sapiens
  CDR3 for alpha chain variable domain of TCR clone 342322 (TRAV12-2, TRAJ13)
CAVTAGGYQNVTF

SEQ ID NO: 684644 - protein, 13 aa, Homo sapiens
  CDR3 for beta chain variable domain of TCR clone 342322 (TRBV7-8, TRBJ2-7)
CASSLTGGREQYF

SEQ ID NO: 684645 - protein, 13 aa, Homo sapiens
  CDR3 for alpha chain variable domain of TCR clone 342323 (TRAV27, TRAJ49)
CAPRPYTGNQFYF

SEQ ID NO: 684646 - protein, 16 aa, Homo sapiens
  CDR3 for beta chain variable domain of TCR clone 342323 (TRBV28, TRBJ2-6)
CASSNRRGSGANVLTF

SEQ ID NO: 684647 - protein, 15 aa, Homo sapiens
  CDR3 for alpha chain variable domain of TCR clone 342324 (TRAV8-2, TRAJ40)
CVVLGTTSGTYKYIF

SEQ ID NO: 684648 - protein, 16 aa, Homo sapiens
  CDR3 for beta chain variable domain of TCR clone 342324 (TRBV7-9, TRBJ1-2)
CASSLGFSSGEDGYTF

SEQ ID NO: 684649 - protein, 14 aa, Homo sapiens
  CDR3 for alpha chain variable domain of TCR clone 342325 (TRAV23/DV6, TRAJ4)
CAAPSSGCYNKLSF

SEQ ID NO: 684650 - protein, 16 aa, Homo sapiens
  CDR3 for beta chain variable domain of TCR clone 342325 (TRBV19, TRBJ1-1)
CASRFGGPVTGTEAFF

SEQ ID NO: 684651 - protein, 14 aa, Homo sapiens
  CDR3 for alpha chain variable domain of TCR clone 342326 (TRAV12-2, TRAJ17)
CAVLFKAAGNKLTF

SEQ ID NO: 684652 - protein, 12 aa, Homo sapiens
  CDR3 for beta chain variable domain of TCR clone 342326 (TRBV5-4, TRBJ2-7)
CASSWAGQGENF

SEQ ID NO: 684653 - protein, 14 aa, Homo sapiens
  CDR3 for alpha chain variable domain of TCR clone 342327 (TRAV26-1, TRAJ48)
CIVRVGFGNEKLTF

SEQ ID NO: 684654 - protein, 17 aa, Homo sapiens
  CDR3 for beta chain variable domain of TCR clone 342327 (TRBV7-8, TRBJ2-6)
CASSAGTGGAGANVLTF

SEQ ID NO: 684655 - protein, 14 aa, Homo sapiens
  CDR3 for alpha chain variable domain of TCR clone 342328 (TRAV6, TRAJ6)
CALDRAGGSYIPTF

SEQ ID NO: 684656 - protein, 16 aa, Homo sapiens
  CDR3 for beta chain variable domain of TCR clone 342328 (TRBV19, TRBJ2-1)
CASSIQGGGSYNEQFF

SEQ ID NO: 684657 - protein, 11 aa, Homo sapiens
  CDR3 for alpha chain variable domain of TCR clone 342329 (TRAV30, TRAJ23)
CGTEIAGKLIF

SEQ ID NO: 684658 - protein, 15 aa, Homo sapiens
  CDR3 for beta chain variable domain of TCR clone 342329 (TRBV7-3, TRBJ2-1)
CASSLSSGSFDEQFF

SEQ ID NO: 684659 - protein, 13 aa, Homo sapiens
  CDR3 for alpha chain variable domain of TCR clone 342330 (TRAV17, TRAJ26)
CATVDNYGQNFVF

SEQ ID NO: 684660 - protein, 15 aa, Homo sapiens
  CDR3 for beta chain variable domain of TCR clone 342330 (TRBV13, TRBJ1-5)
CASSFGQGGVQPQHF

SEQ ID NO: 684661 - protein, 16 aa, Homo sapiens
  CDR3 for alpha chain variable domain of TCR clone 342331 (TRAV4, TRAJ22)
CLVGDLYSGSARQMTF

SEQ ID NO: 684662 - protein, 16 aa, Homo sapiens
  CDR3 for beta chain variable domain of TCR clone 342331 (TRBV7-9, TRBJ2-3)
CASSPWREVGTDTQYF

SEQ ID NO: 684663 - protein, 14 aa, Homo sapiens
  CDR3 for alpha chain variable domain of TCR clone 342332 (TRAV8-3, TRAJ6)
CAVGASGGSYIPTF

SEQ ID NO: 684664 - protein, 17 aa, Homo sapiens
  CDR3 for beta chain variable domain of TCR clone 342332 (TRBV18, TRBJ2-2)
CASSPSDPWQNTGEPFF

SEQ ID NO: 684665 - protein, 13 aa, Homo sapiens
  CDR3 for alpha chain variable domain of TCR clone 342333 (TRAV2, TRAJ40)
CAVATSGTYKYIF

SEQ ID NO: 684666 - protein, 16 aa, Homo sapiens
  CDR3 for beta chain variable domain of TCR clone 342333 (TRBV19, TRBJ2-1)
CASSKAGPSSYNEQFF

SEQ ID NO: 684667 - protein, 12 aa, Homo sapiens
  CDR3 for alpha chain variable domain of TCR clone 342334 (TRAV21, TRAJ33)
CAKMDSNYQLIW

SEQ ID NO: 684668 - protein, 15 aa, Homo sapiens
  CDR3 for beta chain variable domain of TCR clone 342334 (TRBV27, TRBJ1-5)
CASTFNRGSNQPQHF

SEQ ID NO: 684669 - protein, 15 aa, Homo sapiens
  CDR3 for alpha chain variable domain of TCR clone 342335 (TRAV4, TRAJ39)
CLVGPNNNADNMLTF

SEQ ID NO: 684670 - protein, 12 aa, Homo sapiens
  CDR3 for beta chain variable domain of TCR clone 342335 (TRBV12-4, TRBJ2-7)
CASNPGGGEQYF

SEQ ID NO: 684671 - protein, 13 aa, Homo sapiens
  CDR3 for alpha chain variable domain of TCR clone 342336 (TRAV12-1, TRAJ31)
CVVNMNNNARLMF

SEQ ID NO: 684672 - protein, 15 aa, Homo sapiens
  CDR3 for beta chain variable domain of TCR clone 342336 (TRBV4-1, TRBJ1-2)
CASGQGQGAAYGYTF

SEQ ID NO: 684673 - protein, 14 aa, Homo sapiens
  CDR3 for alpha chain variable domain of TCR clone 342337 (TRAV35, TRAJ22)
CAGLRPGSARQLTF

SEQ ID NO: 684674 - protein, 14 aa, Homo sapiens
  CDR3 for beta chain variable domain of TCR clone 342337 (TRBV4-2, TRBJ2-1)
CASGLDRAYNEQFF

SEQ ID NO: 684675 - protein, 13 aa, Homo sapiens
  CDR3 for alpha chain variable domain of TCR clone 342338 (TRAV8-2, TRAJ43)
CVLSDQGDNDMRF

SEQ ID NO: 684676 - protein, 12 aa, Homo sapiens
  CDR3 for beta chain variable domain of TCR clone 342338 (TRBV7-8, TRBJ2-7)
CASSLGDREQYF

SEQ ID NO: 684677 - protein, 16 aa, Homo sapiens
  CDR3 for alpha chain variable domain of TCR clone 342339 (TRAV17, TRAJ22)
CATGPISSGSARQLTF

SEQ ID NO: 684678 - protein, 13 aa, Homo sapiens
  CDR3 for beta chain variable domain of TCR clone 342339 (TRBV11-2, TRBJ2-1)
CASSLGPAGGRFF

SEQ ID NO: 684679 - protein, 19 aa, Homo sapiens
  CDR3 for alpha chain variable domain of TCR clone 342340 (TRAV26-2, TRAJ13)
CCVLLHPERPLRGLPEVTF

SEQ ID NO: 684680 - protein, 11 aa, Homo sapiens
  CDR3 for beta chain variable domain of TCR clone 342340 (TRBV7-9, TRBJ2-3)
CASSYTDTQYF

SEQ ID NO: 684681 - protein, 14 aa, Homo sapiens
  CDR3 for alpha chain variable domain of TCR clone 342341 (TRAV12-2, TRAJ13)
CAVKKTGGYQKVTS

SEQ ID NO: 684682 - protein, 18 aa, Homo sapiens
  CDR3 for beta chain variable domain of TCR clone 342341 (TRBV20-1, TRBJ2-6)
CSAETTPTHGSGANVLTF

SEQ ID NO: 684683 - protein, 14 aa, Homo sapiens
  CDR3 for alpha chain variable domain of TCR clone 342342 (TRAV8-6, TRAJ20)
CAVSDRRVRDKLSF

SEQ ID NO: 684684 - protein, 12 aa, Homo sapiens
  CDR3 for beta chain variable domain of TCR clone 342342 (TRBV20-1, TRBJ2-7)
CSAGLKMGEQYF

SEQ ID NO: 684685 - protein, 15 aa, Homo sapiens
  CDR3 for alpha chain variable domain of TCR clone 342343 (TRAV27, TRAJ38)
CAARRNAGNNRKLIG

SEQ ID NO: 684686 - protein, 14 aa, Homo sapiens
  CDR3 for beta chain variable domain of TCR clone 342343 (TRBV7-8, TRBJ2-3)
CASRLEAGTDTQYF

SEQ ID NO: 684687 - protein, 13 aa, Homo sapiens
  CDR3 for alpha chain variable domain of TCR clone 342344 (TRAV8-6, TRAJ49)
CAVITNTGNQCYF

SEQ ID NO: 684688 - protein, 13 aa, Homo sapiens
  CDR3 for beta chain variable domain of TCR clone 342344 (TRBV7-9, TRBJ1-2)
CASSLKQNYGYTL

SEQ ID NO: 684689 - protein, 14 aa, Homo sapiens
  CDR3 for alpha chain variable domain of TCR clone 342345 (TRAV12-2, TRAJ22)
CAVRVSGSARQSTF

SEQ ID NO: 684690 - protein, 13 aa, Homo sapiens
  CDR3 for beta chain variable domain of TCR clone 342345 (TRBV6-1, TRBJ2-1)
CAGAGTGLHEQFF

SEQ ID NO: 684691 - protein, 13 aa, Homo sapiens
  CDR3 for alpha chain variable domain of TCR clone 342346 (TRAV12-3, TRAJ9)
CAMRNTGCFKTIF

SEQ ID NO: 684692 - protein, 14 aa, Homo sapiens
  CDR3 for beta chain variable domain of TCR clone 342346 (TRBV11-2, TRBJ2-7)
CASSSTGEGYDQYF

SEQ ID NO: 684693 - protein, 11 aa, Homo sapiens
  CDR3 for alpha chain variable domain of TCR clone 342347 (TRAV12-1, TRAJ15)
CVVNAGIALIF

SEQ ID NO: 684694 - protein, 16 aa, Homo sapiens
  CDR3 for beta chain variable domain of TCR clone 342347 (TRBV28, TRBJ2-1)
CASSSRVRDSYNEQFF

SEQ ID NO: 684695 - protein, 12 aa, Homo sapiens
  CDR3 for alpha chain variable domain of TCR clone 342348 (TRAV8-3, TRAJ26)
CAGDNYSQNFVF

SEQ ID NO: 684696 - protein, 13 aa, Homo sapiens
  CDR3 for beta chain variable domain of TCR clone 342348 (TRBV20-1, TRBJ1-1)
CSAPLGGGTEAFL

SEQ ID NO: 684697 - protein, 14 aa, Homo sapiens
  CDR3 for alpha chain variable domain of TCR clone 342349 (TRAV29/DV5, TRAJ36)
CAARRKTGANNLFF

SEQ ID NO: 684698 - protein, 15 aa, Homo sapiens
  CDR3 for beta chain variable domain of TCR clone 342349 (TRBV11-3, TRBJ2-2)
CASSLGGRPTGELFF

SEQ ID NO: 684699 - protein, 14 aa, Homo sapiens
  CDR3 for alpha chain variable domain of TCR clone 342350 (TRAV20, TRAJ17)
CAVQARAAGNKLTF

SEQ ID NO: 684700 - protein, 16 aa, Homo sapiens
  CDR3 for beta chain variable domain of TCR clone 342350 (TRBV29-1, TRBJ2-6)
CSVEDITYSGANVLTF

SEQ ID NO: 684701 - protein, 13 aa, Homo sapiens
  CDR3 for alpha chain variable domain of TCR clone 342351 (TRAV20, TRAJ37)
CAGCSSNTGKLIF

SEQ ID NO: 684702 - protein, 15 aa, Homo sapiens
  CDR3 for beta chain variable domain of TCR clone 342351 (TRBV7-2, TRBJ2-7)
CASSLKGALTYEQYF

SEQ ID NO: 684703 - protein, 14 aa, Homo sapiens
  CDR3 for alpha chain variable domain of TCR clone 342352 (TRAV26-1, TRAJ34)
CIVRVAYNTDKFIF

SEQ ID NO: 684704 - protein, 14 aa, Homo sapiens
  CDR3 for beta chain variable domain of TCR clone 342352 (TRBV20-1, TRBJ2-7)
CSAWTALSSYEQYF

SEQ ID NO: 684705 - protein, 15 aa, Homo sapiens
  CDR3 for alpha chain variable domain of TCR clone 342353 (TRAV20, TRAJ53)
CTVQASGGSNYKLTF

SEQ ID NO: 684706 - protein, 14 aa, Homo sapiens
  CDR3 for beta chain variable domain of TCR clone 342353 (TRBV12-5, TRBJ2-5)
CASGSRTHQETQYF

SEQ ID NO: 684707 - protein, 15 aa, Homo sapiens
  CDR3 for alpha chain variable domain of TCR clone 342354 (TRAV12-3, TRAJ6)
CAMSATSGGSYIPTF

SEQ ID NO: 684708 - protein, 15 aa, Homo sapiens
  CDR3 for beta chain variable domain of TCR clone 342354 (TRBV5-1, TRBJ2-6)
CASSWDPSGANVLTF

SEQ ID NO: 684709 - protein, 16 aa, Homo sapiens
  CDR3 for alpha chain variable domain of TCR clone 342355 (TRAV12-2, TRAJ6)
CAAPLAGSGGSYIPTF

SEQ ID NO: 684710 - protein, 10 aa, Homo sapiens
  CDR3 for beta chain variable domain of TCR clone 342355 (TRBV28, TRBJ1-2)
CASSFDRAVF

SEQ ID NO: 684711 - protein, 16 aa, Homo sapiens
  CDR3 for alpha chain variable domain of TCR clone 342356 (TRAV12-3, TRAJ53)
CAMSPGSGGSNYKLTF

SEQ ID NO: 684712 - protein, 14 aa, Homo sapiens
  CDR3 for beta chain variable domain of TCR clone 342356 (TRBV7-8, TRBJ2-1)
CATERERSYNEQFF

SEQ ID NO: 684713 - protein, 22 aa, Homo sapiens
  CDR3 for alpha chain variable domain of TCR clone 342357 (TRAV8-3, TRAJ32)
CAVEVVLQTSSSLELALCLLSS

SEQ ID NO: 684714 - protein, 15 aa, Homo sapiens
  CDR3 for beta chain variable domain of TCR clone 342357 (TRBV28, TRBJ1-1)
CASTSTRGLNTEAFF

SEQ ID NO: 684715 - protein, 12 aa, Homo sapiens
  CDR3 for alpha chain variable domain of TCR clone 342358 (TRAV17, TRAJ29)
CYASSGNTPLVF

SEQ ID NO: 684716 - protein, 16 aa, Homo sapiens
  CDR3 for beta chain variable domain of TCR clone 342358 (TRBV6-5, TRBJ2-1)
CASSETLAGHYNEQFF

SEQ ID NO: 684717 - protein, 14 aa, Homo sapiens
  CDR3 for alpha chain variable domain of TCR clone 342359 (TRAV13-2, TRAJ9)
CAENSFTGGFKTIF

SEQ ID NO: 684718 - protein, 13 aa, Homo sapiens
  CDR3 for beta chain variable domain of TCR clone 342359 (TRBV7-6, TRBJ2-7)
CASSLDHTHEQYF

SEQ ID NO: 684719 - protein, 13 aa, Homo sapiens
  CDR3 for alpha chain variable domain of TCR clone 342360 (TRAV13-2, TRAJ13)
CAGRPGGYQKVTF

SEQ ID NO: 684720 - protein, 15 aa, Homo sapiens
  CDR3 for beta chain variable domain of TCR clone 342360 (TRBV4-1, TRBJ1-4)
CASSDTGGTNEKLFF

SEQ ID NO: 684721 - protein, 13 aa, Homo sapiens
  CDR3 for alpha chain variable domain of TCR clone 342361 (TRAV13-1, TRAJ21)
CAASINNFNKFYF

SEQ ID NO: 684722 - protein, 16 aa, Homo sapiens
  CDR3 for beta chain variable domain of TCR clone 342361 (TRBV7-3, TRBJ2-2)
CASSLKRGTLSGELFF

SEQ ID NO: 684723 - protein, 19 aa, Homo sapiens
  CDR3 for alpha chain variable domain of TCR clone 342362 (TRAV27, TRAJ53)
ASTSVQSWNSGGSNYKLTF

SEQ ID NO: 684724 - protein, 14 aa, Homo sapiens
  CDR3 for beta chain variable domain of TCR clone 342362 (TRBV11-1, TRBJ2-7)
CASTFAVPSYEQYF

SEQ ID NO: 684725 - protein, 14 aa, Homo sapiens
  CDR3 for alpha chain variable domain of TCR clone 342363 (TRAV3, TRAJ22)
CTVRDYGSARQLTF

SEQ ID NO: 684726 - protein, 16 aa, Homo sapiens
  CDR3 for beta chain variable domain of TCR clone 342363 (TRBV12-5, TRBJ2-5)
CASGPRTSGNQETQYF

SEQ ID NO: 684727 - protein, 13 aa, Homo sapiens
  CDR3 for alpha chain variable domain of TCR clone 342364 (TRAV12-1, TRAJ6)
CVVFPGGSYIPTF

SEQ ID NO: 684728 - protein, 12 aa, Homo sapiens
  CDR3 for beta chain variable domain of TCR clone 342364 (TRBV29-1, TRBJ1-3)
CSTRDSGNTIYF

SEQ ID NO: 684729 - protein, 16 aa, Homo sapiens
  CDR3 for alpha chain variable domain of TCR clone 342365 (TRAV22, TRAJ53)
CAVEPNSGGSNYKLTF

SEQ ID NO: 684730 - protein, 16 aa, Homo sapiens
  CDR3 for beta chain variable domain of TCR clone 342365 (TRBV19, TRBJ2-2)
CASRSPGTGATGELFF

SEQ ID NO: 684731 - protein, 14 aa, Homo sapiens
  CDR3 for alpha chain variable domain of TCR clone 342366 (TRAV1-2, TRAJ16)
CVVNRFSDGQKLLF

SEQ ID NO: 684732 - protein, 15 aa, Homo sapiens
  CDR3 for beta chain variable domain of TCR clone 342366 (TRBV3-1, TRBJ2-5)
CASSANLGGPETQYF

SEQ ID NO: 684733 - protein, 14 aa, Homo sapiens
  CDR3 for alpha chain variable domain of TCR clone 342367 (TRAV1-1, TRAJ27)
CAVIYNTNVGKSTF

SEQ ID NO: 684734 - protein, 15 aa, Homo sapiens
  CDR3 for beta chain variable domain of TCR clone 342367 (TRBV7-2, TRBJ2-1)
CASSSGLAGGNKQFF

SEQ ID NO: 684735 - protein, 12 aa, Homo sapiens
  CDR3 for alpha chain variable domain of TCR clone 342368 (TRAV12-3, TRAJ17)
CAMTLTGNKLTF

SEQ ID NO: 684736 - protein, 15 aa, Homo sapiens
  CDR3 for beta chain variable domain of TCR clone 342368 (TRBV20-1, TRBJ2-7)
YSARDRVAGMDEQYF

SEQ ID NO: 684737 - protein, 14 aa, Homo sapiens
  CDR3 for alpha chain variable domain of TCR clone 342369 (TRAV12-3, TRAJ10)
SRLPLTGGGNKLTF

SEQ ID NO: 684738 - protein, 16 aa, Homo sapiens
  CDR3 for beta chain variable domain of TCR clone 342369 (TRBV6-1, TRBJ2-1)
CASSARLAGSYNEQFF

SEQ ID NO: 684739 - protein, 13 aa, Homo sapiens
  CDR3 for alpha chain variable domain of TCR clone 342370 (TRAV38-1, TRAJ42)
CARWGGSPGNLIF

SEQ ID NO: 684740 - protein, 10 aa, Homo sapiens
  CDR3 for beta chain variable domain of TCR clone 342370 (TRBV2, TRBJ2-5)
CASSAATQYF

SEQ ID NO: 684741 - protein, 15 aa, Homo sapiens
  CDR3 for alpha chain variable domain of TCR clone 342371 (TRAV8-4, TRAJ40)
CAVSSITAGTYKYIF

SEQ ID NO: 684742 - protein, 13 aa, Homo sapiens
  CDR3 for beta chain variable domain of TCR clone 342371 (TRBV2, TRBJ2-1)
CATSRGTDNEQFF

SEQ ID NO: 684743 - protein, 15 aa, Homo sapiens
  CDR3 for alpha chain variable domain of TCR clone 342372 (TRAV3, TRAJ22)
CAVRDRGGSARQLTF

SEQ ID NO: 684744 - protein, 15 aa, Homo sapiens
  CDR3 for beta chain variable domain of TCR clone 342372 (TRBV10-3, TRBJ2-3)
CAISLTSGGTGTQYF

SEQ ID NO: 684745 - protein, 15 aa, Homo sapiens
  CDR3 for alpha chain variable domain of TCR clone 342373 (TRAV12-2, TRAJ8)
CAVREENTGFQKLVF

SEQ ID NO: 684746 - protein, 14 aa, Homo sapiens
  CDR3 for beta chain variable domain of TCR clone 342373 (TRBV4-1, TRBJ2-2)
CASSQAVDTGELFF

SEQ ID NO: 684747 - protein, 15 aa, Homo sapiens
  CDR3 for alpha chain variable domain of TCR clone 342374 (TRAV3, TRAJ11)
CALRDRGSGYSTLTF

SEQ ID NO: 684748 - protein, 11 aa, Homo sapiens
  CDR3 for beta chain variable domain of TCR clone 342374 (TRBV29-1, TRBJ2-5)
CSEDRTGTQYF

SEQ ID NO: 684749 - protein, 15 aa, Homo sapiens
  CDR3 for alpha chain variable domain of TCR clone 342375 (TRAV23/DV6, TRAJ13)
CAAWPGGGGYQTVTI

SEQ ID NO: 684750 - protein, 17 aa, Homo sapiens
  CDR3 for beta chain variable domain of TCR clone 342375 (TRBV19, TRBJ2-7)
CASSISFYDSYPYEQYF

SEQ ID NO: 684751 - protein, 13 aa, Homo sapiens
  CDR3 for alpha chain variable domain of TCR clone 342376 (TRAV26-2, TRAJ43)
FILRAGNNNDMRF

SEQ ID NO: 684752 - protein, 15 aa, Homo sapiens
  CDR3 for beta chain variable domain of TCR clone 342376 (TRBV7-2, TRBJ2-1)
CASTHGTGIYNEQFF

SEQ ID NO: 684753 - protein, 11 aa, Homo sapiens
  CDR3 for alpha chain variable domain of TCR clone 342377 (TRAV30, TRAJ23)
CGTEIAGKLIF

SEQ ID NO: 684754 - protein, 15 aa, Homo sapiens
  CDR3 for beta chain variable domain of TCR clone 342377 (TRBV6-5, TRBJ2-7)
CASSARRGSDNEQYF

SEQ ID NO: 684755 - protein, 12 aa, Homo sapiens
  CDR3 for alpha chain variable domain of TCR clone 342378 (TRAV13-2, TRAJ8)
CAERTGFQKLVF

SEQ ID NO: 684756 - protein, 13 aa, Homo sapiens
  CDR3 for beta chain variable domain of TCR clone 342378 (TRBV7-9, TRBJ1-2)
CASSLKQNYGYTF

SEQ ID NO: 684757 - protein, 16 aa, Homo sapiens
  CDR3 for alpha chain variable domain of TCR clone 342379 (TRAV3, TRAJ18)
CAVRDGRGSTRGRLSF

SEQ ID NO: 684758 - protein, 15 aa, Homo sapiens
  CDR3 for beta chain variable domain of TCR clone 342379 (TRBV7-9, TRBJ1-6)
CASSSPGRGNSPLHF

SEQ ID NO: 684759 - protein, 14 aa, Homo sapiens
  CDR3 for alpha chain variable domain of TCR clone 342380 (TRAV8-4, TRAJ8)
CAVSEDTGFQKLVF

SEQ ID NO: 684760 - protein, 15 aa, Homo sapiens
  CDR3 for beta chain variable domain of TCR clone 342380 (TRBV11-2, TRBJ1-2)
CASSLEGVQRNGYTF

SEQ ID NO: 684761 - protein, 13 aa, Homo sapiens
  CDR3 for alpha chain variable domain of TCR clone 342381 (TRAV29/DV5, TRAJ31)
CAASRNNNARLMF

SEQ ID NO: 684762 - protein, 12 aa, Homo sapiens
  CDR3 for beta chain variable domain of TCR clone 342381 (TRBV14, TRBJ1-1)
CASSKLKGLAFF

SEQ ID NO: 684763 - protein, 16 aa, Homo sapiens
  CDR3 for alpha chain variable domain of TCR clone 342382 (TRAV30, TRAJ24)
CVTEIVDADSWGKFQF

SEQ ID NO: 684764 - protein, 14 aa, Homo sapiens
  CDR3 for beta chain variable domain of TCR clone 342382 (TRBV7-8, TRBJ2-3)
CASSLEAGTDTQYF

SEQ ID NO: 684765 - protein, 13 aa, Homo sapiens
  CDR3 for alpha chain variable domain of TCR clone 342383 (TRAV8-3, TRAJ23)
CAGIYNQGGKLIF

SEQ ID NO: 684766 - protein, 14 aa, Homo sapiens
  CDR3 for beta chain variable domain of TCR clone 342383 (TRBV25-1, TRBJ1-1)
CASAHLGGNTEAFF

SEQ ID NO: 684767 - protein, 14 aa, Homo sapiens
  CDR3 for alpha chain variable domain of TCR clone 342384 (TRAV12-3, TRAJ23)
CAMKMSNQGGKLIF

SEQ ID NO: 684768 - protein, 17 aa, Homo sapiens
  CDR3 for beta chain variable domain of TCR clone 342384 (TRBV18, TRBJ2-1)
CASSPRVAGGSYNEQFF

SEQ ID NO: 684769 - protein, 15 aa, Homo sapiens
  CDR3 for alpha chain variable domain of TCR clone 342385 (TRAV12-2, TRAJ53)
CAVNGAGGSNYKLTF

SEQ ID NO: 684770 - protein, 14 aa, Homo sapiens
  CDR3 for beta chain variable domain of TCR clone 342385 (TRBV19, TRBJ2-2)
CASSTLHRSGELFF

SEQ ID NO: 684771 - protein, 13 aa, Homo sapiens
  CDR3 for alpha chain variable domain of TCR clone 342386 (TRAV2, TRAJ29)
CAAQNSGNTPLVF

SEQ ID NO: 684772 - protein, 12 aa, Homo sapiens
  CDR3 for beta chain variable domain of TCR clone 342386 (TRBV7-9, TRBJ2-4)
CASSLAMGGQHS

SEQ ID NO: 684773 - protein, 21 aa, Homo sapiens
  CDR3 for alpha chain variable domain of TCR clone 342387 (TRAV12-1, )
CVVNSWISRTLTLPCTSWETL

SEQ ID NO: 684774 - protein, 13 aa, Homo sapiens
  CDR3 for beta chain variable domain of TCR clone 342387 (TRBV12-4, TRBJ1-5)
CASSPDRAQPQHF

SEQ ID NO: 684775 - protein, 14 aa, Homo sapiens
  CDR3 for alpha chain variable domain of TCR clone 342388 (TRAV13-1, TRAJ40)
CAASMTSGTYKYIF

SEQ ID NO: 684776 - protein, 15 aa, Homo sapiens
  CDR3 for beta chain variable domain of TCR clone 342388 (TRBV7-3, TRBJ2-1)
CASSSRSSGRNEQFF

SEQ ID NO: 684777 - protein, 14 aa, Homo sapiens
  CDR3 for alpha chain variable domain of TCR clone 342389 (TRAV13-1, TRAJ35)
CAASKGGFGNVLHC

SEQ ID NO: 684778 - protein, 13 aa, Homo sapiens
  CDR3 for beta chain variable domain of TCR clone 342389 (TRBV7-9, TRBJ2-7)
CASSFAGAYEQCF

SEQ ID NO: 684779 - protein, 15 aa, Homo sapiens
  CDR3 for alpha chain variable domain of TCR clone 342390 (TRAV2, TRAJ9)
CAVEDRGTGGFKTIF

SEQ ID NO: 684780 - protein, 16 aa, Homo sapiens
  CDR3 for beta chain variable domain of TCR clone 342390 (TRBV24-1, TRBJ2-3)
CATSDPGTGSTDTQYV

SEQ ID NO: 684781 - protein, 14 aa, Homo sapiens
  CDR3 for alpha chain variable domain of TCR clone 342391 (TRAV16, TRAJ39)
CALSKNNAGNMLTF

SEQ ID NO: 684782 - protein, 16 aa, Homo sapiens
  CDR3 for beta chain variable domain of TCR clone 342391 (TRBV6-6, TRBJ2-1)
CASSYSFSGPYNEQFF

SEQ ID NO: 684783 - protein, 14 aa, Homo sapiens
  CDR3 for alpha chain variable domain of TCR clone 342392 (TRAV12-3, TRAJ42)
CAMNYGGSQGNLIF

SEQ ID NO: 684784 - protein, 16 aa, Homo sapiens
  CDR3 for beta chain variable domain of TCR clone 342392 (TRBV19, TRBJ2-3)
CASSPGAASRTDTQYF

SEQ ID NO: 684785 - protein, 13 aa, Homo sapiens
  CDR3 for alpha chain variable domain of TCR clone 342393 (TRAV13-1, TRAJ39)
CSKYSNAGNMLTF

SEQ ID NO: 684786 - protein, 16 aa, Homo sapiens
  CDR3 for beta chain variable domain of TCR clone 342393 (TRBV20-1, TRBJ1-4)
CSAPGQVLLTNEKLFF

SEQ ID NO: 684787 - protein, 18 aa, Homo sapiens
  CDR3 for alpha chain variable domain of TCR clone 342394 (TRAV21, TRAJ52)
CAVRPSPAGGTSYGKLTF

SEQ ID NO: 684788 - protein, 19 aa, Homo sapiens
  CDR3 for beta chain variable domain of TCR clone 342394 (TRBV7-2, TRBJ2-3)
CASSFLSLNWGGGTDTQYF

SEQ ID NO: 684789 - protein, 14 aa, Homo sapiens
  CDR3 for alpha chain variable domain of TCR clone 342395 (TRAV3, TRAJ26)
CAVRDYNYGQNFVF

SEQ ID NO: 684790 - protein, 14 aa, Homo sapiens
  CDR3 for beta chain variable domain of TCR clone 342395 (TRBV7-9, TRBJ2-4)
CASSLAMGGNIQYF

SEQ ID NO: 684791 - protein, 17 aa, Homo sapiens
  CDR3 for alpha chain variable domain of TCR clone 342396 (TRAV3, TRAJ6)
CAVRDVPRAGGSYIPTF

SEQ ID NO: 684792 - protein, 14 aa, Homo sapiens
  CDR3 for beta chain variable domain of TCR clone 342396 (TRBV7-2, TRBJ2-7)
CASSPKTSFYVQYF

SEQ ID NO: 684793 - protein, 13 aa, Homo sapiens
  CDR3 for alpha chain variable domain of TCR clone 342397 (TRAV12-1, TRAJ7)
CVVNMRGNNRLAF

SEQ ID NO: 684794 - protein, 15 aa, Homo sapiens
  CDR3 for beta chain variable domain of TCR clone 342397 (TRBV27, TRBJ2-3)
CASSLELAATDTQYF

SEQ ID NO: 684795 - protein, 15 aa, Homo sapiens
  CDR3 for alpha chain variable domain of TCR clone 342398 (TRAV8-3, TRAJ45)
CASSYLGGGADELTF

SEQ ID NO: 684796 - protein, 13 aa, Homo sapiens
  CDR3 for beta chain variable domain of TCR clone 342398 (TRBV10-3, TRBJ2-7)
CASKLAVNYEQYF

SEQ ID NO: 684797 - protein, 13 aa, Homo sapiens
  CDR3 for alpha chain variable domain of TCR clone 342399 (TRAV2, TRAJ20)
CAVEGPSEYKLSF

SEQ ID NO: 684798 - protein, 16 aa, Homo sapiens
  CDR3 for beta chain variable domain of TCR clone 342399 (TRBV25-1, TRBJ2-7)
CASSELTVGGIYEQYF

SEQ ID NO: 684799 - protein, 17 aa, Homo sapiens
  CDR3 for alpha chain variable domain of TCR clone 342400 (TRAV12-1, TRAJ8)
CVVNPKRVNTGFQKLVF

SEQ ID NO: 684800 - protein, 14 aa, Homo sapiens
  CDR3 for beta chain variable domain of TCR clone 342400 (TRBV3-1, TRBJ2-7)
CASSRTSGKEEKYF

SEQ ID NO: 684801 - protein, 10 aa, Homo sapiens
  CDR3 for alpha chain variable domain of TCR clone 342401 (TRAV8-4, TRAJ43)
WALSADDMRF

SEQ ID NO: 684802 - protein, 15 aa, Homo sapiens
  CDR3 for beta chain variable domain of TCR clone 342401 (TRBV5-1, TRBJ2-3)
CASSVTSGSTDTQYF

SEQ ID NO: 684803 - protein, 17 aa, Homo sapiens
  CDR3 for alpha chain variable domain of TCR clone 342402 (TRAV16, TRAJ42)
CALSPKLYGGSQGNLIF

SEQ ID NO: 684804 - protein, 14 aa, Homo sapiens
  CDR3 for beta chain variable domain of TCR clone 342402 (TRBV7-6, TRBJ2-3)
CASSLGTVTDTQYF

SEQ ID NO: 684805 - protein, 12 aa, Homo sapiens
  CDR3 for alpha chain variable domain of TCR clone 342403 (TRAV39, TRAJ49)
CTLSNTGNQFYF

SEQ ID NO: 684806 - protein, 15 aa, Homo sapiens
  CDR3 for beta chain variable domain of TCR clone 342403 (TRBV29-1, TRBJ2-1)
CSGRDRKSSYNEQFF

SEQ ID NO: 684807 - protein, 14 aa, Homo sapiens
  CDR3 for alpha chain variable domain of TCR clone 342404 (TRAV26-1, TRAJ38)
CVAGNAGNNRKLIW

SEQ ID NO: 684808 - protein, 13 aa, Homo sapiens
  CDR3 for beta chain variable domain of TCR clone 342404 (TRBV20-1, TRBJ1-1)
CSARGGGNTEAFF

SEQ ID NO: 684809 - protein, 13 aa, Homo sapiens
  CDR3 for alpha chain variable domain of TCR clone 342405 (TRAV12-3, TRAJ47)
CAMKKEYGNKLVF

SEQ ID NO: 684810 - protein, 15 aa, Homo sapiens
  CDR3 for beta chain variable domain of TCR clone 342405 (TRBV20-1, TRBJ2-7)
CSARDRVSGMDEQCF

SEQ ID NO: 684811 - protein, 12 aa, Homo sapiens
  CDR3 for alpha chain variable domain of TCR clone 342406 (TRAV1-2, TRAJ26)
CAVRDYGQNFVF

SEQ ID NO: 684812 - protein, 14 aa, Homo sapiens
  CDR3 for beta chain variable domain of TCR clone 342406 (TRBV11-1, TRBJ2-7)
CASSFRQGSYEQYF

SEQ ID NO: 684813 - protein, 14 aa, Homo sapiens
  CDR3 for alpha chain variable domain of TCR clone 342407 (TRAV2, TRAJ9)
CAVEDRSGGFKTIF

SEQ ID NO: 684814 - protein, 14 aa, Homo sapiens
  CDR3 for beta chain variable domain of TCR clone 342407 (TRBV7-6, TRBJ2-7)
CASSLNSGTKEQYF

SEQ ID NO: 684815 - protein, 16 aa, Homo sapiens
  CDR3 for alpha chain variable domain of TCR clone 342408 (TRAV30, TRAJ24)
CGTEIADADSWGKFQF

SEQ ID NO: 684816 - protein, 15 aa, Homo sapiens
  CDR3 for beta chain variable domain of TCR clone 342408 (TRBV19, TRBJ2-1)
CASNAQGLAGREQFF

SEQ ID NO: 684817 - protein, 16 aa, Homo sapiens
  CDR3 for alpha chain variable domain of TCR clone 342409 (TRAV30, TRAJ24)
CGTAIVDADSWGKFQC

SEQ ID NO: 684818 - protein, 15 aa, Homo sapiens
  CDR3 for beta chain variable domain of TCR clone 342409 (TRBV7-9, TRBJ1-4)
CASSARTGGNEKLFF

SEQ ID NO: 684819 - protein, 14 aa, Homo sapiens
  CDR3 for alpha chain variable domain of TCR clone 342410 (TRAV12-2, TRAJ45)
CAENIGGGADGLTF

SEQ ID NO: 684820 - protein, 13 aa, Homo sapiens
  CDR3 for beta chain variable domain of TCR clone 342410 (TRBV19, TRBJ2-2)
CASSIWSTGELFF

SEQ ID NO: 684821 - protein, 12 aa, Homo sapiens
  CDR3 for alpha chain variable domain of TCR clone 342411 (TRAV20, TRAJ54)
CAVQEGAQKLVF

SEQ ID NO: 684822 - protein, 17 aa, Homo sapiens
  CDR3 for beta chain variable domain of TCR clone 342411 (TRBV13, TRBJ2-3)
CASSLSRVAGGRNTQNF

SEQ ID NO: 684823 - protein, 14 aa, Homo sapiens
  CDR3 for alpha chain variable domain of TCR clone 342412 (TRAV26-1, TRAJ26)
CIVRATLLCQNFVF

SEQ ID NO: 684824 - protein, 16 aa, Homo sapiens
  CDR3 for beta chain variable domain of TCR clone 342412 (TRBV12-4, TRBJ2-7)
CASRSTGTGPSYEQYF

SEQ ID NO: 684825 - protein, 17 aa, Homo sapiens
  CDR3 for alpha chain variable domain of TCR clone 342413 (TRAV3, TRAJ42)
CAVRDRDYGGSQGNPIF

SEQ ID NO: 684826 - protein, 13 aa, Homo sapiens
  CDR3 for beta chain variable domain of TCR clone 342413 (TRBV10-2, TRBJ2-7)
CASGASGGYEQYF

SEQ ID NO: 684827 - protein, 15 aa, Homo sapiens
  CDR3 for alpha chain variable domain of TCR clone 342414 (TRAV27, TRAJ38)
CAARRNAGNNRKLIW

SEQ ID NO: 684828 - protein, 13 aa, Homo sapiens
  CDR3 for beta chain variable domain of TCR clone 342414 (TRBV20-1, TRBJ2-7)
CSATHTSGYEQYF

SEQ ID NO: 684829 - protein, 15 aa, Homo sapiens
  CDR3 for alpha chain variable domain of TCR clone 342415 (TRAV26-1, TRAJ29)
CIVRVEGSGNTPLVF

SEQ ID NO: 684830 - protein, 11 aa, Homo sapiens
  CDR3 for beta chain variable domain of TCR clone 342415 (TRBV18, TRBJ1-2)
CASSPLNGYTF

SEQ ID NO: 684831 - protein, 17 aa, Homo sapiens
  CDR3 for alpha chain variable domain of TCR clone 342416 (TRAV13-1, TRAJ31)
CAPSDRLMFGDGTQLVV

SEQ ID NO: 684832 - protein, 12 aa, Homo sapiens
  CDR3 for beta chain variable domain of TCR clone 342416 (TRBV7-9, TRBJ2-7)
CASSLEGYEQYI

SEQ ID NO: 684833 - protein, 16 aa, Homo sapiens
  CDR3 for alpha chain variable domain of TCR clone 342417 (TRAV26-1, TRAJ36)
CIVRVSYQTGANNLFF

SEQ ID NO: 684834 - protein, 14 aa, Homo sapiens
  CDR3 for beta chain variable domain of TCR clone 342417 (TRBV20-1, TRBJ2-3)
CSARSSGGTDTQYF

SEQ ID NO: 684835 - protein, 12 aa, Homo sapiens
  CDR3 for alpha chain variable domain of TCR clone 342418 (TRAV35, TRAJ31)
CAAASNNARLMF

SEQ ID NO: 684836 - protein, 16 aa, Homo sapiens
  CDR3 for beta chain variable domain of TCR clone 342418 (TRBV5-5, TRBJ2-5)
CASSPMYGGVGETQYF

SEQ ID NO: 684837 - protein, 11 aa, Homo sapiens
  CDR3 for alpha chain variable domain of TCR clone 342419 (TRAV13-2, TRAJ23)
CAESPRGKLIF

SEQ ID NO: 684838 - protein, 13 aa, Homo sapiens
  CDR3 for beta chain variable domain of TCR clone 342419 (TRBV20-1, TRBJ2-1)
TSGALPPGNEQFF

SEQ ID NO: 684839 - protein, 13 aa, Homo sapiens
  CDR3 for alpha chain variable domain of TCR clone 342420 (TRAV13-1, TRAJ12)
CAASPDSSYKLIF

SEQ ID NO: 684840 - protein, 14 aa, Homo sapiens
  CDR3 for beta chain variable domain of TCR clone 342420 (TRBV12-5, TRBJ2-5)
CASGSRTHQETQYF

SEQ ID NO: 684841 - protein, 14 aa, Homo sapiens
  CDR3 for alpha chain variable domain of TCR clone 342421 (TRAV8-3, TRAJ33)
CAVAASDSNYQLIW

SEQ ID NO: 684842 - protein, 12 aa, Homo sapiens
  CDR3 for beta chain variable domain of TCR clone 342421 (TRBV7-8, TRBJ2-7)
CASSLGDREQYF

SEQ ID NO: 684843 - protein, 12 aa, Homo sapiens
  CDR3 for alpha chain variable domain of TCR clone 342422 (TRAV1-2, TRAJ26)
CTVSPYGQNFVF

SEQ ID NO: 684844 - protein, 13 aa, Homo sapiens
  CDR3 for beta chain variable domain of TCR clone 342422 (TRBV7-9, TRBJ1-2)
CASSLKQNYGYTF

SEQ ID NO: 684845 - protein, 16 aa, Homo sapiens
  CDR3 for alpha chain variable domain of TCR clone 342423 (TRAV30, TRAJ24)
FGTEIVDADSWGKFQF

SEQ ID NO: 684846 - protein, 13 aa, Homo sapiens
  CDR3 for beta chain variable domain of TCR clone 342423 (TRBV4-2, TRBJ2-1)
CASSPGTYNEQFF

SEQ ID NO: 684847 - protein, 11 aa, Homo sapiens
  CDR3 for alpha chain variable domain of TCR clone 342424 (TRAV2, TRAJ20)
CAVLNDYKLSF

SEQ ID NO: 684848 - protein, 16 aa, Homo sapiens
  CDR3 for beta chain variable domain of TCR clone 342424 (TRBV28, TRBJ2-2)
CASSLEGGSNTGELFF

SEQ ID NO: 684849 - protein, 17 aa, Homo sapiens
  CDR3 for alpha chain variable domain of TCR clone 342425 (TRAV3, TRAJ6)
FAVRDGPRAGGSYIPTF

SEQ ID NO: 684850 - protein, 20 aa, Homo sapiens
  CDR3 for beta chain variable domain of TCR clone 342425 (TRBV28, TRBJ2-1)
CASTPIGRSPGLAGGNEQFF

SEQ ID NO: 684851 - protein, 13 aa, Homo sapiens
  CDR3 for alpha chain variable domain of TCR clone 342426 (TRAV2, TRAJ40)
CAVVTSGTYKYIF

SEQ ID NO: 684852 - protein, 11 aa, Homo sapiens
  CDR3 for beta chain variable domain of TCR clone 342426 (TRBV19, TRBJ2-1)
CASRRRYEQFF

SEQ ID NO: 684853 - protein, 13 aa, Homo sapiens
  CDR3 for alpha chain variable domain of TCR clone 342427 (TRAV27, TRAJ45)
CRSSGGGADGLTF

SEQ ID NO: 684854 - protein, 11 aa, Homo sapiens
  CDR3 for beta chain variable domain of TCR clone 342427 (TRBV19, TRBJ1-1)
CASSIGSEAFF

SEQ ID NO: 684855 - protein, 14 aa, Homo sapiens
  CDR3 for alpha chain variable domain of TCR clone 342428 (TRAV1-2, TRAJ8)
CAVREDTGFQKLVC

SEQ ID NO: 684856 - protein, 16 aa, Homo sapiens
  CDR3 for beta chain variable domain of TCR clone 342428 (TRBV19, TRBJ2-1)
CASSKAGPSSYNEQFF

SEQ ID NO: 684857 - protein, 16 aa, Homo sapiens
  CDR3 for alpha chain variable domain of TCR clone 342429 (TRAV30, TRAJ24)
CGTEIVDADSWGKFQF

SEQ ID NO: 684858 - protein, 15 aa, Homo sapiens
  CDR3 for beta chain variable domain of TCR clone 342429 (TRBV5-1, TRBJ1-1)
CASSLGQGRFAEAFF

SEQ ID NO: 684859 - protein, 14 aa, Homo sapiens
  CDR3 for alpha chain variable domain of TCR clone 342430 (TRAV8-1, TRAJ4)
CAVPFSGGYNKLFF

SEQ ID NO: 684860 - protein, 16 aa, Homo sapiens
  CDR3 for beta chain variable domain of TCR clone 342430 (TRBV6-1, TRBJ1-2)
CASSGAWQGRSHGYTF

SEQ ID NO: 684861 - protein, 15 aa, Homo sapiens
  CDR3 for alpha chain variable domain of TCR clone 342431 (TRAV3, TRAJ4)
CAVRDRAGGYNKLIF

SEQ ID NO: 684862 - protein, 15 aa, Homo sapiens
  CDR3 for beta chain variable domain of TCR clone 342431 (TRBV11-3, TRBJ2-7)
CASSPGPASSYEQYF

SEQ ID NO: 684863 - protein, 18 aa, Homo sapiens
  CDR3 for alpha chain variable domain of TCR clone 342432 (TRAV4, TRAJ10)
CLVGDIPLLTGGGNKPTF

SEQ ID NO: 684864 - protein, 16 aa, Homo sapiens
  CDR3 for beta chain variable domain of TCR clone 342432 (TRBV28, TRBJ2-1)
CASSSPEYPRGNEQFF

SEQ ID NO: 684865 - protein, 15 aa, Homo sapiens
  CDR3 for alpha chain variable domain of TCR clone 342433 (TRAV29/DV5, TRAJ24)
CAASGATDSWGKYQF

SEQ ID NO: 684866 - protein, 13 aa, Homo sapiens
  CDR3 for beta chain variable domain of TCR clone 342433 (TRBV19, TRBJ1-2)
CASSFPGQDGYTF

SEQ ID NO: 684867 - protein, 13 aa, Homo sapiens
  CDR3 for alpha chain variable domain of TCR clone 342434 (TRAV12-3, TRAJ13)
CTMTSGGYQKVTF

SEQ ID NO: 684868 - protein, 13 aa, Homo sapiens
  CDR3 for beta chain variable domain of TCR clone 342434 (TRBV20-1, TRBJ2-2)
CSALSGGAGELFF

SEQ ID NO: 684869 - protein, 14 aa, Homo sapiens
  CDR3 for alpha chain variable domain of TCR clone 342435 (TRAV12-2, TRAJ17)
CAVLSKAAGNKLTF

SEQ ID NO: 684870 - protein, 15 aa, Homo sapiens
  CDR3 for beta chain variable domain of TCR clone 342435 (TRBV28, TRBJ2-1)
CASSGLAEVDNEQFF

SEQ ID NO: 684871 - protein, 21 aa, Homo sapiens
  CDR3 for alpha chain variable domain of TCR clone 342436 (TRAV8-3, TRAJ6)
CAVGREEATYLHLEEEPALLF

SEQ ID NO: 684872 - protein, 16 aa, Homo sapiens
  CDR3 for beta chain variable domain of TCR clone 342436 (TRBV6-1, TRBJ2-5)
CASSETLDRGAETQYF

SEQ ID NO: 684873 - protein, 11 aa, Homo sapiens
  CDR3 for alpha chain variable domain of TCR clone 342437 (TRAV26-1, TRAJ37)
CIVRVGRKLIF

SEQ ID NO: 684874 - protein, 13 aa, Homo sapiens
  CDR3 for beta chain variable domain of TCR clone 342437 (TRBV14, TRBJ1-2)
CASSVDRRYGYTF

SEQ ID NO: 684875 - protein, 19 aa, Homo sapiens
  CDR3 for alpha chain variable domain of TCR clone 342438 (TRAV26-1, TRAJ52)
CIVRAHRNAGGTSYGKLTF

SEQ ID NO: 684876 - protein, 15 aa, Homo sapiens
  CDR3 for beta chain variable domain of TCR clone 342438 (TRBV12-4, TRBJ2-5)
CASSPPTGLQETQFF

SEQ ID NO: 684877 - protein, 16 aa, Homo sapiens
  CDR3 for alpha chain variable domain of TCR clone 342439 (TRAV12-1, TRAJ15)
CVVSPAGQPGMNCSDL

SEQ ID NO: 684878 - protein, 13 aa, Homo sapiens
  CDR3 for beta chain variable domain of TCR clone 342439 (TRBV7-2, TRBJ2-4)
CASSREHANIQYF

SEQ ID NO: 684879 - protein, 16 aa, Homo sapiens
  CDR3 for alpha chain variable domain of TCR clone 342440 (TRAV1-2, TRAJ10)
CAVRGVLTGGGNKLTF

SEQ ID NO: 684880 - protein, 13 aa, Homo sapiens
  CDR3 for beta chain variable domain of TCR clone 342440 (TRBV11-2, TRBJ2-5)
CASGHGAKETQYF

SEQ ID NO: 684881 - protein, 14 aa, Homo sapiens
  CDR3 for alpha chain variable domain of TCR clone 342441 (TRAV17, TRAJ54)
CATDANQGAQKLVF

SEQ ID NO: 684882 - protein, 14 aa, Homo sapiens
  CDR3 for beta chain variable domain of TCR clone 342441 (TRBV25-1, TRBJ1-1)
YASTHLGGNTEAFF

SEQ ID NO: 684883 - protein, 15 aa, Homo sapiens
  CDR3 for alpha chain variable domain of TCR clone 342442 (TRAV13-1, TRAJ11)
CAASNRNSGYSTLTF

SEQ ID NO: 684884 - protein, 11 aa, Homo sapiens
  CDR3 for beta chain variable domain of TCR clone 342442 (TRBV20-1, TRBJ2-7)
CSARLSYEQYF

SEQ ID NO: 684885 - protein, 11 aa, Homo sapiens
  CDR3 for alpha chain variable domain of TCR clone 342443 (TRAV3, TRAJ21)
RAVGNFNKFYS

SEQ ID NO: 684886 - protein, 16 aa, Homo sapiens
  CDR3 for beta chain variable domain of TCR clone 342443 (TRBV19, TRBJ2-1)
CASSKAGPSSYNEQFF

SEQ ID NO: 684887 - protein, 14 aa, Homo sapiens
  CDR3 for alpha chain variable domain of TCR clone 342444 (TRAV8-3, TRAJ4)
CAVGAAGGSNKLIF

SEQ ID NO: 684888 - protein, 15 aa, Homo sapiens
  CDR3 for beta chain variable domain of TCR clone 342444 (TRBV6-5, TRBJ2-1)
CASSYDAGADNEQFF

SEQ ID NO: 684889 - protein, 16 aa, Homo sapiens
  CDR3 for alpha chain variable domain of TCR clone 342445 (TRAV12-2, TRAJ18)
CAVTTDRGSTLGRRYF

SEQ ID NO: 684890 - protein, 14 aa, Homo sapiens
  CDR3 for beta chain variable domain of TCR clone 342445 (TRBV4-2, TRBJ1-5)
CASSQDSINQPQHF

SEQ ID NO: 684891 - protein, 15 aa, Homo sapiens
  CDR3 for alpha chain variable domain of TCR clone 342446 (TRAV12-1, TRAJ44)
CVADLPTGTASKLTF

SEQ ID NO: 684892 - protein, 13 aa, Homo sapiens
  CDR3 for beta chain variable domain of TCR clone 342446 (TRBV7-9, TRBJ1-2)
CASSLKQHYGYTF

SEQ ID NO: 684893 - protein, 14 aa, Homo sapiens
  CDR3 for alpha chain variable domain of TCR clone 342447 (TRAV12-3, TRAJ9)
CAMSPNTGGFKTIF

SEQ ID NO: 684894 - protein, 14 aa, Homo sapiens
  CDR3 for beta chain variable domain of TCR clone 342447 (TRBV7-8, TRBJ2-3)
CASSLEAGTDTQYF

SEQ ID NO: 684895 - protein, 14 aa, Homo sapiens
  CDR3 for alpha chain variable domain of TCR clone 342448 (TRAV8-4, TRAJ9)
CAVRINTGGFKTIF

SEQ ID NO: 684896 - protein, 15 aa, Homo sapiens
  CDR3 for beta chain variable domain of TCR clone 342448 (TRBV10-2, TRBJ2-6)
CASSEQGTGANVLTC

SEQ ID NO: 684897 - protein, 15 aa, Homo sapiens
  CDR3 for alpha chain variable domain of TCR clone 342449 (TRAV1-1, TRAJ4)
CAVRAFSGGYNKLIF

SEQ ID NO: 684898 - protein, 13 aa, Homo sapiens
  CDR3 for beta chain variable domain of TCR clone 342449 (TRBV7-9, TRBJ1-2)
CASSLKQNYGYAF

SEQ ID NO: 684899 - protein, 12 aa, Homo sapiens
  CDR3 for alpha chain variable domain of TCR clone 342450 (TRAV1-2, TRAJ26)
CAVRYYGQNFVF

SEQ ID NO: 684900 - protein, 15 aa, Homo sapiens
  CDR3 for beta chain variable domain of TCR clone 342450 (TRBV28, TRBJ2-1)
FASSIIAGGRSEQFF

SEQ ID NO: 684901 - protein, 11 aa, Homo sapiens
  CDR3 for alpha chain variable domain of TCR clone 342451 (TRAV12-2, TRAJ36)
CAVDGANNVFF

SEQ ID NO: 684902 - protein, 13 aa, Homo sapiens
  CDR3 for beta chain variable domain of TCR clone 342451 (TRBV28, TRBJ2-5)
CARVSRGEETQYS

SEQ ID NO: 684903 - protein, 16 aa, Homo sapiens
  CDR3 for alpha chain variable domain of TCR clone 342452 (TRAV13-1, TRAJ37)
CAASSLGSSKTGKLIF

SEQ ID NO: 684904 - protein, 12 aa, Homo sapiens
  CDR3 for beta chain variable domain of TCR clone 342452 (TRBV6-1, TRBJ2-5)
CASSEGRETQSF

SEQ ID NO: 684905 - protein, 14 aa, Homo sapiens
  CDR3 for alpha chain variable domain of TCR clone 342453 (TRAV9-2, TRAJ39)
CALYIYNAGNMLTF

SEQ ID NO: 684906 - protein, 11 aa, Homo sapiens
  CDR3 for beta chain variable domain of TCR clone 342453 (TRBV7-8, TRBJ2-7)
CASSLSLEQYL

SEQ ID NO: 684907 - protein, 15 aa, Homo sapiens
  CDR3 for alpha chain variable domain of TCR clone 342454 (TRAV16, TRAJ16)
CALQGGGSDGQKLLF

SEQ ID NO: 684908 - protein, 13 aa, Homo sapiens
  CDR3 for beta chain variable domain of TCR clone 342454 (TRBV20-1, TRBJ1-1)
CSARGGGNTEAFF

SEQ ID NO: 684909 - protein, 13 aa, Homo sapiens
  CDR3 for alpha chain variable domain of TCR clone 342455 (TRAV27, TRAJ6)
CAGGTRGSYRPTF

SEQ ID NO: 684910 - protein, 13 aa, Homo sapiens
  CDR3 for beta chain variable domain of TCR clone 342455 (TRBV12-5, TRBJ2-3)
CASGDRQSDTQYF

SEQ ID NO: 684911 - protein, 15 aa, Homo sapiens
  CDR3 for alpha chain variable domain of TCR clone 342456 (TRAV12-1, TRAJ44)
CVADLPTGTASKLTF

SEQ ID NO: 684912 - protein, 12 aa, Homo sapiens
  CDR3 for beta chain variable domain of TCR clone 342456 (TRBV6-5, TRBJ2-5)
CQQSPGRRDQYF

SEQ ID NO: 684913 - protein, 14 aa, Homo sapiens
  CDR3 for alpha chain variable domain of TCR clone 342457 (TRAV29/DV5, TRAJ6)
CAARVSGGSYIPTF

SEQ ID NO: 684914 - protein, 16 aa, Homo sapiens
  CDR3 for beta chain variable domain of TCR clone 342457 (TRBV29-1, TRBJ2-7)
CSVEDAEDGTAYEQYF

SEQ ID NO: 684915 - protein, 13 aa, Homo sapiens
  CDR3 for alpha chain variable domain of TCR clone 342458 (TRAV8-3, TRAJ44)
CAVVPGTASKLTF

SEQ ID NO: 684916 - protein, 15 aa, Homo sapiens
  CDR3 for beta chain variable domain of TCR clone 342458 (TRBV10-3, TRBJ2-1)
CAISDVQDRAYEQFF

SEQ ID NO: 684917 - protein, 12 aa, Homo sapiens
  CDR3 for alpha chain variable domain of TCR clone 342459 (TRAV13-1, TRAJ21)
CAASFNFNKFYF

SEQ ID NO: 684918 - protein, 14 aa, Homo sapiens
  CDR3 for beta chain variable domain of TCR clone 342459 (TRBV4-1, TRBJ2-7)
CASRLTSGSYEQYF

SEQ ID NO: 684919 - protein, 15 aa, Homo sapiens
  CDR3 for alpha chain variable domain of TCR clone 342460 (TRAV29/DV5, TRAJ29)
CVASERSSGNTPLVF

SEQ ID NO: 684920 - protein, 17 aa, Homo sapiens
  CDR3 for beta chain variable domain of TCR clone 342460 (TRBV4-1, TRBJ1-4)
CASSQEGPRGVEEKLFF

SEQ ID NO: 684921 - protein, 17 aa, Homo sapiens
  CDR3 for alpha chain variable domain of TCR clone 342461 (TRAV3, TRAJ6)
CAVRDGPRAGGSDIPTF

SEQ ID NO: 684922 - protein, 20 aa, Homo sapiens
  CDR3 for beta chain variable domain of TCR clone 342461 (TRBV28, TRBJ2-1)
CASTPIGRSPGLAGGNEQSF

SEQ ID NO: 684923 - protein, 13 aa, Homo sapiens
  CDR3 for alpha chain variable domain of TCR clone 342462 (TRAV27, TRAJ42)
CAGARGSQGNLIF

SEQ ID NO: 684924 - protein, 15 aa, Homo sapiens
  CDR3 for beta chain variable domain of TCR clone 342462 (TRBV4-1, TRBJ1-2)
CASSQGQGAAYGYTF

SEQ ID NO: 684925 - protein, 13 aa, Homo sapiens
  CDR3 for alpha chain variable domain of TCR clone 342463 (TRAV3, TRAJ27)
CAVRPLGAGKSTF

SEQ ID NO: 684926 - protein, 18 aa, Homo sapiens
  CDR3 for beta chain variable domain of TCR clone 342463 (TRBV25-1, TRBJ1-2)
CASSGLQNGQGLIFGYTF

SEQ ID NO: 684927 - protein, 14 aa, Homo sapiens
  CDR3 for alpha chain variable domain of TCR clone 342464 (TRAV12-3, TRAJ10)
SHLPLTGGGNKLTF

SEQ ID NO: 684928 - protein, 18 aa, Homo sapiens
  CDR3 for beta chain variable domain of TCR clone 342464 (TRBV7-9, TRBJ2-6)
CASSFPGAGISGANVLTF

SEQ ID NO: 684929 - protein, 14 aa, Homo sapiens
  CDR3 for alpha chain variable domain of TCR clone 342465 (TRAV1-2, TRAJ16)
CAVNRFSDGQKLLF

SEQ ID NO: 684930 - protein, 12 aa, Homo sapiens
  CDR3 for beta chain variable domain of TCR clone 342465 (TRBV27, TRBJ2-5)
FASSPTGETQYF

SEQ ID NO: 684931 - protein, 16 aa, Homo sapiens
  CDR3 for alpha chain variable domain of TCR clone 342466 (TRAV17, TRAJ35)
CATAEGGIGFGNVLHC

SEQ ID NO: 684932 - protein, 16 aa, Homo sapiens
  CDR3 for beta chain variable domain of TCR clone 342466 (TRBV6-5, TRBJ2-7)
CASSSDPTSGCYEQYF

SEQ ID NO: 684933 - protein, 14 aa, Homo sapiens
  CDR3 for alpha chain variable domain of TCR clone 342467 (TRAV13-2, TRAJ17)
CAENSKAAGNKLTF

SEQ ID NO: 684934 - protein, 14 aa, Homo sapiens
  CDR3 for beta chain variable domain of TCR clone 342467 (TRBV7-3, TRBJ2-2)
CASSLYPLTGELFF

SEQ ID NO: 684935 - protein, 16 aa, Homo sapiens
  CDR3 for alpha chain variable domain of TCR clone 342468 (TRAV21, TRAJ45)
CAVSWGSGGGADGLTF

SEQ ID NO: 684936 - protein, 14 aa, Homo sapiens
  CDR3 for beta chain variable domain of TCR clone 342468 (TRBV4-2, TRBJ1-2)
CAGSPGGSNYGYTF

SEQ ID NO: 684937 - protein, 13 aa, Homo sapiens
  CDR3 for alpha chain variable domain of TCR clone 342469 (TRAV12-2, TRAJ4)
CAVRSGGYNKLIF

SEQ ID NO: 684938 - protein, 13 aa, Homo sapiens
  CDR3 for beta chain variable domain of TCR clone 342469 (TRBV6-5, TRBJ2-5)
CASRTPGWETQYF

SEQ ID NO: 684939 - protein, 13 aa, Homo sapiens
  CDR3 for alpha chain variable domain of TCR clone 342470 (TRAV27, TRAJ41)
CAGEGNSGYALNF

SEQ ID NO: 684940 - protein, 14 aa, Homo sapiens
  CDR3 for beta chain variable domain of TCR clone 342470 (TRBV7-2, TRBJ1-5)
CASSTQGAGQPQHF

SEQ ID NO: 684941 - protein, 15 aa, Homo sapiens
  CDR3 for alpha chain variable domain of TCR clone 342471 (TRAV3, TRAJ37)
CCERKGVWNTGKLIF

SEQ ID NO: 684942 - protein, 13 aa, Homo sapiens
  CDR3 for beta chain variable domain of TCR clone 342471 (TRBV14, TRBJ2-7)
CASSQDRRYEQYF

SEQ ID NO: 684943 - protein, 14 aa, Homo sapiens
  CDR3 for alpha chain variable domain of TCR clone 342472 (TRAV1-2, TRAJ16)
CAVNRFSDGQQLLF

SEQ ID NO: 684944 - protein, 13 aa, Homo sapiens
  CDR3 for beta chain variable domain of TCR clone 342472 (TRBV18, TRBJ2-5)
CASSPAGKETQYF

SEQ ID NO: 684945 - protein, 17 aa, Homo sapiens
  CDR3 for alpha chain variable domain of TCR clone 342473 (TRAV23/DV6, TRAJ53)
CAASKLGSGGSNYKLTF

SEQ ID NO: 684946 - protein, 13 aa, Homo sapiens
  CDR3 for beta chain variable domain of TCR clone 342473 (TRBV19, TRBJ2-7)
CASSTSGSYEQYF

SEQ ID NO: 684947 - protein, 16 aa, Homo sapiens
  CDR3 for alpha chain variable domain of TCR clone 342474 (TRAV16, TRAJ4)
FALSRMFSGGYNKLIF

SEQ ID NO: 684948 - protein, 16 aa, Homo sapiens
  CDR3 for beta chain variable domain of TCR clone 342474 (TRBV24-1, TRBJ2-3)
CDTSDPGTGATDTQYF

SEQ ID NO: 684949 - protein, 11 aa, Homo sapiens
  CDR3 for alpha chain variable domain of TCR clone 342475 (TRAV13-1, TRAJ20)
CAAPMALQAQL

SEQ ID NO: 684950 - protein, 14 aa, Homo sapiens
  CDR3 for beta chain variable domain of TCR clone 342475 (TRBV28, TRBJ2-5)
CASTGAWGVETQYF

SEQ ID NO: 684951 - protein, 13 aa, Homo sapiens
  CDR3 for alpha chain variable domain of TCR clone 342476 (TRAV3, TRAJ33)
CAVRDRGNYQLIW

SEQ ID NO: 684952 - protein, 16 aa, Homo sapiens
  CDR3 for beta chain variable domain of TCR clone 342476 (TRBV4-2, TRBJ2-7)
CASSQDRGTSSYEQYF

SEQ ID NO: 684953 - protein, 15 aa, Homo sapiens
  CDR3 for alpha chain variable domain of TCR clone 342477 (TRAV8-3, TRAJ37)
CAVGARASNTGKLIV

SEQ ID NO: 684954 - protein, 15 aa, Homo sapiens
  CDR3 for beta chain variable domain of TCR clone 342477 (TRBV5-4, TRBJ2-3)
CASSLAGRVTDTQYF

SEQ ID NO: 684955 - protein, 15 aa, Homo sapiens
  CDR3 for alpha chain variable domain of TCR clone 342478 (TRAV20, TRAJ43)
CAVQAGKSSNNDMRF

SEQ ID NO: 684956 - protein, 15 aa, Homo sapiens
  CDR3 for beta chain variable domain of TCR clone 342478 (TRBV11-3, TRBJ2-1)
CASSLAGQTYNEQFF

SEQ ID NO: 684957 - protein, 14 aa, Homo sapiens
  CDR3 for alpha chain variable domain of TCR clone 342479 (TRAV16, TRAJ15)
CALSGPQAGTALIF

SEQ ID NO: 684958 - protein, 12 aa, Homo sapiens
  CDR3 for beta chain variable domain of TCR clone 342479 (TRBV18, TRBJ2-5)
CPSSPSKETQYF

SEQ ID NO: 684959 - protein, 14 aa, Homo sapiens
  CDR3 for alpha chain variable domain of TCR clone 342480 (TRAV12-2, TRAJ13)
CAVKQTGGYQKVTF

SEQ ID NO: 684960 - protein, 12 aa, Homo sapiens
  CDR3 for beta chain variable domain of TCR clone 342480 (TRBV12-4, TRBJ1-2)
CASSVIWLHLRF

SEQ ID NO: 684961 - protein, 14 aa, Homo sapiens
  CDR3 for alpha chain variable domain of TCR clone 342481 (TRAV26-1, TRAJ38)
CIADNSGNNRKLIW

SEQ ID NO: 684962 - protein, 17 aa, Homo sapiens
  CDR3 for beta chain variable domain of TCR clone 342481 (TRBV15, TRBJ1-1)
CATSRVGGADGDTEAFF

SEQ ID NO: 684963 - protein, 16 aa, Homo sapiens
  CDR3 for alpha chain variable domain of TCR clone 342482 (TRAV3, TRAJ10)
CAVRDMRAGGRNKLTF

SEQ ID NO: 684964 - protein, 16 aa, Homo sapiens
  CDR3 for beta chain variable domain of TCR clone 342482 (TRBV19, TRBJ2-2)
CASSFPGQGLAGELFF

SEQ ID NO: 684965 - protein, 16 aa, Homo sapiens
  CDR3 for alpha chain variable domain of TCR clone 342483 (TRAV4, TRAJ18)
CCVLLIGGSTLGRLYF

SEQ ID NO: 684966 - protein, 15 aa, Homo sapiens
  CDR3 for beta chain variable domain of TCR clone 342483 (TRBV7-3, TRBJ2-7)
CASSLNAQGAYEQYF

SEQ ID NO: 684967 - protein, 17 aa, Homo sapiens
  CDR3 for alpha chain variable domain of TCR clone 342484 (TRAV26-1, TRAJ28)
CIVRLAYSGAGSYQLTF

SEQ ID NO: 684968 - protein, 13 aa, Homo sapiens
  CDR3 for beta chain variable domain of TCR clone 342484 (TRBV7-7, TRBJ2-5)
CATTGGAMETQYF

SEQ ID NO: 684969 - protein, 10 aa, Homo sapiens
  CDR3 for alpha chain variable domain of TCR clone 342485 (TRAV1-2, TRAJ31)
CVSEDARLMF

SEQ ID NO: 684970 - protein, 14 aa, Homo sapiens
  CDR3 for beta chain variable domain of TCR clone 342485 (TRBV7-8, TRBJ2-3)
CASSLEAGTDTQYF

SEQ ID NO: 684971 - protein, 14 aa, Homo sapiens
  CDR3 for alpha chain variable domain of TCR clone 342486 (TRAV12-1, TRAJ30)
CVPTGTNRDDKIII

SEQ ID NO: 684972 - protein, 11 aa, Homo sapiens
  CDR3 for beta chain variable domain of TCR clone 342486 (TRBV4-1, TRBJ2-2)
CASEHTGELFF

SEQ ID NO: 684973 - protein, 14 aa, Homo sapiens
  CDR3 for alpha chain variable domain of TCR clone 342487 (TRAV1-2, TRAJ16)
CAVNRFSDGQKLLF

SEQ ID NO: 684974 - protein, 17 aa, Homo sapiens
  CDR3 for beta chain variable domain of TCR clone 342487 (TRBV13, TRBJ2-3)
CASSLSRVSGGRNTQYF

SEQ ID NO: 684975 - protein, 16 aa, Homo sapiens
  CDR3 for alpha chain variable domain of TCR clone 342488 (TRAV17, TRAJ52)
CATDPMGGTSYGKLTF

SEQ ID NO: 684976 - protein, 14 aa, Homo sapiens
  CDR3 for beta chain variable domain of TCR clone 342488 (TRBV7-8, TRBJ2-3)
CASSFKSSTDTQYF

SEQ ID NO: 684977 - protein, 15 aa, Homo sapiens
  CDR3 for alpha chain variable domain of TCR clone 342489 (TRAV17, TRAJ34)
CATDPRMVDTDKLIF

SEQ ID NO: 684978 - protein, 12 aa, Homo sapiens
  CDR3 for beta chain variable domain of TCR clone 342489 (TRBV7-2, TRBJ2-2)
CATQIVTGELFF

SEQ ID NO: 684979 - protein, 13 aa, Homo sapiens
  CDR3 for alpha chain variable domain of TCR clone 342490 (TRAV12-1, TRAJ6)
CVVFPGGSYIPTF

SEQ ID NO: 684980 - protein, 13 aa, Homo sapiens
  CDR3 for beta chain variable domain of TCR clone 342490 (TRBV7-8, TRBJ2-7)
CASSLTGGREQYF

SEQ ID NO: 684981 - protein, 15 aa, Homo sapiens
  CDR3 for alpha chain variable domain of TCR clone 342491 (TRAV8-4, TRAJ6)
CAVSAPSGGSYVPTF

SEQ ID NO: 684982 - protein, 14 aa, Homo sapiens
  CDR3 for beta chain variable domain of TCR clone 342491 (TRBV7-6, TRBJ2-3)
CASSLGTVTDTQYF

SEQ ID NO: 684983 - protein, 15 aa, Homo sapiens
  CDR3 for alpha chain variable domain of TCR clone 342492 (TRAV29/DV5, TRAJ24)
CAASGATDSWGKFQF

SEQ ID NO: 684984 - protein, 12 aa, Homo sapiens
  CDR3 for beta chain variable domain of TCR clone 342492 (TRBV11-2, TRBJ2-2)
CACSLPTGELFF

SEQ ID NO: 684985 - protein, 12 aa, Homo sapiens
  CDR3 for alpha chain variable domain of TCR clone 342493 (TRAV21, TRAJ11)
CAATSGYSTLTF

SEQ ID NO: 684986 - protein, 13 aa, Homo sapiens
  CDR3 for beta chain variable domain of TCR clone 342493 (TRBV7-2, TRBJ2-2)
CASSLAVTGELFF

SEQ ID NO: 684987 - protein, 14 aa, Homo sapiens
  CDR3 for alpha chain variable domain of TCR clone 342494 (TRAV4, TRAJ41)
CLVGDGDSGYALNF

SEQ ID NO: 684988 - protein, 14 aa, Homo sapiens
  CDR3 for beta chain variable domain of TCR clone 342494 (TRBV25-1, TRBJ1-1)
CASTPLGGNTEAFF

SEQ ID NO: 684989 - protein, 14 aa, Homo sapiens
  CDR3 for alpha chain variable domain of TCR clone 342495 (TRAV17, TRAJ45)
CATDARGGADGLTF

SEQ ID NO: 684990 - protein, 11 aa, Homo sapiens
  CDR3 for beta chain variable domain of TCR clone 342495 (TRBV28, TRBJ2-5)
CATGNQESQYF

SEQ ID NO: 684991 - protein, 14 aa, Homo sapiens
  CDR3 for alpha chain variable domain of TCR clone 342496 (TRAV12-2, TRAJ36)
CAVKISTGATNLFF

SEQ ID NO: 684992 - protein, 14 aa, Homo sapiens
  CDR3 for beta chain variable domain of TCR clone 342496 (TRBV25-1, TRBJ1-2)
CASSDTTGVVGYAF

SEQ ID NO: 684993 - protein, 13 aa, Homo sapiens
  CDR3 for alpha chain variable domain of TCR clone 342497 (TRAV14/DV4, TRAJ23)
CAMREVKGGKLSF

SEQ ID NO: 684994 - protein, 15 aa, Homo sapiens
  CDR3 for beta chain variable domain of TCR clone 342497 (TRBV6-3, TRBJ2-1)
CASSYASDSYNEQFF

SEQ ID NO: 684995 - protein, 14 aa, Homo sapiens
  CDR3 for alpha chain variable domain of TCR clone 342498 (TRAV1-2, TRAJ8)
CAVREDTGFQKLVF

SEQ ID NO: 684996 - protein, 13 aa, Homo sapiens
  CDR3 for beta chain variable domain of TCR clone 342498 (TRBV10-3, TRBJ2-5)
CAMTSGAGETQYF

SEQ ID NO: 684997 - protein, 16 aa, Homo sapiens
  CDR3 for alpha chain variable domain of TCR clone 342499 (TRAV3, TRAJ10)
CAVREMRAGGGNKLTF

SEQ ID NO: 684998 - protein, 13 aa, Homo sapiens
  CDR3 for beta chain variable domain of TCR clone 342499 (TRBV7-8, TRBJ2-3)
CASSLGRDRYAVF

SEQ ID NO: 684999 - protein, 16 aa, Homo sapiens
  CDR3 for alpha chain variable domain of TCR clone 342500 (TRAV30, TRAJ24)
CGTDIVDADSWGKFQF

SEQ ID NO: 685000 - protein, 13 aa, Homo sapiens
  CDR3 for beta chain variable domain of TCR clone 342500 (TRBV18, TRBJ1-2)
CASSASATEGYTF

SEQ ID NO: 685001 - protein, 15 aa, Homo sapiens
  CDR3 for alpha chain variable domain of TCR clone 342501 (TRAV26-1, TRAJ37)
CVVKTGSSNTGKLIF

SEQ ID NO: 685002 - protein, 12 aa, Homo sapiens
  CDR3 for beta chain variable domain of TCR clone 342501 (TRBV7-8, TRBJ2-7)
CASSLGDREQYF

SEQ ID NO: 685003 - protein, 17 aa, Homo sapiens
  CDR3 for alpha chain variable domain of TCR clone 342502 (TRAV13-1, TRAJ52)
CAASSGAGGTSYGKLTF

SEQ ID NO: 685004 - protein, 14 aa, Homo sapiens
  CDR3 for beta chain variable domain of TCR clone 342502 (TRBV9, TRBJ2-7)
CASSVGVGSYEQYF

SEQ ID NO: 685005 - protein, 13 aa, Homo sapiens
  CDR3 for alpha chain variable domain of TCR clone 342503 (TRAV21, TRAJ56)
CAVRPGANSKLTF

SEQ ID NO: 685006 - protein, 15 aa, Homo sapiens
  CDR3 for beta chain variable domain of TCR clone 342503 (TRBV7-9, TRBJ1-1)
CASSHRGTVNTEAFF

SEQ ID NO: 685007 - protein, 18 aa, Homo sapiens
  CDR3 for alpha chain variable domain of TCR clone 342504 (TRAV29/DV5, TRAJ52)
CAAGFRGVGGTSDGKLTF

SEQ ID NO: 685008 - protein, 17 aa, Homo sapiens
  CDR3 for beta chain variable domain of TCR clone 342504 (TRBV20-1, TRBJ2-3)
CSARSAGLAGVTDTQYF

SEQ ID NO: 685009 - protein, 11 aa, Homo sapiens
  CDR3 for alpha chain variable domain of TCR clone 342505 (TRAV21, TRAJ7)
CAAYGNNRLAF

SEQ ID NO: 685010 - protein, 14 aa, Homo sapiens
  CDR3 for beta chain variable domain of TCR clone 342505 (TRBV4-1, TRBJ2-7)
CARSRTGVAFEQYF

SEQ ID NO: 685011 - protein, 12 aa, Homo sapiens
  CDR3 for alpha chain variable domain of TCR clone 342506 (TRAV26-1, TRAJ13)
CIVSRGYQKVTF

SEQ ID NO: 685012 - protein, 13 aa, Homo sapiens
  CDR3 for beta chain variable domain of TCR clone 342506 (TRBV7-3, TRBJ1-1)
CASSQDWGAEAFF

SEQ ID NO: 685013 - protein, 12 aa, Homo sapiens
  CDR3 for alpha chain variable domain of TCR clone 342507 (TRAV8-3, TRAJ20)
CAVGANDYKLSF

SEQ ID NO: 685014 - protein, 15 aa, Homo sapiens
  CDR3 for beta chain variable domain of TCR clone 342507 (TRBV20-1, TRBJ2-7)
CSARKGLAESYEQYF

SEQ ID NO: 685015 - protein, 15 aa, Homo sapiens
  CDR3 for alpha chain variable domain of TCR clone 342508 (TRAV29/DV5, TRAJ53)
CAASASGGSNYKLTF

SEQ ID NO: 685016 - protein, 19 aa, Homo sapiens
  CDR3 for beta chain variable domain of TCR clone 342508 (TRBV5-1, TRBJ2-3)
CASSLWLAGGITTTDTQYY

SEQ ID NO: 685017 - protein, 12 aa, Homo sapiens
  CDR3 for alpha chain variable domain of TCR clone 342509 (TRAV27, TRAJ35)
CAGADFGNVLHC

SEQ ID NO: 685018 - protein, 15 aa, Homo sapiens
  CDR3 for beta chain variable domain of TCR clone 342509 (TRBV11-2, TRBJ2-1)
CASSLGPDSYNEQFF

SEQ ID NO: 685019 - protein, 16 aa, Homo sapiens
  CDR3 for alpha chain variable domain of TCR clone 342510 (TRAV21, TRAJ17)
CAVRPGEEAAGNQLTF

SEQ ID NO: 685020 - protein, 16 aa, Homo sapiens
  CDR3 for beta chain variable domain of TCR clone 342510 (TRBV4-2, TRBJ1-2)
CASSQAGTKANYGYTF

SEQ ID NO: 685021 - protein, 15 aa, Homo sapiens
  CDR3 for alpha chain variable domain of TCR clone 342511 (TRAV25, TRAJ53)
CAATGGGGSNYKLTF

SEQ ID NO: 685022 - protein, 16 aa, Homo sapiens
  CDR3 for beta chain variable domain of TCR clone 342511 (TRBV7-9, TRBJ1-2)
CASSLGFSSGEDGYTL

SEQ ID NO: 685023 - protein, 13 aa, Homo sapiens
  CDR3 for alpha chain variable domain of TCR clone 342512 (TRAV17, TRAJ24)
CATSFDSWGKFQF

SEQ ID NO: 685024 - protein, 12 aa, Homo sapiens
  CDR3 for beta chain variable domain of TCR clone 342512 (TRBV14, TRBJ2-7)
CASSRLKGEQYF

SEQ ID NO: 685025 - protein, 12 aa, Homo sapiens
  CDR3 for alpha chain variable domain of TCR clone 342513 (TRAV26-1, TRAJ26)
CIVFIYGQNFVF

SEQ ID NO: 685026 - protein, 15 aa, Homo sapiens
  CDR3 for beta chain variable domain of TCR clone 342513 (TRBV7-8, TRBJ2-1)
CASSLADSLYNEQFF

SEQ ID NO: 685027 - protein, 12 aa, Homo sapiens
  CDR3 for alpha chain variable domain of TCR clone 342514 (TRAV1-2, TRAJ33)
CAALDSNYQLIW

SEQ ID NO: 685028 - protein, 15 aa, Homo sapiens
  CDR3 for beta chain variable domain of TCR clone 342514 (TRBV19, TRBJ2-5)
CASSQLHGAGETQYF

SEQ ID NO: 685029 - protein, 13 aa, Homo sapiens
  CDR3 for alpha chain variable domain of TCR clone 342515 (TRAV13-1, TRAJ20)
CAAGVSNDYKLSF

SEQ ID NO: 685030 - protein, 12 aa, Homo sapiens
  CDR3 for beta chain variable domain of TCR clone 342515 (TRBV20-1, TRBJ2-1)
CSARLGTDEQFF

SEQ ID NO: 685031 - protein, 12 aa, Homo sapiens
  CDR3 for alpha chain variable domain of TCR clone 342516 (TRAV12-2, TRAJ52)
IGGGTSYGKLTF

SEQ ID NO: 685032 - protein, 13 aa, Homo sapiens
  CDR3 for beta chain variable domain of TCR clone 342516 (TRBV29-1, TRBJ2-7)
CSVKRGGNYEQYF

SEQ ID NO: 685033 - protein, 19 aa, Homo sapiens
  CDR3 for alpha chain variable domain of TCR clone 342517 (TRAV12-1, TRAJ42)
SVVQPPTSVKGGSQGNPIF

SEQ ID NO: 685034 - protein, 18 aa, Homo sapiens
  CDR3 for beta chain variable domain of TCR clone 342517 (TRBV11-2, TRBJ2-3)
CASSLGGASRGAPNTQYF

SEQ ID NO: 685035 - protein, 13 aa, Homo sapiens
  CDR3 for alpha chain variable domain of TCR clone 342518 (TRAV16, TRAJ34)
CITVLSHTDKLIF

SEQ ID NO: 685036 - protein, 13 aa, Homo sapiens
  CDR3 for beta chain variable domain of TCR clone 342518 (TRBV7-9, TRBJ2-7)
CASSFAGAYEQYF

SEQ ID NO: 685037 - protein, 13 aa, Homo sapiens
  CDR3 for alpha chain variable domain of TCR clone 342519 (TRAV21, TRAJ27)
CAALNTNAGKSTF

SEQ ID NO: 685038 - protein, 16 aa, Homo sapiens
  CDR3 for beta chain variable domain of TCR clone 342519 (TRBV19, TRBJ2-3)
CASSSIAGTRTDTQYF

SEQ ID NO: 685039 - protein, 17 aa, Homo sapiens
  CDR3 for alpha chain variable domain of TCR clone 342520 (TRAV13-1, TRAJ28)
CAAIPPYSGAGSYQPTF

SEQ ID NO: 685040 - protein, 14 aa, Homo sapiens
  CDR3 for beta chain variable domain of TCR clone 342520 (TRBV11-2, TRBJ2-7)
CASSLGAGAYEQYF

SEQ ID NO: 685041 - protein, 13 aa, Homo sapiens
  CDR3 for alpha chain variable domain of TCR clone 342521 (TRAV3, TRAJ21)
CAVREPDFNKFYF

SEQ ID NO: 685042 - protein, 18 aa, Homo sapiens
  CDR3 for beta chain variable domain of TCR clone 342521 (TRBV20-1, TRBJ2-6)
CSADTTPTHGSGANVLTF

SEQ ID NO: 685043 - protein, 12 aa, Homo sapiens
  CDR3 for alpha chain variable domain of TCR clone 342522 (TRAV12-3, TRAJ17)
CAMTLTGNKLTF

SEQ ID NO: 685044 - protein, 17 aa, Homo sapiens
  CDR3 for beta chain variable domain of TCR clone 342522 (TRBV7-6, TRBJ2-5)
CASSPGLADPRGETQYF

SEQ ID NO: 685045 - protein, 16 aa, Homo sapiens
  CDR3 for alpha chain variable domain of TCR clone 342523 (TRAV3, TRAJ23)
CAVKIGIYNQGGKLIF

SEQ ID NO: 685046 - protein, 14 aa, Homo sapiens
  CDR3 for beta chain variable domain of TCR clone 342523 (TRBV4-1, TRBJ2-2)
CASSQAVNTGELFF

SEQ ID NO: 685047 - protein, 16 aa, Homo sapiens
  CDR3 for alpha chain variable domain of TCR clone 342524 (TRAV3, TRAJ21)
CAVRDIERGNFNKFYF

SEQ ID NO: 685048 - protein, 11 aa, Homo sapiens
  CDR3 for beta chain variable domain of TCR clone 342524 (TRBV11-3, TRBJ2-1)
CASSLGNEQFF

SEQ ID NO: 685049 - protein, 17 aa, Homo sapiens
  CDR3 for alpha chain variable domain of TCR clone 342525 (TRAV12-1, TRAJ13)
CVVNKRGEFWGLPESYL

SEQ ID NO: 685050 - protein, 12 aa, Homo sapiens
  CDR3 for beta chain variable domain of TCR clone 342525 (TRBV7-9, TRBJ2-7)
CASSIKREEQYF

SEQ ID NO: 685051 - protein, 14 aa, Homo sapiens
  CDR3 for alpha chain variable domain of TCR clone 342526 (TRAV12-2, TRAJ40)
CAVKIPSGTYKYSF

SEQ ID NO: 685052 - protein, 17 aa, Homo sapiens
  CDR3 for beta chain variable domain of TCR clone 342526 (TRBV13, TRBJ2-3)
CASSLSRVAGGRNTQYF

SEQ ID NO: 685053 - protein, 15 aa, Homo sapiens
  CDR3 for alpha chain variable domain of TCR clone 342527 (TRAV3, TRAJ5)
CAVRDLDTGRGALTF

SEQ ID NO: 685054 - protein, 13 aa, Homo sapiens
  CDR3 for beta chain variable domain of TCR clone 342527 (TRBV12-4, TRBJ2-7)
CASSPTETYEQHF

SEQ ID NO: 685055 - protein, 14 aa, Homo sapiens
  CDR3 for alpha chain variable domain of TCR clone 342528 (TRAV4, TRAJ26)
CLVGGQGYGQNFVF

SEQ ID NO: 685056 - protein, 16 aa, Homo sapiens
  CDR3 for beta chain variable domain of TCR clone 342528 (TRBV2, TRBJ2-1)
CASSVGGSLSYNEQFF

SEQ ID NO: 685057 - protein, 12 aa, Homo sapiens
  CDR3 for alpha chain variable domain of TCR clone 342529 (TRAV8-6, TRAJ11)
CAVSSGYSTLTV

SEQ ID NO: 685058 - protein, 11 aa, Homo sapiens
  CDR3 for beta chain variable domain of TCR clone 342529 (TRBV20-1, TRBJ1-5)
CSAQGDQPQHF

SEQ ID NO: 685059 - protein, 16 aa, Homo sapiens
  CDR3 for alpha chain variable domain of TCR clone 342530 (TRAV21, TRAJ52)
CAVTNAGGTSHGKLTF

SEQ ID NO: 685060 - protein, 13 aa, Homo sapiens
  CDR3 for beta chain variable domain of TCR clone 342530 (TRBV20-1, TRBJ2-3)
CSARLAGADTQYF

SEQ ID NO: 685061 - protein, 13 aa, Homo sapiens
  CDR3 for alpha chain variable domain of TCR clone 342531 (TRAV14/DV4, TRAJ4)
CAMKASGYNKLIF

SEQ ID NO: 685062 - protein, 15 aa, Homo sapiens
  CDR3 for beta chain variable domain of TCR clone 342531 (TRBV11-3, TRBJ1-1)
CASSLGGPGDTEAFF

SEQ ID NO: 685063 - protein, 12 aa, Homo sapiens
  CDR3 for alpha chain variable domain of TCR clone 342532 (TRAV30, TRAJ39)
CGRGNAGNMLTS

SEQ ID NO: 685064 - protein, 15 aa, Homo sapiens
  CDR3 for beta chain variable domain of TCR clone 342532 (TRBV5-1, TRBJ1-1)
CASSWTGRGNTEAFF

SEQ ID NO: 685065 - protein, 14 aa, Homo sapiens
  CDR3 for alpha chain variable domain of TCR clone 342533 (TRAV1-2, TRAJ16)
CAVNRFSGGQKLLF

SEQ ID NO: 685066 - protein, 17 aa, Homo sapiens
  CDR3 for beta chain variable domain of TCR clone 342533 (TRBV20-1, TRBJ2-1)
CSASSSGLAGSYNEQFF

SEQ ID NO: 685067 - protein, 13 aa, Homo sapiens
  CDR3 for alpha chain variable domain of TCR clone 342534 (TRAV38-1, TRAJ49)
CAFMKYTGNQFYF

SEQ ID NO: 685068 - protein, 19 aa, Homo sapiens
  CDR3 for beta chain variable domain of TCR clone 342534 (TRBV28, TRBJ2-7)
CASSYSGTSRLGWVYEQYF

SEQ ID NO: 685069 - protein, 14 aa, Homo sapiens
  CDR3 for alpha chain variable domain of TCR clone 342535 (TRAV1-2, TRAJ6)
CAVRSSGGSYIPTF

SEQ ID NO: 685070 - protein, 14 aa, Homo sapiens
  CDR3 for beta chain variable domain of TCR clone 342535 (TRBV5-1, TRBJ1-2)
CASSLEPVNYGYTF

SEQ ID NO: 685071 - protein, 14 aa, Homo sapiens
  CDR3 for alpha chain variable domain of TCR clone 342536 (TRAV8-1, TRAJ32)
CSVNARGATNKLIF

SEQ ID NO: 685072 - protein, 14 aa, Homo sapiens
  CDR3 for beta chain variable domain of TCR clone 342536 (TRBV9, TRBJ2-7)
CASSVGVGSYEQYF

SEQ ID NO: 685073 - protein, 14 aa, Homo sapiens
  CDR3 for alpha chain variable domain of TCR clone 342537 (TRAV26-1, TRAJ39)
CIVFTNTAGNMLTF

SEQ ID NO: 685074 - protein, 15 aa, Homo sapiens
  CDR3 for beta chain variable domain of TCR clone 342537 (TRBV19, TRBJ2-4)
CASSLTGLTKNIQYF

SEQ ID NO: 685075 - protein, 13 aa, Homo sapiens
  CDR3 for alpha chain variable domain of TCR clone 342538 (TRAV36/DV7, TRAJ37)
CAVFSSNTGKLIF

SEQ ID NO: 685076 - protein, 11 aa, Homo sapiens
  CDR3 for beta chain variable domain of TCR clone 342538 (TRBV29-1, TRBJ2-5)
CSVASGETQYF

SEQ ID NO: 685077 - protein, 14 aa, Homo sapiens
  CDR3 for alpha chain variable domain of TCR clone 342539 (TRAV17, TRAJ22)
CATSPSGSARQLTF

SEQ ID NO: 685078 - protein, 13 aa, Homo sapiens
  CDR3 for beta chain variable domain of TCR clone 342539 (TRBV12-4, TRBJ1-2)
CASSLRQEKGYTF

SEQ ID NO: 685079 - protein, 10 aa, Homo sapiens
  CDR3 for alpha chain variable domain of TCR clone 342540 (TRAV23/DV6, TRAJ22)
CAASSRGSRF

SEQ ID NO: 685080 - protein, 13 aa, Homo sapiens
  CDR3 for beta chain variable domain of TCR clone 342540 (TRBV20-1, TRBJ1-1)
CSARGGGNTEAFF

SEQ ID NO: 685081 - protein, 12 aa, Homo sapiens
  CDR3 for alpha chain variable domain of TCR clone 342541 (TRAV13-1, TRAJ15)
RAASQAGTALIF

SEQ ID NO: 685082 - protein, 14 aa, Homo sapiens
  CDR3 for beta chain variable domain of TCR clone 342541 (TRBV19, TRBJ2-2)
CASSTLHRSGELFF

SEQ ID NO: 685083 - protein, 15 aa, Homo sapiens
  CDR3 for alpha chain variable domain of TCR clone 342542 (TRAV26-1, TRAJ29)
CIVRVEGAGNTPLVF

SEQ ID NO: 685084 - protein, 18 aa, Homo sapiens
  CDR3 for beta chain variable domain of TCR clone 342542 (TRBV12-4, TRBJ1-1)
CASSKTGLWRTLKLSLDK

SEQ ID NO: 685085 - protein, 17 aa, Homo sapiens
  CDR3 for alpha chain variable domain of TCR clone 342543 (TRAV13-1, TRAJ52)
CAAGRNAGGTSYGKLTF

SEQ ID NO: 685086 - protein, 16 aa, Homo sapiens
  CDR3 for beta chain variable domain of TCR clone 342543 (TRBV5-4, TRBJ2-3)
CASQQPGAGGADTQYF

SEQ ID NO: 685087 - protein, 17 aa, Homo sapiens
  CDR3 for alpha chain variable domain of TCR clone 342544 (TRAV3, TRAJ12)
CAVRDGGRMDSSYNLIF

SEQ ID NO: 685088 - protein, 13 aa, Homo sapiens
  CDR3 for beta chain variable domain of TCR clone 342544 (TRBV20-1, TRBJ1-1)
CSAPLGGGTEAFF

SEQ ID NO: 685089 - protein, 16 aa, Homo sapiens
  CDR3 for alpha chain variable domain of TCR clone 342545 (TRAV8-2, TRAJ7)
CVVSEGPYYGNNRLAC

SEQ ID NO: 685090 - protein, 13 aa, Homo sapiens
  CDR3 for beta chain variable domain of TCR clone 342545 (TRBV19, TRBJ2-1)
CASSMYRVNEQFF

SEQ ID NO: 685091 - protein, 17 aa, Homo sapiens
  CDR3 for alpha chain variable domain of TCR clone 342546 (TRAV26-1, TRAJ47)
CIVPSLLYMEYGNKLVF

SEQ ID NO: 685092 - protein, 14 aa, Homo sapiens
  CDR3 for beta chain variable domain of TCR clone 342546 (TRBV4-1, TRBJ2-2)
CASSQAVNTGELFF

SEQ ID NO: 685093 - protein, 15 aa, Homo sapiens
  CDR3 for alpha chain variable domain of TCR clone 342547 (TRAV3, TRAJ22)
CAVRDRGGAARQLTF

SEQ ID NO: 685094 - protein, 12 aa, Homo sapiens
  CDR3 for beta chain variable domain of TCR clone 342547 (TRBV7-8, TRBJ2-1)
CASSLGHNEQFF

SEQ ID NO: 685095 - protein, 15 aa, Homo sapiens
  CDR3 for alpha chain variable domain of TCR clone 342548 (TRAV17, TRAJ23)
CATDAEDNQGGKLIF

SEQ ID NO: 685096 - protein, 16 aa, Homo sapiens
  CDR3 for beta chain variable domain of TCR clone 342548 (TRBV27, TRBJ2-2)
CASSSSGVSNTGELFF

SEQ ID NO: 685097 - protein, 13 aa, Homo sapiens
  CDR3 for alpha chain variable domain of TCR clone 342549 (TRAV1-2, TRAJ9)
CAALNTGGFKTIF

SEQ ID NO: 685098 - protein, 15 aa, Homo sapiens
  CDR3 for beta chain variable domain of TCR clone 342549 (TRBV2, TRBJ2-2)
CASSRETVGTGELFF

SEQ ID NO: 685099 - protein, 13 aa, Homo sapiens
  CDR3 for alpha chain variable domain of TCR clone 342550 (TRAV8-6, TRAJ49)
CAVITNTGNQFYF

SEQ ID NO: 685100 - protein, 20 aa, Homo sapiens
  CDR3 for beta chain variable domain of TCR clone 342550 (TRBV7-8, TRBJ2-2)
CASSHLFPGPTIHIAGELFF

SEQ ID NO: 685101 - protein, 20 aa, Homo sapiens
  CDR3 for alpha chain variable domain of TCR clone 342551 (TRAV26-1, TRAJ42)
CCVLLHRQTYYGGSQGNLMF

SEQ ID NO: 685102 - protein, 16 aa, Homo sapiens
  CDR3 for beta chain variable domain of TCR clone 342551 (TRBV7-3, TRBJ2-2)
CASSLKRGTLSGELFF

SEQ ID NO: 685103 - protein, 12 aa, Homo sapiens
  CDR3 for alpha chain variable domain of TCR clone 342552 (TRAV12-3, TRAJ40)
CAMSSGTYKYIF

SEQ ID NO: 685104 - protein, 15 aa, Homo sapiens
  CDR3 for beta chain variable domain of TCR clone 342552 (TRBV4-3, TRBJ2-3)
CASSPSLLSTDTQYF

SEQ ID NO: 685105 - protein, 14 aa, Homo sapiens
  CDR3 for alpha chain variable domain of TCR clone 342553 (TRAV4, TRAJ26)
CLVGPHNYGQNFVF

SEQ ID NO: 685106 - protein, 17 aa, Homo sapiens
  CDR3 for beta chain variable domain of TCR clone 342553 (TRBV20-1, TRBJ2-1)
CSASSSGLAGSYNEKFF

SEQ ID NO: 685107 - protein, 13 aa, Homo sapiens
  CDR3 for alpha chain variable domain of TCR clone 342554 (TRAV2, TRAJ33)
CAVEDGSNYQLIW

SEQ ID NO: 685108 - protein, 15 aa, Homo sapiens
  CDR3 for beta chain variable domain of TCR clone 342554 (TRBV20-1, TRBJ2-7)
CSARDRVSGMDEQYF

SEQ ID NO: 685109 - protein, 15 aa, Homo sapiens
  CDR3 for alpha chain variable domain of TCR clone 342555 (TRAV1-1, TRAJ23)
CAVREGDNQGGKLIF

SEQ ID NO: 685110 - protein, 15 aa, Homo sapiens
  CDR3 for beta chain variable domain of TCR clone 342555 (TRBV11-2, TRBJ2-1)
CASSKNRGLIYEQFF

SEQ ID NO: 685111 - protein, 13 aa, Homo sapiens
  CDR3 for alpha chain variable domain of TCR clone 342556 (TRAV13-2, TRAJ8)
CAFMNTGFQKLVF

SEQ ID NO: 685112 - protein, 17 aa, Homo sapiens
  CDR3 for beta chain variable domain of TCR clone 342556 (TRBV28, TRBJ2-1)
CASSSARQALTYNDQFF

SEQ ID NO: 685113 - protein, 11 aa, Homo sapiens
  CDR3 for alpha chain variable domain of TCR clone 342557 (TRAV2, TRAJ13)
CASGGYQKATF

SEQ ID NO: 685114 - protein, 15 aa, Homo sapiens
  CDR3 for beta chain variable domain of TCR clone 342557 (TRBV6-1, TRBJ2-2)
CASSRLRGDTGELFF

SEQ ID NO: 685115 - protein, 18 aa, Homo sapiens
  CDR3 for alpha chain variable domain of TCR clone 342558 (TRAV12-3, TRAJ52)
CAMSRTNAGGTSYGKLTF

SEQ ID NO: 685116 - protein, 15 aa, Homo sapiens
  CDR3 for beta chain variable domain of TCR clone 342558 (TRBV28, TRBJ2-1)
CASSIIAGGRSEQFF

SEQ ID NO: 685117 - protein, 13 aa, Homo sapiens
  CDR3 for alpha chain variable domain of TCR clone 342559 (TRAV8-4, TRAJ48)
CAVSLFGNEKLTF

SEQ ID NO: 685118 - protein, 15 aa, Homo sapiens
  CDR3 for beta chain variable domain of TCR clone 342559 (TRBV20-1, TRBJ2-7)
CTARKGLAESYEQYF

SEQ ID NO: 685119 - protein, 15 aa, Homo sapiens
  CDR3 for alpha chain variable domain of TCR clone 342560 (TRAV8-3, TRAJ45)
CASSYSGGGADGLNF

SEQ ID NO: 685120 - protein, 13 aa, Homo sapiens
  CDR3 for beta chain variable domain of TCR clone 342560 (TRBV28, TRBJ2-7)
CASSLGGAYEQYF

SEQ ID NO: 685121 - protein, 14 aa, Homo sapiens
  CDR3 for alpha chain variable domain of TCR clone 342561 (TRAV12-2, TRAJ13)
CAVKKTGGYQKVTF

SEQ ID NO: 685122 - protein, 15 aa, Homo sapiens
  CDR3 for beta chain variable domain of TCR clone 342561 (TRBV6-5, TRBJ1-2)
CASSYSQAFNYGYTF

SEQ ID NO: 685123 - protein, 16 aa, Homo sapiens
  CDR3 for alpha chain variable domain of TCR clone 342562 (TRAV26-2, TRAJ45)
CTTASPIGGGADGLTF

SEQ ID NO: 685124 - protein, 15 aa, Homo sapiens
  CDR3 for beta chain variable domain of TCR clone 342562 (TRBV20-1, TRBJ2-7)
CSARRDRGSSYEQYF

SEQ ID NO: 685125 - protein, 11 aa, Homo sapiens
  CDR3 for alpha chain variable domain of TCR clone 342563 (TRAV21, TRAJ34)
CAHYNADKLIF

SEQ ID NO: 685126 - protein, 13 aa, Homo sapiens
  CDR3 for beta chain variable domain of TCR clone 342563 (TRBV7-6, TRBJ1-2)
CASSLVADYSYTF

SEQ ID NO: 685127 - protein, 15 aa, Homo sapiens
  CDR3 for alpha chain variable domain of TCR clone 342564 (TRAV29/DV5, TRAJ24)
CAASGATDSWGKFRL

SEQ ID NO: 685128 - protein, 12 aa, Homo sapiens
  CDR3 for beta chain variable domain of TCR clone 342564 (TRBV11-2, TRBJ2-2)
CASSLPTGELFF

SEQ ID NO: 685129 - protein, 11 aa, Homo sapiens
  CDR3 for alpha chain variable domain of TCR clone 342565 (TRAV1-1, TRAJ23)
CAVRQGGKLIF

SEQ ID NO: 685130 - protein, 20 aa, Homo sapiens
  CDR3 for beta chain variable domain of TCR clone 342565 (TRBV7-8, TRBJ2-2)
CASSHLFPGPTVHTTGELFF

SEQ ID NO: 685131 - protein, 13 aa, Homo sapiens
  CDR3 for alpha chain variable domain of TCR clone 342566 (TRAV17, TRAJ39)
CATDYGAGNMLTF

SEQ ID NO: 685132 - protein, 13 aa, Homo sapiens
  CDR3 for beta chain variable domain of TCR clone 342566 (TRBV11-2, TRBJ2-7)
CASSGTRPYEQYF

SEQ ID NO: 685133 - protein, 10 aa, Homo sapiens
  CDR3 for alpha chain variable domain of TCR clone 342567 (TRAV27, TRAJ43)
CAGANNDMRF

SEQ ID NO: 685134 - protein, 16 aa, Homo sapiens
  CDR3 for beta chain variable domain of TCR clone 342567 (TRBV20-1, TRBJ2-2)
CSASASGIPGAGELFF

SEQ ID NO: 685135 - protein, 12 aa, Homo sapiens
  CDR3 for alpha chain variable domain of TCR clone 342568 (TRAV23/DV6, TRAJ17)
CARGSCRQQANF

SEQ ID NO: 685136 - protein, 14 aa, Homo sapiens
  CDR3 for beta chain variable domain of TCR clone 342568 (TRBV7-2, TRBJ1-2)
CASSQAGSTYGYTF

SEQ ID NO: 685137 - protein, 14 aa, Homo sapiens
  CDR3 for alpha chain variable domain of TCR clone 342569 (TRAV22, TRAJ6)
CAGVGPGGSYIPTF

SEQ ID NO: 685138 - protein, 14 aa, Homo sapiens
  CDR3 for beta chain variable domain of TCR clone 342569 (TRBV6-1, TRBJ1-3)
CASVQGGGGNTIYF

SEQ ID NO: 685139 - protein, 14 aa, Homo sapiens
  CDR3 for alpha chain variable domain of TCR clone 342570 (TRAV1-2, TRAJ29)
CAVRELTSATPLVF

SEQ ID NO: 685140 - protein, 14 aa, Homo sapiens
  CDR3 for beta chain variable domain of TCR clone 342570 (TRBV7-9, TRBJ2-1)
CASSPRDSLYEQFF

SEQ ID NO: 685141 - protein, 15 aa, Homo sapiens
  CDR3 for alpha chain variable domain of TCR clone 342571 (TRAV34, TRAJ38)
CGADFTPGNNRKLIW

SEQ ID NO: 685142 - protein, 14 aa, Homo sapiens
  CDR3 for beta chain variable domain of TCR clone 342571 (TRBV28, TRBJ1-5)
CASSLFPGVQPQHF

SEQ ID NO: 685143 - protein, 13 aa, Homo sapiens
  CDR3 for alpha chain variable domain of TCR clone 342572 (TRAV13-1, TRAJ5)
CAASDTGGRELTF

SEQ ID NO: 685144 - protein, 12 aa, Homo sapiens
  CDR3 for beta chain variable domain of TCR clone 342572 (TRBV28, TRBJ2-3)
CASSLYRDTQYF

SEQ ID NO: 685145 - protein, 14 aa, Homo sapiens
  CDR3 for alpha chain variable domain of TCR clone 342573 (TRAV2, TRAJ9)
CAVEDRGGGFKTIF

SEQ ID NO: 685146 - protein, 14 aa, Homo sapiens
  CDR3 for beta chain variable domain of TCR clone 342573 (TRBV19, TRBJ2-7)
CASSMGQGAIEQYF

SEQ ID NO: 685147 - protein, 16 aa, Homo sapiens
  CDR3 for alpha chain variable domain of TCR clone 342574 (TRAV16, TRAJ42)
CARKMNYGGGQGNLIF

SEQ ID NO: 685148 - protein, 13 aa, Homo sapiens
  CDR3 for beta chain variable domain of TCR clone 342574 (TRBV20-1, TRBJ2-7)
CSASPPSSYEQYF

SEQ ID NO: 685149 - protein, 14 aa, Homo sapiens
  CDR3 for alpha chain variable domain of TCR clone 342575 (TRAV2, TRAJ9)
CAVEDRSGAFKTIF

SEQ ID NO: 685150 - protein, 12 aa, Homo sapiens
  CDR3 for beta chain variable domain of TCR clone 342575 (TRBV11-2, TRBJ2-1)
CASSPGNNEQFF

SEQ ID NO: 685151 - protein, 14 aa, Homo sapiens
  CDR3 for alpha chain variable domain of TCR clone 342576 (TRAV1-2, TRAJ16)
CAVNRFSDGQKLLF

SEQ ID NO: 685152 - protein, 17 aa, Homo sapiens
  CDR3 for beta chain variable domain of TCR clone 342576 (TRBV7-3, TRBJ2-3)
CASSLMKRMRGEDTQYF

SEQ ID NO: 685153 - protein, 14 aa, Homo sapiens
  CDR3 for alpha chain variable domain of TCR clone 342577 (TRAV35, TRAJ33)
CAGSSQDSNYQLIW

SEQ ID NO: 685154 - protein, 17 aa, Homo sapiens
  CDR3 for beta chain variable domain of TCR clone 342577 (TRBV7-3, TRBJ2-3)
CASSLMKRMRGADTQYF

SEQ ID NO: 685155 - protein, 15 aa, Homo sapiens
  CDR3 for alpha chain variable domain of TCR clone 342578 (TRAV13-1, TRAJ52)
CAATSPRTSYGKLTF

SEQ ID NO: 685156 - protein, 16 aa, Homo sapiens
  CDR3 for beta chain variable domain of TCR clone 342578 (TRBV7-3, TRBJ2-2)
CASSFKRGTLSGELFF

SEQ ID NO: 685157 - protein, 18 aa, Homo sapiens
  CDR3 for alpha chain variable domain of TCR clone 342579 (TRAV36/DV7, )
CALTYIHNPDPAVYQLRD

SEQ ID NO: 685158 - protein, 13 aa, Homo sapiens
  CDR3 for beta chain variable domain of TCR clone 342579 (TRBV4-1, TRBJ2-7)
CASSQGQAYEQYF

SEQ ID NO: 685159 - protein, 12 aa, Homo sapiens
  CDR3 for alpha chain variable domain of TCR clone 342580 (TRAV3, TRAJ31)
CAAQRANARLMF

SEQ ID NO: 685160 - protein, 14 aa, Homo sapiens
  CDR3 for beta chain variable domain of TCR clone 342580 (TRBV19, TRBJ1-1)
CASRRFAGVTEAFF

SEQ ID NO: 685161 - protein, 14 aa, Homo sapiens
  CDR3 for alpha chain variable domain of TCR clone 342581 (TRAV23/DV6, TRAJ4)
FAANLSGGYNKLIF

SEQ ID NO: 685162 - protein, 17 aa, Homo sapiens
  CDR3 for beta chain variable domain of TCR clone 342581 (TRBV4-1, TRBJ1-3)
CASSPQRGIRFGNTIYL

SEQ ID NO: 685163 - protein, 15 aa, Homo sapiens
  CDR3 for alpha chain variable domain of TCR clone 342582 (TRAV26-1, TRAJ40)
CIVRVTTSGTYKYIF

SEQ ID NO: 685164 - protein, 12 aa, Homo sapiens
  CDR3 for beta chain variable domain of TCR clone 342582 (TRBV7-9, TRBJ1-4)
SASSTDREKLFF

SEQ ID NO: 685165 - protein, 12 aa, Homo sapiens
  CDR3 for alpha chain variable domain of TCR clone 342583 (TRAV1-1, TRAJ30)
CAVRGRDDKIIF

SEQ ID NO: 685166 - protein, 13 aa, Homo sapiens
  CDR3 for beta chain variable domain of TCR clone 342583 (TRBV11-3, TRBJ2-7)
CASILDKLYEQYF

SEQ ID NO: 685167 - protein, 15 aa, Homo sapiens
  CDR3 for alpha chain variable domain of TCR clone 342584 (TRAV27, TRAJ53)
CRAINSRGSNYKLTF

SEQ ID NO: 685168 - protein, 14 aa, Homo sapiens
  CDR3 for beta chain variable domain of TCR clone 342584 (TRBV7-3, TRBJ2-1)
CASSLAGGTNEQFF

SEQ ID NO: 685169 - protein, 16 aa, Homo sapiens
  CDR3 for alpha chain variable domain of TCR clone 342585 (TRAV38-2/DV8, TRAJ10)
CAYRSLLGGGGNKLTF

SEQ ID NO: 685170 - protein, 17 aa, Homo sapiens
  CDR3 for beta chain variable domain of TCR clone 342585 (TRBV6-6, TRBJ2-2)
CASSYYPQGATTGELFF

SEQ ID NO: 685171 - protein, 13 aa, Homo sapiens
  CDR3 for alpha chain variable domain of TCR clone 342586 (TRAV8-3, TRAJ43)
CAVGPYNNNDMRF

SEQ ID NO: 685172 - protein, 17 aa, Homo sapiens
  CDR3 for beta chain variable domain of TCR clone 342586 (TRBV7-7, TRBJ1-1)
CASIGDRPNLGVTEAFF

SEQ ID NO: 685173 - protein, 16 aa, Homo sapiens
  CDR3 for alpha chain variable domain of TCR clone 342587 (TRAV26-1, TRAJ37)
CIYARHGSSNTGKLLF

SEQ ID NO: 685174 - protein, 16 aa, Homo sapiens
  CDR3 for beta chain variable domain of TCR clone 342587 (TRBV19, TRBJ2-4)
CATGGLAGGTKNIQYF

SEQ ID NO: 685175 - protein, 14 aa, Homo sapiens
  CDR3 for alpha chain variable domain of TCR clone 342588 (TRAV26-1, TRAJ38)
CIADNAGNNRKPIW

SEQ ID NO: 685176 - protein, 13 aa, Homo sapiens
  CDR3 for beta chain variable domain of TCR clone 342588 (TRBV20-1, TRBJ1-1)
CSDRGGGNTEAFF

SEQ ID NO: 685177 - protein, 14 aa, Homo sapiens
  CDR3 for alpha chain variable domain of TCR clone 342589 (TRAV12-3, TRAJ56)
CAMSVTGANSKLTF

SEQ ID NO: 685178 - protein, 17 aa, Homo sapiens
  CDR3 for beta chain variable domain of TCR clone 342589 (TRBV20-1, TRBJ2-3)
CSASRRGRGGNADTQYF

SEQ ID NO: 685179 - protein, 14 aa, Homo sapiens
  CDR3 for alpha chain variable domain of TCR clone 342590 (TRAV12-2, TRAJ44)
CAVNPAGTASKLTF

SEQ ID NO: 685180 - protein, 13 aa, Homo sapiens
  CDR3 for beta chain variable domain of TCR clone 342590 (TRBV28, TRBJ2-2)
CASIREGTGELFF

SEQ ID NO: 685181 - protein, 11 aa, Homo sapiens
  CDR3 for alpha chain variable domain of TCR clone 342591 (TRAV1-2, TRAJ20)
CAVANDYKLSF

SEQ ID NO: 685182 - protein, 15 aa, Homo sapiens
  CDR3 for beta chain variable domain of TCR clone 342591 (TRBV6-1, TRBJ2-5)
CASSEGWGIQETQYF

SEQ ID NO: 685183 - protein, 14 aa, Homo sapiens
  CDR3 for alpha chain variable domain of TCR clone 342592 (TRAV38-1, TRAJ48)
CAFMANFGNEKLTF

SEQ ID NO: 685184 - protein, 12 aa, Homo sapiens
  CDR3 for beta chain variable domain of TCR clone 342592 (TRBV11-2, TRBJ2-2)
CASSLGGGELFF

SEQ ID NO: 685185 - protein, 14 aa, Homo sapiens
  CDR3 for alpha chain variable domain of TCR clone 342593 (TRAV35, TRAJ33)
CAGSSQDSNYQLIC

SEQ ID NO: 685186 - protein, 17 aa, Homo sapiens
  CDR3 for beta chain variable domain of TCR clone 342593 (TRBV28, TRBJ2-5)
CASSRQGGLAGAETQYF

SEQ ID NO: 685187 - protein, 14 aa, Homo sapiens
  CDR3 for alpha chain variable domain of TCR clone 342594 (TRAV17, TRAJ31)
CATVLRNNNARLMF

SEQ ID NO: 685188 - protein, 14 aa, Homo sapiens
  CDR3 for beta chain variable domain of TCR clone 342594 (TRBV12-4, TRBJ2-5)
CASTLWQKQETQYF

SEQ ID NO: 685189 - protein, 13 aa, Homo sapiens
  CDR3 for alpha chain variable domain of TCR clone 342595 (TRAV2, TRAJ29)
CAAQNSGNTPLVF

SEQ ID NO: 685190 - protein, 14 aa, Homo sapiens
  CDR3 for beta chain variable domain of TCR clone 342595 (TRBV7-9, TRBJ2-4)
CASRLGMGGNIQYF

SEQ ID NO: 685191 - protein, 12 aa, Homo sapiens
  CDR3 for alpha chain variable domain of TCR clone 342596 (TRAV23/DV6, TRAJ3)
CAARAPQQCFQD

SEQ ID NO: 685192 - protein, 17 aa, Homo sapiens
  CDR3 for beta chain variable domain of TCR clone 342596 (TRBV7-9, TRBJ2-3)
CASSPTVAGDITDTQYF

SEQ ID NO: 685193 - protein, 14 aa, Homo sapiens
  CDR3 for alpha chain variable domain of TCR clone 342597 (TRAV12-1, TRAJ3)
CGAARYSSAFKIIF

SEQ ID NO: 685194 - protein, 15 aa, Homo sapiens
  CDR3 for beta chain variable domain of TCR clone 342597 (TRBV7-2, TRBJ2-6)
CASSREGSGANDLTF

SEQ ID NO: 685195 - protein, 14 aa, Homo sapiens
  CDR3 for alpha chain variable domain of TCR clone 342598 (TRAV13-2, TRAJ11)
CAETGNSGYSTLTF

SEQ ID NO: 685196 - protein, 11 aa, Homo sapiens
  CDR3 for beta chain variable domain of TCR clone 342598 (TRBV10-3, TRBJ2-7)
CAISEGLEKYF

SEQ ID NO: 685197 - protein, 16 aa, Homo sapiens
  CDR3 for alpha chain variable domain of TCR clone 342599 (TRAV3, TRAJ27)
CAMRDPQGTNAGKSTF

SEQ ID NO: 685198 - protein, 14 aa, Homo sapiens
  CDR3 for beta chain variable domain of TCR clone 342599 (TRBV7-2, TRBJ2-7)
CASRSQGAAYEQYF

SEQ ID NO: 685199 - protein, 14 aa, Homo sapiens
  CDR3 for alpha chain variable domain of TCR clone 342600 (TRAV27, TRAJ17)
CRSTIRAAGNTLTF

SEQ ID NO: 685200 - protein, 16 aa, Homo sapiens
  CDR3 for beta chain variable domain of TCR clone 342600 (TRBV5-7, TRBJ2-5)
CASTLAPAGGRETQYF

SEQ ID NO: 685201 - protein, 14 aa, Homo sapiens
  CDR3 for alpha chain variable domain of TCR clone 342601 (TRAV4, TRAJ17)
CLVGDMAAGNKLTF

SEQ ID NO: 685202 - protein, 14 aa, Homo sapiens
  CDR3 for beta chain variable domain of TCR clone 342601 (TRBV6-1, TRBJ1-3)
CASVQGGGGNTIYF

SEQ ID NO: 685203 - protein, 14 aa, Homo sapiens
  CDR3 for alpha chain variable domain of TCR clone 342602 (TRAV3, TRAJ21)
CAVESQANFNKFYF

SEQ ID NO: 685204 - protein, 12 aa, Homo sapiens
  CDR3 for beta chain variable domain of TCR clone 342602 (TRBV6-3, TRBJ2-7)
WASSLTPYEQYF

SEQ ID NO: 685205 - protein, 13 aa, Homo sapiens
  CDR3 for alpha chain variable domain of TCR clone 342603 (TRAV17, TRAJ6)
CATGFGGSYIPTF

SEQ ID NO: 685206 - protein, 14 aa, Homo sapiens
  CDR3 for beta chain variable domain of TCR clone 342603 (TRBV5-1, TRBJ2-5)
CASNFGGSQETQYF

SEQ ID NO: 685207 - protein, 14 aa, Homo sapiens
  CDR3 for alpha chain variable domain of TCR clone 342604 (TRAV12-2, TRAJ17)
CAVLFKAAGNKLTF

SEQ ID NO: 685208 - protein, 12 aa, Homo sapiens
  CDR3 for beta chain variable domain of TCR clone 342604 (TRBV11-3, TRBJ2-2)
CASSLGGGELFF

SEQ ID NO: 685209 - protein, 14 aa, Homo sapiens
  CDR3 for alpha chain variable domain of TCR clone 342605 (TRAV1-2, TRAJ16)
CAVNRFSDGQKLLF

SEQ ID NO: 685210 - protein, 10 aa, Homo sapiens
  CDR3 for beta chain variable domain of TCR clone 342605 (TRBV7-6, TRBJ2-1)
CQINYNEQFF

SEQ ID NO: 685211 - protein, 10 aa, Homo sapiens
  CDR3 for alpha chain variable domain of TCR clone 342606 (TRAV30, TRAJ32)
CGTEKDMVVL

SEQ ID NO: 685212 - protein, 13 aa, Homo sapiens
  CDR3 for beta chain variable domain of TCR clone 342606 (TRBV10-3, TRBJ2-7)
CASKQAVNYEQYF

SEQ ID NO: 685213 - protein, 15 aa, Homo sapiens
  CDR3 for alpha chain variable domain of TCR clone 342607 (TRAV1-2, TRAJ32)
CAVRGYGGAPNKLIF

SEQ ID NO: 685214 - protein, 15 aa, Homo sapiens
  CDR3 for beta chain variable domain of TCR clone 342607 (TRBV25-1, TRBJ2-5)
CASSDTGTHQETQYF

SEQ ID NO: 685215 - protein, 13 aa, Homo sapiens
  CDR3 for alpha chain variable domain of TCR clone 342608 (TRAV14/DV4, TRAJ16)
CAMREGSGQKLLF

SEQ ID NO: 685216 - protein, 15 aa, Homo sapiens
  CDR3 for beta chain variable domain of TCR clone 342608 (TRBV7-9, TRBJ2-7)
CASSLDLDRVYEQYF

SEQ ID NO: 685217 - protein, 17 aa, Homo sapiens
  CDR3 for alpha chain variable domain of TCR clone 342609 (TRAV3, TRAJ42)
CAVRDRDYGGSQGNLIF

SEQ ID NO: 685218 - protein, 15 aa, Homo sapiens
  CDR3 for beta chain variable domain of TCR clone 342609 (TRBV6-3, TRBJ2-7)
CASSSPGTVFYEPYF

SEQ ID NO: 685219 - protein, 15 aa, Homo sapiens
  CDR3 for alpha chain variable domain of TCR clone 342610 (TRAV3, TRAJ9)
CAVRARNTGGFKTIF

SEQ ID NO: 685220 - protein, 15 aa, Homo sapiens
  CDR3 for beta chain variable domain of TCR clone 342610 (TRBV9, TRBJ1-6)
CASSVAGTGDSPLRF

SEQ ID NO: 685221 - protein, 16 aa, Homo sapiens
  CDR3 for alpha chain variable domain of TCR clone 342611 (TRAV1-2, TRAJ10)
CAVRGVLTGGGNKLTF

SEQ ID NO: 685222 - protein, 19 aa, Homo sapiens
  CDR3 for beta chain variable domain of TCR clone 342611 (TRBV7-8, TRBJ2-7)
RRTPPCISVPSLGDREQYF

SEQ ID NO: 685223 - protein, 13 aa, Homo sapiens
  CDR3 for alpha chain variable domain of TCR clone 342612 (TRAV12-3, TRAJ7)
CAMTPYGNNRLAF

SEQ ID NO: 685224 - protein, 19 aa, Homo sapiens
  CDR3 for beta chain variable domain of TCR clone 342612 (TRBV25-1, TRBJ2-2)
CAILVYRVDRGRKTGELFF

SEQ ID NO: 685225 - protein, 13 aa, Homo sapiens
  CDR3 for alpha chain variable domain of TCR clone 342613 (TRAV25, TRAJ29)
CAVRFVGNTPLVF

SEQ ID NO: 685226 - protein, 15 aa, Homo sapiens
  CDR3 for beta chain variable domain of TCR clone 342613 (TRBV29-1, TRBJ2-1)
CSVRTSLSSYNEQFF

SEQ ID NO: 685227 - protein, 14 aa, Homo sapiens
  CDR3 for alpha chain variable domain of TCR clone 342614 (TRAV16, TRAJ39)
CALSKNNAGNMLTF

SEQ ID NO: 685228 - protein, 12 aa, Homo sapiens
  CDR3 for beta chain variable domain of TCR clone 342614 (TRBV18, TRBJ2-1)
CASSSDEDEQFF

SEQ ID NO: 685229 - protein, 18 aa, Homo sapiens
  CDR3 for alpha chain variable domain of TCR clone 342615 (TRAV29/DV5, TRAJ52)
CAAGFRGAGGTSYGKLTF

SEQ ID NO: 685230 - protein, 18 aa, Homo sapiens
  CDR3 for beta chain variable domain of TCR clone 342615 (TRBV4-1, TRBJ1-5)
CASSQDPRGQGLNQPQHF

SEQ ID NO: 685231 - protein, 10 aa, Homo sapiens
  CDR3 for alpha chain variable domain of TCR clone 342616 (TRAV1-2, TRAJ34)
CAVNTDKLIL

SEQ ID NO: 685232 - protein, 15 aa, Homo sapiens
  CDR3 for beta chain variable domain of TCR clone 342616 (TRBV6-3, TRBJ2-7)
CASSSPGTVFYEQYF

SEQ ID NO: 685233 - protein, 23 aa, Homo sapiens
  CDR3 for alpha chain variable domain of TCR clone 342617 (TRAV26-1, TRAJ38)
CIADNAGNNHIQNHDPAVYQLRD

SEQ ID NO: 685234 - protein, 13 aa, Homo sapiens
  CDR3 for beta chain variable domain of TCR clone 342617 (TRBV20-1, TRBJ1-1)
CSARGGGSTEAFF

SEQ ID NO: 685235 - protein, 11 aa, Homo sapiens
  CDR3 for alpha chain variable domain of TCR clone 342618 (TRAV21, TRAJ34)
CAVTNTDELIF

SEQ ID NO: 685236 - protein, 17 aa, Homo sapiens
  CDR3 for beta chain variable domain of TCR clone 342618 (TRBV20-1, TRBJ2-1)
CSARSPSGGPPTMSSSS

SEQ ID NO: 685237 - protein, 16 aa, Homo sapiens
  CDR3 for alpha chain variable domain of TCR clone 342619 (TRAV36/DV7, TRAJ42)
CWGGMNYGGSQGNLIF

SEQ ID NO: 685238 - protein, 13 aa, Homo sapiens
  CDR3 for beta chain variable domain of TCR clone 342619 (TRBV19, TRBJ2-5)
CASSIHSQETQYF

SEQ ID NO: 685239 - protein, 18 aa, Homo sapiens
  CDR3 for alpha chain variable domain of TCR clone 342620 (TRAV1-2, TRAJ52)
CAVRPSPAGGTSYGKLTF

SEQ ID NO: 685240 - protein, 11 aa, Homo sapiens
  CDR3 for beta chain variable domain of TCR clone 342620 (TRBV19, TRBJ1-1)
CASSIGSEAFF

SEQ ID NO: 685241 - protein, 13 aa, Homo sapiens
  CDR3 for alpha chain variable domain of TCR clone 342621 (TRAV8-3, TRAJ43)
CAVGPDNNNDMRF

SEQ ID NO: 685242 - protein, 15 aa, Homo sapiens
  CDR3 for beta chain variable domain of TCR clone 342621 (TRBV7-2, TRBJ2-3)
CASSSTGLETDTQYF

SEQ ID NO: 685243 - protein, 14 aa, Homo sapiens
  CDR3 for alpha chain variable domain of TCR clone 342622 (TRAV16, TRAJ15)
CALRPNQAGTALIF

SEQ ID NO: 685244 - protein, 15 aa, Homo sapiens
  CDR3 for beta chain variable domain of TCR clone 342622 (TRBV10-3, TRBJ2-3)
CAISLTSGGTDTQYF

SEQ ID NO: 685245 - protein, 15 aa, Homo sapiens
  CDR3 for alpha chain variable domain of TCR clone 342623 (TRAV4, TRAJ15)
CLVGDIRRAGTALIF

SEQ ID NO: 685246 - protein, 13 aa, Homo sapiens
  CDR3 for beta chain variable domain of TCR clone 342623 (TRBV19, TRBJ1-2)
CASSVPGQDGYTF

SEQ ID NO: 685247 - protein, 14 aa, Homo sapiens
  CDR3 for alpha chain variable domain of TCR clone 342624 (TRAV1-2, TRAJ8)
CAVRADTGFQKLVF

SEQ ID NO: 685248 - protein, 14 aa, Homo sapiens
  CDR3 for beta chain variable domain of TCR clone 342624 (TRBV20-1, TRBJ1-1)
CSAQTRIGGTEAFF

SEQ ID NO: 685249 - protein, 14 aa, Homo sapiens
  CDR3 for alpha chain variable domain of TCR clone 342625 (TRAV38-1, TRAJ57)
CAFMNTGGSEKLFF

SEQ ID NO: 685250 - protein, 12 aa, Homo sapiens
  CDR3 for beta chain variable domain of TCR clone 342625 (TRBV20-1, TRBJ1-5)
CSTSQGNQPQHF

SEQ ID NO: 685251 - protein, 15 aa, Homo sapiens
  CDR3 for alpha chain variable domain of TCR clone 342626 (TRAV1-2, TRAJ36)
CAASADQTGANNLFF

SEQ ID NO: 685252 - protein, 15 aa, Homo sapiens
  CDR3 for beta chain variable domain of TCR clone 342626 (TRBV5-1, TRBJ2-7)
CASSFSTDAVYEQYF

SEQ ID NO: 685253 - protein, 11 aa, Homo sapiens
  CDR3 for alpha chain variable domain of TCR clone 342627 (TRAV29/DV5, TRAJ49)
CAEVPGNQFYF

SEQ ID NO: 685254 - protein, 17 aa, Homo sapiens
  CDR3 for beta chain variable domain of TCR clone 342627 (TRBV4-2, TRBJ1-1)
CASTQFGGGSGNTEAFF

SEQ ID NO: 685255 - protein, 14 aa, Homo sapiens
  CDR3 for alpha chain variable domain of TCR clone 342628 (TRAV12-1, TRAJ34)
CVVNLDYSTDKLIF

SEQ ID NO: 685256 - protein, 17 aa, Homo sapiens
  CDR3 for beta chain variable domain of TCR clone 342628 (TRBV20-1, TRBJ2-7)
CSAAGTSGGGSAYEQYF

SEQ ID NO: 685257 - protein, 13 aa, Homo sapiens
  CDR3 for alpha chain variable domain of TCR clone 342629 (TRAV2, TRAJ40)
CAVVTSGTYKYIF

SEQ ID NO: 685258 - protein, 16 aa, Homo sapiens
  CDR3 for beta chain variable domain of TCR clone 342629 (TRBV19, TRBJ2-1)
CASSKAGPSSYNGQFF

SEQ ID NO: 685259 - protein, 11 aa, Homo sapiens
  CDR3 for alpha chain variable domain of TCR clone 342630 (TRAV13-1, TRAJ52)
PGGTSYGKLTF

SEQ ID NO: 685260 - protein, 16 aa, Homo sapiens
  CDR3 for beta chain variable domain of TCR clone 342630 (TRBV12-4, TRBJ1-5)
CASRQPVEGSNQPQHF

SEQ ID NO: 685261 - protein, 13 aa, Homo sapiens
  CDR3 for alpha chain variable domain of TCR clone 342631 (TRAV20, TRAJ31)
CAVQAWNNARLMF

SEQ ID NO: 685262 - protein, 15 aa, Homo sapiens
  CDR3 for beta chain variable domain of TCR clone 342631 (TRBV5-1, TRBJ2-3)
CASSVTSGSTDTQYF

SEQ ID NO: 685263 - protein, 13 aa, Homo sapiens
  CDR3 for alpha chain variable domain of TCR clone 342632 (TRAV21, TRAJ20)
RAVGLRVDYKLSF

SEQ ID NO: 685264 - protein, 13 aa, Homo sapiens
  CDR3 for beta chain variable domain of TCR clone 342632 (TRBV6-1, TRBJ1-1)
CASSRQGNTGAFF

SEQ ID NO: 685265 - protein, 16 aa, Homo sapiens
  CDR3 for alpha chain variable domain of TCR clone 342633 (TRAV3, TRAJ10)
CAVRDMGAGGGNKLTF

SEQ ID NO: 685266 - protein, 16 aa, Homo sapiens
  CDR3 for beta chain variable domain of TCR clone 342633 (TRBV12-5, TRBJ2-5)
CASGPRTSGNQETQYF

SEQ ID NO: 685267 - protein, 14 aa, Homo sapiens
  CDR3 for alpha chain variable domain of TCR clone 342634 (TRAV12-2, TRAJ9)
CAVNMEGGGFKTIF

SEQ ID NO: 685268 - protein, 16 aa, Homo sapiens
  CDR3 for beta chain variable domain of TCR clone 342634 (TRBV7-9, TRBJ1-2)
CASSPGGGAINYGYTF

SEQ ID NO: 685269 - protein, 13 aa, Homo sapiens
  CDR3 for alpha chain variable domain of TCR clone 342635 (TRAV3, TRAJ21)
CAVREPDFNKFYF

SEQ ID NO: 685270 - protein, 16 aa, Homo sapiens
  CDR3 for beta chain variable domain of TCR clone 342635 (TRBV27, TRBJ2-7)
CASSSERRDSAYEQYF

SEQ ID NO: 685271 - protein, 16 aa, Homo sapiens
  CDR3 for alpha chain variable domain of TCR clone 342636 (TRAV30, TRAJ24)
CGTEIVDADSWGNSSL

SEQ ID NO: 685272 - protein, 15 aa, Homo sapiens
  CDR3 for beta chain variable domain of TCR clone 342636 (TRBV7-9, TRBJ1-4)
CASSARTGGNGKLFF

SEQ ID NO: 685273 - protein, 16 aa, Homo sapiens
  CDR3 for alpha chain variable domain of TCR clone 342637 (TRAV8-3, TRAJ22)
CAVDLLGPGSARQLTF

SEQ ID NO: 685274 - protein, 15 aa, Homo sapiens
  CDR3 for beta chain variable domain of TCR clone 342637 (TRBV7-2, TRBJ2-1)
CASSFQADEYNEQFF

SEQ ID NO: 685275 - protein, 13 aa, Homo sapiens
  CDR3 for alpha chain variable domain of TCR clone 342638 (TRAV16, TRAJ9)
CALRATGGFKTIF

SEQ ID NO: 685276 - protein, 15 aa, Homo sapiens
  CDR3 for beta chain variable domain of TCR clone 342638 (TRBV11-2, TRBJ2-1)
CASSLGPDSYNEQFF

SEQ ID NO: 685277 - protein, 15 aa, Homo sapiens
  CDR3 for alpha chain variable domain of TCR clone 342639 (TRAV12-2, TRAJ53)
CAVNGGGGSNDKLTS

SEQ ID NO: 685278 - protein, 13 aa, Homo sapiens
  CDR3 for beta chain variable domain of TCR clone 342639 (TRBV12-4, TRBJ1-2)
CASSLRQGKGYTF

SEQ ID NO: 685279 - protein, 16 aa, Homo sapiens
  CDR3 for alpha chain variable domain of TCR clone 342640 (TRAV12-3, TRAJ53)
RAMSPGSGGSNHKLTF

SEQ ID NO: 685280 - protein, 11 aa, Homo sapiens
  CDR3 for beta chain variable domain of TCR clone 342640 (TRBV29-1, TRBJ2-5)
CSEDRTGTQYF

SEQ ID NO: 685281 - protein, 15 aa, Homo sapiens
  CDR3 for alpha chain variable domain of TCR clone 342641 (TRAV20, TRAJ42)
CAVQATRGSQGNLIF

SEQ ID NO: 685282 - protein, 11 aa, Homo sapiens
  CDR3 for beta chain variable domain of TCR clone 342641 (TRBV12-4, TRBJ2-1)
CASSKCSEQFF

SEQ ID NO: 685283 - protein, 11 aa, Homo sapiens
  CDR3 for alpha chain variable domain of TCR clone 342642 (TRAV21, TRAJ31)
CAVRNNTRLMF

SEQ ID NO: 685284 - protein, 17 aa, Homo sapiens
  CDR3 for beta chain variable domain of TCR clone 342642 (TRBV28, TRBJ1-5)
CASSLSWLVSSNQPQHF

SEQ ID NO: 685285 - protein, 15 aa, Homo sapiens
  CDR3 for alpha chain variable domain of TCR clone 342643 (TRAV3, TRAJ22)
CAVRDRGGFARQMTF

SEQ ID NO: 685286 - protein, 18 aa, Homo sapiens
  CDR3 for beta chain variable domain of TCR clone 342643 (TRBV28, TRBJ2-1)
CASSSTSWRANSYNEQFF

SEQ ID NO: 685287 - protein, 14 aa, Homo sapiens
  CDR3 for alpha chain variable domain of TCR clone 342644 (TRAV12-1, TRAJ28)
CVAISGAGSYQLTF

SEQ ID NO: 685288 - protein, 14 aa, Homo sapiens
  CDR3 for beta chain variable domain of TCR clone 342644 (TRBV7-7, TRBJ2-2)
CATRQDSDTGELFF

SEQ ID NO: 685289 - protein, 13 aa, Homo sapiens
  CDR3 for alpha chain variable domain of TCR clone 342645 (TRAV8-1, TRAJ28)
CAVSGAGSYQLTF

SEQ ID NO: 685290 - protein, 14 aa, Homo sapiens
  CDR3 for beta chain variable domain of TCR clone 342645 (TRBV7-2, TRBJ2-2)
CASRGQEAAGELFF

SEQ ID NO: 685291 - protein, 14 aa, Homo sapiens
  CDR3 for alpha chain variable domain of TCR clone 342646 (TRAV29/DV5, TRAJ36)
CAARRKTGANNLFF

SEQ ID NO: 685292 - protein, 14 aa, Homo sapiens
  CDR3 for beta chain variable domain of TCR clone 342646 (TRBV12-5, TRBJ2-5)
CASGSRTHQETQYC

SEQ ID NO: 685293 - protein, 16 aa, Homo sapiens
  CDR3 for alpha chain variable domain of TCR clone 342647 (TRAV30, TRAJ24)
CGTEIVDADSWGKFQL

SEQ ID NO: 685294 - protein, 13 aa, Homo sapiens
  CDR3 for beta chain variable domain of TCR clone 342647 (TRBV4-1, TRBJ2-1)
CASSQAGGDEQFF

SEQ ID NO: 685295 - protein, 14 aa, Homo sapiens
  CDR3 for alpha chain variable domain of TCR clone 342648 (TRAV13-1, TRAJ48)
CAASRSFGNEKLTF

SEQ ID NO: 685296 - protein, 14 aa, Homo sapiens
  CDR3 for beta chain variable domain of TCR clone 342648 (TRBV19, TRBJ2-2)
CASTVTANTGELFF

SEQ ID NO: 685297 - protein, 15 aa, Homo sapiens
  CDR3 for alpha chain variable domain of TCR clone 342649 (TRAV3, TRAJ17)
CAVSPKEAAGNKLTF

SEQ ID NO: 685298 - protein, 12 aa, Homo sapiens
  CDR3 for beta chain variable domain of TCR clone 342649 (TRBV7-9, TRBJ1-6)
CASSFMTSPLHF

SEQ ID NO: 685299 - protein, 15 aa, Homo sapiens
  CDR3 for alpha chain variable domain of TCR clone 342650 (TRAV3, TRAJ20)
CAVRDIKLSDYKPSF

SEQ ID NO: 685300 - protein, 15 aa, Homo sapiens
  CDR3 for beta chain variable domain of TCR clone 342650 (TRBV7-9, TRBJ1-6)
CAGSSPGRGNSPLHF

SEQ ID NO: 685301 - protein, 14 aa, Homo sapiens
  CDR3 for alpha chain variable domain of TCR clone 342651 (TRAV12-2, TRAJ17)
CAVLFNAAGNKLTL

SEQ ID NO: 685302 - protein, 17 aa, Homo sapiens
  CDR3 for beta chain variable domain of TCR clone 342651 (TRBV20-1, TRBJ2-2)
CSASGSGQGGLTGELFF

SEQ ID NO: 685303 - protein, 15 aa, Homo sapiens
  CDR3 for alpha chain variable domain of TCR clone 342652 (TRAV17, TRAJ57)
CATGPSQGVSENLVF

SEQ ID NO: 685304 - protein, 14 aa, Homo sapiens
  CDR3 for beta chain variable domain of TCR clone 342652 (TRBV12-5, TRBJ2-5)
CASGSRTHQETQYF

SEQ ID NO: 685305 - protein, 12 aa, Homo sapiens
  CDR3 for alpha chain variable domain of TCR clone 342653 (TRAV13-2, TRAJ8)
CAPWLGFQKLVF

SEQ ID NO: 685306 - protein, 13 aa, Homo sapiens
  CDR3 for beta chain variable domain of TCR clone 342653 (TRBV20-1, TRBJ1-5)
CSASWGRSQHQHF

SEQ ID NO: 685307 - protein, 13 aa, Homo sapiens
  CDR3 for alpha chain variable domain of TCR clone 342654 (TRAV17, TRAJ5)
CATGDTGRIALTF

SEQ ID NO: 685308 - protein, 13 aa, Homo sapiens
  CDR3 for beta chain variable domain of TCR clone 342654 (TRBV19, TRBJ1-5)
CASSIEPVQPQHF

SEQ ID NO: 685309 - protein, 17 aa, Homo sapiens
  CDR3 for alpha chain variable domain of TCR clone 342655 (TRAV29/DV5, TRAJ45)
CAADGPFSGGGADGLTF

SEQ ID NO: 685310 - protein, 15 aa, Homo sapiens
  CDR3 for beta chain variable domain of TCR clone 342655 (TRBV7-9, TRBJ1-5)
CASSQGHQPNQPQHF

SEQ ID NO: 685311 - protein, 16 aa, Homo sapiens
  CDR3 for alpha chain variable domain of TCR clone 342656 (TRAV16, TRAJ4)
CALSRMFSGGYNKLIF

SEQ ID NO: 685312 - protein, 18 aa, Homo sapiens
  CDR3 for beta chain variable domain of TCR clone 342656 (TRBV23-1, TRBJ2-7)
CASSQYRRTDSTSSTSGR

SEQ ID NO: 685313 - protein, 12 aa, Homo sapiens
  CDR3 for alpha chain variable domain of TCR clone 342657 (TRAV12-1, TRAJ6)
CVVNFRSYIPTF

SEQ ID NO: 685314 - protein, 15 aa, Homo sapiens
  CDR3 for beta chain variable domain of TCR clone 342657 (TRBV7-9, TRBJ1-5)
CASSQGHQPNQPQHF

SEQ ID NO: 685315 - protein, 17 aa, Homo sapiens
  CDR3 for alpha chain variable domain of TCR clone 342658 (TRAV3, TRAJ12)
CAVRDGGRMDSSYKLIF

SEQ ID NO: 685316 - protein, 15 aa, Homo sapiens
  CDR3 for beta chain variable domain of TCR clone 342658 (TRBV19, TRBJ1-1)
CASTSGQIQNTEAFF

SEQ ID NO: 685317 - protein, 14 aa, Homo sapiens
  CDR3 for alpha chain variable domain of TCR clone 342659 (TRAV2, TRAJ37)
CAVDFTSNTGKLIF

SEQ ID NO: 685318 - protein, 14 aa, Homo sapiens
  CDR3 for beta chain variable domain of TCR clone 342659 (TRBV7-9, TRBJ2-1)
CASSDNSGYNEQFF

SEQ ID NO: 685319 - protein, 14 aa, Homo sapiens
  CDR3 for alpha chain variable domain of TCR clone 342660 (TRAV1-2, TRAJ16)
CAVNRFSDGQKLLF

SEQ ID NO: 685320 - protein, 14 aa, Homo sapiens
  CDR3 for beta chain variable domain of TCR clone 342660 (TRBV19, TRBJ2-1)
CASPAFVLSGEQFF

SEQ ID NO: 685321 - protein, 13 aa, Homo sapiens
  CDR3 for alpha chain variable domain of TCR clone 342661 (TRAV13-1, TRAJ43)
CSASIPNNNDMRF

SEQ ID NO: 685322 - protein, 14 aa, Homo sapiens
  CDR3 for beta chain variable domain of TCR clone 342661 (TRBV5-1, TRBJ2-1)
CASSLFGEQASPHF

SEQ ID NO: 685323 - protein, 12 aa, Homo sapiens
  CDR3 for alpha chain variable domain of TCR clone 342662 (TRAV21, TRAJ31)
CAESPARGRLMF

SEQ ID NO: 685324 - protein, 14 aa, Homo sapiens
  CDR3 for beta chain variable domain of TCR clone 342662 (TRBV28, TRBJ2-7)
CASSLLRISYEQYF

SEQ ID NO: 685325 - protein, 18 aa, Homo sapiens
  CDR3 for alpha chain variable domain of TCR clone 342663 (TRAV3, TRAJ42)
CAVRDEGTGGGRQGNLIF

SEQ ID NO: 685326 - protein, 16 aa, Homo sapiens
  CDR3 for beta chain variable domain of TCR clone 342663 (TRBV9, TRBJ1-2)
CASSVAKGRVDYGYTF

SEQ ID NO: 685327 - protein, 13 aa, Homo sapiens
  CDR3 for alpha chain variable domain of TCR clone 342664 (TRAV8-3, TRAJ28)
RAVGAVGSYQLTF

SEQ ID NO: 685328 - protein, 15 aa, Homo sapiens
  CDR3 for beta chain variable domain of TCR clone 342664 (TRBV7-9, TRBJ1-5)
CASSQGHQPNQPQHY

SEQ ID NO: 685329 - protein, 13 aa, Homo sapiens
  CDR3 for alpha chain variable domain of TCR clone 342665 (TRAV8-3, TRAJ40)
CAVGAQYLRNLQI

SEQ ID NO: 685330 - protein, 14 aa, Homo sapiens
  CDR3 for beta chain variable domain of TCR clone 342665 (TRBV28, TRBJ1-5)
CASSLGVLVKPQHF

SEQ ID NO: 685331 - protein, 12 aa, Homo sapiens
  CDR3 for alpha chain variable domain of TCR clone 342666 (TRAV12-2, TRAJ20)
CAARPSDYKLSF

SEQ ID NO: 685332 - protein, 14 aa, Homo sapiens
  CDR3 for beta chain variable domain of TCR clone 342666 (TRBV6-1, TRBJ2-7)
CASNRARPDYEQYF

SEQ ID NO: 685333 - protein, 16 aa, Homo sapiens
  CDR3 for alpha chain variable domain of TCR clone 342667 (TRAV12-2, TRAJ6)
YAAPLAGSGGSYIPTF

SEQ ID NO: 685334 - protein, 10 aa, Homo sapiens
  CDR3 for beta chain variable domain of TCR clone 342667 (TRBV28, TRBJ1-2)
CASSSDRTVF

SEQ ID NO: 685335 - protein, 15 aa, Homo sapiens
  CDR3 for alpha chain variable domain of TCR clone 342668 (TRAV35, TRAJ40)
CAGQLGTSGTYKYIF

SEQ ID NO: 685336 - protein, 14 aa, Homo sapiens
  CDR3 for beta chain variable domain of TCR clone 342668 (TRBV7-3, TRBJ2-1)
CASTLAGGTNEQFF

SEQ ID NO: 685337 - protein, 12 aa, Homo sapiens
  CDR3 for alpha chain variable domain of TCR clone 342669 (TRAV16, TRAJ28)
CALTGAELPTHF

SEQ ID NO: 685338 - protein, 16 aa, Homo sapiens
  CDR3 for beta chain variable domain of TCR clone 342669 (TRBV28, TRBJ1-5)
CASSLTGQGWNQPQHF

SEQ ID NO: 685339 - protein, 15 aa, Homo sapiens
  CDR3 for alpha chain variable domain of TCR clone 342670 (TRAV13-1, TRAJ32)
CAASNGWWCYKQAHL

SEQ ID NO: 685340 - protein, 15 aa, Homo sapiens
  CDR3 for beta chain variable domain of TCR clone 342670 (TRBV7-3, TRBJ2-1)
CASSPTGGGEVEQFF

SEQ ID NO: 685341 - protein, 12 aa, Homo sapiens
  CDR3 for alpha chain variable domain of TCR clone 342671 (TRAV21, TRAJ29)
CAVTSGNTPIVF

SEQ ID NO: 685342 - protein, 15 aa, Homo sapiens
  CDR3 for beta chain variable domain of TCR clone 342671 (TRBV12-4, TRBJ1-2)
CASRLGVAGNYGYTF

SEQ ID NO: 685343 - protein, 13 aa, Homo sapiens
  CDR3 for alpha chain variable domain of TCR clone 342672 (TRAV3, TRAJ27)
CAVRPLGAGKSTF

SEQ ID NO: 685344 - protein, 13 aa, Homo sapiens
  CDR3 for beta chain variable domain of TCR clone 342672 (TRBV20-1, TRBJ2-7)
CSATHTSGYEQYF

SEQ ID NO: 685345 - protein, 14 aa, Homo sapiens
  CDR3 for alpha chain variable domain of TCR clone 342673 (TRAV1-2, TRAJ8)
CAVREDTGFQELVF

SEQ ID NO: 685346 - protein, 16 aa, Homo sapiens
  CDR3 for beta chain variable domain of TCR clone 342673 (TRBV20-1, TRBJ1-4)
CSAPGQGLLTNEKLFF

SEQ ID NO: 685347 - protein, 18 aa, Homo sapiens
  CDR3 for alpha chain variable domain of TCR clone 342674 (TRAV21, TRAJ52)
CAVRPSPAGGTSYGELTF

SEQ ID NO: 685348 - protein, 12 aa, Homo sapiens
  CDR3 for beta chain variable domain of TCR clone 342674 (TRBV5-4, TRBJ2-5)
CASSSTRETQYF

SEQ ID NO: 685349 - protein, 13 aa, Homo sapiens
  CDR3 for alpha chain variable domain of TCR clone 342675 (TRAV21, TRAJ27)
CAARPRNAGKSTF

SEQ ID NO: 685350 - protein, 14 aa, Homo sapiens
  CDR3 for beta chain variable domain of TCR clone 342675 (TRBV7-6, TRBJ2-3)
CASSLGTVTDMQYF

SEQ ID NO: 685351 - protein, 14 aa, Homo sapiens
  CDR3 for alpha chain variable domain of TCR clone 342676 (TRAV13-1, TRAJ52)
CAAAGGTSYGKLTF

SEQ ID NO: 685352 - protein, 17 aa, Homo sapiens
  CDR3 for beta chain variable domain of TCR clone 342676 (TRBV19, TRBJ1-1)
CARSKSGTGGPYTEAFF

SEQ ID NO: 685353 - protein, 12 aa, Homo sapiens
  CDR3 for alpha chain variable domain of TCR clone 342677 (TRAV23/DV6, TRAJ30)
CAASKGDDKNIF

SEQ ID NO: 685354 - protein, 18 aa, Homo sapiens
  CDR3 for beta chain variable domain of TCR clone 342677 (TRBV11-2, TRBJ2-3)
CASSLGGASRGAPNTQYF

SEQ ID NO: 685355 - protein, 13 aa, Homo sapiens
  CDR3 for alpha chain variable domain of TCR clone 342678 (TRAV8-3, TRAJ7)
CAVGAYGNNRLAF

SEQ ID NO: 685356 - protein, 13 aa, Homo sapiens
  CDR3 for beta chain variable domain of TCR clone 342678 (TRBV7-3, TRBJ1-5)
CASSVDSNQPQHF

SEQ ID NO: 685357 - protein, 16 aa, Homo sapiens
  CDR3 for alpha chain variable domain of TCR clone 342679 (TRAV16, TRAJ4)
CALSFMFSGGYIYMIF

SEQ ID NO: 685358 - protein, 14 aa, Homo sapiens
  CDR3 for beta chain variable domain of TCR clone 342679 (TRBV4-1, TRBJ2-2)
CASSQAVNTGELFF

SEQ ID NO: 685359 - protein, 14 aa, Homo sapiens
  CDR3 for alpha chain variable domain of TCR clone 342680 (TRAV12-2, TRAJ6)
CASKWGGGSYIPTF

SEQ ID NO: 685360 - protein, 13 aa, Homo sapiens
  CDR3 for beta chain variable domain of TCR clone 342680 (TRBV11-3, TRBJ2-7)
CASSLDKLYEQYF

SEQ ID NO: 685361 - protein, 12 aa, Homo sapiens
  CDR3 for alpha chain variable domain of TCR clone 342681 (TRAV13-1, TRAJ21)
CEAKEGFNKFYF

SEQ ID NO: 685362 - protein, 14 aa, Homo sapiens
  CDR3 for beta chain variable domain of TCR clone 342681 (TRBV5-4, TRBJ1-1)
CASSLDSRRDEAFF

SEQ ID NO: 685363 - protein, 11 aa, Homo sapiens
  CDR3 for alpha chain variable domain of TCR clone 342682 (TRAV2, TRAJ13)
CASGGYQKVTF

SEQ ID NO: 685364 - protein, 15 aa, Homo sapiens
  CDR3 for beta chain variable domain of TCR clone 342682 (TRBV29-1, TRBJ2-1)
CSGSDRKSSYNEQFF

SEQ ID NO: 685365 - protein, 18 aa, Homo sapiens
  CDR3 for alpha chain variable domain of TCR clone 342683 (TRAV13-1, TRAJ52)
CAAKNPNTGGTSYGKLTF

SEQ ID NO: 685366 - protein, 15 aa, Homo sapiens
  CDR3 for beta chain variable domain of TCR clone 342683 (TRBV28, TRBJ2-1)
CASSIIAGGRSEQFF

SEQ ID NO: 685367 - protein, 15 aa, Homo sapiens
  CDR3 for alpha chain variable domain of TCR clone 342684 (TRAV21, TRAJ40)
CAVRPQTSGTYKYIF

SEQ ID NO: 685368 - protein, 13 aa, Homo sapiens
  CDR3 for beta chain variable domain of TCR clone 342684 (TRBV7-2, TRBJ2-2)
CASNSVRAGELFF

SEQ ID NO: 685369 - protein, 12 aa, Homo sapiens
  CDR3 for alpha chain variable domain of TCR clone 342685 (TRAV12-3, TRAJ17)
CAMTLTGNKLTF

SEQ ID NO: 685370 - protein, 15 aa, Homo sapiens
  CDR3 for beta chain variable domain of TCR clone 342685 (TRBV10-3, TRBJ2-5)
CATLAGQRLQETQYF

SEQ ID NO: 685371 - protein, 11 aa, Homo sapiens
  CDR3 for alpha chain variable domain of TCR clone 342686 (TRAV12-2, TRAJ49)
CAVHTGNQFYF

SEQ ID NO: 685372 - protein, 15 aa, Homo sapiens
  CDR3 for beta chain variable domain of TCR clone 342686 (TRBV4-2, TRBJ1-1)
CASSKQGAGDTEAFF

SEQ ID NO: 685373 - protein, 15 aa, Homo sapiens
  CDR3 for alpha chain variable domain of TCR clone 342687 (TRAV27, TRAJ38)
CAARRNAGNKRKLIW

SEQ ID NO: 685374 - protein, 15 aa, Homo sapiens
  CDR3 for beta chain variable domain of TCR clone 342687 (TRBV12-4, TRBJ2-5)
CASSPPTGLQETQYF

SEQ ID NO: 685375 - protein, 12 aa, Homo sapiens
  CDR3 for alpha chain variable domain of TCR clone 342688 (TRAV1-1, TRAJ43)
CAARVSSNDMRF

SEQ ID NO: 685376 - protein, 15 aa, Homo sapiens
  CDR3 for beta chain variable domain of TCR clone 342688 (TRBV5-1, TRBJ2-7)
CASSLGDFTTYEQYF

SEQ ID NO: 685377 - protein, 14 aa, Homo sapiens
  CDR3 for alpha chain variable domain of TCR clone 342689 (TRAV12-2, TRAJ5)
CAVNRSTGRRALTF

SEQ ID NO: 685378 - protein, 13 aa, Homo sapiens
  CDR3 for beta chain variable domain of TCR clone 342689 (TRBV2, TRBJ1-1)
CARNPTGGFHAFF

SEQ ID NO: 685379 - protein, 13 aa, Homo sapiens
  CDR3 for alpha chain variable domain of TCR clone 342690 (TRAV13-1, TRAJ6)
CAASKGGRYIPTF

SEQ ID NO: 685380 - protein, 15 aa, Homo sapiens
  CDR3 for beta chain variable domain of TCR clone 342690 (TRBV12-4, TRBJ1-1)
CASSGRTGMNTEAFF

SEQ ID NO: 685381 - protein, 14 aa, Homo sapiens
  CDR3 for alpha chain variable domain of TCR clone 342691 (TRAV9-2, TRAJ39)
CALYIYNAGNMLTF

SEQ ID NO: 685382 - protein, 13 aa, Homo sapiens
  CDR3 for beta chain variable domain of TCR clone 342691 (TRBV5-1, TRBJ1-1)
CASSLGTDAEAFF

SEQ ID NO: 685383 - protein, 14 aa, Homo sapiens
  CDR3 for alpha chain variable domain of TCR clone 342692 (TRAV1-2, TRAJ16)
CAVNRFSDGQKLLF

SEQ ID NO: 685384 - protein, 15 aa, Homo sapiens
  CDR3 for beta chain variable domain of TCR clone 342692 (TRBV27, TRBJ1-6)
CASSFHRGLGSPLHF

SEQ ID NO: 685385 - protein, 10 aa, Homo sapiens
  CDR3 for alpha chain variable domain of TCR clone 342693 (TRAV27, TRAJ58)
SETSGSRLTL

SEQ ID NO: 685386 - protein, 14 aa, Homo sapiens
  CDR3 for beta chain variable domain of TCR clone 342693 (TRBV7-2, TRBJ2-7)
CASSPKTSFYEQYF

SEQ ID NO: 685387 - protein, 16 aa, Homo sapiens
  CDR3 for alpha chain variable domain of TCR clone 342694 (TRAV16, TRAJ52)
CALSAAGGTSYGKLTF

SEQ ID NO: 685388 - protein, 16 aa, Homo sapiens
  CDR3 for beta chain variable domain of TCR clone 342694 (TRBV7-3, TRBJ2-1)
CASSKPLAGGYNEQFF

SEQ ID NO: 685389 - protein, 13 aa, Homo sapiens
  CDR3 for alpha chain variable domain of TCR clone 342695 (TRAV21, TRAJ57)
CAVTQGGSEKLVF

SEQ ID NO: 685390 - protein, 17 aa, Homo sapiens
  CDR3 for beta chain variable domain of TCR clone 342695 (TRBV13, TRBJ2-3)
CASGLSRVAGGRNTQYF

SEQ ID NO: 685391 - protein, 17 aa, Homo sapiens
  CDR3 for alpha chain variable domain of TCR clone 342696 (TRAV3, TRAJ12)
CAVGDGGRMDSSYKLIF

SEQ ID NO: 685392 - protein, 17 aa, Homo sapiens
  CDR3 for beta chain variable domain of TCR clone 342696 (TRBV11-2, TRBJ2-1)
CASSLYPPGVEYNEQFF

SEQ ID NO: 685393 - protein, 16 aa, Homo sapiens
  CDR3 for alpha chain variable domain of TCR clone 342697 (TRAV38-1, TRAJ56)
CAFMKRQTGANSKMTF

SEQ ID NO: 685394 - protein, 13 aa, Homo sapiens
  CDR3 for beta chain variable domain of TCR clone 342697 (TRBV18, TRBJ2-7)
CASSRSGSYEQYF

SEQ ID NO: 685395 - protein, 17 aa, Homo sapiens
  CDR3 for alpha chain variable domain of TCR clone 342698 (TRAV3, TRAJ38)
CAVRDCLNAGNNRKLIW

SEQ ID NO: 685396 - protein, 14 aa, Homo sapiens
  CDR3 for beta chain variable domain of TCR clone 342698 (TRBV5-5, TRBJ1-5)
CASSGQRVDQPQHF

SEQ ID NO: 685397 - protein, 13 aa, Homo sapiens
  CDR3 for alpha chain variable domain of TCR clone 342699 (TRAV8-1, TRAJ23)
CAWRDNQGGKLIF

SEQ ID NO: 685398 - protein, 15 aa, Homo sapiens
  CDR3 for beta chain variable domain of TCR clone 342699 (TRBV5-1, TRBJ2-7)
CASSLYPDGGYEQYF

SEQ ID NO: 685399 - protein, 13 aa, Homo sapiens
  CDR3 for alpha chain variable domain of TCR clone 342700 (TRAV3, TRAJ16)
CAVRDRHGQKLLF

SEQ ID NO: 685400 - protein, 15 aa, Homo sapiens
  CDR3 for beta chain variable domain of TCR clone 342700 (TRBV5-1, TRBJ2-1)
CASSPPRAPYNEQFF

SEQ ID NO: 685401 - protein, 14 aa, Homo sapiens
  CDR3 for alpha chain variable domain of TCR clone 342701 (TRAV12-2, TRAJ13)
CSVKKTGGYQKVTF

SEQ ID NO: 685402 - protein, 16 aa, Homo sapiens
  CDR3 for beta chain variable domain of TCR clone 342701 (TRBV12-5, TRBJ2-7)
CASGSQGAPTSSTSGR

SEQ ID NO: 685403 - protein, 11 aa, Homo sapiens
  CDR3 for alpha chain variable domain of TCR clone 342702 (TRAV1-1, TRAJ23)
CAVRQGGKLIF

SEQ ID NO: 685404 - protein, 13 aa, Homo sapiens
  CDR3 for beta chain variable domain of TCR clone 342702 (TRBV7-7, TRBJ2-5)
CASSRSGQETQYF

SEQ ID NO: 685405 - protein, 13 aa, Homo sapiens
  CDR3 for alpha chain variable domain of TCR clone 342703 (TRAV12-3, TRAJ4)
CNEQAGGFNKLIF

SEQ ID NO: 685406 - protein, 15 aa, Homo sapiens
  CDR3 for beta chain variable domain of TCR clone 342703 (TRBV5-1, TRBJ1-1)
CASSLSDLGGTEAFF

SEQ ID NO: 685407 - protein, 15 aa, Homo sapiens
  CDR3 for alpha chain variable domain of TCR clone 342704 (TRAV8-4, TRAJ15)
CALSDPVQAGTALIF

SEQ ID NO: 685408 - protein, 14 aa, Homo sapiens
  CDR3 for beta chain variable domain of TCR clone 342704 (TRBV7-2, TRBJ1-3)
CASSLSRSGNTIYF

SEQ ID NO: 685409 - protein, 14 aa, Homo sapiens
  CDR3 for alpha chain variable domain of TCR clone 342705 (TRAV35, TRAJ33)
CAGSSQDSNYQLIW

SEQ ID NO: 685410 - protein, 14 aa, Homo sapiens
  CDR3 for beta chain variable domain of TCR clone 342705 (TRBV20-1, TRBJ2-1)
CSAQIGGYANEQFF

SEQ ID NO: 685411 - protein, 16 aa, Homo sapiens
  CDR3 for alpha chain variable domain of TCR clone 342706 (TRAV3, TRAJ37)
CAVRGKGCGNTGKLIF

SEQ ID NO: 685412 - protein, 16 aa, Homo sapiens
  CDR3 for beta chain variable domain of TCR clone 342706 (TRBV12-5, TRBJ2-5)
CASGPRTSGNQETQYF

SEQ ID NO: 685413 - protein, 13 aa, Homo sapiens
  CDR3 for alpha chain variable domain of TCR clone 342707 (TRAV1-2, TRAJ12)
CAVSMDSSYKLIF

SEQ ID NO: 685414 - protein, 13 aa, Homo sapiens
  CDR3 for beta chain variable domain of TCR clone 342707 (TRBV10-3, TRBJ2-7)
CASKLAVNYEQYF

SEQ ID NO: 685415 - protein, 13 aa, Homo sapiens
  CDR3 for alpha chain variable domain of TCR clone 342708 (TRAV8-3, TRAJ44)
CAVVPGTARKLTF

SEQ ID NO: 685416 - protein, 14 aa, Homo sapiens
  CDR3 for beta chain variable domain of TCR clone 342708 (TRBV11-2, TRBJ2-3)
CASRRLARTDTQYF

SEQ ID NO: 685417 - protein, 14 aa, Homo sapiens
  CDR3 for alpha chain variable domain of TCR clone 342709 (TRAV20, TRAJ56)
CAVQFGGANSKLTF

SEQ ID NO: 685418 - protein, 12 aa, Homo sapiens
  CDR3 for beta chain variable domain of TCR clone 342709 (TRBV11-3, TRBJ2-1)
CASSPGNNEQFF

SEQ ID NO: 685419 - protein, 13 aa, Homo sapiens
  CDR3 for alpha chain variable domain of TCR clone 342710 (TRAV23/DV6, TRAJ22)
CAPYSGSARQLTF

SEQ ID NO: 685420 - protein, 15 aa, Homo sapiens
  CDR3 for beta chain variable domain of TCR clone 342710 (TRBV6-3, TRBJ2-7)
CASSSPGTVFYEQYF

SEQ ID NO: 685421 - protein, 11 aa, Homo sapiens
  CDR3 for alpha chain variable domain of TCR clone 342711 (TRAV1-2, TRAJ11)
CAVRGYSTLTF

SEQ ID NO: 685422 - protein, 15 aa, Homo sapiens
  CDR3 for beta chain variable domain of TCR clone 342711 (TRBV6-5, TRBJ2-1)
CASSYDAGAGNEQFF

SEQ ID NO: 685423 - protein, 14 aa, Homo sapiens
  CDR3 for alpha chain variable domain of TCR clone 342712 (TRAV13-1, TRAJ44)
CAAKSTGTASKLTF

SEQ ID NO: 685424 - protein, 17 aa, Homo sapiens
  CDR3 for beta chain variable domain of TCR clone 342712 (TRBV7-3, TRBJ2-3)
CASSLMNRMRGADTQYF

SEQ ID NO: 685425 - protein, 12 aa, Homo sapiens
  CDR3 for alpha chain variable domain of TCR clone 342713 (TRAV2, TRAJ32)
CAVGGATNKLIF

SEQ ID NO: 685426 - protein, 13 aa, Homo sapiens
  CDR3 for beta chain variable domain of TCR clone 342713 (TRBV10-3, TRBJ2-7)
CASKLAVNYEQYF

SEQ ID NO: 685427 - protein, 14 aa, Homo sapiens
  CDR3 for alpha chain variable domain of TCR clone 342714 (TRAV13-2, TRAJ15)
CEENPNQAGTALIF

SEQ ID NO: 685428 - protein, 16 aa, Homo sapiens
  CDR3 for beta chain variable domain of TCR clone 342714 (TRBV12-4, TRBJ1-2)
CASSPTATGKTRGYAF

SEQ ID NO: 685429 - protein, 11 aa, Homo sapiens
  CDR3 for alpha chain variable domain of TCR clone 342715 (TRAV17, TRAJ43)
CATPRSNDMRF

SEQ ID NO: 685430 - protein, 15 aa, Homo sapiens
  CDR3 for beta chain variable domain of TCR clone 342715 (TRBV11-2, TRBJ2-1)
CASSLGTSGLDGQFF

SEQ ID NO: 685431 - protein, 11 aa, Homo sapiens
  CDR3 for alpha chain variable domain of TCR clone 342716 (TRAV21, TRAJ48)
CAVDGNEILTF

SEQ ID NO: 685432 - protein, 16 aa, Homo sapiens
  CDR3 for beta chain variable domain of TCR clone 342716 (TRBV19, TRBJ2-1)
CASSSKGTRSYNEQFF

SEQ ID NO: 685433 - protein, 16 aa, Homo sapiens
  CDR3 for alpha chain variable domain of TCR clone 342717 (TRAV8-3, TRAJ18)
CAVGGRQRRNPGEAIL

SEQ ID NO: 685434 - protein, 12 aa, Homo sapiens
  CDR3 for beta chain variable domain of TCR clone 342717 (TRBV28, TRBJ2-6)
CAIQAGANVLTF

SEQ ID NO: 685435 - protein, 12 aa, Homo sapiens
  CDR3 for alpha chain variable domain of TCR clone 342718 (TRAV12-3, TRAJ17)
CAMTLTANKLTF

SEQ ID NO: 685436 - protein, 15 aa, Homo sapiens
  CDR3 for beta chain variable domain of TCR clone 342718 (TRBV11-3, TRBJ2-7)
CASSPGPASSYEQYF

SEQ ID NO: 685437 - protein, 12 aa, Homo sapiens
  CDR3 for alpha chain variable domain of TCR clone 342719 (TRAV35, TRAJ49)
CAGWNTGNQFYF

SEQ ID NO: 685438 - protein, 16 aa, Homo sapiens
  CDR3 for beta chain variable domain of TCR clone 342719 (TRBV5-1, TRBJ2-2)
CISSLWDTTNTGELFF

SEQ ID NO: 685439 - protein, 12 aa, Homo sapiens
  CDR3 for alpha chain variable domain of TCR clone 342720 (TRAV29/DV5, TRAJ15)
CASNQAGTALIF

SEQ ID NO: 685440 - protein, 15 aa, Homo sapiens
  CDR3 for beta chain variable domain of TCR clone 342720 (TRBV11-2, TRBJ2-2)
CASSSDRVNAGGLFF

SEQ ID NO: 685441 - protein, 14 aa, Homo sapiens
  CDR3 for alpha chain variable domain of TCR clone 342721 (TRAV13-1, TRAJ40)
CAASMTSGTYKYIF

SEQ ID NO: 685442 - protein, 12 aa, Homo sapiens
  CDR3 for beta chain variable domain of TCR clone 342721 (TRBV7-9, TRBJ2-7)
CASSLEGYEQYF

SEQ ID NO: 685443 - protein, 12 aa, Homo sapiens
  CDR3 for alpha chain variable domain of TCR clone 342722 (TRAV21, TRAJ13)
PGPSGGYQKFTF

SEQ ID NO: 685444 - protein, 15 aa, Homo sapiens
  CDR3 for beta chain variable domain of TCR clone 342722 (TRBV20-1, TRBJ2-7)
CSARDRVSGMDEQYF

SEQ ID NO: 685445 - protein, 13 aa, Homo sapiens
  CDR3 for alpha chain variable domain of TCR clone 342723 (TRAV13-1, TRAJ39)
CSKYSNAGNMLTF

SEQ ID NO: 685446 - protein, 14 aa, Homo sapiens
  CDR3 for beta chain variable domain of TCR clone 342723 (TRBV18, TRBJ2-7)
CASSLRGGAYEQYF

SEQ ID NO: 685447 - protein, 12 aa, Homo sapiens
  CDR3 for alpha chain variable domain of TCR clone 342724 (TRAV12-3, TRAJ17)
CAMTLTGSKLTF

SEQ ID NO: 685448 - protein, 15 aa, Homo sapiens
  CDR3 for beta chain variable domain of TCR clone 342724 (TRBV20-1, TRBJ2-7)
CSARDRVSGMDERYV

SEQ ID NO: 685449 - protein, 16 aa, Homo sapiens
  CDR3 for alpha chain variable domain of TCR clone 342725 (TRAV26-1, TRAJ32)
CIVRPNYGGATNKLIF

SEQ ID NO: 685450 - protein, 14 aa, Homo sapiens
  CDR3 for beta chain variable domain of TCR clone 342725 (TRBV27, TRBJ1-1)
CASSLLSGLSEAFF

SEQ ID NO: 685451 - protein, 14 aa, Homo sapiens
  CDR3 for alpha chain variable domain of TCR clone 342726 (TRAV12-2, TRAJ13)
CAVKKTGGYQKVTF

SEQ ID NO: 685452 - protein, 15 aa, Homo sapiens
  CDR3 for beta chain variable domain of TCR clone 342726 (TRBV19, TRBJ1-6)
CASSTQGAVGSPLHV

SEQ ID NO: 685453 - protein, 16 aa, Homo sapiens
  CDR3 for alpha chain variable domain of TCR clone 342727 (TRAV30, TRAJ24)
CGTEIVDADSWGKFQF

SEQ ID NO: 685454 - protein, 15 aa, Homo sapiens
  CDR3 for beta chain variable domain of TCR clone 342727 (TRBV6-1, TRBJ1-1)
CASRRGEGQLSEAFF

SEQ ID NO: 685455 - protein, 15 aa, Homo sapiens
  CDR3 for alpha chain variable domain of TCR clone 342728 (TRAV8-3, TRAJ15)
CAVGAPNQAGTALIF

SEQ ID NO: 685456 - protein, 18 aa, Homo sapiens
  CDR3 for beta chain variable domain of TCR clone 342728 (TRBV4-1, TRBJ2-7)
CASSQAPGTGTLGDEQYF

SEQ ID NO: 685457 - protein, 15 aa, Homo sapiens
  CDR3 for alpha chain variable domain of TCR clone 342729 (TRAV25, TRAJ10)
CAGPLLTGGGNKLTF

SEQ ID NO: 685458 - protein, 15 aa, Homo sapiens
  CDR3 for beta chain variable domain of TCR clone 342729 (TRBV20-1, TRBJ2-7)
CSARVPAAYFYEQYF

SEQ ID NO: 685459 - protein, 17 aa, Homo sapiens
  CDR3 for alpha chain variable domain of TCR clone 342730 (TRAV3, TRAJ6)
CAVRDGPRAGGSYIPTF

SEQ ID NO: 685460 - protein, 16 aa, Homo sapiens
  CDR3 for beta chain variable domain of TCR clone 342730 (TRBV7-3, TRBJ2-2)
FASSLKRGTLSGELFF

SEQ ID NO: 685461 - protein, 17 aa, Homo sapiens
  CDR3 for alpha chain variable domain of TCR clone 342731 (TRAV16, TRAJ58)
CITVLSNGETSGSRLTF

SEQ ID NO: 685462 - protein, 13 aa, Homo sapiens
  CDR3 for beta chain variable domain of TCR clone 342731 (TRBV20-1, TRBJ2-2)
CSANAAGTGELFF

SEQ ID NO: 685463 - protein, 18 aa, Homo sapiens
  CDR3 for alpha chain variable domain of TCR clone 342732 (TRAV21, TRAJ52)
CAVRPSPAGGTSYGKLTF

SEQ ID NO: 685464 - protein, 15 aa, Homo sapiens
  CDR3 for beta chain variable domain of TCR clone 342732 (TRBV5-7, TRBJ1-2)
CASSLDSGQGYGYTF

SEQ ID NO: 685465 - protein, 18 aa, Homo sapiens
  CDR3 for alpha chain variable domain of TCR clone 342733 (TRAV21, TRAJ52)
CAVRPSPAGGTSYGKLTF

SEQ ID NO: 685466 - protein, 15 aa, Homo sapiens
  CDR3 for beta chain variable domain of TCR clone 342733 (TRBV20-1, TRBJ2-1)
CSATSSGTRGGEQFF

SEQ ID NO: 685467 - protein, 14 aa, Homo sapiens
  CDR3 for alpha chain variable domain of TCR clone 342734 (TRAV9-2, TRAJ39)
CALYIYNAGNMLTF

SEQ ID NO: 685468 - protein, 16 aa, Homo sapiens
  CDR3 for beta chain variable domain of TCR clone 342734 (TRBV11-2, TRBJ2-1)
CASARGSYSHHNEQFF

SEQ ID NO: 685469 - protein, 16 aa, Homo sapiens
  CDR3 for alpha chain variable domain of TCR clone 342735 (TRAV30, TRAJ24)
CGTEIVDADSWGKFQV

SEQ ID NO: 685470 - protein, 16 aa, Homo sapiens
  CDR3 for beta chain variable domain of TCR clone 342735 (TRBV29-1, TRBJ2-7)
CSVEDAEDGTAYEQYF

SEQ ID NO: 685471 - protein, 15 aa, Homo sapiens
  CDR3 for alpha chain variable domain of TCR clone 342736 (TRAV17, TRAJ23)
CATDAEDNQGGKLIF

SEQ ID NO: 685472 - protein, 11 aa, Homo sapiens
  CDR3 for beta chain variable domain of TCR clone 342736 (TRBV2, TRBJ2-1)
CQAGGLHEQFF

SEQ ID NO: 685473 - protein, 13 aa, Homo sapiens
  CDR3 for alpha chain variable domain of TCR clone 342737 (TRAV17, TRAJ5)
CAPMDTGRRALTF

SEQ ID NO: 685474 - protein, 18 aa, Homo sapiens
  CDR3 for beta chain variable domain of TCR clone 342737 (TRBV20-1, TRBJ2-3)
CSASGLAGGPGTTDTQYF

SEQ ID NO: 685475 - protein, 12 aa, Homo sapiens
  CDR3 for alpha chain variable domain of TCR clone 342738 (TRAV13-1, TRAJ9)
CAAHTGGFKTIF

SEQ ID NO: 685476 - protein, 13 aa, Homo sapiens
  CDR3 for beta chain variable domain of TCR clone 342738 (TRBV12-4, TRBJ1-2)
CASSSGSKDGYTF

SEQ ID NO: 685477 - protein, 12 aa, Homo sapiens
  CDR3 for alpha chain variable domain of TCR clone 342739 (TRAV12-3, TRAJ17)
CAMTLTGDKLTF

SEQ ID NO: 685478 - protein, 14 aa, Homo sapiens
  CDR3 for beta chain variable domain of TCR clone 342739 (TRBV11-2, TRBJ2-7)
CASSLGAGAYEQYF

SEQ ID NO: 685479 - protein, 12 aa, Homo sapiens
  CDR3 for alpha chain variable domain of TCR clone 342740 (TRAV13-1, TRAJ17)
CAARTAGNKLTF

SEQ ID NO: 685480 - protein, 16 aa, Homo sapiens
  CDR3 for beta chain variable domain of TCR clone 342740 (TRBV7-2, TRBJ2-3)
CASSLVALYSTDTQYF

SEQ ID NO: 685481 - protein, 11 aa, Homo sapiens
  CDR3 for alpha chain variable domain of TCR clone 342741 (TRAV4, TRAJ20)
CLVGDKVTTTS

SEQ ID NO: 685482 - protein, 15 aa, Homo sapiens
  CDR3 for beta chain variable domain of TCR clone 342741 (TRBV18, TRBJ2-7)
CASSPSTTGNYEQYF

SEQ ID NO: 685483 - protein, 14 aa, Homo sapiens
  CDR3 for alpha chain variable domain of TCR clone 342742 (TRAV13-2, TRAJ10)
CAETFTGGGNKLTF

SEQ ID NO: 685484 - protein, 13 aa, Homo sapiens
  CDR3 for beta chain variable domain of TCR clone 342742 (TRBV14, TRBJ2-7)
CASSQDRRYEQYF

SEQ ID NO: 685485 - protein, 18 aa, Homo sapiens
  CDR3 for alpha chain variable domain of TCR clone 342743 (TRAV21, TRAJ52)
CAVRPSPAGGTSHGELTF

SEQ ID NO: 685486 - protein, 15 aa, Homo sapiens
  CDR3 for beta chain variable domain of TCR clone 342743 (TRBV19, TRBJ1-6)
CASSTQGAVGSPLHF

SEQ ID NO: 685487 - protein, 18 aa, Homo sapiens
  CDR3 for alpha chain variable domain of TCR clone 342744 (TRAV26-2, TRAJ45)
CILRVDKASGGGADGLTF

SEQ ID NO: 685488 - protein, 11 aa, Homo sapiens
  CDR3 for beta chain variable domain of TCR clone 342744 (TRBV29-1, TRBJ2-5)
CSEDRTGTQYF

SEQ ID NO: 685489 - protein, 14 aa, Homo sapiens
  CDR3 for alpha chain variable domain of TCR clone 342745 (TRAV13-1, TRAJ44)
CAAKATGTASKLSF

SEQ ID NO: 685490 - protein, 13 aa, Homo sapiens
  CDR3 for beta chain variable domain of TCR clone 342745 (TRBV5-5, TRBJ1-2)
CASSFWRGEDYTF

SEQ ID NO: 685491 - protein, 14 aa, Homo sapiens
  CDR3 for alpha chain variable domain of TCR clone 342746 (TRAV12-2, TRAJ45)
CAVNIGGGADGLTF

SEQ ID NO: 685492 - protein, 14 aa, Homo sapiens
  CDR3 for beta chain variable domain of TCR clone 342746 (TRBV6-3, TRBJ2-5)
CASRRDGGEETQYF

SEQ ID NO: 685493 - protein, 13 aa, Homo sapiens
  CDR3 for alpha chain variable domain of TCR clone 342747 (TRAV8-3, TRAJ28)
CAVGAVGSYQLTF

SEQ ID NO: 685494 - protein, 13 aa, Homo sapiens
  CDR3 for beta chain variable domain of TCR clone 342747 (TRBV24-1, TRBJ2-1)
CATSAGPYNEQFF

SEQ ID NO: 685495 - protein, 11 aa, Homo sapiens
  CDR3 for alpha chain variable domain of TCR clone 342748 (TRAV2, TRAJ33)
CAVESNYQLIW

SEQ ID NO: 685496 - protein, 12 aa, Homo sapiens
  CDR3 for beta chain variable domain of TCR clone 342748 (TRBV7-8, TRBJ2-1)
CASSLGHNEQFF

SEQ ID NO: 685497 - protein, 14 aa, Homo sapiens
  CDR3 for alpha chain variable domain of TCR clone 342749 (TRAV1-2, TRAJ8)
CAVREDTGFQQLVF

SEQ ID NO: 685498 - protein, 16 aa, Homo sapiens
  CDR3 for beta chain variable domain of TCR clone 342749 (TRBV29-1, TRBJ1-2)
CSVEANRDIANYGYTF

SEQ ID NO: 685499 - protein, 12 aa, Homo sapiens
  CDR3 for alpha chain variable domain of TCR clone 342750 (TRAV9-2, TRAJ26)
CSLRGYGQNFVF

SEQ ID NO: 685500 - protein, 12 aa, Homo sapiens
  CDR3 for beta chain variable domain of TCR clone 342750 (TRBV29-1, TRBJ2-3)
CSVTGGADTQYF

SEQ ID NO: 685501 - protein, 16 aa, Homo sapiens
  CDR3 for alpha chain variable domain of TCR clone 342751 (TRAV17, TRAJ28)
CASYAYSGAGSYQLTF

SEQ ID NO: 685502 - protein, 15 aa, Homo sapiens
  CDR3 for beta chain variable domain of TCR clone 342751 (TRBV4-3, TRBJ2-1)
WASSPSGGFYNEQFF

SEQ ID NO: 685503 - protein, 12 aa, Homo sapiens
  CDR3 for alpha chain variable domain of TCR clone 342752 (TRAV12-3, TRAJ17)
CAMTLTGNKLTF

SEQ ID NO: 685504 - protein, 13 aa, Homo sapiens
  CDR3 for beta chain variable domain of TCR clone 342752 (TRBV27, TRBJ2-1)
CTSRTLGVGEQFF

SEQ ID NO: 685505 - protein, 16 aa, Homo sapiens
  CDR3 for alpha chain variable domain of TCR clone 342753 (TRAV12-1, TRAJ42)
CVVTPYYGGSQGNLIF

SEQ ID NO: 685506 - protein, 15 aa, Homo sapiens
  CDR3 for beta chain variable domain of TCR clone 342753 (TRBV27, TRBJ2-1)
CASSNGGGSSNEQFF

SEQ ID NO: 685507 - protein, 14 aa, Homo sapiens
  CDR3 for alpha chain variable domain of TCR clone 342754 (TRAV8-4, TRAJ13)
CAVTLSGGYQKVTF

SEQ ID NO: 685508 - protein, 12 aa, Homo sapiens
  CDR3 for beta chain variable domain of TCR clone 342754 (TRBV28, TRBJ1-2)
CASLTLAEGYTF

SEQ ID NO: 685509 - protein, 15 aa, Homo sapiens
  CDR3 for alpha chain variable domain of TCR clone 342755 (TRAV12-2, TRAJ53)
CAVNGGGGSNYKLTF

SEQ ID NO: 685510 - protein, 16 aa, Homo sapiens
  CDR3 for beta chain variable domain of TCR clone 342755 (TRBV6-1, TRBJ1-2)
CASSGAWQGRSHGYAF

SEQ ID NO: 685511 - protein, 13 aa, Homo sapiens
  CDR3 for alpha chain variable domain of TCR clone 342756 (TRAV35, TRAJ58)
CAGLETSGSRLTF

SEQ ID NO: 685512 - protein, 15 aa, Homo sapiens
  CDR3 for beta chain variable domain of TCR clone 342756 (TRBV20-1, TRBJ2-1)
CSARFSAGGLNEQFV

SEQ ID NO: 685513 - protein, 14 aa, Homo sapiens
  CDR3 for alpha chain variable domain of TCR clone 342757 (TRAV1-2, TRAJ8)
CAVREDTGFQKLVF

SEQ ID NO: 685514 - protein, 14 aa, Homo sapiens
  CDR3 for beta chain variable domain of TCR clone 342757 (TRBV7-2, TRBJ2-7)
CASIPKTIFYEQYF

SEQ ID NO: 685515 - protein, 16 aa, Homo sapiens
  CDR3 for alpha chain variable domain of TCR clone 342758 (TRAV12-3, TRAJ10)
CSMKKGITGGGNKLTF

SEQ ID NO: 685516 - protein, 12 aa, Homo sapiens
  CDR3 for beta chain variable domain of TCR clone 342758 (TRBV20-1, TRBJ2-7)
CSAITPTKEQYF

SEQ ID NO: 685517 - protein, 12 aa, Homo sapiens
  CDR3 for alpha chain variable domain of TCR clone 342759 (TRAV2, TRAJ34)
CAVERNTDKLIF

SEQ ID NO: 685518 - protein, 16 aa, Homo sapiens
  CDR3 for beta chain variable domain of TCR clone 342759 (TRBV5-1, TRBJ2-2)
CASSLWDTTNTGELFF

SEQ ID NO: 685519 - protein, 14 aa, Homo sapiens
  CDR3 for alpha chain variable domain of TCR clone 342760 (TRAV8-2, TRAJ37)
CVVSISGNTAKLIF

SEQ ID NO: 685520 - protein, 11 aa, Homo sapiens
  CDR3 for beta chain variable domain of TCR clone 342760 (TRBV18, TRBJ2-5)
CASSPRETQYF

SEQ ID NO: 685521 - protein, 14 aa, Homo sapiens
  CDR3 for alpha chain variable domain of TCR clone 342761 (TRAV1-2, TRAJ8)
CAVREDTGFQKLVF

SEQ ID NO: 685522 - protein, 16 aa, Homo sapiens
  CDR3 for beta chain variable domain of TCR clone 342761 (TRBV12-4, TRBJ2-5)
CASSWRPSGDLETQYF

SEQ ID NO: 685523 - protein, 15 aa, Homo sapiens
  CDR3 for alpha chain variable domain of TCR clone 342762 (TRAV14/DV4, TRAJ15)
CAMREGWQEGTALIF

SEQ ID NO: 685524 - protein, 14 aa, Homo sapiens
  CDR3 for beta chain variable domain of TCR clone 342762 (TRBV19, TRBJ2-5)
CASSMTGQQETQYF

SEQ ID NO: 685525 - protein, 14 aa, Homo sapiens
  CDR3 for alpha chain variable domain of TCR clone 342763 (TRAV38-2/DV8, TRAJ30)
CAYRSADRDDKSIF

SEQ ID NO: 685526 - protein, 16 aa, Homo sapiens
  CDR3 for beta chain variable domain of TCR clone 342763 (TRBV15, TRBJ1-3)
CATSSPIGFSGNTIYF

SEQ ID NO: 685527 - protein, 16 aa, Homo sapiens
  CDR3 for alpha chain variable domain of TCR clone 342764 (TRAV3, TRAJ37)
CAVRGKGSGNTGKIIF

SEQ ID NO: 685528 - protein, 15 aa, Homo sapiens
  CDR3 for beta chain variable domain of TCR clone 342764 (TRBV5-1, TRBJ2-7)
CASSLNGGPAREQYF

SEQ ID NO: 685529 - protein, 12 aa, Homo sapiens
  CDR3 for alpha chain variable domain of TCR clone 342765 (TRAV12-3, TRAJ17)
CAMTLTGNTLTF

SEQ ID NO: 685530 - protein, 14 aa, Homo sapiens
  CDR3 for beta chain variable domain of TCR clone 342765 (TRBV7-2, TRBJ1-5)
CASSTQGAGQPQHF

SEQ ID NO: 685531 - protein, 14 aa, Homo sapiens
  CDR3 for alpha chain variable domain of TCR clone 342766 (TRAV36/DV7, TRAJ45)
CPLYSGGGADGLTF

SEQ ID NO: 685532 - protein, 18 aa, Homo sapiens
  CDR3 for beta chain variable domain of TCR clone 342766 (TRBV23-1, TRBJ2-3)
CISAPAVNRPASTDTQYF

SEQ ID NO: 685533 - protein, 16 aa, Homo sapiens
  CDR3 for alpha chain variable domain of TCR clone 342767 (TRAV3, TRAJ37)
CAVRGKGSGDTGKLIF

SEQ ID NO: 685534 - protein, 15 aa, Homo sapiens
  CDR3 for beta chain variable domain of TCR clone 342767 (TRBV9, TRBJ1-6)
CASSVAGTGDSPLHF

SEQ ID NO: 685535 - protein, 12 aa, Homo sapiens
  CDR3 for alpha chain variable domain of TCR clone 342768 (TRAV12-2, TRAJ52)
IGGGTSHGKLTF

SEQ ID NO: 685536 - protein, 13 aa, Homo sapiens
  CDR3 for beta chain variable domain of TCR clone 342768 (TRBV12-4, TRBJ1-1)
CASSPGTGFGAFF

SEQ ID NO: 685537 - protein, 11 aa, Homo sapiens
  CDR3 for alpha chain variable domain of TCR clone 342769 (TRAV12-1, TRAJ15)
CVVIAGTALIF

SEQ ID NO: 685538 - protein, 16 aa, Homo sapiens
  CDR3 for beta chain variable domain of TCR clone 342769 (TRBV28, TRBJ2-1)
CASSSRVRDSYNEQFF

SEQ ID NO: 685539 - protein, 15 aa, Homo sapiens
  CDR3 for alpha chain variable domain of TCR clone 342770 (TRAV20, TRAJ43)
CAVQAGKSSKKDMRF

SEQ ID NO: 685540 - protein, 13 aa, Homo sapiens
  CDR3 for beta chain variable domain of TCR clone 342770 (TRBV27, TRBJ1-1)
CASSLSIGAEAFF

SEQ ID NO: 685541 - protein, 14 aa, Homo sapiens
  CDR3 for alpha chain variable domain of TCR clone 342771 (TRAV13-2, TRAJ43)
CAEIPTYNNNDTRF

SEQ ID NO: 685542 - protein, 15 aa, Homo sapiens
  CDR3 for beta chain variable domain of TCR clone 342771 (TRBV7-9, TRBJ2-2)
CASGPLDTFPGELFF

SEQ ID NO: 685543 - protein, 14 aa, Homo sapiens
  CDR3 for alpha chain variable domain of TCR clone 342772 (TRAV3, TRAJ34)
CAVRAPGSTDKLSF

SEQ ID NO: 685544 - protein, 13 aa, Homo sapiens
  CDR3 for beta chain variable domain of TCR clone 342772 (TRBV6-4, TRBJ1-5)
CASSADLNQPQHF

SEQ ID NO: 685545 - protein, 18 aa, Homo sapiens
  CDR3 for alpha chain variable domain of TCR clone 342773 (TRAV21, TRAJ52)
CAVRPSPAGGTSYGKLTF

SEQ ID NO: 685546 - protein, 16 aa, Homo sapiens
  CDR3 for beta chain variable domain of TCR clone 342773 (TRBV7-3, TRBJ2-1)
CASSSEGYRSYNEQFF

SEQ ID NO: 685547 - protein, 15 aa, Homo sapiens
  CDR3 for alpha chain variable domain of TCR clone 342774 (TRAV12-3, TRAJ6)
CAMSATTVGSYIPTF

SEQ ID NO: 685548 - protein, 17 aa, Homo sapiens
  CDR3 for beta chain variable domain of TCR clone 342774 (TRBV13, TRBJ2-3)
CASSLSRVAGGRNTQYF

SEQ ID NO: 685549 - protein, 13 aa, Homo sapiens
  CDR3 for alpha chain variable domain of TCR clone 342775 (TRAV27, TRAJ45)
CRSSRGGADGLTF

SEQ ID NO: 685550 - protein, 14 aa, Homo sapiens
  CDR3 for beta chain variable domain of TCR clone 342775 (TRBV7-9, TRBJ2-1)
CASSSMVGFGEQFF

SEQ ID NO: 685551 - protein, 14 aa, Homo sapiens
  CDR3 for alpha chain variable domain of TCR clone 342776 (TRAV1-2, TRAJ16)
CAVNRFSDGQRLLF

SEQ ID NO: 685552 - protein, 15 aa, Homo sapiens
  CDR3 for beta chain variable domain of TCR clone 342776 (TRBV4-1, TRBJ2-7)
CASSQNTGRLYEQYF

SEQ ID NO: 685553 - protein, 15 aa, Homo sapiens
  CDR3 for alpha chain variable domain of TCR clone 342777 (TRAV26-1, TRAJ15)
CIVRMANQAGTALIF

SEQ ID NO: 685554 - protein, 15 aa, Homo sapiens
  CDR3 for beta chain variable domain of TCR clone 342777 (TRBV20-1, TRBJ1-1)
CSARKAEASNTEAFF

SEQ ID NO: 685555 - protein, 15 aa, Homo sapiens
  CDR3 for alpha chain variable domain of TCR clone 342778 (TRAV8-3, TRAJ27)
CAVGPSKTNAGISTV

SEQ ID NO: 685556 - protein, 15 aa, Homo sapiens
  CDR3 for beta chain variable domain of TCR clone 342778 (TRBV7-2, TRBJ2-1)
CASSSGLAGGNEQFF

SEQ ID NO: 685557 - protein, 14 aa, Homo sapiens
  CDR3 for alpha chain variable domain of TCR clone 342779 (TRAV1-2, TRAJ16)
CAVYRFSDGQKLLF

SEQ ID NO: 685558 - protein, 14 aa, Homo sapiens
  CDR3 for beta chain variable domain of TCR clone 342779 (TRBV19, TRBJ2-1)
CASSEPGGHGEQFF

SEQ ID NO: 685559 - protein, 13 aa, Homo sapiens
  CDR3 for alpha chain variable domain of TCR clone 342780 (TRAV13-1, TRAJ21)
CAASIYNFNKFYF

SEQ ID NO: 685560 - protein, 13 aa, Homo sapiens
  CDR3 for beta chain variable domain of TCR clone 342780 (TRBV20-1, TRBJ2-7)
CSDRWGYNYEQYF

SEQ ID NO: 685561 - protein, 11 aa, Homo sapiens
  CDR3 for alpha chain variable domain of TCR clone 342781 (TRAV2, TRAJ33)
CAVDSNYQLIW

SEQ ID NO: 685562 - protein, 17 aa, Homo sapiens
  CDR3 for beta chain variable domain of TCR clone 342781 (TRBV28, TRBJ2-7)
CASSPGLAGGDSSEQYF

SEQ ID NO: 685563 - protein, 18 aa, Homo sapiens
  CDR3 for alpha chain variable domain of TCR clone 342782 (TRAV13-1, TRAJ52)
CAAKNPNAGRTSYGKLTF

SEQ ID NO: 685564 - protein, 15 aa, Homo sapiens
  CDR3 for beta chain variable domain of TCR clone 342782 (TRBV9, TRBJ1-6)
CASSVAGTGDSPLHF

SEQ ID NO: 685565 - protein, 14 aa, Homo sapiens
  CDR3 for alpha chain variable domain of TCR clone 342783 (TRAV1-2, TRAJ8)
CAVREDTGFQKLVF

SEQ ID NO: 685566 - protein, 16 aa, Homo sapiens
  CDR3 for beta chain variable domain of TCR clone 342783 (TRBV7-9, TRBJ2-4)
CASSLGPPGDKNIQYF

SEQ ID NO: 685567 - protein, 14 aa, Homo sapiens
  CDR3 for alpha chain variable domain of TCR clone 342784 (TRAV16, TRAJ13)
CALRRSGGYQKVTF

SEQ ID NO: 685568 - protein, 13 aa, Homo sapiens
  CDR3 for beta chain variable domain of TCR clone 342784 (TRBV10-2, TRBJ2-7)
CASGASGGYEQYF

SEQ ID NO: 685569 - protein, 15 aa, Homo sapiens
  CDR3 for alpha chain variable domain of TCR clone 342785 (TRAV25, TRAJ52)
CAGRPGGTSYGKLTF

SEQ ID NO: 685570 - protein, 15 aa, Homo sapiens
  CDR3 for beta chain variable domain of TCR clone 342785 (TRBV6-1, TRBJ2-1)
CASSELRGQYNEQFF

SEQ ID NO: 685571 - protein, 13 aa, Homo sapiens
  CDR3 for alpha chain variable domain of TCR clone 342786 (TRAV26-2, TRAJ43)
CILRAVNNNDMRF

SEQ ID NO: 685572 - protein, 14 aa, Homo sapiens
  CDR3 for beta chain variable domain of TCR clone 342786 (TRBV19, TRBJ2-1)
CASPTFVLSGEQIF

SEQ ID NO: 685573 - protein, 16 aa, Homo sapiens
  CDR3 for alpha chain variable domain of TCR clone 342787 (TRAV12-3, TRAJ53)
CAMSPGSGGSNYKLTF

SEQ ID NO: 685574 - protein, 15 aa, Homo sapiens
  CDR3 for beta chain variable domain of TCR clone 342787 (TRBV4-3, TRBJ2-3)
CASSPTGGHTDTQYF

SEQ ID NO: 685575 - protein, 19 aa, Homo sapiens
  CDR3 for alpha chain variable domain of TCR clone 342788 (TRAV16, )
CALSGDIQNPDPAMYLLRD

SEQ ID NO: 685576 - protein, 16 aa, Homo sapiens
  CDR3 for beta chain variable domain of TCR clone 342788 (TRBV12-5, TRBJ2-5)
CASGPRTSGNQETQYF

SEQ ID NO: 685577 - protein, 13 aa, Homo sapiens
  CDR3 for alpha chain variable domain of TCR clone 342789 (TRAV2, TRAJ40)
CAVVTSGTYNYIF

SEQ ID NO: 685578 - protein, 14 aa, Homo sapiens
  CDR3 for beta chain variable domain of TCR clone 342789 (TRBV19, TRBJ2-1)
CASPTFVLSGEQLF

SEQ ID NO: 685579 - protein, 14 aa, Homo sapiens
  CDR3 for alpha chain variable domain of TCR clone 342790 (TRAV1-2, TRAJ8)
CAVREDKGFQKLVF

SEQ ID NO: 685580 - protein, 15 aa, Homo sapiens
  CDR3 for beta chain variable domain of TCR clone 342790 (TRBV2, TRBJ2-7)
YASSEGLARSYEQYF

SEQ ID NO: 685581 - protein, 16 aa, Homo sapiens
  CDR3 for alpha chain variable domain of TCR clone 342791 (TRAV12-3, TRAJ53)
FAMSPASGGSNYKLTF

SEQ ID NO: 685582 - protein, 11 aa, Homo sapiens
  CDR3 for beta chain variable domain of TCR clone 342791 (TRBV29-1, TRBJ2-5)
CSEDRTGTQYF

SEQ ID NO: 685583 - protein, 15 aa, Homo sapiens
  CDR3 for alpha chain variable domain of TCR clone 342792 (TRAV3, TRAJ9)
CAVRDLNTGGFKTIF

SEQ ID NO: 685584 - protein, 16 aa, Homo sapiens
  CDR3 for beta chain variable domain of TCR clone 342792 (TRBV15, TRBJ2-5)
CATSPTTGQGMETQYF

SEQ ID NO: 685585 - protein, 16 aa, Homo sapiens
  CDR3 for alpha chain variable domain of TCR clone 342793 (TRAV12-3, TRAJ53)
CAMSPGSGGSNYKLTF

SEQ ID NO: 685586 - protein, 14 aa, Homo sapiens
  CDR3 for beta chain variable domain of TCR clone 342793 (TRBV7-2, TRBJ2-5)
CASSTGGELKTQYF

SEQ ID NO: 685587 - protein, 15 aa, Homo sapiens
  CDR3 for alpha chain variable domain of TCR clone 342794 (TRAV12-2, TRAJ8)
CAVREENTGFQKLVF

SEQ ID NO: 685588 - protein, 14 aa, Homo sapiens
  CDR3 for beta chain variable domain of TCR clone 342794 (TRBV7-6, TRBJ2-3)
CASSLGTVTDTQYF

SEQ ID NO: 685589 - protein, 13 aa, Homo sapiens
  CDR3 for alpha chain variable domain of TCR clone 342795 (TRAV8-3, TRAJ43)
CAVGADNNNDMRF

SEQ ID NO: 685590 - protein, 14 aa, Homo sapiens
  CDR3 for beta chain variable domain of TCR clone 342795 (TRBV19, TRBJ2-1)
CASPTFVLSGEQFF

SEQ ID NO: 685591 - protein, 13 aa, Homo sapiens
  CDR3 for alpha chain variable domain of TCR clone 342796 (TRAV36/DV7, TRAJ37)
CAVFSSNTGKLIF

SEQ ID NO: 685592 - protein, 17 aa, Homo sapiens
  CDR3 for beta chain variable domain of TCR clone 342796 (TRBV5-1, TRBJ2-1)
CASSTGTSGYSYNEQFF

SEQ ID NO: 685593 - protein, 16 aa, Homo sapiens
  CDR3 for alpha chain variable domain of TCR clone 342797 (TRAV3, TRAJ37)
CAVSVRGSGNTGKLIF

SEQ ID NO: 685594 - protein, 16 aa, Homo sapiens
  CDR3 for beta chain variable domain of TCR clone 342797 (TRBV11-2, TRBJ2-7)
CASSPTTGGVSYEQYF

SEQ ID NO: 685595 - protein, 13 aa, Homo sapiens
  CDR3 for alpha chain variable domain of TCR clone 342798 (TRAV8-2, TRAJ26)
CVVSLGYGQNFVF

SEQ ID NO: 685596 - protein, 14 aa, Homo sapiens
  CDR3 for beta chain variable domain of TCR clone 342798 (TRBV5-1, TRBJ2-7)
CASSRGESLYEQYF

SEQ ID NO: 685597 - protein, 13 aa, Homo sapiens
  CDR3 for alpha chain variable domain of TCR clone 342799 (TRAV8-4, TRAJ21)
CAGSEYNFNKFYF

SEQ ID NO: 685598 - protein, 12 aa, Homo sapiens
  CDR3 for beta chain variable domain of TCR clone 342799 (TRBV7-9, TRBJ1-5)
CASSSDQAPQHF

SEQ ID NO: 685599 - protein, 14 aa, Homo sapiens
  CDR3 for alpha chain variable domain of TCR clone 342800 (TRAV21, TRAJ15)
CAVSLNQAGTALIF

SEQ ID NO: 685600 - protein, 15 aa, Homo sapiens
  CDR3 for beta chain variable domain of TCR clone 342800 (TRBV7-2, TRBJ2-3)
CASSLVVRGPDTQYF

SEQ ID NO: 685601 - protein, 11 aa, Homo sapiens
  CDR3 for alpha chain variable domain of TCR clone 342801 (TRAV12-2, TRAJ29)
CAVTLRSPLVF

SEQ ID NO: 685602 - protein, 17 aa, Homo sapiens
  CDR3 for beta chain variable domain of TCR clone 342801 (TRBV10-3, TRBJ1-2)
CAISETRDRGLEYGYTF

SEQ ID NO: 685603 - protein, 16 aa, Homo sapiens
  CDR3 for alpha chain variable domain of TCR clone 342802 (TRAV3, TRAJ37)
CAVRGKGSGNTGKLIF

SEQ ID NO: 685604 - protein, 14 aa, Homo sapiens
  CDR3 for beta chain variable domain of TCR clone 342802 (TRBV20-1, TRBJ2-7)
CSAKRGRSSYEQYL

SEQ ID NO: 685605 - protein, 15 aa, Homo sapiens
  CDR3 for alpha chain variable domain of TCR clone 342803 (TRAV1-2, TRAJ13)
CAVRGSSGGYQKVTF

SEQ ID NO: 685606 - protein, 15 aa, Homo sapiens
  CDR3 for beta chain variable domain of TCR clone 342803 (TRBV11-3, TRBJ1-3)
CASSLSGTSGNTMYF

SEQ ID NO: 685607 - protein, 13 aa, Homo sapiens
  CDR3 for alpha chain variable domain of TCR clone 342804 (TRAV13-1, TRAJ5)
CAASDTGRRALNF

SEQ ID NO: 685608 - protein, 12 aa, Homo sapiens
  CDR3 for beta chain variable domain of TCR clone 342804 (TRBV28, TRBJ2-3)
CASRLYRDTQYF

SEQ ID NO: 685609 - protein, 13 aa, Homo sapiens
  CDR3 for alpha chain variable domain of TCR clone 342805 (TRAV13-2, TRAJ13)
CAERPGGYQKVTF

SEQ ID NO: 685610 - protein, 19 aa, Homo sapiens
  CDR3 for beta chain variable domain of TCR clone 342805 (TRBV4-1, TRBJ2-1)
CASSQGPRPGLGGRNEQFF

SEQ ID NO: 685611 - protein, 21 aa, Homo sapiens
  CDR3 for alpha chain variable domain of TCR clone 342806 (TRAV8-4, TRAJ26)
CAVSSSMVRILFLVPEPDCPF

SEQ ID NO: 685612 - protein, 13 aa, Homo sapiens
  CDR3 for beta chain variable domain of TCR clone 342806 (TRBV12-4, TRBJ2-7)
CASSPTETYEQYF

SEQ ID NO: 685613 - protein, 17 aa, Homo sapiens
  CDR3 for alpha chain variable domain of TCR clone 342807 (TRAV1-1, TRAJ4)
CALYNKLIFGAGTRLAV

SEQ ID NO: 685614 - protein, 15 aa, Homo sapiens
  CDR3 for beta chain variable domain of TCR clone 342807 (TRBV5-1, TRBJ2-1)
CASSPPRAPYNEQFF

SEQ ID NO: 685615 - protein, 14 aa, Homo sapiens
  CDR3 for alpha chain variable domain of TCR clone 342808 (TRAV16, TRAJ17)
CALSGRAAGNKPTF

SEQ ID NO: 685616 - protein, 15 aa, Homo sapiens
  CDR3 for beta chain variable domain of TCR clone 342808 (TRBV3-1, TRBJ1-2)
CASSPTRLPEGGYTY

SEQ ID NO: 685617 - protein, 12 aa, Homo sapiens
  CDR3 for alpha chain variable domain of TCR clone 342809 (TRAV16, TRAJ27)
CALNHQCRQINL

SEQ ID NO: 685618 - protein, 13 aa, Homo sapiens
  CDR3 for beta chain variable domain of TCR clone 342809 (TRBV11-2, TRBJ1-5)
ASSLDRGRQPQHF

SEQ ID NO: 685619 - protein, 19 aa, Homo sapiens
  CDR3 for alpha chain variable domain of TCR clone 342810 (TRAV2, TRAJ32)
TTVLSTPPSQGGATNKLLF

SEQ ID NO: 685620 - protein, 12 aa, Homo sapiens
  CDR3 for beta chain variable domain of TCR clone 342810 (TRBV20-1, TRBJ2-7)
CSAITPTKEQYF

SEQ ID NO: 685621 - protein, 15 aa, Homo sapiens
  CDR3 for alpha chain variable domain of TCR clone 342811 (TRAV38-2/DV8, TRAJ45)
CAYWDSVGGADGLTF

SEQ ID NO: 685622 - protein, 14 aa, Homo sapiens
  CDR3 for beta chain variable domain of TCR clone 342811 (TRBV7-2, TRBJ2-7)
CASRSQGAAYEQYF

SEQ ID NO: 685623 - protein, 13 aa, Homo sapiens
  CDR3 for alpha chain variable domain of TCR clone 342812 (TRAV23/DV6, TRAJ22)
CAPYSGSARQLTF

SEQ ID NO: 685624 - protein, 14 aa, Homo sapiens
  CDR3 for beta chain variable domain of TCR clone 342812 (TRBV4-1, TRBJ2-2)
CASSQAVNTGELFF

SEQ ID NO: 685625 - protein, 13 aa, Homo sapiens
  CDR3 for alpha chain variable domain of TCR clone 342813 (TRAV35, TRAJ53)
CAGQESSNYKLTF

SEQ ID NO: 685626 - protein, 11 aa, Homo sapiens
  CDR3 for beta chain variable domain of TCR clone 342813 (TRBV29-1, TRBJ2-5)
CSEDRTETQYF

SEQ ID NO: 685627 - protein, 15 aa, Homo sapiens
  CDR3 for alpha chain variable domain of TCR clone 342814 (TRAV3, TRAJ29)
CAVRDLYSGNTHLVF

SEQ ID NO: 685628 - protein, 17 aa, Homo sapiens
  CDR3 for beta chain variable domain of TCR clone 342814 (TRBV20-1, TRBJ2-1)
CSARDPLAGVWDNEQFF

SEQ ID NO: 685629 - protein, 13 aa, Homo sapiens
  CDR3 for alpha chain variable domain of TCR clone 342815 (TRAV2, TRAJ40)
CAVVTSGTYKYIF

SEQ ID NO: 685630 - protein, 15 aa, Homo sapiens
  CDR3 for beta chain variable domain of TCR clone 342815 (TRBV7-2, TRBJ1-5)
CASSSGQGHAQPQHF

SEQ ID NO: 685631 - protein, 16 aa, Homo sapiens
  CDR3 for alpha chain variable domain of TCR clone 342816 (TRAV23/DV6, TRAJ9)
CAASIGGNTGGVKTIF

SEQ ID NO: 685632 - protein, 17 aa, Homo sapiens
  CDR3 for beta chain variable domain of TCR clone 342816 (TRBV13, TRBJ2-3)
CASSLSRVAGGRNTQYF

SEQ ID NO: 685633 - protein, 12 aa, Homo sapiens
  CDR3 for alpha chain variable domain of TCR clone 342817 (TRAV12-1, TRAJ34)
CVVAGATDKLIF

SEQ ID NO: 685634 - protein, 15 aa, Homo sapiens
  CDR3 for beta chain variable domain of TCR clone 342817 (TRBV12-4, TRBJ2-5)
CASSPPTGLQETQYF

SEQ ID NO: 685635 - protein, 14 aa, Homo sapiens
  CDR3 for alpha chain variable domain of TCR clone 342818 (TRAV21, TRAJ38)
CAVMGAGNNRKLIR

SEQ ID NO: 685636 - protein, 13 aa, Homo sapiens
  CDR3 for beta chain variable domain of TCR clone 342818 (TRBV7-3, TRBJ2-5)
CASSIGFFETQYF

SEQ ID NO: 685637 - protein, 15 aa, Homo sapiens
  CDR3 for alpha chain variable domain of TCR clone 342819 (TRAV12-3, TRAJ5)
CAMSGLGTGRRALTF

SEQ ID NO: 685638 - protein, 16 aa, Homo sapiens
  CDR3 for beta chain variable domain of TCR clone 342819 (TRBV20-1, TRBJ2-3)
CSARLHSAGAIDTQYV

SEQ ID NO: 685639 - protein, 10 aa, Homo sapiens
  CDR3 for alpha chain variable domain of TCR clone 342820 (TRAV30, TRAJ48)
CGLGNEKLTF

SEQ ID NO: 685640 - protein, 15 aa, Homo sapiens
  CDR3 for beta chain variable domain of TCR clone 342820 (TRBV28, TRBJ2-5)
CASSPPWSYQETQYF

SEQ ID NO: 685641 - protein, 14 aa, Homo sapiens
  CDR3 for alpha chain variable domain of TCR clone 342821 (TRAV12-2, TRAJ17)
CAALFKAAGDKLTF

SEQ ID NO: 685642 - protein, 16 aa, Homo sapiens
  CDR3 for beta chain variable domain of TCR clone 342821 (TRBV20-1, TRBJ2-2)
CSASASGIPGAGELFF

SEQ ID NO: 685643 - protein, 13 aa, Homo sapiens
  CDR3 for alpha chain variable domain of TCR clone 342822 (TRAV1-1, TRAJ9)
CAAKNTGGFKTIF

SEQ ID NO: 685644 - protein, 15 aa, Homo sapiens
  CDR3 for beta chain variable domain of TCR clone 342822 (TRBV7-7, TRBJ2-5)
CASSQLERAEETQYF

SEQ ID NO: 685645 - protein, 13 aa, Homo sapiens
  CDR3 for alpha chain variable domain of TCR clone 342823 (TRAV17, TRAJ9)
CATFLTGGFTTIF

SEQ ID NO: 685646 - protein, 16 aa, Homo sapiens
  CDR3 for beta chain variable domain of TCR clone 342823 (TRBV5-7, TRBJ1-4)
CASSPSGGLKTEKLFF

SEQ ID NO: 685647 - protein, 10 aa, Homo sapiens
  CDR3 for alpha chain variable domain of TCR clone 342824 (TRAV38-2/DV8, TRAJ40)
CASGTDKYIF

SEQ ID NO: 685648 - protein, 14 aa, Homo sapiens
  CDR3 for beta chain variable domain of TCR clone 342824 (TRBV7-9, TRBJ2-1)
CASRPRHSLYEQFF

SEQ ID NO: 685649 - protein, 14 aa, Homo sapiens
  CDR3 for alpha chain variable domain of TCR clone 342825 (TRAV13-1, TRAJ44)
CAAKATGTASKLTF

SEQ ID NO: 685650 - protein, 15 aa, Homo sapiens
  CDR3 for beta chain variable domain of TCR clone 342825 (TRBV28, TRBJ1-5)
CASSRTGGYVQPQHF

SEQ ID NO: 685651 - protein, 13 aa, Homo sapiens
  CDR3 for alpha chain variable domain of TCR clone 342826 (TRAV13-2, TRAJ15)
CAEKNQAGTALIV

SEQ ID NO: 685652 - protein, 15 aa, Homo sapiens
  CDR3 for beta chain variable domain of TCR clone 342826 (TRBV29-1, TRBJ2-5)
CSVAPGQGARETQYF

SEQ ID NO: 685653 - protein, 14 aa, Homo sapiens
  CDR3 for alpha chain variable domain of TCR clone 342827 (TRAV38-1, TRAJ45)
CACHSGGGADGLTF

SEQ ID NO: 685654 - protein, 13 aa, Homo sapiens
  CDR3 for beta chain variable domain of TCR clone 342827 (TRBV10-3, TRBJ1-2)
CAISERDSYGYTF

SEQ ID NO: 685655 - protein, 11 aa, Homo sapiens
  CDR3 for alpha chain variable domain of TCR clone 342828 (TRAV1-2, TRAJ20)
CAVSNDYKLSF

SEQ ID NO: 685656 - protein, 16 aa, Homo sapiens
  CDR3 for beta chain variable domain of TCR clone 342828 (TRBV29-1, TRBJ2-6)
CSAGDITYAGANVLTF

SEQ ID NO: 685657 - protein, 15 aa, Homo sapiens
  CDR3 for alpha chain variable domain of TCR clone 342829 (TRAV26-2, TRAJ57)
CILRDIRGGSEKLVF

SEQ ID NO: 685658 - protein, 15 aa, Homo sapiens
  CDR3 for beta chain variable domain of TCR clone 342829 (TRBV2, TRBJ2-1)
CASDIGRAGEGEQFF

SEQ ID NO: 685659 - protein, 16 aa, Homo sapiens
  CDR3 for alpha chain variable domain of TCR clone 342830 (TRAV30, TRAJ24)
CGTEIVDADSWGKFQF

SEQ ID NO: 685660 - protein, 13 aa, Homo sapiens
  CDR3 for beta chain variable domain of TCR clone 342830 (TRBV18, TRBJ1-2)
YASSASATEGYTF

SEQ ID NO: 685661 - protein, 12 aa, Homo sapiens
  CDR3 for alpha chain variable domain of TCR clone 342831 (TRAV2, TRAJ31)
CAVEDNNASLMF

SEQ ID NO: 685662 - protein, 12 aa, Homo sapiens
  CDR3 for beta chain variable domain of TCR clone 342831 (TRBV6-5, TRBJ2-2)
CASSLATGELFF

SEQ ID NO: 685663 - protein, 13 aa, Homo sapiens
  CDR3 for alpha chain variable domain of TCR clone 342832 (TRAV29/DV5, TRAJ31)
CAASRNNNARLIF

SEQ ID NO: 685664 - protein, 14 aa, Homo sapiens
  CDR3 for beta chain variable domain of TCR clone 342832 (TRBV7-9, TRBJ2-3)
CASSLEDGTDTQYF

SEQ ID NO: 685665 - protein, 13 aa, Homo sapiens
  CDR3 for alpha chain variable domain of TCR clone 342833 (TRAV1-2, TRAJ9)
CAALNTGGFKTIF

SEQ ID NO: 685666 - protein, 13 aa, Homo sapiens
  CDR3 for beta chain variable domain of TCR clone 342833 (TRBV19, TRBJ1-2)
CASSVPGQDGYVF

SEQ ID NO: 685667 - protein, 11 aa, Homo sapiens
  CDR3 for alpha chain variable domain of TCR clone 342834 (TRAV35, TRAJ30)
CAGPGDDKIIF

SEQ ID NO: 685668 - protein, 15 aa, Homo sapiens
  CDR3 for beta chain variable domain of TCR clone 342834 (TRBV11-3, TRBJ2-3)
CASLKDGREGDTQYF

SEQ ID NO: 685669 - protein, 12 aa, Homo sapiens
  CDR3 for alpha chain variable domain of TCR clone 342835 (TRAV12-2, TRAJ7)
CAVMRGNNRLAF

SEQ ID NO: 685670 - protein, 17 aa, Homo sapiens
  CDR3 for beta chain variable domain of TCR clone 342835 (TRBV7-9, TRBJ2-3)
CASSPTVAGELTDTQYF

SEQ ID NO: 685671 - protein, 15 aa, Homo sapiens
  CDR3 for alpha chain variable domain of TCR clone 342836 (TRAV27, TRAJ38)
CAGRFNAGNNRKLIW

SEQ ID NO: 685672 - protein, 18 aa, Homo sapiens
  CDR3 for beta chain variable domain of TCR clone 342836 (TRBV11-2, TRBJ2-6)
CASSLNPFLGTGANVLTF

SEQ ID NO: 685673 - protein, 14 aa, Homo sapiens
  CDR3 for alpha chain variable domain of TCR clone 342837 (TRAV3, TRAJ9)
CAVRGNTGGFKTIF

SEQ ID NO: 685674 - protein, 14 aa, Homo sapiens
  CDR3 for beta chain variable domain of TCR clone 342837 (TRBV15, TRBJ2-1)
CATSGVGDYNEQFF

SEQ ID NO: 685675 - protein, 10 aa, Homo sapiens
  CDR3 for alpha chain variable domain of TCR clone 342838 (TRAV2, TRAJ34)
CAVVNDKLIF

SEQ ID NO: 685676 - protein, 15 aa, Homo sapiens
  CDR3 for beta chain variable domain of TCR clone 342838 (TRBV3-1, TRBJ2-2)
CASSQEWTRAGELYF

SEQ ID NO: 685677 - protein, 12 aa, Homo sapiens
  CDR3 for alpha chain variable domain of TCR clone 342839 (TRAV38-2/DV8, TRAJ47)
CVLMEYGNKLVF

SEQ ID NO: 685678 - protein, 15 aa, Homo sapiens
  CDR3 for beta chain variable domain of TCR clone 342839 (TRBV4-1, TRBJ2-2)
CASSEGQGITGELFF

SEQ ID NO: 685679 - protein, 14 aa, Homo sapiens
  CDR3 for alpha chain variable domain of TCR clone 342840 (TRAV26-1, TRAJ38)
CIADNAGNNRKLIW

SEQ ID NO: 685680 - protein, 11 aa, Homo sapiens
  CDR3 for beta chain variable domain of TCR clone 342840 (TRBV5-6, TRBJ2-5)
CASSLERTQYF

SEQ ID NO: 685681 - protein, 14 aa, Homo sapiens
  CDR3 for alpha chain variable domain of TCR clone 342841 (TRAV16, TRAJ37)
CAPDISGNTGKLIF

SEQ ID NO: 685682 - protein, 14 aa, Homo sapiens
  CDR3 for beta chain variable domain of TCR clone 342841 (TRBV7-6, TRBJ2-7)
CASSFRQGADEQYF

SEQ ID NO: 685683 - protein, 15 aa, Homo sapiens
  CDR3 for alpha chain variable domain of TCR clone 342842 (TRAV35, TRAJ41)
CAGQLFSNYGYALNF

SEQ ID NO: 685684 - protein, 14 aa, Homo sapiens
  CDR3 for beta chain variable domain of TCR clone 342842 (TRBV7-2, TRBJ1-2)
CASSRGGTNYGYTF

SEQ ID NO: 685685 - protein, 11 aa, Homo sapiens
  CDR3 for alpha chain variable domain of TCR clone 342843 (TRAV4, TRAJ23)
CLVAPGVKLIF

SEQ ID NO: 685686 - protein, 15 aa, Homo sapiens
  CDR3 for beta chain variable domain of TCR clone 342843 (TRBV7-2, TRBJ2-1)
CASSFQADEYNEQFF

SEQ ID NO: 685687 - protein, 15 aa, Homo sapiens
  CDR3 for alpha chain variable domain of TCR clone 342844 (TRAV2, TRAJ9)
CAVEDRGTGGVKTTF

SEQ ID NO: 685688 - protein, 16 aa, Homo sapiens
  CDR3 for beta chain variable domain of TCR clone 342844 (TRBV24-1, TRBJ2-3)
CATSDPGTGATDTQYF

SEQ ID NO: 685689 - protein, 12 aa, Homo sapiens
  CDR3 for alpha chain variable domain of TCR clone 342845 (TRAV3, TRAJ43)
CAGRDPNNDMRF

SEQ ID NO: 685690 - protein, 14 aa, Homo sapiens
  CDR3 for beta chain variable domain of TCR clone 342845 (TRBV19, TRBJ2-5)
CASSMTGQQETQYF

SEQ ID NO: 685691 - protein, 11 aa, Homo sapiens
  CDR3 for alpha chain variable domain of TCR clone 342846 (TRAV2, TRAJ13)
CASGGYQKVTF

SEQ ID NO: 685692 - protein, 18 aa, Homo sapiens
  CDR3 for beta chain variable domain of TCR clone 342846 (TRBV6-5, TRBJ2-6)
CASSYSGNMESGANVLTF

SEQ ID NO: 685693 - protein, 13 aa, Homo sapiens
  CDR3 for alpha chain variable domain of TCR clone 342847 (TRAV29/DV5, TRAJ31)
CAASRNNNARLMF

SEQ ID NO: 685694 - protein, 13 aa, Homo sapiens
  CDR3 for beta chain variable domain of TCR clone 342847 (TRBV6-5, TRBJ2-5)
CASSPQGGETQYF

SEQ ID NO: 685695 - protein, 14 aa, Homo sapiens
  CDR3 for alpha chain variable domain of TCR clone 342848 (TRAV8-2, TRAJ4)
CVVSPSGGYNKLIF

SEQ ID NO: 685696 - protein, 13 aa, Homo sapiens
  CDR3 for beta chain variable domain of TCR clone 342848 (TRBV11-2, TRBJ1-1)
CASSLGNGAEAFF

SEQ ID NO: 685697 - protein, 14 aa, Homo sapiens
  CDR3 for alpha chain variable domain of TCR clone 342849 (TRAV17, TRAJ11)
CATDTSRGYSTLTF

SEQ ID NO: 685698 - protein, 15 aa, Homo sapiens
  CDR3 for beta chain variable domain of TCR clone 342849 (TRBV7-6, TRBJ2-3)
CSSARTSRGTDTQYF

SEQ ID NO: 685699 - protein, 12 aa, Homo sapiens
  CDR3 for alpha chain variable domain of TCR clone 342850 (TRAV25, TRAJ31)
CAGHLNNARLMF

SEQ ID NO: 685700 - protein, 11 aa, Homo sapiens
  CDR3 for beta chain variable domain of TCR clone 342850 (TRBV12-4, TRBJ2-3)
CASTATDTQYF

SEQ ID NO: 685701 - protein, 16 aa, Homo sapiens
  CDR3 for alpha chain variable domain of TCR clone 342851 (TRAV12-1, TRAJ8)
CVVNGRGNTGFQKIVF

SEQ ID NO: 685702 - protein, 15 aa, Homo sapiens
  CDR3 for beta chain variable domain of TCR clone 342851 (TRBV6-1, TRBJ1-2)
CASNPGRGGSYGYTF

SEQ ID NO: 685703 - protein, 14 aa, Homo sapiens
  CDR3 for alpha chain variable domain of TCR clone 342852 (TRAV8-3, TRAJ21)
CAAGLNPRSDKFYF

SEQ ID NO: 685704 - protein, 11 aa, Homo sapiens
  CDR3 for beta chain variable domain of TCR clone 342852 (TRBV6-3, TRBJ2-3)
CATGQADTQYF

SEQ ID NO: 685705 - protein, 11 aa, Homo sapiens
  CDR3 for alpha chain variable domain of TCR clone 342853 (TRAV3, TRAJ21)
CAGGNFNKFYF

SEQ ID NO: 685706 - protein, 14 aa, Homo sapiens
  CDR3 for beta chain variable domain of TCR clone 342853 (TRBV15, TRBJ2-1)
CATSGVEDYNEQFF

SEQ ID NO: 685707 - protein, 12 aa, Homo sapiens
  CDR3 for alpha chain variable domain of TCR clone 342854 (TRAV16, TRAJ10)
CSRTGGGNKLTF

SEQ ID NO: 685708 - protein, 15 aa, Homo sapiens
  CDR3 for beta chain variable domain of TCR clone 342854 (TRBV4-1, TRBJ2-7)
CASSQHGQGFDEQYF

SEQ ID NO: 685709 - protein, 13 aa, Homo sapiens
  CDR3 for alpha chain variable domain of TCR clone 342855 (TRAV27, TRAJ6)
CAGGTRGSYIPTF

SEQ ID NO: 685710 - protein, 15 aa, Homo sapiens
  CDR3 for beta chain variable domain of TCR clone 342855 (TRBV9, TRBJ2-1)
CASSLAGSSYNEQFF

SEQ ID NO: 685711 - protein, 14 aa, Homo sapiens
  CDR3 for alpha chain variable domain of TCR clone 342856 (TRAV1-2, TRAJ16)
CAVNRFSDGQKLLF

SEQ ID NO: 685712 - protein, 12 aa, Homo sapiens
  CDR3 for beta chain variable domain of TCR clone 342856 (TRBV6-1, TRBJ2-1)
CATQKGGGHLFF

SEQ ID NO: 685713 - protein, 12 aa, Homo sapiens
  CDR3 for alpha chain variable domain of TCR clone 342857 (TRAV8-6, TRAJ36)
CAVSDWLGQTTS

SEQ ID NO: 685714 - protein, 13 aa, Homo sapiens
  CDR3 for beta chain variable domain of TCR clone 342857 (TRBV7-2, TRBJ2-2)
CASSLAVTGELFF

SEQ ID NO: 685715 - protein, 13 aa, Homo sapiens
  CDR3 for alpha chain variable domain of TCR clone 342858 (TRAV12-1, TRAJ49)
CVVIFNTGNQFYF

SEQ ID NO: 685716 - protein, 13 aa, Homo sapiens
  CDR3 for beta chain variable domain of TCR clone 342858 (TRBV10-3, TRBJ2-7)
CASKLAVNYEQYF

SEQ ID NO: 685717 - protein, 12 aa, Homo sapiens
  CDR3 for alpha chain variable domain of TCR clone 342859 (TRAV1-1, TRAJ39)
CAVPVVGNMLTF

SEQ ID NO: 685718 - protein, 14 aa, Homo sapiens
  CDR3 for beta chain variable domain of TCR clone 342859 (TRBV7-2, TRBJ1-2)
CASSSQGAHYGYTF

SEQ ID NO: 685719 - protein, 16 aa, Homo sapiens
  CDR3 for alpha chain variable domain of TCR clone 342860 (TRAV12-3, TRAJ53)
CAMSPGSGGSNYKLTF

SEQ ID NO: 685720 - protein, 12 aa, Homo sapiens
  CDR3 for beta chain variable domain of TCR clone 342860 (TRBV19, TRBJ2-1)
CASSRQGAEQFF

SEQ ID NO: 685721 - protein, 12 aa, Homo sapiens
  CDR3 for alpha chain variable domain of TCR clone 342861 (TRAV17, TRAJ30)
RVTERRDDKIIF

SEQ ID NO: 685722 - protein, 14 aa, Homo sapiens
  CDR3 for beta chain variable domain of TCR clone 342861 (TRBV7-7, TRBJ2-2)
CASSRDRSTGELFF

SEQ ID NO: 685723 - protein, 15 aa, Homo sapiens
  CDR3 for alpha chain variable domain of TCR clone 342862 (TRAV26-1, TRAJ29)
CIVRVEGSGNTPLVF

SEQ ID NO: 685724 - protein, 13 aa, Homo sapiens
  CDR3 for beta chain variable domain of TCR clone 342862 (TRBV24-1, TRBJ1-1)
CATRGRAGTEAFF

SEQ ID NO: 685725 - protein, 16 aa, Homo sapiens
  CDR3 for alpha chain variable domain of TCR clone 342863 (TRAV12-1, TRAJ45)
CVVIRYSEGGADGLTF

SEQ ID NO: 685726 - protein, 12 aa, Homo sapiens
  CDR3 for beta chain variable domain of TCR clone 342863 (TRBV6-5, TRBJ2-2)
CASRQITGELFF

SEQ ID NO: 685727 - protein, 16 aa, Homo sapiens
  CDR3 for alpha chain variable domain of TCR clone 342864 (TRAV3, TRAJ10)
CAVRDTRAGGGNKLTF

SEQ ID NO: 685728 - protein, 15 aa, Homo sapiens
  CDR3 for beta chain variable domain of TCR clone 342864 (TRBV2, TRBJ2-1)
CASSELAGSYNEQFF

SEQ ID NO: 685729 - protein, 14 aa, Homo sapiens
  CDR3 for alpha chain variable domain of TCR clone 342865 (TRAV35, TRAJ56)
WAGQLTGANSKLAF

SEQ ID NO: 685730 - protein, 16 aa, Homo sapiens
  CDR3 for beta chain variable domain of TCR clone 342865 (TRBV7-2, TRBJ1-2)
CASSSNQDRRGHGYTF

SEQ ID NO: 685731 - protein, 12 aa, Homo sapiens
  CDR3 for alpha chain variable domain of TCR clone 342866 (TRAV13-1, TRAJ26)
QVQDNYGQNFVF

SEQ ID NO: 685732 - protein, 13 aa, Homo sapiens
  CDR3 for beta chain variable domain of TCR clone 342866 (TRBV7-9, TRBJ2-7)
CASSAALQYEQYF

SEQ ID NO: 685733 - protein, 16 aa, Homo sapiens
  CDR3 for alpha chain variable domain of TCR clone 342867 (TRAV1-2, TRAJ10)
CAVRGVRTGGGNKLTF

SEQ ID NO: 685734 - protein, 16 aa, Homo sapiens
  CDR3 for beta chain variable domain of TCR clone 342867 (TRBV14, TRBJ2-7)
CASSQGRGGYSYEQYF

SEQ ID NO: 685735 - protein, 18 aa, Homo sapiens
  CDR3 for alpha chain variable domain of TCR clone 342868 (TRAV21, TRAJ52)
CAVMPSPAGVTSYGKLTF

SEQ ID NO: 685736 - protein, 17 aa, Homo sapiens
  CDR3 for beta chain variable domain of TCR clone 342868 (TRBV13, TRBJ2-3)
CASSLSRVAGGRNTQYF

SEQ ID NO: 685737 - protein, 15 aa, Homo sapiens
  CDR3 for alpha chain variable domain of TCR clone 342869 (TRAV23/DV6, TRAJ33)
CAASNSWGGNYQLIW

SEQ ID NO: 685738 - protein, 14 aa, Homo sapiens
  CDR3 for beta chain variable domain of TCR clone 342869 (TRBV7-2, TRBJ2-7)
CASSLYPGRYEQYF

SEQ ID NO: 685739 - protein, 13 aa, Homo sapiens
  CDR3 for alpha chain variable domain of TCR clone 342870 (TRAV21, TRAJ57)
CAVTQGGSETLVF

SEQ ID NO: 685740 - protein, 16 aa, Homo sapiens
  CDR3 for beta chain variable domain of TCR clone 342870 (TRBV29-1, TRBJ2-7)
GSVEDAEDGTAYEQYF

SEQ ID NO: 685741 - protein, 15 aa, Homo sapiens
  CDR3 for alpha chain variable domain of TCR clone 342871 (TRAV8-3, TRAJ45)
CASSYSGGGADGLTF

SEQ ID NO: 685742 - protein, 16 aa, Homo sapiens
  CDR3 for beta chain variable domain of TCR clone 342871 (TRBV7-9, TRBJ2-2)
CASSGFGGVNTGELFF

SEQ ID NO: 685743 - protein, 12 aa, Homo sapiens
  CDR3 for alpha chain variable domain of TCR clone 342872 (TRAV8-3, TRAJ26)
CAGDNYGQNFVF

SEQ ID NO: 685744 - protein, 14 aa, Homo sapiens
  CDR3 for beta chain variable domain of TCR clone 342872 (TRBV20-1, TRBJ1-3)
CSASPTGAGNTIYF

SEQ ID NO: 685745 - protein, 13 aa, Homo sapiens
  CDR3 for alpha chain variable domain of TCR clone 342873 (TRAV20, TRAJ54)
CAVQAGGAQKLVF

SEQ ID NO: 685746 - protein, 17 aa, Homo sapiens
  CDR3 for beta chain variable domain of TCR clone 342873 (TRBV13, TRBJ2-3)
CASSLSRVAGGRNTQYF

SEQ ID NO: 685747 - protein, 12 aa, Homo sapiens
  CDR3 for alpha chain variable domain of TCR clone 342874 (TRAV13-2, TRAJ23)
CAERHRGGKLIF

SEQ ID NO: 685748 - protein, 14 aa, Homo sapiens
  CDR3 for beta chain variable domain of TCR clone 342874 (TRBV2, TRBJ2-7)
CASSLTSGRYEQYF

SEQ ID NO: 685749 - protein, 13 aa, Homo sapiens
  CDR3 for alpha chain variable domain of TCR clone 342875 (TRAV13-1, TRAJ6)
CAASRGGRYIPTF

SEQ ID NO: 685750 - protein, 17 aa, Homo sapiens
  CDR3 for beta chain variable domain of TCR clone 342875 (TRBV13, TRBJ2-3)
CASSLSRVAGGRNTQYF

SEQ ID NO: 685751 - protein, 12 aa, Homo sapiens
  CDR3 for alpha chain variable domain of TCR clone 342876 (TRAV13-1, TRAJ21)
CAAKEGVNKFYF

SEQ ID NO: 685752 - protein, 16 aa, Homo sapiens
  CDR3 for beta chain variable domain of TCR clone 342876 (TRBV28, TRBJ2-7)
CASSLFFETGGPEQYF

SEQ ID NO: 685753 - protein, 13 aa, Homo sapiens
  CDR3 for alpha chain variable domain of TCR clone 342877 (TRAV12-1, TRAJ11)
CVVNRAGYSTLTF

SEQ ID NO: 685754 - protein, 14 aa, Homo sapiens
  CDR3 for beta chain variable domain of TCR clone 342877 (TRBV19, TRBJ2-2)
CASTVAANTGELFF

SEQ ID NO: 685755 - protein, 14 aa, Homo sapiens
  CDR3 for alpha chain variable domain of TCR clone 342878 (TRAV26-1, TRAJ21)
RIVRPPYNFNKFYF

SEQ ID NO: 685756 - protein, 14 aa, Homo sapiens
  CDR3 for beta chain variable domain of TCR clone 342878 (TRBV11-3, TRBJ2-1)
CASSATTSGSIQFF

SEQ ID NO: 685757 - protein, 16 aa, Homo sapiens
  CDR3 for alpha chain variable domain of TCR clone 342879 (TRAV30, TRAJ24)
CGTEIVDADSWGKFQF

SEQ ID NO: 685758 - protein, 13 aa, Homo sapiens
  CDR3 for beta chain variable domain of TCR clone 342879 (TRBV18, TRBJ1-1)
CASSGGRNTEASF

SEQ ID NO: 685759 - protein, 13 aa, Homo sapiens
  CDR3 for alpha chain variable domain of TCR clone 342880 (TRAV27, TRAJ24)
CAGDRDSWGKLQF

SEQ ID NO: 685760 - protein, 15 aa, Homo sapiens
  CDR3 for beta chain variable domain of TCR clone 342880 (TRBV7-2, TRBJ2-1)
CASSSGLAGGNEQFF

SEQ ID NO: 685761 - protein, 16 aa, Homo sapiens
  CDR3 for alpha chain variable domain of TCR clone 342881 (TRAV30, TRAJ24)
CGTEIVDADSWGKFQF

SEQ ID NO: 685762 - protein, 17 aa, Homo sapiens
  CDR3 for beta chain variable domain of TCR clone 342881 (TRBV7-2, TRBJ2-7)
CASSPFGSSGPSPERYF

SEQ ID NO: 685763 - protein, 12 aa, Homo sapiens
  CDR3 for alpha chain variable domain of TCR clone 342882 (TRAV12-2, TRAJ47)
CAVAEYGNKLVF

SEQ ID NO: 685764 - protein, 16 aa, Homo sapiens
  CDR3 for beta chain variable domain of TCR clone 342882 (TRBV20-1, TRBJ1-1)
CSAMGGTANTKLSLDK

SEQ ID NO: 685765 - protein, 15 aa, Homo sapiens
  CDR3 for alpha chain variable domain of TCR clone 342883 (TRAV12-1, TRAJ26)
CVVNSLVTMVRILSL

SEQ ID NO: 685766 - protein, 13 aa, Homo sapiens
  CDR3 for beta chain variable domain of TCR clone 342883 (TRBV10-3, TRBJ2-7)
CASKLAVNYEQYF

SEQ ID NO: 685767 - protein, 18 aa, Homo sapiens
  CDR3 for alpha chain variable domain of TCR clone 342884 (TRAV1-1, TRAJ42)
CAVGPSAFYGGSQGNLIF

SEQ ID NO: 685768 - protein, 14 aa, Homo sapiens
  CDR3 for beta chain variable domain of TCR clone 342884 (TRBV6-3, TRBJ2-7)
CASSYSTGGDEQYF

SEQ ID NO: 685769 - protein, 10 aa, Homo sapiens
  CDR3 for alpha chain variable domain of TCR clone 342885 (TRAV36/DV7, TRAJ31)
CAVGEARLML

SEQ ID NO: 685770 - protein, 16 aa, Homo sapiens
  CDR3 for beta chain variable domain of TCR clone 342885 (TRBV19, TRBJ2-1)
CASSKAGPSSYNEQFF

SEQ ID NO: 685771 - protein, 13 aa, Homo sapiens
  CDR3 for alpha chain variable domain of TCR clone 342886 (TRAV27, TRAJ45)
CRRSGGGADGLTF

SEQ ID NO: 685772 - protein, 14 aa, Homo sapiens
  CDR3 for beta chain variable domain of TCR clone 342886 (TRBV7-2, TRBJ2-7)
CASSPKTSYYEQYF

SEQ ID NO: 685773 - protein, 16 aa, Homo sapiens
  CDR3 for alpha chain variable domain of TCR clone 342887 (TRAV12-2, TRAJ40)
CAVIRGGTSGTDKYIF

SEQ ID NO: 685774 - protein, 14 aa, Homo sapiens
  CDR3 for beta chain variable domain of TCR clone 342887 (TRBV20-1, TRBJ2-5)
CSARDGRAGETQYF

SEQ ID NO: 685775 - protein, 14 aa, Homo sapiens
  CDR3 for alpha chain variable domain of TCR clone 342888 (TRAV12-3, TRAJ15)
CAMIPPQAGTALIF

SEQ ID NO: 685776 - protein, 15 aa, Homo sapiens
  CDR3 for beta chain variable domain of TCR clone 342888 (TRBV6-1, TRBJ2-7)
CASSESMGDFYVQYF

SEQ ID NO: 685777 - protein, 15 aa, Homo sapiens
  CDR3 for alpha chain variable domain of TCR clone 342889 (TRAV13-1, TRAJ16)
CAARYQMARSCSLQG

SEQ ID NO: 685778 - protein, 17 aa, Homo sapiens
  CDR3 for beta chain variable domain of TCR clone 342889 (TRBV7-9, TRBJ2-6)
CASSFGAGYSGANVPTF

SEQ ID NO: 685779 - protein, 14 aa, Homo sapiens
  CDR3 for alpha chain variable domain of TCR clone 342890 (TRAV8-6, TRAJ17)
CAILPKAAGNKLTF

SEQ ID NO: 685780 - protein, 13 aa, Homo sapiens
  CDR3 for beta chain variable domain of TCR clone 342890 (TRBV7-3, TRBJ1-1)
CASSQDWGAEAFF

SEQ ID NO: 685781 - protein, 17 aa, Homo sapiens
  CDR3 for alpha chain variable domain of TCR clone 342891 (TRAV3, TRAJ42)
CAVRDRDYGGSQGNLIF

SEQ ID NO: 685782 - protein, 14 aa, Homo sapiens
  CDR3 for beta chain variable domain of TCR clone 342891 (TRBV12-5, TRBJ2-5)
CACGSRTHQETPYF

SEQ ID NO: 685783 - protein, 13 aa, Homo sapiens
  CDR3 for alpha chain variable domain of TCR clone 342892 (TRAV17, TRAJ21)
CATDGGNFNKFYF

SEQ ID NO: 685784 - protein, 14 aa, Homo sapiens
  CDR3 for beta chain variable domain of TCR clone 342892 (TRBV4-1, TRBJ2-2)
CASSQAVNTGELFF

SEQ ID NO: 685785 - protein, 18 aa, Homo sapiens
  CDR3 for alpha chain variable domain of TCR clone 342893 (TRAV21, TRAJ52)
CAVRPSPAGGTSYGKLTF

SEQ ID NO: 685786 - protein, 14 aa, Homo sapiens
  CDR3 for beta chain variable domain of TCR clone 342893 (TRBV13, TRBJ1-1)
CASTVITVNTEAFF

SEQ ID NO: 685787 - protein, 12 aa, Homo sapiens
  CDR3 for alpha chain variable domain of TCR clone 342894 (TRAV12-3, TRAJ17)
CATTLTGNKPTF

SEQ ID NO: 685788 - protein, 15 aa, Homo sapiens
  CDR3 for beta chain variable domain of TCR clone 342894 (TRBV20-1, TRBJ2-7)
CSARDRVSGMDEQYF

SEQ ID NO: 685789 - protein, 18 aa, Homo sapiens
  CDR3 for alpha chain variable domain of TCR clone 342895 (TRAV13-1, TRAJ52)
CAAKNPNAGGTSYGKLTF

SEQ ID NO: 685790 - protein, 14 aa, Homo sapiens
  CDR3 for beta chain variable domain of TCR clone 342895 (TRBV12-4, TRBJ1-1)
CASTWTGHDTEAFF

SEQ ID NO: 685791 - protein, 16 aa, Homo sapiens
  CDR3 for alpha chain variable domain of TCR clone 342896 (TRAV30, TRAJ24)
CGTELVDADSWGKFQF

SEQ ID NO: 685792 - protein, 14 aa, Homo sapiens
  CDR3 for beta chain variable domain of TCR clone 342896 (TRBV12-5, TRBJ2-5)
CASGSRTHQEAQYF

SEQ ID NO: 685793 - protein, 15 aa, Homo sapiens
  CDR3 for alpha chain variable domain of TCR clone 342897 (TRAV3, TRAJ29)
CAVRDINSGNTPLVF

SEQ ID NO: 685794 - protein, 13 aa, Homo sapiens
  CDR3 for beta chain variable domain of TCR clone 342897 (TRBV7-9, TRBJ1-2)
CASSLKQNYGYTF

SEQ ID NO: 685795 - protein, 13 aa, Homo sapiens
  CDR3 for alpha chain variable domain of TCR clone 342898 (TRAV2, TRAJ40)
CAVVASGTYKYIF

SEQ ID NO: 685796 - protein, 19 aa, Homo sapiens
  CDR3 for beta chain variable domain of TCR clone 342898 (TRBV19, TRBJ2-5)
CASSIGQVTDFFLGETQYF

SEQ ID NO: 685797 - protein, 13 aa, Homo sapiens
  CDR3 for alpha chain variable domain of TCR clone 342899 (TRAV13-1, TRAJ39)
CAASIWAGNMLTF

SEQ ID NO: 685798 - protein, 13 aa, Homo sapiens
  CDR3 for beta chain variable domain of TCR clone 342899 (TRBV10-1, TRBJ2-1)
CASSAGPDNEQFF

SEQ ID NO: 685799 - protein, 14 aa, Homo sapiens
  CDR3 for alpha chain variable domain of TCR clone 342900 (TRAV8-4, TRAJ5)
CAVSTDTGRRALTF

SEQ ID NO: 685800 - protein, 15 aa, Homo sapiens
  CDR3 for beta chain variable domain of TCR clone 342900 (TRBV5-5, TRBJ1-5)
CASSSTPGSNQPQHF

SEQ ID NO: 685801 - protein, 12 aa, Homo sapiens
  CDR3 for alpha chain variable domain of TCR clone 342901 (TRAV12-3, TRAJ17)
CAMTLTGNKLTF

SEQ ID NO: 685802 - protein, 13 aa, Homo sapiens
  CDR3 for beta chain variable domain of TCR clone 342901 (TRBV28, TRBJ2-7)
CASSPTLKREQYF

SEQ ID NO: 685803 - protein, 13 aa, Homo sapiens
  CDR3 for alpha chain variable domain of TCR clone 342902 (TRAV29/DV5, TRAJ31)
CAASRNNNARPMF

SEQ ID NO: 685804 - protein, 16 aa, Homo sapiens
  CDR3 for beta chain variable domain of TCR clone 342902 (TRBV7-2, TRBJ2-6)
CASSERRASGANVLTF

SEQ ID NO: 685805 - protein, 14 aa, Homo sapiens
  CDR3 for alpha chain variable domain of TCR clone 342903 (TRAV1-2, TRAJ8)
CAVREDTGFQKLVF

SEQ ID NO: 685806 - protein, 15 aa, Homo sapiens
  CDR3 for beta chain variable domain of TCR clone 342903 (TRBV10-2, TRBJ2-7)
CASWNRGQATYEQYF

SEQ ID NO: 685807 - protein, 17 aa, Homo sapiens
  CDR3 for alpha chain variable domain of TCR clone 342904 (TRAV36/DV7, TRAJ52)
CAVAQRAGGTTYGKLTF

SEQ ID NO: 685808 - protein, 15 aa, Homo sapiens
  CDR3 for beta chain variable domain of TCR clone 342904 (TRBV27, TRBJ1-3)
CASSPSPGSGNTIYF

SEQ ID NO: 685809 - protein, 11 aa, Homo sapiens
  CDR3 for alpha chain variable domain of TCR clone 342905 (TRAV17, TRAJ56)
CATGANSKLTF

SEQ ID NO: 685810 - protein, 14 aa, Homo sapiens
  CDR3 for beta chain variable domain of TCR clone 342905 (TRBV7-2, TRBJ2-7)
CASSPKTSFYEQYF

SEQ ID NO: 685811 - protein, 14 aa, Homo sapiens
  CDR3 for alpha chain variable domain of TCR clone 342906 (TRAV1-2, TRAJ27)
RAPAEYTNAGKSTF

SEQ ID NO: 685812 - protein, 18 aa, Homo sapiens
  CDR3 for beta chain variable domain of TCR clone 342906 (TRBV28, TRBJ1-2)
CASRQQQGKRGSNYGYTF

SEQ ID NO: 685813 - protein, 13 aa, Homo sapiens
  CDR3 for alpha chain variable domain of TCR clone 342907 (TRAV13-1, TRAJ6)
CAASKGGSYIPPF

SEQ ID NO: 685814 - protein, 14 aa, Homo sapiens
  CDR3 for beta chain variable domain of TCR clone 342907 (TRBV7-2, TRBJ2-1)
CAISLGVGYNEQFF

SEQ ID NO: 685815 - protein, 14 aa, Homo sapiens
  CDR3 for alpha chain variable domain of TCR clone 342908 (TRAV26-1, TRAJ38)
CIADNAGNNRKLIW

SEQ ID NO: 685816 - protein, 12 aa, Homo sapiens
  CDR3 for beta chain variable domain of TCR clone 342908 (TRBV2, TRBJ1-2)
CASSGQTYGYTF

SEQ ID NO: 685817 - protein, 12 aa, Homo sapiens
  CDR3 for alpha chain variable domain of TCR clone 342909 (TRAV13-1, TRAJ21)
CAAKEGFNKFYF

SEQ ID NO: 685818 - protein, 16 aa, Homo sapiens
  CDR3 for beta chain variable domain of TCR clone 342909 (TRBV4-2, TRBJ2-7)
CASSQDTSGGPSEQYF

SEQ ID NO: 685819 - protein, 11 aa, Homo sapiens
  CDR3 for alpha chain variable domain of TCR clone 342910 (TRAV12-3, TRAJ27)
CAMANAGKSTF

SEQ ID NO: 685820 - protein, 15 aa, Homo sapiens
  CDR3 for beta chain variable domain of TCR clone 342910 (TRBV28, TRBJ2-1)
CASSIIAGGRSEQFF

SEQ ID NO: 685821 - protein, 16 aa, Homo sapiens
  CDR3 for alpha chain variable domain of TCR clone 342911 (TRAV20, TRAJ22)
CAVRLVSSGSARQLTF

SEQ ID NO: 685822 - protein, 17 aa, Homo sapiens
  CDR3 for beta chain variable domain of TCR clone 342911 (TRBV20-1, TRBJ2-2)
CSASGSGQGGLTGELFF

SEQ ID NO: 685823 - protein, 12 aa, Homo sapiens
  CDR3 for alpha chain variable domain of TCR clone 342912 (TRAV12-2, TRAJ7)
CAVKRGNNRLAF

SEQ ID NO: 685824 - protein, 17 aa, Homo sapiens
  CDR3 for beta chain variable domain of TCR clone 342912 (TRBV7-9, TRBJ2-3)
CASSPTVAGDLTDTQYF

SEQ ID NO: 685825 - protein, 11 aa, Homo sapiens
  CDR3 for alpha chain variable domain of TCR clone 342913 (TRAV12-2, TRAJ43)
CASPIGNDMRF

SEQ ID NO: 685826 - protein, 15 aa, Homo sapiens
  CDR3 for beta chain variable domain of TCR clone 342913 (TRBV6-1, TRBJ2-6)
CASSSRPSGANVLTF

SEQ ID NO: 685827 - protein, 15 aa, Homo sapiens
  CDR3 for alpha chain variable domain of TCR clone 342914 (TRAV26-2, TRAJ39)
CSLRGNNNAGNMLTF

SEQ ID NO: 685828 - protein, 15 aa, Homo sapiens
  CDR3 for beta chain variable domain of TCR clone 342914 (TRBV5-4, TRBJ1-1)
CASSSLGWANTEAFL

SEQ ID NO: 685829 - protein, 11 aa, Homo sapiens
  CDR3 for alpha chain variable domain of TCR clone 342915 (TRAV2, TRAJ9)
CAVGAGFKTIF

SEQ ID NO: 685830 - protein, 16 aa, Homo sapiens
  CDR3 for beta chain variable domain of TCR clone 342915 (TRBV13, TRBJ2-2)
CASSPRTGEHTGELFF

SEQ ID NO: 685831 - protein, 13 aa, Homo sapiens
  CDR3 for alpha chain variable domain of TCR clone 342916 (TRAV21, TRAJ20)
CAVGLRVDYKLSF

SEQ ID NO: 685832 - protein, 11 aa, Homo sapiens
  CDR3 for beta chain variable domain of TCR clone 342916 (TRBV11-2, TRBJ1-1)
CASSINTEAFF

SEQ ID NO: 685833 - protein, 15 aa, Homo sapiens
  CDR3 for alpha chain variable domain of TCR clone 342917 (TRAV23/DV6, TRAJ13)
CAAWPGGGGYEKVTF

SEQ ID NO: 685834 - protein, 17 aa, Homo sapiens
  CDR3 for beta chain variable domain of TCR clone 342917 (TRBV19, TRBJ2-7)
CASSTSFYDSYPYEQYF

SEQ ID NO: 685835 - protein, 15 aa, Homo sapiens
  CDR3 for alpha chain variable domain of TCR clone 342918 (TRAV3, TRAJ32)
CAVSSYGGATNKLIF

SEQ ID NO: 685836 - protein, 13 aa, Homo sapiens
  CDR3 for beta chain variable domain of TCR clone 342918 (TRBV20-1, TRBJ2-7)
CSARPSTNYEQYC

SEQ ID NO: 685837 - protein, 14 aa, Homo sapiens
  CDR3 for alpha chain variable domain of TCR clone 342919 (TRAV17, TRAJ54)
CATDANQGAKKLVF

SEQ ID NO: 685838 - protein, 12 aa, Homo sapiens
  CDR3 for beta chain variable domain of TCR clone 342919 (TRBV7-9, TRBJ2-7)
CASSIKREEQYF

SEQ ID NO: 685839 - protein, 13 aa, Homo sapiens
  CDR3 for alpha chain variable domain of TCR clone 342920 (TRAV20, TRAJ37)
CAGCSSNTGQLIF

SEQ ID NO: 685840 - protein, 11 aa, Homo sapiens
  CDR3 for beta chain variable domain of TCR clone 342920 (TRBV12-4, TRBJ2-3)
CARTATDTQYF

SEQ ID NO: 685841 - protein, 13 aa, Homo sapiens
  CDR3 for alpha chain variable domain of TCR clone 342921 (TRAV26-1, TRAJ34)
CIVRPWITDKLIF

SEQ ID NO: 685842 - protein, 14 aa, Homo sapiens
  CDR3 for beta chain variable domain of TCR clone 342921 (TRBV5-1, TRBJ2-7)
CASSRGESLYEQYF

SEQ ID NO: 685843 - protein, 14 aa, Homo sapiens
  CDR3 for alpha chain variable domain of TCR clone 342922 (TRAV2, TRAJ9)
CAVEDRSGGFKTIF

SEQ ID NO: 685844 - protein, 11 aa, Homo sapiens
  CDR3 for beta chain variable domain of TCR clone 342922 (TRBV12-4, TRBJ2-3)
LASTATDTQYF

SEQ ID NO: 685845 - protein, 16 aa, Homo sapiens
  CDR3 for alpha chain variable domain of TCR clone 342923 (TRAV8-3, TRAJ52)
CAVQPAGGTSYGKLTF

SEQ ID NO: 685846 - protein, 15 aa, Homo sapiens
  CDR3 for beta chain variable domain of TCR clone 342923 (TRBV11-2, TRBJ2-7)
CASSLAGAVATEQYF

SEQ ID NO: 685847 - protein, 12 aa, Homo sapiens
  CDR3 for alpha chain variable domain of TCR clone 342924 (TRAV16, TRAJ10)
CSRTGGGKKLTF

SEQ ID NO: 685848 - protein, 13 aa, Homo sapiens
  CDR3 for beta chain variable domain of TCR clone 342924 (TRBV10-3, TRBJ2-7)
CASKLAVNYEQYF

SEQ ID NO: 685849 - protein, 16 aa, Homo sapiens
  CDR3 for alpha chain variable domain of TCR clone 342925 (TRAV36/DV7, TRAJ45)
CAVGLYSGGGADGLTF

SEQ ID NO: 685850 - protein, 13 aa, Homo sapiens
  CDR3 for beta chain variable domain of TCR clone 342925 (TRBV20-1, TRBJ1-5)
CSARTGVNQPQHF

SEQ ID NO: 685851 - protein, 18 aa, Homo sapiens
  CDR3 for alpha chain variable domain of TCR clone 342926 (TRAV29/DV5, TRAJ52)
CAAGFRDAGGTIYGKLTF

SEQ ID NO: 685852 - protein, 16 aa, Homo sapiens
  CDR3 for beta chain variable domain of TCR clone 342926 (TRBV7-3, TRBJ2-2)
CASSLKRGTLSGELFF

SEQ ID NO: 685853 - protein, 18 aa, Homo sapiens
  CDR3 for alpha chain variable domain of TCR clone 342927 (TRAV8-3, TRAJ4)
WVRDPTSNDPGGYNKLNF

SEQ ID NO: 685854 - protein, 13 aa, Homo sapiens
  CDR3 for beta chain variable domain of TCR clone 342927 (TRBV20-1, TRBJ1-2)
CSATGIQGSGYTF

SEQ ID NO: 685855 - protein, 11 aa, Homo sapiens
  CDR3 for alpha chain variable domain of TCR clone 342928 (TRAV2, TRAJ33)
CAVCSNYQLIW

SEQ ID NO: 685856 - protein, 14 aa, Homo sapiens
  CDR3 for beta chain variable domain of TCR clone 342928 (TRBV11-2, TRBJ2-3)
CASSRLARTDTQYF

SEQ ID NO: 685857 - protein, 13 aa, Homo sapiens
  CDR3 for alpha chain variable domain of TCR clone 342929 (TRAV13-1, TRAJ5)
CAARVTGRIALTV

SEQ ID NO: 685858 - protein, 15 aa, Homo sapiens
  CDR3 for beta chain variable domain of TCR clone 342929 (TRBV7-9, TRBJ2-7)
CASSPGGGLTYEQYF

SEQ ID NO: 685859 - protein, 14 aa, Homo sapiens
  CDR3 for alpha chain variable domain of TCR clone 342930 (TRAV13-1, TRAJ35)
CAASKGGFGHVLHC

SEQ ID NO: 685860 - protein, 13 aa, Homo sapiens
  CDR3 for beta chain variable domain of TCR clone 342930 (TRBV12-4, TRBJ2-7)
CASSLSGVYEQYF

SEQ ID NO: 685861 - protein, 14 aa, Homo sapiens
  CDR3 for alpha chain variable domain of TCR clone 342931 (TRAV8-4, TRAJ15)
CAVTIREAGTALIF

SEQ ID NO: 685862 - protein, 13 aa, Homo sapiens
  CDR3 for beta chain variable domain of TCR clone 342931 (TRBV10-3, TRBJ2-7)
CAISEKRGYEQYF

SEQ ID NO: 685863 - protein, 11 aa, Homo sapiens
  CDR3 for alpha chain variable domain of TCR clone 342932 (TRAV13-1, TRAJ52)
PGGTSDGKLTF

SEQ ID NO: 685864 - protein, 16 aa, Homo sapiens
  CDR3 for beta chain variable domain of TCR clone 342932 (TRBV28, TRBJ2-7)
CASSPWVATGDLSQYF

SEQ ID NO: 685865 - protein, 16 aa, Homo sapiens
  CDR3 for alpha chain variable domain of TCR clone 342933 (TRAV30, TRAJ24)
CGTEIVDADSWGKFQF

SEQ ID NO: 685866 - protein, 14 aa, Homo sapiens
  CDR3 for beta chain variable domain of TCR clone 342933 (TRBV7-3, TRBJ1-1)
CQRLRGQMNTEAFF

SEQ ID NO: 685867 - protein, 12 aa, Homo sapiens
  CDR3 for alpha chain variable domain of TCR clone 342934 (TRAV12-1, TRAJ6)
GVVSERSYIPTF

SEQ ID NO: 685868 - protein, 15 aa, Homo sapiens
  CDR3 for beta chain variable domain of TCR clone 342934 (TRBV5-1, TRBJ2-7)
CASSLNGGPAREQYF

SEQ ID NO: 685869 - protein, 21 aa, Homo sapiens
  CDR3 for alpha chain variable domain of TCR clone 342935 (TRAV1-1, TRAJ6)
CLLLLRCERLERTGGSYITTF

SEQ ID NO: 685870 - protein, 13 aa, Homo sapiens
  CDR3 for beta chain variable domain of TCR clone 342935 (TRBV10-2, TRBJ2-7)
CAGGASGGYEQYF

SEQ ID NO: 685871 - protein, 13 aa, Homo sapiens
  CDR3 for alpha chain variable domain of TCR clone 342936 (TRAV21, TRAJ27)
CAARPGNAGKSTS

SEQ ID NO: 685872 - protein, 14 aa, Homo sapiens
  CDR3 for beta chain variable domain of TCR clone 342936 (TRBV7-6, TRBJ2-3)
CASSLGTVTDTQYF

SEQ ID NO: 685873 - protein, 13 aa, Homo sapiens
  CDR3 for alpha chain variable domain of TCR clone 342937 (TRAV21, TRAJ27)
CAARPGNAGISTF

SEQ ID NO: 685874 - protein, 14 aa, Homo sapiens
  CDR3 for beta chain variable domain of TCR clone 342937 (TRBV11-2, TRBJ2-7)
CASSLGAGAYEQYF

SEQ ID NO: 685875 - protein, 14 aa, Homo sapiens
  CDR3 for alpha chain variable domain of TCR clone 342938 (TRAV1-2, TRAJ16)
CAVNRFSGGQKLLF

SEQ ID NO: 685876 - protein, 12 aa, Homo sapiens
  CDR3 for beta chain variable domain of TCR clone 342938 (TRBV7-9, TRBJ2-7)
CASSLEGYEQYF

SEQ ID NO: 685877 - protein, 13 aa, Homo sapiens
  CDR3 for alpha chain variable domain of TCR clone 342939 (TRAV16, TRAJ54)
CALKVRGAQKLVF

SEQ ID NO: 685878 - protein, 16 aa, Homo sapiens
  CDR3 for beta chain variable domain of TCR clone 342939 (TRBV19, TRBJ2-1)
CASSKAGPSSYNEQFF

SEQ ID NO: 685879 - protein, 13 aa, Homo sapiens
  CDR3 for alpha chain variable domain of TCR clone 342940 (TRAV13-2, TRAJ54)
CAESGSGSPEAVI

SEQ ID NO: 685880 - protein, 15 aa, Homo sapiens
  CDR3 for beta chain variable domain of TCR clone 342940 (TRBV4-1, TRBJ1-4)
CASSDTGGTNEKLFF

SEQ ID NO: 685881 - protein, 15 aa, Homo sapiens
  CDR3 for alpha chain variable domain of TCR clone 342941 (TRAV8-4, TRAJ53)
CAVSDGGGSNYKLTF

SEQ ID NO: 685882 - protein, 14 aa, Homo sapiens
  CDR3 for beta chain variable domain of TCR clone 342941 (TRBV19, TRBJ2-5)
CQPWTSGAQETQYF

SEQ ID NO: 685883 - protein, 15 aa, Homo sapiens
  CDR3 for alpha chain variable domain of TCR clone 342942 (TRAV12-2, TRAJ13)
CRESLGSGGYQKVTF

SEQ ID NO: 685884 - protein, 15 aa, Homo sapiens
  CDR3 for beta chain variable domain of TCR clone 342942 (TRBV6-5, TRBJ2-1)
CASRRAQLSYYEQFF

SEQ ID NO: 685885 - protein, 21 aa, Homo sapiens
  CDR3 for alpha chain variable domain of TCR clone 342943 (TRAV2, TRAJ26)
CAGSPGRLWSEFCLWSRNQIF

SEQ ID NO: 685886 - protein, 16 aa, Homo sapiens
  CDR3 for beta chain variable domain of TCR clone 342943 (TRBV13, TRBJ2-2)
CASSPRTGEHTGELFF

SEQ ID NO: 685887 - protein, 13 aa, Homo sapiens
  CDR3 for alpha chain variable domain of TCR clone 342944 (TRAV12-1, TRAJ7)
CVVNMRGNNRLAF

SEQ ID NO: 685888 - protein, 15 aa, Homo sapiens
  CDR3 for beta chain variable domain of TCR clone 342944 (TRBV27, TRBJ2-3)
CVSSLGLAATDTQYF

SEQ ID NO: 685889 - protein, 16 aa, Homo sapiens
  CDR3 for alpha chain variable domain of TCR clone 342945 (TRAV3, TRAJ18)
CAVRDGRGSTLGRRDF

SEQ ID NO: 685890 - protein, 15 aa, Homo sapiens
  CDR3 for beta chain variable domain of TCR clone 342945 (TRBV7-9, TRBJ1-6)
CASSSPGRGNSPLHF

SEQ ID NO: 685891 - protein, 14 aa, Homo sapiens
  CDR3 for alpha chain variable domain of TCR clone 342946 (TRAV13-1, TRAJ52)
CAANGGTSYGKLTF

SEQ ID NO: 685892 - protein, 14 aa, Homo sapiens
  CDR3 for beta chain variable domain of TCR clone 342946 (TRBV25-1, TRBJ1-1)
CASTHLGGNTEAFF

SEQ ID NO: 685893 - protein, 11 aa, Homo sapiens
  CDR3 for alpha chain variable domain of TCR clone 342947 (TRAV38-2/DV8, TRAJ45)
CAYRKGDGLTF

SEQ ID NO: 685894 - protein, 16 aa, Homo sapiens
  CDR3 for beta chain variable domain of TCR clone 342947 (TRBV20-1, TRBJ1-4)
CSAPGQGLLTNEKLFF

SEQ ID NO: 685895 - protein, 15 aa, Homo sapiens
  CDR3 for alpha chain variable domain of TCR clone 342948 (TRAV3, TRAJ5)
CAVRDLDTGRRELTF

SEQ ID NO: 685896 - protein, 13 aa, Homo sapiens
  CDR3 for beta chain variable domain of TCR clone 342948 (TRBV12-4, TRBJ2-7)
CGSSPTETYEQYF

SEQ ID NO: 685897 - protein, 15 aa, Homo sapiens
  CDR3 for alpha chain variable domain of TCR clone 342949 (TRAV23/DV6, TRAJ13)
CAACPGGGGYQKVTF

SEQ ID NO: 685898 - protein, 13 aa, Homo sapiens
  CDR3 for beta chain variable domain of TCR clone 342949 (TRBV6-1, TRBJ1-1)
CASSRQGNTEAFF

SEQ ID NO: 685899 - protein, 15 aa, Homo sapiens
  CDR3 for alpha chain variable domain of TCR clone 342950 (TRAV3, TRAJ17)
CAVRPKEAAGNKLTF

SEQ ID NO: 685900 - protein, 14 aa, Homo sapiens
  CDR3 for beta chain variable domain of TCR clone 342950 (TRBV5-1, TRBJ2-3)
CASSLFGTTDTQYF

SEQ ID NO: 685901 - protein, 13 aa, Homo sapiens
  CDR3 for alpha chain variable domain of TCR clone 342951 (TRAV13-2, TRAJ13)
CAERPGGYQKVTF

SEQ ID NO: 685902 - protein, 16 aa, Homo sapiens
  CDR3 for beta chain variable domain of TCR clone 342951 (TRBV4-3, TRBJ2-1)
CASSPALDRGVNEQFF

SEQ ID NO: 685903 - protein, 14 aa, Homo sapiens
  CDR3 for alpha chain variable domain of TCR clone 342952 (TRAV1-2, TRAJ17)
CALRRGAAGNKLTF

SEQ ID NO: 685904 - protein, 13 aa, Homo sapiens
  CDR3 for beta chain variable domain of TCR clone 342952 (TRBV4-2, TRBJ1-1)
CASSQAGNTEAFF

SEQ ID NO: 685905 - protein, 17 aa, Homo sapiens
  CDR3 for alpha chain variable domain of TCR clone 342953 (TRAV3, TRAJ6)
CAVRDGPRAGGRYIPTF

SEQ ID NO: 685906 - protein, 12 aa, Homo sapiens
  CDR3 for beta chain variable domain of TCR clone 342953 (TRBV7-8, TRBJ2-7)
CASSLGDREQYF

SEQ ID NO: 685907 - protein, 14 aa, Homo sapiens
  CDR3 for alpha chain variable domain of TCR clone 342954 (TRAV12-3, TRAJ9)
CAMSPNTGGFKTVF

SEQ ID NO: 685908 - protein, 12 aa, Homo sapiens
  CDR3 for beta chain variable domain of TCR clone 342954 (TRBV19, TRBJ1-5)
CASSIAQQPQHF

SEQ ID NO: 685909 - protein, 12 aa, Homo sapiens
  CDR3 for alpha chain variable domain of TCR clone 342955 (TRAV2, TRAJ33)
CAVPDSNYQLIW

SEQ ID NO: 685910 - protein, 16 aa, Homo sapiens
  CDR3 for beta chain variable domain of TCR clone 342955 (TRBV2, TRBJ2-1)
CASSVGGSLSYNEQFF

SEQ ID NO: 685911 - protein, 13 aa, Homo sapiens
  CDR3 for alpha chain variable domain of TCR clone 342956 (TRAV13-2, TRAJ13)
CAERTGGYQKVTF

SEQ ID NO: 685912 - protein, 19 aa, Homo sapiens
  CDR3 for beta chain variable domain of TCR clone 342956 (TRBV4-1, TRBJ2-1)
CASSQGPLPGLGSRNEQFF

SEQ ID NO: 685913 - protein, 13 aa, Homo sapiens
  CDR3 for alpha chain variable domain of TCR clone 342957 (TRAV1-1, TRAJ11)
CAVLNSGYSTLTF

SEQ ID NO: 685914 - protein, 15 aa, Homo sapiens
  CDR3 for beta chain variable domain of TCR clone 342957 (TRBV20-1, TRBJ2-3)
CSASPPQVSTDTQYF

SEQ ID NO: 685915 - protein, 10 aa, Homo sapiens
  CDR3 for alpha chain variable domain of TCR clone 342958 (TRAV2, TRAJ34)
CAVVNDKLIF

SEQ ID NO: 685916 - protein, 15 aa, Homo sapiens
  CDR3 for beta chain variable domain of TCR clone 342958 (TRBV7-2, TRBJ2-1)
CASSSGLAGGNEQFF

SEQ ID NO: 685917 - protein, 13 aa, Homo sapiens
  CDR3 for alpha chain variable domain of TCR clone 342959 (TRAV3, TRAJ21)
CAVREPDFNKFYF

SEQ ID NO: 685918 - protein, 18 aa, Homo sapiens
  CDR3 for beta chain variable domain of TCR clone 342959 (TRBV11-2, TRBJ2-3)
CASSLGGASRGAPNTQDF

SEQ ID NO: 685919 - protein, 12 aa, Homo sapiens
  CDR3 for alpha chain variable domain of TCR clone 342960 (TRAV23/DV6, TRAJ53)
CAASKLGSGGSN

SEQ ID NO: 685920 - protein, 14 aa, Homo sapiens
  CDR3 for beta chain variable domain of TCR clone 342960 (TRBV7-9, TRBJ2-3)
CASSLEQGTNTQYC

SEQ ID NO: 685921 - protein, 18 aa, Homo sapiens
  CDR3 for alpha chain variable domain of TCR clone 342961 (TRAV26-1, TRAJ23)
CIVRVGLAVWNQGGKLIF

SEQ ID NO: 685922 - protein, 16 aa, Homo sapiens
  CDR3 for beta chain variable domain of TCR clone 342961 (TRBV12-4, TRBJ2-5)
CASSFFVRGRQEAQYF

SEQ ID NO: 685923 - protein, 16 aa, Homo sapiens
  CDR3 for alpha chain variable domain of TCR clone 342962 (TRAV30, TRAJ24)
CGTEMVDADSWGKFQF

SEQ ID NO: 685924 - protein, 13 aa, Homo sapiens
  CDR3 for beta chain variable domain of TCR clone 342962 (TRBV27, TRBJ2-7)
CASSFSQGYEQYF

SEQ ID NO: 685925 - protein, 15 aa, Homo sapiens
  CDR3 for alpha chain variable domain of TCR clone 342963 (TRAV29/DV5, TRAJ42)
CAAKTDGGSQGNLIF

SEQ ID NO: 685926 - protein, 15 aa, Homo sapiens
  CDR3 for beta chain variable domain of TCR clone 342963 (TRBV19, TRBJ1-1)
CASSGNSHPNTEAFF

SEQ ID NO: 685927 - protein, 11 aa, Homo sapiens
  CDR3 for alpha chain variable domain of TCR clone 342964 (TRAV3, TRAJ21)
CAVGNFNKFYF

SEQ ID NO: 685928 - protein, 16 aa, Homo sapiens
  CDR3 for beta chain variable domain of TCR clone 342964 (TRBV19, TRBJ2-1)
SASSKAGPSSYNEQFF

SEQ ID NO: 685929 - protein, 15 aa, Homo sapiens
  CDR3 for alpha chain variable domain of TCR clone 342965 (TRAV1-2, TRAJ39)
CAVEGVDNAGNILTF

SEQ ID NO: 685930 - protein, 13 aa, Homo sapiens
  CDR3 for beta chain variable domain of TCR clone 342965 (TRBV27, TRBJ1-6)
CASRWTGYSPLHF

SEQ ID NO: 685931 - protein, 12 aa, Homo sapiens
  CDR3 for alpha chain variable domain of TCR clone 342966 (TRAV8-4, TRAJ31)
CAVSDSNARFMF

SEQ ID NO: 685932 - protein, 15 aa, Homo sapiens
  CDR3 for beta chain variable domain of TCR clone 342966 (TRBV27, TRBJ2-7)
CASRFWGQGADEQYF

SEQ ID NO: 685933 - protein, 12 aa, Homo sapiens
  CDR3 for alpha chain variable domain of TCR clone 342967 (TRAV3, TRAJ20)
CAVRDGDYKLSF

SEQ ID NO: 685934 - protein, 13 aa, Homo sapiens
  CDR3 for beta chain variable domain of TCR clone 342967 (TRBV7-2, TRBJ2-4)
CASSREHANIQYF

SEQ ID NO: 685935 - protein, 14 aa, Homo sapiens
  CDR3 for alpha chain variable domain of TCR clone 342968 (TRAV2, TRAJ9)
CAVEDRSGGFKTIF

SEQ ID NO: 685936 - protein, 11 aa, Homo sapiens
  CDR3 for beta chain variable domain of TCR clone 342968 (TRBV7-9, TRBJ2-5)
CASSLGDTQYF

SEQ ID NO: 685937 - protein, 19 aa, Homo sapiens
  CDR3 for alpha chain variable domain of TCR clone 342969 (TRAV1-2, TRAJ26)
CLLPLCCERPDNYGQNCVF

SEQ ID NO: 685938 - protein, 12 aa, Homo sapiens
  CDR3 for beta chain variable domain of TCR clone 342969 (TRBV7-9, TRBJ2-7)
CATRTDAYEQYF

SEQ ID NO: 685939 - protein, 14 aa, Homo sapiens
  CDR3 for alpha chain variable domain of TCR clone 342970 (TRAV1-2, TRAJ6)
CAVSLSGGSYIPTF

SEQ ID NO: 685940 - protein, 15 aa, Homo sapiens
  CDR3 for beta chain variable domain of TCR clone 342970 (TRBV28, TRBJ2-7)
CASSRGGRGFYEQYF

SEQ ID NO: 685941 - protein, 15 aa, Homo sapiens
  CDR3 for alpha chain variable domain of TCR clone 342971 (TRAV3, TRAJ27)
CAVRAGGHQCRQINL

SEQ ID NO: 685942 - protein, 15 aa, Homo sapiens
  CDR3 for beta chain variable domain of TCR clone 342971 (TRBV20-1, TRBJ2-7)
CSARDRVSGMDEQYF

SEQ ID NO: 685943 - protein, 12 aa, Homo sapiens
  CDR3 for alpha chain variable domain of TCR clone 342972 (TRAV1-1, TRAJ39)
CAVPVVCNMLTF

SEQ ID NO: 685944 - protein, 15 aa, Homo sapiens
  CDR3 for beta chain variable domain of TCR clone 342972 (TRBV19, TRBJ1-6)
CASSTQGAVGSPLHF

SEQ ID NO: 685945 - protein, 14 aa, Homo sapiens
  CDR3 for alpha chain variable domain of TCR clone 342973 (TRAV17, TRAJ56)
CATVPAGANSKLTF

SEQ ID NO: 685946 - protein, 14 aa, Homo sapiens
  CDR3 for beta chain variable domain of TCR clone 342973 (TRBV5-5, TRBJ1-5)
CASSGQGVDQPQHF

SEQ ID NO: 685947 - protein, 12 aa, Homo sapiens
  CDR3 for alpha chain variable domain of TCR clone 342974 (TRAV21, TRAJ23)
CAVGPQGGKLIF

SEQ ID NO: 685948 - protein, 15 aa, Homo sapiens
  CDR3 for beta chain variable domain of TCR clone 342974 (TRBV20-1, TRBJ2-7)
CSARDPTEVGHEQYF

SEQ ID NO: 685949 - protein, 10 aa, Homo sapiens
  CDR3 for alpha chain variable domain of TCR clone 342975 (TRAV19, TRAJ45)
PGGGADGLTF

SEQ ID NO: 685950 - protein, 13 aa, Homo sapiens
  CDR3 for beta chain variable domain of TCR clone 342975 (TRBV18, TRBJ2-1)
CASSPPSSNEQFF

SEQ ID NO: 685951 - protein, 15 aa, Homo sapiens
  CDR3 for alpha chain variable domain of TCR clone 342976 (TRAV27, TRAJ17)
CRSTMIKAAGNKLTF

SEQ ID NO: 685952 - protein, 13 aa, Homo sapiens
  CDR3 for beta chain variable domain of TCR clone 342976 (TRBV18, TRBJ2-7)
CASQAGGGYEQYF

SEQ ID NO: 685953 - protein, 12 aa, Homo sapiens
  CDR3 for alpha chain variable domain of TCR clone 342977 (TRAV35, TRAJ40)
CAGRAGTYKYIF

SEQ ID NO: 685954 - protein, 17 aa, Homo sapiens
  CDR3 for beta chain variable domain of TCR clone 342977 (TRBV13, TRBJ2-3)
CASSLSRVAGGRNTQYF

SEQ ID NO: 685955 - protein, 13 aa, Homo sapiens
  CDR3 for alpha chain variable domain of TCR clone 342978 (TRAV6, TRAJ45)
SPFSGGGADGLTF

SEQ ID NO: 685956 - protein, 14 aa, Homo sapiens
  CDR3 for beta chain variable domain of TCR clone 342978 (TRBV6-1, TRBJ1-3)
CASVQGGGGNTIYF

SEQ ID NO: 685957 - protein, 16 aa, Homo sapiens
  CDR3 for alpha chain variable domain of TCR clone 342979 (TRAV1-2, TRAJ10)
CAVRGVLTGGGNKLTF

SEQ ID NO: 685958 - protein, 14 aa, Homo sapiens
  CDR3 for beta chain variable domain of TCR clone 342979 (TRBV4-1, TRBJ2-2)
CASSQAVNTGELVF

SEQ ID NO: 685959 - protein, 23 aa, Homo sapiens
  CDR3 for alpha chain variable domain of TCR clone 342980 (TRAV30, TRAJ43)
CTLRPPSSVTQEPTSAALSDMRF

SEQ ID NO: 685960 - protein, 17 aa, Homo sapiens
  CDR3 for beta chain variable domain of TCR clone 342980 (TRBV13, TRBJ2-3)
CASSLSRVAGGRNTQYF

SEQ ID NO: 685961 - protein, 14 aa, Homo sapiens
  CDR3 for alpha chain variable domain of TCR clone 342981 (TRAV17, TRAJ34)
CAADSLEGTDNLIF

SEQ ID NO: 685962 - protein, 13 aa, Homo sapiens
  CDR3 for beta chain variable domain of TCR clone 342981 (TRBV11-2, TRBJ2-7)
CASSGTRPYEQYF

SEQ ID NO: 685963 - protein, 16 aa, Homo sapiens
  CDR3 for alpha chain variable domain of TCR clone 342982 (TRAV30, TRAJ24)
CGTEIVGAGSWGKFQF

SEQ ID NO: 685964 - protein, 15 aa, Homo sapiens
  CDR3 for beta chain variable domain of TCR clone 342982 (TRBV7-9, TRBJ1-4)
CASSARTGGNENLFF

SEQ ID NO: 685965 - protein, 16 aa, Homo sapiens
  CDR3 for alpha chain variable domain of TCR clone 342983 (TRAV12-3, TRAJ50)
CAMRDPMKTSYDKVIF

SEQ ID NO: 685966 - protein, 13 aa, Homo sapiens
  CDR3 for beta chain variable domain of TCR clone 342983 (TRBV4-1, TRBJ2-3)
CASSLDFTDTQYL

SEQ ID NO: 685967 - protein, 15 aa, Homo sapiens
  CDR3 for alpha chain variable domain of TCR clone 342984 (TRAV8-3, TRAJ45)
CASSYSGGGADGLTF

SEQ ID NO: 685968 - protein, 16 aa, Homo sapiens
  CDR3 for beta chain variable domain of TCR clone 342984 (TRBV7-2, TRBJ2-7)
CASSLEAGGPWYEQYF

SEQ ID NO: 685969 - protein, 14 aa, Homo sapiens
  CDR3 for alpha chain variable domain of TCR clone 342985 (TRAV14/DV4, TRAJ42)
CPRGSLRSQGNLIF

SEQ ID NO: 685970 - protein, 14 aa, Homo sapiens
  CDR3 for beta chain variable domain of TCR clone 342985 (TRBV18, TRBJ2-7)
CASSPRGGAYEQYF

SEQ ID NO: 685971 - protein, 14 aa, Homo sapiens
  CDR3 for alpha chain variable domain of TCR clone 342986 (TRAV2, TRAJ37)
CAVDCTSNTGTLIF

SEQ ID NO: 685972 - protein, 13 aa, Homo sapiens
  CDR3 for beta chain variable domain of TCR clone 342986 (TRBV20-1, TRBJ1-1)
CSAPLGGGTEAFF

SEQ ID NO: 685973 - protein, 15 aa, Homo sapiens
  CDR3 for alpha chain variable domain of TCR clone 342987 (TRAV23/DV6, TRAJ12)
CAAIDLGAMDSSYKL

SEQ ID NO: 685974 - protein, 14 aa, Homo sapiens
  CDR3 for beta chain variable domain of TCR clone 342987 (TRBV7-2, TRBJ1-2)
CASSQTGSTYGYTF

SEQ ID NO: 685975 - protein, 14 aa, Homo sapiens
  CDR3 for alpha chain variable domain of TCR clone 342988 (TRAV13-1, TRAJ37)
CAASRLATQANQSL

SEQ ID NO: 685976 - protein, 16 aa, Homo sapiens
  CDR3 for beta chain variable domain of TCR clone 342988 (TRBV29-1, TRBJ2-7)
CSVEVVGTSGSYEQYF

SEQ ID NO: 685977 - protein, 15 aa, Homo sapiens
  CDR3 for alpha chain variable domain of TCR clone 342989 (TRAV25, TRAJ52)
CAGRPGGTSYGKLNL

SEQ ID NO: 685978 - protein, 17 aa, Homo sapiens
  CDR3 for beta chain variable domain of TCR clone 342989 (TRBV7-8, TRBJ2-6)
CASSAGKGGAGANVLTF

SEQ ID NO: 685979 - protein, 13 aa, Homo sapiens
  CDR3 for alpha chain variable domain of TCR clone 342990 (TRAV27, TRAJ6)
CAGGTRGSYIPTF

SEQ ID NO: 685980 - protein, 15 aa, Homo sapiens
  CDR3 for beta chain variable domain of TCR clone 342990 (TRBV7-2, TRBJ1-2)
CASSPRAGWNYGYTF

SEQ ID NO: 685981 - protein, 14 aa, Homo sapiens
  CDR3 for alpha chain variable domain of TCR clone 342991 (TRAV17, TRAJ16)
CATADFSDGQKLLF

SEQ ID NO: 685982 - protein, 12 aa, Homo sapiens
  CDR3 for beta chain variable domain of TCR clone 342991 (TRBV24-1, TRBJ1-1)
CATLDPDTDAFF

SEQ ID NO: 685983 - protein, 15 aa, Homo sapiens
  CDR3 for alpha chain variable domain of TCR clone 342992 (TRAV8-4, TRAJ40)
CAVSDDTSGTYKYIF

SEQ ID NO: 685984 - protein, 12 aa, Homo sapiens
  CDR3 for beta chain variable domain of TCR clone 342992 (TRBV20-1, TRBJ2-5)
CRVAGAGETQYF

SEQ ID NO: 685985 - protein, 12 aa, Homo sapiens
  CDR3 for alpha chain variable domain of TCR clone 342993 (TRAV8-3, TRAJ20)
CAVGANDYKLSF

SEQ ID NO: 685986 - protein, 16 aa, Homo sapiens
  CDR3 for beta chain variable domain of TCR clone 342993 (TRBV19, TRBJ2-2)
CASRSPGTGETGELFF

SEQ ID NO: 685987 - protein, 14 aa, Homo sapiens
  CDR3 for alpha chain variable domain of TCR clone 342994 (TRAV16, TRAJ3)
CALSQYSSASKIIF

SEQ ID NO: 685988 - protein, 14 aa, Homo sapiens
  CDR3 for beta chain variable domain of TCR clone 342994 (TRBV6-3, TRBJ2-1)
CASLPSAYYNEQFF

SEQ ID NO: 685989 - protein, 14 aa, Homo sapiens
  CDR3 for alpha chain variable domain of TCR clone 342995 (TRAV1-2, TRAJ16)
CAVNRFSDGQKLLF

SEQ ID NO: 685990 - protein, 12 aa, Homo sapiens
  CDR3 for beta chain variable domain of TCR clone 342995 (TRBV7-7, TRBJ2-5)
CASSLGGETQYF

SEQ ID NO: 685991 - protein, 16 aa, Homo sapiens
  CDR3 for alpha chain variable domain of TCR clone 342996 (TRAV21, TRAJ33)
CAVSPASMDSNYQLIW

SEQ ID NO: 685992 - protein, 17 aa, Homo sapiens
  CDR3 for beta chain variable domain of TCR clone 342996 (TRBV2, TRBJ1-4)
CASSTRELTQGEEKLFF

SEQ ID NO: 685993 - protein, 16 aa, Homo sapiens
  CDR3 for alpha chain variable domain of TCR clone 342997 (TRAV27, TRAJ53)
CAAPEGSGGSNYKLTF

SEQ ID NO: 685994 - protein, 14 aa, Homo sapiens
  CDR3 for beta chain variable domain of TCR clone 342997 (TRBV12-4, TRBJ1-1)
CASSLDGLNTEAFF

SEQ ID NO: 685995 - protein, 17 aa, Homo sapiens
  CDR3 for alpha chain variable domain of TCR clone 342998 (TRAV3, TRAJ38)
CAVRDCLNAGNNRKLIW

SEQ ID NO: 685996 - protein, 13 aa, Homo sapiens
  CDR3 for beta chain variable domain of TCR clone 342998 (TRBV27, TRBJ2-7)
CASSLTTGYEQYF

SEQ ID NO: 685997 - protein, 11 aa, Homo sapiens
  CDR3 for alpha chain variable domain of TCR clone 342999 (TRAV12-2, TRAJ31)
CAVTRWARLTF

SEQ ID NO: 685998 - protein, 15 aa, Homo sapiens
  CDR3 for beta chain variable domain of TCR clone 342999 (TRBV6-1, TRBJ2-3)
CASSERGGITDTQYF

SEQ ID NO: 685999 - protein, 13 aa, Homo sapiens
  CDR3 for alpha chain variable domain of TCR clone 343000 (TRAV8-3, TRAJ54)
CAVSIQGAQKLVF

SEQ ID NO: 686000 - protein, 12 aa, Homo sapiens
  CDR3 for beta chain variable domain of TCR clone 343000 (TRBV7-9, TRBJ1-4)
CASSTDREKLFF

SEQ ID NO: 686001 - protein, 15 aa, Homo sapiens
  CDR3 for alpha chain variable domain of TCR clone 343001 (TRAV29/DV5, TRAJ29)
CAACERSSGNTPLVF

SEQ ID NO: 686002 - protein, 17 aa, Homo sapiens
  CDR3 for beta chain variable domain of TCR clone 343001 (TRBV4-1, TRBJ1-4)
CASSQEGPRGVEEKLFF

SEQ ID NO: 686003 - protein, 12 aa, Homo sapiens
  CDR3 for alpha chain variable domain of TCR clone 343002 (TRAV2, TRAJ33)
CAVPDSNYQLIW

SEQ ID NO: 686004 - protein, 15 aa, Homo sapiens
  CDR3 for beta chain variable domain of TCR clone 343002 (TRBV15, TRBJ1-5)
CATCRDPVSNQPQHF

SEQ ID NO: 686005 - protein, 14 aa, Homo sapiens
  CDR3 for alpha chain variable domain of TCR clone 343003 (TRAV17, TRAJ32)
CAMDPGGAANKLIF

SEQ ID NO: 686006 - protein, 14 aa, Homo sapiens
  CDR3 for beta chain variable domain of TCR clone 343003 (TRBV2, TRBJ1-5)
CASSENRGGQPQHF

SEQ ID NO: 686007 - protein, 11 aa, Homo sapiens
  CDR3 for alpha chain variable domain of TCR clone 343004 (TRAV1-2, TRAJ40)
CAVPGTYKYVF

SEQ ID NO: 686008 - protein, 13 aa, Homo sapiens
  CDR3 for beta chain variable domain of TCR clone 343004 (TRBV7-2, TRBJ2-2)
CASSSRPNGELFF

SEQ ID NO: 686009 - protein, 14 aa, Homo sapiens
  CDR3 for alpha chain variable domain of TCR clone 343005 (TRAV17, TRAJ54)
WATDANQGAQKLVF

SEQ ID NO: 686010 - protein, 14 aa, Homo sapiens
  CDR3 for beta chain variable domain of TCR clone 343005 (TRBV25-1, TRBJ1-1)
CASTHLGGNTEAFF

SEQ ID NO: 686011 - protein, 13 aa, Homo sapiens
  CDR3 for alpha chain variable domain of TCR clone 343006 (TRAV22, TRAJ12)
CTGRIDSSYKLIF

SEQ ID NO: 686012 - protein, 13 aa, Homo sapiens
  CDR3 for beta chain variable domain of TCR clone 343006 (TRBV2, TRBJ2-7)
CASSVGGSGEQYF

SEQ ID NO: 686013 - protein, 14 aa, Homo sapiens
  CDR3 for alpha chain variable domain of TCR clone 343007 (TRAV13-1, TRAJ53)
CAASISGSNYKLTF

SEQ ID NO: 686014 - protein, 13 aa, Homo sapiens
  CDR3 for beta chain variable domain of TCR clone 343007 (TRBV2, TRBJ2-7)
CASSVGGSGEQYF

SEQ ID NO: 686015 - protein, 14 aa, Homo sapiens
  CDR3 for alpha chain variable domain of TCR clone 343008 (TRAV12-2, TRAJ17)
CAVLFKAAGNKLTL

SEQ ID NO: 686016 - protein, 14 aa, Homo sapiens
  CDR3 for beta chain variable domain of TCR clone 343008 (TRBV12-5, TRBJ2-5)
CASGSRTHQETQYF

SEQ ID NO: 686017 - protein, 17 aa, Homo sapiens
  CDR3 for alpha chain variable domain of TCR clone 343009 (TRAV12-2, TRAJ48)
CASNEKLTVGTGTRLTI

SEQ ID NO: 686018 - protein, 14 aa, Homo sapiens
  CDR3 for beta chain variable domain of TCR clone 343009 (TRBV5-1, TRBJ2-5)
CASSLAGKQETQYF

SEQ ID NO: 686019 - protein, 15 aa, Homo sapiens
  CDR3 for alpha chain variable domain of TCR clone 343010 (TRAV17, TRAJ40)
CATVSSTSGTYKYIF

SEQ ID NO: 686020 - protein, 13 aa, Homo sapiens
  CDR3 for beta chain variable domain of TCR clone 343010 (TRBV7-9, TRBJ1-2)
CASSLKQNYGYTF

SEQ ID NO: 686021 - protein, 14 aa, Homo sapiens
  CDR3 for alpha chain variable domain of TCR clone 343011 (TRAV16, TRAJ17)
CAPRIKAAGNKLTF

SEQ ID NO: 686022 - protein, 17 aa, Homo sapiens
  CDR3 for beta chain variable domain of TCR clone 343011 (TRBV7-2, TRBJ2-3)
CASGSYSGTRRADTQYF

SEQ ID NO: 686023 - protein, 15 aa, Homo sapiens
  CDR3 for alpha chain variable domain of TCR clone 343012 (TRAV3, TRAJ17)
CAVSPKEAAGTRLTF

SEQ ID NO: 686024 - protein, 12 aa, Homo sapiens
  CDR3 for beta chain variable domain of TCR clone 343012 (TRBV7-9, TRBJ1-6)
CASSLMTSPLHF

SEQ ID NO: 686025 - protein, 16 aa, Homo sapiens
  CDR3 for alpha chain variable domain of TCR clone 343013 (TRAV3, TRAJ10)
CAVRDMRAGGGNQLTF

SEQ ID NO: 686026 - protein, 14 aa, Homo sapiens
  CDR3 for beta chain variable domain of TCR clone 343013 (TRBV25-1, TRBJ1-1)
CASTHLGGNTEAFF

SEQ ID NO: 686027 - protein, 12 aa, Homo sapiens
  CDR3 for alpha chain variable domain of TCR clone 343014 (TRAV27, TRAJ9)
CAGESGGFKTIF

SEQ ID NO: 686028 - protein, 15 aa, Homo sapiens
  CDR3 for beta chain variable domain of TCR clone 343014 (TRBV28, TRBJ2-5)
CASSFRRPGPETQYF

SEQ ID NO: 686029 - protein, 14 aa, Homo sapiens
  CDR3 for alpha chain variable domain of TCR clone 343015 (TRAV12-1, TRAJ17)
CVVNYKAAGNKLTF

SEQ ID NO: 686030 - protein, 16 aa, Homo sapiens
  CDR3 for beta chain variable domain of TCR clone 343015 (TRBV2, TRBJ2-5)
CASSETQGVGEETQYF

SEQ ID NO: 686031 - protein, 17 aa, Homo sapiens
  CDR3 for alpha chain variable domain of TCR clone 343016 (TRAV13-1, TRAJ52)
CAAGRNAGGSSYGKLTF

SEQ ID NO: 686032 - protein, 13 aa, Homo sapiens
  CDR3 for beta chain variable domain of TCR clone 343016 (TRBV7-2, TRBJ1-1)
CASNLNGAKVAFF

SEQ ID NO: 686033 - protein, 13 aa, Homo sapiens
  CDR3 for alpha chain variable domain of TCR clone 343017 (TRAV29/DV5, TRAJ49)
CAASTNTGNQFYV

SEQ ID NO: 686034 - protein, 11 aa, Homo sapiens
  CDR3 for beta chain variable domain of TCR clone 343017 (TRBV6-1, TRBJ2-1)
CASISSNEQFF

SEQ ID NO: 686035 - protein, 12 aa, Homo sapiens
  CDR3 for alpha chain variable domain of TCR clone 343018 (TRAV13-1, TRAJ21)
CAAKEGFNKFYF

SEQ ID NO: 686036 - protein, 20 aa, Homo sapiens
  CDR3 for beta chain variable domain of TCR clone 343018 (TRBV28, TRBJ2-1)
CASSPIGRSPGLAGGNEQFF

SEQ ID NO: 686037 - protein, 15 aa, Homo sapiens
  CDR3 for alpha chain variable domain of TCR clone 343019 (TRAV27, TRAJ33)
CAGADIMDSNHQLIW

SEQ ID NO: 686038 - protein, 15 aa, Homo sapiens
  CDR3 for beta chain variable domain of TCR clone 343019 (TRBV28, TRBJ2-1)
CASSIIAGGRSEQFF

SEQ ID NO: 686039 - protein, 13 aa, Homo sapiens
  CDR3 for alpha chain variable domain of TCR clone 343020 (TRAV12-2, TRAJ47)
CAVTMEYGNKLVF

SEQ ID NO: 686040 - protein, 15 aa, Homo sapiens
  CDR3 for beta chain variable domain of TCR clone 343020 (TRBV20-1, TRBJ2-7)
CSARDRVSGMDKQYF

SEQ ID NO: 686041 - protein, 18 aa, Homo sapiens
  CDR3 for alpha chain variable domain of TCR clone 343021 (TRAV21, TRAJ53)
CAVEGGENSGGSNYKLTF

SEQ ID NO: 686042 - protein, 16 aa, Homo sapiens
  CDR3 for beta chain variable domain of TCR clone 343021 (TRBV15, TRBJ1-2)
CATSRGPRTGGGGYTF

SEQ ID NO: 686043 - protein, 12 aa, Homo sapiens
  CDR3 for alpha chain variable domain of TCR clone 343022 (TRAV12-2, TRAJ10)
WGVTGGGNKLTF

SEQ ID NO: 686044 - protein, 13 aa, Homo sapiens
  CDR3 for beta chain variable domain of TCR clone 343022 (TRBV13, TRBJ2-3)
LSRVAGGRNTQYF

SEQ ID NO: 686045 - protein, 14 aa, Homo sapiens
  CDR3 for alpha chain variable domain of TCR clone 343023 (TRAV13-1, TRAJ35)
CAASKGGFGNVLHC

SEQ ID NO: 686046 - protein, 16 aa, Homo sapiens
  CDR3 for beta chain variable domain of TCR clone 343023 (TRBV11-2, TRBJ2-1)
CASSPRLAGVYNEQFF

SEQ ID NO: 686047 - protein, 13 aa, Homo sapiens
  CDR3 for alpha chain variable domain of TCR clone 343024 (TRAV8-4, TRAJ36)
CAVSVAGANNLFF

SEQ ID NO: 686048 - protein, 12 aa, Homo sapiens
  CDR3 for beta chain variable domain of TCR clone 343024 (TRBV11-2, TRBJ2-2)
CASSLPTGELFF

SEQ ID NO: 686049 - protein, 22 aa, Homo sapiens
  CDR3 for alpha chain variable domain of TCR clone 343025 (TRAV27, TRAJ38)
CAARRNAGNNHIQNPDPAVYQL

SEQ ID NO: 686050 - protein, 14 aa, Homo sapiens
  CDR3 for beta chain variable domain of TCR clone 343025 (TRBV28, TRBJ1-4)
CASSFGTFDEKLFF

SEQ ID NO: 686051 - protein, 13 aa, Homo sapiens
  CDR3 for alpha chain variable domain of TCR clone 343026 (TRAV24, TRAJ42)
CAFSTGSQGNLIF

SEQ ID NO: 686052 - protein, 19 aa, Homo sapiens
  CDR3 for beta chain variable domain of TCR clone 343026 (TRBV19, TRBJ2-5)
CASSIGQVTDVLLGETQYF

SEQ ID NO: 686053 - protein, 12 aa, Homo sapiens
  CDR3 for alpha chain variable domain of TCR clone 343027 (TRAV8-6, TRAJ43)
CAVSNNNNDMRF

SEQ ID NO: 686054 - protein, 13 aa, Homo sapiens
  CDR3 for beta chain variable domain of TCR clone 343027 (TRBV19, TRBJ2-5)
CASSIPYGETQYF

SEQ ID NO: 686055 - protein, 12 aa, Homo sapiens
  CDR3 for alpha chain variable domain of TCR clone 343028 (TRAV12-3, TRAJ3)
CAIDSSASKIIF

SEQ ID NO: 686056 - protein, 14 aa, Homo sapiens
  CDR3 for beta chain variable domain of TCR clone 343028 (TRBV19, TRBJ2-1)
CASPTFVLSGEQFF

SEQ ID NO: 686057 - protein, 13 aa, Homo sapiens
  CDR3 for alpha chain variable domain of TCR clone 343029 (TRAV3, TRAJ21)
CAVREPDFNKFYF

SEQ ID NO: 686058 - protein, 13 aa, Homo sapiens
  CDR3 for beta chain variable domain of TCR clone 343029 (TRBV6-6, TRBJ1-5)
CASRAYQDQPQHF

SEQ ID NO: 686059 - protein, 16 aa, Homo sapiens
  CDR3 for alpha chain variable domain of TCR clone 343030 (TRAV8-3, TRAJ43)
LSTSVVVPYNNNDMRF

SEQ ID NO: 686060 - protein, 17 aa, Homo sapiens
  CDR3 for beta chain variable domain of TCR clone 343030 (TRBV7-7, TRBJ1-1)
CASIGDRPNLGVTEAFF

SEQ ID NO: 686061 - protein, 16 aa, Homo sapiens
  CDR3 for alpha chain variable domain of TCR clone 343031 (TRAV3, TRAJ28)
CAVLPRSGAGSYQLTF

SEQ ID NO: 686062 - protein, 14 aa, Homo sapiens
  CDR3 for beta chain variable domain of TCR clone 343031 (TRBV19, TRBJ2-1)
CASPTFVLSGEQYF

SEQ ID NO: 686063 - protein, 12 aa, Homo sapiens
  CDR3 for alpha chain variable domain of TCR clone 343032 (TRAV21, TRAJ13)
PGPSGGYQKVTF

SEQ ID NO: 686064 - protein, 14 aa, Homo sapiens
  CDR3 for beta chain variable domain of TCR clone 343032 (TRBV20-1, TRBJ2-7)
CRAKDRKGAYEQYF

SEQ ID NO: 686065 - protein, 16 aa, Homo sapiens
  CDR3 for alpha chain variable domain of TCR clone 343033 (TRAV12-2, TRAJ45)
CAVNMYSGGGADGLTF

SEQ ID NO: 686066 - protein, 11 aa, Homo sapiens
  CDR3 for beta chain variable domain of TCR clone 343033 (TRBV10-1, TRBJ2-3)
CASSDSDTQYF

SEQ ID NO: 686067 - protein, 13 aa, Homo sapiens
  CDR3 for alpha chain variable domain of TCR clone 343034 (TRAV1-2, TRAJ12)
CAVSMDSSYKFIF

SEQ ID NO: 686068 - protein, 16 aa, Homo sapiens
  CDR3 for beta chain variable domain of TCR clone 343034 (TRBV20-1, TRBJ1-4)
CSAPGQGLLTNEKLFF

SEQ ID NO: 686069 - protein, 14 aa, Homo sapiens
  CDR3 for alpha chain variable domain of TCR clone 343035 (TRAV38-1, TRAJ54)
CAFMSPSGAQNLVF

SEQ ID NO: 686070 - protein, 16 aa, Homo sapiens
  CDR3 for beta chain variable domain of TCR clone 343035 (TRBV28, TRBJ2-1)
CASSLGGSGSYNEQFF

SEQ ID NO: 686071 - protein, 15 aa, Homo sapiens
  CDR3 for alpha chain variable domain of TCR clone 343036 (TRAV26-2, TRAJ45)
CILRDRVDQEEVLTD

SEQ ID NO: 686072 - protein, 15 aa, Homo sapiens
  CDR3 for beta chain variable domain of TCR clone 343036 (TRBV7-6, TRBJ2-5)
CASSKPTGPQESQYF

SEQ ID NO: 686073 - protein, 10 aa, Homo sapiens
  CDR3 for alpha chain variable domain of TCR clone 343037 (TRAV12-1, TRAJ26)
CGSLWSEFVF

SEQ ID NO: 686074 - protein, 15 aa, Homo sapiens
  CDR3 for beta chain variable domain of TCR clone 343037 (TRBV12-4, TRBJ2-5)
CASSGTGQAQETQYF

SEQ ID NO: 686075 - protein, 15 aa, Homo sapiens
  CDR3 for alpha chain variable domain of TCR clone 343038 (TRAV19, TRAJ9)
CALSLPDTGGFKTIF

SEQ ID NO: 686076 - protein, 17 aa, Homo sapiens
  CDR3 for beta chain variable domain of TCR clone 343038 (TRBV20-1, TRBJ2-1)
CSARDPRAGVWDKEQFF

SEQ ID NO: 686077 - protein, 16 aa, Homo sapiens
  CDR3 for alpha chain variable domain of TCR clone 343039 (TRAV6, TRAJ43)
CARHKPRFGAGTRLTA

SEQ ID NO: 686078 - protein, 16 aa, Homo sapiens
  CDR3 for beta chain variable domain of TCR clone 343039 (TRBV6-5, TRBJ2-1)
CASSYSLAGGYNEQFF

SEQ ID NO: 686079 - protein, 11 aa, Homo sapiens
  CDR3 for alpha chain variable domain of TCR clone 343040 (TRAV23/DV6, TRAJ58)
CAARLLRGETS

SEQ ID NO: 686080 - protein, 13 aa, Homo sapiens
  CDR3 for beta chain variable domain of TCR clone 343040 (TRBV6-4, TRBJ1-5)
CASSADLNHPQHF

SEQ ID NO: 686081 - protein, 16 aa, Homo sapiens
  CDR3 for alpha chain variable domain of TCR clone 343041 (TRAV3, TRAJ32)
CAVRENYGGATNKIIF

SEQ ID NO: 686082 - protein, 12 aa, Homo sapiens
  CDR3 for beta chain variable domain of TCR clone 343041 (TRBV20-1, TRBJ1-2)
CSVTPEGYGYTF

SEQ ID NO: 686083 - protein, 14 aa, Homo sapiens
  CDR3 for alpha chain variable domain of TCR clone 343042 (TRAV29/DV5, TRAJ48)
CAAGGNFGNEKLTF

SEQ ID NO: 686084 - protein, 15 aa, Homo sapiens
  CDR3 for beta chain variable domain of TCR clone 343042 (TRBV10-2, TRBJ2-6)
CASSEQGTGANVLTF

SEQ ID NO: 686085 - protein, 14 aa, Homo sapiens
  CDR3 for alpha chain variable domain of TCR clone 343043 (TRAV26-1, TRAJ48)
CIVRVGFGNEQLTF

SEQ ID NO: 686086 - protein, 14 aa, Homo sapiens
  CDR3 for beta chain variable domain of TCR clone 343043 (TRBV19, TRBJ2-1)
CASPTFVLSGEQFF

SEQ ID NO: 686087 - protein, 18 aa, Homo sapiens
  CDR3 for alpha chain variable domain of TCR clone 343044 (TRAV21, TRAJ52)
CAVRPSPAGGTSYGKLTF

SEQ ID NO: 686088 - protein, 15 aa, Homo sapiens
  CDR3 for beta chain variable domain of TCR clone 343044 (TRBV19, TRBJ1-1)
CASTSGQFQNTEAFF

SEQ ID NO: 686089 - protein, 17 aa, Homo sapiens
  CDR3 for alpha chain variable domain of TCR clone 343045 (TRAV3, TRAJ6)
CAVRDGPRAGGSYIPTF

SEQ ID NO: 686090 - protein, 14 aa, Homo sapiens
  CDR3 for beta chain variable domain of TCR clone 343045 (TRBV7-2, TRBJ2-7)
CARSPKTSFYEQYF

SEQ ID NO: 686091 - protein, 13 aa, Homo sapiens
  CDR3 for alpha chain variable domain of TCR clone 343046 (TRAV20, TRAJ34)
CAVSSSNTDKPIF

SEQ ID NO: 686092 - protein, 15 aa, Homo sapiens
  CDR3 for beta chain variable domain of TCR clone 343046 (TRBV20-1, TRBJ1-2)
CSAAGEGARIYGYTF

SEQ ID NO: 686093 - protein, 15 aa, Homo sapiens
  CDR3 for alpha chain variable domain of TCR clone 343047 (TRAV30, TRAJ53)
CGTEIGGGSNYKLTF

SEQ ID NO: 686094 - protein, 15 aa, Homo sapiens
  CDR3 for beta chain variable domain of TCR clone 343047 (TRBV2, TRBJ2-1)
CASSELAGSYNEQFF

SEQ ID NO: 686095 - protein, 12 aa, Homo sapiens
  CDR3 for alpha chain variable domain of TCR clone 343048 (TRAV35, TRAJ31)
CAAASNNARLMF

SEQ ID NO: 686096 - protein, 16 aa, Homo sapiens
  CDR3 for beta chain variable domain of TCR clone 343048 (TRBV7-9, TRBJ1-2)
CASSLGFSSGEDGYTF

SEQ ID NO: 686097 - protein, 13 aa, Homo sapiens
  CDR3 for alpha chain variable domain of TCR clone 343049 (TRAV12-1, TRAJ33)
CGDAPDSNYQLIW

SEQ ID NO: 686098 - protein, 15 aa, Homo sapiens
  CDR3 for beta chain variable domain of TCR clone 343049 (TRBV7-2, TRBJ1-1)
CASSPQGGANTEAFF

SEQ ID NO: 686099 - protein, 15 aa, Homo sapiens
  CDR3 for alpha chain variable domain of TCR clone 343050 (TRAV26-1, TRAJ29)
CIVRVEGSGNTPLAF

SEQ ID NO: 686100 - protein, 14 aa, Homo sapiens
  CDR3 for beta chain variable domain of TCR clone 343050 (TRBV20-1, TRBJ2-7)
CSAWTALGSYEQYF

SEQ ID NO: 686101 - protein, 15 aa, Homo sapiens
  CDR3 for alpha chain variable domain of TCR clone 343051 (TRAV9-2, TRAJ30)
CALIPLLDRDDKIIF

SEQ ID NO: 686102 - protein, 16 aa, Homo sapiens
  CDR3 for beta chain variable domain of TCR clone 343051 (TRBV12-4, TRBJ1-5)
CASSRPVGGSNQPQHF

SEQ ID NO: 686103 - protein, 12 aa, Homo sapiens
  CDR3 for alpha chain variable domain of TCR clone 343052 (TRAV8-3, TRAJ20)
CAVGANDYKLSL

SEQ ID NO: 686104 - protein, 14 aa, Homo sapiens
  CDR3 for beta chain variable domain of TCR clone 343052 (TRBV20-1, TRBJ1-5)
CSARDDRGNQPQHF

SEQ ID NO: 686105 - protein, 11 aa, Homo sapiens
  CDR3 for alpha chain variable domain of TCR clone 343053 (TRAV3, TRAJ17)
PRGAAGNKLTF

SEQ ID NO: 686106 - protein, 12 aa, Homo sapiens
  CDR3 for beta chain variable domain of TCR clone 343053 (TRBV11-2, TRBJ2-2)
CASSLGGVELFF

SEQ ID NO: 686107 - protein, 15 aa, Homo sapiens
  CDR3 for alpha chain variable domain of TCR clone 343054 (TRAV13-1, TRAJ3)
CAASKLASSASKILF

SEQ ID NO: 686108 - protein, 16 aa, Homo sapiens
  CDR3 for beta chain variable domain of TCR clone 343054 (TRBV25-1, TRBJ1-5)
CASGAPTVNSNQPQHF

SEQ ID NO: 686109 - protein, 23 aa, Homo sapiens
  CDR3 for alpha chain variable domain of TCR clone 343055 (TRAV1-1, TRAJ4)
LLQELQMKDSASYFCALYNKLIF

SEQ ID NO: 686110 - protein, 12 aa, Homo sapiens
  CDR3 for beta chain variable domain of TCR clone 343055 (TRBV12-4, TRBJ2-1)
CASSPGRNEQFF

SEQ ID NO: 686111 - protein, 15 aa, Homo sapiens
  CDR3 for alpha chain variable domain of TCR clone 343056 (TRAV25, TRAJ53)
CPTSNSGCSNYKQTF

SEQ ID NO: 686112 - protein, 14 aa, Homo sapiens
  CDR3 for beta chain variable domain of TCR clone 343056 (TRBV11-2, TRBJ2-3)
CASSGLARTDTQYF

SEQ ID NO: 686113 - protein, 14 aa, Homo sapiens
  CDR3 for alpha chain variable domain of TCR clone 343057 (TRAV26-1, TRAJ38)
CIADNAGNNRKLIW

SEQ ID NO: 686114 - protein, 17 aa, Homo sapiens
  CDR3 for beta chain variable domain of TCR clone 343057 (TRBV7-9, TRBJ2-3)
CGSSPTVAGDLTDTQYF

SEQ ID NO: 686115 - protein, 15 aa, Homo sapiens
  CDR3 for alpha chain variable domain of TCR clone 343058 (TRAV12-2, TRAJ53)
CAVNWGGGSNYKLTF

SEQ ID NO: 686116 - protein, 15 aa, Homo sapiens
  CDR3 for beta chain variable domain of TCR clone 343058 (TRBV7-3, TRBJ2-1)
CASSPTGGGEVEQFF

SEQ ID NO: 686117 - protein, 11 aa, Homo sapiens
  CDR3 for alpha chain variable domain of TCR clone 343059 (TRAV2, TRAJ33)
CALDSNYQLIW

SEQ ID NO: 686118 - protein, 13 aa, Homo sapiens
  CDR3 for beta chain variable domain of TCR clone 343059 (TRBV7-2, TRBJ2-7)
CASSSPSGSEQYF

SEQ ID NO: 686119 - protein, 17 aa, Homo sapiens
  CDR3 for alpha chain variable domain of TCR clone 343060 (TRAV12-1, TRAJ53)
CVARAIVGGGSNYKLTF

SEQ ID NO: 686120 - protein, 16 aa, Homo sapiens
  CDR3 for beta chain variable domain of TCR clone 343060 (TRBV29-1, TRBJ1-2)
CSVEANRDIANYGYTF

SEQ ID NO: 686121 - protein, 12 aa, Homo sapiens
  CDR3 for alpha chain variable domain of TCR clone 343061 (TRAV1-1, TRAJ8)
CAGGTGFQKLVF

SEQ ID NO: 686122 - protein, 15 aa, Homo sapiens
  CDR3 for beta chain variable domain of TCR clone 343061 (TRBV20-1, TRBJ2-7)
CSSRDRVSGMDEQYF

SEQ ID NO: 686123 - protein, 15 aa, Homo sapiens
  CDR3 for alpha chain variable domain of TCR clone 343062 (TRAV4, TRAJ39)
CLVGPNNNASNMLTF

SEQ ID NO: 686124 - protein, 13 aa, Homo sapiens
  CDR3 for beta chain variable domain of TCR clone 343062 (TRBV11-2, TRBJ2-5)
RASSSTGEETQYF

SEQ ID NO: 686125 - protein, 15 aa, Homo sapiens
  CDR3 for alpha chain variable domain of TCR clone 343063 (TRAV17, TRAJ16)
CATALRFSDGQKLLF

SEQ ID NO: 686126 - protein, 15 aa, Homo sapiens
  CDR3 for beta chain variable domain of TCR clone 343063 (TRBV20-1, TRBJ1-1)
CIASRGVTGNTEAFF

SEQ ID NO: 686127 - protein, 12 aa, Homo sapiens
  CDR3 for alpha chain variable domain of TCR clone 343064 (TRAV21, TRAJ13)
PGPSGGYQKVTF

SEQ ID NO: 686128 - protein, 11 aa, Homo sapiens
  CDR3 for beta chain variable domain of TCR clone 343064 (TRBV13, TRBJ2-3)
CASGNADTQYF

SEQ ID NO: 686129 - protein, 16 aa, Homo sapiens
  CDR3 for alpha chain variable domain of TCR clone 343065 (TRAV38-1, TRAJ32)
CAFMPYLGGATNKLIF

SEQ ID NO: 686130 - protein, 13 aa, Homo sapiens
  CDR3 for beta chain variable domain of TCR clone 343065 (TRBV7-9, TRBJ2-7)
CASSFAGAYEQYF

SEQ ID NO: 686131 - protein, 16 aa, Homo sapiens
  CDR3 for alpha chain variable domain of TCR clone 343066 (TRAV13-2, TRAJ37)
CAENIRGTSNTGKLIF

SEQ ID NO: 686132 - protein, 15 aa, Homo sapiens
  CDR3 for beta chain variable domain of TCR clone 343066 (TRBV5-1, TRBJ2-7)
CASSPQGRPLDEQYF

SEQ ID NO: 686133 - protein, 14 aa, Homo sapiens
  CDR3 for alpha chain variable domain of TCR clone 343067 (TRAV2, TRAJ9)
CAVEDRSGGFKTIF

SEQ ID NO: 686134 - protein, 14 aa, Homo sapiens
  CDR3 for beta chain variable domain of TCR clone 343067 (TRBV28, TRBJ2-7)
CASTFYGRAHEQYL

SEQ ID NO: 686135 - protein, 22 aa, Homo sapiens
  CDR3 for alpha chain variable domain of TCR clone 343068 (TRAV3, TRAJ37)
CAVRGKGVWQHRQTNLRARDNF

SEQ ID NO: 686136 - protein, 16 aa, Homo sapiens
  CDR3 for beta chain variable domain of TCR clone 343068 (TRBV28, TRBJ1-5)
CASSFRGGYSNQPQHF

SEQ ID NO: 686137 - protein, 16 aa, Homo sapiens
  CDR3 for alpha chain variable domain of TCR clone 343069 (TRAV3, TRAJ10)
CAVRDMRAGGGNKLTF

SEQ ID NO: 686138 - protein, 16 aa, Homo sapiens
  CDR3 for beta chain variable domain of TCR clone 343069 (TRBV7-7, TRBJ2-1)
CASSLASGTSYNEQFF

SEQ ID NO: 686139 - protein, 12 aa, Homo sapiens
  CDR3 for alpha chain variable domain of TCR clone 343070 (TRAV12-2, TRAJ10)
WGVTGGGNKLTF

SEQ ID NO: 686140 - protein, 14 aa, Homo sapiens
  CDR3 for beta chain variable domain of TCR clone 343070 (TRBV27, TRBJ2-7)
CASATGTKRREQYF

SEQ ID NO: 686141 - protein, 17 aa, Homo sapiens
  CDR3 for alpha chain variable domain of TCR clone 343071 (TRAV14/DV4, TRAJ28)
CAMRGTSSGAGSYQLTF

SEQ ID NO: 686142 - protein, 13 aa, Homo sapiens
  CDR3 for beta chain variable domain of TCR clone 343071 (TRBV28, TRBJ2-5)
CASSFTGGETQYF

SEQ ID NO: 686143 - protein, 13 aa, Homo sapiens
  CDR3 for alpha chain variable domain of TCR clone 343072 (TRAV9-2, TRAJ33)
CALRMDSNYQLIW

SEQ ID NO: 686144 - protein, 14 aa, Homo sapiens
  CDR3 for beta chain variable domain of TCR clone 343072 (TRBV18, TRBJ2-7)
CASSPRGGAYEQYF

SEQ ID NO: 686145 - protein, 14 aa, Homo sapiens
  CDR3 for alpha chain variable domain of TCR clone 343073 (TRAV12-2, TRAJ4)
CAVLIGGGYNKLIF

SEQ ID NO: 686146 - protein, 14 aa, Homo sapiens
  CDR3 for beta chain variable domain of TCR clone 343073 (TRBV19, TRBJ2-2)
CASSTGQGAGELFF

SEQ ID NO: 686147 - protein, 13 aa, Homo sapiens
  CDR3 for alpha chain variable domain of TCR clone 343074 (TRAV1-2, TRAJ24)
CAVTTDSWGKLQF

SEQ ID NO: 686148 - protein, 14 aa, Homo sapiens
  CDR3 for beta chain variable domain of TCR clone 343074 (TRBV18, TRBJ2-7)
CASSPRGGAYEQYF

SEQ ID NO: 686149 - protein, 13 aa, Homo sapiens
  CDR3 for alpha chain variable domain of TCR clone 343075 (TRAV12-1, TRAJ40)
CVVPTSGTYKYIF

SEQ ID NO: 686150 - protein, 13 aa, Homo sapiens
  CDR3 for beta chain variable domain of TCR clone 343075 (TRBV4-2, TRBJ1-1)
CASCQAGNTEAFF

SEQ ID NO: 686151 - protein, 11 aa, Homo sapiens
  CDR3 for alpha chain variable domain of TCR clone 343076 (TRAV12-3, TRAJ43)
CAMSVSNDIRF

SEQ ID NO: 686152 - protein, 14 aa, Homo sapiens
  CDR3 for beta chain variable domain of TCR clone 343076 (TRBV20-1, TRBJ2-2)
CSALYRGGTGELFF

SEQ ID NO: 686153 - protein, 14 aa, Homo sapiens
  CDR3 for alpha chain variable domain of TCR clone 343077 (TRAV20, TRAJ47)
CAVTFGEYGNKLVF

SEQ ID NO: 686154 - protein, 15 aa, Homo sapiens
  CDR3 for beta chain variable domain of TCR clone 343077 (TRBV6-3, TRBJ2-7)
CASSSPGTVFYEQYF

SEQ ID NO: 686155 - protein, 12 aa, Homo sapiens
  CDR3 for alpha chain variable domain of TCR clone 343078 (TRAV3, TRAJ43)
CAVRDPTNDMLF

SEQ ID NO: 686156 - protein, 15 aa, Homo sapiens
  CDR3 for beta chain variable domain of TCR clone 343078 (TRBV27, TRBJ1-5)
CASSLGTGFDQPQHF

SEQ ID NO: 686157 - protein, 15 aa, Homo sapiens
  CDR3 for alpha chain variable domain of TCR clone 343079 (TRAV16, TRAJ17)
CALSGQEAAGNKLTF

SEQ ID NO: 686158 - protein, 14 aa, Homo sapiens
  CDR3 for beta chain variable domain of TCR clone 343079 (TRBV11-2, TRBJ1-6)
CASSLRQGNSPLHF

SEQ ID NO: 686159 - protein, 13 aa, Homo sapiens
  CDR3 for alpha chain variable domain of TCR clone 343080 (TRAV12-3, TRAJ9)
CAMRNNGGFKTIF

SEQ ID NO: 686160 - protein, 14 aa, Homo sapiens
  CDR3 for beta chain variable domain of TCR clone 343080 (TRBV11-2, TRBJ2-7)
CASSSTGEGYEQYF

SEQ ID NO: 686161 - protein, 15 aa, Homo sapiens
  CDR3 for alpha chain variable domain of TCR clone 343081 (TRAV26-1, TRAJ44)
CIARVPFGTARKLTF

SEQ ID NO: 686162 - protein, 12 aa, Homo sapiens
  CDR3 for beta chain variable domain of TCR clone 343081 (TRBV11-2, TRBJ2-2)
CASSLGGGELFF

SEQ ID NO: 686163 - protein, 22 aa, Homo sapiens
  CDR3 for alpha chain variable domain of TCR clone 343082 (TRAV25, TRAJ6)
CAGRESGGSYIPTFGREPALLF

SEQ ID NO: 686164 - protein, 13 aa, Homo sapiens
  CDR3 for beta chain variable domain of TCR clone 343082 (TRBV12-4, TRBJ2-7)
CASSLSGVYEQYF

SEQ ID NO: 686165 - protein, 12 aa, Homo sapiens
  CDR3 for alpha chain variable domain of TCR clone 343083 (TRAV12-3, TRAJ31)
CAMSVPNAILMF

SEQ ID NO: 686166 - protein, 12 aa, Homo sapiens
  CDR3 for beta chain variable domain of TCR clone 343083 (TRBV11-2, TRBJ2-1)
CASSVQREGQFF

SEQ ID NO: 686167 - protein, 12 aa, Homo sapiens
  CDR3 for alpha chain variable domain of TCR clone 343084 (TRAV17, TRAJ4)
CATDGGYNKLIF

SEQ ID NO: 686168 - protein, 13 aa, Homo sapiens
  CDR3 for beta chain variable domain of TCR clone 343084 (TRBV29-1, TRBJ2-2)
CRTTGINTGELFF

SEQ ID NO: 686169 - protein, 17 aa, Homo sapiens
  CDR3 for alpha chain variable domain of TCR clone 343085 (TRAV12-3, TRAJ26)
CAMSGGRWDNYGQNFVF

SEQ ID NO: 686170 - protein, 12 aa, Homo sapiens
  CDR3 for beta chain variable domain of TCR clone 343085 (TRBV19, TRBJ1-1)
CASSTTGIEALF

SEQ ID NO: 686171 - protein, 12 aa, Homo sapiens
  CDR3 for alpha chain variable domain of TCR clone 343086 (TRAV12-3, TRAJ17)
CAMTLTGNKRTF

SEQ ID NO: 686172 - protein, 15 aa, Homo sapiens
  CDR3 for beta chain variable domain of TCR clone 343086 (TRBV20-1, TRBJ2-7)
CIARDRVSGMDEQYF

SEQ ID NO: 686173 - protein, 14 aa, Homo sapiens
  CDR3 for alpha chain variable domain of TCR clone 343087 (TRAV1-2, TRAJ16)
CAVNRFSDGQKLLF

SEQ ID NO: 686174 - protein, 17 aa, Homo sapiens
  CDR3 for beta chain variable domain of TCR clone 343087 (TRBV6-6, TRBJ2-7)
CASSYSYGGSSSSTSGR

SEQ ID NO: 686175 - protein, 12 aa, Homo sapiens
  CDR3 for alpha chain variable domain of TCR clone 343088 (TRAV1-2, TRAJ30)
CAVRGRDDKIIF

SEQ ID NO: 686176 - protein, 13 aa, Homo sapiens
  CDR3 for beta chain variable domain of TCR clone 343088 (TRBV11-3, TRBJ2-7)
CASSLDKLCEQYF

SEQ ID NO: 686177 - protein, 14 aa, Homo sapiens
  CDR3 for alpha chain variable domain of TCR clone 343089 (TRAV38-1, TRAJ45)
CSYYSVGGADGLTF

SEQ ID NO: 686178 - protein, 20 aa, Homo sapiens
  CDR3 for beta chain variable domain of TCR clone 343089 (TRBV28, TRBJ2-1)
CASTPIGRSPGLAGGNEQFF

SEQ ID NO: 686179 - protein, 11 aa, Homo sapiens
  CDR3 for alpha chain variable domain of TCR clone 343090 (TRAV1-2, TRAJ31)
CAVNNNARLMF

SEQ ID NO: 686180 - protein, 15 aa, Homo sapiens
  CDR3 for beta chain variable domain of TCR clone 343090 (TRBV28, TRBJ2-1)
CASSIIAGGRSEEFF

SEQ ID NO: 686181 - protein, 13 aa, Homo sapiens
  CDR3 for alpha chain variable domain of TCR clone 343091 (TRAV26-1, TRAJ35)
CIVSRRVGEMLHC

SEQ ID NO: 686182 - protein, 17 aa, Homo sapiens
  CDR3 for beta chain variable domain of TCR clone 343091 (TRBV7-9, TRBJ2-7)
CASSFDGSRGGAYEQYI

SEQ ID NO: 686183 - protein, 12 aa, Homo sapiens
  CDR3 for alpha chain variable domain of TCR clone 343092 (TRAV10, TRAJ43)
CVVVRVGNDMRF

SEQ ID NO: 686184 - protein, 15 aa, Homo sapiens
  CDR3 for beta chain variable domain of TCR clone 343092 (TRBV2, TRBJ2-7)
CASSEGLAWSYEQYF

SEQ ID NO: 686185 - protein, 12 aa, Homo sapiens
  CDR3 for alpha chain variable domain of TCR clone 343093 (TRAV16, TRAJ10)
CSRTGGGNKLTF

SEQ ID NO: 686186 - protein, 14 aa, Homo sapiens
  CDR3 for beta chain variable domain of TCR clone 343093 (TRBV16, TRBJ1-1)
CASSQAGPNTEAFF

SEQ ID NO: 686187 - protein, 15 aa, Homo sapiens
  CDR3 for alpha chain variable domain of TCR clone 343094 (TRAV26-1, TRAJ44)
CIVRANTGTASKLTF

SEQ ID NO: 686188 - protein, 14 aa, Homo sapiens
  CDR3 for beta chain variable domain of TCR clone 343094 (TRBV18, TRBJ2-5)
CASSPGVSQETQYF

SEQ ID NO: 686189 - protein, 12 aa, Homo sapiens
  CDR3 for alpha chain variable domain of TCR clone 343095 (TRAV8-3, TRAJ41)
CAVALSGYALNF

SEQ ID NO: 686190 - protein, 15 aa, Homo sapiens
  CDR3 for beta chain variable domain of TCR clone 343095 (TRBV20-1, TRBJ1-1)
CSARSAATSNTEAFF

SEQ ID NO: 686191 - protein, 16 aa, Homo sapiens
  CDR3 for alpha chain variable domain of TCR clone 343096 (TRAV3, TRAJ15)
CAVRDRTNQAGTALLF

SEQ ID NO: 686192 - protein, 14 aa, Homo sapiens
  CDR3 for beta chain variable domain of TCR clone 343096 (TRBV7-2, TRBJ1-4)
CASSSGRGDRKLFF

SEQ ID NO: 686193 - protein, 15 aa, Homo sapiens
  CDR3 for alpha chain variable domain of TCR clone 343097 (TRAV26-1, TRAJ56)
CIVRVATGANSKLTF

SEQ ID NO: 686194 - protein, 13 aa, Homo sapiens
  CDR3 for beta chain variable domain of TCR clone 343097 (TRBV4-1, TRBJ2-2)
CASSQENTGELFF

SEQ ID NO: 686195 - protein, 14 aa, Homo sapiens
  CDR3 for alpha chain variable domain of TCR clone 343098 (TRAV12-3, TRAJ10)
SHLPLTGGGNKLTF

SEQ ID NO: 686196 - protein, 17 aa, Homo sapiens
  CDR3 for beta chain variable domain of TCR clone 343098 (TRBV6-1, TRBJ1-3)
CTSGPAWKGGGGNTIYF

SEQ ID NO: 686197 - protein, 13 aa, Homo sapiens
  CDR3 for alpha chain variable domain of TCR clone 343099 (TRAV12-1, TRAJ16)
YVVNGPDGQTLLF

SEQ ID NO: 686198 - protein, 15 aa, Homo sapiens
  CDR3 for beta chain variable domain of TCR clone 343099 (TRBV6-3, TRBJ2-7)
CASSSPGTVFYEQYF

SEQ ID NO: 686199 - protein, 17 aa, Homo sapiens
  CDR3 for alpha chain variable domain of TCR clone 343100 (TRAV3, TRAJ42)
CAVRDRDYGGSQGNLIF

SEQ ID NO: 686200 - protein, 17 aa, Homo sapiens
  CDR3 for beta chain variable domain of TCR clone 343100 (TRBV7-9, TRBJ2-3)
CASSPTVAGGLTDTQYF

SEQ ID NO: 686201 - protein, 14 aa, Homo sapiens
  CDR3 for alpha chain variable domain of TCR clone 343101 (TRAV26-1, TRAJ38)
CIADNSGNNRKLIW

SEQ ID NO: 686202 - protein, 20 aa, Homo sapiens
  CDR3 for beta chain variable domain of TCR clone 343101 (TRBV7-8, TRBJ2-2)
CASSHLFPGPTIHITGELFF

SEQ ID NO: 686203 - protein, 16 aa, Homo sapiens
  CDR3 for alpha chain variable domain of TCR clone 343102 (TRAV21, TRAJ52)
CAVTNAGGTSYGKLTF

SEQ ID NO: 686204 - protein, 16 aa, Homo sapiens
  CDR3 for beta chain variable domain of TCR clone 343102 (TRBV5-4, TRBJ2-5)
CASSLGLAGGRETQYF

SEQ ID NO: 686205 - protein, 14 aa, Homo sapiens
  CDR3 for alpha chain variable domain of TCR clone 343103 (TRAV13-1, TRAJ26)
CAASSAHYGQNFVF

SEQ ID NO: 686206 - protein, 17 aa, Homo sapiens
  CDR3 for beta chain variable domain of TCR clone 343103 (TRBV25-1, TRBJ2-5)
CASSRRGGGGGQETQYF

SEQ ID NO: 686207 - protein, 12 aa, Homo sapiens
  CDR3 for alpha chain variable domain of TCR clone 343104 (TRAV12-3, TRAJ17)
CAMTLTCKKLTF

SEQ ID NO: 686208 - protein, 15 aa, Homo sapiens
  CDR3 for beta chain variable domain of TCR clone 343104 (TRBV20-1, TRBJ2-7)
CSARDRVSGMDEQYF

SEQ ID NO: 686209 - protein, 13 aa, Homo sapiens
  CDR3 for alpha chain variable domain of TCR clone 343105 (TRAV3, TRAJ27)
CVVRPLGAGKSPF

SEQ ID NO: 686210 - protein, 13 aa, Homo sapiens
  CDR3 for beta chain variable domain of TCR clone 343105 (TRBV7-9, TRBJ2-3)
CASSPGSTDTQYF

SEQ ID NO: 686211 - protein, 11 aa, Homo sapiens
  CDR3 for alpha chain variable domain of TCR clone 343106 (TRAV21, TRAJ34)
CAHYNTDKLIF

SEQ ID NO: 686212 - protein, 15 aa, Homo sapiens
  CDR3 for beta chain variable domain of TCR clone 343106 (TRBV6-1, TRBJ2-3)
CASSERGGITDTQYF

SEQ ID NO: 686213 - protein, 16 aa, Homo sapiens
  CDR3 for alpha chain variable domain of TCR clone 343107 (TRAV3, TRAJ13)
CAVRDPNSGGYQKVTF

SEQ ID NO: 686214 - protein, 13 aa, Homo sapiens
  CDR3 for beta chain variable domain of TCR clone 343107 (TRBV7-9, TRBJ2-7)
CASTLQGSYEQYF

SEQ ID NO: 686215 - protein, 16 aa, Homo sapiens
  CDR3 for alpha chain variable domain of TCR clone 343108 (TRAV8-6, TRAJ4)
CVVSERSSGGYNKLIF

SEQ ID NO: 686216 - protein, 19 aa, Homo sapiens
  CDR3 for beta chain variable domain of TCR clone 343108 (TRBV19, TRBJ1-5)
CASSISPRQTGGGNQPQHF

SEQ ID NO: 686217 - protein, 19 aa, Homo sapiens
  CDR3 for alpha chain variable domain of TCR clone 343109 (TRAV12-3, TRAJ24)
SLFIRDSQPRADSWGKFQF

SEQ ID NO: 686218 - protein, 13 aa, Homo sapiens
  CDR3 for beta chain variable domain of TCR clone 343109 (TRBV19, TRBJ2-2)
CASSIWSTGELFF

SEQ ID NO: 686219 - protein, 17 aa, Homo sapiens
  CDR3 for alpha chain variable domain of TCR clone 343110 (TRAV3, TRAJ6)
CAVRDGPRAGGSYLPTF

SEQ ID NO: 686220 - protein, 13 aa, Homo sapiens
  CDR3 for beta chain variable domain of TCR clone 343110 (TRBV27, TRBJ1-1)
CASSLSIGAEAFF

SEQ ID NO: 686221 - protein, 13 aa, Homo sapiens
  CDR3 for alpha chain variable domain of TCR clone 343111 (TRAV2, TRAJ40)
CAVVTSGTYKYIF

SEQ ID NO: 686222 - protein, 12 aa, Homo sapiens
  CDR3 for beta chain variable domain of TCR clone 343111 (TRBV5-1, TRBJ1-1)
CASSLTGAEAFF

SEQ ID NO: 686223 - protein, 15 aa, Homo sapiens
  CDR3 for alpha chain variable domain of TCR clone 343112 (TRAV26-1, TRAJ29)
CIVRVEGSGNTPLVF

SEQ ID NO: 686224 - protein, 14 aa, Homo sapiens
  CDR3 for beta chain variable domain of TCR clone 343112 (TRBV7-2, TRBJ2-7)
CASSLPPGQGPQYF

SEQ ID NO: 686225 - protein, 14 aa, Homo sapiens
  CDR3 for alpha chain variable domain of TCR clone 343113 (TRAV8-1, TRAJ34)
CALPRGTTSSSLGL

SEQ ID NO: 686226 - protein, 16 aa, Homo sapiens
  CDR3 for beta chain variable domain of TCR clone 343113 (TRBV11-2, TRBJ1-2)
CASSLDTGGADYGYAF

SEQ ID NO: 686227 - protein, 16 aa, Homo sapiens
  CDR3 for alpha chain variable domain of TCR clone 343114 (TRAV14/DV4, TRAJ53)
CAMREGGGGSNYKLTF

SEQ ID NO: 686228 - protein, 19 aa, Homo sapiens
  CDR3 for beta chain variable domain of TCR clone 343114 (TRBV28, TRBJ2-4)
CASSFQPGGPAHSKNTQYF

SEQ ID NO: 686229 - protein, 12 aa, Homo sapiens
  CDR3 for alpha chain variable domain of TCR clone 343115 (TRAV13-1, TRAJ48)
CAANFGNEKLTF

SEQ ID NO: 686230 - protein, 13 aa, Homo sapiens
  CDR3 for beta chain variable domain of TCR clone 343115 (TRBV7-3, TRBJ1-1)
CTSSQDWGAEAFF

SEQ ID NO: 686231 - protein, 15 aa, Homo sapiens
  CDR3 for alpha chain variable domain of TCR clone 343116 (TRAV13-1, TRAJ44)
CAASRGGGTASKLTF

SEQ ID NO: 686232 - protein, 12 aa, Homo sapiens
  CDR3 for beta chain variable domain of TCR clone 343116 (TRBV11-2, TRBJ2-2)
CASSLGDGELFF

SEQ ID NO: 686233 - protein, 13 aa, Homo sapiens
  CDR3 for alpha chain variable domain of TCR clone 343117 (TRAV12-3, TRAJ48)
CAMSLVGNEKLTF

SEQ ID NO: 686234 - protein, 12 aa, Homo sapiens
  CDR3 for beta chain variable domain of TCR clone 343117 (TRBV5-1, TRBJ2-7)
CASSLDSYEQYF

SEQ ID NO: 686235 - protein, 16 aa, Homo sapiens
  CDR3 for alpha chain variable domain of TCR clone 343118 (TRAV4, TRAJ22)
CLVGDLYSGSARQLTF

SEQ ID NO: 686236 - protein, 15 aa, Homo sapiens
  CDR3 for beta chain variable domain of TCR clone 343118 (TRBV12-4, TRBJ2-5)
CASSGTGQAQETQYF

SEQ ID NO: 686237 - protein, 16 aa, Homo sapiens
  CDR3 for alpha chain variable domain of TCR clone 343119 (TRAV38-2/DV8, TRAJ45)
CAYTTTSGGGADGLTF

SEQ ID NO: 686238 - protein, 14 aa, Homo sapiens
  CDR3 for beta chain variable domain of TCR clone 343119 (TRBV7-9, TRBJ2-2)
CASSLGHHTGELFF

SEQ ID NO: 686239 - protein, 13 aa, Homo sapiens
  CDR3 for alpha chain variable domain of TCR clone 343120 (TRAV22, TRAJ12)
CAGRMDSSYKLIF

SEQ ID NO: 686240 - protein, 15 aa, Homo sapiens
  CDR3 for beta chain variable domain of TCR clone 343120 (TRBV19, TRBJ2-1)
CASNAQGLAGREQFF

SEQ ID NO: 686241 - protein, 13 aa, Homo sapiens
  CDR3 for alpha chain variable domain of TCR clone 343121 (TRAV17, TRAJ5)
CAHMDTGRRALTF

SEQ ID NO: 686242 - protein, 14 aa, Homo sapiens
  CDR3 for beta chain variable domain of TCR clone 343121 (TRBV7-3, TRBJ2-1)
CASSLAGGTNEQFF

SEQ ID NO: 686243 - protein, 14 aa, Homo sapiens
  CDR3 for alpha chain variable domain of TCR clone 343122 (TRAV1-2, TRAJ8)
CAVREDTGFPKLVF

SEQ ID NO: 686244 - protein, 16 aa, Homo sapiens
  CDR3 for beta chain variable domain of TCR clone 343122 (TRBV7-9, TRBJ2-1)
CASSDVAGGSYNEQFF

SEQ ID NO: 686245 - protein, 18 aa, Homo sapiens
  CDR3 for alpha chain variable domain of TCR clone 343123 (TRAV13-1, TRAJ52)
CAASKRSAGGTSYGKLTF

SEQ ID NO: 686246 - protein, 16 aa, Homo sapiens
  CDR3 for beta chain variable domain of TCR clone 343123 (TRBV7-3, TRBJ2-1)
CASSKPLAGGYNEQFF

SEQ ID NO: 686247 - protein, 12 aa, Homo sapiens
  CDR3 for alpha chain variable domain of TCR clone 343124 (TRAV13-1, TRAJ21)
CAAKEGFNKFYF

SEQ ID NO: 686248 - protein, 17 aa, Homo sapiens
  CDR3 for beta chain variable domain of TCR clone 343124 (TRBV19, TRBJ2-7)
CASSIPFYDSYPYEQYF

SEQ ID NO: 686249 - protein, 14 aa, Homo sapiens
  CDR3 for alpha chain variable domain of TCR clone 343125 (TRAV12-2, TRAJ13)
CAVKKTGGYQKVTF

SEQ ID NO: 686250 - protein, 14 aa, Homo sapiens
  CDR3 for beta chain variable domain of TCR clone 343125 (TRBV28, TRBJ2-1)
CASSLLQGTNEQFF

SEQ ID NO: 686251 - protein, 14 aa, Homo sapiens
  CDR3 for alpha chain variable domain of TCR clone 343126 (TRAV35, TRAJ22)
CAGLRPGSARQLTF

SEQ ID NO: 686252 - protein, 13 aa, Homo sapiens
  CDR3 for beta chain variable domain of TCR clone 343126 (TRBV20-1, TRBJ2-7)
CSATHTSGYVQYF

SEQ ID NO: 686253 - protein, 13 aa, Homo sapiens
  CDR3 for alpha chain variable domain of TCR clone 343127 (TRAV12-1, TRAJ39)
GVVNYNAGNMLTF

SEQ ID NO: 686254 - protein, 14 aa, Homo sapiens
  CDR3 for beta chain variable domain of TCR clone 343127 (TRBV27, TRBJ2-3)
CASSPLGTTDTQYF

SEQ ID NO: 686255 - protein, 12 aa, Homo sapiens
  CDR3 for alpha chain variable domain of TCR clone 343128 (TRAV23/DV6, TRAJ49)
CAARRTGNQFYF

SEQ ID NO: 686256 - protein, 14 aa, Homo sapiens
  CDR3 for beta chain variable domain of TCR clone 343128 (TRBV6-6, TRBJ2-7)
CASSDSGAGYEQYF

SEQ ID NO: 686257 - protein, 15 aa, Homo sapiens
  CDR3 for alpha chain variable domain of TCR clone 343129 (TRAV8-3, TRAJ45)
CASSYSGGGADGLTF

SEQ ID NO: 686258 - protein, 14 aa, Homo sapiens
  CDR3 for beta chain variable domain of TCR clone 343129 (TRBV19, TRBJ2-1)
CASPTFVLSGEQIF

SEQ ID NO: 686259 - protein, 16 aa, Homo sapiens
  CDR3 for alpha chain variable domain of TCR clone 343130 (TRAV3, TRAJ10)
CAVRDMRAGGGNKLNF

SEQ ID NO: 686260 - protein, 14 aa, Homo sapiens
  CDR3 for beta chain variable domain of TCR clone 343130 (TRBV25-1, TRBJ1-1)
CASTHLGGNTEALF

SEQ ID NO: 686261 - protein, 11 aa, Homo sapiens
  CDR3 for alpha chain variable domain of TCR clone 343131 (TRAV13-1, TRAJ43)
CAASLRNDMRF

SEQ ID NO: 686262 - protein, 12 aa, Homo sapiens
  CDR3 for beta chain variable domain of TCR clone 343131 (TRBV29-1, TRBJ2-3)
CSVTGGADTQYF

SEQ ID NO: 686263 - protein, 17 aa, Homo sapiens
  CDR3 for alpha chain variable domain of TCR clone 343132 (TRAV14/DV4, TRAJ28)
CAMREVSSWAGSYQLTF

SEQ ID NO: 686264 - protein, 15 aa, Homo sapiens
  CDR3 for beta chain variable domain of TCR clone 343132 (TRBV11-2, TRBJ1-6)
CASTLRETGNSPLHF

SEQ ID NO: 686265 - protein, 12 aa, Homo sapiens
  CDR3 for alpha chain variable domain of TCR clone 343133 (TRAV12-3, TRAJ41)
CAMSYSGYALNF

SEQ ID NO: 686266 - protein, 12 aa, Homo sapiens
  CDR3 for beta chain variable domain of TCR clone 343133 (TRBV11-2, TRBJ2-2)
CASSLGGGELFF

SEQ ID NO: 686267 - protein, 12 aa, Homo sapiens
  CDR3 for alpha chain variable domain of TCR clone 343134 (TRAV21, TRAJ33)
CAKMDSNYQLIW

SEQ ID NO: 686268 - protein, 15 aa, Homo sapiens
  CDR3 for beta chain variable domain of TCR clone 343134 (TRBV28, TRBJ2-1)
CASRVGLDEYNEQFF

SEQ ID NO: 686269 - protein, 13 aa, Homo sapiens
  CDR3 for alpha chain variable domain of TCR clone 343135 (TRAV17, TRAJ5)
CALRGTGRRALTF

SEQ ID NO: 686270 - protein, 14 aa, Homo sapiens
  CDR3 for beta chain variable domain of TCR clone 343135 (TRBV12-5, TRBJ2-5)
CASGSRTHQESQYF

SEQ ID NO: 686271 - protein, 12 aa, Homo sapiens
  CDR3 for alpha chain variable domain of TCR clone 343136 (TRAV21, TRAJ27)
CAANTNAGKSTF

SEQ ID NO: 686272 - protein, 12 aa, Homo sapiens
  CDR3 for beta chain variable domain of TCR clone 343136 (TRBV11-2, TRBJ2-5)
CASSLVGETQYF

SEQ ID NO: 686273 - protein, 14 aa, Homo sapiens
  CDR3 for alpha chain variable domain of TCR clone 343137 (TRAV13-1, TRAJ35)
CAASKRSFGNVLHC

SEQ ID NO: 686274 - protein, 13 aa, Homo sapiens
  CDR3 for beta chain variable domain of TCR clone 343137 (TRBV7-3, TRBJ1-1)
CASSQDWGAEAFF

SEQ ID NO: 686275 - protein, 14 aa, Homo sapiens
  CDR3 for alpha chain variable domain of TCR clone 343138 (TRAV12-2, TRAJ22)
CSVRVSGSARQLTF

SEQ ID NO: 686276 - protein, 13 aa, Homo sapiens
  CDR3 for beta chain variable domain of TCR clone 343138 (TRBV6-1, TRBJ2-1)
CAGAGTGLHEQFF

SEQ ID NO: 686277 - protein, 18 aa, Homo sapiens
  CDR3 for alpha chain variable domain of TCR clone 343139 (TRAV1-2, TRAJ18)
CAVRDMGDRGSTLGRLYF

SEQ ID NO: 686278 - protein, 16 aa, Homo sapiens
  CDR3 for beta chain variable domain of TCR clone 343139 (TRBV19, TRBJ1-2)
CASSKFRDTTNYGYTF

SEQ ID NO: 686279 - protein, 15 aa, Homo sapiens
  CDR3 for alpha chain variable domain of TCR clone 343140 (TRAV3, TRAJ22)
CAVRDRGGSARQLTF

SEQ ID NO: 686280 - protein, 13 aa, Homo sapiens
  CDR3 for beta chain variable domain of TCR clone 343140 (TRBV12-4, TRBJ1-2)
FASSVRQGKGYTF

SEQ ID NO: 686281 - protein, 16 aa, Homo sapiens
  CDR3 for alpha chain variable domain of TCR clone 343141 (TRAV1-2, TRAJ10)
CAVRGVLTGGGNKLTF

SEQ ID NO: 686282 - protein, 14 aa, Homo sapiens
  CDR3 for beta chain variable domain of TCR clone 343141 (TRBV7-2, TRBJ1-1)
CASRDWTRGTEAFF

SEQ ID NO: 686283 - protein, 12 aa, Homo sapiens
  CDR3 for alpha chain variable domain of TCR clone 343142 (TRAV1-2, TRAJ7)
CAVAYGSNRFAF

SEQ ID NO: 686284 - protein, 16 aa, Homo sapiens
  CDR3 for beta chain variable domain of TCR clone 343142 (TRBV5-1, TRBJ2-7)
CASSPMTGALSYEQYF

SEQ ID NO: 686285 - protein, 14 aa, Homo sapiens
  CDR3 for alpha chain variable domain of TCR clone 343143 (TRAV35, TRAJ33)
CAGSSQDSNYHLIL

SEQ ID NO: 686286 - protein, 15 aa, Homo sapiens
  CDR3 for beta chain variable domain of TCR clone 343143 (TRBV20-1, TRBJ2-7)
CSAESGTSGAYEQYF

SEQ ID NO: 686287 - protein, 16 aa, Homo sapiens
  CDR3 for alpha chain variable domain of TCR clone 343144 (TRAV26-1, TRAJ37)
CIVRGDGSGNTGKLIF

SEQ ID NO: 686288 - protein, 13 aa, Homo sapiens
  CDR3 for beta chain variable domain of TCR clone 343144 (TRBV4-1, TRBJ2-2)
CASSQENNGELFF

SEQ ID NO: 686289 - protein, 14 aa, Homo sapiens
  CDR3 for alpha chain variable domain of TCR clone 343145 (TRAV12-3, TRAJ56)
CAMSVTGANSKLTF

SEQ ID NO: 686290 - protein, 17 aa, Homo sapiens
  CDR3 for beta chain variable domain of TCR clone 343145 (TRBV20-1, TRBJ2-3)
CSASRLGRGGGADTQYF

SEQ ID NO: 686291 - protein, 12 aa, Homo sapiens
  CDR3 for alpha chain variable domain of TCR clone 343146 (TRAV17, TRAJ49)
CATVTTGNQFYL

SEQ ID NO: 686292 - protein, 18 aa, Homo sapiens
  CDR3 for beta chain variable domain of TCR clone 343146 (TRBV11-2, TRBJ2-6)
CASSLNPFLGTGANVLTF

SEQ ID NO: 686293 - protein, 17 aa, Homo sapiens
  CDR3 for alpha chain variable domain of TCR clone 343147 (TRAV4, TRAJ28)
CLVGDRALGLGVTNSLS

SEQ ID NO: 686294 - protein, 14 aa, Homo sapiens
  CDR3 for beta chain variable domain of TCR clone 343147 (TRBV19, TRBJ2-7)
CASTVQGRPYEQYF

SEQ ID NO: 686295 - protein, 14 aa, Homo sapiens
  CDR3 for alpha chain variable domain of TCR clone 343148 (TRAV1-2, TRAJ16)
CAVNRFSDGPKLLF

SEQ ID NO: 686296 - protein, 15 aa, Homo sapiens
  CDR3 for beta chain variable domain of TCR clone 343148 (TRBV9, TRBJ1-6)
CASSVAGTGDPPLHF

SEQ ID NO: 686297 - protein, 13 aa, Homo sapiens
  CDR3 for alpha chain variable domain of TCR clone 343149 (TRAV12-3, TRAJ33)
CAMSVNSNYQLIW

SEQ ID NO: 686298 - protein, 15 aa, Homo sapiens
  CDR3 for beta chain variable domain of TCR clone 343149 (TRBV7-3, TRBJ2-1)
CASSYFRGTYNEQFF

SEQ ID NO: 686299 - protein, 17 aa, Homo sapiens
  CDR3 for alpha chain variable domain of TCR clone 343150 (TRAV26-1, TRAJ46)
IASSESEKKSSGDKLTF

SEQ ID NO: 686300 - protein, 14 aa, Homo sapiens
  CDR3 for beta chain variable domain of TCR clone 343150 (TRBV7-6, TRBJ2-3)
CASSLGTVTDTQYF

SEQ ID NO: 686301 - protein, 15 aa, Homo sapiens
  CDR3 for alpha chain variable domain of TCR clone 343151 (TRAV26-1, TRAJ40)
CIVRVTTSGTYKYIF

SEQ ID NO: 686302 - protein, 12 aa, Homo sapiens
  CDR3 for beta chain variable domain of TCR clone 343151 (TRBV7-9, TRBJ1-4)
CASSPDREKLFF

SEQ ID NO: 686303 - protein, 15 aa, Homo sapiens
  CDR3 for alpha chain variable domain of TCR clone 343152 (TRAV8-3, TRAJ23)
CAVGDRYNQGGKLIF

SEQ ID NO: 686304 - protein, 22 aa, Homo sapiens
  CDR3 for beta chain variable domain of TCR clone 343152 (TRBV29-1, TRBJ2-5)
TVSIMSPEDSSIYLCSAGTQYF

SEQ ID NO: 686305 - protein, 11 aa, Homo sapiens
  CDR3 for alpha chain variable domain of TCR clone 343153 (TRAV21, TRAJ33)
CQMDSNYQLIW

SEQ ID NO: 686306 - protein, 17 aa, Homo sapiens
  CDR3 for beta chain variable domain of TCR clone 343153 (TRBV20-1, TRBJ2-2)
CSASGSGQGGLTGELFF

SEQ ID NO: 686307 - protein, 15 aa, Homo sapiens
  CDR3 for alpha chain variable domain of TCR clone 343154 (TRAV3, TRAJ20)
CAVRDIKLSDYKTSF

SEQ ID NO: 686308 - protein, 15 aa, Homo sapiens
  CDR3 for beta chain variable domain of TCR clone 343154 (TRBV7-9, TRBJ1-6)
CASSSPGRGNSPLHF

SEQ ID NO: 686309 - protein, 15 aa, Homo sapiens
  CDR3 for alpha chain variable domain of TCR clone 343155 (TRAV8-2, TRAJ16)
CVVSEGFSDGQKLLF

SEQ ID NO: 686310 - protein, 13 aa, Homo sapiens
  CDR3 for beta chain variable domain of TCR clone 343155 (TRBV20-1, TRBJ1-1)
CSAPPGGHTEAFF

SEQ ID NO: 686311 - protein, 11 aa, Homo sapiens
  CDR3 for alpha chain variable domain of TCR clone 343156 (TRAV13-1, TRAJ15)
CASTPGTALIF

SEQ ID NO: 686312 - protein, 15 aa, Homo sapiens
  CDR3 for beta chain variable domain of TCR clone 343156 (TRBV28, TRBJ2-5)
CASSPPWSYQETQYF

SEQ ID NO: 686313 - protein, 16 aa, Homo sapiens
  CDR3 for alpha chain variable domain of TCR clone 343157 (TRAV26-1, TRAJ11)
CIVRVVLGFRIQHPHL

SEQ ID NO: 686314 - protein, 13 aa, Homo sapiens
  CDR3 for beta chain variable domain of TCR clone 343157 (TRBV4-1, TRBJ1-1)
CASSRKMNTEAFF

SEQ ID NO: 686315 - protein, 12 aa, Homo sapiens
  CDR3 for alpha chain variable domain of TCR clone 343158 (TRAV13-2, TRAJ8)
CAPWLGFQRLVF

SEQ ID NO: 686316 - protein, 14 aa, Homo sapiens
  CDR3 for beta chain variable domain of TCR clone 343158 (TRBV12-4, TRBJ2-7)
CASSASGGWYEQYF

SEQ ID NO: 686317 - protein, 16 aa, Homo sapiens
  CDR3 for alpha chain variable domain of TCR clone 343159 (TRAV3, TRAJ10)
CAVRDMRAGGGNKLTF

SEQ ID NO: 686318 - protein, 15 aa, Homo sapiens
  CDR3 for beta chain variable domain of TCR clone 343159 (TRBV20-1, TRBJ2-7)
CSARGRVSGMDEQYF

SEQ ID NO: 686319 - protein, 13 aa, Homo sapiens
  CDR3 for alpha chain variable domain of TCR clone 343160 (TRAV12-3, TRAJ53)
CAMRGGSNYKLTF

SEQ ID NO: 686320 - protein, 14 aa, Homo sapiens
  CDR3 for beta chain variable domain of TCR clone 343160 (TRBV12-5, TRBJ2-5)
CASGSRTHQETQYF

SEQ ID NO: 686321 - protein, 16 aa, Homo sapiens
  CDR3 for alpha chain variable domain of TCR clone 343161 (TRAV30, TRAJ24)
CGTELMDADSWGKFQF

SEQ ID NO: 686322 - protein, 14 aa, Homo sapiens
  CDR3 for beta chain variable domain of TCR clone 343161 (TRBV12-5, TRBJ2-5)
CASGSRTHQETQYF

SEQ ID NO: 686323 - protein, 18 aa, Homo sapiens
  CDR3 for alpha chain variable domain of TCR clone 343162 (TRAV26-1, TRAJ23)
CIVRVGLEVWNQGGKLIF

SEQ ID NO: 686324 - protein, 14 aa, Homo sapiens
  CDR3 for beta chain variable domain of TCR clone 343162 (TRBV7-2, TRBJ2-7)
CASSLYPGRYEQYF

SEQ ID NO: 686325 - protein, 13 aa, Homo sapiens
  CDR3 for alpha chain variable domain of TCR clone 343163 (TRAV13-1, TRAJ23)
CAASGRGGGKLIF

SEQ ID NO: 686326 - protein, 16 aa, Homo sapiens
  CDR3 for beta chain variable domain of TCR clone 343163 (TRBV12-5, TRBJ2-5)
CASGPRTSGNQETQYF

SEQ ID NO: 686327 - protein, 13 aa, Homo sapiens
  CDR3 for alpha chain variable domain of TCR clone 343164 (TRAV21, TRAJ15)
CAVANQAGTALIF

SEQ ID NO: 686328 - protein, 12 aa, Homo sapiens
  CDR3 for beta chain variable domain of TCR clone 343164 (TRBV7-9, TRBJ2-7)
CASSSKREEQYF

SEQ ID NO: 686329 - protein, 11 aa, Homo sapiens
  CDR3 for alpha chain variable domain of TCR clone 343165 (TRAV3, TRAJ21)
SAVGNFNKFYF

SEQ ID NO: 686330 - protein, 16 aa, Homo sapiens
  CDR3 for beta chain variable domain of TCR clone 343165 (TRBV19, TRBJ2-1)
CASSKAEPSSYNEQFF

SEQ ID NO: 686331 - protein, 14 aa, Homo sapiens
  CDR3 for alpha chain variable domain of TCR clone 343166 (TRAV13-1, TRAJ45)
CAAIGGGGADGLTF

SEQ ID NO: 686332 - protein, 16 aa, Homo sapiens
  CDR3 for beta chain variable domain of TCR clone 343166 (TRBV7-2, TRBJ1-1)
CASSLGAGWTNIEAFF

SEQ ID NO: 686333 - protein, 14 aa, Homo sapiens
  CDR3 for alpha chain variable domain of TCR clone 343167 (TRAV30, TRAJ26)
CGTEIVSYGQNFVF

SEQ ID NO: 686334 - protein, 15 aa, Homo sapiens
  CDR3 for beta chain variable domain of TCR clone 343167 (TRBV5-1, TRBJ2-3)
CASSVTSGSTDTQYF

SEQ ID NO: 686335 - protein, 16 aa, Homo sapiens
  CDR3 for alpha chain variable domain of TCR clone 343168 (TRAV3, TRAJ37)
CAVRPHGSGNTGKLIF

SEQ ID NO: 686336 - protein, 13 aa, Homo sapiens
  CDR3 for beta chain variable domain of TCR clone 343168 (TRBV7-9, TRBJ2-3)
CASSPGSTDTQYF

SEQ ID NO: 686337 - protein, 14 aa, Homo sapiens
  CDR3 for alpha chain variable domain of TCR clone 343169 (TRAV17, TRAJ22)
CATSPSGSARQLTF

SEQ ID NO: 686338 - protein, 15 aa, Homo sapiens
  CDR3 for beta chain variable domain of TCR clone 343169 (TRBV4-1, TRBJ2-5)
CTSSQWDLYQETQYF

SEQ ID NO: 686339 - protein, 16 aa, Homo sapiens
  CDR3 for alpha chain variable domain of TCR clone 343170 (TRAV14/DV4, TRAJ54)
CAMREGRIQGAQKLVF

SEQ ID NO: 686340 - protein, 14 aa, Homo sapiens
  CDR3 for beta chain variable domain of TCR clone 343170 (TRBV7-2, TRBJ2-7)
CASRSQGAAYEQYF

SEQ ID NO: 686341 - protein, 13 aa, Homo sapiens
  CDR3 for alpha chain variable domain of TCR clone 343171 (TRAV12-1, TRAJ35)
CVVRGGFGNVLHC

SEQ ID NO: 686342 - protein, 18 aa, Homo sapiens
  CDR3 for beta chain variable domain of TCR clone 343171 (TRBV2, TRBJ2-1)
CASRGLAGGPRTYNEQFF

SEQ ID NO: 686343 - protein, 15 aa, Homo sapiens
  CDR3 for alpha chain variable domain of TCR clone 343172 (TRAV13-2, TRAJ6)
FAEKVLAGGSSIPTF

SEQ ID NO: 686344 - protein, 13 aa, Homo sapiens
  CDR3 for beta chain variable domain of TCR clone 343172 (TRBV20-1, TRBJ1-1)
CSARGGGNTEAFF

SEQ ID NO: 686345 - protein, 14 aa, Homo sapiens
  CDR3 for alpha chain variable domain of TCR clone 343173 (TRAV12-2, TRAJ13)
FAVKKTGGYQKVTF

SEQ ID NO: 686346 - protein, 16 aa, Homo sapiens
  CDR3 for beta chain variable domain of TCR clone 343173 (TRBV2, TRBJ2-1)
CASRSPAGGKYNEQFF

SEQ ID NO: 686347 - protein, 23 aa, Homo sapiens
  CDR3 for alpha chain variable domain of TCR clone 343174 (TRAV26-1, TRAJ38)
CIADNAGNNHIQNPDPAGYQLIN

SEQ ID NO: 686348 - protein, 13 aa, Homo sapiens
  CDR3 for beta chain variable domain of TCR clone 343174 (TRBV20-1, TRBJ1-1)
CSARGGGNTEAFF

SEQ ID NO: 686349 - protein, 12 aa, Homo sapiens
  CDR3 for alpha chain variable domain of TCR clone 343175 (TRAV38-1, TRAJ20)
CAFIWNDYKLSF

SEQ ID NO: 686350 - protein, 17 aa, Homo sapiens
  CDR3 for beta chain variable domain of TCR clone 343175 (TRBV19, TRBJ1-1)
CASSIAGRGLMNTEAFF

SEQ ID NO: 686351 - protein, 14 aa, Homo sapiens
  CDR3 for alpha chain variable domain of TCR clone 343176 (TRAV13-1, TRAJ35)
CAASKGGFGNVLHF

SEQ ID NO: 686352 - protein, 13 aa, Homo sapiens
  CDR3 for beta chain variable domain of TCR clone 343176 (TRBV7-3, TRBJ1-1)
CASSQDWGAEDFF

SEQ ID NO: 686353 - protein, 15 aa, Homo sapiens
  CDR3 for alpha chain variable domain of TCR clone 343177 (TRAV34, TRAJ38)
CGADFTPGNNRKLIW

SEQ ID NO: 686354 - protein, 11 aa, Homo sapiens
  CDR3 for beta chain variable domain of TCR clone 343177 (TRBV7-9, TRBJ2-3)
CASSPTDTQYF

SEQ ID NO: 686355 - protein, 17 aa, Homo sapiens
  CDR3 for alpha chain variable domain of TCR clone 343178 (TRAV8-6, TRAJ58)
CAVSSWVGETSGSRLTF

SEQ ID NO: 686356 - protein, 15 aa, Homo sapiens
  CDR3 for beta chain variable domain of TCR clone 343178 (TRBV11-2, TRBJ2-1)
CASSLGPDSYNEQFF

SEQ ID NO: 686357 - protein, 13 aa, Homo sapiens
  CDR3 for alpha chain variable domain of TCR clone 343179 (TRAV2, TRAJ40)
CAVVTSGTYKYIF

SEQ ID NO: 686358 - protein, 13 aa, Homo sapiens
  CDR3 for beta chain variable domain of TCR clone 343179 (TRBV19, TRBJ1-5)
CASSIGGEQPQHF

SEQ ID NO: 686359 - protein, 14 aa, Homo sapiens
  CDR3 for alpha chain variable domain of TCR clone 343180 (TRAV35, TRAJ33)
CAGSSQDSNYQLIW

SEQ ID NO: 686360 - protein, 12 aa, Homo sapiens
  CDR3 for beta chain variable domain of TCR clone 343180 (TRBV7-9, TRBJ2-7)
CASSLEGYEQYF

SEQ ID NO: 686361 - protein, 13 aa, Homo sapiens
  CDR3 for alpha chain variable domain of TCR clone 343181 (TRAV1-2, TRAJ9)
CAALNTGGFKTIF

SEQ ID NO: 686362 - protein, 16 aa, Homo sapiens
  CDR3 for beta chain variable domain of TCR clone 343181 (TRBV4-1, TRBJ2-7)
CASSLTAGQATYEQYF

SEQ ID NO: 686363 - protein, 15 aa, Homo sapiens
  CDR3 for alpha chain variable domain of TCR clone 343182 (TRAV27, TRAJ38)
CAARRNAGNNRKLLW

SEQ ID NO: 686364 - protein, 15 aa, Homo sapiens
  CDR3 for beta chain variable domain of TCR clone 343182 (TRBV5-1, TRBJ2-2)
CASSSQGGNTGELFF

SEQ ID NO: 686365 - protein, 12 aa, Homo sapiens
  CDR3 for alpha chain variable domain of TCR clone 343183 (TRAV13-1, TRAJ21)
CAAKEGFNKFYF

SEQ ID NO: 686366 - protein, 12 aa, Homo sapiens
  CDR3 for beta chain variable domain of TCR clone 343183 (TRBV18, TRBJ1-4)
CASSPSRENLFF

SEQ ID NO: 686367 - protein, 16 aa, Homo sapiens
  CDR3 for alpha chain variable domain of TCR clone 343184 (TRAV12-3, TRAJ53)
CAMSPGSGGSNYKLTF

SEQ ID NO: 686368 - protein, 14 aa, Homo sapiens
  CDR3 for beta chain variable domain of TCR clone 343184 (TRBV20-1, TRBJ2-7)
CSAPELAGVGEQYF

SEQ ID NO: 686369 - protein, 13 aa, Homo sapiens
  CDR3 for alpha chain variable domain of TCR clone 343185 (TRAV23/DV6, TRAJ34)
CAAIENNTDKPIF

SEQ ID NO: 686370 - protein, 13 aa, Homo sapiens
  CDR3 for beta chain variable domain of TCR clone 343185 (TRBV29-1, TRBJ2-7)
RSVGPSGGYEQYF

SEQ ID NO: 686371 - protein, 13 aa, Homo sapiens
  CDR3 for alpha chain variable domain of TCR clone 343186 (TRAV1-1, TRAJ33)
CAVRRDSNYQLIW

SEQ ID NO: 686372 - protein, 17 aa, Homo sapiens
  CDR3 for beta chain variable domain of TCR clone 343186 (TRBV13, TRBJ2-3)
CASSLSRVAGGRNTQYF

SEQ ID NO: 686373 - protein, 14 aa, Homo sapiens
  CDR3 for alpha chain variable domain of TCR clone 343187 (TRAV1-1, TRAJ9)
CAVRGGNGGFKTIF

SEQ ID NO: 686374 - protein, 14 aa, Homo sapiens
  CDR3 for beta chain variable domain of TCR clone 343187 (TRBV7-8, TRBJ2-3)
CASSLEAGTDTQYF

SEQ ID NO: 686375 - protein, 14 aa, Homo sapiens
  CDR3 for alpha chain variable domain of TCR clone 343188 (TRAV2, TRAJ24)
TTVPQLTAGGKFQF

SEQ ID NO: 686376 - protein, 13 aa, Homo sapiens
  CDR3 for beta chain variable domain of TCR clone 343188 (TRBV11-2, TRBJ2-1)
CASSSEAYNEQFF

SEQ ID NO: 686377 - protein, 14 aa, Homo sapiens
  CDR3 for alpha chain variable domain of TCR clone 343189 (TRAV13-1, TRAJ35)
CAASKGGFGNVLHC

SEQ ID NO: 686378 - protein, 13 aa, Homo sapiens
  CDR3 for beta chain variable domain of TCR clone 343189 (TRBV11-1, TRBJ1-1)
CASSKQGRTEAFF

SEQ ID NO: 686379 - protein, 13 aa, Homo sapiens
  CDR3 for alpha chain variable domain of TCR clone 343190 (TRAV38-2/DV8, TRAJ34)
CAYRTWHTDKLIF

SEQ ID NO: 686380 - protein, 18 aa, Homo sapiens
  CDR3 for beta chain variable domain of TCR clone 343190 (TRBV6-6, TRBJ1-3)
CASSYSKWDSISGNTIYF

SEQ ID NO: 686381 - protein, 16 aa, Homo sapiens
  CDR3 for alpha chain variable domain of TCR clone 343191 (TRAV3, TRAJ37)
CAVRPHASGNTGKLIF

SEQ ID NO: 686382 - protein, 17 aa, Homo sapiens
  CDR3 for beta chain variable domain of TCR clone 343191 (TRBV20-1, TRBJ2-1)
CSASSSGLAGSYNEQFF

SEQ ID NO: 686383 - protein, 12 aa, Homo sapiens
  CDR3 for alpha chain variable domain of TCR clone 343192 (TRAV23/DV6, TRAJ16)
CAARERGQKLLF

SEQ ID NO: 686384 - protein, 15 aa, Homo sapiens
  CDR3 for beta chain variable domain of TCR clone 343192 (TRBV15, TRBJ2-1)
CATSRPGQGLHEQFF

SEQ ID NO: 686385 - protein, 12 aa, Homo sapiens
  CDR3 for alpha chain variable domain of TCR clone 343193 (TRAV12-3, TRAJ17)
CAMTLTGNKLTF

SEQ ID NO: 686386 - protein, 19 aa, Homo sapiens
  CDR3 for beta chain variable domain of TCR clone 343193 (TRBV11-2, TRBJ2-3)
CASSAPRAGGNPSTDTQYF

SEQ ID NO: 686387 - protein, 13 aa, Homo sapiens
  CDR3 for alpha chain variable domain of TCR clone 343194 (TRAV13-1, TRAJ6)
CAASKGGSYIPKL

SEQ ID NO: 686388 - protein, 13 aa, Homo sapiens
  CDR3 for beta chain variable domain of TCR clone 343194 (TRBV7-9, TRBJ2-5)
CASLPSGRETQYF

SEQ ID NO: 686389 - protein, 16 aa, Homo sapiens
  CDR3 for alpha chain variable domain of TCR clone 343195 (TRAV12-1, TRAJ28)
CVVIAYSGAGSYQLIF

SEQ ID NO: 686390 - protein, 15 aa, Homo sapiens
  CDR3 for beta chain variable domain of TCR clone 343195 (TRBV14, TRBJ1-1)
CASSQEGMGFTEAFF

SEQ ID NO: 686391 - protein, 12 aa, Homo sapiens
  CDR3 for alpha chain variable domain of TCR clone 343196 (TRAV12-3, TRAJ17)
CAMTLTGNKLTF

SEQ ID NO: 686392 - protein, 15 aa, Homo sapiens
  CDR3 for beta chain variable domain of TCR clone 343196 (TRBV7-3, TRBJ2-2)
CASKANGANTGELFF

SEQ ID NO: 686393 - protein, 13 aa, Homo sapiens
  CDR3 for alpha chain variable domain of TCR clone 343197 (TRAV22, TRAJ29)
CAVGGVGNTPLVF

SEQ ID NO: 686394 - protein, 13 aa, Homo sapiens
  CDR3 for beta chain variable domain of TCR clone 343197 (TRBV4-2, TRBJ1-1)
CASSQAGNTEAFF

SEQ ID NO: 686395 - protein, 15 aa, Homo sapiens
  CDR3 for alpha chain variable domain of TCR clone 343198 (TRAV21, TRAJ53)
CATLNSGGSNYNLTF

SEQ ID NO: 686396 - protein, 12 aa, Homo sapiens
  CDR3 for beta chain variable domain of TCR clone 343198 (TRBV11-2, TRBJ2-2)
CASSLGGGELFF

SEQ ID NO: 686397 - protein, 15 aa, Homo sapiens
  CDR3 for alpha chain variable domain of TCR clone 343199 (TRAV13-1, TRAJ52)
SYYSAGGTSYGKLTF

SEQ ID NO: 686398 - protein, 11 aa, Homo sapiens
  CDR3 for beta chain variable domain of TCR clone 343199 (TRBV12-4, TRBJ2-2)
CASSSAGELFF

SEQ ID NO: 686399 - protein, 17 aa, Homo sapiens
  CDR3 for alpha chain variable domain of TCR clone 343200 (TRAV3, TRAJ6)
RAVRDGPRAGGSYIPTF

SEQ ID NO: 686400 - protein, 17 aa, Homo sapiens
  CDR3 for beta chain variable domain of TCR clone 343200 (TRBV27, TRBJ2-6)
CASSLTGFASGANVLTF

SEQ ID NO: 686401 - protein, 12 aa, Homo sapiens
  CDR3 for alpha chain variable domain of TCR clone 343201 (TRAV1-1, TRAJ9)
CAVDSGGFKTIF

SEQ ID NO: 686402 - protein, 14 aa, Homo sapiens
  CDR3 for beta chain variable domain of TCR clone 343201 (TRBV7-8, TRBJ2-5)
CASSATGGQETQYF

SEQ ID NO: 686403 - protein, 14 aa, Homo sapiens
  CDR3 for alpha chain variable domain of TCR clone 343202 (TRAV14/DV4, TRAJ41)
CARGGPDSGYELNF

SEQ ID NO: 686404 - protein, 15 aa, Homo sapiens
  CDR3 for beta chain variable domain of TCR clone 343202 (TRBV6-1, TRBJ1-1)
CASSEAWGQNTEAFF

SEQ ID NO: 686405 - protein, 13 aa, Homo sapiens
  CDR3 for alpha chain variable domain of TCR clone 343203 (TRAV12-2, TRAJ34)
CAVRGYNTDNLIF

SEQ ID NO: 686406 - protein, 15 aa, Homo sapiens
  CDR3 for beta chain variable domain of TCR clone 343203 (TRBV28, TRBJ2-1)
CASRTGAGVIARQFF

SEQ ID NO: 686407 - protein, 13 aa, Homo sapiens
  CDR3 for alpha chain variable domain of TCR clone 343204 (TRAV27, TRAJ29)
CAGAHSGNTPLVF

SEQ ID NO: 686408 - protein, 11 aa, Homo sapiens
  CDR3 for beta chain variable domain of TCR clone 343204 (TRBV29-1, TRBJ2-5)
CSEDRTGTQYF

SEQ ID NO: 686409 - protein, 13 aa, Homo sapiens
  CDR3 for alpha chain variable domain of TCR clone 343205 (TRAV23/DV6, TRAJ21)
CAASIGNFNKFYF

SEQ ID NO: 686410 - protein, 15 aa, Homo sapiens
  CDR3 for beta chain variable domain of TCR clone 343205 (TRBV7-9, TRBJ1-6)
CASSSPGRGNSPLHF

SEQ ID NO: 686411 - protein, 16 aa, Homo sapiens
  CDR3 for alpha chain variable domain of TCR clone 343206 (TRAV23/DV6, TRAJ9)
CAASIGGNTGGFKTIF

SEQ ID NO: 686412 - protein, 12 aa, Homo sapiens
  CDR3 for beta chain variable domain of TCR clone 343206 (TRBV9, TRBJ1-5)
CASSPQGQPQHF

SEQ ID NO: 686413 - protein, 13 aa, Homo sapiens
  CDR3 for alpha chain variable domain of TCR clone 343207 (TRAV8-1, TRAJ41)
CAVNPGSGYALNF

SEQ ID NO: 686414 - protein, 14 aa, Homo sapiens
  CDR3 for beta chain variable domain of TCR clone 343207 (TRBV7-2, TRBJ2-5)
CASSFTQGQGTQYF

SEQ ID NO: 686415 - protein, 15 aa, Homo sapiens
  CDR3 for alpha chain variable domain of TCR clone 343208 (TRAV12-2, TRAJ50)
FAVNGLETSYDKVIF

SEQ ID NO: 686416 - protein, 14 aa, Homo sapiens
  CDR3 for beta chain variable domain of TCR clone 343208 (TRBV7-2, TRBJ1-1)
CASSFLTGTTEAFF

SEQ ID NO: 686417 - protein, 13 aa, Homo sapiens
  CDR3 for alpha chain variable domain of TCR clone 343209 (TRAV2, TRAJ39)
CAVLNNAGNMLTF

SEQ ID NO: 686418 - protein, 16 aa, Homo sapiens
  CDR3 for beta chain variable domain of TCR clone 343209 (TRBV19, TRBJ2-1)
CASRTSSGSIVDEQFF

SEQ ID NO: 686419 - protein, 14 aa, Homo sapiens
  CDR3 for alpha chain variable domain of TCR clone 343210 (TRAV16, TRAJ39)
CALSKNNAGNMLTF

SEQ ID NO: 686420 - protein, 18 aa, Homo sapiens
  CDR3 for beta chain variable domain of TCR clone 343210 (TRBV7-9, TRBJ2-7)
CASSLTTSGSRTWYEQYF

SEQ ID NO: 686421 - protein, 12 aa, Homo sapiens
  CDR3 for alpha chain variable domain of TCR clone 343211 (TRAV12-3, TRAJ17)
CAMTLTGNKLTF

SEQ ID NO: 686422 - protein, 15 aa, Homo sapiens
  CDR3 for beta chain variable domain of TCR clone 343211 (TRBV10-3, TRBJ2-1)
CATNGGPGQGDEQFF

SEQ ID NO: 686423 - protein, 12 aa, Homo sapiens
  CDR3 for alpha chain variable domain of TCR clone 343212 (TRAV1-1, TRAJ39)
CAVPVVGNMLAF

SEQ ID NO: 686424 - protein, 14 aa, Homo sapiens
  CDR3 for beta chain variable domain of TCR clone 343212 (TRBV11-2, TRBJ2-7)
CASSSTGEGYEQYF

SEQ ID NO: 686425 - protein, 16 aa, Homo sapiens
  CDR3 for alpha chain variable domain of TCR clone 343213 (TRAV30, TRAJ24)
CGTEIVDADSWGKFQF

SEQ ID NO: 686426 - protein, 15 aa, Homo sapiens
  CDR3 for beta chain variable domain of TCR clone 343213 (TRBV20-1, TRBJ2-5)
CSAEGTGGLQETQYF

SEQ ID NO: 686427 - protein, 14 aa, Homo sapiens
  CDR3 for alpha chain variable domain of TCR clone 343214 (TRAV12-2, TRAJ3)
CAVSLYSSASKIIF

SEQ ID NO: 686428 - protein, 14 aa, Homo sapiens
  CDR3 for beta chain variable domain of TCR clone 343214 (TRBV27, TRBJ2-1)
CAGSIEETYNEQFF

SEQ ID NO: 686429 - protein, 12 aa, Homo sapiens
  CDR3 for alpha chain variable domain of TCR clone 343215 (TRAV21, TRAJ33)
CAKMDSNYQLIW

SEQ ID NO: 686430 - protein, 14 aa, Homo sapiens
  CDR3 for beta chain variable domain of TCR clone 343215 (TRBV7-9, TRBJ1-6)
CASSLGLATGPLHF

SEQ ID NO: 686431 - protein, 14 aa, Homo sapiens
  CDR3 for alpha chain variable domain of TCR clone 343216 (TRAV8-3, TRAJ4)
CAVGASGGYNKLIF

SEQ ID NO: 686432 - protein, 16 aa, Homo sapiens
  CDR3 for beta chain variable domain of TCR clone 343216 (TRBV2, TRBJ2-1)
CASSVGGSLSYNEQFS

SEQ ID NO: 686433 - protein, 19 aa, Homo sapiens
  CDR3 for alpha chain variable domain of TCR clone 343217 (TRAV2, TRAJ20)
ILQVREADAAVYRDCKLSF

SEQ ID NO: 686434 - protein, 12 aa, Homo sapiens
  CDR3 for beta chain variable domain of TCR clone 343217 (TRBV19, TRBJ2-1)
CASSQISNEQFF

SEQ ID NO: 686435 - protein, 13 aa, Homo sapiens
  CDR3 for alpha chain variable domain of TCR clone 343218 (TRAV2, TRAJ15)
CAVASQAGTALIF

SEQ ID NO: 686436 - protein, 15 aa, Homo sapiens
  CDR3 for beta chain variable domain of TCR clone 343218 (TRBV27, TRBJ1-4)
CASSNRRGFNEKLFF

SEQ ID NO: 686437 - protein, 16 aa, Homo sapiens
  CDR3 for alpha chain variable domain of TCR clone 343219 (TRAV12-3, TRAJ53)
CAMSVGSGGSNYKLTF

SEQ ID NO: 686438 - protein, 14 aa, Homo sapiens
  CDR3 for beta chain variable domain of TCR clone 343219 (TRBV12-4, TRBJ2-5)
CASSLWQKQETQYF

SEQ ID NO: 686439 - protein, 14 aa, Homo sapiens
  CDR3 for alpha chain variable domain of TCR clone 343220 (TRAV26-1, TRAJ54)
CIVRRTQGAQKLVF

SEQ ID NO: 686440 - protein, 19 aa, Homo sapiens
  CDR3 for beta chain variable domain of TCR clone 343220 (TRBV7-8, TRBJ2-3)
CASRNSGTSGKGIRSILAQ

SEQ ID NO: 686441 - protein, 19 aa, Homo sapiens
  CDR3 for alpha chain variable domain of TCR clone 343221 (TRAV26-1, TRAJ50)
CCVLLHRQNPKTSYDKVIF

SEQ ID NO: 686442 - protein, 14 aa, Homo sapiens
  CDR3 for beta chain variable domain of TCR clone 343221 (TRBV6-3, TRBJ1-2)
CASSEGGGSYGYTF

SEQ ID NO: 686443 - protein, 16 aa, Homo sapiens
  CDR3 for alpha chain variable domain of TCR clone 343222 (TRAV26-2, TRAJ37)
CILRDFGSSNTGKLIF

SEQ ID NO: 686444 - protein, 15 aa, Homo sapiens
  CDR3 for beta chain variable domain of TCR clone 343222 (TRBV6-5, TRBJ2-7)
CASRSLAVSSYERYF

SEQ ID NO: 686445 - protein, 15 aa, Homo sapiens
  CDR3 for alpha chain variable domain of TCR clone 343223 (TRAV3, TRAJ22)
CAVRDRGGSARQLTC

SEQ ID NO: 686446 - protein, 14 aa, Homo sapiens
  CDR3 for beta chain variable domain of TCR clone 343223 (TRBV12-4, TRBJ2-5)
CASSSRQGAETQYF

SEQ ID NO: 686447 - protein, 15 aa, Homo sapiens
  CDR3 for alpha chain variable domain of TCR clone 343224 (TRAV3, TRAJ17)
CAVSPKEAAGNKLTF

SEQ ID NO: 686448 - protein, 12 aa, Homo sapiens
  CDR3 for beta chain variable domain of TCR clone 343224 (TRBV7-9, TRBJ1-6)
CASSLMPSPLHF

SEQ ID NO: 686449 - protein, 16 aa, Homo sapiens
  CDR3 for alpha chain variable domain of TCR clone 343225 (TRAV13-1, TRAJ48)
CAASIFGNFVNEKLTF

SEQ ID NO: 686450 - protein, 12 aa, Homo sapiens
  CDR3 for beta chain variable domain of TCR clone 343225 (TRBV7-9, TRBJ1-5)
CASSPQGQPQHF

SEQ ID NO: 686451 - protein, 14 aa, Homo sapiens
  CDR3 for alpha chain variable domain of TCR clone 343226 (TRAV8-1, TRAJ34)
CAVNPSYNTDKLIF

SEQ ID NO: 686452 - protein, 16 aa, Homo sapiens
  CDR3 for beta chain variable domain of TCR clone 343226 (TRBV7-2, TRBJ2-6)
CASSLAGLSGANVLTF

SEQ ID NO: 686453 - protein, 16 aa, Homo sapiens
  CDR3 for alpha chain variable domain of TCR clone 343227 (TRAV8-1, TRAJ48)
CAVTLISNFGTEKLTF

SEQ ID NO: 686454 - protein, 12 aa, Homo sapiens
  CDR3 for beta chain variable domain of TCR clone 343227 (TRBV20-1, TRBJ1-2)
CSAPGFNYGYTF

SEQ ID NO: 686455 - protein, 14 aa, Homo sapiens
  CDR3 for alpha chain variable domain of TCR clone 343228 (TRAV12-3, TRAJ10)
SHPPLTGGGNKLTF

SEQ ID NO: 686456 - protein, 14 aa, Homo sapiens
  CDR3 for beta chain variable domain of TCR clone 343228 (TRBV25-1, TRBJ1-1)
CASTHLGGNTEAFF

SEQ ID NO: 686457 - protein, 13 aa, Homo sapiens
  CDR3 for alpha chain variable domain of TCR clone 343229 (TRAV29/DV5, TRAJ31)
CAASRNNNARLML

SEQ ID NO: 686458 - protein, 12 aa, Homo sapiens
  CDR3 for beta chain variable domain of TCR clone 343229 (TRBV14, TRBJ2-7)
CASSLYKDEQYF

SEQ ID NO: 686459 - protein, 13 aa, Homo sapiens
  CDR3 for alpha chain variable domain of TCR clone 343230 (TRAV13-1, TRAJ33)
CAAWTDSNYQLIW

SEQ ID NO: 686460 - protein, 18 aa, Homo sapiens
  CDR3 for beta chain variable domain of TCR clone 343230 (TRBV18, TRBJ1-3)
CASSPRGGAGPSGNTIYF

SEQ ID NO: 686461 - protein, 13 aa, Homo sapiens
  CDR3 for alpha chain variable domain of TCR clone 343231 (TRAV26-1, TRAJ30)
CIVRVESNDKIIF

SEQ ID NO: 686462 - protein, 15 aa, Homo sapiens
  CDR3 for beta chain variable domain of TCR clone 343231 (TRBV7-2, TRBJ2-3)
CASSLEQGGTDTQYF

SEQ ID NO: 686463 - protein, 16 aa, Homo sapiens
  CDR3 for alpha chain variable domain of TCR clone 343232 (TRAV3, TRAJ37)
CAVRGKGSGNAGKLIF

SEQ ID NO: 686464 - protein, 13 aa, Homo sapiens
  CDR3 for beta chain variable domain of TCR clone 343232 (TRBV14, TRBJ2-7)
SASSQDRRYEQYF

SEQ ID NO: 686465 - protein, 11 aa, Homo sapiens
  CDR3 for alpha chain variable domain of TCR clone 343233 (TRAV3, TRAJ21)
CAVGNFNKFYF

SEQ ID NO: 686466 - protein, 13 aa, Homo sapiens
  CDR3 for beta chain variable domain of TCR clone 343233 (TRBV25-1, TRBJ2-5)
CASGESGRETQYF

SEQ ID NO: 686467 - protein, 16 aa, Homo sapiens
  CDR3 for alpha chain variable domain of TCR clone 343234 (TRAV3, TRAJ37)
CAVRGKGSGNTGKLIF

SEQ ID NO: 686468 - protein, 13 aa, Homo sapiens
  CDR3 for beta chain variable domain of TCR clone 343234 (TRBV10-2, TRBJ2-3)
CASSESGDHTQYF

SEQ ID NO: 686469 - protein, 14 aa, Homo sapiens
  CDR3 for alpha chain variable domain of TCR clone 343235 (TRAV12-3, TRAJ42)
RAMNYGGSQGNLIF

SEQ ID NO: 686470 - protein, 15 aa, Homo sapiens
  CDR3 for beta chain variable domain of TCR clone 343235 (TRBV5-7, TRBJ1-5)
CASSYGKLWDQAQHF

SEQ ID NO: 686471 - protein, 15 aa, Homo sapiens
  CDR3 for alpha chain variable domain of TCR clone 343236 (TRAV13-2, TRAJ45)
CAEYHSGGGADGLTF

SEQ ID NO: 686472 - protein, 15 aa, Homo sapiens
  CDR3 for beta chain variable domain of TCR clone 343236 (TRBV7-2, TRBJ2-7)
CASSLALGSAYEQYF

SEQ ID NO: 686473 - protein, 15 aa, Homo sapiens
  CDR3 for alpha chain variable domain of TCR clone 343237 (TRAV17, TRAJ57)
CATGPSQGGSEKLVF

SEQ ID NO: 686474 - protein, 15 aa, Homo sapiens
  CDR3 for beta chain variable domain of TCR clone 343237 (TRBV5-1, TRBJ2-5)
CASSFKGGDQETQYF

SEQ ID NO: 686475 - protein, 11 aa, Homo sapiens
  CDR3 for alpha chain variable domain of TCR clone 343238 (TRAV1-2, TRAJ20)
CAVANDYKLSF

SEQ ID NO: 686476 - protein, 12 aa, Homo sapiens
  CDR3 for beta chain variable domain of TCR clone 343238 (TRBV7-9, TRBJ2-3)
CASSFITDTQYF

SEQ ID NO: 686477 - protein, 14 aa, Homo sapiens
  CDR3 for alpha chain variable domain of TCR clone 343239 (TRAV12-3, TRAJ10)
SATYLTGGGNKLTF

SEQ ID NO: 686478 - protein, 16 aa, Homo sapiens
  CDR3 for beta chain variable domain of TCR clone 343239 (TRBV12-5, TRBJ2-5)
CASGPRTSGKQETQYF

SEQ ID NO: 686479 - protein, 13 aa, Homo sapiens
  CDR3 for alpha chain variable domain of TCR clone 343240 (TRAV36/DV7, TRAJ54)
CAVDIQGAQKLVF

SEQ ID NO: 686480 - protein, 16 aa, Homo sapiens
  CDR3 for beta chain variable domain of TCR clone 343240 (TRBV5-1, TRBJ2-3)
CASSLGLAVYTDTQYF

SEQ ID NO: 686481 - protein, 15 aa, Homo sapiens
  CDR3 for alpha chain variable domain of TCR clone 343241 (TRAV8-3, TRAJ11)
CAVGLLNSVYSTLTF

SEQ ID NO: 686482 - protein, 14 aa, Homo sapiens
  CDR3 for beta chain variable domain of TCR clone 343241 (TRBV25-1, TRBJ1-1)
CASTHLGGNTEAFF

SEQ ID NO: 686483 - protein, 11 aa, Homo sapiens
  CDR3 for alpha chain variable domain of TCR clone 343242 (TRAV13-1, TRAJ5)
CAPKGRRALTF

SEQ ID NO: 686484 - protein, 16 aa, Homo sapiens
  CDR3 for beta chain variable domain of TCR clone 343242 (TRBV7-6, TRBJ2-3)
CASSARTSRGTDTQYF

SEQ ID NO: 686485 - protein, 10 aa, Homo sapiens
  CDR3 for alpha chain variable domain of TCR clone 343243 (TRAV23/DV6, TRAJ3)
CAATTFALGG

SEQ ID NO: 686486 - protein, 15 aa, Homo sapiens
  CDR3 for beta chain variable domain of TCR clone 343243 (TRBV19, TRBJ1-6)
CASSTQGAVGSPRHF

SEQ ID NO: 686487 - protein, 13 aa, Homo sapiens
  CDR3 for alpha chain variable domain of TCR clone 343244 (TRAV29/DV5, TRAJ31)
CAASRNNNARLMF

SEQ ID NO: 686488 - protein, 15 aa, Homo sapiens
  CDR3 for beta chain variable domain of TCR clone 343244 (TRBV27, TRBJ2-1)
CASSNGGGSSNEQFF

SEQ ID NO: 686489 - protein, 17 aa, Homo sapiens
  CDR3 for alpha chain variable domain of TCR clone 343245 (TRAV3, TRAJ6)
CAVRDGPRAGGSYIPTF

SEQ ID NO: 686490 - protein, 13 aa, Homo sapiens
  CDR3 for beta chain variable domain of TCR clone 343245 (TRBV19, TRBJ2-7)
CASSIDRTDEQYF

SEQ ID NO: 686491 - protein, 13 aa, Homo sapiens
  CDR3 for alpha chain variable domain of TCR clone 343246 (TRAV12-3, TRAJ5)
CAMIYTGRRALTF

SEQ ID NO: 686492 - protein, 12 aa, Homo sapiens
  CDR3 for beta chain variable domain of TCR clone 343246 (TRBV18, TRBJ1-4)
CASSPSLEKLFF

SEQ ID NO: 686493 - protein, 13 aa, Homo sapiens
  CDR3 for alpha chain variable domain of TCR clone 343247 (TRAV12-1, TRAJ6)
CVVFPGGSYIPTF

SEQ ID NO: 686494 - protein, 13 aa, Homo sapiens
  CDR3 for beta chain variable domain of TCR clone 343247 (TRBV19, TRBJ1-2)
CASSVPGQDGYTF

SEQ ID NO: 686495 - protein, 14 aa, Homo sapiens
  CDR3 for alpha chain variable domain of TCR clone 343248 (TRAV8-4, TRAJ45)
CASGGGGCADGLTF

SEQ ID NO: 686496 - protein, 20 aa, Homo sapiens
  CDR3 for beta chain variable domain of TCR clone 343248 (TRBV4-3, TRBJ2-3)
CASSPRVEMRASGRPDTQYF

SEQ ID NO: 686497 - protein, 15 aa, Homo sapiens
  CDR3 for alpha chain variable domain of TCR clone 343249 (TRAV13-1, TRAJ5)
CAASPRGHGQESTYF

SEQ ID NO: 686498 - protein, 17 aa, Homo sapiens
  CDR3 for beta chain variable domain of TCR clone 343249 (TRBV20-1, TRBJ2-2)
CSASGSGQGGLTGELFF

SEQ ID NO: 686499 - protein, 13 aa, Homo sapiens
  CDR3 for alpha chain variable domain of TCR clone 343250 (TRAV36/DV7, TRAJ34)
CAVGEVNTDKLIF

SEQ ID NO: 686500 - protein, 10 aa, Homo sapiens
  CDR3 for beta chain variable domain of TCR clone 343250 (TRBV2, TRBJ2-5)
CASSAATQYF

SEQ ID NO: 686501 - protein, 14 aa, Homo sapiens
  CDR3 for alpha chain variable domain of TCR clone 343251 (TRAV8-3, TRAJ4)
CAVGAAGGYNKLIF

SEQ ID NO: 686502 - protein, 13 aa, Homo sapiens
  CDR3 for beta chain variable domain of TCR clone 343251 (TRBV3-1, TRBJ1-1)
RASSPGVITEAFF

SEQ ID NO: 686503 - protein, 14 aa, Homo sapiens
  CDR3 for alpha chain variable domain of TCR clone 343252 (TRAV26-1, TRAJ38)
CIADNAGNNRKLIW

SEQ ID NO: 686504 - protein, 13 aa, Homo sapiens
  CDR3 for beta chain variable domain of TCR clone 343252 (TRBV20-1, TRBJ1-1)
CSARGGGNTEALF

SEQ ID NO: 686505 - protein, 13 aa, Homo sapiens
  CDR3 for alpha chain variable domain of TCR clone 343253 (TRAV26-2, TRAJ57)
CIQSRGGSEKLVF

SEQ ID NO: 686506 - protein, 16 aa, Homo sapiens
  CDR3 for beta chain variable domain of TCR clone 343253 (TRBV18, TRBJ1-5)
CASSPRTGGGDQPQHF

SEQ ID NO: 686507 - protein, 12 aa, Homo sapiens
  CDR3 for alpha chain variable domain of TCR clone 343254 (TRAV12-3, TRAJ17)
CAMTLKGNKLTF

SEQ ID NO: 686508 - protein, 11 aa, Homo sapiens
  CDR3 for beta chain variable domain of TCR clone 343254 (TRBV28, TRBJ2-1)
CASRRVNEQFF

SEQ ID NO: 686509 - protein, 15 aa, Homo sapiens
  CDR3 for alpha chain variable domain of TCR clone 343255 (TRAV12-2, TRAJ43)
CAFDMRFGAGTRLTV

SEQ ID NO: 686510 - protein, 14 aa, Homo sapiens
  CDR3 for beta chain variable domain of TCR clone 343255 (TRBV7-9, TRBJ2-7)
CAGSLSQGSYEQYF

SEQ ID NO: 686511 - protein, 16 aa, Homo sapiens
  CDR3 for alpha chain variable domain of TCR clone 343256 (TRAV1-2, TRAJ16)
CAVNRFQMARSCSLQG

SEQ ID NO: 686512 - protein, 14 aa, Homo sapiens
  CDR3 for beta chain variable domain of TCR clone 343256 (TRBV19, TRBJ2-7)
CASSMGQGAIEQYF

SEQ ID NO: 686513 - protein, 15 aa, Homo sapiens
  CDR3 for alpha chain variable domain of TCR clone 343257 (TRAV25, TRAJ53)
CAATGGGGSNNKLTF

SEQ ID NO: 686514 - protein, 18 aa, Homo sapiens
  CDR3 for beta chain variable domain of TCR clone 343257 (TRBV7-9, TRBJ2-7)
CASSLTTSGSRTWYEQYF

SEQ ID NO: 686515 - protein, 14 aa, Homo sapiens
  CDR3 for alpha chain variable domain of TCR clone 343258 (TRAV26-1, TRAJ44)
CISPLPGTASKLTF

SEQ ID NO: 686516 - protein, 16 aa, Homo sapiens
  CDR3 for beta chain variable domain of TCR clone 343258 (TRBV19, TRBJ2-1)
CASSKAGSSSYNEQFF

SEQ ID NO: 686517 - protein, 12 aa, Homo sapiens
  CDR3 for alpha chain variable domain of TCR clone 343259 (TRAV21, TRAJ11)
CAVRGGNSTLTF

SEQ ID NO: 686518 - protein, 14 aa, Homo sapiens
  CDR3 for beta chain variable domain of TCR clone 343259 (TRBV19, TRBJ2-1)
CASPTFVLSGEQFF

SEQ ID NO: 686519 - protein, 16 aa, Homo sapiens
  CDR3 for alpha chain variable domain of TCR clone 343260 (TRAV4, TRAJ22)
CLVGDLYSGSARQLTF

SEQ ID NO: 686520 - protein, 16 aa, Homo sapiens
  CDR3 for beta chain variable domain of TCR clone 343260 (TRBV7-9, TRBJ2-1)
CGSSGVAGGSYKEQFF

SEQ ID NO: 686521 - protein, 11 aa, Homo sapiens
  CDR3 for alpha chain variable domain of TCR clone 343261 (TRAV3, TRAJ21)
CAVGNFNKFYF

SEQ ID NO: 686522 - protein, 16 aa, Homo sapiens
  CDR3 for beta chain variable domain of TCR clone 343261 (TRBV19, TRBJ2-1)
CASSKAGPSSYNESSS

SEQ ID NO: 686523 - protein, 14 aa, Homo sapiens
  CDR3 for alpha chain variable domain of TCR clone 343262 (TRAV8-4, TRAJ13)
CAVTLSGGYQKVTF

SEQ ID NO: 686524 - protein, 14 aa, Homo sapiens
  CDR3 for beta chain variable domain of TCR clone 343262 (TRBV7-2, TRBJ1-2)
CASSQTGSIYGYTF

SEQ ID NO: 686525 - protein, 16 aa, Homo sapiens
  CDR3 for alpha chain variable domain of TCR clone 343263 (TRAV23/DV6, TRAJ9)
CAASIGGNTGGFKTIF

SEQ ID NO: 686526 - protein, 11 aa, Homo sapiens
  CDR3 for beta chain variable domain of TCR clone 343263 (TRBV19, TRBJ1-1)
CASSIGSEAFF

SEQ ID NO: 686527 - protein, 15 aa, Homo sapiens
  CDR3 for alpha chain variable domain of TCR clone 343264 (TRAV8-6, TRAJ10)
CAVSDQAGGGNKLTF

SEQ ID NO: 686528 - protein, 18 aa, Homo sapiens
  CDR3 for beta chain variable domain of TCR clone 343264 (TRBV12-4, TRBJ2-2)
CASSLVAGTRGRTGELFF

SEQ ID NO: 686529 - protein, 13 aa, Homo sapiens
  CDR3 for alpha chain variable domain of TCR clone 343265 (TRAV8-4, TRAJ49)
CAVRTLTGNQFYF

SEQ ID NO: 686530 - protein, 16 aa, Homo sapiens
  CDR3 for beta chain variable domain of TCR clone 343265 (TRBV5-7, TRBJ2-5)
CASTLAPAGGRETRYF

SEQ ID NO: 686531 - protein, 16 aa, Homo sapiens
  CDR3 for alpha chain variable domain of TCR clone 343266 (TRAV1-1, TRAJ29)
CAVRSTRNSGNTPLVL

SEQ ID NO: 686532 - protein, 16 aa, Homo sapiens
  CDR3 for beta chain variable domain of TCR clone 343266 (TRBV27, TRBJ1-1)
CASSSRGRTGYTEAFF

SEQ ID NO: 686533 - protein, 13 aa, Homo sapiens
  CDR3 for alpha chain variable domain of TCR clone 343267 (TRAV8-4, TRAJ26)
CAVSSSLVRILSL

SEQ ID NO: 686534 - protein, 12 aa, Homo sapiens
  CDR3 for beta chain variable domain of TCR clone 343267 (TRBV7-2, TRBJ2-5)
CASSQYQETQYF

SEQ ID NO: 686535 - protein, 14 aa, Homo sapiens
  CDR3 for alpha chain variable domain of TCR clone 343268 (TRAV8-6, TRAJ33)
CAVSGMDSNYQLIW

SEQ ID NO: 686536 - protein, 11 aa, Homo sapiens
  CDR3 for beta chain variable domain of TCR clone 343268 (TRBV29-1, TRBJ2-5)
CSEDRTGTQYF

SEQ ID NO: 686537 - protein, 16 aa, Homo sapiens
  CDR3 for alpha chain variable domain of TCR clone 343269 (TRAV3, TRAJ22)
CAVRDMGSGSARQLTF

SEQ ID NO: 686538 - protein, 11 aa, Homo sapiens
  CDR3 for beta chain variable domain of TCR clone 343269 (TRBV5-6, TRBJ2-5)
CASSLERTQYF

SEQ ID NO: 686539 - protein, 14 aa, Homo sapiens
  CDR3 for alpha chain variable domain of TCR clone 343270 (TRAV25, TRAJ35)
CARRIEGFGNVLHC

SEQ ID NO: 686540 - protein, 13 aa, Homo sapiens
  CDR3 for beta chain variable domain of TCR clone 343270 (TRBV7-2, TRBJ1-4)
CASSLAGLEKLFF

SEQ ID NO: 686541 - protein, 12 aa, Homo sapiens
  CDR3 for alpha chain variable domain of TCR clone 343271 (TRAV12-3, TRAJ17)
RAMTLTGNKLTF

SEQ ID NO: 686542 - protein, 15 aa, Homo sapiens
  CDR3 for beta chain variable domain of TCR clone 343271 (TRBV20-1, TRBJ2-7)
CSARDQVSGMDEQYF

SEQ ID NO: 686543 - protein, 10 aa, Homo sapiens
  CDR3 for alpha chain variable domain of TCR clone 343272 (TRAV16, TRAJ26)
CAPEELWSEF

SEQ ID NO: 686544 - protein, 15 aa, Homo sapiens
  CDR3 for beta chain variable domain of TCR clone 343272 (TRBV7-2, TRBJ2-3)
CASSLTWTSTDTQYF

SEQ ID NO: 686545 - protein, 13 aa, Homo sapiens
  CDR3 for alpha chain variable domain of TCR clone 343273 (TRAV21, TRAJ27)
CAALNTNAGKSPL

SEQ ID NO: 686546 - protein, 15 aa, Homo sapiens
  CDR3 for beta chain variable domain of TCR clone 343273 (TRBV20-1, TRBJ2-7)
CSARKGLAESYEQYF

SEQ ID NO: 686547 - protein, 12 aa, Homo sapiens
  CDR3 for alpha chain variable domain of TCR clone 343274 (TRAV13-2, TRAJ23)
CAERHRGGKLIF

SEQ ID NO: 686548 - protein, 14 aa, Homo sapiens
  CDR3 for beta chain variable domain of TCR clone 343274 (TRBV6-6, TRBJ2-5)
CASSYGGRGETQYF

SEQ ID NO: 686549 - protein, 15 aa, Homo sapiens
  CDR3 for alpha chain variable domain of TCR clone 343275 (TRAV21, TRAJ32)
CTVNSYGGATNKLIF

SEQ ID NO: 686550 - protein, 18 aa, Homo sapiens
  CDR3 for beta chain variable domain of TCR clone 343275 (TRBV7-9, TRBJ2-1)
CASSTGLAGGSSYNEQFF

SEQ ID NO: 686551 - protein, 13 aa, Homo sapiens
  CDR3 for alpha chain variable domain of TCR clone 343276 (TRAV12-2, TRAJ18)
CAVRGSTLARLYF

SEQ ID NO: 686552 - protein, 20 aa, Homo sapiens
  CDR3 for beta chain variable domain of TCR clone 343276 (TRBV7-8, TRBJ2-2)
CASSHLFPGPTIHITGELFF

SEQ ID NO: 686553 - protein, 13 aa, Homo sapiens
  CDR3 for alpha chain variable domain of TCR clone 343277 (TRAV2, TRAJ40)
CAVVTSGTYKYIF

SEQ ID NO: 686554 - protein, 13 aa, Homo sapiens
  CDR3 for beta chain variable domain of TCR clone 343277 (TRBV19, TRBJ2-5)
CASSIRGRETQYF

SEQ ID NO: 686555 - protein, 12 aa, Homo sapiens
  CDR3 for alpha chain variable domain of TCR clone 343278 (TRAV8-3, TRAJ26)
CAGDNYGQNFVF

SEQ ID NO: 686556 - protein, 11 aa, Homo sapiens
  CDR3 for beta chain variable domain of TCR clone 343278 (TRBV29-1, TRBJ2-5)
CSEDRTGTPYF

SEQ ID NO: 686557 - protein, 13 aa, Homo sapiens
  CDR3 for alpha chain variable domain of TCR clone 343279 (TRAV26-1, TRAJ48)
CIVRVVGEEKLTF

SEQ ID NO: 686558 - protein, 14 aa, Homo sapiens
  CDR3 for beta chain variable domain of TCR clone 343279 (TRBV12-5, TRBJ2-5)
CASGSRTHQETQYF

SEQ ID NO: 686559 - protein, 10 aa, Homo sapiens
  CDR3 for alpha chain variable domain of TCR clone 343280 (TRAV25, TRAJ34)
CAENTDRLIF

SEQ ID NO: 686560 - protein, 16 aa, Homo sapiens
  CDR3 for beta chain variable domain of TCR clone 343280 (TRBV7-9, TRBJ2-1)
CASSPRASSSYNEQFF

SEQ ID NO: 686561 - protein, 18 aa, Homo sapiens
  CDR3 for alpha chain variable domain of TCR clone 343281 (TRAV26-2, TRAJ45)
CILRVDKYSGGGADGLPF

SEQ ID NO: 686562 - protein, 11 aa, Homo sapiens
  CDR3 for beta chain variable domain of TCR clone 343281 (TRBV29-1, TRBJ2-5)
CSEDRTGTQYF

SEQ ID NO: 686563 - protein, 15 aa, Homo sapiens
  CDR3 for alpha chain variable domain of TCR clone 343282 (TRAV20, TRAJ53)
CCAVLSGGSNYKLTF

SEQ ID NO: 686564 - protein, 18 aa, Homo sapiens
  CDR3 for beta chain variable domain of TCR clone 343282 (TRBV11-2, TRBJ2-3)
CASSLGGASRGAPNTQYF

SEQ ID NO: 686565 - protein, 18 aa, Homo sapiens
  CDR3 for alpha chain variable domain of TCR clone 343283 (TRAV13-1, TRAJ52)
CAASPYQNAGTSYGKLTF

SEQ ID NO: 686566 - protein, 15 aa, Homo sapiens
  CDR3 for beta chain variable domain of TCR clone 343283 (TRBV20-1, TRBJ1-1)
CSASRGVTGNTEAFF

SEQ ID NO: 686567 - protein, 18 aa, Homo sapiens
  CDR3 for alpha chain variable domain of TCR clone 343284 (TRAV26-1, TRAJ23)
CIVRVGLEVWNQGGKLIF

SEQ ID NO: 686568 - protein, 16 aa, Homo sapiens
  CDR3 for beta chain variable domain of TCR clone 343284 (TRBV12-4, TRBJ2-5)
CASSFFVRGREETQYF

SEQ ID NO: 686569 - protein, 16 aa, Homo sapiens
  CDR3 for alpha chain variable domain of TCR clone 343285 (TRAV29/DV5, TRAJ22)
CAACSRDSGSARQLTF

SEQ ID NO: 686570 - protein, 18 aa, Homo sapiens
  CDR3 for beta chain variable domain of TCR clone 343285 (TRBV7-8, TRBJ2-1)
CASSPYLGQRGSNNEQFF

SEQ ID NO: 686571 - protein, 14 aa, Homo sapiens
  CDR3 for alpha chain variable domain of TCR clone 343286 (TRAV4, TRAJ20)
CLVGDFINDYKLSF

SEQ ID NO: 686572 - protein, 12 aa, Homo sapiens
  CDR3 for beta chain variable domain of TCR clone 343286 (TRBV14, TRBJ2-5)
CASSQLKETQYF

SEQ ID NO: 686573 - protein, 14 aa, Homo sapiens
  CDR3 for alpha chain variable domain of TCR clone 343287 (TRAV16, TRAJ37)
CALDISGNTGKLIL

SEQ ID NO: 686574 - protein, 17 aa, Homo sapiens
  CDR3 for beta chain variable domain of TCR clone 343287 (TRBV20-1, TRBJ2-2)
CSASGSGQGGLTGELFF

SEQ ID NO: 686575 - protein, 14 aa, Homo sapiens
  CDR3 for alpha chain variable domain of TCR clone 343288 (TRAV12-2, TRAJ17)
CAALFKAAGTKLTF

SEQ ID NO: 686576 - protein, 16 aa, Homo sapiens
  CDR3 for beta chain variable domain of TCR clone 343288 (TRBV20-1, TRBJ2-2)
CSASASGNPGAGELFF

SEQ ID NO: 686577 - protein, 14 aa, Homo sapiens
  CDR3 for alpha chain variable domain of TCR clone 343289 (TRAV1-2, TRAJ8)
CAVRDDTGFQKLVF

SEQ ID NO: 686578 - protein, 15 aa, Homo sapiens
  CDR3 for beta chain variable domain of TCR clone 343289 (TRBV9, TRBJ1-6)
CASSVAGTGDSPLHF

SEQ ID NO: 686579 - protein, 13 aa, Homo sapiens
  CDR3 for alpha chain variable domain of TCR clone 343290 (TRAV36/DV7, TRAJ37)
CAVFSSNTGKLIF

SEQ ID NO: 686580 - protein, 14 aa, Homo sapiens
  CDR3 for beta chain variable domain of TCR clone 343290 (TRBV7-7, TRBJ2-2)
CATRQDSDTGELFF

SEQ ID NO: 686581 - protein, 15 aa, Homo sapiens
  CDR3 for alpha chain variable domain of TCR clone 343291 (TRAV12-2, TRAJ53)
CAVNGGGGSNYKLTL

SEQ ID NO: 686582 - protein, 14 aa, Homo sapiens
  CDR3 for beta chain variable domain of TCR clone 343291 (TRBV6-1, TRBJ1-3)
CASVQGGGGNTIYF

SEQ ID NO: 686583 - protein, 15 aa, Homo sapiens
  CDR3 for alpha chain variable domain of TCR clone 343292 (TRAV4, TRAJ39)
CLVGPNNNAGNKLTF

SEQ ID NO: 686584 - protein, 13 aa, Homo sapiens
  CDR3 for beta chain variable domain of TCR clone 343292 (TRBV11-2, TRBJ2-5)
CASSSTGEETQYF

SEQ ID NO: 686585 - protein, 13 aa, Homo sapiens
  CDR3 for alpha chain variable domain of TCR clone 343293 (TRAV12-1, TRAJ33)
CGDAPDSNYQLIW

SEQ ID NO: 686586 - protein, 14 aa, Homo sapiens
  CDR3 for beta chain variable domain of TCR clone 343293 (TRBV6-5, TRBJ1-2)
CASSYDGTGGGYTF

SEQ ID NO: 686587 - protein, 12 aa, Homo sapiens
  CDR3 for alpha chain variable domain of TCR clone 343294 (TRAV8-4, TRAJ33)
CAVSEGNYQLIW

SEQ ID NO: 686588 - protein, 16 aa, Homo sapiens
  CDR3 for beta chain variable domain of TCR clone 343294 (TRBV19, TRBJ1-1)
CASSPTRFWPGTEAFF

SEQ ID NO: 686589 - protein, 15 aa, Homo sapiens
  CDR3 for alpha chain variable domain of TCR clone 343295 (TRAV12-2, TRAJ53)
CAVNTGGGSTYKLTF

SEQ ID NO: 686590 - protein, 15 aa, Homo sapiens
  CDR3 for beta chain variable domain of TCR clone 343295 (TRBV5-1, TRBJ2-5)
CASSLGLGEIKTQYF

SEQ ID NO: 686591 - protein, 12 aa, Homo sapiens
  CDR3 for alpha chain variable domain of TCR clone 343296 (TRAV12-3, TRAJ20)
CAMVRGDYKLSF

SEQ ID NO: 686592 - protein, 11 aa, Homo sapiens
  CDR3 for beta chain variable domain of TCR clone 343296 (TRBV29-1, TRBJ2-5)
CGEDRTGTQYF

SEQ ID NO: 686593 - protein, 13 aa, Homo sapiens
  CDR3 for alpha chain variable domain of TCR clone 343297 (TRAV12-2, TRAJ23)
CAVMGNQGGKLIF

SEQ ID NO: 686594 - protein, 15 aa, Homo sapiens
  CDR3 for beta chain variable domain of TCR clone 343297 (TRBV7-2, TRBJ2-3)
CASSLAGAVIDTQYF

SEQ ID NO: 686595 - protein, 12 aa, Homo sapiens
  CDR3 for alpha chain variable domain of TCR clone 343298 (TRAV13-2, TRAJ23)
CAERHRGGKLIF

SEQ ID NO: 686596 - protein, 13 aa, Homo sapiens
  CDR3 for beta chain variable domain of TCR clone 343298 (TRBV15, TRBJ1-6)
CATSGGLNSPLHV

SEQ ID NO: 686597 - protein, 15 aa, Homo sapiens
  CDR3 for alpha chain variable domain of TCR clone 343299 (TRAV3, TRAJ13)
CAVRVYSGGYQKVTI

SEQ ID NO: 686598 - protein, 15 aa, Homo sapiens
  CDR3 for beta chain variable domain of TCR clone 343299 (TRBV5-7, TRBJ1-2)
CASSLGVAANYGYTF

SEQ ID NO: 686599 - protein, 13 aa, Homo sapiens
  CDR3 for alpha chain variable domain of TCR clone 343300 (TRAV21, TRAJ20)
CAVGLRVDYKLSF

SEQ ID NO: 686600 - protein, 15 aa, Homo sapiens
  CDR3 for beta chain variable domain of TCR clone 343300 (TRBV20-1, TRBJ2-7)
CSARVPAADFYEQYF

SEQ ID NO: 686601 - protein, 13 aa, Homo sapiens
  CDR3 for alpha chain variable domain of TCR clone 343301 (TRAV3, TRAJ27)
CAVRPLGAGKSTF

SEQ ID NO: 686602 - protein, 16 aa, Homo sapiens
  CDR3 for beta chain variable domain of TCR clone 343301 (TRBV29-1, TRBJ2-7)
CSVEVVGTSGSYEQYF

SEQ ID NO: 686603 - protein, 13 aa, Homo sapiens
  CDR3 for alpha chain variable domain of TCR clone 343302 (TRAV30, TRAJ24)
CGTVTDSWGKLQF

SEQ ID NO: 686604 - protein, 15 aa, Homo sapiens
  CDR3 for beta chain variable domain of TCR clone 343302 (TRBV4-1, TRBJ2-1)
CASSQDPGDYNEQFF

SEQ ID NO: 686605 - protein, 13 aa, Homo sapiens
  CDR3 for alpha chain variable domain of TCR clone 343303 (TRAV17, TRAJ5)
CAPMDKGRRALTF

SEQ ID NO: 686606 - protein, 14 aa, Homo sapiens
  CDR3 for beta chain variable domain of TCR clone 343303 (TRBV19, TRBJ2-1)
CASPTFVLSGEQFF

SEQ ID NO: 686607 - protein, 18 aa, Homo sapiens
  CDR3 for alpha chain variable domain of TCR clone 343304 (TRAV12-2, )
CAVEDIQNPDPAVYQLRD

SEQ ID NO: 686608 - protein, 13 aa, Homo sapiens
  CDR3 for beta chain variable domain of TCR clone 343304 (TRBV7-6, TRBJ1-2)
CASSLGQGRGYTF

SEQ ID NO: 686609 - protein, 14 aa, Homo sapiens
  CDR3 for alpha chain variable domain of TCR clone 343305 (TRAV16, TRAJ54)
CALSLIQGAKKLVS

SEQ ID NO: 686610 - protein, 15 aa, Homo sapiens
  CDR3 for beta chain variable domain of TCR clone 343305 (TRBV20-1, TRBJ2-7)
CSARDRVSGMDEQYF

SEQ ID NO: 686611 - protein, 14 aa, Homo sapiens
  CDR3 for alpha chain variable domain of TCR clone 343306 (TRAV17, TRAJ39)
CATDPVRAGNMLTF

SEQ ID NO: 686612 - protein, 15 aa, Homo sapiens
  CDR3 for beta chain variable domain of TCR clone 343306 (TRBV13, TRBJ1-5)
CVSSFGQGGVQPQHF

SEQ ID NO: 686613 - protein, 19 aa, Homo sapiens
  CDR3 for alpha chain variable domain of TCR clone 343307 (TRAV1-1, TRAJ32)
CAVRVDELWWCYKQAHLLN

SEQ ID NO: 686614 - protein, 12 aa, Homo sapiens
  CDR3 for beta chain variable domain of TCR clone 343307 (TRBV7-8, TRBJ2-1)
CASSLGHNEQFF

SEQ ID NO: 686615 - protein, 14 aa, Homo sapiens
  CDR3 for alpha chain variable domain of TCR clone 343308 (TRAV6, TRAJ8)
CALDNDTGFQKLVF

SEQ ID NO: 686616 - protein, 13 aa, Homo sapiens
  CDR3 for beta chain variable domain of TCR clone 343308 (TRBV12-5, TRBJ2-3)
CASGDRQSDTQYF

SEQ ID NO: 686617 - protein, 15 aa, Homo sapiens
  CDR3 for alpha chain variable domain of TCR clone 343309 (TRAV23/DV6, TRAJ18)
YAARYRGSTLGRLYF

SEQ ID NO: 686618 - protein, 14 aa, Homo sapiens
  CDR3 for beta chain variable domain of TCR clone 343309 (TRBV28, TRBJ2-7)
CASSLLRISYEQYF

SEQ ID NO: 686619 - protein, 13 aa, Homo sapiens
  CDR3 for alpha chain variable domain of TCR clone 343310 (TRAV14/DV4, TRAJ20)
CAMREGRDYKLSF

SEQ ID NO: 686620 - protein, 14 aa, Homo sapiens
  CDR3 for beta chain variable domain of TCR clone 343310 (TRBV7-3, TRBJ2-1)
CQQLIQGSFDEQFF

SEQ ID NO: 686621 - protein, 13 aa, Homo sapiens
  CDR3 for alpha chain variable domain of TCR clone 343311 (TRAV1-1, TRAJ33)
RAVRRDSNYQLIW

SEQ ID NO: 686622 - protein, 16 aa, Homo sapiens
  CDR3 for beta chain variable domain of TCR clone 343311 (TRBV6-1, TRBJ2-2)
CASSAFRGGDTGELFF

SEQ ID NO: 686623 - protein, 16 aa, Homo sapiens
  CDR3 for alpha chain variable domain of TCR clone 343312 (TRAV30, TRAJ24)
CGTEIVDADSWGNFQF

SEQ ID NO: 686624 - protein, 17 aa, Homo sapiens
  CDR3 for beta chain variable domain of TCR clone 343312 (TRBV10-3, TRBJ1-2)
CAISQTGSASGVDGYTF

SEQ ID NO: 686625 - protein, 13 aa, Homo sapiens
  CDR3 for alpha chain variable domain of TCR clone 343313 (TRAV2, TRAJ40)
CAVVTSGTYKYIF

SEQ ID NO: 686626 - protein, 17 aa, Homo sapiens
  CDR3 for beta chain variable domain of TCR clone 343313 (TRBV20-1, TRBJ1-2)
CSARDRLSVGGLGGYTF

SEQ ID NO: 686627 - protein, 13 aa, Homo sapiens
  CDR3 for alpha chain variable domain of TCR clone 343314 (TRAV1-1, TRAJ9)
CAAKNTGGFKTIF

SEQ ID NO: 686628 - protein, 14 aa, Homo sapiens
  CDR3 for beta chain variable domain of TCR clone 343314 (TRBV9, TRBJ1-2)
CASSVSGTLYGYTF

SEQ ID NO: 686629 - protein, 16 aa, Homo sapiens
  CDR3 for alpha chain variable domain of TCR clone 343315 (TRAV23/DV6, TRAJ9)
CAPSIGGNTGGFKTIF

SEQ ID NO: 686630 - protein, 13 aa, Homo sapiens
  CDR3 for beta chain variable domain of TCR clone 343315 (TRBV4-1, TRBJ2-2)
CASSQENTGELFF

SEQ ID NO: 686631 - protein, 13 aa, Homo sapiens
  CDR3 for alpha chain variable domain of TCR clone 343316 (TRAV13-1, TRAJ53)
CAASKGSNYNLTF

SEQ ID NO: 686632 - protein, 14 aa, Homo sapiens
  CDR3 for beta chain variable domain of TCR clone 343316 (TRBV25-1, TRBJ1-1)
CASTHLGGNTEAFF

SEQ ID NO: 686633 - protein, 14 aa, Homo sapiens
  CDR3 for alpha chain variable domain of TCR clone 343317 (TRAV4, TRAJ6)
CLVGEAGGSYIPTF

SEQ ID NO: 686634 - protein, 16 aa, Homo sapiens
  CDR3 for beta chain variable domain of TCR clone 343317 (TRBV7-6, TRBJ2-1)
CASSLNEGPSYNEHFF

SEQ ID NO: 686635 - protein, 11 aa, Homo sapiens
  CDR3 for alpha chain variable domain of TCR clone 343318 (TRAV12-2, TRAJ21)
CAVEGFNKFYF

SEQ ID NO: 686636 - protein, 13 aa, Homo sapiens
  CDR3 for beta chain variable domain of TCR clone 343318 (TRBV10-3, TRBJ2-7)
CAISEAGPYEQYF

SEQ ID NO: 686637 - protein, 14 aa, Homo sapiens
  CDR3 for alpha chain variable domain of TCR clone 343319 (TRAV26-1, TRAJ40)
CIVRLLSGTYKYIF

SEQ ID NO: 686638 - protein, 10 aa, Homo sapiens
  CDR3 for beta chain variable domain of TCR clone 343319 (TRBV15, TRBJ2-7)
AETGGYGQYF

SEQ ID NO: 686639 - protein, 13 aa, Homo sapiens
  CDR3 for alpha chain variable domain of TCR clone 343320 (TRAV1-2, TRAJ9)
CAALNTGGFKTIF

SEQ ID NO: 686640 - protein, 12 aa, Homo sapiens
  CDR3 for beta chain variable domain of TCR clone 343320 (TRBV28, TRBJ2-6)
CAIQAGANVLTF

SEQ ID NO: 686641 - protein, 17 aa, Homo sapiens
  CDR3 for alpha chain variable domain of TCR clone 343321 (TRAV36/DV7, TRAJ52)
CAVAQRAGGTSYGKLTF

SEQ ID NO: 686642 - protein, 16 aa, Homo sapiens
  CDR3 for beta chain variable domain of TCR clone 343321 (TRBV20-1, TRBJ2-1)
CSARDLKQGMKNEQFF

SEQ ID NO: 686643 - protein, 11 aa, Homo sapiens
  CDR3 for alpha chain variable domain of TCR clone 343322 (TRAV2, TRAJ33)
CAVESNYQLIW

SEQ ID NO: 686644 - protein, 16 aa, Homo sapiens
  CDR3 for beta chain variable domain of TCR clone 343322 (TRBV20-1, TRBJ1-4)
CSAPGQGVLTNEKLFF

SEQ ID NO: 686645 - protein, 13 aa, Homo sapiens
  CDR3 for alpha chain variable domain of TCR clone 343323 (TRAV27, TRAJ28)
CAISGAGRYQLTF

SEQ ID NO: 686646 - protein, 13 aa, Homo sapiens
  CDR3 for beta chain variable domain of TCR clone 343323 (TRBV20-1, TRBJ1-1)
CSARGGGNTEAFF

SEQ ID NO: 686647 - protein, 14 aa, Homo sapiens
  CDR3 for alpha chain variable domain of TCR clone 343324 (TRAV9-2, TRAJ39)
CAHYIYNAGNMLTF

SEQ ID NO: 686648 - protein, 14 aa, Homo sapiens
  CDR3 for beta chain variable domain of TCR clone 343324 (TRBV12-5, TRBJ2-5)
CASGSRTHQETQYF

SEQ ID NO: 686649 - protein, 14 aa, Homo sapiens
  CDR3 for alpha chain variable domain of TCR clone 343325 (TRAV13-1, TRAJ35)
CAASKGGFGNVLHC

SEQ ID NO: 686650 - protein, 15 aa, Homo sapiens
  CDR3 for beta chain variable domain of TCR clone 343325 (TRBV12-4, TRBJ2-5)
CASSLGGQGRETQYF

SEQ ID NO: 686651 - protein, 14 aa, Homo sapiens
  CDR3 for alpha chain variable domain of TCR clone 343326 (TRAV8-4, TRAJ8)
CAVSEDTGFQKLVF

SEQ ID NO: 686652 - protein, 16 aa, Homo sapiens
  CDR3 for beta chain variable domain of TCR clone 343326 (TRBV20-1, TRBJ1-4)
CSAPGQGLLTNEKLFF

SEQ ID NO: 686653 - protein, 14 aa, Homo sapiens
  CDR3 for alpha chain variable domain of TCR clone 343327 (TRAV35, TRAJ38)
CAHCGAGNNRKLIW

SEQ ID NO: 686654 - protein, 16 aa, Homo sapiens
  CDR3 for beta chain variable domain of TCR clone 343327 (TRBV20-1, TRBJ2-2)
CSASASGIPGAGELFF

SEQ ID NO: 686655 - protein, 16 aa, Homo sapiens
  CDR3 for alpha chain variable domain of TCR clone 343328 (TRAV3, TRAJ10)
CAVRYMRAGGGNKLTF

SEQ ID NO: 686656 - protein, 14 aa, Homo sapiens
  CDR3 for beta chain variable domain of TCR clone 343328 (TRBV7-2, TRBJ1-4)
CASSVVEGGEKLFF

SEQ ID NO: 686657 - protein, 16 aa, Homo sapiens
  CDR3 for alpha chain variable domain of TCR clone 343329 (TRAV3, TRAJ21)
CAVRDIERGNFNKFYF

SEQ ID NO: 686658 - protein, 15 aa, Homo sapiens
  CDR3 for beta chain variable domain of TCR clone 343329 (TRBV19, TRBJ2-7)
CASRPTPGLSIEQYF

SEQ ID NO: 686659 - protein, 16 aa, Homo sapiens
  CDR3 for alpha chain variable domain of TCR clone 343330 (TRAV21, TRAJ37)
CAVRPRGSSNTGKLIF

SEQ ID NO: 686660 - protein, 13 aa, Homo sapiens
  CDR3 for beta chain variable domain of TCR clone 343330 (TRBV7-3, TRBJ2-1)
CASSLDSYNEQFF

SEQ ID NO: 686661 - protein, 14 aa, Homo sapiens
  CDR3 for alpha chain variable domain of TCR clone 343331 (TRAV1-2, TRAJ8)
CAVREDTGFRKLVF

SEQ ID NO: 686662 - protein, 16 aa, Homo sapiens
  CDR3 for beta chain variable domain of TCR clone 343331 (TRBV5-1, TRBJ2-2)
CASSLWDTTNTGELFF

SEQ ID NO: 686663 - protein, 12 aa, Homo sapiens
  CDR3 for alpha chain variable domain of TCR clone 343332 (TRAV21, TRAJ15)
CAVNQAGTALIF

SEQ ID NO: 686664 - protein, 17 aa, Homo sapiens
  CDR3 for beta chain variable domain of TCR clone 343332 (TRBV11-2, TRBJ2-5)
CASSSTGEDPVLRARHA

SEQ ID NO: 686665 - protein, 21 aa, Homo sapiens
  CDR3 for alpha chain variable domain of TCR clone 343333 (TRAV12-1, TRAJ32)
SSVIQPPTSMNYGGATTKLIF

SEQ ID NO: 686666 - protein, 15 aa, Homo sapiens
  CDR3 for beta chain variable domain of TCR clone 343333 (TRBV7-9, TRBJ2-2)
CASGPLDTFPGELFF

SEQ ID NO: 686667 - protein, 14 aa, Homo sapiens
  CDR3 for alpha chain variable domain of TCR clone 343334 (TRAV1-2, TRAJ16)
CAVNRFSDGQNLLF

SEQ ID NO: 686668 - protein, 15 aa, Homo sapiens
  CDR3 for beta chain variable domain of TCR clone 343334 (TRBV7-2, TRBJ2-1)
CASSSGLAGGNEQFF

SEQ ID NO: 686669 - protein, 12 aa, Homo sapiens
  CDR3 for alpha chain variable domain of TCR clone 343335 (TRAV10, TRAJ31)
CVVRAHRARRMF

SEQ ID NO: 686670 - protein, 13 aa, Homo sapiens
  CDR3 for beta chain variable domain of TCR clone 343335 (TRBV12-4, TRBJ2-7)
CASSFVPTAEQYF

SEQ ID NO: 686671 - protein, 16 aa, Homo sapiens
  CDR3 for alpha chain variable domain of TCR clone 343336 (TRAV8-3, TRAJ22)
CTVDLLGPGSARQLTF

SEQ ID NO: 686672 - protein, 14 aa, Homo sapiens
  CDR3 for beta chain variable domain of TCR clone 343336 (TRBV11-2, TRBJ2-7)
CASSLELEGYEQYF

SEQ ID NO: 686673 - protein, 14 aa, Homo sapiens
  CDR3 for alpha chain variable domain of TCR clone 343337 (TRAV26-1, TRAJ38)
CIADNAGNNRKLIC

SEQ ID NO: 686674 - protein, 13 aa, Homo sapiens
  CDR3 for beta chain variable domain of TCR clone 343337 (TRBV20-1, TRBJ1-1)
CSARGGGNIEAFF

SEQ ID NO: 686675 - protein, 13 aa, Homo sapiens
  CDR3 for alpha chain variable domain of TCR clone 343338 (TRAV12-3, TRAJ40)
CAMSDSGTYKYIF

SEQ ID NO: 686676 - protein, 15 aa, Homo sapiens
  CDR3 for beta chain variable domain of TCR clone 343338 (TRBV7-2, TRBJ2-1)
CASSLVAGRYNEQFF

SEQ ID NO: 686677 - protein, 14 aa, Homo sapiens
  CDR3 for alpha chain variable domain of TCR clone 343339 (TRAV17, TRAJ26)
TSVLRYNYGQNFVF

SEQ ID NO: 686678 - protein, 16 aa, Homo sapiens
  CDR3 for beta chain variable domain of TCR clone 343339 (TRBV2, TRBJ2-1)
CASSVGGSLSYNEQFF

SEQ ID NO: 686679 - protein, 14 aa, Homo sapiens
  CDR3 for alpha chain variable domain of TCR clone 343340 (TRAV17, TRAJ39)
CATDPVRAGNMITL

SEQ ID NO: 686680 - protein, 15 aa, Homo sapiens
  CDR3 for beta chain variable domain of TCR clone 343340 (TRBV13, TRBJ1-5)
CASSFGQGGVQPQHF

SEQ ID NO: 686681 - protein, 14 aa, Homo sapiens
  CDR3 for alpha chain variable domain of TCR clone 343341 (TRAV12-2, TRAJ24)
CAVTPADSWGELQF

SEQ ID NO: 686682 - protein, 12 aa, Homo sapiens
  CDR3 for beta chain variable domain of TCR clone 343341 (TRBV3-1, TRBJ2-1)
CASSQGSSRQFF

SEQ ID NO: 686683 - protein, 12 aa, Homo sapiens
  CDR3 for alpha chain variable domain of TCR clone 343342 (TRAV12-3, TRAJ17)
CAMTLTSNKLTF

SEQ ID NO: 686684 - protein, 14 aa, Homo sapiens
  CDR3 for beta chain variable domain of TCR clone 343342 (TRBV20-1, TRBJ2-1)
CSAQIGGSANEQFF

SEQ ID NO: 686685 - protein, 13 aa, Homo sapiens
  CDR3 for alpha chain variable domain of TCR clone 343343 (TRAV3, TRAJ27)
CAVTNTNAGKSTF

SEQ ID NO: 686686 - protein, 13 aa, Homo sapiens
  CDR3 for beta chain variable domain of TCR clone 343343 (TRBV19, TRBJ2-7)
CASQSYGAGEQCF

SEQ ID NO: 686687 - protein, 18 aa, Homo sapiens
  CDR3 for alpha chain variable domain of TCR clone 343344 (TRAV26-2, TRAJ45)
CVLRVDKYSGGGADGLTF

SEQ ID NO: 686688 - protein, 14 aa, Homo sapiens
  CDR3 for beta chain variable domain of TCR clone 343344 (TRBV12-5, TRBJ2-5)
CASGSRTHQETQYF

SEQ ID NO: 686689 - protein, 15 aa, Homo sapiens
  CDR3 for alpha chain variable domain of TCR clone 343345 (TRAV26-1, TRAJ42)
CIVRVKGGSQGKLIF

SEQ ID NO: 686690 - protein, 14 aa, Homo sapiens
  CDR3 for beta chain variable domain of TCR clone 343345 (TRBV12-4, TRBJ1-1)
CASSLGTGGTEAFF

SEQ ID NO: 686691 - protein, 23 aa, Homo sapiens
  CDR3 for alpha chain variable domain of TCR clone 343346 (TRAV12-2, TRAJ36)
SLLIRDSQPSDSATLERANNLFF

SEQ ID NO: 686692 - protein, 14 aa, Homo sapiens
  CDR3 for beta chain variable domain of TCR clone 343346 (TRBV6-6, TRBJ1-4)
CASRTDREYEKLFF

SEQ ID NO: 686693 - protein, 12 aa, Homo sapiens
  CDR3 for alpha chain variable domain of TCR clone 343347 (TRAV12-2, TRAJ16)
CAVNLDGQKLLF

SEQ ID NO: 686694 - protein, 15 aa, Homo sapiens
  CDR3 for beta chain variable domain of TCR clone 343347 (TRBV7-9, TRBJ1-6)
CASSSPGRGNSPLHF

SEQ ID NO: 686695 - protein, 12 aa, Homo sapiens
  CDR3 for alpha chain variable domain of TCR clone 343348 (TRAV12-3, TRAJ17)
CAMTLTGNKLTF

SEQ ID NO: 686696 - protein, 15 aa, Homo sapiens
  CDR3 for beta chain variable domain of TCR clone 343348 (TRBV20-1, TRBJ2-7)
CSARDQVSGMDERCF

SEQ ID NO: 686697 - protein, 15 aa, Homo sapiens
  CDR3 for alpha chain variable domain of TCR clone 343349 (TRAV12-1, TRAJ13)
CVVNGDSGGYQKVTF

SEQ ID NO: 686698 - protein, 14 aa, Homo sapiens
  CDR3 for beta chain variable domain of TCR clone 343349 (TRBV20-1, TRBJ2-4)
CSASGRVGENIQYF

SEQ ID NO: 686699 - protein, 15 aa, Homo sapiens
  CDR3 for alpha chain variable domain of TCR clone 343350 (TRAV8-3, TRAJ44)
CAVGAGAGTASKLTF

SEQ ID NO: 686700 - protein, 12 aa, Homo sapiens
  CDR3 for beta chain variable domain of TCR clone 343350 (TRBV7-8, TRBJ2-4)
CASSLGGNIQFF

SEQ ID NO: 686701 - protein, 14 aa, Homo sapiens
  CDR3 for alpha chain variable domain of TCR clone 343351 (TRAV1-2, TRAJ6)
CAVSLSGGSYIPAC

SEQ ID NO: 686702 - protein, 15 aa, Homo sapiens
  CDR3 for beta chain variable domain of TCR clone 343351 (TRBV7-9, TRBJ2-7)
CASSPGGGLTYEQYF

SEQ ID NO: 686703 - protein, 11 aa, Homo sapiens
  CDR3 for alpha chain variable domain of TCR clone 343352 (TRAV16, TRAJ29)
WAPSGNTPLVF

SEQ ID NO: 686704 - protein, 14 aa, Homo sapiens
  CDR3 for beta chain variable domain of TCR clone 343352 (TRBV7-2, TRBJ2-7)
CASSPKTSFYEQYF

SEQ ID NO: 686705 - protein, 11 aa, Homo sapiens
  CDR3 for alpha chain variable domain of TCR clone 343353 (TRAV26-1, TRAJ37)
CIVRVGRKLIF

SEQ ID NO: 686706 - protein, 14 aa, Homo sapiens
  CDR3 for beta chain variable domain of TCR clone 343353 (TRBV7-2, TRBJ1-2)
CASSQTGSTYGYTF

SEQ ID NO: 686707 - protein, 14 aa, Homo sapiens
  CDR3 for alpha chain variable domain of TCR clone 343354 (TRAV13-2, TRAJ17)
CAENSKAAGNKLTL

SEQ ID NO: 686708 - protein, 14 aa, Homo sapiens
  CDR3 for beta chain variable domain of TCR clone 343354 (TRBV12-4, TRBJ1-6)
CASNLQGKGSPLHF

SEQ ID NO: 686709 - protein, 13 aa, Homo sapiens
  CDR3 for alpha chain variable domain of TCR clone 343355 (TRAV8-3, TRAJ36)
CAVGATGANNPFF

SEQ ID NO: 686710 - protein, 13 aa, Homo sapiens
  CDR3 for beta chain variable domain of TCR clone 343355 (TRBV6-1, TRBJ1-1)
CASSRQGNTEAFF

SEQ ID NO: 686711 - protein, 16 aa, Homo sapiens
  CDR3 for alpha chain variable domain of TCR clone 343356 (TRAV4, TRAJ5)
CLVGPDHGHGQESTYF

SEQ ID NO: 686712 - protein, 13 aa, Homo sapiens
  CDR3 for beta chain variable domain of TCR clone 343356 (TRBV20-1, TRBJ1-1)
CSARGGGNTEAFF

SEQ ID NO: 686713 - protein, 14 aa, Homo sapiens
  CDR3 for alpha chain variable domain of TCR clone 343357 (TRAV3, TRAJ33)
CAVRDMGSNYQLIW

SEQ ID NO: 686714 - protein, 17 aa, Homo sapiens
  CDR3 for beta chain variable domain of TCR clone 343357 (TRBV19, TRBJ2-1)
CASSIWSAQPTHNKQFF

SEQ ID NO: 686715 - protein, 12 aa, Homo sapiens
  CDR3 for alpha chain variable domain of TCR clone 343358 (TRAV1-1, TRAJ34)
CAVRLNTDKLIF

SEQ ID NO: 686716 - protein, 16 aa, Homo sapiens
  CDR3 for beta chain variable domain of TCR clone 343358 (TRBV6-1, TRBJ2-5)
CASSETLGRGAETQYF

SEQ ID NO: 686717 - protein, 10 aa, Homo sapiens
  CDR3 for alpha chain variable domain of TCR clone 343359 (TRAV23/DV6, TRAJ57)
CAASSTLSQG

SEQ ID NO: 686718 - protein, 14 aa, Homo sapiens
  CDR3 for beta chain variable domain of TCR clone 343359 (TRBV18, TRBJ2-7)
CASSPRGGAYEQYF

SEQ ID NO: 686719 - protein, 14 aa, Homo sapiens
  CDR3 for alpha chain variable domain of TCR clone 343360 (TRAV12-2, TRAJ45)
CAVNIGGGADGLTF

SEQ ID NO: 686720 - protein, 17 aa, Homo sapiens
  CDR3 for beta chain variable domain of TCR clone 343360 (TRBV7-8, TRBJ2-6)
CASSAGTGGAEANVLTF

SEQ ID NO: 686721 - protein, 14 aa, Homo sapiens
  CDR3 for alpha chain variable domain of TCR clone 343361 (TRAV12-3, TRAJ5)
CAMSTYTGRRALTF

SEQ ID NO: 686722 - protein, 13 aa, Homo sapiens
  CDR3 for beta chain variable domain of TCR clone 343361 (TRBV28, TRBJ2-3)
CASSKGGGDTQYF

SEQ ID NO: 686723 - protein, 12 aa, Homo sapiens
  CDR3 for alpha chain variable domain of TCR clone 343362 (TRAV17, TRAJ30)
CATDARDDKIIF

SEQ ID NO: 686724 - protein, 15 aa, Homo sapiens
  CDR3 for beta chain variable domain of TCR clone 343362 (TRBV6-6, TRBJ2-7)
CVSSYSYGGSYEQYF

SEQ ID NO: 686725 - protein, 13 aa, Homo sapiens
  CDR3 for alpha chain variable domain of TCR clone 343363 (TRAV12-1, TRAJ39)
CVVPQRAGNMLTF

SEQ ID NO: 686726 - protein, 13 aa, Homo sapiens
  CDR3 for beta chain variable domain of TCR clone 343363 (TRBV7-9, TRBJ1-2)
CASSLKQNYGYTF

SEQ ID NO: 686727 - protein, 11 aa, Homo sapiens
  CDR3 for alpha chain variable domain of TCR clone 343364 (TRAV13-1, TRAJ50)
CAYLLLRQGDI

SEQ ID NO: 686728 - protein, 13 aa, Homo sapiens
  CDR3 for beta chain variable domain of TCR clone 343364 (TRBV9, TRBJ2-1)
CASSPSGGSEQFF

SEQ ID NO: 686729 - protein, 12 aa, Homo sapiens
  CDR3 for alpha chain variable domain of TCR clone 343365 (TRAV12-1, TRAJ31)
CVSWNNNARLMF

SEQ ID NO: 686730 - protein, 14 aa, Homo sapiens
  CDR3 for beta chain variable domain of TCR clone 343365 (TRBV7-2, TRBJ2-7)
CASRSQGAAYEQYF

SEQ ID NO: 686731 - protein, 17 aa, Homo sapiens
  CDR3 for alpha chain variable domain of TCR clone 343366 (TRAV3, TRAJ42)
CAVRDRDYGGSQGNLIF

SEQ ID NO: 686732 - protein, 14 aa, Homo sapiens
  CDR3 for beta chain variable domain of TCR clone 343366 (TRBV7-3, TRBJ2-2)
CASSLNYNTGELFF

SEQ ID NO: 686733 - protein, 14 aa, Homo sapiens
  CDR3 for alpha chain variable domain of TCR clone 343367 (TRAV12-2, TRAJ13)
CAVKKTGGYQKVTF

SEQ ID NO: 686734 - protein, 13 aa, Homo sapiens
  CDR3 for beta chain variable domain of TCR clone 343367 (TRBV28, TRBJ2-7)
FASKAGGVYEQYF

SEQ ID NO: 686735 - protein, 18 aa, Homo sapiens
  CDR3 for alpha chain variable domain of TCR clone 343368 (TRAV26-2, TRAJ33)
CCVLLHPEEPASNYQLIW

SEQ ID NO: 686736 - protein, 17 aa, Homo sapiens
  CDR3 for beta chain variable domain of TCR clone 343368 (TRBV7-3, TRBJ2-3)
CASSPRGQGYGTDTQYF

SEQ ID NO: 686737 - protein, 13 aa, Homo sapiens
  CDR3 for alpha chain variable domain of TCR clone 343369 (TRAV12-2, TRAJ10)
CAVPTRGGNKLTF

SEQ ID NO: 686738 - protein, 11 aa, Homo sapiens
  CDR3 for beta chain variable domain of TCR clone 343369 (TRBV6-1, TRBJ2-1)
CASISSNEQFF

SEQ ID NO: 686739 - protein, 14 aa, Homo sapiens
  CDR3 for alpha chain variable domain of TCR clone 343370 (TRAV1-2, TRAJ8)
CAVREDTGLQKLVF

SEQ ID NO: 686740 - protein, 14 aa, Homo sapiens
  CDR3 for beta chain variable domain of TCR clone 343370 (TRBV7-9, TRBJ1-1)
CASILGGANTEAFF

SEQ ID NO: 686741 - protein, 12 aa, Homo sapiens
  CDR3 for alpha chain variable domain of TCR clone 343371 (TRAV12-1, TRAJ13)
CNSQGGYQKVTF

SEQ ID NO: 686742 - protein, 14 aa, Homo sapiens
  CDR3 for beta chain variable domain of TCR clone 343371 (TRBV12-5, TRBJ2-5)
CASGSRTHQETQYF

SEQ ID NO: 686743 - protein, 14 aa, Homo sapiens
  CDR3 for alpha chain variable domain of TCR clone 343372 (TRAV17, TRAJ32)
CATDPGGATNKLIF

SEQ ID NO: 686744 - protein, 13 aa, Homo sapiens
  CDR3 for beta chain variable domain of TCR clone 343372 (TRBV2, TRBJ1-1)
CASSVLMNTEAFF

SEQ ID NO: 686745 - protein, 13 aa, Homo sapiens
  CDR3 for alpha chain variable domain of TCR clone 343373 (TRAV13-2, TRAJ48)
CAEMDFGNEKLTF

SEQ ID NO: 686746 - protein, 13 aa, Homo sapiens
  CDR3 for beta chain variable domain of TCR clone 343373 (TRBV13, TRBJ2-5)
CASSPGVGENQYF

SEQ ID NO: 686747 - protein, 11 aa, Homo sapiens
  CDR3 for alpha chain variable domain of TCR clone 343374 (TRAV16, TRAJ49)
CSLNTGNQFFF

SEQ ID NO: 686748 - protein, 12 aa, Homo sapiens
  CDR3 for beta chain variable domain of TCR clone 343374 (TRBV7-9, TRBJ1-4)
CASSTDREKLFF

SEQ ID NO: 686749 - protein, 14 aa, Homo sapiens
  CDR3 for alpha chain variable domain of TCR clone 343375 (TRAV12-2, TRAJ9)
CAVNMEGGGFKTIF

SEQ ID NO: 686750 - protein, 13 aa, Homo sapiens
  CDR3 for beta chain variable domain of TCR clone 343375 (TRBV27, TRBJ2-5)
CQQFPEGLGDQYF

SEQ ID NO: 686751 - protein, 14 aa, Homo sapiens
  CDR3 for alpha chain variable domain of TCR clone 343376 (TRAV12-2, TRAJ5)
CAVNRSTGRRALTL

SEQ ID NO: 686752 - protein, 15 aa, Homo sapiens
  CDR3 for beta chain variable domain of TCR clone 343376 (TRBV27, TRBJ2-1)
CASSNGGGSSNEQFF

SEQ ID NO: 686753 - protein, 19 aa, Homo sapiens
  CDR3 for alpha chain variable domain of TCR clone 343377 (TRAV38-1, TRAJ53)
CAFMKHGLESGGSNYKLTF

SEQ ID NO: 686754 - protein, 17 aa, Homo sapiens
  CDR3 for beta chain variable domain of TCR clone 343377 (TRBV7-3, TRBJ2-3)
CASSLMKRMRGADTQYF

SEQ ID NO: 686755 - protein, 13 aa, Homo sapiens
  CDR3 for alpha chain variable domain of TCR clone 343378 (TRAV8-1, TRAJ9)
FAVNSVGGFKTIF

SEQ ID NO: 686756 - protein, 15 aa, Homo sapiens
  CDR3 for beta chain variable domain of TCR clone 343378 (TRBV11-2, TRBJ2-3)
CASSGRDGLTDTQYF

SEQ ID NO: 686757 - protein, 12 aa, Homo sapiens
  CDR3 for alpha chain variable domain of TCR clone 343379 (TRAV13-1, TRAJ21)
CAAKEGFNNFYF

SEQ ID NO: 686758 - protein, 16 aa, Homo sapiens
  CDR3 for beta chain variable domain of TCR clone 343379 (TRBV7-2, TRBJ2-6)
CASSLAGRSGANVLTF

SEQ ID NO: 686759 - protein, 14 aa, Homo sapiens
  CDR3 for alpha chain variable domain of TCR clone 343380 (TRAV17, TRAJ32)
CATDPGGATNKLIF

SEQ ID NO: 686760 - protein, 18 aa, Homo sapiens
  CDR3 for beta chain variable domain of TCR clone 343380 (TRBV12-4, TRBJ2-2)
CASRPFGAGALNTGELFF

SEQ ID NO: 686761 - protein, 11 aa, Homo sapiens
  CDR3 for alpha chain variable domain of TCR clone 343381 (TRAV1-2, TRAJ20)
CAVANDYKLSF

SEQ ID NO: 686762 - protein, 15 aa, Homo sapiens
  CDR3 for beta chain variable domain of TCR clone 343381 (TRBV2, TRBJ2-1)
CASSEQAGSYNEQFF

SEQ ID NO: 686763 - protein, 17 aa, Homo sapiens
  CDR3 for alpha chain variable domain of TCR clone 343382 (TRAV26-2, TRAJ42)
CILRDVGYGGSQGNLIF

SEQ ID NO: 686764 - protein, 18 aa, Homo sapiens
  CDR3 for beta chain variable domain of TCR clone 343382 (TRBV18, TRBJ1-3)
CASSPRGGAGPSGNTIYF

SEQ ID NO: 686765 - protein, 14 aa, Homo sapiens
  CDR3 for alpha chain variable domain of TCR clone 343383 (TRAV26-1, TRAJ38)
CIADNAGNNRKLIW

SEQ ID NO: 686766 - protein, 14 aa, Homo sapiens
  CDR3 for beta chain variable domain of TCR clone 343383 (TRBV7-3, TRBJ2-1)
CASSLAGGTNEQFF

SEQ ID NO: 686767 - protein, 16 aa, Homo sapiens
  CDR3 for alpha chain variable domain of TCR clone 343384 (TRAV17, TRAJ52)
YATSNAGGTSYGKLTF

SEQ ID NO: 686768 - protein, 13 aa, Homo sapiens
  CDR3 for beta chain variable domain of TCR clone 343384 (TRBV27, TRBJ1-6)
CASSLVLVSPLHF

SEQ ID NO: 686769 - protein, 17 aa, Homo sapiens
  CDR3 for alpha chain variable domain of TCR clone 343385 (TRAV13-1, TRAJ28)
CAASPPYSGAGSYQLTF

SEQ ID NO: 686770 - protein, 12 aa, Homo sapiens
  CDR3 for beta chain variable domain of TCR clone 343385 (TRBV29-1, TRBJ2-3)
CSVTGGADTQYF

SEQ ID NO: 686771 - protein, 15 aa, Homo sapiens
  CDR3 for alpha chain variable domain of TCR clone 343386 (TRAV26-1, TRAJ29)
CIVRVEGSGNTPLVF

SEQ ID NO: 686772 - protein, 13 aa, Homo sapiens
  CDR3 for beta chain variable domain of TCR clone 343386 (TRBV15, TRBJ2-7)
CATSTTGHYEQYF

SEQ ID NO: 686773 - protein, 12 aa, Homo sapiens
  CDR3 for alpha chain variable domain of TCR clone 343387 (TRAV26-1, TRAJ26)
CIVDNYGQNCVF

SEQ ID NO: 686774 - protein, 15 aa, Homo sapiens
  CDR3 for beta chain variable domain of TCR clone 343387 (TRBV7-2, TRBJ2-3)
CASSLRGGSTDTQYF

SEQ ID NO: 686775 - protein, 16 aa, Homo sapiens
  CDR3 for alpha chain variable domain of TCR clone 343388 (TRAV26-1, TRAJ52)
CIVSNAGGTSYGKLTF

SEQ ID NO: 686776 - protein, 15 aa, Homo sapiens
  CDR3 for beta chain variable domain of TCR clone 343388 (TRBV7-3, TRBJ2-1)
CASSPAGGGEVEQFF

SEQ ID NO: 686777 - protein, 14 aa, Homo sapiens
  CDR3 for alpha chain variable domain of TCR clone 343389 (TRAV12-3, TRAJ10)
SHLPLTGGGNKLTF

SEQ ID NO: 686778 - protein, 15 aa, Homo sapiens
  CDR3 for beta chain variable domain of TCR clone 343389 (TRBV20-1, TRBJ1-5)
CSAFKNGQRNQSQHF

SEQ ID NO: 686779 - protein, 15 aa, Homo sapiens
  CDR3 for alpha chain variable domain of TCR clone 343390 (TRAV25, TRAJ53)
CPTSNSGGSNYKLTF

SEQ ID NO: 686780 - protein, 15 aa, Homo sapiens
  CDR3 for beta chain variable domain of TCR clone 343390 (TRBV19, TRBJ1-1)
CASTSGQIQNTEAFF

SEQ ID NO: 686781 - protein, 14 aa, Homo sapiens
  CDR3 for alpha chain variable domain of TCR clone 343391 (TRAV36/DV7, TRAJ53)
CAVVDGGSNYKLTF

SEQ ID NO: 686782 - protein, 14 aa, Homo sapiens
  CDR3 for beta chain variable domain of TCR clone 343391 (TRBV19, TRBJ2-1)
CASPTFVLGGEQFF

SEQ ID NO: 686783 - protein, 15 aa, Homo sapiens
  CDR3 for alpha chain variable domain of TCR clone 343392 (TRAV12-2, TRAJ30)
CAVNPAMDRDDKIIF

SEQ ID NO: 686784 - protein, 13 aa, Homo sapiens
  CDR3 for beta chain variable domain of TCR clone 343392 (TRBV7-8, TRBJ2-7)
RRVRLTEMGEQYF

SEQ ID NO: 686785 - protein, 12 aa, Homo sapiens
  CDR3 for alpha chain variable domain of TCR clone 343393 (TRAV21, TRAJ3)
CCFYSSASKIIF

SEQ ID NO: 686786 - protein, 16 aa, Homo sapiens
  CDR3 for beta chain variable domain of TCR clone 343393 (TRBV19, TRBJ2-1)
CASSKAGASSYNEQFF

SEQ ID NO: 686787 - protein, 13 aa, Homo sapiens
  CDR3 for alpha chain variable domain of TCR clone 343394 (TRAV12-2, TRAJ13)
CREEDWGFQKVTF

SEQ ID NO: 686788 - protein, 14 aa, Homo sapiens
  CDR3 for beta chain variable domain of TCR clone 343394 (TRBV4-3, TRBJ2-7)
CASSPHKGLYEQYF

SEQ ID NO: 686789 - protein, 14 aa, Homo sapiens
  CDR3 for alpha chain variable domain of TCR clone 343395 (TRAV20, TRAJ17)
CAVQARAAGNKVTF

SEQ ID NO: 686790 - protein, 13 aa, Homo sapiens
  CDR3 for beta chain variable domain of TCR clone 343395 (TRBV19, TRBJ1-2)
CASSPTLNYGYTF

SEQ ID NO: 686791 - protein, 19 aa, Homo sapiens
  CDR3 for alpha chain variable domain of TCR clone 343396 (TRAV26-1, TRAJ52)
CIVRAHRNAGGTSYGKLTF

SEQ ID NO: 686792 - protein, 15 aa, Homo sapiens
  CDR3 for beta chain variable domain of TCR clone 343396 (TRBV29-1, TRBJ2-1)
CSGRDRKISYNEQFF

SEQ ID NO: 686793 - protein, 13 aa, Homo sapiens
  CDR3 for alpha chain variable domain of TCR clone 343397 (TRAV2, TRAJ40)
CAVVTSGTYKCIV

SEQ ID NO: 686794 - protein, 15 aa, Homo sapiens
  CDR3 for beta chain variable domain of TCR clone 343397 (TRBV11-3, TRBJ2-3)
CASLKDGREGDTQYF

SEQ ID NO: 686795 - protein, 17 aa, Homo sapiens
  CDR3 for alpha chain variable domain of TCR clone 343398 (TRAV3, TRAJ6)
CAVRDGPRAGGSYIPTF

SEQ ID NO: 686796 - protein, 10 aa, Homo sapiens
  CDR3 for beta chain variable domain of TCR clone 343398 (TRBV23-1, TRBJ2-1)
KWSSYNEQFF

SEQ ID NO: 686797 - protein, 12 aa, Homo sapiens
  CDR3 for alpha chain variable domain of TCR clone 343399 (TRAV12-3, TRAJ17)
CAMTLTGNKLTF

SEQ ID NO: 686798 - protein, 15 aa, Homo sapiens
  CDR3 for beta chain variable domain of TCR clone 343399 (TRBV6-3, TRBJ2-7)
CASSSPGTVLYEQYF

SEQ ID NO: 686799 - protein, 13 aa, Homo sapiens
  CDR3 for alpha chain variable domain of TCR clone 343400 (TRAV35, TRAJ42)
CAGFPGSQGNLIF

SEQ ID NO: 686800 - protein, 15 aa, Homo sapiens
  CDR3 for beta chain variable domain of TCR clone 343400 (TRBV3-1, TRBJ2-1)
CASSQDYTPRGEQFF

SEQ ID NO: 686801 - protein, 17 aa, Homo sapiens
  CDR3 for alpha chain variable domain of TCR clone 343401 (TRAV3, TRAJ42)
CAVRDRDYGGSQGNLIF

SEQ ID NO: 686802 - protein, 14 aa, Homo sapiens
  CDR3 for beta chain variable domain of TCR clone 343401 (TRBV7-2, TRBJ2-7)
CASSSISGFSEQYF

SEQ ID NO: 686803 - protein, 15 aa, Homo sapiens
  CDR3 for alpha chain variable domain of TCR clone 343402 (TRAV12-3, TRAJ5)
CAMSGLGTSRRALTF

SEQ ID NO: 686804 - protein, 16 aa, Homo sapiens
  CDR3 for beta chain variable domain of TCR clone 343402 (TRBV20-1, TRBJ2-3)
CSARLHSAGAIDTQYF

SEQ ID NO: 686805 - protein, 13 aa, Homo sapiens
  CDR3 for alpha chain variable domain of TCR clone 343403 (TRAV23/DV6, TRAJ16)
CAASGSDGQKLIF

SEQ ID NO: 686806 - protein, 13 aa, Homo sapiens
  CDR3 for beta chain variable domain of TCR clone 343403 (TRBV7-9, TRBJ1-2)
CASSLKQNYGYTF

SEQ ID NO: 686807 - protein, 12 aa, Homo sapiens
  CDR3 for alpha chain variable domain of TCR clone 343404 (TRAV12-3, TRAJ17)
CAMTLTGDKLTF

SEQ ID NO: 686808 - protein, 20 aa, Homo sapiens
  CDR3 for beta chain variable domain of TCR clone 343404 (TRBV7-8, TRBJ2-2)
CAGSHLFPGPTIHITGELFF

SEQ ID NO: 686809 - protein, 16 aa, Homo sapiens
  CDR3 for alpha chain variable domain of TCR clone 343405 (TRAV21, TRAJ52)
CAVTNAGGTSDGKLTF

SEQ ID NO: 686810 - protein, 13 aa, Homo sapiens
  CDR3 for beta chain variable domain of TCR clone 343405 (TRBV20-1, TRBJ2-3)
CSARLAGTDTQYF

SEQ ID NO: 686811 - protein, 14 aa, Homo sapiens
  CDR3 for alpha chain variable domain of TCR clone 343406 (TRAV26-1, TRAJ34)
CIVRVAYNTDKLIF

SEQ ID NO: 686812 - protein, 13 aa, Homo sapiens
  CDR3 for beta chain variable domain of TCR clone 343406 (TRBV4-2, TRBJ1-1)
CASSQAGNTEAFL

SEQ ID NO: 686813 - protein, 15 aa, Homo sapiens
  CDR3 for alpha chain variable domain of TCR clone 343407 (TRAV2, TRAJ15)
CAVEDRGQAGTALIF

SEQ ID NO: 686814 - protein, 15 aa, Homo sapiens
  CDR3 for beta chain variable domain of TCR clone 343407 (TRBV5-1, TRBJ2-1)
CASSPPRAPYNEQFF

SEQ ID NO: 686815 - protein, 16 aa, Homo sapiens
  CDR3 for alpha chain variable domain of TCR clone 343408 (TRAV4, TRAJ5)
CVVGPDHGHGQESTYF

SEQ ID NO: 686816 - protein, 15 aa, Homo sapiens
  CDR3 for beta chain variable domain of TCR clone 343408 (TRBV27, TRBJ2-5)
CASSLIPSGGETQYF

SEQ ID NO: 686817 - protein, 15 aa, Homo sapiens
  CDR3 for alpha chain variable domain of TCR clone 343409 (TRAV3, TRAJ5)
CAVRYLETGRRALTF

SEQ ID NO: 686818 - protein, 14 aa, Homo sapiens
  CDR3 for beta chain variable domain of TCR clone 343409 (TRBV12-5, TRBJ2-5)
CASGSRTHQETQYF

SEQ ID NO: 686819 - protein, 12 aa, Homo sapiens
  CDR3 for alpha chain variable domain of TCR clone 343410 (TRAV8-3, TRAJ40)
CAVTSGTYKYIF

SEQ ID NO: 686820 - protein, 13 aa, Homo sapiens
  CDR3 for beta chain variable domain of TCR clone 343410 (TRBV3-1, TRBJ1-1)
CASSPGVITEAFF

SEQ ID NO: 686821 - protein, 14 aa, Homo sapiens
  CDR3 for alpha chain variable domain of TCR clone 343411 (TRAV12-1, TRAJ34)
CVVNLDYDTDKLIF

SEQ ID NO: 686822 - protein, 13 aa, Homo sapiens
  CDR3 for beta chain variable domain of TCR clone 343411 (TRBV29-1, TRBJ2-1)
CSVEGGRVNEQFF

SEQ ID NO: 686823 - protein, 15 aa, Homo sapiens
  CDR3 for alpha chain variable domain of TCR clone 343412 (TRAV21, TRAJ53)
CAVRQSGGSNYKLTS

SEQ ID NO: 686824 - protein, 14 aa, Homo sapiens
  CDR3 for beta chain variable domain of TCR clone 343412 (TRBV18, TRBJ2-5)
CASSPGVSQETQYF

SEQ ID NO: 686825 - protein, 10 aa, Homo sapiens
  CDR3 for alpha chain variable domain of TCR clone 343413 (TRAV25, TRAJ21)
CLYNFNKFYF

SEQ ID NO: 686826 - protein, 14 aa, Homo sapiens
  CDR3 for beta chain variable domain of TCR clone 343413 (TRBV19, TRBJ2-1)
CASPTFVLSGEQFF

SEQ ID NO: 686827 - protein, 14 aa, Homo sapiens
  CDR3 for alpha chain variable domain of TCR clone 343414 (TRAV1-2, TRAJ16)
CAVNRFSDGRKLLF

SEQ ID NO: 686828 - protein, 13 aa, Homo sapiens
  CDR3 for beta chain variable domain of TCR clone 343414 (TRBV20-1, TRBJ2-1)
CSAHVSSYNEQFF

SEQ ID NO: 686829 - protein, 15 aa, Homo sapiens
  CDR3 for alpha chain variable domain of TCR clone 343415 (TRAV2, TRAJ9)
CAVEDRGTGGFKTIF

SEQ ID NO: 686830 - protein, 14 aa, Homo sapiens
  CDR3 for beta chain variable domain of TCR clone 343415 (TRBV2, TRBJ1-2)
CASRRTGSPYGYTF

SEQ ID NO: 686831 - protein, 16 aa, Homo sapiens
  CDR3 for alpha chain variable domain of TCR clone 343416 (TRAV12-3, TRAJ53)
CAMSPGIGGSNYKLTF

SEQ ID NO: 686832 - protein, 12 aa, Homo sapiens
  CDR3 for beta chain variable domain of TCR clone 343416 (TRBV11-2, TRBJ2-2)
CASSLGGGELFF

SEQ ID NO: 686833 - protein, 16 aa, Homo sapiens
  CDR3 for alpha chain variable domain of TCR clone 343417 (TRAV30, TRAJ24)
CGSEIVDADSWGKFQF

SEQ ID NO: 686834 - protein, 15 aa, Homo sapiens
  CDR3 for beta chain variable domain of TCR clone 343417 (TRBV29-1, TRBJ2-1)
CSGRDRKSSYNEQFF

SEQ ID NO: 686835 - protein, 13 aa, Homo sapiens
  CDR3 for alpha chain variable domain of TCR clone 343418 (TRAV8-3, TRAJ7)
CAVGAYGSNRLAF

SEQ ID NO: 686836 - protein, 13 aa, Homo sapiens
  CDR3 for beta chain variable domain of TCR clone 343418 (TRBV7-3, TRBJ1-5)
CASSLDSNQPQHF

SEQ ID NO: 686837 - protein, 13 aa, Homo sapiens
  CDR3 for alpha chain variable domain of TCR clone 343419 (TRAV26-1, TRAJ48)
FIVRVVGDEKLTF

SEQ ID NO: 686838 - protein, 16 aa, Homo sapiens
  CDR3 for beta chain variable domain of TCR clone 343419 (TRBV12-5, TRBJ2-5)
CASGPRTSGNQETQYF

SEQ ID NO: 686839 - protein, 14 aa, Homo sapiens
  CDR3 for alpha chain variable domain of TCR clone 343420 (TRAV1-2, TRAJ16)
CAVNRFSDGQKLLF

SEQ ID NO: 686840 - protein, 14 aa, Homo sapiens
  CDR3 for beta chain variable domain of TCR clone 343420 (TRBV15, TRBJ2-7)
CATSRVARGYEQYF

SEQ ID NO: 686841 - protein, 13 aa, Homo sapiens
  CDR3 for alpha chain variable domain of TCR clone 343421 (TRAV8-3, TRAJ36)
CAVGATGANNLCF

SEQ ID NO: 686842 - protein, 16 aa, Homo sapiens
  CDR3 for beta chain variable domain of TCR clone 343421 (TRBV9, TRBJ1-2)
CASSVEEKVSPYGYTF

SEQ ID NO: 686843 - protein, 14 aa, Homo sapiens
  CDR3 for alpha chain variable domain of TCR clone 343422 (TRAV30, TRAJ50)
CGTALKTSYDKVIF

SEQ ID NO: 686844 - protein, 14 aa, Homo sapiens
  CDR3 for beta chain variable domain of TCR clone 343422 (TRBV7-6, TRBJ2-3)
CASSVAGGTDTQYF

SEQ ID NO: 686845 - protein, 16 aa, Homo sapiens
  CDR3 for alpha chain variable domain of TCR clone 343423 (TRAV35, TRAJ28)
CAGQKYSGAGSYQLTF

SEQ ID NO: 686846 - protein, 15 aa, Homo sapiens
  CDR3 for beta chain variable domain of TCR clone 343423 (TRBV7-3, TRBJ2-2)
CQQLKAGDLVRELFF

SEQ ID NO: 686847 - protein, 14 aa, Homo sapiens
  CDR3 for alpha chain variable domain of TCR clone 343424 (TRAV13-1, TRAJ35)
CAASKGSVGNVLHC

SEQ ID NO: 686848 - protein, 13 aa, Homo sapiens
  CDR3 for beta chain variable domain of TCR clone 343424 (TRBV7-3, TRBJ1-1)
CASSQDWGAEAFF

SEQ ID NO: 686849 - protein, 13 aa, Homo sapiens
  CDR3 for alpha chain variable domain of TCR clone 343425 (TRAV12-1, TRAJ34)
CVVTGYNTDKLIF

SEQ ID NO: 686850 - protein, 13 aa, Homo sapiens
  CDR3 for beta chain variable domain of TCR clone 343425 (TRBV28, TRBJ2-7)
CASKTGGVYEQYF

SEQ ID NO: 686851 - protein, 17 aa, Homo sapiens
  CDR3 for alpha chain variable domain of TCR clone 343426 (TRAV4, TRAJ18)
CLVGERSVCSTLGRRYF

SEQ ID NO: 686852 - protein, 14 aa, Homo sapiens
  CDR3 for beta chain variable domain of TCR clone 343426 (TRBV6-5, TRBJ1-2)
CASSYDGTGGGYTF

SEQ ID NO: 686853 - protein, 15 aa, Homo sapiens
  CDR3 for alpha chain variable domain of TCR clone 343427 (TRAV17, TRAJ13)
CATDAGSGGYQKVTF

SEQ ID NO: 686854 - protein, 17 aa, Homo sapiens
  CDR3 for beta chain variable domain of TCR clone 343427 (TRBV7-8, TRBJ2-6)
CASSAGTGGAGANVLTF

SEQ ID NO: 686855 - protein, 13 aa, Homo sapiens
  CDR3 for alpha chain variable domain of TCR clone 343428 (TRAV13-1, TRAJ39)
CSKYSNEVNMLTF

SEQ ID NO: 686856 - protein, 16 aa, Homo sapiens
  CDR3 for beta chain variable domain of TCR clone 343428 (TRBV20-1, TRBJ1-4)
CSAPGQGLLTNEKLFF

SEQ ID NO: 686857 - protein, 12 aa, Homo sapiens
  CDR3 for alpha chain variable domain of TCR clone 343429 (TRAV12-2, TRAJ9)
CAVNTGGFKTIF

SEQ ID NO: 686858 - protein, 15 aa, Homo sapiens
  CDR3 for beta chain variable domain of TCR clone 343429 (TRBV6-1, TRBJ2-3)
CASSERGGITDTQYF

SEQ ID NO: 686859 - protein, 12 aa, Homo sapiens
  CDR3 for alpha chain variable domain of TCR clone 343430 (TRAV8-6, TRAJ43)
CAGSHNNNDMRF

SEQ ID NO: 686860 - protein, 14 aa, Homo sapiens
  CDR3 for beta chain variable domain of TCR clone 343430 (TRBV10-3, TRBJ1-1)
CAISDGSGVTEAFF

SEQ ID NO: 686861 - protein, 13 aa, Homo sapiens
  CDR3 for alpha chain variable domain of TCR clone 343431 (TRAV17, TRAJ9)
FATAITGGFKTIF

SEQ ID NO: 686862 - protein, 16 aa, Homo sapiens
  CDR3 for beta chain variable domain of TCR clone 343431 (TRBV15, TRBJ2-1)
CATSRNLAGGYNEQFF

SEQ ID NO: 686863 - protein, 13 aa, Homo sapiens
  CDR3 for alpha chain variable domain of TCR clone 343432 (TRAV8-2, TRAJ43)
CVVSDQGDNDMRF

SEQ ID NO: 686864 - protein, 12 aa, Homo sapiens
  CDR3 for beta chain variable domain of TCR clone 343432 (TRBV7-9, TRBJ2-7)
CASRTGIDEQYF

SEQ ID NO: 686865 - protein, 12 aa, Homo sapiens
  CDR3 for alpha chain variable domain of TCR clone 343433 (TRAV12-2, TRAJ45)
CASGGGTDGLTF

SEQ ID NO: 686866 - protein, 16 aa, Homo sapiens
  CDR3 for beta chain variable domain of TCR clone 343433 (TRBV19, TRBJ2-3)
CASSPGLLARTDTQYF

SEQ ID NO: 686867 - protein, 14 aa, Homo sapiens
  CDR3 for alpha chain variable domain of TCR clone 343434 (TRAV1-2, TRAJ16)
CAVNRFSDGQKLLF

SEQ ID NO: 686868 - protein, 15 aa, Homo sapiens
  CDR3 for beta chain variable domain of TCR clone 343434 (TRBV9, TRBJ1-6)
CASSEAGTGDSPLHF

SEQ ID NO: 686869 - protein, 14 aa, Homo sapiens
  CDR3 for alpha chain variable domain of TCR clone 343435 (TRAV1-2, TRAJ8)
CAVREDTGLQKLVF

SEQ ID NO: 686870 - protein, 15 aa, Homo sapiens
  CDR3 for beta chain variable domain of TCR clone 343435 (TRBV19, TRBJ2-1)
CASSTGTSSYNEQFF

SEQ ID NO: 686871 - protein, 15 aa, Homo sapiens
  CDR3 for alpha chain variable domain of TCR clone 343436 (TRAV17, TRAJ35)
CATAFVIGFGNVLHC

SEQ ID NO: 686872 - protein, 16 aa, Homo sapiens
  CDR3 for beta chain variable domain of TCR clone 343436 (TRBV7-9, TRBJ2-1)
CASSDVAGGSYNEQFF

SEQ ID NO: 686873 - protein, 11 aa, Homo sapiens
  CDR3 for alpha chain variable domain of TCR clone 343437 (TRAV2, TRAJ13)
CASGGYKKVTF

SEQ ID NO: 686874 - protein, 15 aa, Homo sapiens
  CDR3 for beta chain variable domain of TCR clone 343437 (TRBV20-1, TRBJ2-7)
CSARDRVSGMDEQYF

SEQ ID NO: 686875 - protein, 17 aa, Homo sapiens
  CDR3 for alpha chain variable domain of TCR clone 343438 (TRAV3, TRAJ38)
CAVRDCFNAGNNRKLIW

SEQ ID NO: 686876 - protein, 13 aa, Homo sapiens
  CDR3 for beta chain variable domain of TCR clone 343438 (TRBV23-1, TRBJ1-4)
CASRGKFNEKLFF

SEQ ID NO: 686877 - protein, 13 aa, Homo sapiens
  CDR3 for alpha chain variable domain of TCR clone 343439 (TRAV6, TRAJ20)
CALTVSNDYKLSF

SEQ ID NO: 686878 - protein, 16 aa, Homo sapiens
  CDR3 for beta chain variable domain of TCR clone 343439 (TRBV7-9, TRBJ2-1)
CASSDVAGGSYNEQFF

SEQ ID NO: 686879 - protein, 15 aa, Homo sapiens
  CDR3 for alpha chain variable domain of TCR clone 343440 (TRAV2, TRAJ15)
CAVEDRGQAGTALIF

SEQ ID NO: 686880 - protein, 14 aa, Homo sapiens
  CDR3 for beta chain variable domain of TCR clone 343440 (TRBV7-2, TRBJ2-7)
CASRSQGAAYEQYF

SEQ ID NO: 686881 - protein, 14 aa, Homo sapiens
  CDR3 for alpha chain variable domain of TCR clone 343441 (TRAV8-6, TRAJ36)
CAVSEKDGANNLFF

SEQ ID NO: 686882 - protein, 17 aa, Homo sapiens
  CDR3 for beta chain variable domain of TCR clone 343441 (TRBV11-2, TRBJ2-3)
CASSPTGTGGLTDTQYF

SEQ ID NO: 686883 - protein, 13 aa, Homo sapiens
  CDR3 for alpha chain variable domain of TCR clone 343442 (TRAV12-2, TRAJ4)
CAGFSGGYNKLIF

SEQ ID NO: 686884 - protein, 13 aa, Homo sapiens
  CDR3 for beta chain variable domain of TCR clone 343442 (TRBV24-1, TRBJ1-1)
CHSIPRGDTEAFF

SEQ ID NO: 686885 - protein, 14 aa, Homo sapiens
  CDR3 for alpha chain variable domain of TCR clone 343443 (TRAV9-2, TRAJ39)
CALYIYSAGNMLTF

SEQ ID NO: 686886 - protein, 16 aa, Homo sapiens
  CDR3 for beta chain variable domain of TCR clone 343443 (TRBV13, TRBJ2-2)
CASSPRTGEHTGELFF

SEQ ID NO: 686887 - protein, 16 aa, Homo sapiens
  CDR3 for alpha chain variable domain of TCR clone 343444 (TRAV14/DV4, TRAJ20)
CAMREGRSRDDYKLSF

SEQ ID NO: 686888 - protein, 15 aa, Homo sapiens
  CDR3 for beta chain variable domain of TCR clone 343444 (TRBV27, TRBJ2-1)
CASSNGGGSSNEQFF

SEQ ID NO: 686889 - protein, 14 aa, Homo sapiens
  CDR3 for alpha chain variable domain of TCR clone 343445 (TRAV1-2, TRAJ24)
CAVLTTDSWGKFQF

SEQ ID NO: 686890 - protein, 21 aa, Homo sapiens
  CDR3 for beta chain variable domain of TCR clone 343445 (TRBV6-5, TRBJ1-3)
CASSYWEKIAQGMSPGNTMYF

SEQ ID NO: 686891 - protein, 14 aa, Homo sapiens
  CDR3 for alpha chain variable domain of TCR clone 343446 (TRAV12-2, TRAJ36)
CAVKISTGANNLFF

SEQ ID NO: 686892 - protein, 14 aa, Homo sapiens
  CDR3 for beta chain variable domain of TCR clone 343446 (TRBV20-1, TRBJ2-3)
CSARWGTSTDTQYF

SEQ ID NO: 686893 - protein, 16 aa, Homo sapiens
  CDR3 for alpha chain variable domain of TCR clone 343447 (TRAV30, TRAJ24)
CGTEIVDADSWGKFQL

SEQ ID NO: 686894 - protein, 16 aa, Homo sapiens
  CDR3 for beta chain variable domain of TCR clone 343447 (TRBV12-5, TRBJ2-5)
CASGPRTSGNQETQYF

SEQ ID NO: 686895 - protein, 14 aa, Homo sapiens
  CDR3 for alpha chain variable domain of TCR clone 343448 (TRAV12-2, TRAJ40)
CAVKIPSGTYKYIF

SEQ ID NO: 686896 - protein, 17 aa, Homo sapiens
  CDR3 for beta chain variable domain of TCR clone 343448 (TRBV13, TRBJ2-3)
CASSLSRVAGGRNTQYL

SEQ ID NO: 686897 - protein, 14 aa, Homo sapiens
  CDR3 for alpha chain variable domain of TCR clone 343449 (TRAV38-1, TRAJ31)
CAFMKHDNNARHMF

SEQ ID NO: 686898 - protein, 16 aa, Homo sapiens
  CDR3 for beta chain variable domain of TCR clone 343449 (TRBV23-1, TRBJ2-1)
CISAPATGPTYNEQFF

SEQ ID NO: 686899 - protein, 14 aa, Homo sapiens
  CDR3 for alpha chain variable domain of TCR clone 343450 (TRAV12-2, TRAJ40)
CAVEIPSGTYKYIF

SEQ ID NO: 686900 - protein, 14 aa, Homo sapiens
  CDR3 for beta chain variable domain of TCR clone 343450 (TRBV7-9, TRBJ1-2)
CASSRQGANYGYTF

SEQ ID NO: 686901 - protein, 14 aa, Homo sapiens
  CDR3 for alpha chain variable domain of TCR clone 343451 (TRAV8-4, TRAJ15)
CAVTIREAGPALIF

SEQ ID NO: 686902 - protein, 13 aa, Homo sapiens
  CDR3 for beta chain variable domain of TCR clone 343451 (TRBV10-3, TRBJ2-7)
CAISEKGGYEQYF

SEQ ID NO: 686903 - protein, 13 aa, Homo sapiens
  CDR3 for alpha chain variable domain of TCR clone 343452 (TRAV13-1, TRAJ4)
CAASIGGYNKLIF

SEQ ID NO: 686904 - protein, 16 aa, Homo sapiens
  CDR3 for beta chain variable domain of TCR clone 343452 (TRBV20-1, TRBJ2-1)
CSARGLAGSYSDEQFF

SEQ ID NO: 686905 - protein, 19 aa, Homo sapiens
  CDR3 for alpha chain variable domain of TCR clone 343453 (TRAV1-1, TRAJ13)
CLLLLRCEGESGGYQKVTF

SEQ ID NO: 686906 - protein, 19 aa, Homo sapiens
  CDR3 for beta chain variable domain of TCR clone 343453 (TRBV14, TRBJ2-1)
CASSQGQRWEAPEYNEQFF

SEQ ID NO: 686907 - protein, 16 aa, Homo sapiens
  CDR3 for alpha chain variable domain of TCR clone 343454 (TRAV8-3, TRAJ10)
CAVGPILTGGGNKLTF

SEQ ID NO: 686908 - protein, 16 aa, Homo sapiens
  CDR3 for beta chain variable domain of TCR clone 343454 (TRBV7-2, TRBJ2-5)
CASSSKWWSGQETQYF

SEQ ID NO: 686909 - protein, 14 aa, Homo sapiens
  CDR3 for alpha chain variable domain of TCR clone 343455 (TRAV8-4, TRAJ9)
CAVRINTGGFKTIF

SEQ ID NO: 686910 - protein, 13 aa, Homo sapiens
  CDR3 for beta chain variable domain of TCR clone 343455 (TRBV7-3, TRBJ1-1)
CASSQDWGAEAFF

SEQ ID NO: 686911 - protein, 16 aa, Homo sapiens
  CDR3 for alpha chain variable domain of TCR clone 343456 (TRAV3, TRAJ37)
CAVRGKGSGNTGKLIF

SEQ ID NO: 686912 - protein, 15 aa, Homo sapiens
  CDR3 for beta chain variable domain of TCR clone 343456 (TRBV5-1, TRBJ1-5)
CASSFWVVSPSILVM

SEQ ID NO: 686913 - protein, 13 aa, Homo sapiens
  CDR3 for alpha chain variable domain of TCR clone 343457 (TRAV1-2, TRAJ9)
CAVLNTGGFKTIF

SEQ ID NO: 686914 - protein, 14 aa, Homo sapiens
  CDR3 for beta chain variable domain of TCR clone 343457 (TRBV4-2, TRBJ1-5)
CASSRDRGNQPQHF

SEQ ID NO: 686915 - protein, 13 aa, Homo sapiens
  CDR3 for alpha chain variable domain of TCR clone 343458 (TRAV35, TRAJ42)
CAGFPGSQGNLIF

SEQ ID NO: 686916 - protein, 16 aa, Homo sapiens
  CDR3 for beta chain variable domain of TCR clone 343458 (TRBV28, TRBJ2-1)
CASSSSYSGSLNEQFF

SEQ ID NO: 686917 - protein, 12 aa, Homo sapiens
  CDR3 for alpha chain variable domain of TCR clone 343459 (TRAV41, TRAJ58)
CAVKTSGSRLTF

SEQ ID NO: 686918 - protein, 16 aa, Homo sapiens
  CDR3 for beta chain variable domain of TCR clone 343459 (TRBV27, TRBJ2-7)
CASSSERRDSAYEQYF

SEQ ID NO: 686919 - protein, 16 aa, Homo sapiens
  CDR3 for alpha chain variable domain of TCR clone 343460 (TRAV12-2, TRAJ18)
CAVTTDRGSTLGRLSF

SEQ ID NO: 686920 - protein, 13 aa, Homo sapiens
  CDR3 for beta chain variable domain of TCR clone 343460 (TRBV19, TRBJ2-3)
CATWDKITDTQYF

SEQ ID NO: 686921 - protein, 12 aa, Homo sapiens
  CDR3 for alpha chain variable domain of TCR clone 343461 (TRAV12-3, TRAJ17)
CAMTLTRHKITF

SEQ ID NO: 686922 - protein, 14 aa, Homo sapiens
  CDR3 for beta chain variable domain of TCR clone 343461 (TRBV7-3, TRBJ2-1)
CASSLAGGTNEQFF

SEQ ID NO: 686923 - protein, 12 aa, Homo sapiens
  CDR3 for alpha chain variable domain of TCR clone 343462 (TRAV13-2, TRAJ8)
CAPWLGFQKIVF

SEQ ID NO: 686924 - protein, 14 aa, Homo sapiens
  CDR3 for beta chain variable domain of TCR clone 343462 (TRBV18, TRBJ1-5)
RASSRQQRNQPQHF

SEQ ID NO: 686925 - protein, 22 aa, Homo sapiens
  CDR3 for alpha chain variable domain of TCR clone 343463 (TRAV26-1, TRAJ30)
CIVRVRTEMTRSSLEKGNDFIF

SEQ ID NO: 686926 - protein, 15 aa, Homo sapiens
  CDR3 for beta chain variable domain of TCR clone 343463 (TRBV4-1, TRBJ2-5)
CASSQWDLYQETQYF

SEQ ID NO: 686927 - protein, 14 aa, Homo sapiens
  CDR3 for alpha chain variable domain of TCR clone 343464 (TRAV13-1, TRAJ26)
CAASRGNYGQNFVF

SEQ ID NO: 686928 - protein, 16 aa, Homo sapiens
  CDR3 for beta chain variable domain of TCR clone 343464 (TRBV19, TRBJ2-7)
CASSTPGQASSYEQYF

SEQ ID NO: 686929 - protein, 15 aa, Homo sapiens
  CDR3 for alpha chain variable domain of TCR clone 343465 (TRAV12-1, TRAJ44)
CVVFVNTGTASKLTF

SEQ ID NO: 686930 - protein, 16 aa, Homo sapiens
  CDR3 for beta chain variable domain of TCR clone 343465 (TRBV7-6, TRBJ2-7)
CQQLSSASGNSYEQYF

SEQ ID NO: 686931 - protein, 13 aa, Homo sapiens
  CDR3 for alpha chain variable domain of TCR clone 343466 (TRAV21, TRAJ57)
CAVTQGGSEKLVF

SEQ ID NO: 686932 - protein, 17 aa, Homo sapiens
  CDR3 for beta chain variable domain of TCR clone 343466 (TRBV24-1, TRBJ2-1)
CATSDVSTSGTYNEQFF

SEQ ID NO: 686933 - protein, 13 aa, Homo sapiens
  CDR3 for alpha chain variable domain of TCR clone 343467 (TRAV29/DV5, TRAJ31)
CAASRNNNTRLMF

SEQ ID NO: 686934 - protein, 14 aa, Homo sapiens
  CDR3 for beta chain variable domain of TCR clone 343467 (TRBV7-9, TRBJ2-2)
CASSLVQDTGELFF

SEQ ID NO: 686935 - protein, 18 aa, Homo sapiens
  CDR3 for alpha chain variable domain of TCR clone 343468 (TRAV21, TRAJ52)
CAVRPSPAGGTRYGKLPF

SEQ ID NO: 686936 - protein, 17 aa, Homo sapiens
  CDR3 for beta chain variable domain of TCR clone 343468 (TRBV13, TRBJ2-3)
CASSLSRVAGGRNTQYF

SEQ ID NO: 686937 - protein, 11 aa, Homo sapiens
  CDR3 for alpha chain variable domain of TCR clone 343469 (TRAV21, TRAJ34)
CAHYNTDKLIF

SEQ ID NO: 686938 - protein, 14 aa, Homo sapiens
  CDR3 for beta chain variable domain of TCR clone 343469 (TRBV12-4, TRBJ1-1)
CASSFSQMNTEAFF

SEQ ID NO: 686939 - protein, 15 aa, Homo sapiens
  CDR3 for alpha chain variable domain of TCR clone 343470 (TRAV26-1, TRAJ29)
CIARVEGSGNTPLVF

SEQ ID NO: 686940 - protein, 15 aa, Homo sapiens
  CDR3 for beta chain variable domain of TCR clone 343470 (TRBV19, TRBJ2-7)
CASSPAGSCEALRYF

SEQ ID NO: 686941 - protein, 13 aa, Homo sapiens
  CDR3 for alpha chain variable domain of TCR clone 343471 (TRAV12-1, TRAJ26)
CVVRRNYGQDFVF

SEQ ID NO: 686942 - protein, 15 aa, Homo sapiens
  CDR3 for beta chain variable domain of TCR clone 343471 (TRBV28, TRBJ2-1)
CASSIIAGGRSEQFF

SEQ ID NO: 686943 - protein, 12 aa, Homo sapiens
  CDR3 for alpha chain variable domain of TCR clone 343472 (TRAV30, TRAJ39)
CGGGNAGNMLTF

SEQ ID NO: 686944 - protein, 12 aa, Homo sapiens
  CDR3 for beta chain variable domain of TCR clone 343472 (TRBV10-3, TRBJ1-1)
CATMDRPPEAFF

SEQ ID NO: 686945 - protein, 16 aa, Homo sapiens
  CDR3 for alpha chain variable domain of TCR clone 343473 (TRAV12-3, TRAJ53)
CAMSPGSGGSNYKLTV

SEQ ID NO: 686946 - protein, 11 aa, Homo sapiens
  CDR3 for beta chain variable domain of TCR clone 343473 (TRBV29-1, TRBJ2-5)
CSEDRTGNQYF

SEQ ID NO: 686947 - protein, 16 aa, Homo sapiens
  CDR3 for alpha chain variable domain of TCR clone 343474 (TRAV1-2, TRAJ10)
CAVRGVLTGGGNKLTF

SEQ ID NO: 686948 - protein, 13 aa, Homo sapiens
  CDR3 for beta chain variable domain of TCR clone 343474 (TRBV20-1, TRBJ1-6)
CSATLGVGSPLHF

SEQ ID NO: 686949 - protein, 14 aa, Homo sapiens
  CDR3 for alpha chain variable domain of TCR clone 343475 (TRAV3, TRAJ8)
CAVSLNTGFQKLVF

SEQ ID NO: 686950 - protein, 17 aa, Homo sapiens
  CDR3 for beta chain variable domain of TCR clone 343475 (TRBV12-4, TRBJ1-1)
CASSLSGFRTMNTEAFF

SEQ ID NO: 686951 - protein, 15 aa, Homo sapiens
  CDR3 for alpha chain variable domain of TCR clone 343476 (TRAV29/DV5, TRAJ53)
CAASASGGSNYKLTF

SEQ ID NO: 686952 - protein, 15 aa, Homo sapiens
  CDR3 for beta chain variable domain of TCR clone 343476 (TRBV4-3, TRBJ1-2)
CASSRGQGRNYGYTF

SEQ ID NO: 686953 - protein, 17 aa, Homo sapiens
  CDR3 for alpha chain variable domain of TCR clone 343477 (TRAV3, TRAJ6)
CAVRDGPRARGSYRPTF

SEQ ID NO: 686954 - protein, 14 aa, Homo sapiens
  CDR3 for beta chain variable domain of TCR clone 343477 (TRBV7-2, TRBJ2-7)
CASSPKTSFYEQYF

SEQ ID NO: 686955 - protein, 14 aa, Homo sapiens
  CDR3 for alpha chain variable domain of TCR clone 343478 (TRAV3, TRAJ34)
CAVRDINNTDKLIF

SEQ ID NO: 686956 - protein, 13 aa, Homo sapiens
  CDR3 for beta chain variable domain of TCR clone 343478 (TRBV20-1, TRBJ1-1)
CSARGGGNTEAVF

SEQ ID NO: 686957 - protein, 23 aa, Homo sapiens
  CDR3 for alpha chain variable domain of TCR clone 343479 (TRAV26-1, TRAJ38)
CIADNAGNNHIQNPDPAVYQLSD

SEQ ID NO: 686958 - protein, 14 aa, Homo sapiens
  CDR3 for beta chain variable domain of TCR clone 343479 (TRBV7-3, TRBJ1-1)
CASSLKGGNTEAFF

SEQ ID NO: 686959 - protein, 12 aa, Homo sapiens
  CDR3 for alpha chain variable domain of TCR clone 343480 (TRAV27, TRAJ9)
CAGESGGFKTIF

SEQ ID NO: 686960 - protein, 14 aa, Homo sapiens
  CDR3 for beta chain variable domain of TCR clone 343480 (TRBV20-1, TRBJ1-1)
CSAQTRIGGTEAFF

SEQ ID NO: 686961 - protein, 14 aa, Homo sapiens
  CDR3 for alpha chain variable domain of TCR clone 343481 (TRAV35, TRAJ22)
CAGLRPGSARQLTF

SEQ ID NO: 686962 - protein, 12 aa, Homo sapiens
  CDR3 for beta chain variable domain of TCR clone 343481 (TRBV12-5, TRBJ2-5)
CASGQGVETQYF

SEQ ID NO: 686963 - protein, 12 aa, Homo sapiens
  CDR3 for alpha chain variable domain of TCR clone 343482 (TRAV8-3, TRAJ26)
CAGDNYGQNFVF

SEQ ID NO: 686964 - protein, 14 aa, Homo sapiens
  CDR3 for beta chain variable domain of TCR clone 343482 (TRBV19, TRBJ1-2)
CASSLQGQAYGYTF

SEQ ID NO: 686965 - protein, 13 aa, Homo sapiens
  CDR3 for alpha chain variable domain of TCR clone 343483 (TRAV2, TRAJ20)
CAVDGPSEYKLSF

SEQ ID NO: 686966 - protein, 16 aa, Homo sapiens
  CDR3 for beta chain variable domain of TCR clone 343483 (TRBV25-1, TRBJ2-7)
CASSELTGGGIYEQYF

SEQ ID NO: 686967 - protein, 12 aa, Homo sapiens
  CDR3 for alpha chain variable domain of TCR clone 343484 (TRAV12-3, TRAJ40)
CAMSSGTYKYIF

SEQ ID NO: 686968 - protein, 20 aa, Homo sapiens
  CDR3 for beta chain variable domain of TCR clone 343484 (TRBV7-8, TRBJ2-2)
CASIHLFPGPTIHITGELFF

SEQ ID NO: 686969 - protein, 18 aa, Homo sapiens
  CDR3 for alpha chain variable domain of TCR clone 343485 (TRAV29/DV5, TRAJ52)
CAAGFRGAGGTSNGKLTF

SEQ ID NO: 686970 - protein, 16 aa, Homo sapiens
  CDR3 for beta chain variable domain of TCR clone 343485 (TRBV7-3, TRBJ2-2)
CASSLKRGTLSGELFF

SEQ ID NO: 686971 - protein, 15 aa, Homo sapiens
  CDR3 for alpha chain variable domain of TCR clone 343486 (TRAV16, TRAJ50)
CALSGRETSYDKVIF

SEQ ID NO: 686972 - protein, 14 aa, Homo sapiens
  CDR3 for beta chain variable domain of TCR clone 343486 (TRBV18, TRBJ2-3)
CASSETSASDTQYF

SEQ ID NO: 686973 - protein, 18 aa, Homo sapiens
  CDR3 for alpha chain variable domain of TCR clone 343487 (TRAV21, TRAJ52)
CAVRPSPAGGTRYGKLTF

SEQ ID NO: 686974 - protein, 14 aa, Homo sapiens
  CDR3 for beta chain variable domain of TCR clone 343487 (TRBV7-8, TRBJ2-7)
CASSPGLADYEQYF

SEQ ID NO: 686975 - protein, 16 aa, Homo sapiens
  CDR3 for alpha chain variable domain of TCR clone 343488 (TRAV8-6, TRAJ4)
CAVSERISGGYNKLSF

SEQ ID NO: 686976 - protein, 19 aa, Homo sapiens
  CDR3 for beta chain variable domain of TCR clone 343488 (TRBV19, TRBJ1-5)
CASSISPRQTGGGNQPQHF

SEQ ID NO: 686977 - protein, 12 aa, Homo sapiens
  CDR3 for alpha chain variable domain of TCR clone 343489 (TRAV1-1, TRAJ39)
CAVPVVGNMLTF

SEQ ID NO: 686978 - protein, 14 aa, Homo sapiens
  CDR3 for beta chain variable domain of TCR clone 343489 (TRBV5-1, TRBJ2-7)
CASSRGESLYEQYF

SEQ ID NO: 686979 - protein, 17 aa, Homo sapiens
  CDR3 for alpha chain variable domain of TCR clone 343490 (TRAV3, TRAJ6)
CAVRDGPRAGGSYITTF

SEQ ID NO: 686980 - protein, 13 aa, Homo sapiens
  CDR3 for beta chain variable domain of TCR clone 343490 (TRBV12-5, TRBJ2-3)
CASGDRQSDTQYF

SEQ ID NO: 686981 - protein, 14 aa, Homo sapiens
  CDR3 for alpha chain variable domain of TCR clone 343491 (TRAV16, TRAJ39)
CAPSKNNAGNMLTF

SEQ ID NO: 686982 - protein, 16 aa, Homo sapiens
  CDR3 for beta chain variable domain of TCR clone 343491 (TRBV6-6, TRBJ2-1)
CASSYSFSGSYNEQFF

SEQ ID NO: 686983 - protein, 19 aa, Homo sapiens
  CDR3 for alpha chain variable domain of TCR clone 343492 (TRAV26-1, TRAJ52)
CIVRAHRNAGGTSYGQLTF

SEQ ID NO: 686984 - protein, 15 aa, Homo sapiens
  CDR3 for beta chain variable domain of TCR clone 343492 (TRBV12-4, TRBJ2-5)
CAGSPPTGLQETQYF

SEQ ID NO: 686985 - protein, 12 aa, Homo sapiens
  CDR3 for alpha chain variable domain of TCR clone 343493 (TRAV6, TRAJ40)
CARTSGTYKYIF

SEQ ID NO: 686986 - protein, 12 aa, Homo sapiens
  CDR3 for beta chain variable domain of TCR clone 343493 (TRBV27, TRBJ2-5)
CASSPTGETQSF

SEQ ID NO: 686987 - protein, 11 aa, Homo sapiens
  CDR3 for alpha chain variable domain of TCR clone 343494 (TRAV2, TRAJ13)
CASGGYQNVTF

SEQ ID NO: 686988 - protein, 16 aa, Homo sapiens
  CDR3 for beta chain variable domain of TCR clone 343494 (TRBV19, TRBJ2-1)
CASSKAGPSSYNEQFF

SEQ ID NO: 686989 - protein, 11 aa, Homo sapiens
  CDR3 for alpha chain variable domain of TCR clone 343495 (TRAV1-1, TRAJ23)
CAVRQGGKLIF

SEQ ID NO: 686990 - protein, 12 aa, Homo sapiens
  CDR3 for beta chain variable domain of TCR clone 343495 (TRBV28, TRBJ2-6)
CAIQAGANVLTF

SEQ ID NO: 686991 - protein, 11 aa, Homo sapiens
  CDR3 for alpha chain variable domain of TCR clone 343496 (TRAV1-2, TRAJ40)
CAVPGTYKYIF

SEQ ID NO: 686992 - protein, 15 aa, Homo sapiens
  CDR3 for beta chain variable domain of TCR clone 343496 (TRBV25-1, TRBJ1-4)
CARSPGDSTNEKLFF

SEQ ID NO: 686993 - protein, 16 aa, Homo sapiens
  CDR3 for alpha chain variable domain of TCR clone 343497 (TRAV21, TRAJ37)
CAVRPRGSSSTGKLLF

SEQ ID NO: 686994 - protein, 13 aa, Homo sapiens
  CDR3 for beta chain variable domain of TCR clone 343497 (TRBV7-9, TRBJ2-5)
CASLSPGQETQYF

SEQ ID NO: 686995 - protein, 14 aa, Homo sapiens
  CDR3 for alpha chain variable domain of TCR clone 343498 (TRAV25, TRAJ27)
CAGPGNTNAGKSTF

SEQ ID NO: 686996 - protein, 16 aa, Homo sapiens
  CDR3 for beta chain variable domain of TCR clone 343498 (TRBV27, TRBJ2-2)
CASSLRPGGAPGELFF

SEQ ID NO: 686997 - protein, 13 aa, Homo sapiens
  CDR3 for alpha chain variable domain of TCR clone 343499 (TRAV16, TRAJ22)
SAMLAGSARKLTF

SEQ ID NO: 686998 - protein, 18 aa, Homo sapiens
  CDR3 for beta chain variable domain of TCR clone 343499 (TRBV7-2, TRBJ2-3)
CASSLETSRGRKADTQYF

SEQ ID NO: 686999 - protein, 16 aa, Homo sapiens
  CDR3 for alpha chain variable domain of TCR clone 343500 (TRAV21, TRAJ52)
CAVSDAGVTSYGKLTF

SEQ ID NO: 687000 - protein, 13 aa, Homo sapiens
  CDR3 for beta chain variable domain of TCR clone 343500 (TRBV7-3, TRBJ2-5)
CASSFRGSQTQYF

SEQ ID NO: 687001 - protein, 14 aa, Homo sapiens
  CDR3 for alpha chain variable domain of TCR clone 343501 (TRAV27, TRAJ48)
CAGAPGFGNEKLTF

SEQ ID NO: 687002 - protein, 14 aa, Homo sapiens
  CDR3 for beta chain variable domain of TCR clone 343501 (TRBV4-1, TRBJ2-2)
CASSQAVNTGELFF

SEQ ID NO: 687003 - protein, 15 aa, Homo sapiens
  CDR3 for alpha chain variable domain of TCR clone 343502 (TRAV8-2, TRAJ40)
CVVLGTTSGTYKYIF

SEQ ID NO: 687004 - protein, 17 aa, Homo sapiens
  CDR3 for beta chain variable domain of TCR clone 343502 (TRBV4-1, TRBJ1-4)
CASSQEGPRGVEEKLFF

SEQ ID NO: 687005 - protein, 14 aa, Homo sapiens
  CDR3 for alpha chain variable domain of TCR clone 343503 (TRAV8-4, TRAJ38)
CARLNAGTNRKLIW

SEQ ID NO: 687006 - protein, 12 aa, Homo sapiens
  CDR3 for beta chain variable domain of TCR clone 343503 (TRBV6-1, TRBJ2-7)
CASSEPLYEQYF

SEQ ID NO: 687007 - protein, 12 aa, Homo sapiens
  CDR3 for alpha chain variable domain of TCR clone 343504 (TRAV24, TRAJ32)
CLYGGATNKIIF

SEQ ID NO: 687008 - protein, 14 aa, Homo sapiens
  CDR3 for beta chain variable domain of TCR clone 343504 (TRBV7-2, TRBJ1-5)
CASSTQGAGQPQHF

SEQ ID NO: 687009 - protein, 16 aa, Homo sapiens
  CDR3 for alpha chain variable domain of TCR clone 343505 (TRAV16, TRAJ57)
CAPYLVTQGGSEKLVF

SEQ ID NO: 687010 - protein, 17 aa, Homo sapiens
  CDR3 for beta chain variable domain of TCR clone 343505 (TRBV24-1, TRBJ2-4)
CATSDAEARGVRNIQYF

SEQ ID NO: 687011 - protein, 13 aa, Homo sapiens
  CDR3 for alpha chain variable domain of TCR clone 343506 (TRAV8-3, TRAJ28)
CALGAVGSYQLTF

SEQ ID NO: 687012 - protein, 13 aa, Homo sapiens
  CDR3 for beta chain variable domain of TCR clone 343506 (TRBV29-1, TRBJ2-1)
CSVEGGRVNEQFF

SEQ ID NO: 687013 - protein, 12 aa, Homo sapiens
  CDR3 for alpha chain variable domain of TCR clone 343507 (TRAV13-2, TRAJ8)
CAPWLGFQKLVF

SEQ ID NO: 687014 - protein, 17 aa, Homo sapiens
  CDR3 for beta chain variable domain of TCR clone 343507 (TRBV27, TRBJ2-7)
CASSISPTGLHPTEQYF

SEQ ID NO: 687015 - protein, 14 aa, Homo sapiens
  CDR3 for alpha chain variable domain of TCR clone 343508 (TRAV1-2, TRAJ8)
CAVREDTGFQKLVF

SEQ ID NO: 687016 - protein, 15 aa, Homo sapiens
  CDR3 for beta chain variable domain of TCR clone 343508 (TRBV28, TRBJ2-1)
CAGSIIAGGRSEQFF

SEQ ID NO: 687017 - protein, 16 aa, Homo sapiens
  CDR3 for alpha chain variable domain of TCR clone 343509 (TRAV21, TRAJ37)
CAVRTAGSSNTGKLIF

SEQ ID NO: 687018 - protein, 12 aa, Homo sapiens
  CDR3 for beta chain variable domain of TCR clone 343509 (TRBV7-8, TRBJ2-7)
CASSLGDREQYF

SEQ ID NO: 687019 - protein, 17 aa, Homo sapiens
  CDR3 for alpha chain variable domain of TCR clone 343510 (TRAV2, TRAJ36)
CAVEDRGNWGKQPLLWD

SEQ ID NO: 687020 - protein, 14 aa, Homo sapiens
  CDR3 for beta chain variable domain of TCR clone 343510 (TRBV7-9, TRBJ2-5)
CAGSLDTAQETQYF

SEQ ID NO: 687021 - protein, 13 aa, Homo sapiens
  CDR3 for alpha chain variable domain of TCR clone 343511 (TRAV13-1, TRAJ53)
QAASGGSNYKLTF

SEQ ID NO: 687022 - protein, 16 aa, Homo sapiens
  CDR3 for beta chain variable domain of TCR clone 343511 (TRBV28, TRBJ2-6)
CAGSNRRGSGANVLTF

SEQ ID NO: 687023 - protein, 12 aa, Homo sapiens
  CDR3 for alpha chain variable domain of TCR clone 343512 (TRAV1-2, TRAJ26)
CAVSPYGQNFVF

SEQ ID NO: 687024 - protein, 14 aa, Homo sapiens
  CDR3 for beta chain variable domain of TCR clone 343512 (TRBV15, TRBJ1-4)
CATSGQGRDEKLFF

SEQ ID NO: 687025 - protein, 11 aa, Homo sapiens
  CDR3 for alpha chain variable domain of TCR clone 343513 (TRAV21, TRAJ24)
CAVRTYDNWQL

SEQ ID NO: 687026 - protein, 12 aa, Homo sapiens
  CDR3 for beta chain variable domain of TCR clone 343513 (TRBV11-2, TRBJ2-7)
CASSPPADEQYF

SEQ ID NO: 687027 - protein, 14 aa, Homo sapiens
  CDR3 for alpha chain variable domain of TCR clone 343514 (TRAV12-2, TRAJ13)
CAMKKTGGYQKVTF

SEQ ID NO: 687028 - protein, 15 aa, Homo sapiens
  CDR3 for beta chain variable domain of TCR clone 343514 (TRBV27, TRBJ2-1)
CASSSGGGSSNEQFF

SEQ ID NO: 687029 - protein, 13 aa, Homo sapiens
  CDR3 for alpha chain variable domain of TCR clone 343515 (TRAV13-1, TRAJ39)
CSKYSNAGNMLTF

SEQ ID NO: 687030 - protein, 16 aa, Homo sapiens
  CDR3 for beta chain variable domain of TCR clone 343515 (TRBV20-1, TRBJ1-4)
CSAPGQGLFTNEKLFF

SEQ ID NO: 687031 - protein, 13 aa, Homo sapiens
  CDR3 for alpha chain variable domain of TCR clone 343516 (TRAV21, TRAJ20)
CAAGLRVDYKLSF

SEQ ID NO: 687032 - protein, 13 aa, Homo sapiens
  CDR3 for beta chain variable domain of TCR clone 343516 (TRBV6-1, TRBJ1-1)
CASSRQGNTAAFF

SEQ ID NO: 687033 - protein, 17 aa, Homo sapiens
  CDR3 for alpha chain variable domain of TCR clone 343517 (TRAV3, TRAJ6)
CAVRDCARAGGSYIPTF

SEQ ID NO: 687034 - protein, 14 aa, Homo sapiens
  CDR3 for beta chain variable domain of TCR clone 343517 (TRBV7-2, TRBJ2-7)
CASSPKTSFYEQYF

SEQ ID NO: 687035 - protein, 19 aa, Homo sapiens
  CDR3 for alpha chain variable domain of TCR clone 343518 (TRAV13-1, TRAJ52)
CAASPYQNAGGTSYGKLTF

SEQ ID NO: 687036 - protein, 16 aa, Homo sapiens
  CDR3 for beta chain variable domain of TCR clone 343518 (TRBV4-1, TRBJ2-5)
CASSSGLAGVLGTQYF

SEQ ID NO: 687037 - protein, 15 aa, Homo sapiens
  CDR3 for alpha chain variable domain of TCR clone 343519 (TRAV3, TRAJ3)
CAVRDISSSASKIIF

SEQ ID NO: 687038 - protein, 14 aa, Homo sapiens
  CDR3 for beta chain variable domain of TCR clone 343519 (TRBV5-1, TRBJ2-7)
CASSRGESLYEQYF

SEQ ID NO: 687039 - protein, 14 aa, Homo sapiens
  CDR3 for alpha chain variable domain of TCR clone 343520 (TRAV3, TRAJ21)
CAVESQANFNKFYF

SEQ ID NO: 687040 - protein, 12 aa, Homo sapiens
  CDR3 for beta chain variable domain of TCR clone 343520 (TRBV6-3, TRBJ2-7)
CASSITPYEQYF

SEQ ID NO: 687041 - protein, 16 aa, Homo sapiens
  CDR3 for alpha chain variable domain of TCR clone 343521 (TRAV27, TRAJ48)
TAAQPGDTGLYLPLTF

SEQ ID NO: 687042 - protein, 12 aa, Homo sapiens
  CDR3 for beta chain variable domain of TCR clone 343521 (TRBV7-9, TRBJ2-7)
CATRTDAYEQYF

SEQ ID NO: 687043 - protein, 16 aa, Homo sapiens
  CDR3 for alpha chain variable domain of TCR clone 343522 (TRAV20, TRAJ26)
CAVQHRRDNYGQNFVF

SEQ ID NO: 687044 - protein, 15 aa, Homo sapiens
  CDR3 for beta chain variable domain of TCR clone 343522 (TRBV7-9, TRBJ2-1)
CASSLGWGRANEQFF

SEQ ID NO: 687045 - protein, 14 aa, Homo sapiens
  CDR3 for alpha chain variable domain of TCR clone 343523 (TRAV1-2, TRAJ16)
CAVNRFSDGQKLLF

SEQ ID NO: 687046 - protein, 16 aa, Homo sapiens
  CDR3 for beta chain variable domain of TCR clone 343523 (TRBV11-3, TRBJ1-2)
CASSLETGGADYGYTF

SEQ ID NO: 687047 - protein, 13 aa, Homo sapiens
  CDR3 for alpha chain variable domain of TCR clone 343524 (TRAV21, TRAJ27)
CAARPGNAGKSTF

SEQ ID NO: 687048 - protein, 16 aa, Homo sapiens
  CDR3 for beta chain variable domain of TCR clone 343524 (TRBV7-6, TRBJ2-3)
CIAVPAAWTVTDTQYF

SEQ ID NO: 687049 - protein, 14 aa, Homo sapiens
  CDR3 for alpha chain variable domain of TCR clone 343525 (TRAV17, TRAJ57)
CATDPQGGSEKLVF

SEQ ID NO: 687050 - protein, 15 aa, Homo sapiens
  CDR3 for beta chain variable domain of TCR clone 343525 (TRBV7-2, TRBJ1-1)
CASSFAGDRDTEAFS

SEQ ID NO: 687051 - protein, 11 aa, Homo sapiens
  CDR3 for alpha chain variable domain of TCR clone 343526 (TRAV22, TRAJ30)
CSGNRDDKIIF

SEQ ID NO: 687052 - protein, 13 aa, Homo sapiens
  CDR3 for beta chain variable domain of TCR clone 343526 (TRBV20-1, TRBJ1-1)
CSASKRGLTEAFF

SEQ ID NO: 687053 - protein, 14 aa, Homo sapiens
  CDR3 for alpha chain variable domain of TCR clone 343527 (TRAV17, TRAJ37)
CATDVSSNTGKLIF

SEQ ID NO: 687054 - protein, 13 aa, Homo sapiens
  CDR3 for beta chain variable domain of TCR clone 343527 (TRBV11-2, TRBJ2-1)
CASSLDLVNEQFF

SEQ ID NO: 687055 - protein, 14 aa, Homo sapiens
  CDR3 for alpha chain variable domain of TCR clone 343528 (TRAV13-1, TRAJ10)
CAAKEPGGGNKRTF

SEQ ID NO: 687056 - protein, 14 aa, Homo sapiens
  CDR3 for beta chain variable domain of TCR clone 343528 (TRBV6-6, TRBJ2-7)
CASSDSGAGYEQYF

SEQ ID NO: 687057 - protein, 12 aa, Homo sapiens
  CDR3 for alpha chain variable domain of TCR clone 343529 (TRAV1-2, TRAJ33)
YAALDSNYQLIW

SEQ ID NO: 687058 - protein, 17 aa, Homo sapiens
  CDR3 for beta chain variable domain of TCR clone 343529 (TRBV20-1, TRBJ2-1)
CSASSSGLAGSYNEQFF

SEQ ID NO: 687059 - protein, 10 aa, Homo sapiens
  CDR3 for alpha chain variable domain of TCR clone 343530 (TRAV1-2, TRAJ23)
CAGQGGKLIF

SEQ ID NO: 687060 - protein, 13 aa, Homo sapiens
  CDR3 for beta chain variable domain of TCR clone 343530 (TRBV7-7, TRBJ2-3)
CASSLSRADTRYF

SEQ ID NO: 687061 - protein, 14 aa, Homo sapiens
  CDR3 for alpha chain variable domain of TCR clone 343531 (TRAV12-2, TRAJ44)
CAVNPAGTASKLTF

SEQ ID NO: 687062 - protein, 14 aa, Homo sapiens
  CDR3 for beta chain variable domain of TCR clone 343531 (TRBV13, TRBJ2-5)
CASSLGRGQETQYF

SEQ ID NO: 687063 - protein, 13 aa, Homo sapiens
  CDR3 for alpha chain variable domain of TCR clone 343532 (TRAV35, TRAJ43)
CAGYPYNNNDMRF

SEQ ID NO: 687064 - protein, 14 aa, Homo sapiens
  CDR3 for beta chain variable domain of TCR clone 343532 (TRBV12-4, TRBJ1-1)
CASRPGQGRTEAFF

SEQ ID NO: 687065 - protein, 13 aa, Homo sapiens
  CDR3 for alpha chain variable domain of TCR clone 343533 (TRAV3, TRAJ21)
CAVREPDFNKFYF

SEQ ID NO: 687066 - protein, 14 aa, Homo sapiens
  CDR3 for beta chain variable domain of TCR clone 343533 (TRBV7-9, TRBJ2-3)
CASSLEQGTNTQYF

SEQ ID NO: 687067 - protein, 12 aa, Homo sapiens
  CDR3 for alpha chain variable domain of TCR clone 343534 (TRAV21, TRAJ13)
PGPSGGYQKVTF

SEQ ID NO: 687068 - protein, 13 aa, Homo sapiens
  CDR3 for beta chain variable domain of TCR clone 343534 (TRBV7-6, TRBJ2-3)
CASSLRSDNTQYF

SEQ ID NO: 687069 - protein, 13 aa, Homo sapiens
  CDR3 for alpha chain variable domain of TCR clone 343535 (TRAV21, TRAJ27)
CAARPGNAGISTF

SEQ ID NO: 687070 - protein, 13 aa, Homo sapiens
  CDR3 for beta chain variable domain of TCR clone 343535 (TRBV18, TRBJ2-7)
CASQSGGGYEQYF

SEQ ID NO: 687071 - protein, 11 aa, Homo sapiens
  CDR3 for alpha chain variable domain of TCR clone 343536 (TRAV21, TRAJ34)
CAVTNTDKLIF

SEQ ID NO: 687072 - protein, 16 aa, Homo sapiens
  CDR3 for beta chain variable domain of TCR clone 343536 (TRBV28, TRBJ2-2)
CASSLEGGSNTGELFF

SEQ ID NO: 687073 - protein, 12 aa, Homo sapiens
  CDR3 for alpha chain variable domain of TCR clone 343537 (TRAV1-2, TRAJ33)
CAALDSNYQLIW

SEQ ID NO: 687074 - protein, 16 aa, Homo sapiens
  CDR3 for beta chain variable domain of TCR clone 343537 (TRBV3-1, TRBJ2-7)
CASSQGATGVAYEQYF

SEQ ID NO: 687075 - protein, 15 aa, Homo sapiens
  CDR3 for alpha chain variable domain of TCR clone 343538 (TRAV38-1, TRAJ37)
CAFIFGSGNTGKLIF

SEQ ID NO: 687076 - protein, 15 aa, Homo sapiens
  CDR3 for beta chain variable domain of TCR clone 343538 (TRBV4-1, TRBJ1-4)
CASSDTGGTNEKLFF

SEQ ID NO: 687077 - protein, 11 aa, Homo sapiens
  CDR3 for alpha chain variable domain of TCR clone 343539 (TRAV13-1, TRAJ15)
CAATPGTALIF

SEQ ID NO: 687078 - protein, 13 aa, Homo sapiens
  CDR3 for beta chain variable domain of TCR clone 343539 (TRBV7-2, TRBJ2-1)
CASSLGVCNEQFF

SEQ ID NO: 687079 - protein, 15 aa, Homo sapiens
  CDR3 for alpha chain variable domain of TCR clone 343540 (TRAV2, TRAJ15)
CAVEDRGQAGTALIF

SEQ ID NO: 687080 - protein, 13 aa, Homo sapiens
  CDR3 for beta chain variable domain of TCR clone 343540 (TRBV13, TRBJ2-1)
CASTPGSYNEQFF

SEQ ID NO: 687081 - protein, 13 aa, Homo sapiens
  CDR3 for alpha chain variable domain of TCR clone 343541 (TRAV27, TRAJ56)
CAGLTGANSKLTF

SEQ ID NO: 687082 - protein, 16 aa, Homo sapiens
  CDR3 for beta chain variable domain of TCR clone 343541 (TRBV12-4, TRBJ2-7)
CASSPEGQGSSYEQYF

SEQ ID NO: 687083 - protein, 12 aa, Homo sapiens
  CDR3 for alpha chain variable domain of TCR clone 343542 (TRAV1-1, TRAJ8)
CAGGTGFQKLVF

SEQ ID NO: 687084 - protein, 18 aa, Homo sapiens
  CDR3 for beta chain variable domain of TCR clone 343542 (TRBV7-8, TRBJ2-1)
CASSPAEGLAGGLNEQFF

SEQ ID NO: 687085 - protein, 16 aa, Homo sapiens
  CDR3 for alpha chain variable domain of TCR clone 343543 (TRAV3, TRAJ21)
CAVRDIERGNFNKFYF

SEQ ID NO: 687086 - protein, 13 aa, Homo sapiens
  CDR3 for beta chain variable domain of TCR clone 343543 (TRBV9, TRBJ2-1)
CASSVGQGGEQFV

SEQ ID NO: 687087 - protein, 14 aa, Homo sapiens
  CDR3 for alpha chain variable domain of TCR clone 343544 (TRAV12-2, TRAJ13)
CSVKKTGGYQKGTF

SEQ ID NO: 687088 - protein, 15 aa, Homo sapiens
  CDR3 for beta chain variable domain of TCR clone 343544 (TRBV27, TRBJ2-1)
CASSNGGGSSNEQFF

SEQ ID NO: 687089 - protein, 14 aa, Homo sapiens
  CDR3 for alpha chain variable domain of TCR clone 343545 (TRAV35, TRAJ33)
CAGSSQDSNYQLIW

SEQ ID NO: 687090 - protein, 15 aa, Homo sapiens
  CDR3 for beta chain variable domain of TCR clone 343545 (TRBV20-1, TRBJ2-7)
CSAESGTSGAYKQYF

SEQ ID NO: 687091 - protein, 17 aa, Homo sapiens
  CDR3 for alpha chain variable domain of TCR clone 343546 (TRAV13-1, TRAJ28)
CAASPPYSGAGSYQLTF

SEQ ID NO: 687092 - protein, 15 aa, Homo sapiens
  CDR3 for beta chain variable domain of TCR clone 343546 (TRBV29-1, TRBJ2-7)
CSAEFFDRGSYEQYF

SEQ ID NO: 687093 - protein, 16 aa, Homo sapiens
  CDR3 for alpha chain variable domain of TCR clone 343547 (TRAV38-1, TRAJ56)
CAFMKRQTGANSKLTF

SEQ ID NO: 687094 - protein, 13 aa, Homo sapiens
  CDR3 for beta chain variable domain of TCR clone 343547 (TRBV3-1, TRBJ2-2)
CASLARGSGELFF

SEQ ID NO: 687095 - protein, 12 aa, Homo sapiens
  CDR3 for alpha chain variable domain of TCR clone 343548 (TRAV13-2, TRAJ39)
CAENNAGNMLTF

SEQ ID NO: 687096 - protein, 13 aa, Homo sapiens
  CDR3 for beta chain variable domain of TCR clone 343548 (TRBV7-6, TRBJ1-1)
CASSLELGTEAFF

SEQ ID NO: 687097 - protein, 17 aa, Homo sapiens
  CDR3 for alpha chain variable domain of TCR clone 343549 (TRAV13-1, TRAJ52)
CAASSGAGGTSYGKLTF

SEQ ID NO: 687098 - protein, 15 aa, Homo sapiens
  CDR3 for beta chain variable domain of TCR clone 343549 (TRBV28, TRBJ2-5)
CASSPPWSYQETQYF

SEQ ID NO: 687099 - protein, 14 aa, Homo sapiens
  CDR3 for alpha chain variable domain of TCR clone 343550 (TRAV26-1, TRAJ22)
CIVRVYGSARQLTF

SEQ ID NO: 687100 - protein, 16 aa, Homo sapiens
  CDR3 for beta chain variable domain of TCR clone 343550 (TRBV7-3, TRBJ2-3)
CQQPRWLAGFGDTQYF

SEQ ID NO: 687101 - protein, 13 aa, Homo sapiens
  CDR3 for alpha chain variable domain of TCR clone 343551 (TRAV17, TRAJ5)
CALRGTGRRALTF

SEQ ID NO: 687102 - protein, 11 aa, Homo sapiens
  CDR3 for beta chain variable domain of TCR clone 343551 (TRBV29-1, TRBJ2-5)
CSEDRTGTQYF

SEQ ID NO: 687103 - protein, 15 aa, Homo sapiens
  CDR3 for alpha chain variable domain of TCR clone 343552 (TRAV3, TRAJ20)
CAVIDIKLSDYKLSF

SEQ ID NO: 687104 - protein, 18 aa, Homo sapiens
  CDR3 for beta chain variable domain of TCR clone 343552 (TRBV20-1, TRBJ2-5)
CSQTGDSGRLGGKETQYF

SEQ ID NO: 687105 - protein, 14 aa, Homo sapiens
  CDR3 for alpha chain variable domain of TCR clone 343553 (TRAV12-3, TRAJ58)
CAMSTETSGSRLTF

SEQ ID NO: 687106 - protein, 13 aa, Homo sapiens
  CDR3 for beta chain variable domain of TCR clone 343553 (TRBV11-3, TRBJ2-3)
CASSWGRTDTQYF

SEQ ID NO: 687107 - protein, 22 aa, Homo sapiens
  CDR3 for alpha chain variable domain of TCR clone 343554 (TRAV3, TRAJ38)
CAVRDCLNAGNNHIQNPDPAVY

SEQ ID NO: 687108 - protein, 14 aa, Homo sapiens
  CDR3 for beta chain variable domain of TCR clone 343554 (TRBV5-5, TRBJ1-5)
CASSAQGVDQPQHF

SEQ ID NO: 687109 - protein, 16 aa, Homo sapiens
  CDR3 for alpha chain variable domain of TCR clone 343555 (TRAV3, TRAJ37)
CAVRGKGSGNTGKLSF

SEQ ID NO: 687110 - protein, 16 aa, Homo sapiens
  CDR3 for beta chain variable domain of TCR clone 343555 (TRBV28, TRBJ1-5)
CASSFRGGYSNQPQHF

SEQ ID NO: 687111 - protein, 11 aa, Homo sapiens
  CDR3 for alpha chain variable domain of TCR clone 343556 (TRAV12-3, TRAJ16)
LTGADGQKLLF

SEQ ID NO: 687112 - protein, 13 aa, Homo sapiens
  CDR3 for beta chain variable domain of TCR clone 343556 (TRBV12-4, TRBJ1-4)
CASAMGHNEKLFF

SEQ ID NO: 687113 - protein, 15 aa, Homo sapiens
  CDR3 for alpha chain variable domain of TCR clone 343557 (TRAV20, TRAJ43)
CAVQAGKSSNNDMRF

SEQ ID NO: 687114 - protein, 13 aa, Homo sapiens
  CDR3 for beta chain variable domain of TCR clone 343557 (TRBV2, TRBJ1-1)
CASRWTVNTEAFF

SEQ ID NO: 687115 - protein, 13 aa, Homo sapiens
  CDR3 for alpha chain variable domain of TCR clone 343558 (TRAV25, TRAJ30)
CAGRVDRDDKIIF

SEQ ID NO: 687116 - protein, 17 aa, Homo sapiens
  CDR3 for beta chain variable domain of TCR clone 343558 (TRBV7-9, TRBJ2-6)
CASSFGAGYSGATVLTF

SEQ ID NO: 687117 - protein, 16 aa, Homo sapiens
  CDR3 for alpha chain variable domain of TCR clone 343559 (TRAV26-1, TRAJ38)
CIDRVELGGNNRKLIW

SEQ ID NO: 687118 - protein, 14 aa, Homo sapiens
  CDR3 for beta chain variable domain of TCR clone 343559 (TRBV5-1, TRBJ2-3)
CASSPGLAADTQYF

SEQ ID NO: 687119 - protein, 20 aa, Homo sapiens
  CDR3 for alpha chain variable domain of TCR clone 343560 (TRAV1-1, TRAJ4)
CLLLLRCEGFLSGGYNKLIF

SEQ ID NO: 687120 - protein, 12 aa, Homo sapiens
  CDR3 for beta chain variable domain of TCR clone 343560 (TRBV2, TRBJ2-1)
CAYGPPGNEQFF

SEQ ID NO: 687121 - protein, 13 aa, Homo sapiens
  CDR3 for alpha chain variable domain of TCR clone 343561 (TRAV8-6, TRAJ21)
CAVSPSSLNNFYF

SEQ ID NO: 687122 - protein, 14 aa, Homo sapiens
  CDR3 for beta chain variable domain of TCR clone 343561 (TRBV7-9, TRBJ2-5)
CASSLDTAKETQYF

SEQ ID NO: 687123 - protein, 13 aa, Homo sapiens
  CDR3 for alpha chain variable domain of TCR clone 343562 (TRAV3, TRAJ30)
CAVRDRGDDKIIF

SEQ ID NO: 687124 - protein, 16 aa, Homo sapiens
  CDR3 for beta chain variable domain of TCR clone 343562 (TRBV7-3, TRBJ2-2)
CASSVKRGSLSGELFF

SEQ ID NO: 687125 - protein, 14 aa, Homo sapiens
  CDR3 for alpha chain variable domain of TCR clone 343563 (TRAV1-2, TRAJ8)
CAVREDTGFQKLVF

SEQ ID NO: 687126 - protein, 14 aa, Homo sapiens
  CDR3 for beta chain variable domain of TCR clone 343563 (TRBV15, TRBJ2-5)
CATSGDRGRETQYF

SEQ ID NO: 687127 - protein, 16 aa, Homo sapiens
  CDR3 for alpha chain variable domain of TCR clone 343564 (TRAV3, TRAJ37)
CAVRGKGSGNTGKLIF

SEQ ID NO: 687128 - protein, 13 aa, Homo sapiens
  CDR3 for beta chain variable domain of TCR clone 343564 (TRBV14, TRBJ2-7)
CASSQDRRYDQYF

SEQ ID NO: 687129 - protein, 13 aa, Homo sapiens
  CDR3 for alpha chain variable domain of TCR clone 343565 (TRAV21, TRAJ15)
CAEANQAGTALIF

SEQ ID NO: 687130 - protein, 14 aa, Homo sapiens
  CDR3 for beta chain variable domain of TCR clone 343565 (TRBV27, TRBJ2-2)
CASSLGAATGELFF

SEQ ID NO: 687131 - protein, 14 aa, Homo sapiens
  CDR3 for alpha chain variable domain of TCR clone 343566 (TRAV27, TRAJ17)
CRSTIRAGGNKLTF

SEQ ID NO: 687132 - protein, 16 aa, Homo sapiens
  CDR3 for beta chain variable domain of TCR clone 343566 (TRBV5-7, TRBJ2-5)
CASTLAPAGGRETQYF

SEQ ID NO: 687133 - protein, 14 aa, Homo sapiens
  CDR3 for alpha chain variable domain of TCR clone 343567 (TRAV13-1, TRAJ35)
CAASKGGFGNVLHC

SEQ ID NO: 687134 - protein, 13 aa, Homo sapiens
  CDR3 for beta chain variable domain of TCR clone 343567 (TRBV7-3, TRBJ1-1)
CAIIQDWGAEAFF

SEQ ID NO: 687135 - protein, 14 aa, Homo sapiens
  CDR3 for alpha chain variable domain of TCR clone 343568 (TRAV14/DV4, TRAJ23)
CAMRYYNQGGKLSF

SEQ ID NO: 687136 - protein, 17 aa, Homo sapiens
  CDR3 for beta chain variable domain of TCR clone 343568 (TRBV7-2, TRBJ2-2)
CASSPRGAGEGTGELFF

SEQ ID NO: 687137 - protein, 11 aa, Homo sapiens
  CDR3 for alpha chain variable domain of TCR clone 343569 (TRAV1-1, TRAJ30)
CAQNRDDKIIF

SEQ ID NO: 687138 - protein, 15 aa, Homo sapiens
  CDR3 for beta chain variable domain of TCR clone 343569 (TRBV7-2, TRBJ2-1)
CASSSGLAGGNEQFF

SEQ ID NO: 687139 - protein, 15 aa, Homo sapiens
  CDR3 for alpha chain variable domain of TCR clone 343570 (TRAV8-3, TRAJ20)
CCGFPRIANDYKLSF

SEQ ID NO: 687140 - protein, 13 aa, Homo sapiens
  CDR3 for beta chain variable domain of TCR clone 343570 (TRBV7-9, TRBJ1-2)
CASSLKQNYGYTF

SEQ ID NO: 687141 - protein, 13 aa, Homo sapiens
  CDR3 for alpha chain variable domain of TCR clone 343571 (TRAV22, TRAJ29)
CAVGGSGKTPLVF

SEQ ID NO: 687142 - protein, 18 aa, Homo sapiens
  CDR3 for beta chain variable domain of TCR clone 343571 (TRBV10-3, TRBJ2-3)
CAISESRVGPMRGDTQYF

SEQ ID NO: 687143 - protein, 11 aa, Homo sapiens
  CDR3 for alpha chain variable domain of TCR clone 343572 (TRAV12-2, TRAJ49)
CAVNTGNQFYF

SEQ ID NO: 687144 - protein, 12 aa, Homo sapiens
  CDR3 for beta chain variable domain of TCR clone 343572 (TRBV2, TRBJ2-3)
RASSGRFDTQYF

SEQ ID NO: 687145 - protein, 23 aa, Homo sapiens
  CDR3 for alpha chain variable domain of TCR clone 343573 (TRAV8-3, TRAJ38)
CAVGASNAGNNHIQNPDPAVYQL

SEQ ID NO: 687146 - protein, 15 aa, Homo sapiens
  CDR3 for beta chain variable domain of TCR clone 343573 (TRBV9, TRBJ2-1)
CASSLAGSSYNEQFF

SEQ ID NO: 687147 - protein, 15 aa, Homo sapiens
  CDR3 for alpha chain variable domain of TCR clone 343574 (TRAV13-1, TRAJ52)
CAATSPRTSYGKLTF

SEQ ID NO: 687148 - protein, 15 aa, Homo sapiens
  CDR3 for beta chain variable domain of TCR clone 343574 (TRBV7-9, TRBJ1-5)
CVSSQGHQPNQPQHF

SEQ ID NO: 687149 - protein, 12 aa, Homo sapiens
  CDR3 for alpha chain variable domain of TCR clone 343575 (TRAV12-3, TRAJ40)
CAMSSGTYKYIF

SEQ ID NO: 687150 - protein, 15 aa, Homo sapiens
  CDR3 for beta chain variable domain of TCR clone 343575 (TRBV11-2, TRBJ1-6)
CASSLDPWAVSPLHS

SEQ ID NO: 687151 - protein, 12 aa, Homo sapiens
  CDR3 for alpha chain variable domain of TCR clone 343576 (TRAV17, TRAJ20)
CATQANDYKLSF

SEQ ID NO: 687152 - protein, 12 aa, Homo sapiens
  CDR3 for beta chain variable domain of TCR clone 343576 (TRBV6-1, TRBJ1-1)
CASNSPTAEDFF

SEQ ID NO: 687153 - protein, 13 aa, Homo sapiens
  CDR3 for alpha chain variable domain of TCR clone 343577 (TRAV12-3, TRAJ13)
CAMSSGGYQKVTF

SEQ ID NO: 687154 - protein, 14 aa, Homo sapiens
  CDR3 for beta chain variable domain of TCR clone 343577 (TRBV2, TRBJ2-1)
CASRTGRSYNEQFF

SEQ ID NO: 687155 - protein, 18 aa, Homo sapiens
  CDR3 for alpha chain variable domain of TCR clone 343578 (TRAV12-3, TRAJ52)
CAMSRTNAGGTSYGKLTF

SEQ ID NO: 687156 - protein, 15 aa, Homo sapiens
  CDR3 for beta chain variable domain of TCR clone 343578 (TRBV7-2, TRBJ2-1)
CASRKTGSSYNEQFF

SEQ ID NO: 687157 - protein, 14 aa, Homo sapiens
  CDR3 for alpha chain variable domain of TCR clone 343579 (TRAV12-1, TRAJ26)
CVVKGSNYGQNFVF

SEQ ID NO: 687158 - protein, 17 aa, Homo sapiens
  CDR3 for beta chain variable domain of TCR clone 343579 (TRBV11-2, TRBJ2-6)
CAISQRDIFSGANVLTF

SEQ ID NO: 687159 - protein, 12 aa, Homo sapiens
  CDR3 for alpha chain variable domain of TCR clone 343580 (TRAV17, TRAJ48)
CALNFGNEKLTF

SEQ ID NO: 687160 - protein, 13 aa, Homo sapiens
  CDR3 for beta chain variable domain of TCR clone 343580 (TRBV3-1, TRBJ2-5)
CASSPPAAETQYF

SEQ ID NO: 687161 - protein, 16 aa, Homo sapiens
  CDR3 for alpha chain variable domain of TCR clone 343581 (TRAV8-3, TRAJ44)
CAVCASNTGTASRLTF

SEQ ID NO: 687162 - protein, 15 aa, Homo sapiens
  CDR3 for beta chain variable domain of TCR clone 343581 (TRBV27, TRBJ1-5)
CASTFNRGSNQPQHF

SEQ ID NO: 687163 - protein, 19 aa, Homo sapiens
  CDR3 for alpha chain variable domain of TCR clone 343582 (TRAV38-2/DV8, TRAJ42)
FAYRSAGMNYGGSQGNLIF

SEQ ID NO: 687164 - protein, 14 aa, Homo sapiens
  CDR3 for beta chain variable domain of TCR clone 343582 (TRBV7-2, TRBJ1-2)
CASSQTGSTYGYTF

SEQ ID NO: 687165 - protein, 11 aa, Homo sapiens
  CDR3 for alpha chain variable domain of TCR clone 343583 (TRAV1-2, TRAJ20)
CAVANDYKLSF

SEQ ID NO: 687166 - protein, 18 aa, Homo sapiens
  CDR3 for beta chain variable domain of TCR clone 343583 (TRBV20-1, TRBJ2-6)
CSAETTPTHGSGANVLIC

SEQ ID NO: 687167 - protein, 18 aa, Homo sapiens
  CDR3 for alpha chain variable domain of TCR clone 343584 (TRAV13-1, TRAJ52)
CAAKNPNAGGTSYGKMTF

SEQ ID NO: 687168 - protein, 13 aa, Homo sapiens
  CDR3 for beta chain variable domain of TCR clone 343584 (TRBV29-1, TRBJ2-1)
CSVEGGRVNEQFF

SEQ ID NO: 687169 - protein, 13 aa, Homo sapiens
  CDR3 for alpha chain variable domain of TCR clone 343585 (TRAV12-3, TRAJ46)
CAVKKSSGDKLTF

SEQ ID NO: 687170 - protein, 13 aa, Homo sapiens
  CDR3 for beta chain variable domain of TCR clone 343585 (TRBV6-1, TRBJ2-1)
CASSHDRSNEQFF

SEQ ID NO: 687171 - protein, 11 aa, Homo sapiens
  CDR3 for alpha chain variable domain of TCR clone 343586 (TRAV12-1, TRAJ8)
RVLIGFQKLVF

SEQ ID NO: 687172 - protein, 14 aa, Homo sapiens
  CDR3 for beta chain variable domain of TCR clone 343586 (TRBV19, TRBJ2-1)
CASGKSTQYNEQFF

SEQ ID NO: 687173 - protein, 15 aa, Homo sapiens
  CDR3 for alpha chain variable domain of TCR clone 343587 (TRAV12-2, TRAJ53)
CAVNGGGGSNYKLTF

SEQ ID NO: 687174 - protein, 14 aa, Homo sapiens
  CDR3 for beta chain variable domain of TCR clone 343587 (TRBV7-6, TRBJ2-1)
CASSLGGGADEQFF

SEQ ID NO: 687175 - protein, 14 aa, Homo sapiens
  CDR3 for alpha chain variable domain of TCR clone 343588 (TRAV1-2, TRAJ8)
CAVREDTGFQKLVF

SEQ ID NO: 687176 - protein, 16 aa, Homo sapiens
  CDR3 for beta chain variable domain of TCR clone 343588 (TRBV12-4, TRBJ1-5)
CASNRPVGGSNQPQHF

SEQ ID NO: 687177 - protein, 19 aa, Homo sapiens
  CDR3 for alpha chain variable domain of TCR clone 343589 (TRAV26-1, TRAJ22)
CCVLLHRQSIVGSARQLTF

SEQ ID NO: 687178 - protein, 13 aa, Homo sapiens
  CDR3 for beta chain variable domain of TCR clone 343589 (TRBV7-9, TRBJ1-2)
CASSLKQNYGYTF

SEQ ID NO: 687179 - protein, 13 aa, Homo sapiens
  CDR3 for alpha chain variable domain of TCR clone 343590 (TRAV20, TRAJ31)
CAVQAWNNARLMF

SEQ ID NO: 687180 - protein, 17 aa, Homo sapiens
  CDR3 for beta chain variable domain of TCR clone 343590 (TRBV7-3, TRBJ2-3)
CASSLMKGMRGADTQYF

SEQ ID NO: 687181 - protein, 13 aa, Homo sapiens
  CDR3 for alpha chain variable domain of TCR clone 343591 (TRAV17, TRAJ4)
CATKSGGYNKLIF

SEQ ID NO: 687182 - protein, 11 aa, Homo sapiens
  CDR3 for beta chain variable domain of TCR clone 343591 (TRBV10-3, TRBJ2-7)
CAISEGLEQYF

SEQ ID NO: 687183 - protein, 12 aa, Homo sapiens
  CDR3 for alpha chain variable domain of TCR clone 343592 (TRAV16, TRAJ8)
CAPLGVFQKLVF

SEQ ID NO: 687184 - protein, 15 aa, Homo sapiens
  CDR3 for beta chain variable domain of TCR clone 343592 (TRBV6-1, TRBJ1-5)
CASIPDRLGNQPQHF

SEQ ID NO: 687185 - protein, 11 aa, Homo sapiens
  CDR3 for alpha chain variable domain of TCR clone 343593 (TRAV36/DV7, TRAJ43)
CAVERVNDMRF

SEQ ID NO: 687186 - protein, 14 aa, Homo sapiens
  CDR3 for beta chain variable domain of TCR clone 343593 (TRBV27, TRBJ2-2)
CASSLGAATGELFF

SEQ ID NO: 687187 - protein, 12 aa, Homo sapiens
  CDR3 for alpha chain variable domain of TCR clone 343594 (TRAV12-3, TRAJ17)
CAMTLTCNNLTF

SEQ ID NO: 687188 - protein, 15 aa, Homo sapiens
  CDR3 for beta chain variable domain of TCR clone 343594 (TRBV20-1, TRBJ2-7)
CSARDRVYGMDEQYF

SEQ ID NO: 687189 - protein, 15 aa, Homo sapiens
  CDR3 for alpha chain variable domain of TCR clone 343595 (TRAV17, TRAJ16)
CATALRFSDGQKLPV

SEQ ID NO: 687190 - protein, 15 aa, Homo sapiens
  CDR3 for beta chain variable domain of TCR clone 343595 (TRBV20-1, TRBJ1-1)
CSASRGVTGNTEAFF

SEQ ID NO: 687191 - protein, 12 aa, Homo sapiens
  CDR3 for alpha chain variable domain of TCR clone 343596 (TRAV12-1, TRAJ30)
CVVNPRDDKIIF

SEQ ID NO: 687192 - protein, 18 aa, Homo sapiens
  CDR3 for beta chain variable domain of TCR clone 343596 (TRBV5-1, TRBJ2-7)
CASSFAGFGGMSSYEQYF

SEQ ID NO: 687193 - protein, 13 aa, Homo sapiens
  CDR3 for alpha chain variable domain of TCR clone 343597 (TRAV3, TRAJ21)
CAVRETDFNKFYF

SEQ ID NO: 687194 - protein, 14 aa, Homo sapiens
  CDR3 for beta chain variable domain of TCR clone 343597 (TRBV4-1, TRBJ2-2)
CASSQAVNTGELFF

SEQ ID NO: 687195 - protein, 14 aa, Homo sapiens
  CDR3 for alpha chain variable domain of TCR clone 343598 (TRAV1-2, TRAJ8)
CAVREDTGFKKLVF

SEQ ID NO: 687196 - protein, 13 aa, Homo sapiens
  CDR3 for beta chain variable domain of TCR clone 343598 (TRBV7-7, TRBJ2-5)
CASSRSGQETQYF

SEQ ID NO: 687197 - protein, 13 aa, Homo sapiens
  CDR3 for alpha chain variable domain of TCR clone 343599 (TRAV2, TRAJ40)
CAVVTSGTYKYIF

SEQ ID NO: 687198 - protein, 14 aa, Homo sapiens
  CDR3 for beta chain variable domain of TCR clone 343599 (TRBV7-9, TRBJ2-5)
CASSLVGGEETQYF

SEQ ID NO: 687199 - protein, 17 aa, Homo sapiens
  CDR3 for alpha chain variable domain of TCR clone 343600 (TRAV13-1, TRAJ52)
CAAGRNAGGTSYGRLTF

SEQ ID NO: 687200 - protein, 15 aa, Homo sapiens
  CDR3 for beta chain variable domain of TCR clone 343600 (TRBV3-1, TRBJ2-1)
CASSQVVDDGEEQFF

SEQ ID NO: 687201 - protein, 12 aa, Homo sapiens
  CDR3 for alpha chain variable domain of TCR clone 343601 (TRAV13-2, TRAJ23)
CAWRHRGGKLIF

SEQ ID NO: 687202 - protein, 14 aa, Homo sapiens
  CDR3 for beta chain variable domain of TCR clone 343601 (TRBV2, TRBJ2-7)
CASSLTSGGYEQYF

SEQ ID NO: 687203 - protein, 14 aa, Homo sapiens
  CDR3 for alpha chain variable domain of TCR clone 343602 (TRAV1-2, TRAJ8)
CAVREDTGFQKLVF

SEQ ID NO: 687204 - protein, 12 aa, Homo sapiens
  CDR3 for beta chain variable domain of TCR clone 343602 (TRBV7-2, TRBJ2-5)
CASSLAKETQYF

SEQ ID NO: 687205 - protein, 13 aa, Homo sapiens
  CDR3 for alpha chain variable domain of TCR clone 343603 (TRAV8-4, TRAJ30)
CAVSVNRDDKIIF

SEQ ID NO: 687206 - protein, 15 aa, Homo sapiens
  CDR3 for beta chain variable domain of TCR clone 343603 (TRBV7-9, TRBJ1-5)
CASSQGHQPNQPQHF

SEQ ID NO: 687207 - protein, 14 aa, Homo sapiens
  CDR3 for alpha chain variable domain of TCR clone 343604 (TRAV13-1, TRAJ13)
CAASRVGGYQKVTF

SEQ ID NO: 687208 - protein, 17 aa, Homo sapiens
  CDR3 for beta chain variable domain of TCR clone 343604 (TRBV15, TRBJ1-5)
CASSRAPPGTRNQPQHF

SEQ ID NO: 687209 - protein, 15 aa, Homo sapiens
  CDR3 for alpha chain variable domain of TCR clone 343605 (TRAV36/DV7, TRAJ53)
CAVEGSGGSNYKLTF

SEQ ID NO: 687210 - protein, 15 aa, Homo sapiens
  CDR3 for beta chain variable domain of TCR clone 343605 (TRBV7-9, TRBJ2-7)
CASSPGGGLTYEQYF

SEQ ID NO: 687211 - protein, 18 aa, Homo sapiens
  CDR3 for alpha chain variable domain of TCR clone 343606 (TRAV21, TRAJ52)
CAVRPSPAGGTSYGKLTF

SEQ ID NO: 687212 - protein, 15 aa, Homo sapiens
  CDR3 for beta chain variable domain of TCR clone 343606 (TRBV13, TRBJ2-1)
CASSNGGGSSNEQFF

SEQ ID NO: 687213 - protein, 13 aa, Homo sapiens
  CDR3 for alpha chain variable domain of TCR clone 343607 (TRAV21, TRAJ20)
CAVGLRVDYKLSF

SEQ ID NO: 687214 - protein, 15 aa, Homo sapiens
  CDR3 for beta chain variable domain of TCR clone 343607 (TRBV28, TRBJ2-1)
CASSIIAGGRSEQYF

SEQ ID NO: 687215 - protein, 14 aa, Homo sapiens
  CDR3 for alpha chain variable domain of TCR clone 343608 (TRAV1-2, TRAJ16)
CAVNRVSDGQKLLF

SEQ ID NO: 687216 - protein, 16 aa, Homo sapiens
  CDR3 for beta chain variable domain of TCR clone 343608 (TRBV5-1, TRBJ1-1)
CASSSGGNSVNTEAFF

SEQ ID NO: 687217 - protein, 14 aa, Homo sapiens
  CDR3 for alpha chain variable domain of TCR clone 343609 (TRAV2, TRAJ37)
CAVDFTSNTGKLIF

SEQ ID NO: 687218 - protein, 15 aa, Homo sapiens
  CDR3 for beta chain variable domain of TCR clone 343609 (TRBV11-2, TRBJ2-1)
CASSLGTSGLNEQFF

SEQ ID NO: 687219 - protein, 13 aa, Homo sapiens
  CDR3 for alpha chain variable domain of TCR clone 343610 (TRAV17, TRAJ26)
CATVDNYGQNFVF

SEQ ID NO: 687220 - protein, 14 aa, Homo sapiens
  CDR3 for beta chain variable domain of TCR clone 343610 (TRBV7-8, TRBJ2-3)
CASSFKSSTDTQYF

SEQ ID NO: 687221 - protein, 12 aa, Homo sapiens
  CDR3 for alpha chain variable domain of TCR clone 343611 (TRAV8-3, TRAJ41)
CAVGALGYALNF

SEQ ID NO: 687222 - protein, 16 aa, Homo sapiens
  CDR3 for beta chain variable domain of TCR clone 343611 (TRBV7-6, TRBJ2-3)
CASSDSRWEGTDTQYF

SEQ ID NO: 687223 - protein, 14 aa, Homo sapiens
  CDR3 for alpha chain variable domain of TCR clone 343612 (TRAV29/DV5, TRAJ48)
CAAMALFGNEKLTF

SEQ ID NO: 687224 - protein, 14 aa, Homo sapiens
  CDR3 for beta chain variable domain of TCR clone 343612 (TRBV7-2, TRBJ2-7)
CASSPKTSFYEQYF

SEQ ID NO: 687225 - protein, 15 aa, Homo sapiens
  CDR3 for alpha chain variable domain of TCR clone 343613 (TRAV34, TRAJ38)
CGADLTPGNNRKLIW

SEQ ID NO: 687226 - protein, 14 aa, Homo sapiens
  CDR3 for beta chain variable domain of TCR clone 343613 (TRBV5-1, TRBJ2-7)
CASSRGESLYEQYF

SEQ ID NO: 687227 - protein, 15 aa, Homo sapiens
  CDR3 for alpha chain variable domain of TCR clone 343614 (TRAV27, TRAJ38)
CAARRNAGNNRKLLL

SEQ ID NO: 687228 - protein, 13 aa, Homo sapiens
  CDR3 for beta chain variable domain of TCR clone 343614 (TRBV20-1, TRBJ1-1)
CSARGGGNTEAFF

SEQ ID NO: 687229 - protein, 17 aa, Homo sapiens
  CDR3 for alpha chain variable domain of TCR clone 343615 (TRAV3, TRAJ42)
CAVRDRDYGGSKGNFIF

SEQ ID NO: 687230 - protein, 13 aa, Homo sapiens
  CDR3 for beta chain variable domain of TCR clone 343615 (TRBV10-3, TRBJ2-7)
CASKLAVNYEQYF

SEQ ID NO: 687231 - protein, 10 aa, Homo sapiens
  CDR3 for alpha chain variable domain of TCR clone 343616 (TRAV27, TRAJ58)
SETSGSRLTF

SEQ ID NO: 687232 - protein, 13 aa, Homo sapiens
  CDR3 for beta chain variable domain of TCR clone 343616 (TRBV15, TRBJ1-6)
CATSGGLNSPLHF

SEQ ID NO: 687233 - protein, 13 aa, Homo sapiens
  CDR3 for alpha chain variable domain of TCR clone 343617 (TRAV35, TRAJ42)
CAGFPGSQGNLSF

SEQ ID NO: 687234 - protein, 13 aa, Homo sapiens
  CDR3 for beta chain variable domain of TCR clone 343617 (TRBV10-3, TRBJ2-7)
CASTLAVNYEQYF

SEQ ID NO: 687235 - protein, 12 aa, Homo sapiens
  CDR3 for alpha chain variable domain of TCR clone 343618 (TRAV12-3, TRAJ17)
CAMTLTGNKLAF

SEQ ID NO: 687236 - protein, 20 aa, Homo sapiens
  CDR3 for beta chain variable domain of TCR clone 343618 (TRBV7-8, TRBJ2-2)
RASSHLFPGPTIHITGELFF

SEQ ID NO: 687237 - protein, 13 aa, Homo sapiens
  CDR3 for alpha chain variable domain of TCR clone 343619 (TRAV12-3, TRAJ40)
CAMSARGTYKYIF

SEQ ID NO: 687238 - protein, 15 aa, Homo sapiens
  CDR3 for beta chain variable domain of TCR clone 343619 (TRBV7-9, TRBJ2-7)
CASSSSGLAVYEQYF

SEQ ID NO: 687239 - protein, 16 aa, Homo sapiens
  CDR3 for alpha chain variable domain of TCR clone 343620 (TRAV12-2, TRAJ10)
CAVNRVLTGGGNKLTF

SEQ ID NO: 687240 - protein, 14 aa, Homo sapiens
  CDR3 for beta chain variable domain of TCR clone 343620 (TRBV9, TRBJ2-1)
CASSVALAGNEQFF

SEQ ID NO: 687241 - protein, 14 aa, Homo sapiens
  CDR3 for alpha chain variable domain of TCR clone 343621 (TRAV1-2, TRAJ8)
CAVREDTGFQKLVF

SEQ ID NO: 687242 - protein, 15 aa, Homo sapiens
  CDR3 for beta chain variable domain of TCR clone 343621 (TRBV7-9, TRBJ1-1)
CASSHRGTANTEAFF

SEQ ID NO: 687243 - protein, 16 aa, Homo sapiens
  CDR3 for alpha chain variable domain of TCR clone 343622 (TRAV12-2, TRAJ6)
CAAPLAGSGGSYIPTF

SEQ ID NO: 687244 - protein, 13 aa, Homo sapiens
  CDR3 for beta chain variable domain of TCR clone 343622 (TRBV20-1, TRBJ1-6)
CSAPLGVGSPLHF

SEQ ID NO: 687245 - protein, 10 aa, Homo sapiens
  CDR3 for alpha chain variable domain of TCR clone 343623 (TRAV26-1, TRAJ22)
RSGSARQLTF

SEQ ID NO: 687246 - protein, 14 aa, Homo sapiens
  CDR3 for beta chain variable domain of TCR clone 343623 (TRBV4-1, TRBJ2-2)
CASSQAVNTGELFF

SEQ ID NO: 687247 - protein, 15 aa, Homo sapiens
  CDR3 for alpha chain variable domain of TCR clone 343624 (TRAV27, TRAJ38)
WAARRNAGNNRKLIW

SEQ ID NO: 687248 - protein, 15 aa, Homo sapiens
  CDR3 for beta chain variable domain of TCR clone 343624 (TRBV2, TRBJ2-1)
CASSELAGSYNEQFF

SEQ ID NO: 687249 - protein, 17 aa, Homo sapiens
  CDR3 for alpha chain variable domain of TCR clone 343625 (TRAV13-1, TRAJ52)
CAAGRTAGGTSYGKLTF

SEQ ID NO: 687250 - protein, 12 aa, Homo sapiens
  CDR3 for beta chain variable domain of TCR clone 343625 (TRBV29-1, TRBJ1-3)
CSTRDSGNTIYF

SEQ ID NO: 687251 - protein, 11 aa, Homo sapiens
  CDR3 for alpha chain variable domain of TCR clone 343626 (TRAV3, TRAJ21)
CAVGNFNKFYF

SEQ ID NO: 687252 - protein, 16 aa, Homo sapiens
  CDR3 for beta chain variable domain of TCR clone 343626 (TRBV19, TRBJ2-1)
CASSRAGPSSSNEQFF

SEQ ID NO: 687253 - protein, 11 aa, Homo sapiens
  CDR3 for alpha chain variable domain of TCR clone 343627 (TRAV12-3, TRAJ49)
CAANTGNQFYF

SEQ ID NO: 687254 - protein, 15 aa, Homo sapiens
  CDR3 for beta chain variable domain of TCR clone 343627 (TRBV11-2, TRBJ2-1)
CASSLGTSGLNEQSF

SEQ ID NO: 687255 - protein, 18 aa, Homo sapiens
  CDR3 for alpha chain variable domain of TCR clone 343628 (TRAV12-3, TRAJ52)
CAMSRTNAGGTSYGKLTF

SEQ ID NO: 687256 - protein, 17 aa, Homo sapiens
  CDR3 for beta chain variable domain of TCR clone 343628 (TRBV7-3, TRBJ2-3)
CASSLMKRMRGADTQFF

SEQ ID NO: 687257 - protein, 15 aa, Homo sapiens
  CDR3 for alpha chain variable domain of TCR clone 343629 (TRAV13-1, TRAJ17)
CAASIERAAGNKLTF

SEQ ID NO: 687258 - protein, 13 aa, Homo sapiens
  CDR3 for beta chain variable domain of TCR clone 343629 (TRBV5-7, TRBJ2-2)
CASTLGGAGELFF

SEQ ID NO: 687259 - protein, 13 aa, Homo sapiens
  CDR3 for alpha chain variable domain of TCR clone 343630 (TRAV12-1, TRAJ4)
CVAFSGGYNKLIF

SEQ ID NO: 687260 - protein, 15 aa, Homo sapiens
  CDR3 for beta chain variable domain of TCR clone 343630 (TRBV5-1, TRBJ2-1)
CASSPPRAPYNEQFF

SEQ ID NO: 687261 - protein, 15 aa, Homo sapiens
  CDR3 for alpha chain variable domain of TCR clone 343631 (TRAV12-3, TRAJ6)
CAMSATTGGSYIPIF

SEQ ID NO: 687262 - protein, 15 aa, Homo sapiens
  CDR3 for beta chain variable domain of TCR clone 343631 (TRBV5-1, TRBJ2-7)
CASSLNGGPAREQYF

SEQ ID NO: 687263 - protein, 17 aa, Homo sapiens
  CDR3 for alpha chain variable domain of TCR clone 343632 (TRAV3, TRAJ42)
CAVRDREYGGSQGNLIF

SEQ ID NO: 687264 - protein, 14 aa, Homo sapiens
  CDR3 for beta chain variable domain of TCR clone 343632 (TRBV19, TRBJ2-5)
CASSMTGQQETQYF

SEQ ID NO: 687265 - protein, 13 aa, Homo sapiens
  CDR3 for alpha chain variable domain of TCR clone 343633 (TRAV12-2, TRAJ20)
CAVNRFDDYKLSF

SEQ ID NO: 687266 - protein, 17 aa, Homo sapiens
  CDR3 for beta chain variable domain of TCR clone 343633 (TRBV13, TRBJ2-3)
CASSLSSVTGGRNTQYF

SEQ ID NO: 687267 - protein, 15 aa, Homo sapiens
  CDR3 for alpha chain variable domain of TCR clone 343634 (TRAV21, TRAJ37)
CAVRPTLSNTGKLIF

SEQ ID NO: 687268 - protein, 13 aa, Homo sapiens
  CDR3 for beta chain variable domain of TCR clone 343634 (TRBV7-3, TRBJ1-1)
CASSQDWGAEAFF

SEQ ID NO: 687269 - protein, 14 aa, Homo sapiens
  CDR3 for alpha chain variable domain of TCR clone 343635 (TRAV12-2, TRAJ13)
CAVKKTGGYQKVTL

SEQ ID NO: 687270 - protein, 15 aa, Homo sapiens
  CDR3 for beta chain variable domain of TCR clone 343635 (TRBV27, TRBJ2-1)
CASSNGGGSSNEQFF

SEQ ID NO: 687271 - protein, 10 aa, Homo sapiens
  CDR3 for alpha chain variable domain of TCR clone 343636 (TRAV16, TRAJ22)
SAMYLRQLTF

SEQ ID NO: 687272 - protein, 15 aa, Homo sapiens
  CDR3 for beta chain variable domain of TCR clone 343636 (TRBV7-9, TRBJ1-6)
CASSSPGRGNSILHF

SEQ ID NO: 687273 - protein, 12 aa, Homo sapiens
  CDR3 for alpha chain variable domain of TCR clone 343637 (TRAV12-1, TRAJ40)
CVVYSGTYRYIF

SEQ ID NO: 687274 - protein, 14 aa, Homo sapiens
  CDR3 for beta chain variable domain of TCR clone 343637 (TRBV19, TRBJ2-1)
CASPTFVLSGEQFF

SEQ ID NO: 687275 - protein, 15 aa, Homo sapiens
  CDR3 for alpha chain variable domain of TCR clone 343638 (TRAV25, TRAJ53)
CAAKGGGGSNYKLTF

SEQ ID NO: 687276 - protein, 12 aa, Homo sapiens
  CDR3 for beta chain variable domain of TCR clone 343638 (TRBV7-8, TRBJ2-7)
CASSLGDREQYF

SEQ ID NO: 687277 - protein, 14 aa, Homo sapiens
  CDR3 for alpha chain variable domain of TCR clone 343639 (TRAV17, TRAJ24)
CATPTTDSWGKFQF

SEQ ID NO: 687278 - protein, 16 aa, Homo sapiens
  CDR3 for beta chain variable domain of TCR clone 343639 (TRBV4-2, TRBJ2-7)
CASSQDGGSLRGEQYF

SEQ ID NO: 687279 - protein, 14 aa, Homo sapiens
  CDR3 for alpha chain variable domain of TCR clone 343640 (TRAV8-3, TRAJ23)
CAVIIYNQGGKLIF

SEQ ID NO: 687280 - protein, 14 aa, Homo sapiens
  CDR3 for beta chain variable domain of TCR clone 343640 (TRBV19, TRBJ2-2)
CASSGQGIAGELFF

SEQ ID NO: 687281 - protein, 15 aa, Homo sapiens
  CDR3 for alpha chain variable domain of TCR clone 343641 (TRAV21, TRAJ32)
CAANSYGGATNKLIF

SEQ ID NO: 687282 - protein, 18 aa, Homo sapiens
  CDR3 for beta chain variable domain of TCR clone 343641 (TRBV7-9, TRBJ2-1)
CASSTGLAEGSSYNEQFF

SEQ ID NO: 687283 - protein, 17 aa, Homo sapiens
  CDR3 for alpha chain variable domain of TCR clone 343642 (TRAV13-1, TRAJ52)
CAAGRNAGGTSYGKLTF

SEQ ID NO: 687284 - protein, 15 aa, Homo sapiens
  CDR3 for beta chain variable domain of TCR clone 343642 (TRBV7-2, TRBJ2-2)
CASSSSGPTTGELFF

SEQ ID NO: 687285 - protein, 14 aa, Homo sapiens
  CDR3 for alpha chain variable domain of TCR clone 343643 (TRAV12-3, TRAJ10)
SHLPLTGGGNKLTF

SEQ ID NO: 687286 - protein, 12 aa, Homo sapiens
  CDR3 for beta chain variable domain of TCR clone 343643 (TRBV19, TRBJ2-1)
CASSRQGAEQFF

SEQ ID NO: 687287 - protein, 14 aa, Homo sapiens
  CDR3 for alpha chain variable domain of TCR clone 343644 (TRAV8-4, TRAJ4)
CAVSPSGGYNKLIF

SEQ ID NO: 687288 - protein, 15 aa, Homo sapiens
  CDR3 for beta chain variable domain of TCR clone 343644 (TRBV7-8, TRBJ2-3)
CASSLSADSGGVQYF

SEQ ID NO: 687289 - protein, 18 aa, Homo sapiens
  CDR3 for alpha chain variable domain of TCR clone 343645 (TRAV12-3, TRAJ52)
CAMSVGGAGGTSYGKLTF

SEQ ID NO: 687290 - protein, 12 aa, Homo sapiens
  CDR3 for beta chain variable domain of TCR clone 343645 (TRBV12-5, TRBJ2-5)
CASGQGVETQYF

SEQ ID NO: 687291 - protein, 12 aa, Homo sapiens
  CDR3 for alpha chain variable domain of TCR clone 343646 (TRAV12-1, TRAJ40)
CVVYSGTYKYIF

SEQ ID NO: 687292 - protein, 18 aa, Homo sapiens
  CDR3 for beta chain variable domain of TCR clone 343646 (TRBV11-2, TRBJ2-3)
CASSLGGASRGPPNTQYF

SEQ ID NO: 687293 - protein, 12 aa, Homo sapiens
  CDR3 for alpha chain variable domain of TCR clone 343647 (TRAV13-2, TRAJ31)
CAESYNNARLVF

SEQ ID NO: 687294 - protein, 13 aa, Homo sapiens
  CDR3 for beta chain variable domain of TCR clone 343647 (TRBV24-1, TRBJ1-3)
CATMADSGNTIYF

SEQ ID NO: 687295 - protein, 16 aa, Homo sapiens
  CDR3 for alpha chain variable domain of TCR clone 343648 (TRAV29/DV5, TRAJ36)
CAASAHYQSGANNHFF

SEQ ID NO: 687296 - protein, 16 aa, Homo sapiens
  CDR3 for beta chain variable domain of TCR clone 343648 (TRBV4-2, TRBJ2-3)
CASSQELAGDTDTQYF

SEQ ID NO: 687297 - protein, 11 aa, Homo sapiens
  CDR3 for alpha chain variable domain of TCR clone 343649 (TRAV21, TRAJ41)
CAVRSGYALNF

SEQ ID NO: 687298 - protein, 15 aa, Homo sapiens
  CDR3 for beta chain variable domain of TCR clone 343649 (TRBV11-2, TRBJ2-1)
CASSWDGRSYNEQFF

SEQ ID NO: 687299 - protein, 16 aa, Homo sapiens
  CDR3 for alpha chain variable domain of TCR clone 343650 (TRAV23/DV6, TRAJ57)
CAASSTLSQGGSEKLF

SEQ ID NO: 687300 - protein, 13 aa, Homo sapiens
  CDR3 for beta chain variable domain of TCR clone 343650 (TRBV7-9, TRBJ1-2)
CASSLKQNYGYTF

SEQ ID NO: 687301 - protein, 15 aa, Homo sapiens
  CDR3 for alpha chain variable domain of TCR clone 343651 (TRAV26-1, TRAJ29)
CIVRVEGSGNTPLVF

SEQ ID NO: 687302 - protein, 13 aa, Homo sapiens
  CDR3 for beta chain variable domain of TCR clone 343651 (TRBV19, TRBJ2-1)
CASSMYRVNEQFF

SEQ ID NO: 687303 - protein, 12 aa, Homo sapiens
  CDR3 for alpha chain variable domain of TCR clone 343652 (TRAV13-2, TRAJ48)
CRDGLWNEKLTF

SEQ ID NO: 687304 - protein, 13 aa, Homo sapiens
  CDR3 for beta chain variable domain of TCR clone 343652 (TRBV14, TRBJ2-7)
CASSQDRRYEQYF

SEQ ID NO: 687305 - protein, 13 aa, Homo sapiens
  CDR3 for alpha chain variable domain of TCR clone 343653 (TRAV27, TRAJ45)
CRSSGGGADGLTF

SEQ ID NO: 687306 - protein, 17 aa, Homo sapiens
  CDR3 for beta chain variable domain of TCR clone 343653 (TRBV11-2, TRBJ2-1)
CASSLYPPGVEYNELFF

SEQ ID NO: 687307 - protein, 14 aa, Homo sapiens
  CDR3 for alpha chain variable domain of TCR clone 343654 (TRAV8-4, TRAJ22)
CAVTPSGSARQLTF

SEQ ID NO: 687308 - protein, 14 aa, Homo sapiens
  CDR3 for beta chain variable domain of TCR clone 343654 (TRBV7-6, TRBJ2-7)
CASSFRQGADEQYF

SEQ ID NO: 687309 - protein, 13 aa, Homo sapiens
  CDR3 for alpha chain variable domain of TCR clone 343655 (TRAV3, TRAJ21)
CAVREPGFNKFYF

SEQ ID NO: 687310 - protein, 13 aa, Homo sapiens
  CDR3 for beta chain variable domain of TCR clone 343655 (TRBV12-4, TRBJ1-2)
CASSYRVNYGYTF

SEQ ID NO: 687311 - protein, 15 aa, Homo sapiens
  CDR3 for alpha chain variable domain of TCR clone 343656 (TRAV27, TRAJ53)
CAGGDSGGSNYKLTF

SEQ ID NO: 687312 - protein, 17 aa, Homo sapiens
  CDR3 for beta chain variable domain of TCR clone 343656 (TRBV11-2, TRBJ2-1)
CASSLYPPGVEYNEQFF

SEQ ID NO: 687313 - protein, 16 aa, Homo sapiens
  CDR3 for alpha chain variable domain of TCR clone 343657 (TRAV12-3, TRAJ53)
CAMSPGSGGSNYKLTF

SEQ ID NO: 687314 - protein, 14 aa, Homo sapiens
  CDR3 for beta chain variable domain of TCR clone 343657 (TRBV2, TRBJ2-7)
CASSLTSGGCEQYF

SEQ ID NO: 687315 - protein, 11 aa, Homo sapiens
  CDR3 for alpha chain variable domain of TCR clone 343658 (TRAV13-1, TRAJ20)
CAASNDYKLSF

SEQ ID NO: 687316 - protein, 14 aa, Homo sapiens
  CDR3 for beta chain variable domain of TCR clone 343658 (TRBV19, TRBJ2-1)
CASPTFVLSGEQFF

SEQ ID NO: 687317 - protein, 13 aa, Homo sapiens
  CDR3 for alpha chain variable domain of TCR clone 343659 (TRAV13-2, TRAJ13)
CAERPGGYQKVTF

SEQ ID NO: 687318 - protein, 16 aa, Homo sapiens
  CDR3 for beta chain variable domain of TCR clone 343659 (TRBV2, TRBJ2-1)
CASSVGGSLSYNEQFF

SEQ ID NO: 687319 - protein, 12 aa, Homo sapiens
  CDR3 for alpha chain variable domain of TCR clone 343660 (TRAV21, TRAJ49)
CAATNTGNQFYF

SEQ ID NO: 687320 - protein, 15 aa, Homo sapiens
  CDR3 for beta chain variable domain of TCR clone 343660 (TRBV10-3, TRBJ1-1)
CAIQQGRSGNTEAFF

SEQ ID NO: 687321 - protein, 13 aa, Homo sapiens
  CDR3 for alpha chain variable domain of TCR clone 343661 (TRAV30, TRAJ6)
CGFIEGGSYIPTF

SEQ ID NO: 687322 - protein, 13 aa, Homo sapiens
  CDR3 for beta chain variable domain of TCR clone 343661 (TRBV5-4, TRBJ2-5)
CASSPVSQGTQYF

SEQ ID NO: 687323 - protein, 15 aa, Homo sapiens
  CDR3 for alpha chain variable domain of TCR clone 343662 (TRAV3, TRAJ5)
CAVRDSKTGRRALTF

SEQ ID NO: 687324 - protein, 15 aa, Homo sapiens
  CDR3 for beta chain variable domain of TCR clone 343662 (TRBV7-8, TRBJ2-1)
RASSLADSLYNEQFF

SEQ ID NO: 687325 - protein, 15 aa, Homo sapiens
  CDR3 for alpha chain variable domain of TCR clone 343663 (TRAV8-1, TRAJ8)
CAVNAMNKGFQKLVF

SEQ ID NO: 687326 - protein, 15 aa, Homo sapiens
  CDR3 for beta chain variable domain of TCR clone 343663 (TRBV5-8, TRBJ1-1)
CASSFSGTSLKGAFF

SEQ ID NO: 687327 - protein, 14 aa, Homo sapiens
  CDR3 for alpha chain variable domain of TCR clone 343664 (TRAV1-2, TRAJ8)
CAVREDTGFQKLEF

SEQ ID NO: 687328 - protein, 15 aa, Homo sapiens
  CDR3 for beta chain variable domain of TCR clone 343664 (TRBV9, TRBJ1-6)
CASSVAGTGDSPLHF

SEQ ID NO: 687329 - protein, 13 aa, Homo sapiens
  CDR3 for alpha chain variable domain of TCR clone 343665 (TRAV36/DV7, TRAJ37)
CAVFSSNTGKLIL

SEQ ID NO: 687330 - protein, 18 aa, Homo sapiens
  CDR3 for beta chain variable domain of TCR clone 343665 (TRBV11-2, TRBJ2-3)
CASSLGGASRGAPNTQYF

SEQ ID NO: 687331 - protein, 16 aa, Homo sapiens
  CDR3 for alpha chain variable domain of TCR clone 343666 (TRAV38-1, TRAJ56)
CAFMKRQTGANSKLTF

SEQ ID NO: 687332 - protein, 13 aa, Homo sapiens
  CDR3 for beta chain variable domain of TCR clone 343666 (TRBV7-9, TRBJ2-7)
CASSFAGAYVQYF

SEQ ID NO: 687333 - protein, 15 aa, Homo sapiens
  CDR3 for alpha chain variable domain of TCR clone 343667 (TRAV8-3, TRAJ45)
CASSYSGGGADGLTF

SEQ ID NO: 687334 - protein, 16 aa, Homo sapiens
  CDR3 for beta chain variable domain of TCR clone 343667 (TRBV7-9, TRBJ2-2)
CASSGFWGANTGELFF

SEQ ID NO: 687335 - protein, 14 aa, Homo sapiens
  CDR3 for alpha chain variable domain of TCR clone 343668 (TRAV3, TRAJ9)
CAVRDDTGGFKTIF

SEQ ID NO: 687336 - protein, 18 aa, Homo sapiens
  CDR3 for beta chain variable domain of TCR clone 343668 (TRBV20-1, TRBJ2-6)
CSAETTATHGSGANVLTF

SEQ ID NO: 687337 - protein, 16 aa, Homo sapiens
  CDR3 for alpha chain variable domain of TCR clone 343669 (TRAV12-2, TRAJ43)
CAGDDMRFGAGTRLTV

SEQ ID NO: 687338 - protein, 13 aa, Homo sapiens
  CDR3 for beta chain variable domain of TCR clone 343669 (TRBV10-2, TRBJ2-7)
CASGASGGYEQYF

SEQ ID NO: 687339 - protein, 11 aa, Homo sapiens
  CDR3 for alpha chain variable domain of TCR clone 343670 (TRAV12-3, TRAJ49)
CAANTGNQFYF

SEQ ID NO: 687340 - protein, 16 aa, Homo sapiens
  CDR3 for beta chain variable domain of TCR clone 343670 (TRBV7-9, TRBJ2-3)
CASSPCREVGTDTQYF

SEQ ID NO: 687341 - protein, 16 aa, Homo sapiens
  CDR3 for alpha chain variable domain of TCR clone 343671 (TRAV30, TRAJ24)
CGTEIEDADSWGKFEF

SEQ ID NO: 687342 - protein, 14 aa, Homo sapiens
  CDR3 for beta chain variable domain of TCR clone 343671 (TRBV12-5, TRBJ2-5)
CASGSRTHQETQYF

SEQ ID NO: 687343 - protein, 17 aa, Homo sapiens
  CDR3 for alpha chain variable domain of TCR clone 343672 (TRAV3, TRAJ6)
CAMRDGPRAGGSYIPTV

SEQ ID NO: 687344 - protein, 18 aa, Homo sapiens
  CDR3 for beta chain variable domain of TCR clone 343672 (TRBV25-1, TRBJ1-2)
CASSGLQNGQGLIFGDTF

SEQ ID NO: 687345 - protein, 14 aa, Homo sapiens
  CDR3 for alpha chain variable domain of TCR clone 343673 (TRAV1-2, TRAJ6)
CAVRSSGGSYIPTF

SEQ ID NO: 687346 - protein, 16 aa, Homo sapiens
  CDR3 for beta chain variable domain of TCR clone 343673 (TRBV7-3, TRBJ2-2)
CASSVKRGTVSGELFF

SEQ ID NO: 687347 - protein, 17 aa, Homo sapiens
  CDR3 for alpha chain variable domain of TCR clone 343674 (TRAV3, TRAJ42)
CAVRDRDYGGSQGNLIF

SEQ ID NO: 687348 - protein, 16 aa, Homo sapiens
  CDR3 for beta chain variable domain of TCR clone 343674 (TRBV7-9, TRBJ1-3)
CASSQTSGLRMGTIYF

SEQ ID NO: 687349 - protein, 15 aa, Homo sapiens
  CDR3 for alpha chain variable domain of TCR clone 343675 (TRAV27, TRAJ38)
CAARRNAGNNRKLIW

SEQ ID NO: 687350 - protein, 12 aa, Homo sapiens
  CDR3 for beta chain variable domain of TCR clone 343675 (TRBV7-9, TRBJ2-5)
CASSLRGETQYF

SEQ ID NO: 687351 - protein, 18 aa, Homo sapiens
  CDR3 for alpha chain variable domain of TCR clone 343676 (TRAV21, TRAJ52)
CAVGPYPAGGTSYGKLTF

SEQ ID NO: 687352 - protein, 17 aa, Homo sapiens
  CDR3 for beta chain variable domain of TCR clone 343676 (TRBV13, TRBJ2-3)
CASSLSRVAGGRNTQYF

SEQ ID NO: 687353 - protein, 15 aa, Homo sapiens
  CDR3 for alpha chain variable domain of TCR clone 343677 (TRAV13-1, TRAJ44)
CAASRNTGTASKLTF

SEQ ID NO: 687354 - protein, 18 aa, Homo sapiens
  CDR3 for beta chain variable domain of TCR clone 343677 (TRBV3-1, TRBJ1-2)
CASSQDVIGWNGDYGYTF

SEQ ID NO: 687355 - protein, 14 aa, Homo sapiens
  CDR3 for alpha chain variable domain of TCR clone 343678 (TRAV12-1, TRAJ37)
CVVGGGENTGKLIF

SEQ ID NO: 687356 - protein, 16 aa, Homo sapiens
  CDR3 for beta chain variable domain of TCR clone 343678 (TRBV20-1, TRBJ2-3)
CSAVRDRGPIADTQYF

SEQ ID NO: 687357 - protein, 15 aa, Homo sapiens
  CDR3 for alpha chain variable domain of TCR clone 343679 (TRAV1-2, TRAJ15)
CAVEAANQAGTALIF

SEQ ID NO: 687358 - protein, 16 aa, Homo sapiens
  CDR3 for beta chain variable domain of TCR clone 343679 (TRBV4-2, TRBJ1-1)
CASRPLDGGGDTEAFF

SEQ ID NO: 687359 - protein, 13 aa, Homo sapiens
  CDR3 for alpha chain variable domain of TCR clone 343680 (TRAV12-1, TRAJ31)
CVVIPNNNARLMF

SEQ ID NO: 687360 - protein, 14 aa, Homo sapiens
  CDR3 for beta chain variable domain of TCR clone 343680 (TRBV19, TRBJ2-5)
CASSMTGQQETQYF

SEQ ID NO: 687361 - protein, 14 aa, Homo sapiens
  CDR3 for alpha chain variable domain of TCR clone 343681 (TRAV17, TRAJ57)
CATDPQGGSEKLVF

SEQ ID NO: 687362 - protein, 12 aa, Homo sapiens
  CDR3 for beta chain variable domain of TCR clone 343681 (TRBV12-4, TRBJ2-3)
CASSTLPDTQYF

SEQ ID NO: 687363 - protein, 14 aa, Homo sapiens
  CDR3 for alpha chain variable domain of TCR clone 343682 (TRAV27, TRAJ22)
CAGVVPGSARQLTF

SEQ ID NO: 687364 - protein, 15 aa, Homo sapiens
  CDR3 for beta chain variable domain of TCR clone 343682 (TRBV20-1, TRBJ2-7)
CSARDRVSGMDEQYF

SEQ ID NO: 687365 - protein, 16 aa, Homo sapiens
  CDR3 for alpha chain variable domain of TCR clone 343683 (TRAV14/DV4, TRAJ20)
CAMREGRSRDDYKLSF

SEQ ID NO: 687366 - protein, 17 aa, Homo sapiens
  CDR3 for beta chain variable domain of TCR clone 343683 (TRBV11-2, TRBJ2-1)
CASSLYPPGVEYNEQFF

SEQ ID NO: 687367 - protein, 15 aa, Homo sapiens
  CDR3 for alpha chain variable domain of TCR clone 343684 (TRAV27, TRAJ24)
CAGGTSADSWGKLQF

SEQ ID NO: 687368 - protein, 12 aa, Homo sapiens
  CDR3 for beta chain variable domain of TCR clone 343684 (TRBV10-3, TRBJ2-7)
CAHGADSGEQYF

SEQ ID NO: 687369 - protein, 12 aa, Homo sapiens
  CDR3 for alpha chain variable domain of TCR clone 343685 (TRAV12-2, TRAJ10)
WGVTGGGNKRTF

SEQ ID NO: 687370 - protein, 15 aa, Homo sapiens
  CDR3 for beta chain variable domain of TCR clone 343685 (TRBV7-9, TRBJ2-7)
CARSPGGGLTYEQYF

SEQ ID NO: 687371 - protein, 13 aa, Homo sapiens
  CDR3 for alpha chain variable domain of TCR clone 343686 (TRAV13-2, TRAJ48)
CAEMDFGNERLTF

SEQ ID NO: 687372 - protein, 16 aa, Homo sapiens
  CDR3 for beta chain variable domain of TCR clone 343686 (TRBV27, TRBJ2-2)
CASSFRGLVRTGELFF

SEQ ID NO: 687373 - protein, 14 aa, Homo sapiens
  CDR3 for alpha chain variable domain of TCR clone 343687 (TRAV35, TRAJ50)
CAGHRKTSYDKVIF

SEQ ID NO: 687374 - protein, 16 aa, Homo sapiens
  CDR3 for beta chain variable domain of TCR clone 343687 (TRBV12-4, TRBJ2-7)
CASSPEGQGSSYEQYF

SEQ ID NO: 687375 - protein, 12 aa, Homo sapiens
  CDR3 for alpha chain variable domain of TCR clone 343688 (TRAV27, TRAJ42)
CAGGGNQGNLIF

SEQ ID NO: 687376 - protein, 13 aa, Homo sapiens
  CDR3 for beta chain variable domain of TCR clone 343688 (TRBV19, TRBJ2-7)
CASSIRSSYEQYF

SEQ ID NO: 687377 - protein, 14 aa, Homo sapiens
  CDR3 for alpha chain variable domain of TCR clone 343689 (TRAV20, TRAJ13)
CAVLNSGGYQKVTF

SEQ ID NO: 687378 - protein, 14 aa, Homo sapiens
  CDR3 for beta chain variable domain of TCR clone 343689 (TRBV7-2, TRBJ1-1)
CASSFLTGTTEAVF

SEQ ID NO: 687379 - protein, 11 aa, Homo sapiens
  CDR3 for alpha chain variable domain of TCR clone 343690 (TRAV1-2, TRAJ11)
CAVRGYSTLTF

SEQ ID NO: 687380 - protein, 18 aa, Homo sapiens
  CDR3 for beta chain variable domain of TCR clone 343690 (TRBV20-1, TRBJ2-6)
GSAETTPTHGSGANDLTF

SEQ ID NO: 687381 - protein, 14 aa, Homo sapiens
  CDR3 for alpha chain variable domain of TCR clone 343691 (TRAV1-2, TRAJ16)
CVVNRFSDGQKLLF

SEQ ID NO: 687382 - protein, 15 aa, Homo sapiens
  CDR3 for beta chain variable domain of TCR clone 343691 (TRBV9, TRBJ1-6)
CASSVAGTGDSPLHC

SEQ ID NO: 687383 - protein, 13 aa, Homo sapiens
  CDR3 for alpha chain variable domain of TCR clone 343692 (TRAV38-1, TRAJ42)
CARWGGSQGNLIF

SEQ ID NO: 687384 - protein, 14 aa, Homo sapiens
  CDR3 for beta chain variable domain of TCR clone 343692 (TRBV27, TRBJ2-2)
CASRPGVNTGELFF

SEQ ID NO: 687385 - protein, 15 aa, Homo sapiens
  CDR3 for alpha chain variable domain of TCR clone 343693 (TRAV3, TRAJ22)
CAVRDRGGSARQLIF

SEQ ID NO: 687386 - protein, 13 aa, Homo sapiens
  CDR3 for beta chain variable domain of TCR clone 343693 (TRBV2, TRBJ1-5)
CATAGPGNQPQHF

SEQ ID NO: 687387 - protein, 19 aa, Homo sapiens
  CDR3 for alpha chain variable domain of TCR clone 343694 (TRAV25, TRAJ43)
TATQTTDVGPYFCAVFMRF

SEQ ID NO: 687388 - protein, 12 aa, Homo sapiens
  CDR3 for beta chain variable domain of TCR clone 343694 (TRBV11-2, TRBJ2-3)
CASSYRPDTQYF

SEQ ID NO: 687389 - protein, 14 aa, Homo sapiens
  CDR3 for alpha chain variable domain of TCR clone 343695 (TRAV12-3, TRAJ6)
CAMSATGGSYIPTF

SEQ ID NO: 687390 - protein, 16 aa, Homo sapiens
  CDR3 for beta chain variable domain of TCR clone 343695 (TRBV7-9, TRBJ1-3)
CASSLGAGSSGNTIYF

SEQ ID NO: 687391 - protein, 13 aa, Homo sapiens
  CDR3 for alpha chain variable domain of TCR clone 343696 (TRAV13-1, TRAJ20)
CAARVSNDYKLSF

SEQ ID NO: 687392 - protein, 12 aa, Homo sapiens
  CDR3 for beta chain variable domain of TCR clone 343696 (TRBV20-1, TRBJ2-1)
CSARLGTDDQFF

SEQ ID NO: 687393 - protein, 15 aa, Homo sapiens
  CDR3 for alpha chain variable domain of TCR clone 343697 (TRAV2, TRAJ9)
CAVEDRGTVGFKTIF

SEQ ID NO: 687394 - protein, 14 aa, Homo sapiens
  CDR3 for beta chain variable domain of TCR clone 343697 (TRBV4-1, TRBJ2-2)
CASSQAVNTGELFF

SEQ ID NO: 687395 - protein, 11 aa, Homo sapiens
  CDR3 for alpha chain variable domain of TCR clone 343698 (TRAV3, TRAJ13)
CAVTIYQKVTF

SEQ ID NO: 687396 - protein, 15 aa, Homo sapiens
  CDR3 for beta chain variable domain of TCR clone 343698 (TRBV7-9, TRBJ2-7)
CASSSSGLAVYEQYF

SEQ ID NO: 687397 - protein, 17 aa, Homo sapiens
  CDR3 for alpha chain variable domain of TCR clone 343699 (TRAV3, TRAJ42)
FAVRDRDYGGSQGNLIF

SEQ ID NO: 687398 - protein, 18 aa, Homo sapiens
  CDR3 for beta chain variable domain of TCR clone 343699 (TRBV20-1, TRBJ2-3)
CGASGLAGGPGTTDTQYF

SEQ ID NO: 687399 - protein, 15 aa, Homo sapiens
  CDR3 for alpha chain variable domain of TCR clone 343700 (TRAV26-2, TRAJ26)
CILRDFDNYGQNFVF

SEQ ID NO: 687400 - protein, 20 aa, Homo sapiens
  CDR3 for beta chain variable domain of TCR clone 343700 (TRBV7-8, TRBJ2-2)
CASSHLFPGPTIHITGELFF

SEQ ID NO: 687401 - protein, 16 aa, Homo sapiens
  CDR3 for alpha chain variable domain of TCR clone 343701 (TRAV1-2, TRAJ10)
CAVRGVLTGGGNKLTF

SEQ ID NO: 687402 - protein, 11 aa, Homo sapiens
  CDR3 for beta chain variable domain of TCR clone 343701 (TRBV12-4, TRBJ2-7)
CQQFRGYEQYF

SEQ ID NO: 687403 - protein, 13 aa, Homo sapiens
  CDR3 for alpha chain variable domain of TCR clone 343702 (TRAV27, TRAJ29)
CAGAHSGNTPLVF

SEQ ID NO: 687404 - protein, 14 aa, Homo sapiens
  CDR3 for beta chain variable domain of TCR clone 343702 (TRBV7-9, TRBJ2-7)
CASSIGEGAGEQYF

SEQ ID NO: 687405 - protein, 16 aa, Homo sapiens
  CDR3 for alpha chain variable domain of TCR clone 343703 (TRAV13-1, TRAJ48)
CAASIFGNFGNEKLTF

SEQ ID NO: 687406 - protein, 12 aa, Homo sapiens
  CDR3 for beta chain variable domain of TCR clone 343703 (TRBV14, TRBJ2-4)
CASSNLKSNQYL

SEQ ID NO: 687407 - protein, 12 aa, Homo sapiens
  CDR3 for alpha chain variable domain of TCR clone 343704 (TRAV2, TRAJ33)
CAFMDSNYQLIW

SEQ ID NO: 687408 - protein, 15 aa, Homo sapiens
  CDR3 for beta chain variable domain of TCR clone 343704 (TRBV9, TRBJ1-6)
CASSVAGTGDPPLHF

SEQ ID NO: 687409 - protein, 17 aa, Homo sapiens
  CDR3 for alpha chain variable domain of TCR clone 343705 (TRAV12-2, TRAJ6)
CAPQGPPRAGGSYIPTF

SEQ ID NO: 687410 - protein, 16 aa, Homo sapiens
  CDR3 for beta chain variable domain of TCR clone 343705 (TRBV19, TRBJ2-2)
CASSTVRASNTGELFF

SEQ ID NO: 687411 - protein, 15 aa, Homo sapiens
  CDR3 for alpha chain variable domain of TCR clone 343706 (TRAV8-3, TRAJ11)
CAVGLLNSGYSTLTF

SEQ ID NO: 687412 - protein, 12 aa, Homo sapiens
  CDR3 for beta chain variable domain of TCR clone 343706 (TRBV7-9, TRBJ2-7)
CASSIKREEQYF

SEQ ID NO: 687413 - protein, 16 aa, Homo sapiens
  CDR3 for alpha chain variable domain of TCR clone 343707 (TRAV27, TRAJ52)
CAGAGAGGTSYGKLTF

SEQ ID NO: 687414 - protein, 17 aa, Homo sapiens
  CDR3 for beta chain variable domain of TCR clone 343707 (TRBV24-1, TRBJ2-3)
CATIDLPSGEDTDTQYF

SEQ ID NO: 687415 - protein, 13 aa, Homo sapiens
  CDR3 for alpha chain variable domain of TCR clone 343708 (TRAV26-1, TRAJ29)
CIVRRSVNTPLVF

SEQ ID NO: 687416 - protein, 16 aa, Homo sapiens
  CDR3 for beta chain variable domain of TCR clone 343708 (TRBV11-2, TRBJ2-7)
CASSLAPTGVNYEQYF

SEQ ID NO: 687417 - protein, 18 aa, Homo sapiens
  CDR3 for alpha chain variable domain of TCR clone 343709 (TRAV29/DV5, TRAJ52)
CAAGFRGAGGTSYGKLTF

SEQ ID NO: 687418 - protein, 16 aa, Homo sapiens
  CDR3 for beta chain variable domain of TCR clone 343709 (TRBV7-3, TRBJ2-2)
CASSLKRGTLSGELIF

SEQ ID NO: 687419 - protein, 15 aa, Homo sapiens
  CDR3 for alpha chain variable domain of TCR clone 343710 (TRAV27, TRAJ38)
CAARRNAGNNRKLIW

SEQ ID NO: 687420 - protein, 15 aa, Homo sapiens
  CDR3 for beta chain variable domain of TCR clone 343710 (TRBV28, TRBJ2-7)
CASSPGGRGFYEQYF

SEQ ID NO: 687421 - protein, 14 aa, Homo sapiens
  CDR3 for alpha chain variable domain of TCR clone 343711 (TRAV16, TRAJ37)
CALDISGNTAKLIF

SEQ ID NO: 687422 - protein, 14 aa, Homo sapiens
  CDR3 for beta chain variable domain of TCR clone 343711 (TRBV7-6, TRBJ2-7)
CASSFRQGADEQYF

SEQ ID NO: 687423 - protein, 14 aa, Homo sapiens
  CDR3 for alpha chain variable domain of TCR clone 343712 (TRAV8-4, TRAJ27)
CAVSKGTNAGKSTF

SEQ ID NO: 687424 - protein, 16 aa, Homo sapiens
  CDR3 for beta chain variable domain of TCR clone 343712 (TRBV2, TRBJ2-7)
CASSSTRLGSSYEQYF

SEQ ID NO: 687425 - protein, 15 aa, Homo sapiens
  CDR3 for alpha chain variable domain of TCR clone 343713 (TRAV26-2, TRAJ13)
CILRDLSGGYQKVNF

SEQ ID NO: 687426 - protein, 11 aa, Homo sapiens
  CDR3 for beta chain variable domain of TCR clone 343713 (TRBV7-9, TRBJ2-3)
CASSYTDTQYF

SEQ ID NO: 687427 - protein, 16 aa, Homo sapiens
  CDR3 for alpha chain variable domain of TCR clone 343714 (TRAV8-3, TRAJ8)
CAVSRDGNTGFQKLVF

SEQ ID NO: 687428 - protein, 13 aa, Homo sapiens
  CDR3 for beta chain variable domain of TCR clone 343714 (TRBV2, TRBJ2-1)
CASSGSSSGEQFF

SEQ ID NO: 687429 - protein, 15 aa, Homo sapiens
  CDR3 for alpha chain variable domain of TCR clone 343715 (TRAV26-1, TRAJ22)
CIVRVSFWFCKATDL

SEQ ID NO: 687430 - protein, 13 aa, Homo sapiens
  CDR3 for beta chain variable domain of TCR clone 343715 (TRBV7-9, TRBJ1-2)
CGSSLKQNYGYTS

SEQ ID NO: 687431 - protein, 14 aa, Homo sapiens
  CDR3 for alpha chain variable domain of TCR clone 343716 (TRAV3, TRAJ37)
CAVKESGNTGKLIF

SEQ ID NO: 687432 - protein, 14 aa, Homo sapiens
  CDR3 for beta chain variable domain of TCR clone 343716 (TRBV2, TRBJ1-5)
CASSENRGGQPQHC

SEQ ID NO: 687433 - protein, 15 aa, Homo sapiens
  CDR3 for alpha chain variable domain of TCR clone 343717 (TRAV3, TRAJ36)
CAVRASQTGANNLFF

SEQ ID NO: 687434 - protein, 13 aa, Homo sapiens
  CDR3 for beta chain variable domain of TCR clone 343717 (TRBV10-3, TRBJ1-2)
CAISKRDSYGYTF

SEQ ID NO: 687435 - protein, 11 aa, Homo sapiens
  CDR3 for alpha chain variable domain of TCR clone 343718 (TRAV12-3, TRAJ49)
CAANTGNQFYF

SEQ ID NO: 687436 - protein, 12 aa, Homo sapiens
  CDR3 for beta chain variable domain of TCR clone 343718 (TRBV6-3, TRBJ2-7)
CAISEPGFEQYF

SEQ ID NO: 687437 - protein, 15 aa, Homo sapiens
  CDR3 for alpha chain variable domain of TCR clone 343719 (TRAV34, TRAJ38)
CGADFTPGNNRKLIW

SEQ ID NO: 687438 - protein, 13 aa, Homo sapiens
  CDR3 for beta chain variable domain of TCR clone 343719 (TRBV9, TRBJ1-1)
CASSVGTGTEAFF

SEQ ID NO: 687439 - protein, 14 aa, Homo sapiens
  CDR3 for alpha chain variable domain of TCR clone 343720 (TRAV1-2, TRAJ8)
CAVREDTGFQKLVI

SEQ ID NO: 687440 - protein, 17 aa, Homo sapiens
  CDR3 for beta chain variable domain of TCR clone 343720 (TRBV13, TRBJ2-3)
CASSLSRVAGGRNTQYF

SEQ ID NO: 687441 - protein, 12 aa, Homo sapiens
  CDR3 for alpha chain variable domain of TCR clone 343721 (TRAV36/DV7, TRAJ40)
CAVGTGTYKYIF

SEQ ID NO: 687442 - protein, 14 aa, Homo sapiens
  CDR3 for beta chain variable domain of TCR clone 343721 (TRBV7-2, TRBJ2-7)
CASSPKTSFYEQYF

SEQ ID NO: 687443 - protein, 16 aa, Homo sapiens
  CDR3 for alpha chain variable domain of TCR clone 343722 (TRAV3, TRAJ21)
CAVRNIERGNLNKFYF

SEQ ID NO: 687444 - protein, 13 aa, Homo sapiens
  CDR3 for beta chain variable domain of TCR clone 343722 (TRBV27, TRBJ2-7)
CASSLTTGYEQYF

SEQ ID NO: 687445 - protein, 13 aa, Homo sapiens
  CDR3 for alpha chain variable domain of TCR clone 343723 (TRAV2, TRAJ40)
CAVVTSGTYKYIF

SEQ ID NO: 687446 - protein, 12 aa, Homo sapiens
  CDR3 for beta chain variable domain of TCR clone 343723 (TRBV7-9, TRBJ2-7)
CASRTGFDEQYF

SEQ ID NO: 687447 - protein, 15 aa, Homo sapiens
  CDR3 for alpha chain variable domain of TCR clone 343724 (TRAV27, TRAJ33)
CAGADIMDSNYQLIW

SEQ ID NO: 687448 - protein, 13 aa, Homo sapiens
  CDR3 for beta chain variable domain of TCR clone 343724 (TRBV28, TRBJ1-2)
CATSLQGRGGYTF

SEQ ID NO: 687449 - protein, 15 aa, Homo sapiens
  CDR3 for alpha chain variable domain of TCR clone 343725 (TRAV29/DV5, TRAJ24)
CAASGATDSWGKFPV

SEQ ID NO: 687450 - protein, 12 aa, Homo sapiens
  CDR3 for beta chain variable domain of TCR clone 343725 (TRBV11-2, TRBJ2-2)
CASSLPTGELFF

SEQ ID NO: 687451 - protein, 13 aa, Homo sapiens
  CDR3 for alpha chain variable domain of TCR clone 343726 (TRAV36/DV7, TRAJ37)
CAVFSSNTCKLIF

SEQ ID NO: 687452 - protein, 12 aa, Homo sapiens
  CDR3 for beta chain variable domain of TCR clone 343726 (TRBV11-2, TRBJ2-2)
CASSLGGGELFF

SEQ ID NO: 687453 - protein, 13 aa, Homo sapiens
  CDR3 for alpha chain variable domain of TCR clone 343727 (TRAV27, TRAJ8)
CAGGPTGFQKLVF

SEQ ID NO: 687454 - protein, 15 aa, Homo sapiens
  CDR3 for beta chain variable domain of TCR clone 343727 (TRBV6-1, TRBJ2-7)
CASSETMGDFYEQYF

SEQ ID NO: 687455 - protein, 14 aa, Homo sapiens
  CDR3 for alpha chain variable domain of TCR clone 343728 (TRAV12-3, TRAJ10)
SHLPLTGGGNKLTF

SEQ ID NO: 687456 - protein, 15 aa, Homo sapiens
  CDR3 for beta chain variable domain of TCR clone 343728 (TRBV7-6, TRBJ2-3)
CASSPIIYSTDTQYF

SEQ ID NO: 687457 - protein, 14 aa, Homo sapiens
  CDR3 for alpha chain variable domain of TCR clone 343729 (TRAV12-3, TRAJ50)
CAMSPKTSYDKVIF

SEQ ID NO: 687458 - protein, 13 aa, Homo sapiens
  CDR3 for beta chain variable domain of TCR clone 343729 (TRBV7-3, TRBJ1-1)
CASSQDWGAEAFF

SEQ ID NO: 687459 - protein, 18 aa, Homo sapiens
  CDR3 for alpha chain variable domain of TCR clone 343730 (TRAV21, TRAJ52)
CAVSPSPAGGTSKGKLTF

SEQ ID NO: 687460 - protein, 15 aa, Homo sapiens
  CDR3 for beta chain variable domain of TCR clone 343730 (TRBV6-6, TRBJ2-7)
CASSCSYGGSYEQYF

SEQ ID NO: 687461 - protein, 12 aa, Homo sapiens
  CDR3 for alpha chain variable domain of TCR clone 343731 (TRAV12-3, TRAJ17)
CAMTLTGNKLTF

SEQ ID NO: 687462 - protein, 15 aa, Homo sapiens
  CDR3 for beta chain variable domain of TCR clone 343731 (TRBV7-2, TRBJ2-1)
CASSLVGSSYNEQFF

SEQ ID NO: 687463 - protein, 14 aa, Homo sapiens
  CDR3 for alpha chain variable domain of TCR clone 343732 (TRAV35, TRAJ33)
CAGSSEDSNYQLIW

SEQ ID NO: 687464 - protein, 15 aa, Homo sapiens
  CDR3 for beta chain variable domain of TCR clone 343732 (TRBV20-1, TRBJ2-7)
CSAESGTSGAYEQYF

SEQ ID NO: 687465 - protein, 15 aa, Homo sapiens
  CDR3 for alpha chain variable domain of TCR clone 343733 (TRAV17, TRAJ35)
CATAFVIGFGNVLHC

SEQ ID NO: 687466 - protein, 13 aa, Homo sapiens
  CDR3 for beta chain variable domain of TCR clone 343733 (TRBV4-2, TRBJ1-1)
CASSQAGNTEAFF

SEQ ID NO: 687467 - protein, 16 aa, Homo sapiens
  CDR3 for alpha chain variable domain of TCR clone 343734 (TRAV21, TRAJ52)
CAVTNAGGTSYGKMTF

SEQ ID NO: 687468 - protein, 13 aa, Homo sapiens
  CDR3 for beta chain variable domain of TCR clone 343734 (TRBV20-1, TRBJ2-3)
CSARLAGTDTQYF

SEQ ID NO: 687469 - protein, 16 aa, Homo sapiens
  CDR3 for alpha chain variable domain of TCR clone 343735 (TRAV30, TRAJ24)
CGTEIVGADSWGKFQF

SEQ ID NO: 687470 - protein, 15 aa, Homo sapiens
  CDR3 for beta chain variable domain of TCR clone 343735 (TRBV7-9, TRBJ1-4)
CASSARTGGNEKLFV

SEQ ID NO: 687471 - protein, 14 aa, Homo sapiens
  CDR3 for alpha chain variable domain of TCR clone 343736 (TRAV35, TRAJ42)
CCLPYGGSQGNLIF

SEQ ID NO: 687472 - protein, 18 aa, Homo sapiens
  CDR3 for beta chain variable domain of TCR clone 343736 (TRBV13, TRBJ2-6)
CASSPMTSGGSGANDLTF

SEQ ID NO: 687473 - protein, 11 aa, Homo sapiens
  CDR3 for alpha chain variable domain of TCR clone 343737 (TRAV16, TRAJ20)
CALSEGFKAAL

SEQ ID NO: 687474 - protein, 13 aa, Homo sapiens
  CDR3 for beta chain variable domain of TCR clone 343737 (TRBV7-3, TRBJ2-1)
RASSLDSYNEQFF

SEQ ID NO: 687475 - protein, 15 aa, Homo sapiens
  CDR3 for alpha chain variable domain of TCR clone 343738 (TRAV2, TRAJ9)
RAVEDRGTGGFKTIF

SEQ ID NO: 687476 - protein, 12 aa, Homo sapiens
  CDR3 for beta chain variable domain of TCR clone 343738 (TRBV7-9, TRBJ2-7)
CASSLEGYEQYF

SEQ ID NO: 687477 - protein, 11 aa, Homo sapiens
  CDR3 for alpha chain variable domain of TCR clone 343739 (TRAV2, TRAJ13)
CASGGYQKVTF

SEQ ID NO: 687478 - protein, 12 aa, Homo sapiens
  CDR3 for beta chain variable domain of TCR clone 343739 (TRBV7-2, TRBJ2-5)
CASSQYQETQYF

SEQ ID NO: 687479 - protein, 15 aa, Homo sapiens
  CDR3 for alpha chain variable domain of TCR clone 343740 (TRAV12-3, TRAJ58)
CAMRRQETSGSRLTF

SEQ ID NO: 687480 - protein, 15 aa, Homo sapiens
  CDR3 for beta chain variable domain of TCR clone 343740 (TRBV5-1, TRBJ2-7)
CASSLMTSGSNEQYF

SEQ ID NO: 687481 - protein, 15 aa, Homo sapiens
  CDR3 for alpha chain variable domain of TCR clone 343741 (TRAV8-4, TRAJ12)
CAVSDRVDRSYKLIF

SEQ ID NO: 687482 - protein, 15 aa, Homo sapiens
  CDR3 for beta chain variable domain of TCR clone 343741 (TRBV11-3, TRBJ2-1)
CASSLAGQTYNEQFF

SEQ ID NO: 687483 - protein, 13 aa, Homo sapiens
  CDR3 for alpha chain variable domain of TCR clone 343742 (TRAV2, TRAJ10)
CAVETGGGNKLTF

SEQ ID NO: 687484 - protein, 14 aa, Homo sapiens
  CDR3 for beta chain variable domain of TCR clone 343742 (TRBV20-1, TRBJ2-3)
CSAGGRRGTDTQYF

SEQ ID NO: 687485 - protein, 12 aa, Homo sapiens
  CDR3 for alpha chain variable domain of TCR clone 343743 (TRAV2, TRAJ33)
CAAPDSNYQLIW

SEQ ID NO: 687486 - protein, 15 aa, Homo sapiens
  CDR3 for beta chain variable domain of TCR clone 343743 (TRBV10-2, TRBJ2-6)
CASSEQGTGANVLTF

SEQ ID NO: 687487 - protein, 14 aa, Homo sapiens
  CDR3 for alpha chain variable domain of TCR clone 343744 (TRAV1-2, TRAJ16)
CAVNRFSDGRKLLF

SEQ ID NO: 687488 - protein, 18 aa, Homo sapiens
  CDR3 for beta chain variable domain of TCR clone 343744 (TRBV20-1, TRBJ2-6)
CSAETTPTHGSGANVLTF

SEQ ID NO: 687489 - protein, 14 aa, Homo sapiens
  CDR3 for alpha chain variable domain of TCR clone 343745 (TRAV12-2, TRAJ45)
CAVNIGGGADGLTF

SEQ ID NO: 687490 - protein, 13 aa, Homo sapiens
  CDR3 for beta chain variable domain of TCR clone 343745 (TRBV7-3, TRBJ1-1)
CASSQDWGAEAVF

SEQ ID NO: 687491 - protein, 12 aa, Homo sapiens
  CDR3 for alpha chain variable domain of TCR clone 343746 (TRAV16, TRAJ56)
CAPTGANSKLTL

SEQ ID NO: 687492 - protein, 16 aa, Homo sapiens
  CDR3 for beta chain variable domain of TCR clone 343746 (TRBV19, TRBJ2-2)
CASRSPGTGATGELFF

SEQ ID NO: 687493 - protein, 11 aa, Homo sapiens
  CDR3 for alpha chain variable domain of TCR clone 343747 (TRAV27, TRAJ47)
SIVEYGNKLVF

SEQ ID NO: 687494 - protein, 17 aa, Homo sapiens
  CDR3 for beta chain variable domain of TCR clone 343747 (TRBV2, TRBJ2-1)
CQQGTAGGPRTYNEQFF

SEQ ID NO: 687495 - protein, 15 aa, Homo sapiens
  CDR3 for alpha chain variable domain of TCR clone 343748 (TRAV3, TRAJ22)
CAVRDRGGSARQLTF

SEQ ID NO: 687496 - protein, 15 aa, Homo sapiens
  CDR3 for beta chain variable domain of TCR clone 343748 (TRBV19, TRBJ2-1)
CASSSPGVPLDEQFF

SEQ ID NO: 687497 - protein, 14 aa, Homo sapiens
  CDR3 for alpha chain variable domain of TCR clone 343749 (TRAV16, TRAJ33)
CALSAMDSNYQLIW

SEQ ID NO: 687498 - protein, 17 aa, Homo sapiens
  CDR3 for beta chain variable domain of TCR clone 343749 (TRBV25-1, TRBJ2-7)
CASSDARVVFSSYDQYF

SEQ ID NO: 687499 - protein, 15 aa, Homo sapiens
  CDR3 for alpha chain variable domain of TCR clone 343750 (TRAV8-3, TRAJ27)
CSVCPSKTNAGKSTF

SEQ ID NO: 687500 - protein, 15 aa, Homo sapiens
  CDR3 for beta chain variable domain of TCR clone 343750 (TRBV7-2, TRBJ2-1)
CASSSGLAGGNEQFF

SEQ ID NO: 687501 - protein, 15 aa, Homo sapiens
  CDR3 for alpha chain variable domain of TCR clone 343751 (TRAV26-1, TRAJ3)
CIVRSGYSSASKINF

SEQ ID NO: 687502 - protein, 14 aa, Homo sapiens
  CDR3 for beta chain variable domain of TCR clone 343751 (TRBV13, TRBJ2-5)
CASYRRLAEETQYF

SEQ ID NO: 687503 - protein, 13 aa, Homo sapiens
  CDR3 for alpha chain variable domain of TCR clone 343752 (TRAV26-2, TRAJ57)
CILSRGGSEKLVF

SEQ ID NO: 687504 - protein, 16 aa, Homo sapiens
  CDR3 for beta chain variable domain of TCR clone 343752 (TRBV18, TRBJ1-5)
CPSSPRTGGGNQPQHF

SEQ ID NO: 687505 - protein, 14 aa, Homo sapiens
  CDR3 for alpha chain variable domain of TCR clone 343753 (TRAV20, TRAJ42)
CAVQAGGSQGNLIF

SEQ ID NO: 687506 - protein, 14 aa, Homo sapiens
  CDR3 for beta chain variable domain of TCR clone 343753 (TRBV7-2, TRBJ2-7)
CASSLYPGRYEQYF

SEQ ID NO: 687507 - protein, 12 aa, Homo sapiens
  CDR3 for alpha chain variable domain of TCR clone 343754 (TRAV27, TRAJ13)
CAGAGGYQTVTF

SEQ ID NO: 687508 - protein, 14 aa, Homo sapiens
  CDR3 for beta chain variable domain of TCR clone 343754 (TRBV12-5, TRBJ2-5)
CASGSRTHQETQYF

SEQ ID NO: 687509 - protein, 17 aa, Homo sapiens
  CDR3 for alpha chain variable domain of TCR clone 343755 (TRAV3, TRAJ42)
CAVRDRDYGGSQGNLIF

SEQ ID NO: 687510 - protein, 14 aa, Homo sapiens
  CDR3 for beta chain variable domain of TCR clone 343755 (TRBV19, TRBJ2-2)
CTSSGQGNAGELFF

SEQ ID NO: 687511 - protein, 13 aa, Homo sapiens
  CDR3 for alpha chain variable domain of TCR clone 343756 (TRAV12-1, TRAJ6)
CVVFPGGSYIPTF

SEQ ID NO: 687512 - protein, 16 aa, Homo sapiens
  CDR3 for beta chain variable domain of TCR clone 343756 (TRBV5-1, TRBJ1-1)
CASSSGGNSLNTEAFF

SEQ ID NO: 687513 - protein, 13 aa, Homo sapiens
  CDR3 for alpha chain variable domain of TCR clone 343757 (TRAV2, TRAJ29)
CAAPNSGNTPLVF

SEQ ID NO: 687514 - protein, 14 aa, Homo sapiens
  CDR3 for beta chain variable domain of TCR clone 343757 (TRBV7-9, TRBJ2-4)
CASSLAMGGNMQYF

SEQ ID NO: 687515 - protein, 12 aa, Homo sapiens
  CDR3 for alpha chain variable domain of TCR clone 343758 (TRAV13-2, TRAJ23)
CAERHRGGKLIF

SEQ ID NO: 687516 - protein, 17 aa, Homo sapiens
  CDR3 for beta chain variable domain of TCR clone 343758 (TRBV5-1, TRBJ2-5)
CASSPVALGQNQETQYF

SEQ ID NO: 687517 - protein, 11 aa, Homo sapiens
  CDR3 for alpha chain variable domain of TCR clone 343759 (TRAV2, TRAJ13)
CASGGYQKVTF

SEQ ID NO: 687518 - protein, 16 aa, Homo sapiens
  CDR3 for beta chain variable domain of TCR clone 343759 (TRBV19, TRBJ2-1)
CASSKAGPISYNEQFF

SEQ ID NO: 687519 - protein, 16 aa, Homo sapiens
  CDR3 for alpha chain variable domain of TCR clone 343760 (TRAV1-2, TRAJ10)
CAVRDQGGGGGNKLTF

SEQ ID NO: 687520 - protein, 14 aa, Homo sapiens
  CDR3 for beta chain variable domain of TCR clone 343760 (TRBV6-3, TRBJ1-1)
CASSNLLPGAEAFF

SEQ ID NO: 687521 - protein, 13 aa, Homo sapiens
  CDR3 for alpha chain variable domain of TCR clone 343761 (TRAV12-1, TRAJ33)
CGDAPDSNYQLIW

SEQ ID NO: 687522 - protein, 13 aa, Homo sapiens
  CDR3 for beta chain variable domain of TCR clone 343761 (TRBV20-1, TRBJ1-1)
CSARGGGNTEAFF

SEQ ID NO: 687523 - protein, 15 aa, Homo sapiens
  CDR3 for alpha chain variable domain of TCR clone 343762 (TRAV21, TRAJ53)
CATLNSGGSKYKLTF

SEQ ID NO: 687524 - protein, 16 aa, Homo sapiens
  CDR3 for beta chain variable domain of TCR clone 343762 (TRBV24-1, TRBJ2-3)
CATSDHGTGATDTQYF

SEQ ID NO: 687525 - protein, 12 aa, Homo sapiens
  CDR3 for alpha chain variable domain of TCR clone 343763 (TRAV2, TRAJ9)
CAVGAGGFKTIF

SEQ ID NO: 687526 - protein, 13 aa, Homo sapiens
  CDR3 for beta chain variable domain of TCR clone 343763 (TRBV11-2, TRBJ2-5)
CPSSSTGEETQYF

SEQ ID NO: 687527 - protein, 13 aa, Homo sapiens
  CDR3 for alpha chain variable domain of TCR clone 343764 (TRAV23/DV6, TRAJ34)
CAAIENNTDKIIF

SEQ ID NO: 687528 - protein, 13 aa, Homo sapiens
  CDR3 for beta chain variable domain of TCR clone 343764 (TRBV29-1, TRBJ2-7)
CSVGPSGGYEQYF

SEQ ID NO: 687529 - protein, 15 aa, Homo sapiens
  CDR3 for alpha chain variable domain of TCR clone 343765 (TRAV26-1, TRAJ15)
CIVRMANQAGTAVIF

SEQ ID NO: 687530 - protein, 15 aa, Homo sapiens
  CDR3 for beta chain variable domain of TCR clone 343765 (TRBV20-1, TRBJ1-1)
CSARKAETSNTEAFF

SEQ ID NO: 687531 - protein, 13 aa, Homo sapiens
  CDR3 for alpha chain variable domain of TCR clone 343766 (TRAV21, TRAJ27)
CAARPGNAGKSTF

SEQ ID NO: 687532 - protein, 12 aa, Homo sapiens
  CDR3 for beta chain variable domain of TCR clone 343766 (TRBV11-2, TRBJ2-2)
CASSLGDGELFF

SEQ ID NO: 687533 - protein, 14 aa, Homo sapiens
  CDR3 for alpha chain variable domain of TCR clone 343767 (TRAV12-1, TRAJ13)
CVVIASGGYQKVTF

SEQ ID NO: 687534 - protein, 13 aa, Homo sapiens
  CDR3 for beta chain variable domain of TCR clone 343767 (TRBV20-1, TRBJ1-1)
CSAPPGGHTEAFF

SEQ ID NO: 687535 - protein, 18 aa, Homo sapiens
  CDR3 for alpha chain variable domain of TCR clone 343768 (TRAV21, TRAJ52)
CAVRPSPAGGTSYGKLTF

SEQ ID NO: 687536 - protein, 14 aa, Homo sapiens
  CDR3 for beta chain variable domain of TCR clone 343768 (TRBV9, TRBJ2-7)
CASSVGGEAYEQYF

SEQ ID NO: 687537 - protein, 11 aa, Homo sapiens
  CDR3 for alpha chain variable domain of TCR clone 343769 (TRAV26-2, TRAJ8)
CILTVFQKLVF

SEQ ID NO: 687538 - protein, 19 aa, Homo sapiens
  CDR3 for beta chain variable domain of TCR clone 343769 (TRBV20-1, TRBJ2-1)
CSARGETSGNSPQIDEQFF

SEQ ID NO: 687539 - protein, 12 aa, Homo sapiens
  CDR3 for alpha chain variable domain of TCR clone 343770 (TRAV12-3, TRAJ34)
CAMGYNTDKLIF

SEQ ID NO: 687540 - protein, 16 aa, Homo sapiens
  CDR3 for beta chain variable domain of TCR clone 343770 (TRBV7-2, TRBJ2-7)
CASSRPGTGLVHEQYF

SEQ ID NO: 687541 - protein, 15 aa, Homo sapiens
  CDR3 for alpha chain variable domain of TCR clone 343771 (TRAV26-1, TRAJ29)
CIVRVEGSGNTPLVF

SEQ ID NO: 687542 - protein, 13 aa, Homo sapiens
  CDR3 for beta chain variable domain of TCR clone 343771 (TRBV24-1, TRBJ2-1)
CATSAGPYNEQFF

SEQ ID NO: 687543 - protein, 14 aa, Homo sapiens
  CDR3 for alpha chain variable domain of TCR clone 343772 (TRAV1-2, TRAJ8)
CAVREDTGFQKLVF

SEQ ID NO: 687544 - protein, 12 aa, Homo sapiens
  CDR3 for beta chain variable domain of TCR clone 343772 (TRBV12-4, TRBJ2-1)
CAGSPGRNEQFF

SEQ ID NO: 687545 - protein, 13 aa, Homo sapiens
  CDR3 for alpha chain variable domain of TCR clone 343773 (TRAV26-1, TRAJ29)
CIVRRSGNTPLVF

SEQ ID NO: 687546 - protein, 16 aa, Homo sapiens
  CDR3 for beta chain variable domain of TCR clone 343773 (TRBV11-2, TRBJ1-2)
CASSLDTGGADYGYTF

SEQ ID NO: 687547 - protein, 16 aa, Homo sapiens
  CDR3 for alpha chain variable domain of TCR clone 343774 (TRAV20, TRAJ53)
CAVQAESGGSNYKLTF

SEQ ID NO: 687548 - protein, 13 aa, Homo sapiens
  CDR3 for beta chain variable domain of TCR clone 343774 (TRBV20-1, TRBJ2-3)
CSADQGVSDTQYF

SEQ ID NO: 687549 - protein, 15 aa, Homo sapiens
  CDR3 for alpha chain variable domain of TCR clone 343775 (TRAV23/DV6, TRAJ18)
CAARYRGSTLGRLYL

SEQ ID NO: 687550 - protein, 15 aa, Homo sapiens
  CDR3 for beta chain variable domain of TCR clone 343775 (TRBV9, TRBJ1-6)
CASSVAGTGDSPLHF

SEQ ID NO: 687551 - protein, 13 aa, Homo sapiens
  CDR3 for alpha chain variable domain of TCR clone 343776 (TRAV21, TRAJ36)
CAVIKTGANNLFL

SEQ ID NO: 687552 - protein, 18 aa, Homo sapiens
  CDR3 for beta chain variable domain of TCR clone 343776 (TRBV18, TRBJ1-3)
CASSPRGGAGPSGNTIYF

SEQ ID NO: 687553 - protein, 15 aa, Homo sapiens
  CDR3 for alpha chain variable domain of TCR clone 343777 (TRAV8-3, TRAJ23)
CAVGDRYNQGGKLIF

SEQ ID NO: 687554 - protein, 12 aa, Homo sapiens
  CDR3 for beta chain variable domain of TCR clone 343777 (TRBV29-1, TRBJ2-5)
CSAVPSTSGQAR

SEQ ID NO: 687555 - protein, 21 aa, Homo sapiens
  CDR3 for alpha chain variable domain of TCR clone 343778 (TRAV12-1, TRAJ32)
SSVIQPPTSMIYGGATNKLIF

SEQ ID NO: 687556 - protein, 15 aa, Homo sapiens
  CDR3 for beta chain variable domain of TCR clone 343778 (TRBV7-9, TRBJ2-2)
CASGPLDTFPGELFF

SEQ ID NO: 687557 - protein, 12 aa, Homo sapiens
  CDR3 for alpha chain variable domain of TCR clone 343779 (TRAV8-3, TRAJ26)
CAGDNYGKNFVF

SEQ ID NO: 687558 - protein, 15 aa, Homo sapiens
  CDR3 for beta chain variable domain of TCR clone 343779 (TRBV11-2, TRBJ2-1)
CASSLGTSGLNEQFF

SEQ ID NO: 687559 - protein, 14 aa, Homo sapiens
  CDR3 for alpha chain variable domain of TCR clone 343780 (TRAV1-2, TRAJ16)
CADNRFSDGQKLLF

SEQ ID NO: 687560 - protein, 13 aa, Homo sapiens
  CDR3 for beta chain variable domain of TCR clone 343780 (TRBV19, TRBJ2-7)
CASSTSGSYEQYF

SEQ ID NO: 687561 - protein, 11 aa, Homo sapiens
  CDR3 for alpha chain variable domain of TCR clone 343781 (TRAV27, TRAJ47)
SIVEYGNKLVF

SEQ ID NO: 687562 - protein, 17 aa, Homo sapiens
  CDR3 for beta chain variable domain of TCR clone 343781 (TRBV2, TRBJ2-1)
CASGLAGGPRTYNEQFF

SEQ ID NO: 687563 - protein, 14 aa, Homo sapiens
  CDR3 for alpha chain variable domain of TCR clone 343782 (TRAV1-2, TRAJ8)
CAVREDTGFQKLGF

SEQ ID NO: 687564 - protein, 17 aa, Homo sapiens
  CDR3 for beta chain variable domain of TCR clone 343782 (TRBV11-2, TRBJ2-1)
CASSLYPPGVEYNEQFF

SEQ ID NO: 687565 - protein, 11 aa, Homo sapiens
  CDR3 for alpha chain variable domain of TCR clone 343783 (TRAV8-3, TRAJ18)
CAVGGRQMLNP

SEQ ID NO: 687566 - protein, 13 aa, Homo sapiens
  CDR3 for beta chain variable domain of TCR clone 343783 (TRBV7-9, TRBJ2-5)
CASLPSGRETQYF

SEQ ID NO: 687567 - protein, 14 aa, Homo sapiens
  CDR3 for alpha chain variable domain of TCR clone 343784 (TRAV38-1, TRAJ40)
CALRPTSGTYKYIF

SEQ ID NO: 687568 - protein, 13 aa, Homo sapiens
  CDR3 for beta chain variable domain of TCR clone 343784 (TRBV20-1, TRBJ1-1)
CSAPPGGHTEAFF

SEQ ID NO: 687569 - protein, 16 aa, Homo sapiens
  CDR3 for alpha chain variable domain of TCR clone 343785 (TRAV26-1, TRAJ52)
CIVSNAGGTSYGKLTF

SEQ ID NO: 687570 - protein, 16 aa, Homo sapiens
  CDR3 for beta chain variable domain of TCR clone 343785 (TRBV5-1, TRBJ2-1)
CASSLGGRGLYNEQFF

SEQ ID NO: 687571 - protein, 14 aa, Homo sapiens
  CDR3 for alpha chain variable domain of TCR clone 343786 (TRAV35, TRAJ22)
CAWLRPGSARQPTF

SEQ ID NO: 687572 - protein, 14 aa, Homo sapiens
  CDR3 for beta chain variable domain of TCR clone 343786 (TRBV4-1, TRBJ2-7)
CASSPVAGGDEQYF

SEQ ID NO: 687573 - protein, 16 aa, Homo sapiens
  CDR3 for alpha chain variable domain of TCR clone 343787 (TRAV2, TRAJ13)
CAARILGVTRKIPLEL

SEQ ID NO: 687574 - protein, 14 aa, Homo sapiens
  CDR3 for beta chain variable domain of TCR clone 343787 (TRBV19, TRBJ2-1)
CASEVTGARNEQFF

SEQ ID NO: 687575 - protein, 14 aa, Homo sapiens
  CDR3 for alpha chain variable domain of TCR clone 343788 (TRAV12-2, TRAJ24)
CAVTPAESWGKLQF

SEQ ID NO: 687576 - protein, 14 aa, Homo sapiens
  CDR3 for beta chain variable domain of TCR clone 343788 (TRBV2, TRBJ2-1)
CASRLIVGHDEQFF

SEQ ID NO: 687577 - protein, 12 aa, Homo sapiens
  CDR3 for alpha chain variable domain of TCR clone 343789 (TRAV1-1, TRAJ39)
CAVPVVGNMLTF

SEQ ID NO: 687578 - protein, 15 aa, Homo sapiens
  CDR3 for beta chain variable domain of TCR clone 343789 (TRBV12-4, TRBJ2-5)
CASSPPTGLQETQYF

SEQ ID NO: 687579 - protein, 14 aa, Homo sapiens
  CDR3 for alpha chain variable domain of TCR clone 343790 (TRAV21, TRAJ52)
CGRAGGTSYGKLTF

SEQ ID NO: 687580 - protein, 14 aa, Homo sapiens
  CDR3 for beta chain variable domain of TCR clone 343790 (TRBV19, TRBJ1-2)
CASSVVGYSYGYTF

SEQ ID NO: 687581 - protein, 13 aa, Homo sapiens
  CDR3 for alpha chain variable domain of TCR clone 343791 (TRAV13-1, TRAJ42)
CAARKPRKSHLWK

SEQ ID NO: 687582 - protein, 13 aa, Homo sapiens
  CDR3 for beta chain variable domain of TCR clone 343791 (TRBV2, TRBJ1-4)
CASSELGVETLFF

SEQ ID NO: 687583 - protein, 14 aa, Homo sapiens
  CDR3 for alpha chain variable domain of TCR clone 343792 (TRAV26-1, TRAJ38)
CIADNAGNNRKLMW

SEQ ID NO: 687584 - protein, 13 aa, Homo sapiens
  CDR3 for beta chain variable domain of TCR clone 343792 (TRBV20-1, TRBJ1-1)
RSARGGGNTEAFF

SEQ ID NO: 687585 - protein, 15 aa, Homo sapiens
  CDR3 for alpha chain variable domain of TCR clone 343793 (TRAV21, TRAJ40)
CAVRPQTSGTYKYIF

SEQ ID NO: 687586 - protein, 12 aa, Homo sapiens
  CDR3 for beta chain variable domain of TCR clone 343793 (TRBV7-8, TRBJ2-7)
CASNLGDREQYF

SEQ ID NO: 687587 - protein, 13 aa, Homo sapiens
  CDR3 for alpha chain variable domain of TCR clone 343794 (TRAV12-3, TRAJ43)
CAMIRPNNNDMRF

SEQ ID NO: 687588 - protein, 18 aa, Homo sapiens
  CDR3 for beta chain variable domain of TCR clone 343794 (TRBV7-7, TRBJ2-1)
CASSLALTSGRSYNEQFF

SEQ ID NO: 687589 - protein, 15 aa, Homo sapiens
  CDR3 for alpha chain variable domain of TCR clone 343795 (TRAV3, TRAJ29)
CAVRPGNSGNTPLVF

SEQ ID NO: 687590 - protein, 16 aa, Homo sapiens
  CDR3 for beta chain variable domain of TCR clone 343795 (TRBV24-1, TRBJ2-2)
RATSDPGTANTGELFF

SEQ ID NO: 687591 - protein, 14 aa, Homo sapiens
  CDR3 for alpha chain variable domain of TCR clone 343796 (TRAV23/DV6, TRAJ8)
CAASKNTGFQKLVF

SEQ ID NO: 687592 - protein, 16 aa, Homo sapiens
  CDR3 for beta chain variable domain of TCR clone 343796 (TRBV4-1, TRBJ2-6)
CASSEVGDPEANVLTF

SEQ ID NO: 687593 - protein, 23 aa, Homo sapiens
  CDR3 for alpha chain variable domain of TCR clone 343797 (TRAV26-1, )
CIADNAGKHHIQNPDPAVYQLRD

SEQ ID NO: 687594 - protein, 13 aa, Homo sapiens
  CDR3 for beta chain variable domain of TCR clone 343797 (TRBV20-1, TRBJ1-1)
CSARGGGNTEAFF

SEQ ID NO: 687595 - protein, 16 aa, Homo sapiens
  CDR3 for alpha chain variable domain of TCR clone 343798 (TRAV13-1, TRAJ52)
CAAIMRGGTSYVKLTF

SEQ ID NO: 687596 - protein, 15 aa, Homo sapiens
  CDR3 for beta chain variable domain of TCR clone 343798 (TRBV3-1, TRBJ2-7)
CASSQVAGAQYGQYF

SEQ ID NO: 687597 - protein, 14 aa, Homo sapiens
  CDR3 for alpha chain variable domain of TCR clone 343799 (TRAV17, TRAJ15)
CATMGIQAGTALIF

SEQ ID NO: 687598 - protein, 14 aa, Homo sapiens
  CDR3 for beta chain variable domain of TCR clone 343799 (TRBV7-9, TRBJ2-2)
CASSGLADTGELFF

SEQ ID NO: 687599 - protein, 14 aa, Homo sapiens
  CDR3 for alpha chain variable domain of TCR clone 343800 (TRAV3, TRAJ21)
CAVRDPYNFNKFYF

SEQ ID NO: 687600 - protein, 13 aa, Homo sapiens
  CDR3 for beta chain variable domain of TCR clone 343800 (TRBV7-2, TRBJ2-5)
CASSQTSVETQYF

SEQ ID NO: 687601 - protein, 14 aa, Homo sapiens
  CDR3 for alpha chain variable domain of TCR clone 343801 (TRAV12-2, TRAJ17)
CAVLFKAAGTKLTF

SEQ ID NO: 687602 - protein, 17 aa, Homo sapiens
  CDR3 for beta chain variable domain of TCR clone 343801 (TRBV20-1, TRBJ2-2)
CSAGGSGQGGLTGELFF

SEQ ID NO: 687603 - protein, 13 aa, Homo sapiens
  CDR3 for alpha chain variable domain of TCR clone 343802 (TRAV30, TRAJ6)
CGFIERGSYIPTF

SEQ ID NO: 687604 - protein, 16 aa, Homo sapiens
  CDR3 for beta chain variable domain of TCR clone 343802 (TRBV7-6, TRBJ2-3)
CASSARTSRGTDTQYF

SEQ ID NO: 687605 - protein, 12 aa, Homo sapiens
  CDR3 for alpha chain variable domain of TCR clone 343803 (TRAV13-1, TRAJ49)
CAASIRSNQFYF

SEQ ID NO: 687606 - protein, 14 aa, Homo sapiens
  CDR3 for beta chain variable domain of TCR clone 343803 (TRBV7-2, TRBJ2-1)
CASSPGLAGNEQFF

SEQ ID NO: 687607 - protein, 11 aa, Homo sapiens
  CDR3 for alpha chain variable domain of TCR clone 343804 (TRAV12-3, TRAJ49)
CAANTGNQFYF

SEQ ID NO: 687608 - protein, 12 aa, Homo sapiens
  CDR3 for beta chain variable domain of TCR clone 343804 (TRBV6-3, TRBJ2-7)
CASSEPGFEQSF

SEQ ID NO: 687609 - protein, 17 aa, Homo sapiens
  CDR3 for alpha chain variable domain of TCR clone 343805 (TRAV13-2, TRAJ42)
CAENGKNYGGSQGNLIF

SEQ ID NO: 687610 - protein, 16 aa, Homo sapiens
  CDR3 for beta chain variable domain of TCR clone 343805 (TRBV7-9, TRBJ2-1)
CASSLGTGWDYNEQFF

SEQ ID NO: 687611 - protein, 12 aa, Homo sapiens
  CDR3 for alpha chain variable domain of TCR clone 343806 (TRAV3, TRAJ43)
CAVRDPNNDMRF

SEQ ID NO: 687612 - protein, 15 aa, Homo sapiens
  CDR3 for beta chain variable domain of TCR clone 343806 (TRBV27, TRBJ1-5)
CASILGTGFDQPQHF

SEQ ID NO: 687613 - protein, 13 aa, Homo sapiens
  CDR3 for alpha chain variable domain of TCR clone 343807 (TRAV1-2, TRAJ12)
CAVSMDSSYKLIF

SEQ ID NO: 687614 - protein, 16 aa, Homo sapiens
  CDR3 for beta chain variable domain of TCR clone 343807 (TRBV7-9, TRBJ2-1)
CASSDVAGGSYNEQFF

SEQ ID NO: 687615 - protein, 18 aa, Homo sapiens
  CDR3 for alpha chain variable domain of TCR clone 343808 (TRAV16, TRAJ16)
CALSSLVTGMARSCSLQG

SEQ ID NO: 687616 - protein, 14 aa, Homo sapiens
  CDR3 for beta chain variable domain of TCR clone 343808 (TRBV7-9, TRBJ2-4)
CASTTGGAKNIQYF

SEQ ID NO: 687617 - protein, 14 aa, Homo sapiens
  CDR3 for alpha chain variable domain of TCR clone 343809 (TRAV2, TRAJ37)
CAVADLGNTGKLIF

SEQ ID NO: 687618 - protein, 11 aa, Homo sapiens
  CDR3 for beta chain variable domain of TCR clone 343809 (TRBV25-1, TRBJ2-2)
CASSAQGDEHR

SEQ ID NO: 687619 - protein, 13 aa, Homo sapiens
  CDR3 for alpha chain variable domain of TCR clone 343810 (TRAV21, TRAJ15)
CAVPNQAGTALIF

SEQ ID NO: 687620 - protein, 15 aa, Homo sapiens
  CDR3 for beta chain variable domain of TCR clone 343810 (TRBV11-3, TRBJ2-3)
CASLKDGREGDTQYF

SEQ ID NO: 687621 - protein, 12 aa, Homo sapiens
  CDR3 for alpha chain variable domain of TCR clone 343811 (TRAV12-3, TRAJ17)
CAMKLTGNKLTF

SEQ ID NO: 687622 - protein, 15 aa, Homo sapiens
  CDR3 for beta chain variable domain of TCR clone 343811 (TRBV7-2, TRBJ2-1)
CASTHGTGIYNEQFF

SEQ ID NO: 687623 - protein, 15 aa, Homo sapiens
  CDR3 for alpha chain variable domain of TCR clone 343812 (TRAV12-1, TRAJ44)
CVVFVNTGTAGKLTF

SEQ ID NO: 687624 - protein, 17 aa, Homo sapiens
  CDR3 for beta chain variable domain of TCR clone 343812 (TRBV7-8, TRBJ2-6)
CASSAGTGGAGANVLTF

SEQ ID NO: 687625 - protein, 13 aa, Homo sapiens
  CDR3 for alpha chain variable domain of TCR clone 343813 (TRAV13-2, TRAJ48)
CAEMDFGNEKLTF

SEQ ID NO: 687626 - protein, 13 aa, Homo sapiens
  CDR3 for beta chain variable domain of TCR clone 343813 (TRBV25-1, TRBJ2-3)
CASSEWGTDTQYF

SEQ ID NO: 687627 - protein, 14 aa, Homo sapiens
  CDR3 for alpha chain variable domain of TCR clone 343814 (TRAV13-1, TRAJ44)
CAAKATGTASKLTF

SEQ ID NO: 687628 - protein, 19 aa, Homo sapiens
  CDR3 for beta chain variable domain of TCR clone 343814 (TRBV28, TRBJ2-4)
CASSFQPGGPAQSKNIQYF

SEQ ID NO: 687629 - protein, 14 aa, Homo sapiens
  CDR3 for alpha chain variable domain of TCR clone 343815 (TRAV3, TRAJ22)
CAVRDYGSARQLTF

SEQ ID NO: 687630 - protein, 17 aa, Homo sapiens
  CDR3 for beta chain variable domain of TCR clone 343815 (TRBV11-2, TRBJ2-1)
CASSLYPPGVEYNEQFF

SEQ ID NO: 687631 - protein, 14 aa, Homo sapiens
  CDR3 for alpha chain variable domain of TCR clone 343816 (TRAV12-2, TRAJ11)
CAVNREAGYSTLTF

SEQ ID NO: 687632 - protein, 10 aa, Homo sapiens
  CDR3 for beta chain variable domain of TCR clone 343816 (TRBV20-1, TRBJ2-5)
CSARFETQYF

SEQ ID NO: 687633 - protein, 13 aa, Homo sapiens
  CDR3 for alpha chain variable domain of TCR clone 343817 (TRAV21, TRAJ57)
CAVTQGGSEKLVF

SEQ ID NO: 687634 - protein, 14 aa, Homo sapiens
  CDR3 for beta chain variable domain of TCR clone 343817 (TRBV4-1, TRBJ2-2)
CASSQALNTGELFF

SEQ ID NO: 687635 - protein, 15 aa, Homo sapiens
  CDR3 for alpha chain variable domain of TCR clone 343818 (TRAV20, TRAJ53)
CALQASGGSNYKLTF

SEQ ID NO: 687636 - protein, 12 aa, Homo sapiens
  CDR3 for beta chain variable domain of TCR clone 343818 (TRBV7-6, TRBJ2-5)
CASSLSQETQYF

SEQ ID NO: 687637 - protein, 12 aa, Homo sapiens
  CDR3 for alpha chain variable domain of TCR clone 343819 (TRAV1-1, TRAJ20)
CAVREDDYKLSF

SEQ ID NO: 687638 - protein, 16 aa, Homo sapiens
  CDR3 for beta chain variable domain of TCR clone 343819 (TRBV5-1, TRBJ2-2)
CASSLWDTTNTGELFF

SEQ ID NO: 687639 - protein, 15 aa, Homo sapiens
  CDR3 for alpha chain variable domain of TCR clone 343820 (TRAV23/DV6, TRAJ45)
CAASARGGGADGLPF

SEQ ID NO: 687640 - protein, 15 aa, Homo sapiens
  CDR3 for beta chain variable domain of TCR clone 343820 (TRBV3-1, TRBJ2-5)
CASSRGQASWKTQYF

SEQ ID NO: 687641 - protein, 17 aa, Homo sapiens
  CDR3 for alpha chain variable domain of TCR clone 343821 (TRAV12-1, TRAJ13)
CVVNKRGEFWGLPESYL

SEQ ID NO: 687642 - protein, 17 aa, Homo sapiens
  CDR3 for beta chain variable domain of TCR clone 343821 (TRBV28, TRBJ2-5)
SASSTPEGDALQETQYF

SEQ ID NO: 687643 - protein, 14 aa, Homo sapiens
  CDR3 for alpha chain variable domain of TCR clone 343822 (TRAV6, TRAJ37)
CALGSQGNTGKLIV

SEQ ID NO: 687644 - protein, 15 aa, Homo sapiens
  CDR3 for beta chain variable domain of TCR clone 343822 (TRBV2, TRBJ2-1)
CASSEEREGDNEQFF

SEQ ID NO: 687645 - protein, 14 aa, Homo sapiens
  CDR3 for alpha chain variable domain of TCR clone 343823 (TRAV29/DV5, TRAJ36)
CAARRKTGANHLFF

SEQ ID NO: 687646 - protein, 15 aa, Homo sapiens
  CDR3 for beta chain variable domain of TCR clone 343823 (TRBV29-1, TRBJ2-1)
CSGRDRKSSYNEQFF

SEQ ID NO: 687647 - protein, 15 aa, Homo sapiens
  CDR3 for alpha chain variable domain of TCR clone 343824 (TRAV35, TRAJ41)
CSGQLFSNSGYALNF

SEQ ID NO: 687648 - protein, 14 aa, Homo sapiens
  CDR3 for beta chain variable domain of TCR clone 343824 (TRBV7-2, TRBJ1-2)
CASSRGGTNYGYTF

SEQ ID NO: 687649 - protein, 13 aa, Homo sapiens
  CDR3 for alpha chain variable domain of TCR clone 343825 (TRAV12-3, TRAJ49)
CAMSRNTGNPCYF

SEQ ID NO: 687650 - protein, 16 aa, Homo sapiens
  CDR3 for beta chain variable domain of TCR clone 343825 (TRBV5-8, TRBJ2-2)
CASSLINPGGAGELFF

SEQ ID NO: 687651 - protein, 13 aa, Homo sapiens
  CDR3 for alpha chain variable domain of TCR clone 343826 (TRAV8-3, TRAJ28)
CAVGAVGSYQLTF

SEQ ID NO: 687652 - protein, 13 aa, Homo sapiens
  CDR3 for beta chain variable domain of TCR clone 343826 (TRBV7-9, TRBJ2-1)
CASSLDVGNEQFF

SEQ ID NO: 687653 - protein, 14 aa, Homo sapiens
  CDR3 for alpha chain variable domain of TCR clone 343827 (TRAV1-2, TRAJ16)
CAVNRFSDGQKLLF

SEQ ID NO: 687654 - protein, 13 aa, Homo sapiens
  CDR3 for beta chain variable domain of TCR clone 343827 (TRBV11-2, TRBJ2-1)
CASSLRLTHEQFF

SEQ ID NO: 687655 - protein, 11 aa, Homo sapiens
  CDR3 for alpha chain variable domain of TCR clone 343828 (TRAV12-1, TRAJ30)
CVVNGQDKIIF

SEQ ID NO: 687656 - protein, 13 aa, Homo sapiens
  CDR3 for beta chain variable domain of TCR clone 343828 (TRBV12-4, TRBJ2-7)
CASSPTETYEQYF

SEQ ID NO: 687657 - protein, 15 aa, Homo sapiens
  CDR3 for alpha chain variable domain of TCR clone 343829 (TRAV13-1, TRAJ50)
CAATGSETSYDKVIF

SEQ ID NO: 687658 - protein, 18 aa, Homo sapiens
  CDR3 for beta chain variable domain of TCR clone 343829 (TRBV10-3, TRBJ2-1)
CTSVPAVSLRGGVDEQFF

SEQ ID NO: 687659 - protein, 15 aa, Homo sapiens
  CDR3 for alpha chain variable domain of TCR clone 343830 (TRAV23/DV6, TRAJ18)
CAARYRGSTLGRRYY

SEQ ID NO: 687660 - protein, 13 aa, Homo sapiens
  CDR3 for beta chain variable domain of TCR clone 343830 (TRBV7-2, TRBJ2-7)
CASSSPSGSEQYF

SEQ ID NO: 687661 - protein, 14 aa, Homo sapiens
  CDR3 for alpha chain variable domain of TCR clone 343831 (TRAV26-1, TRAJ34)
CIVRVAYNTGKLIF

SEQ ID NO: 687662 - protein, 15 aa, Homo sapiens
  CDR3 for beta chain variable domain of TCR clone 343831 (TRBV3-1, TRBJ1-2)
CASSHPGTPGYGYTC

SEQ ID NO: 687663 - protein, 12 aa, Homo sapiens
  CDR3 for alpha chain variable domain of TCR clone 343832 (TRAV8-6, TRAJ33)
CAVIDSNYQLIW

SEQ ID NO: 687664 - protein, 15 aa, Homo sapiens
  CDR3 for beta chain variable domain of TCR clone 343832 (TRBV4-3, TRBJ1-2)
CASSRGQGRNYGYTF

SEQ ID NO: 687665 - protein, 10 aa, Homo sapiens
  CDR3 for alpha chain variable domain of TCR clone 343833 (TRAV23/DV6, TRAJ57)
CAASSTLSQG

SEQ ID NO: 687666 - protein, 13 aa, Homo sapiens
  CDR3 for beta chain variable domain of TCR clone 343833 (TRBV28, TRBJ2-7)
CASKAGGVYEQYF

SEQ ID NO: 687667 - protein, 14 aa, Homo sapiens
  CDR3 for alpha chain variable domain of TCR clone 343834 (TRAV8-2, TRAJ4)
CVVSPSGGYNKLIF

SEQ ID NO: 687668 - protein, 13 aa, Homo sapiens
  CDR3 for beta chain variable domain of TCR clone 343834 (TRBV25-1, TRBJ2-2)
CASRKANTGELFF

SEQ ID NO: 687669 - protein, 14 aa, Homo sapiens
  CDR3 for alpha chain variable domain of TCR clone 343835 (TRAV21, TRAJ35)
CAVMSIGFGTVLHC

SEQ ID NO: 687670 - protein, 12 aa, Homo sapiens
  CDR3 for beta chain variable domain of TCR clone 343835 (TRBV7-9, TRBJ2-7)
CASSIKREEQYF

SEQ ID NO: 687671 - protein, 21 aa, Homo sapiens
  CDR3 for alpha chain variable domain of TCR clone 343836 (TRAV36/DV7, TRAJ39)
TATQTGDSAIYLPNAGNMLTF

SEQ ID NO: 687672 - protein, 15 aa, Homo sapiens
  CDR3 for beta chain variable domain of TCR clone 343836 (TRBV11-2, TRBJ2-1)
CASSSPSTRYNEQFF

SEQ ID NO: 687673 - protein, 19 aa, Homo sapiens
  CDR3 for alpha chain variable domain of TCR clone 343837 (TRAV26-1, TRAJ52)
CIVRAHRNAGGTSYRKLTF

SEQ ID NO: 687674 - protein, 15 aa, Homo sapiens
  CDR3 for beta chain variable domain of TCR clone 343837 (TRBV29-1, TRBJ2-1)
CSGRDRKSSYNEQFF

SEQ ID NO: 687675 - protein, 12 aa, Homo sapiens
  CDR3 for alpha chain variable domain of TCR clone 343838 (TRAV41, TRAJ58)
CAVETSGSRLTF

SEQ ID NO: 687676 - protein, 13 aa, Homo sapiens
  CDR3 for beta chain variable domain of TCR clone 343838 (TRBV19, TRBJ1-2)
CASSVPGQDGYTF

SEQ ID NO: 687677 - protein, 14 aa, Homo sapiens
  CDR3 for alpha chain variable domain of TCR clone 343839 (TRAV13-1, TRAJ35)
CAASKGGFGNVLHC

SEQ ID NO: 687678 - protein, 12 aa, Homo sapiens
  CDR3 for beta chain variable domain of TCR clone 343839 (TRBV7-3, TRBJ1-1)
CQQPGLGSEAFF

SEQ ID NO: 687679 - protein, 13 aa, Homo sapiens
  CDR3 for alpha chain variable domain of TCR clone 343840 (TRAV8-3, TRAJ6)
CAVGSGGSYIRTF

SEQ ID NO: 687680 - protein, 14 aa, Homo sapiens
  CDR3 for beta chain variable domain of TCR clone 343840 (TRBV11-2, TRBJ1-1)
CASSTQRGRTEAFF

SEQ ID NO: 687681 - protein, 14 aa, Homo sapiens
  CDR3 for alpha chain variable domain of TCR clone 343841 (TRAV21, TRAJ45)
CAVSSGGGADGLTF

SEQ ID NO: 687682 - protein, 14 aa, Homo sapiens
  CDR3 for beta chain variable domain of TCR clone 343841 (TRBV4-1, TRBJ2-2)
CASSQAVNTGELFF

SEQ ID NO: 687683 - protein, 15 aa, Homo sapiens
  CDR3 for alpha chain variable domain of TCR clone 343842 (TRAV21, TRAJ17)
CAVDEQKAAGNKLTF

SEQ ID NO: 687684 - protein, 17 aa, Homo sapiens
  CDR3 for beta chain variable domain of TCR clone 343842 (TRBV20-1, TRBJ2-1)
CSAPPRLAGTRYNEQFF

SEQ ID NO: 687685 - protein, 14 aa, Homo sapiens
  CDR3 for alpha chain variable domain of TCR clone 343843 (TRAV17, TRAJ57)
CATHPQGGSEKLVF

SEQ ID NO: 687686 - protein, 15 aa, Homo sapiens
  CDR3 for beta chain variable domain of TCR clone 343843 (TRBV5-1, TRBJ2-7)
CASSLDLTSSYEQYF

SEQ ID NO: 687687 - protein, 16 aa, Homo sapiens
  CDR3 for alpha chain variable domain of TCR clone 343844 (TRAV3, TRAJ5)
CAVRNLMDTGRRALTL

SEQ ID NO: 687688 - protein, 16 aa, Homo sapiens
  CDR3 for beta chain variable domain of TCR clone 343844 (TRBV12-5, TRBJ2-5)
CASGPRTSGNQETQYF

SEQ ID NO: 687689 - protein, 18 aa, Homo sapiens
  CDR3 for alpha chain variable domain of TCR clone 343845 (TRAV21, TRAJ52)
CAVRPSPAGGTSNGKLTF

SEQ ID NO: 687690 - protein, 12 aa, Homo sapiens
  CDR3 for beta chain variable domain of TCR clone 343845 (TRBV11-2, TRBJ2-2)
CASSLGGGELFF

SEQ ID NO: 687691 - protein, 12 aa, Homo sapiens
  CDR3 for alpha chain variable domain of TCR clone 343846 (TRAV1-1, TRAJ24)
CAATDSWGKLQF

SEQ ID NO: 687692 - protein, 16 aa, Homo sapiens
  CDR3 for beta chain variable domain of TCR clone 343846 (TRBV12-4, TRBJ1-5)
CASRQPVEGSNQPQHF

SEQ ID NO: 687693 - protein, 16 aa, Homo sapiens
  CDR3 for alpha chain variable domain of TCR clone 343847 (TRAV8-6, TRAJ37)
CAVSGLGSSNTGKLIF

SEQ ID NO: 687694 - protein, 14 aa, Homo sapiens
  CDR3 for beta chain variable domain of TCR clone 343847 (TRBV19, TRBJ2-1)
CASPTFVLSGEQFF

SEQ ID NO: 687695 - protein, 14 aa, Homo sapiens
  CDR3 for alpha chain variable domain of TCR clone 343848 (TRAV34, TRAJ22)
CGADTSGSARQLTF

SEQ ID NO: 687696 - protein, 16 aa, Homo sapiens
  CDR3 for beta chain variable domain of TCR clone 343848 (TRBV2, TRBJ2-3)
CQRRGAPRRWTDTQYF

SEQ ID NO: 687697 - protein, 11 aa, Homo sapiens
  CDR3 for alpha chain variable domain of TCR clone 343849 (TRAV8-3, TRAJ18)
CAVGGRQRLNP

SEQ ID NO: 687698 - protein, 13 aa, Homo sapiens
  CDR3 for beta chain variable domain of TCR clone 343849 (TRBV7-9, TRBJ1-2)
CASSLKQNYGYTF

SEQ ID NO: 687699 - protein, 16 aa, Homo sapiens
  CDR3 for alpha chain variable domain of TCR clone 343850 (TRAV12-3, TRAJ53)
CAMSPGSGGSNYKLTF

SEQ ID NO: 687700 - protein, 13 aa, Homo sapiens
  CDR3 for beta chain variable domain of TCR clone 343850 (TRBV15, TRBJ1-1)
CATSRGIQARAFF

SEQ ID NO: 687701 - protein, 17 aa, Homo sapiens
  CDR3 for alpha chain variable domain of TCR clone 343851 (TRAV36/DV7, TRAJ52)
CAVAQRAGGTSYGKLTF

SEQ ID NO: 687702 - protein, 12 aa, Homo sapiens
  CDR3 for beta chain variable domain of TCR clone 343851 (TRBV5-5, TRBJ2-5)
CASSYFGETQYF

SEQ ID NO: 687703 - protein, 12 aa, Homo sapiens
  CDR3 for alpha chain variable domain of TCR clone 343852 (TRAV27, TRAJ41)
CAGRNSGYALNF

SEQ ID NO: 687704 - protein, 12 aa, Homo sapiens
  CDR3 for beta chain variable domain of TCR clone 343852 (TRBV24-1, TRBJ2-3)
CATGEKTDTQYF

SEQ ID NO: 687705 - protein, 12 aa, Homo sapiens
  CDR3 for alpha chain variable domain of TCR clone 343853 (TRAV12-2, TRAJ4)
GWPEGGYNKLIF

SEQ ID NO: 687706 - protein, 15 aa, Homo sapiens
  CDR3 for beta chain variable domain of TCR clone 343853 (TRBV19, TRBJ1-1)
CASTSGQIQNTEAFF

SEQ ID NO: 687707 - protein, 15 aa, Homo sapiens
  CDR3 for alpha chain variable domain of TCR clone 343854 (TRAV13-1, TRAJ15)
CAASIERQAGTALIF

SEQ ID NO: 687708 - protein, 13 aa, Homo sapiens
  CDR3 for beta chain variable domain of TCR clone 343854 (TRBV5-1, TRBJ2-7)
GASSATGGNEQYF

SEQ ID NO: 687709 - protein, 13 aa, Homo sapiens
  CDR3 for alpha chain variable domain of TCR clone 343855 (TRAV2, TRAJ40)
CAVVTSGTYKYIF

SEQ ID NO: 687710 - protein, 15 aa, Homo sapiens
  CDR3 for beta chain variable domain of TCR clone 343855 (TRBV9, TRBJ2-1)
CASSLAGSSYNEQFF

SEQ ID NO: 687711 - protein, 14 aa, Homo sapiens
  CDR3 for alpha chain variable domain of TCR clone 343856 (TRAV8-4, TRAJ4)
CAVSPSCGYNKLIF

SEQ ID NO: 687712 - protein, 15 aa, Homo sapiens
  CDR3 for beta chain variable domain of TCR clone 343856 (TRBV7-8, TRBJ2-3)
CASSLSADSGGAQYF

SEQ ID NO: 687713 - protein, 12 aa, Homo sapiens
  CDR3 for alpha chain variable domain of TCR clone 343857 (TRAV21, TRAJ23)
CAVMLQGGKLIF

SEQ ID NO: 687714 - protein, 15 aa, Homo sapiens
  CDR3 for beta chain variable domain of TCR clone 343857 (TRBV19, TRBJ2-4)
CASRGPRRGENIQYF

SEQ ID NO: 687715 - protein, 14 aa, Homo sapiens
  CDR3 for alpha chain variable domain of TCR clone 343858 (TRAV21, TRAJ8)
CAVNTGFQKLVLEL

SEQ ID NO: 687716 - protein, 13 aa, Homo sapiens
  CDR3 for beta chain variable domain of TCR clone 343858 (TRBV6-3, TRBJ2-1)
CASSYDNYNEQFF

SEQ ID NO: 687717 - protein, 14 aa, Homo sapiens
  CDR3 for alpha chain variable domain of TCR clone 343859 (TRAV8-4, TRAJ34)
CAVSDPGDTDKLIF

SEQ ID NO: 687718 - protein, 15 aa, Homo sapiens
  CDR3 for beta chain variable domain of TCR clone 343859 (TRBV6-6, TRBJ1-1)
CASSPRGDLETEAFF

SEQ ID NO: 687719 - protein, 13 aa, Homo sapiens
  CDR3 for alpha chain variable domain of TCR clone 343860 (TRAV13-1, TRAJ6)
CAASKGGIYIPTF

SEQ ID NO: 687720 - protein, 14 aa, Homo sapiens
  CDR3 for beta chain variable domain of TCR clone 343860 (TRBV7-2, TRBJ2-1)
CASSLGVGYNEQFF

SEQ ID NO: 687721 - protein, 13 aa, Homo sapiens
  CDR3 for alpha chain variable domain of TCR clone 343861 (TRAV21, TRAJ20)
CAVGVFADSKLSF

SEQ ID NO: 687722 - protein, 14 aa, Homo sapiens
  CDR3 for beta chain variable domain of TCR clone 343861 (TRBV4-2, TRBJ1-4)
CASSPSSGNEKLFF

SEQ ID NO: 687723 - protein, 11 aa, Homo sapiens
  CDR3 for alpha chain variable domain of TCR clone 343862 (TRAV17, TRAJ43)
CATPRSNDMRF

SEQ ID NO: 687724 - protein, 13 aa, Homo sapiens
  CDR3 for beta chain variable domain of TCR clone 343862 (TRBV10-3, TRBJ2-7)
CAAKLAVNYEQYF

SEQ ID NO: 687725 - protein, 13 aa, Homo sapiens
  CDR3 for alpha chain variable domain of TCR clone 343863 (TRAV27, TRAJ41)
CAGEGNSGDALNF

SEQ ID NO: 687726 - protein, 14 aa, Homo sapiens
  CDR3 for beta chain variable domain of TCR clone 343863 (TRBV25-1, TRBJ1-1)
CASTHLGGNTEAFL

SEQ ID NO: 687727 - protein, 13 aa, Homo sapiens
  CDR3 for alpha chain variable domain of TCR clone 343864 (TRAV26-2, TRAJ37)
CIRGSSNTGKLIF

SEQ ID NO: 687728 - protein, 13 aa, Homo sapiens
  CDR3 for beta chain variable domain of TCR clone 343864 (TRBV27, TRBJ2-1)
CASRTLGVGEQFF

SEQ ID NO: 687729 - protein, 10 aa, Homo sapiens
  CDR3 for alpha chain variable domain of TCR clone 343865 (TRAV38-2/DV8, TRAJ40)
CASGTYKYIF

SEQ ID NO: 687730 - protein, 14 aa, Homo sapiens
  CDR3 for beta chain variable domain of TCR clone 343865 (TRBV25-1, TRBJ2-1)
CASSKTGGYNEQFF

SEQ ID NO: 687731 - protein, 14 aa, Homo sapiens
  CDR3 for alpha chain variable domain of TCR clone 343866 (TRAV1-2, TRAJ8)
CAVREDTGFQKLVF

SEQ ID NO: 687732 - protein, 13 aa, Homo sapiens
  CDR3 for beta chain variable domain of TCR clone 343866 (TRBV27, TRBJ2-7)
CASSSGDSYEQYF

SEQ ID NO: 687733 - protein, 16 aa, Homo sapiens
  CDR3 for alpha chain variable domain of TCR clone 343867 (TRAV30, TRAJ49)
SAAQRVGPNTGNQFYF

SEQ ID NO: 687734 - protein, 15 aa, Homo sapiens
  CDR3 for beta chain variable domain of TCR clone 343867 (TRBV2, TRBJ2-1)
CAISELAGSYNEQFF

SEQ ID NO: 687735 - protein, 12 aa, Homo sapiens
  CDR3 for alpha chain variable domain of TCR clone 343868 (TRAV12-2, TRAJ3)
CAVCSSASKIIF

SEQ ID NO: 687736 - protein, 12 aa, Homo sapiens
  CDR3 for beta chain variable domain of TCR clone 343868 (TRBV11-2, TRBJ2-1)
CASGPGNNEQFF

SEQ ID NO: 687737 - protein, 14 aa, Homo sapiens
  CDR3 for alpha chain variable domain of TCR clone 343869 (TRAV17, TRAJ45)
CATASGGGADGLTF

SEQ ID NO: 687738 - protein, 12 aa, Homo sapiens
  CDR3 for beta chain variable domain of TCR clone 343869 (TRBV19, TRBJ1-5)
CASSIAQQPQHF

SEQ ID NO: 687739 - protein, 14 aa, Homo sapiens
  CDR3 for alpha chain variable domain of TCR clone 343870 (TRAV12-2, TRAJ9)
CAVNMEGGGFKTIF

SEQ ID NO: 687740 - protein, 15 aa, Homo sapiens
  CDR3 for beta chain variable domain of TCR clone 343870 (TRBV4-1, TRBJ2-7)
CASSQQGQGFDEQYF

SEQ ID NO: 687741 - protein, 17 aa, Homo sapiens
  CDR3 for alpha chain variable domain of TCR clone 343871 (TRAV12-2, TRAJ39)
CAVNNMLTFGGRTRLMV

SEQ ID NO: 687742 - protein, 16 aa, Homo sapiens
  CDR3 for beta chain variable domain of TCR clone 343871 (TRBV5-3, TRBJ2-2)
CARSFGTGTNTGELFF

SEQ ID NO: 687743 - protein, 13 aa, Homo sapiens
  CDR3 for alpha chain variable domain of TCR clone 343872 (TRAV20, TRAJ34)
CAVHARYHRQAHL

SEQ ID NO: 687744 - protein, 15 aa, Homo sapiens
  CDR3 for beta chain variable domain of TCR clone 343872 (TRBV2, TRBJ2-1)
CASSVTSEGTDEQFF

SEQ ID NO: 687745 - protein, 10 aa, Homo sapiens
  CDR3 for alpha chain variable domain of TCR clone 343873 (TRAV8-4, TRAJ43)
CAVSADDMRF

SEQ ID NO: 687746 - protein, 15 aa, Homo sapiens
  CDR3 for beta chain variable domain of TCR clone 343873 (TRBV7-2, TRBJ2-3)
CASSLAGAFIDTQYF

SEQ ID NO: 687747 - protein, 12 aa, Homo sapiens
  CDR3 for alpha chain variable domain of TCR clone 343874 (TRAV1-1, TRAJ39)
CAVPVVGNMLTF

SEQ ID NO: 687748 - protein, 15 aa, Homo sapiens
  CDR3 for beta chain variable domain of TCR clone 343874 (TRBV7-3, TRBJ2-1)
CASSPTGGGEVEQFF

SEQ ID NO: 687749 - protein, 13 aa, Homo sapiens
  CDR3 for alpha chain variable domain of TCR clone 343875 (TRAV39, TRAJ49)
CAVDRNTGNQFYF

SEQ ID NO: 687750 - protein, 14 aa, Homo sapiens
  CDR3 for beta chain variable domain of TCR clone 343875 (TRBV4-1, TRBJ1-1)
CASSRSGQSCEAFC

SEQ ID NO: 687751 - protein, 14 aa, Homo sapiens
  CDR3 for alpha chain variable domain of TCR clone 343876 (TRAV8-3, TRAJ11)
CAVGSNSGYSTLTF

SEQ ID NO: 687752 - protein, 14 aa, Homo sapiens
  CDR3 for beta chain variable domain of TCR clone 343876 (TRBV5-1, TRBJ2-7)
CASSLTSGSYEQYF

SEQ ID NO: 687753 - protein, 13 aa, Homo sapiens
  CDR3 for alpha chain variable domain of TCR clone 343877 (TRAV41, TRAJ38)
CAGNAGNNRKLIC

SEQ ID NO: 687754 - protein, 14 aa, Homo sapiens
  CDR3 for beta chain variable domain of TCR clone 343877 (TRBV12-4, TRBJ1-1)
CASTWTGHDTEAFF

SEQ ID NO: 687755 - protein, 14 aa, Homo sapiens
  CDR3 for alpha chain variable domain of TCR clone 343878 (TRAV12-2, TRAJ13)
CAVKKTGGSQKVTF

SEQ ID NO: 687756 - protein, 13 aa, Homo sapiens
  CDR3 for beta chain variable domain of TCR clone 343878 (TRBV12-4, TRBJ1-2)
CTSVPTVSFGYTF

SEQ ID NO: 687757 - protein, 19 aa, Homo sapiens
  CDR3 for alpha chain variable domain of TCR clone 343879 (TRAV2, TRAJ20)
ILQVRGADAAVYRDCKLSF

SEQ ID NO: 687758 - protein, 13 aa, Homo sapiens
  CDR3 for beta chain variable domain of TCR clone 343879 (TRBV15, TRBJ1-6)
CATSGGLNSPLHF

SEQ ID NO: 687759 - protein, 14 aa, Homo sapiens
  CDR3 for alpha chain variable domain of TCR clone 343880 (TRAV1-2, TRAJ16)
CAVNRFSDGQKLLF

SEQ ID NO: 687760 - protein, 16 aa, Homo sapiens
  CDR3 for beta chain variable domain of TCR clone 343880 (TRBV12-5, TRBJ2-5)
CASGPRTSGNQETQYL

SEQ ID NO: 687761 - protein, 13 aa, Homo sapiens
  CDR3 for alpha chain variable domain of TCR clone 343881 (TRAV27, TRAJ41)
CAGEGNSGYALNF

SEQ ID NO: 687762 - protein, 12 aa, Homo sapiens
  CDR3 for beta chain variable domain of TCR clone 343881 (TRBV25-1, TRBJ1-1)
CASRHMNTEAFF

SEQ ID NO: 687763 - protein, 15 aa, Homo sapiens
  CDR3 for alpha chain variable domain of TCR clone 343882 (TRAV29/DV5, TRAJ24)
CAASGATDSWGKFQF

SEQ ID NO: 687764 - protein, 15 aa, Homo sapiens
  CDR3 for beta chain variable domain of TCR clone 343882 (TRBV11-2, TRBJ2-1)
CASSRNRGLMYEQFF

SEQ ID NO: 687765 - protein, 15 aa, Homo sapiens
  CDR3 for alpha chain variable domain of TCR clone 343883 (TRAV4, TRAJ39)
CLVGPNNNAGNMLTF

SEQ ID NO: 687766 - protein, 13 aa, Homo sapiens
  CDR3 for beta chain variable domain of TCR clone 343883 (TRBV12-4, TRBJ2-7)
CASSPTETYEQYF

SEQ ID NO: 687767 - protein, 11 aa, Homo sapiens
  CDR3 for alpha chain variable domain of TCR clone 343884 (TRAV12-1, TRAJ34)
CVVNKGRELIF

SEQ ID NO: 687768 - protein, 12 aa, Homo sapiens
  CDR3 for beta chain variable domain of TCR clone 343884 (TRBV2, TRBJ2-1)
CVYGPPGNEQFF

SEQ ID NO: 687769 - protein, 16 aa, Homo sapiens
  CDR3 for alpha chain variable domain of TCR clone 343885 (TRAV12-3, TRAJ53)
CAMSPGSGGSNYKLTF

SEQ ID NO: 687770 - protein, 15 aa, Homo sapiens
  CDR3 for beta chain variable domain of TCR clone 343885 (TRBV28, TRBJ1-2)
CASSSHSIANYGYTF

SEQ ID NO: 687771 - protein, 14 aa, Homo sapiens
  CDR3 for alpha chain variable domain of TCR clone 343886 (TRAV12-2, TRAJ9)
CAVSFGTGGFKTIF

SEQ ID NO: 687772 - protein, 13 aa, Homo sapiens
  CDR3 for beta chain variable domain of TCR clone 343886 (TRBV7-2, TRBJ2-2)
CASSLAVTGELFF

SEQ ID NO: 687773 - protein, 12 aa, Homo sapiens
  CDR3 for alpha chain variable domain of TCR clone 343887 (TRAV21, TRAJ49)
CAVNDGGNQFYF

SEQ ID NO: 687774 - protein, 17 aa, Homo sapiens
  CDR3 for beta chain variable domain of TCR clone 343887 (TRBV4-1, TRBJ2-1)
CASSHRDSGSSYNEQFF

SEQ ID NO: 687775 - protein, 15 aa, Homo sapiens
  CDR3 for alpha chain variable domain of TCR clone 343888 (TRAV12-3, TRAJ6)
CAMSATSGGSYIPTF

SEQ ID NO: 687776 - protein, 13 aa, Homo sapiens
  CDR3 for beta chain variable domain of TCR clone 343888 (TRBV7-9, TRBJ1-2)
CASSLKQNYDYTF

SEQ ID NO: 687777 - protein, 11 aa, Homo sapiens
  CDR3 for alpha chain variable domain of TCR clone 343889 (TRAV12-1, TRAJ37)
CVVNTPSKLIF

SEQ ID NO: 687778 - protein, 13 aa, Homo sapiens
  CDR3 for beta chain variable domain of TCR clone 343889 (TRBV12-4, TRBJ1-5)
CASSPDRAQPQHF

SEQ ID NO: 687779 - protein, 17 aa, Homo sapiens
  CDR3 for alpha chain variable domain of TCR clone 343890 (TRAV3, TRAJ6)
CAVRDGPRAGGSYIPTF

SEQ ID NO: 687780 - protein, 15 aa, Homo sapiens
  CDR3 for beta chain variable domain of TCR clone 343890 (TRBV11-3, TRBJ2-7)
CASSPGPASSYEKYF

SEQ ID NO: 687781 - protein, 14 aa, Homo sapiens
  CDR3 for alpha chain variable domain of TCR clone 343891 (TRAV12-3, TRAJ10)
SHLPLTGGGNKLTF

SEQ ID NO: 687782 - protein, 16 aa, Homo sapiens
  CDR3 for beta chain variable domain of TCR clone 343891 (TRBV24-1, TRBJ2-3)
CATSDPGTGATGTQYF

SEQ ID NO: 687783 - protein, 15 aa, Homo sapiens
  CDR3 for alpha chain variable domain of TCR clone 343892 (TRAV26-1, TRAJ3)
CIVRSGDSSASKIIF

SEQ ID NO: 687784 - protein, 14 aa, Homo sapiens
  CDR3 for beta chain variable domain of TCR clone 343892 (TRBV13, TRBJ2-5)
CASYRRLAEETQYF

SEQ ID NO: 687785 - protein, 16 aa, Homo sapiens
  CDR3 for alpha chain variable domain of TCR clone 343893 (TRAV38-1, TRAJ45)
CAFMKGSGGGSEGLTF

SEQ ID NO: 687786 - protein, 15 aa, Homo sapiens
  CDR3 for beta chain variable domain of TCR clone 343893 (TRBV7-2, TRBJ2-3)
CASSSTGLETDTQYF

SEQ ID NO: 687787 - protein, 12 aa, Homo sapiens
  CDR3 for alpha chain variable domain of TCR clone 343894 (TRAV12-2, TRAJ9)
CAVNTGGFKTIF

SEQ ID NO: 687788 - protein, 13 aa, Homo sapiens
  CDR3 for beta chain variable domain of TCR clone 343894 (TRBV12-4, TRBJ1-2)
CASSLRQGKGYTF

SEQ ID NO: 687789 - protein, 14 aa, Homo sapiens
  CDR3 for alpha chain variable domain of TCR clone 343895 (TRAV12-2, TRAJ45)
CAVNKGGGADGRTF

SEQ ID NO: 687790 - protein, 15 aa, Homo sapiens
  CDR3 for beta chain variable domain of TCR clone 343895 (TRBV9, TRBJ1-6)
CASSAAGTGDSPLHF

SEQ ID NO: 687791 - protein, 14 aa, Homo sapiens
  CDR3 for alpha chain variable domain of TCR clone 343896 (TRAV12-1, TRAJ43)
CVVNGRSNNNDMRF

SEQ ID NO: 687792 - protein, 14 aa, Homo sapiens
  CDR3 for beta chain variable domain of TCR clone 343896 (TRBV7-8, TRBJ2-3)
CASSLEAGTDTQYF

SEQ ID NO: 687793 - protein, 14 aa, Homo sapiens
  CDR3 for alpha chain variable domain of TCR clone 343897 (TRAV23/DV6, TRAJ8)
WAASKNTGFQKLVF

SEQ ID NO: 687794 - protein, 16 aa, Homo sapiens
  CDR3 for beta chain variable domain of TCR clone 343897 (TRBV4-1, TRBJ2-6)
CASSQVGDPGANVLTF

SEQ ID NO: 687795 - protein, 12 aa, Homo sapiens
  CDR3 for alpha chain variable domain of TCR clone 343898 (TRAV26-1, TRAJ26)
CIVFIYGQNFVF

SEQ ID NO: 687796 - protein, 13 aa, Homo sapiens
  CDR3 for beta chain variable domain of TCR clone 343898 (TRBV27, TRBJ1-1)
CAISLSIGAEAFF

SEQ ID NO: 687797 - protein, 14 aa, Homo sapiens
  CDR3 for alpha chain variable domain of TCR clone 343899 (TRAV14/DV4, TRAJ54)
CAMREAPGAQTLVF

SEQ ID NO: 687798 - protein, 15 aa, Homo sapiens
  CDR3 for beta chain variable domain of TCR clone 343899 (TRBV5-1, TRBJ2-7)
CASSLNGGPAREQYF

SEQ ID NO: 687799 - protein, 14 aa, Homo sapiens
  CDR3 for alpha chain variable domain of TCR clone 343900 (TRAV20, TRAJ42)
CAVQAGGSQGNLIF

SEQ ID NO: 687800 - protein, 11 aa, Homo sapiens
  CDR3 for beta chain variable domain of TCR clone 343900 (TRBV28, TRBJ1-2)
CASRIQGRAMA

SEQ ID NO: 687801 - protein, 15 aa, Homo sapiens
  CDR3 for alpha chain variable domain of TCR clone 343901 (TRAV3, TRAJ5)
CALRDLDTGRRALTF

SEQ ID NO: 687802 - protein, 13 aa, Homo sapiens
  CDR3 for beta chain variable domain of TCR clone 343901 (TRBV20-1, TRBJ2-5)
CSARDSKQATQYF

SEQ ID NO: 687803 - protein, 14 aa, Homo sapiens
  CDR3 for alpha chain variable domain of TCR clone 343902 (TRAV1-2, TRAJ16)
CAVNRFSDGQKLLF

SEQ ID NO: 687804 - protein, 13 aa, Homo sapiens
  CDR3 for beta chain variable domain of TCR clone 343902 (TRBV2, TRBJ2-7)
CASRDLQGPEQYF

SEQ ID NO: 687805 - protein, 14 aa, Homo sapiens
  CDR3 for alpha chain variable domain of TCR clone 343903 (TRAV2, TRAJ37)
CAVDFTSNTGKLIF

SEQ ID NO: 687806 - protein, 15 aa, Homo sapiens
  CDR3 for beta chain variable domain of TCR clone 343903 (TRBV11-3, TRBJ1-1)
CASSLGGPGDTEAFF

SEQ ID NO: 687807 - protein, 12 aa, Homo sapiens
  CDR3 for alpha chain variable domain of TCR clone 343904 (TRAV21, TRAJ49)
CAVNDGGNQFYF

SEQ ID NO: 687808 - protein, 17 aa, Homo sapiens
  CDR3 for beta chain variable domain of TCR clone 343904 (TRBV13, TRBJ2-3)
CASSLSRVAGGRNTQYF

SEQ ID NO: 687809 - protein, 13 aa, Homo sapiens
  CDR3 for alpha chain variable domain of TCR clone 343905 (TRAV21, TRAJ26)
CAVLDNYGQNFVF

SEQ ID NO: 687810 - protein, 16 aa, Homo sapiens
  CDR3 for beta chain variable domain of TCR clone 343905 (TRBV29-1, TRBJ2-2)
CSVETIASGNTGELFF

SEQ ID NO: 687811 - protein, 14 aa, Homo sapiens
  CDR3 for alpha chain variable domain of TCR clone 343906 (TRAV12-3, TRAJ54)
CAMRGIQGAQKLVF

SEQ ID NO: 687812 - protein, 13 aa, Homo sapiens
  CDR3 for beta chain variable domain of TCR clone 343906 (TRBV19, TRBJ1-1)
CASSPSNGGEAFS

SEQ ID NO: 687813 - protein, 13 aa, Homo sapiens
  CDR3 for alpha chain variable domain of TCR clone 343907 (TRAV13-1, TRAJ39)
CSKYSNAGNMLTF

SEQ ID NO: 687814 - protein, 16 aa, Homo sapiens
  CDR3 for beta chain variable domain of TCR clone 343907 (TRBV19, TRBJ2-1)
CASSKAGPSSYNEQFF

SEQ ID NO: 687815 - protein, 15 aa, Homo sapiens
  CDR3 for alpha chain variable domain of TCR clone 343908 (TRAV17, TRAJ54)
CATEKLGQGAQKLVF

SEQ ID NO: 687816 - protein, 14 aa, Homo sapiens
  CDR3 for beta chain variable domain of TCR clone 343908 (TRBV7-3, TRBJ1-1)
CQQLRGQMNSEAFF

SEQ ID NO: 687817 - protein, 16 aa, Homo sapiens
  CDR3 for alpha chain variable domain of TCR clone 343909 (TRAV30, TRAJ24)
CGTEIVDADSWGKFQF

SEQ ID NO: 687818 - protein, 15 aa, Homo sapiens
  CDR3 for beta chain variable domain of TCR clone 343909 (TRBV2, TRBJ2-3)
CACSGLAGSTDTQYF

SEQ ID NO: 687819 - protein, 13 aa, Homo sapiens
  CDR3 for alpha chain variable domain of TCR clone 343910 (TRAV3, TRAJ21)
CAVREPAFNKFYF

SEQ ID NO: 687820 - protein, 13 aa, Homo sapiens
  CDR3 for beta chain variable domain of TCR clone 343910 (TRBV12-4, TRBJ1-2)
CASSYRVNYGYTF

SEQ ID NO: 687821 - protein, 14 aa, Homo sapiens
  CDR3 for alpha chain variable domain of TCR clone 343911 (TRAV26-1, TRAJ34)
CIVRVAYNTDKLIF

SEQ ID NO: 687822 - protein, 11 aa, Homo sapiens
  CDR3 for beta chain variable domain of TCR clone 343911 (TRBV19, TRBJ2-2)
CASRYSGELFF

SEQ ID NO: 687823 - protein, 13 aa, Homo sapiens
  CDR3 for alpha chain variable domain of TCR clone 343912 (TRAV8-6, TRAJ21)
CAVSRYNFNKFYF

SEQ ID NO: 687824 - protein, 15 aa, Homo sapiens
  CDR3 for beta chain variable domain of TCR clone 343912 (TRBV5-1, TRBJ2-3)
CASSVTPGSTDTQYF

SEQ ID NO: 687825 - protein, 10 aa, Homo sapiens
  CDR3 for alpha chain variable domain of TCR clone 343913 (TRAV23/DV6, TRAJ57)
CAASSTLSQG

SEQ ID NO: 687826 - protein, 14 aa, Homo sapiens
  CDR3 for beta chain variable domain of TCR clone 343913 (TRBV20-1, TRBJ2-7)
CSAKRGRGSYEQYF

SEQ ID NO: 687827 - protein, 17 aa, Homo sapiens
  CDR3 for alpha chain variable domain of TCR clone 343914 (TRAV1-1, TRAJ4)
CALYNKLIFGAGTRLAV

SEQ ID NO: 687828 - protein, 18 aa, Homo sapiens
  CDR3 for beta chain variable domain of TCR clone 343914 (TRBV27, TRBJ2-7)
CASRTGQFFPGARDELYF

SEQ ID NO: 687829 - protein, 14 aa, Homo sapiens
  CDR3 for alpha chain variable domain of TCR clone 343915 (TRAV12-2, TRAJ6)
CAVNVSRKIHTYIL

SEQ ID NO: 687830 - protein, 13 aa, Homo sapiens
  CDR3 for beta chain variable domain of TCR clone 343915 (TRBV29-1, TRBJ2-3)
SAALQGGADTQYF

SEQ ID NO: 687831 - protein, 18 aa, Homo sapiens
  CDR3 for alpha chain variable domain of TCR clone 343916 (TRAV21, TRAJ52)
CAVRPSPAGGTSFGKLTF

SEQ ID NO: 687832 - protein, 15 aa, Homo sapiens
  CDR3 for beta chain variable domain of TCR clone 343916 (TRBV5-1, TRBJ2-1)
CASSPPRAPYNEQFF

SEQ ID NO: 687833 - protein, 15 aa, Homo sapiens
  CDR3 for alpha chain variable domain of TCR clone 343917 (TRAV14/DV4, TRAJ26)
CAMREGKNYGQNFVF

SEQ ID NO: 687834 - protein, 13 aa, Homo sapiens
  CDR3 for beta chain variable domain of TCR clone 343917 (TRBV24-1, TRBJ2-2)
CATSDWSNGELFF

SEQ ID NO: 687835 - protein, 13 aa, Homo sapiens
  CDR3 for alpha chain variable domain of TCR clone 343918 (TRAV25, TRAJ29)
CAGRFVGNTPLVF

SEQ ID NO: 687836 - protein, 16 aa, Homo sapiens
  CDR3 for beta chain variable domain of TCR clone 343918 (TRBV7-9, TRBJ2-5)
CASSPSGQGVKGTQYF

SEQ ID NO: 687837 - protein, 14 aa, Homo sapiens
  CDR3 for alpha chain variable domain of TCR clone 343919 (TRAV1-2, TRAJ6)
CAVSLSGGNYIPTF

SEQ ID NO: 687838 - protein, 11 aa, Homo sapiens
  CDR3 for beta chain variable domain of TCR clone 343919 (TRBV6-3, TRBJ2-3)
CATGQADTQYF

SEQ ID NO: 687839 - protein, 13 aa, Homo sapiens
  CDR3 for alpha chain variable domain of TCR clone 343920 (TRAV36/DV7, TRAJ53)
CALSGGSNYKLPF

SEQ ID NO: 687840 - protein, 13 aa, Homo sapiens
  CDR3 for beta chain variable domain of TCR clone 343920 (TRBV28, TRBJ2-7)
CASSLPSRYEQYF

SEQ ID NO: 687841 - protein, 14 aa, Homo sapiens
  CDR3 for alpha chain variable domain of TCR clone 343921 (TRAV1-2, TRAJ8)
CAVREDTGFQKLVF

SEQ ID NO: 687842 - protein, 17 aa, Homo sapiens
  CDR3 for beta chain variable domain of TCR clone 343921 (TRBV2, TRBJ2-7)
CASSQALTGWDSYEQYF

SEQ ID NO: 687843 - protein, 12 aa, Homo sapiens
  CDR3 for alpha chain variable domain of TCR clone 343922 (TRAV25, TRAJ16)
CAGNRDGQKLLF

SEQ ID NO: 687844 - protein, 13 aa, Homo sapiens
  CDR3 for beta chain variable domain of TCR clone 343922 (TRBV7-9, TRBJ1-2)
CASSLKQNYGYTF

SEQ ID NO: 687845 - protein, 12 aa, Homo sapiens
  CDR3 for alpha chain variable domain of TCR clone 343923 (TRAV29/DV5, TRAJ34)
CAALHNTDKLIF

SEQ ID NO: 687846 - protein, 15 aa, Homo sapiens
  CDR3 for beta chain variable domain of TCR clone 343923 (TRBV19, TRBJ2-7)
CASSPAGSGEALRYF

SEQ ID NO: 687847 - protein, 12 aa, Homo sapiens
  CDR3 for alpha chain variable domain of TCR clone 343924 (TRAV29/DV5, TRAJ15)
CASNQAGTALIF

SEQ ID NO: 687848 - protein, 15 aa, Homo sapiens
  CDR3 for beta chain variable domain of TCR clone 343924 (TRBV11-2, TRBJ2-2)
CASSSVRVNAGELFF

SEQ ID NO: 687849 - protein, 17 aa, Homo sapiens
  CDR3 for alpha chain variable domain of TCR clone 343925 (TRAV8-6, TRAJ8)
CAVKEGIETTGFQKLVF

SEQ ID NO: 687850 - protein, 12 aa, Homo sapiens
  CDR3 for beta chain variable domain of TCR clone 343925 (TRBV19, TRBJ1-4)
CASKDWPGGLFF

SEQ ID NO: 687851 - protein, 14 aa, Homo sapiens
  CDR3 for alpha chain variable domain of TCR clone 343926 (TRAV12-2, TRAJ13)
CAVNPSGVYQKVTF

SEQ ID NO: 687852 - protein, 13 aa, Homo sapiens
  CDR3 for beta chain variable domain of TCR clone 343926 (TRBV20-1, TRBJ1-6)
CSAKLGGTSPLHF

SEQ ID NO: 687853 - protein, 14 aa, Homo sapiens
  CDR3 for alpha chain variable domain of TCR clone 343927 (TRAV26-1, TRAJ8)
CIVRVDTGFQRLVF

SEQ ID NO: 687854 - protein, 15 aa, Homo sapiens
  CDR3 for beta chain variable domain of TCR clone 343927 (TRBV10-2, TRBJ2-7)
CASWNRVQATYERYF

SEQ ID NO: 687855 - protein, 14 aa, Homo sapiens
  CDR3 for alpha chain variable domain of TCR clone 343928 (TRAV12-2, TRAJ44)
CAVNPAGTASKLTF

SEQ ID NO: 687856 - protein, 15 aa, Homo sapiens
  CDR3 for beta chain variable domain of TCR clone 343928 (TRBV19, TRBJ2-7)
CASSPAGSGEALRYF

SEQ ID NO: 687857 - protein, 15 aa, Homo sapiens
  CDR3 for alpha chain variable domain of TCR clone 343929 (TRAV26-1, TRAJ17)
CIVRVVKAAGNKLTF

SEQ ID NO: 687858 - protein, 13 aa, Homo sapiens
  CDR3 for beta chain variable domain of TCR clone 343929 (TRBV6-1, TRBJ1-2)
CASSAREGYGYTF

SEQ ID NO: 687859 - protein, 13 aa, Homo sapiens
  CDR3 for alpha chain variable domain of TCR clone 343930 (TRAV12-3, TRAJ48)
CAMSLVANEKLTF

SEQ ID NO: 687860 - protein, 11 aa, Homo sapiens
  CDR3 for beta chain variable domain of TCR clone 343930 (TRBV7-2, TRBJ2-7)
CASSSGLWQYF

SEQ ID NO: 687861 - protein, 15 aa, Homo sapiens
  CDR3 for alpha chain variable domain of TCR clone 343931 (TRAV8-4, TRAJ6)
RAVSAPSGGSYIPTF

SEQ ID NO: 687862 - protein, 15 aa, Homo sapiens
  CDR3 for beta chain variable domain of TCR clone 343931 (TRBV7-3, TRBJ2-2)
CASKANGANTGELFF

SEQ ID NO: 687863 - protein, 12 aa, Homo sapiens
  CDR3 for alpha chain variable domain of TCR clone 343932 (TRAV8-3, TRAJ26)
YAGDNYGQNFVF

SEQ ID NO: 687864 - protein, 17 aa, Homo sapiens
  CDR3 for beta chain variable domain of TCR clone 343932 (TRBV7-8, TRBJ2-6)
CASSAGTGGAGANVLTF

SEQ ID NO: 687865 - protein, 17 aa, Homo sapiens
  CDR3 for alpha chain variable domain of TCR clone 343933 (TRAV35, TRAJ38)
CAGQLQRNAGNNLKLIW

SEQ ID NO: 687866 - protein, 15 aa, Homo sapiens
  CDR3 for beta chain variable domain of TCR clone 343933 (TRBV7-9, TRBJ2-1)
CASSLGLAGGTEQFF

SEQ ID NO: 687867 - protein, 14 aa, Homo sapiens
  CDR3 for alpha chain variable domain of TCR clone 343934 (TRAV1-2, TRAJ16)
CAVNRFSDGQKLLF

SEQ ID NO: 687868 - protein, 15 aa, Homo sapiens
  CDR3 for beta chain variable domain of TCR clone 343934 (TRBV7-9, TRBJ2-2)
CASGPLDTFPGKLFF

SEQ ID NO: 687869 - protein, 17 aa, Homo sapiens
  CDR3 for alpha chain variable domain of TCR clone 343935 (TRAV1-1, TRAJ32)
CAVRVDDLWWCYKQAHL

SEQ ID NO: 687870 - protein, 13 aa, Homo sapiens
  CDR3 for beta chain variable domain of TCR clone 343935 (TRBV10-3, TRBJ2-7)
CASKLAVNYEQYF

SEQ ID NO: 687871 - protein, 12 aa, Homo sapiens
  CDR3 for alpha chain variable domain of TCR clone 343936 (TRAV1-1, TRAJ30)
CAVRGRHDKIIF

SEQ ID NO: 687872 - protein, 13 aa, Homo sapiens
  CDR3 for beta chain variable domain of TCR clone 343936 (TRBV11-3, TRBJ2-7)
CASCLDKLYEQYF

SEQ ID NO: 687873 - protein, 15 aa, Homo sapiens
  CDR3 for alpha chain variable domain of TCR clone 343937 (TRAV16, TRAJ42)
CALRRGGGSQGNLIF

SEQ ID NO: 687874 - protein, 14 aa, Homo sapiens
  CDR3 for beta chain variable domain of TCR clone 343937 (TRBV12-5, TRBJ2-5)
CASGSRTHQETQYF

SEQ ID NO: 687875 - protein, 14 aa, Homo sapiens
  CDR3 for alpha chain variable domain of TCR clone 343938 (TRAV12-2, TRAJ17)
CAVLFKAAGNKLTF

SEQ ID NO: 687876 - protein, 14 aa, Homo sapiens
  CDR3 for beta chain variable domain of TCR clone 343938 (TRBV5-7, TRBJ2-2)
CASSLARNTGELFF

SEQ ID NO: 687877 - protein, 11 aa, Homo sapiens
  CDR3 for alpha chain variable domain of TCR clone 343939 (TRAV1-2, TRAJ20)
CAVSNDYKLSF

SEQ ID NO: 687878 - protein, 17 aa, Homo sapiens
  CDR3 for beta chain variable domain of TCR clone 343939 (TRBV6-1, TRBJ1-5)
CASSEAEFIRARQPQHF

SEQ ID NO: 687879 - protein, 19 aa, Homo sapiens
  CDR3 for alpha chain variable domain of TCR clone 343940 (TRAV12-3, TRAJ40)
SPVIQPPTSVQDRTYKYIF

SEQ ID NO: 687880 - protein, 17 aa, Homo sapiens
  CDR3 for beta chain variable domain of TCR clone 343940 (TRBV4-1, TRBJ2-7)
CASSRDPLGVRGGEQYF

SEQ ID NO: 687881 - protein, 14 aa, Homo sapiens
  CDR3 for alpha chain variable domain of TCR clone 343941 (TRAV26-1, TRAJ49)
CIVRVATGGNQFYF

SEQ ID NO: 687882 - protein, 14 aa, Homo sapiens
  CDR3 for beta chain variable domain of TCR clone 343941 (TRBV19, TRBJ2-7)
CASTVQGRPYEQYF

SEQ ID NO: 687883 - protein, 12 aa, Homo sapiens
  CDR3 for alpha chain variable domain of TCR clone 343942 (TRAV36/DV7, TRAJ54)
CAVVRGAQKLVF

SEQ ID NO: 687884 - protein, 15 aa, Homo sapiens
  CDR3 for beta chain variable domain of TCR clone 343942 (TRBV9, TRBJ2-3)
CASSTGGGEGDTQYF

SEQ ID NO: 687885 - protein, 15 aa, Homo sapiens
  CDR3 for alpha chain variable domain of TCR clone 343943 (TRAV35, TRAJ58)
CAGRRQETSGSRLTF

SEQ ID NO: 687886 - protein, 15 aa, Homo sapiens
  CDR3 for beta chain variable domain of TCR clone 343943 (TRBV7-3, TRBJ2-1)
CASSPTGGGEVEQFF

SEQ ID NO: 687887 - protein, 13 aa, Homo sapiens
  CDR3 for alpha chain variable domain of TCR clone 343944 (TRAV2, TRAJ29)
CAVRNSGNTPLVF

SEQ ID NO: 687888 - protein, 16 aa, Homo sapiens
  CDR3 for beta chain variable domain of TCR clone 343944 (TRBV25-1, TRBJ2-7)
CASSELTGGGIYEQYF

SEQ ID NO: 687889 - protein, 12 aa, Homo sapiens
  CDR3 for alpha chain variable domain of TCR clone 343945 (TRAV8-3, TRAJ26)
CAGDNYGQNFVF

SEQ ID NO: 687890 - protein, 14 aa, Homo sapiens
  CDR3 for beta chain variable domain of TCR clone 343945 (TRBV7-9, TRBJ1-1)
CASTPLQSYTEAFF

SEQ ID NO: 687891 - protein, 15 aa, Homo sapiens
  CDR3 for alpha chain variable domain of TCR clone 343946 (TRAV3, TRAJ22)
CAVRDRSGSARQLTF

SEQ ID NO: 687892 - protein, 17 aa, Homo sapiens
  CDR3 for beta chain variable domain of TCR clone 343946 (TRBV28, TRBJ2-5)
CASSTPEGDALQETQYF

SEQ ID NO: 687893 - protein, 13 aa, Homo sapiens
  CDR3 for alpha chain variable domain of TCR clone 343947 (TRAV8-4, TRAJ49)
CAVRTLTGNQFYF

SEQ ID NO: 687894 - protein, 16 aa, Homo sapiens
  CDR3 for beta chain variable domain of TCR clone 343947 (TRBV7-3, TRBJ2-2)
CASSFLPSGYTGELFF

SEQ ID NO: 687895 - protein, 16 aa, Homo sapiens
  CDR3 for alpha chain variable domain of TCR clone 343948 (TRAV30, TRAJ24)
CGTEIVDADSWGKFQF

SEQ ID NO: 687896 - protein, 12 aa, Homo sapiens
  CDR3 for beta chain variable domain of TCR clone 343948 (TRBV14, TRBJ2-5)
CASSHLKETQYF

SEQ ID NO: 687897 - protein, 13 aa, Homo sapiens
  CDR3 for alpha chain variable domain of TCR clone 343949 (TRAV21, TRAJ44)
CAAHTVTASKLTF

SEQ ID NO: 687898 - protein, 18 aa, Homo sapiens
  CDR3 for beta chain variable domain of TCR clone 343949 (TRBV25-1, TRBJ1-2)
CASSGLQNGQGLIFGYTF

SEQ ID NO: 687899 - protein, 16 aa, Homo sapiens
  CDR3 for alpha chain variable domain of TCR clone 343950 (TRAV30, TRAJ24)
CGTEIVDADSWGKFQF

SEQ ID NO: 687900 - protein, 15 aa, Homo sapiens
  CDR3 for beta chain variable domain of TCR clone 343950 (TRBV7-2, TRBJ1-2)
CAISQVWAATSGYTF

SEQ ID NO: 687901 - protein, 13 aa, Homo sapiens
  CDR3 for alpha chain variable domain of TCR clone 343951 (TRAV8-3, TRAJ21)
CAVGAYNFNKFYF

SEQ ID NO: 687902 - protein, 13 aa, Homo sapiens
  CDR3 for beta chain variable domain of TCR clone 343951 (TRBV7-9, TRBJ1-2)
CASSPSNFWGYTF

SEQ ID NO: 687903 - protein, 14 aa, Homo sapiens
  CDR3 for alpha chain variable domain of TCR clone 343952 (TRAV13-1, TRAJ40)
CAARSTSGTYKYIF

SEQ ID NO: 687904 - protein, 15 aa, Homo sapiens
  CDR3 for beta chain variable domain of TCR clone 343952 (TRBV18, TRBJ1-5)
CASSETGGDNQTQHF

SEQ ID NO: 687905 - protein, 13 aa, Homo sapiens
  CDR3 for alpha chain variable domain of TCR clone 343953 (TRAV27, TRAJ45)
CRSSGGGADGLTF

SEQ ID NO: 687906 - protein, 17 aa, Homo sapiens
  CDR3 for beta chain variable domain of TCR clone 343953 (TRBV11-3, TRBJ2-5)
CASSLPGVRGGKETQYF

SEQ ID NO: 687907 - protein, 13 aa, Homo sapiens
  CDR3 for alpha chain variable domain of TCR clone 343954 (TRAV12-1, TRAJ42)
CGGVGGSQGNLIF

SEQ ID NO: 687908 - protein, 18 aa, Homo sapiens
  CDR3 for beta chain variable domain of TCR clone 343954 (TRBV25-1, TRBJ1-2)
CASSGLQNGQGLIFGYTF

SEQ ID NO: 687909 - protein, 11 aa, Homo sapiens
  CDR3 for alpha chain variable domain of TCR clone 343955 (TRAV1-2, TRAJ40)
CAVPGTYKYIF

SEQ ID NO: 687910 - protein, 16 aa, Homo sapiens
  CDR3 for beta chain variable domain of TCR clone 343955 (TRBV7-9, TRBJ1-2)
CASSLGFSSGEDGYTF

SEQ ID NO: 687911 - protein, 13 aa, Homo sapiens
  CDR3 for alpha chain variable domain of TCR clone 343956 (TRAV3, TRAJ16)
CAVRDRNGQKLLF

SEQ ID NO: 687912 - protein, 15 aa, Homo sapiens
  CDR3 for beta chain variable domain of TCR clone 343956 (TRBV5-1, TRBJ2-1)
CASSPPRAPYSEQFF

SEQ ID NO: 687913 - protein, 15 aa, Homo sapiens
  CDR3 for alpha chain variable domain of TCR clone 343957 (TRAV26-1, TRAJ21)
CIVRVPNYNFNKFYF

SEQ ID NO: 687914 - protein, 15 aa, Homo sapiens
  CDR3 for beta chain variable domain of TCR clone 343957 (TRBV7-9, TRBJ1-1)
CASSLLEQGGTEAFF

SEQ ID NO: 687915 - protein, 17 aa, Homo sapiens
  CDR3 for alpha chain variable domain of TCR clone 343958 (TRAV3, TRAJ6)
CAVRDGPRAGGSYIPTF

SEQ ID NO: 687916 - protein, 20 aa, Homo sapiens
  CDR3 for beta chain variable domain of TCR clone 343958 (TRBV28, TRBJ2-1)
CASAPIGRSPGRAGGNEQFF

SEQ ID NO: 687917 - protein, 12 aa, Homo sapiens
  CDR3 for alpha chain variable domain of TCR clone 343959 (TRAV36/DV7, TRAJ37)
CACYGNTGKLNF

SEQ ID NO: 687918 - protein, 13 aa, Homo sapiens
  CDR3 for beta chain variable domain of TCR clone 343959 (TRBV10-3, TRBJ2-7)
CASKLAVNYEQYF

SEQ ID NO: 687919 - protein, 13 aa, Homo sapiens
  CDR3 for alpha chain variable domain of TCR clone 343960 (TRAV17, TRAJ39)
CATEDNAGNMLTF

SEQ ID NO: 687920 - protein, 14 aa, Homo sapiens
  CDR3 for beta chain variable domain of TCR clone 343960 (TRBV5-1, TRBJ1-1)
CASSLQGASTEAFF

SEQ ID NO: 687921 - protein, 18 aa, Homo sapiens
  CDR3 for alpha chain variable domain of TCR clone 343961 (TRAV12-3, TRAJ52)
CAMSVGGAGGTSYGKLTF

SEQ ID NO: 687922 - protein, 15 aa, Homo sapiens
  CDR3 for beta chain variable domain of TCR clone 343961 (TRBV7-3, TRBJ2-1)
CASSLGQGPFGEQFF

SEQ ID NO: 687923 - protein, 19 aa, Homo sapiens
  CDR3 for alpha chain variable domain of TCR clone 343962 (TRAV25, TRAJ20)
TATQTTDVGILPHDYKLSF

SEQ ID NO: 687924 - protein, 16 aa, Homo sapiens
  CDR3 for beta chain variable domain of TCR clone 343962 (TRBV12-5, TRBJ2-5)
CASGPRTSGNQETQYF

SEQ ID NO: 687925 - protein, 12 aa, Homo sapiens
  CDR3 for alpha chain variable domain of TCR clone 343963 (TRAV22, TRAJ29)
CAPPSGNTPLVF

SEQ ID NO: 687926 - protein, 16 aa, Homo sapiens
  CDR3 for beta chain variable domain of TCR clone 343963 (TRBV11-2, TRBJ2-7)
CASSLGGGPTSSTSGR

SEQ ID NO: 687927 - protein, 12 aa, Homo sapiens
  CDR3 for alpha chain variable domain of TCR clone 343964 (TRAV12-2, TRAJ47)
CAVAEYGNKLVF

SEQ ID NO: 687928 - protein, 14 aa, Homo sapiens
  CDR3 for beta chain variable domain of TCR clone 343964 (TRBV7-7, TRBJ2-2)
CATRQDSDTGELFF

SEQ ID NO: 687929 - protein, 13 aa, Homo sapiens
  CDR3 for alpha chain variable domain of TCR clone 343965 (TRAV29/DV5, TRAJ39)
CAARVDNTDMLTF

SEQ ID NO: 687930 - protein, 16 aa, Homo sapiens
  CDR3 for beta chain variable domain of TCR clone 343965 (TRBV7-2, TRBJ1-3)
CASSSGRVLSGNTIYF

SEQ ID NO: 687931 - protein, 12 aa, Homo sapiens
  CDR3 for alpha chain variable domain of TCR clone 343966 (TRAV12-3, TRAJ17)
CAMTLTGNTLTF

SEQ ID NO: 687932 - protein, 14 aa, Homo sapiens
  CDR3 for beta chain variable domain of TCR clone 343966 (TRBV18, TRBJ2-7)
CASSPRGGAYEQYF

SEQ ID NO: 687933 - protein, 10 aa, Homo sapiens
  CDR3 for alpha chain variable domain of TCR clone 343967 (TRAV36/DV7, TRAJ48)
CAVGNEELTF

SEQ ID NO: 687934 - protein, 15 aa, Homo sapiens
  CDR3 for beta chain variable domain of TCR clone 343967 (TRBV5-1, TRBJ1-5)
CASSAAAGGDQPQHF

SEQ ID NO: 687935 - protein, 14 aa, Homo sapiens
  CDR3 for alpha chain variable domain of TCR clone 343968 (TRAV17, TRAJ16)
CATADFSDGQKLLF

SEQ ID NO: 687936 - protein, 15 aa, Homo sapiens
  CDR3 for beta chain variable domain of TCR clone 343968 (TRBV6-5, TRBJ2-1)
CASSYEAGAGNEQFF

SEQ ID NO: 687937 - protein, 14 aa, Homo sapiens
  CDR3 for alpha chain variable domain of TCR clone 343969 (TRAV8-1, TRAJ39)
CAVNASNAGNMLTF

SEQ ID NO: 687938 - protein, 15 aa, Homo sapiens
  CDR3 for beta chain variable domain of TCR clone 343969 (TRBV2, TRBJ2-4)
CASSGTNLAKNIQYF

SEQ ID NO: 687939 - protein, 11 aa, Homo sapiens
  CDR3 for alpha chain variable domain of TCR clone 343970 (TRAV27, TRAJ43)
CAGANNNDMRF

SEQ ID NO: 687940 - protein, 16 aa, Homo sapiens
  CDR3 for beta chain variable domain of TCR clone 343970 (TRBV7-3, TRBJ2-2)
CASSLKRGTLSGELFF

SEQ ID NO: 687941 - protein, 10 aa, Homo sapiens
  CDR3 for alpha chain variable domain of TCR clone 343971 (TRAV25, TRAJ34)
CAYNTDKLIF

SEQ ID NO: 687942 - protein, 15 aa, Homo sapiens
  CDR3 for beta chain variable domain of TCR clone 343971 (TRBV28, TRBJ1-2)
CASSSHSIANYGYTF

SEQ ID NO: 687943 - protein, 13 aa, Homo sapiens
  CDR3 for alpha chain variable domain of TCR clone 343972 (TRAV12-3, TRAJ33)
CAMSVNSTYQLIW

SEQ ID NO: 687944 - protein, 16 aa, Homo sapiens
  CDR3 for beta chain variable domain of TCR clone 343972 (TRBV12-4, TRBJ1-5)
CASSRPVGGSNQPQHF

SEQ ID NO: 687945 - protein, 12 aa, Homo sapiens
  CDR3 for alpha chain variable domain of TCR clone 343973 (TRAV3, TRAJ20)
CAVRDPDHKLSF

SEQ ID NO: 687946 - protein, 11 aa, Homo sapiens
  CDR3 for beta chain variable domain of TCR clone 343973 (TRBV28, TRBJ2-5)
CASSLKETQYF

SEQ ID NO: 687947 - protein, 13 aa, Homo sapiens
  CDR3 for alpha chain variable domain of TCR clone 343974 (TRAV13-2, TRAJ5)
CAESDTGRKALTF

SEQ ID NO: 687948 - protein, 14 aa, Homo sapiens
  CDR3 for beta chain variable domain of TCR clone 343974 (TRBV2, TRBJ1-1)
CASTQVGENTEAFF

SEQ ID NO: 687949 - protein, 14 aa, Homo sapiens
  CDR3 for alpha chain variable domain of TCR clone 343975 (TRAV13-1, TRAJ42)
CSKYSRRSQGNLIF

SEQ ID NO: 687950 - protein, 15 aa, Homo sapiens
  CDR3 for beta chain variable domain of TCR clone 343975 (TRBV19, TRBJ2-1)
CASSIVRGEGREQFF

SEQ ID NO: 687951 - protein, 18 aa, Homo sapiens
  CDR3 for alpha chain variable domain of TCR clone 343976 (TRAV26-2, TRAJ54)
CILRDVEVGIQGAQKLVF

SEQ ID NO: 687952 - protein, 13 aa, Homo sapiens
  CDR3 for beta chain variable domain of TCR clone 343976 (TRBV19, TRBJ1-2)
CASSVPGQDGYTF

SEQ ID NO: 687953 - protein, 15 aa, Homo sapiens
  CDR3 for alpha chain variable domain of TCR clone 343977 (TRAV17, TRAJ57)
CATGPSQGGSEMLVF

SEQ ID NO: 687954 - protein, 14 aa, Homo sapiens
  CDR3 for beta chain variable domain of TCR clone 343977 (TRBV12-5, TRBJ2-5)
CASGSRTHQETQYF

SEQ ID NO: 687955 - protein, 14 aa, Homo sapiens
  CDR3 for alpha chain variable domain of TCR clone 343978 (TRAV1-2, TRAJ16)
CAVNRFSDGQKLLF

SEQ ID NO: 687956 - protein, 15 aa, Homo sapiens
  CDR3 for beta chain variable domain of TCR clone 343978 (TRBV7-9, TRBJ1-6)
CASSAAGSGNSPLHF

SEQ ID NO: 687957 - protein, 15 aa, Homo sapiens
  CDR3 for alpha chain variable domain of TCR clone 343979 (TRAV8-3, TRAJ45)
CALSYSGGGADGLTF

SEQ ID NO: 687958 - protein, 14 aa, Homo sapiens
  CDR3 for beta chain variable domain of TCR clone 343979 (TRBV27, TRBJ2-2)
CASRPGVNTGELFF

SEQ ID NO: 687959 - protein, 13 aa, Homo sapiens
  CDR3 for alpha chain variable domain of TCR clone 343980 (TRAV13-1, TRAJ21)
CAASIYNFNKFYF

SEQ ID NO: 687960 - protein, 13 aa, Homo sapiens
  CDR3 for beta chain variable domain of TCR clone 343980 (TRBV6-4, TRBJ1-1)
CASSSDIGTEAFF

SEQ ID NO: 687961 - protein, 16 aa, Homo sapiens
  CDR3 for alpha chain variable domain of TCR clone 343981 (TRAV3, TRAJ37)
CAVRGKGSGNTGKLIF

SEQ ID NO: 687962 - protein, 13 aa, Homo sapiens
  CDR3 for beta chain variable domain of TCR clone 343981 (TRBV14, TRBJ2-7)
CSSSQARRYEQYF

SEQ ID NO: 687963 - protein, 14 aa, Homo sapiens
  CDR3 for alpha chain variable domain of TCR clone 343982 (TRAV16, TRAJ33)
CALSAMDSNYQLIW

SEQ ID NO: 687964 - protein, 15 aa, Homo sapiens
  CDR3 for beta chain variable domain of TCR clone 343982 (TRBV11-3, TRBJ2-7)
CASSPGPASSYERYF

SEQ ID NO: 687965 - protein, 17 aa, Homo sapiens
  CDR3 for alpha chain variable domain of TCR clone 343983 (TRAV4, TRAJ13)
CIVGVQGSSGGYQKVTF

SEQ ID NO: 687966 - protein, 14 aa, Homo sapiens
  CDR3 for beta chain variable domain of TCR clone 343983 (TRBV2, TRBJ2-1)
CASRTGSSYNEQFF

SEQ ID NO: 687967 - protein, 13 aa, Homo sapiens
  CDR3 for alpha chain variable domain of TCR clone 343984 (TRAV12-1, TRAJ6)
CVVFPGGSYIPPF

SEQ ID NO: 687968 - protein, 15 aa, Homo sapiens
  CDR3 for beta chain variable domain of TCR clone 343984 (TRBV20-1, TRBJ2-1)
CSARGIGGTYNEQFF

SEQ ID NO: 687969 - protein, 20 aa, Homo sapiens
  CDR3 for alpha chain variable domain of TCR clone 343985 (TRAV12-1, TRAJ42)
SSVIQPPTSVTGGSQGNLIF

SEQ ID NO: 687970 - protein, 18 aa, Homo sapiens
  CDR3 for beta chain variable domain of TCR clone 343985 (TRBV11-2, TRBJ2-3)
WASSLGGASRGAPNTQYF

SEQ ID NO: 687971 - protein, 13 aa, Homo sapiens
  CDR3 for alpha chain variable domain of TCR clone 343986 (TRAV2, TRAJ40)
WAVVTSGTYKYIF

SEQ ID NO: 687972 - protein, 15 aa, Homo sapiens
  CDR3 for beta chain variable domain of TCR clone 343986 (TRBV11-3, TRBJ2-3)
CASLKDGREGDTQYL

SEQ ID NO: 687973 - protein, 16 aa, Homo sapiens
  CDR3 for alpha chain variable domain of TCR clone 343987 (TRAV17, TRAJ28)
CASYAYSGAGSYQLTF

SEQ ID NO: 687974 - protein, 14 aa, Homo sapiens
  CDR3 for beta chain variable domain of TCR clone 343987 (TRBV4-2, TRBJ2-1)
CQQPQRGLYNEQFF

SEQ ID NO: 687975 - protein, 14 aa, Homo sapiens
  CDR3 for alpha chain variable domain of TCR clone 343988 (TRAV1-2, TRAJ16)
CAVNRFSDGQKLLF

SEQ ID NO: 687976 - protein, 14 aa, Homo sapiens
  CDR3 for beta chain variable domain of TCR clone 343988 (TRBV11-3, TRBJ2-3)
CASSPGGHTDTQYF

SEQ ID NO: 687977 - protein, 12 aa, Homo sapiens
  CDR3 for alpha chain variable domain of TCR clone 343989 (TRAV12-3, TRAJ17)
CAMTLTGTKLTF

SEQ ID NO: 687978 - protein, 15 aa, Homo sapiens
  CDR3 for beta chain variable domain of TCR clone 343989 (TRBV20-1, TRBJ2-7)
CSARDRVSGMDKQYF

SEQ ID NO: 687979 - protein, 11 aa, Homo sapiens
  CDR3 for alpha chain variable domain of TCR clone 343990 (TRAV2, TRAJ13)
CTSGGYQKVTF

SEQ ID NO: 687980 - protein, 15 aa, Homo sapiens
  CDR3 for beta chain variable domain of TCR clone 343990 (TRBV28, TRBJ2-1)
CASSIIAGGRSEQFF

SEQ ID NO: 687981 - protein, 20 aa, Homo sapiens
  CDR3 for alpha chain variable domain of TCR clone 343991 (TRAV30, TRAJ54)
SAAQSRSETQVVQGAQELVF

SEQ ID NO: 687982 - protein, 14 aa, Homo sapiens
  CDR3 for beta chain variable domain of TCR clone 343991 (TRBV25-1, TRBJ2-4)
CASPDTKTFSASAP

SEQ ID NO: 687983 - protein, 14 aa, Homo sapiens
  CDR3 for alpha chain variable domain of TCR clone 343992 (TRAV13-1, TRAJ24)
CAASPADSWGKFQF

SEQ ID NO: 687984 - protein, 13 aa, Homo sapiens
  CDR3 for beta chain variable domain of TCR clone 343992 (TRBV12-4, TRBJ1-2)
CASSLRQGKGYTF

SEQ ID NO: 687985 - protein, 13 aa, Homo sapiens
  CDR3 for alpha chain variable domain of TCR clone 343993 (TRAV13-1, TRAJ6)
CAAISGGSYIPTF

SEQ ID NO: 687986 - protein, 14 aa, Homo sapiens
  CDR3 for beta chain variable domain of TCR clone 343993 (TRBV20-1, TRBJ2-4)
CSAVAGGPGNIQYF

SEQ ID NO: 687987 - protein, 12 aa, Homo sapiens
  CDR3 for alpha chain variable domain of TCR clone 343994 (TRAV13-2, TRAJ23)
CAERHRGGKLIF

SEQ ID NO: 687988 - protein, 18 aa, Homo sapiens
  CDR3 for beta chain variable domain of TCR clone 343994 (TRBV11-2, TRBJ2-3)
CASSLGGASRGAPNTQYF

SEQ ID NO: 687989 - protein, 15 aa, Homo sapiens
  CDR3 for alpha chain variable domain of TCR clone 343995 (TRAV8-3, TRAJ45)
CASSYPGGGADGLTF

SEQ ID NO: 687990 - protein, 13 aa, Homo sapiens
  CDR3 for beta chain variable domain of TCR clone 343995 (TRBV19, TRBJ1-2)
CASSVPGQDGDTF

SEQ ID NO: 687991 - protein, 15 aa, Homo sapiens
  CDR3 for alpha chain variable domain of TCR clone 343996 (TRAV3, TRAJ22)
CAVRDRGGSARQLTF

SEQ ID NO: 687992 - protein, 12 aa, Homo sapiens
  CDR3 for beta chain variable domain of TCR clone 343996 (TRBV7-8, TRBJ2-7)
CASEGGPHGQYF

SEQ ID NO: 687993 - protein, 14 aa, Homo sapiens
  CDR3 for alpha chain variable domain of TCR clone 343997 (TRAV38-1, TRAJ29)
CAFITPSGNTPLVF

SEQ ID NO: 687994 - protein, 13 aa, Homo sapiens
  CDR3 for beta chain variable domain of TCR clone 343997 (TRBV18, TRBJ2-7)
CSSPRGGAYEQYF

SEQ ID NO: 687995 - protein, 14 aa, Homo sapiens
  CDR3 for alpha chain variable domain of TCR clone 343998 (TRAV12-3, TRAJ10)
SHLPLTGGGDKLTF

SEQ ID NO: 687996 - protein, 11 aa, Homo sapiens
  CDR3 for beta chain variable domain of TCR clone 343998 (TRBV19, TRBJ1-1)
CASSIGSEAFF

SEQ ID NO: 687997 - protein, 15 aa, Homo sapiens
  CDR3 for alpha chain variable domain of TCR clone 343999 (TRAV27, TRAJ38)
CAARRNAGNNRKQIW

SEQ ID NO: 687998 - protein, 17 aa, Homo sapiens
  CDR3 for beta chain variable domain of TCR clone 343999 (TRBV13, TRBJ2-3)
CASSLSRVAGGRNTQYF

SEQ ID NO: 687999 - protein, 18 aa, Homo sapiens
  CDR3 for alpha chain variable domain of TCR clone 344000 (TRAV9-2, TRAJ52)
CAQSRHNAGGTSYGKLTF

SEQ ID NO: 688000 - protein, 13 aa, Homo sapiens
  CDR3 for beta chain variable domain of TCR clone 344000 (TRBV7-9, TRBJ1-2)
CASSLKQNYGYTF

SEQ ID NO: 688001 - protein, 13 aa, Homo sapiens
  CDR3 for alpha chain variable domain of TCR clone 344001 (TRAV12-2, TRAJ39)
CAVNNNAGNMLTF

SEQ ID NO: 688002 - protein, 12 aa, Homo sapiens
  CDR3 for beta chain variable domain of TCR clone 344001 (TRBV5-1, TRBJ2-7)
CASSFRGYAQYF

SEQ ID NO: 688003 - protein, 16 aa, Homo sapiens
  CDR3 for alpha chain variable domain of TCR clone 344002 (TRAV12-3, TRAJ18)
CAMRGSRGSTLGRLYF

SEQ ID NO: 688004 - protein, 13 aa, Homo sapiens
  CDR3 for beta chain variable domain of TCR clone 344002 (TRBV7-9, TRBJ2-1)
CASSLDVGNEQFF

SEQ ID NO: 688005 - protein, 14 aa, Homo sapiens
  CDR3 for alpha chain variable domain of TCR clone 344003 (TRAV8-1, TRAJ23)
CAVGTYNQGGKLIF

SEQ ID NO: 688006 - protein, 16 aa, Homo sapiens
  CDR3 for beta chain variable domain of TCR clone 344003 (TRBV18, TRBJ1-5)
CASSSSTGNSNQPQHF

SEQ ID NO: 688007 - protein, 14 aa, Homo sapiens
  CDR3 for alpha chain variable domain of TCR clone 344004 (TRAV29/DV5, TRAJ32)
CAASQGGATNKLIF

SEQ ID NO: 688008 - protein, 15 aa, Homo sapiens
  CDR3 for beta chain variable domain of TCR clone 344004 (TRBV12-4, TRBJ2-5)
CASSPPTGLQETQYF

SEQ ID NO: 688009 - protein, 12 aa, Homo sapiens
  CDR3 for alpha chain variable domain of TCR clone 344005 (TRAV12-3, TRAJ29)
CAAREGNKPLVF

SEQ ID NO: 688010 - protein, 17 aa, Homo sapiens
  CDR3 for beta chain variable domain of TCR clone 344005 (TRBV18, TRBJ2-1)
CASSPLAAGAGDNEQFF

SEQ ID NO: 688011 - protein, 13 aa, Homo sapiens
  CDR3 for alpha chain variable domain of TCR clone 344006 (TRAV13-1, TRAJ21)
CAASIYNFNKFYF

SEQ ID NO: 688012 - protein, 17 aa, Homo sapiens
  CDR3 for beta chain variable domain of TCR clone 344006 (TRBV27, TRBJ2-5)
CASRLRPGQGVQETQYF

SEQ ID NO: 688013 - protein, 13 aa, Homo sapiens
  CDR3 for alpha chain variable domain of TCR clone 344007 (TRAV16, TRAJ26)
CITVICLGQNFVF

SEQ ID NO: 688014 - protein, 12 aa, Homo sapiens
  CDR3 for beta chain variable domain of TCR clone 344007 (TRBV11-2, TRBJ2-1)
CASSPGNNEQFF

SEQ ID NO: 688015 - protein, 13 aa, Homo sapiens
  CDR3 for alpha chain variable domain of TCR clone 344008 (TRAV2, TRAJ15)
CAVASQAGTALIV

SEQ ID NO: 688016 - protein, 16 aa, Homo sapiens
  CDR3 for beta chain variable domain of TCR clone 344008 (TRBV20-1, TRBJ1-4)
CSAPGQGLLTNENLFF

SEQ ID NO: 688017 - protein, 12 aa, Homo sapiens
  CDR3 for alpha chain variable domain of TCR clone 344009 (TRAV12-3, TRAJ17)
CAMTLTGNELTF

SEQ ID NO: 688018 - protein, 17 aa, Homo sapiens
  CDR3 for beta chain variable domain of TCR clone 344009 (TRBV28, TRBJ2-3)
CASSTYPTGGPKDTQYF

SEQ ID NO: 688019 - protein, 13 aa, Homo sapiens
  CDR3 for alpha chain variable domain of TCR clone 344010 (TRAV3, TRAJ21)
CAAIEPDFNKFYF

SEQ ID NO: 688020 - protein, 14 aa, Homo sapiens
  CDR3 for beta chain variable domain of TCR clone 344010 (TRBV20-1, TRBJ1-1)
CSARAVNGYTEAFF

SEQ ID NO: 688021 - protein, 14 aa, Homo sapiens
  CDR3 for alpha chain variable domain of TCR clone 344011 (TRAV13-1, TRAJ6)
CAASITGGIYIPTF

SEQ ID NO: 688022 - protein, 14 aa, Homo sapiens
  CDR3 for beta chain variable domain of TCR clone 344011 (TRBV6-3, TRBJ2-1)
CASLHSAYYNEQFF

SEQ ID NO: 688023 - protein, 19 aa, Homo sapiens
  CDR3 for alpha chain variable domain of TCR clone 344012 (TRAV8-3, TRAJ8)
LSTSVLWDPMNTGFQKLVF

SEQ ID NO: 688024 - protein, 15 aa, Homo sapiens
  CDR3 for beta chain variable domain of TCR clone 344012 (TRBV11-2, TRBJ2-1)
CASSSPSTRYNEQFF

SEQ ID NO: 688025 - protein, 14 aa, Homo sapiens
  CDR3 for alpha chain variable domain of TCR clone 344013 (TRAV23/DV6, TRAJ8)
CAASKNTGFQKLVF

SEQ ID NO: 688026 - protein, 16 aa, Homo sapiens
  CDR3 for beta chain variable domain of TCR clone 344013 (TRBV4-1, TRBJ2-6)
CASSQVGDPEANVLIF

SEQ ID NO: 688027 - protein, 11 aa, Homo sapiens
  CDR3 for alpha chain variable domain of TCR clone 344014 (TRAV2, TRAJ13)
CASGGYQKVTF

SEQ ID NO: 688028 - protein, 15 aa, Homo sapiens
  CDR3 for beta chain variable domain of TCR clone 344014 (TRBV3-1, TRBJ2-7)
CASSQVQQGAYEQYF

SEQ ID NO: 688029 - protein, 12 aa, Homo sapiens
  CDR3 for alpha chain variable domain of TCR clone 344015 (TRAV12-3, TRAJ17)
CAMTLTGNKLTF

SEQ ID NO: 688030 - protein, 12 aa, Homo sapiens
  CDR3 for beta chain variable domain of TCR clone 344015 (TRBV28, TRBJ2-7)
CASSLLSYEQYF

SEQ ID NO: 688031 - protein, 15 aa, Homo sapiens
  CDR3 for alpha chain variable domain of TCR clone 344016 (TRAV4, TRAJ36)
CLVGDRQTGANNLFF

SEQ ID NO: 688032 - protein, 16 aa, Homo sapiens
  CDR3 for beta chain variable domain of TCR clone 344016 (TRBV2, TRBJ2-1)
CASSVGGSLSYNEQFF

SEQ ID NO: 688033 - protein, 13 aa, Homo sapiens
  CDR3 for alpha chain variable domain of TCR clone 344017 (TRAV13-1, TRAJ21)
CAASIYNVNKFYF

SEQ ID NO: 688034 - protein, 16 aa, Homo sapiens
  CDR3 for beta chain variable domain of TCR clone 344017 (TRBV5-1, TRBJ2-2)
CASSSRTGGRTGELFF

SEQ ID NO: 688035 - protein, 11 aa, Homo sapiens
  CDR3 for alpha chain variable domain of TCR clone 344018 (TRAV3, TRAJ21)
CAVGNFNKFYF

SEQ ID NO: 688036 - protein, 17 aa, Homo sapiens
  CDR3 for beta chain variable domain of TCR clone 344018 (TRBV24-1, TRBJ2-1)
CATSDVSTSGTYNEQFS

SEQ ID NO: 688037 - protein, 15 aa, Homo sapiens
  CDR3 for alpha chain variable domain of TCR clone 344019 (TRAV23/DV6, TRAJ30)
CAASSQESRDDKLIF

SEQ ID NO: 688038 - protein, 17 aa, Homo sapiens
  CDR3 for beta chain variable domain of TCR clone 344019 (TRBV4-3, TRBJ2-1)
CASSQFSSGRASGEQFF

SEQ ID NO: 688039 - protein, 15 aa, Homo sapiens
  CDR3 for alpha chain variable domain of TCR clone 344020 (TRAV8-3, TRAJ15)
CAVGAPNQAGTALIF

SEQ ID NO: 688040 - protein, 14 aa, Homo sapiens
  CDR3 for beta chain variable domain of TCR clone 344020 (TRBV20-1, TRBJ2-1)
CSPNDEASYNDQFF

SEQ ID NO: 688041 - protein, 11 aa, Homo sapiens
  CDR3 for alpha chain variable domain of TCR clone 344021 (TRAV3, TRAJ32)
CAVSPKGMVVL

SEQ ID NO: 688042 - protein, 12 aa, Homo sapiens
  CDR3 for beta chain variable domain of TCR clone 344021 (TRBV14, TRBJ2-7)
CASSLYKDEQYF

SEQ ID NO: 688043 - protein, 12 aa, Homo sapiens
  CDR3 for alpha chain variable domain of TCR clone 344022 (TRAV13-1, TRAJ49)
CAASPMGNQFYF

SEQ ID NO: 688044 - protein, 14 aa, Homo sapiens
  CDR3 for beta chain variable domain of TCR clone 344022 (TRBV20-1, TRBJ2-2)
SAGLVPRAPGSCFF

SEQ ID NO: 688045 - protein, 18 aa, Homo sapiens
  CDR3 for alpha chain variable domain of TCR clone 344023 (TRAV26-2, TRAJ45)
CILRVDKYSGGGADGLTF

SEQ ID NO: 688046 - protein, 16 aa, Homo sapiens
  CDR3 for beta chain variable domain of TCR clone 344023 (TRBV2, TRBJ1-4)
CACNLLQGATNEKLFF

SEQ ID NO: 688047 - protein, 15 aa, Homo sapiens
  CDR3 for alpha chain variable domain of TCR clone 344024 (TRAV19, TRAJ9)
CALSEARTGGFKTIF

SEQ ID NO: 688048 - protein, 17 aa, Homo sapiens
  CDR3 for beta chain variable domain of TCR clone 344024 (TRBV28, TRBJ2-5)
YASSTPEGDALQETQYF

SEQ ID NO: 688049 - protein, 13 aa, Homo sapiens
  CDR3 for alpha chain variable domain of TCR clone 344025 (TRAV21, TRAJ57)
CAVIECGSEKLVF

SEQ ID NO: 688050 - protein, 15 aa, Homo sapiens
  CDR3 for beta chain variable domain of TCR clone 344025 (TRBV10-3, TRBJ2-5)
CAISEFGRGQETQYF

SEQ ID NO: 688051 - protein, 14 aa, Homo sapiens
  CDR3 for alpha chain variable domain of TCR clone 344026 (TRAV1-2, TRAJ16)
CAVNRFSDGQKLLF

SEQ ID NO: 688052 - protein, 15 aa, Homo sapiens
  CDR3 for beta chain variable domain of TCR clone 344026 (TRBV9, TRBJ1-6)
CASSVAGTGESTLHF

SEQ ID NO: 688053 - protein, 11 aa, Homo sapiens
  CDR3 for alpha chain variable domain of TCR clone 344027 (TRAV35, TRAJ33)
NFSDSNYKLIW

SEQ ID NO: 688054 - protein, 15 aa, Homo sapiens
  CDR3 for beta chain variable domain of TCR clone 344027 (TRBV6-5, TRBJ1-1)
CASSYLRGSVPEAFF

SEQ ID NO: 688055 - protein, 19 aa, Homo sapiens
  CDR3 for alpha chain variable domain of TCR clone 344028 (TRAV1-2, TRAJ26)
CLLPLCCERPDNYGQNFVF

SEQ ID NO: 688056 - protein, 17 aa, Homo sapiens
  CDR3 for beta chain variable domain of TCR clone 344028 (TRBV28, TRBJ2-5)
CASSTPEGDALQETQYF

SEQ ID NO: 688057 - protein, 12 aa, Homo sapiens
  CDR3 for alpha chain variable domain of TCR clone 344029 (TRAV12-1, TRAJ16)
CVVFRDGQKLLF

SEQ ID NO: 688058 - protein, 15 aa, Homo sapiens
  CDR3 for beta chain variable domain of TCR clone 344029 (TRBV7-3, TRBJ2-2)
CASSETGQGTGELFF

SEQ ID NO: 688059 - protein, 14 aa, Homo sapiens
  CDR3 for alpha chain variable domain of TCR clone 344030 (TRAV1-1, TRAJ35)
CAVRSIGFGNVLHC

SEQ ID NO: 688060 - protein, 14 aa, Homo sapiens
  CDR3 for beta chain variable domain of TCR clone 344030 (TRBV5-7, TRBJ2-7)
CASSGGLSSYEQSF

SEQ ID NO: 688061 - protein, 14 aa, Homo sapiens
  CDR3 for alpha chain variable domain of TCR clone 344031 (TRAV26-1, TRAJ48)
CIVRVGFGNEKLTF

SEQ ID NO: 688062 - protein, 13 aa, Homo sapiens
  CDR3 for beta chain variable domain of TCR clone 344031 (TRBV11-3, TRBJ2-3)
CASSHDTKDAQNF

SEQ ID NO: 688063 - protein, 15 aa, Homo sapiens
  CDR3 for alpha chain variable domain of TCR clone 344032 (TRAV13-1, TRAJ32)
CGASIYGGATNKLIF

SEQ ID NO: 688064 - protein, 14 aa, Homo sapiens
  CDR3 for beta chain variable domain of TCR clone 344032 (TRBV7-9, TRBJ2-1)
CASSLASGSNEQFF

SEQ ID NO: 688065 - protein, 12 aa, Homo sapiens
  CDR3 for alpha chain variable domain of TCR clone 344033 (TRAV17, TRAJ20)
CATLANDYKLSF

SEQ ID NO: 688066 - protein, 16 aa, Homo sapiens
  CDR3 for beta chain variable domain of TCR clone 344033 (TRBV5-1, TRBJ2-2)
CASSLWDTTNTGELFF

SEQ ID NO: 688067 - protein, 12 aa, Homo sapiens
  CDR3 for alpha chain variable domain of TCR clone 344034 (TRAV2, TRAJ31)
CAVEDNNARLMF

SEQ ID NO: 688068 - protein, 14 aa, Homo sapiens
  CDR3 for beta chain variable domain of TCR clone 344034 (TRBV12-4, TRBJ2-2)
CASNQGANTGELFF

SEQ ID NO: 688069 - protein, 16 aa, Homo sapiens
  CDR3 for alpha chain variable domain of TCR clone 344035 (TRAV4, TRAJ22)
CLVGDLYSGSARQLTF

SEQ ID NO: 688070 - protein, 14 aa, Homo sapiens
  CDR3 for beta chain variable domain of TCR clone 344035 (TRBV18, TRBJ2-5)
CASSPGVSQETQYF

SEQ ID NO: 688071 - protein, 14 aa, Homo sapiens
  CDR3 for alpha chain variable domain of TCR clone 344036 (TRAV4, TRAJ10)
CLVGDTGGGNKLTF

SEQ ID NO: 688072 - protein, 13 aa, Homo sapiens
  CDR3 for beta chain variable domain of TCR clone 344036 (TRBV10-2, TRBJ2-5)
CASSVGPHETQYF

SEQ ID NO: 688073 - protein, 16 aa, Homo sapiens
  CDR3 for alpha chain variable domain of TCR clone 344037 (TRAV38-1, TRAJ24)
CAFMPFLGGATNKLIF

SEQ ID NO: 688074 - protein, 14 aa, Homo sapiens
  CDR3 for beta chain variable domain of TCR clone 344037 (TRBV12-5, TRBJ2-5)
CASGSRTHQETQYF

SEQ ID NO: 688075 - protein, 13 aa, Homo sapiens
  CDR3 for alpha chain variable domain of TCR clone 344038 (TRAV16, TRAJ10)
CALLTGGGNKLPF

SEQ ID NO: 688076 - protein, 12 aa, Homo sapiens
  CDR3 for beta chain variable domain of TCR clone 344038 (TRBV28, TRBJ2-7)
CASTGNHYEQNF

SEQ ID NO: 688077 - protein, 12 aa, Homo sapiens
  CDR3 for alpha chain variable domain of TCR clone 344039 (TRAV12-1, TRAJ40)
CVVYSGTYKYIF

SEQ ID NO: 688078 - protein, 15 aa, Homo sapiens
  CDR3 for beta chain variable domain of TCR clone 344039 (TRBV7-9, TRBJ1-6)
CASSSPGRGNSPLNF

SEQ ID NO: 688079 - protein, 14 aa, Homo sapiens
  CDR3 for alpha chain variable domain of TCR clone 344040 (TRAV1-2, TRAJ8)
CAVREDTGFQKLVF

SEQ ID NO: 688080 - protein, 17 aa, Homo sapiens
  CDR3 for beta chain variable domain of TCR clone 344040 (TRBV20-1, TRBJ2-2)
CSASGSGQGGLTGELFF

SEQ ID NO: 688081 - protein, 16 aa, Homo sapiens
  CDR3 for alpha chain variable domain of TCR clone 344041 (TRAV1-2, TRAJ10)
CAVRGVLTGGGNKLTI

SEQ ID NO: 688082 - protein, 12 aa, Homo sapiens
  CDR3 for beta chain variable domain of TCR clone 344041 (TRBV7-8, TRBJ2-7)
CASSLGHREQYF

SEQ ID NO: 688083 - protein, 14 aa, Homo sapiens
  CDR3 for alpha chain variable domain of TCR clone 344042 (TRAV2, TRAJ22)
CAVEDSGSASQLTF

SEQ ID NO: 688084 - protein, 15 aa, Homo sapiens
  CDR3 for beta chain variable domain of TCR clone 344042 (TRBV28, TRBJ1-2)
CASSLPVGHGDGYTF

SEQ ID NO: 688085 - protein, 14 aa, Homo sapiens
  CDR3 for alpha chain variable domain of TCR clone 344043 (TRAV1-2, TRAJ8)
CAVREDTGFQKLVF

SEQ ID NO: 688086 - protein, 14 aa, Homo sapiens
  CDR3 for beta chain variable domain of TCR clone 344043 (TRBV12-4, TRBJ1-1)
CASSLRSSGTKAFF

SEQ ID NO: 688087 - protein, 16 aa, Homo sapiens
  CDR3 for alpha chain variable domain of TCR clone 344044 (TRAV38-2/DV8, TRAJ57)
CAYRSVGQGGSEKLVF

SEQ ID NO: 688088 - protein, 14 aa, Homo sapiens
  CDR3 for beta chain variable domain of TCR clone 344044 (TRBV7-2, TRBJ2-7)
CASSLPPGQGPQYF

SEQ ID NO: 688089 - protein, 14 aa, Homo sapiens
  CDR3 for alpha chain variable domain of TCR clone 344045 (TRAV20, TRAJ40)
CAVSLTSGTYKYIF

SEQ ID NO: 688090 - protein, 15 aa, Homo sapiens
  CDR3 for beta chain variable domain of TCR clone 344045 (TRBV18, TRBJ2-2)
CASSKTPYGAGELFF

SEQ ID NO: 688091 - protein, 14 aa, Homo sapiens
  CDR3 for alpha chain variable domain of TCR clone 344046 (TRAV2, TRAJ8)
CAGRGNTGFQKLVF

SEQ ID NO: 688092 - protein, 13 aa, Homo sapiens
  CDR3 for beta chain variable domain of TCR clone 344046 (TRBV12-4, TRBJ1-2)
CASSLRQGKGYTF

SEQ ID NO: 688093 - protein, 18 aa, Homo sapiens
  CDR3 for alpha chain variable domain of TCR clone 344047 (TRAV38-1, TRAJ40)
CDVFLCFTPYLRTYKYIF

SEQ ID NO: 688094 - protein, 14 aa, Homo sapiens
  CDR3 for beta chain variable domain of TCR clone 344047 (TRBV25-1, TRBJ1-1)
CASTHLGGNTEAFF

SEQ ID NO: 688095 - protein, 14 aa, Homo sapiens
  CDR3 for alpha chain variable domain of TCR clone 344048 (TRAV13-2, TRAJ43)
CAEIPTYNNNDMRF

SEQ ID NO: 688096 - protein, 17 aa, Homo sapiens
  CDR3 for beta chain variable domain of TCR clone 344048 (TRBV15, TRBJ1-4)
CATSRYGTGDPNEKLFF

SEQ ID NO: 688097 - protein, 22 aa, Homo sapiens
  CDR3 for alpha chain variable domain of TCR clone 344049 (TRAV21, )
CAVRQDAGNNHIQNPDPAVYQL

SEQ ID NO: 688098 - protein, 15 aa, Homo sapiens
  CDR3 for beta chain variable domain of TCR clone 344049 (TRBV6-5, TRBJ2-1)
CASSYDAGAGNEQFF

SEQ ID NO: 688099 - protein, 11 aa, Homo sapiens
  CDR3 for alpha chain variable domain of TCR clone 344050 (TRAV1-1, TRAJ23)
CAVRQGGKLIF

SEQ ID NO: 688100 - protein, 12 aa, Homo sapiens
  CDR3 for beta chain variable domain of TCR clone 344050 (TRBV19, TRBJ2-1)
CASSRQGAEQFF

SEQ ID NO: 688101 - protein, 15 aa, Homo sapiens
  CDR3 for alpha chain variable domain of TCR clone 344051 (TRAV21, TRAJ53)
CATLNSGGSNYKLTF

SEQ ID NO: 688102 - protein, 13 aa, Homo sapiens
  CDR3 for beta chain variable domain of TCR clone 344051 (TRBV6-1, TRBJ1-2)
CASSAREGYGYTF

SEQ ID NO: 688103 - protein, 14 aa, Homo sapiens
  CDR3 for alpha chain variable domain of TCR clone 344052 (TRAV4, TRAJ17)
CLVGAMAAGNKLTF

SEQ ID NO: 688104 - protein, 13 aa, Homo sapiens
  CDR3 for beta chain variable domain of TCR clone 344052 (TRBV18, TRBJ2-7)
CASQSGGGYEQYF

SEQ ID NO: 688105 - protein, 13 aa, Homo sapiens
  CDR3 for alpha chain variable domain of TCR clone 344053 (TRAV8-3, TRAJ5)
CAVGPRGRRALTF

SEQ ID NO: 688106 - protein, 16 aa, Homo sapiens
  CDR3 for beta chain variable domain of TCR clone 344053 (TRBV12-5, TRBJ2-5)
CASGPRTSGNQETQYF

SEQ ID NO: 688107 - protein, 16 aa, Homo sapiens
  CDR3 for alpha chain variable domain of TCR clone 344054 (TRAV12-1, TRAJ48)
CVVDMRDNFGNEKLTF

SEQ ID NO: 688108 - protein, 16 aa, Homo sapiens
  CDR3 for beta chain variable domain of TCR clone 344054 (TRBV7-6, TRBJ2-1)
CASSSVVAGTYNEQFF

SEQ ID NO: 688109 - protein, 14 aa, Homo sapiens
  CDR3 for alpha chain variable domain of TCR clone 344055 (TRAV26-1, TRAJ48)
CIVRVPFGNEKLIF

SEQ ID NO: 688110 - protein, 16 aa, Homo sapiens
  CDR3 for beta chain variable domain of TCR clone 344055 (TRBV18, TRBJ2-1)
CASSPYLSIRGDEQFF

SEQ ID NO: 688111 - protein, 17 aa, Homo sapiens
  CDR3 for alpha chain variable domain of TCR clone 344056 (TRAV13-1, TRAJ3)
CAASKAGRGSSASKIIF

SEQ ID NO: 688112 - protein, 15 aa, Homo sapiens
  CDR3 for beta chain variable domain of TCR clone 344056 (TRBV7-9, TRBJ1-5)
CASSQGHQPNQPQHF

SEQ ID NO: 688113 - protein, 10 aa, Homo sapiens
  CDR3 for alpha chain variable domain of TCR clone 344057 (TRAV13-2, TRAJ49)
CEGTGNQFYF

SEQ ID NO: 688114 - protein, 12 aa, Homo sapiens
  CDR3 for beta chain variable domain of TCR clone 344057 (TRBV5-4, TRBJ2-7)
CASSLEAYEQYF

SEQ ID NO: 688115 - protein, 15 aa, Homo sapiens
  CDR3 for alpha chain variable domain of TCR clone 344058 (TRAV29/DV5, TRAJ57)
CAASLLRGGSETLVF

SEQ ID NO: 688116 - protein, 15 aa, Homo sapiens
  CDR3 for beta chain variable domain of TCR clone 344058 (TRBV5-1, TRBJ1-3)
CASSLEGGSGNTIYF

SEQ ID NO: 688117 - protein, 16 aa, Homo sapiens
  CDR3 for alpha chain variable domain of TCR clone 344059 (TRAV8-4, TRAJ18)
CAVTANGGSTLGRLNF

SEQ ID NO: 688118 - protein, 14 aa, Homo sapiens
  CDR3 for beta chain variable domain of TCR clone 344059 (TRBV12-4, TRBJ1-2)
CASSSAGHIYGYTF

SEQ ID NO: 688119 - protein, 14 aa, Homo sapiens
  CDR3 for alpha chain variable domain of TCR clone 344060 (TRAV1-2, TRAJ8)
FAVREDTGFQKLVF

SEQ ID NO: 688120 - protein, 15 aa, Homo sapiens
  CDR3 for beta chain variable domain of TCR clone 344060 (TRBV20-1, TRBJ2-7)
CSARDRVSGMDEQYF

SEQ ID NO: 688121 - protein, 18 aa, Homo sapiens
  CDR3 for alpha chain variable domain of TCR clone 344061 (TRAV13-1, TRAJ52)
CAAKNPNAGGTSYGKLTF

SEQ ID NO: 688122 - protein, 18 aa, Homo sapiens
  CDR3 for beta chain variable domain of TCR clone 344061 (TRBV4-1, TRBJ1-4)
CASSPRTGGACTNEKLFF

SEQ ID NO: 688123 - protein, 13 aa, Homo sapiens
  CDR3 for alpha chain variable domain of TCR clone 344062 (TRAV8-4, TRAJ10)
CAAFTGGGNKHTF

SEQ ID NO: 688124 - protein, 12 aa, Homo sapiens
  CDR3 for beta chain variable domain of TCR clone 344062 (TRBV3-1, TRBJ2-1)
CASSQGSSGQFF

SEQ ID NO: 688125 - protein, 13 aa, Homo sapiens
  CDR3 for alpha chain variable domain of TCR clone 344063 (TRAV12-1, TRAJ6)
CVVYPGGSYIPTF

SEQ ID NO: 688126 - protein, 15 aa, Homo sapiens
  CDR3 for beta chain variable domain of TCR clone 344063 (TRBV27, TRBJ2-1)
CASSNGGGSSNEQFF

SEQ ID NO: 688127 - protein, 14 aa, Homo sapiens
  CDR3 for alpha chain variable domain of TCR clone 344064 (TRAV29/DV5, TRAJ36)
CAARRKTGANNLSF

SEQ ID NO: 688128 - protein, 16 aa, Homo sapiens
  CDR3 for beta chain variable domain of TCR clone 344064 (TRBV12-5, TRBJ2-5)
CASGPRTSGNQETQYF

SEQ ID NO: 688129 - protein, 11 aa, Homo sapiens
  CDR3 for alpha chain variable domain of TCR clone 344065 (TRAV12-3, TRAJ49)
CAANTGNQFYF

SEQ ID NO: 688130 - protein, 13 aa, Homo sapiens
  CDR3 for beta chain variable domain of TCR clone 344065 (TRBV19, TRBJ2-2)
CASKVSAAGELFF

SEQ ID NO: 688131 - protein, 12 aa, Homo sapiens
  CDR3 for alpha chain variable domain of TCR clone 344066 (TRAV35, TRAJ49)
CAGWNTGSQFYF

SEQ ID NO: 688132 - protein, 16 aa, Homo sapiens
  CDR3 for beta chain variable domain of TCR clone 344066 (TRBV5-1, TRBJ2-2)
CASSLWDTTNTGELFF

SEQ ID NO: 688133 - protein, 13 aa, Homo sapiens
  CDR3 for alpha chain variable domain of TCR clone 344067 (TRAV1-2, TRAJ9)
CAVLNTGGFKTIF

SEQ ID NO: 688134 - protein, 14 aa, Homo sapiens
  CDR3 for beta chain variable domain of TCR clone 344067 (TRBV20-1, TRBJ2-3)
CSARVGTSTDTQYF

SEQ ID NO: 688135 - protein, 14 aa, Homo sapiens
  CDR3 for alpha chain variable domain of TCR clone 344068 (TRAV2, TRAJ9)
GAVEDRSGGFKTIF

SEQ ID NO: 688136 - protein, 13 aa, Homo sapiens
  CDR3 for beta chain variable domain of TCR clone 344068 (TRBV7-3, TRBJ1-1)
CASSQDWGAEAFF

SEQ ID NO: 688137 - protein, 13 aa, Homo sapiens
  CDR3 for alpha chain variable domain of TCR clone 344069 (TRAV12-3, TRAJ13)
CAMSPGGYQKVTF

SEQ ID NO: 688138 - protein, 14 aa, Homo sapiens
  CDR3 for beta chain variable domain of TCR clone 344069 (TRBV2, TRBJ2-1)
CASRTGSSYNEQFF

SEQ ID NO: 688139 - protein, 13 aa, Homo sapiens
  CDR3 for alpha chain variable domain of TCR clone 344070 (TRAV13-1, TRAJ41)
CADAPNSVYALNF

SEQ ID NO: 688140 - protein, 13 aa, Homo sapiens
  CDR3 for beta chain variable domain of TCR clone 344070 (TRBV19, TRBJ2-7)
CASEGTTTYEQYV

SEQ ID NO: 688141 - protein, 15 aa, Homo sapiens
  CDR3 for alpha chain variable domain of TCR clone 344071 (TRAV13-1, TRAJ44)
VQQVGGGGTASKLTF

SEQ ID NO: 688142 - protein, 14 aa, Homo sapiens
  CDR3 for beta chain variable domain of TCR clone 344071 (TRBV7-2, TRBJ2-5)
CASSPRGSSETQYF

SEQ ID NO: 688143 - protein, 11 aa, Homo sapiens
  CDR3 for alpha chain variable domain of TCR clone 344072 (TRAV2, TRAJ21)
CAVFNFNKFYF

SEQ ID NO: 688144 - protein, 14 aa, Homo sapiens
  CDR3 for beta chain variable domain of TCR clone 344072 (TRBV15, TRBJ2-3)
CATRSGTSKDTQYF

SEQ ID NO: 688145 - protein, 16 aa, Homo sapiens
  CDR3 for alpha chain variable domain of TCR clone 344073 (TRAV4, TRAJ22)
CLVGDLYSGSARQLTF

SEQ ID NO: 688146 - protein, 17 aa, Homo sapiens
  CDR3 for beta chain variable domain of TCR clone 344073 (TRBV11-2, TRBJ2-3)
CASSPTGTGGLTDTQYF

SEQ ID NO: 688147 - protein, 15 aa, Homo sapiens
  CDR3 for alpha chain variable domain of TCR clone 344074 (TRAV3, TRAJ24)
CAVRDKMTTGGNCSL

SEQ ID NO: 688148 - protein, 14 aa, Homo sapiens
  CDR3 for beta chain variable domain of TCR clone 344074 (TRBV7-2, TRBJ2-3)
CASSQTGSSYTQYF

SEQ ID NO: 688149 - protein, 14 aa, Homo sapiens
  CDR3 for alpha chain variable domain of TCR clone 344075 (TRAV23/DV6, TRAJ22)
CAASVSGSARQLTV

SEQ ID NO: 688150 - protein, 16 aa, Homo sapiens
  CDR3 for beta chain variable domain of TCR clone 344075 (TRBV19, TRBJ2-2)
CASSFPGQGLAGELFF

SEQ ID NO: 688151 - protein, 12 aa, Homo sapiens
  CDR3 for alpha chain variable domain of TCR clone 344076 (TRAV17, TRAJ4)
CATDGGYNKLIF

SEQ ID NO: 688152 - protein, 13 aa, Homo sapiens
  CDR3 for beta chain variable domain of TCR clone 344076 (TRBV29-1, TRBJ2-2)
CSTTGVNTGELCF

SEQ ID NO: 688153 - protein, 11 aa, Homo sapiens
  CDR3 for alpha chain variable domain of TCR clone 344077 (TRAV26-1, TRAJ47)
CIFFHRIWKQT

SEQ ID NO: 688154 - protein, 13 aa, Homo sapiens
  CDR3 for beta chain variable domain of TCR clone 344077 (TRBV24-1, TRBJ2-7)
CATSDLGPYEQYF

SEQ ID NO: 688155 - protein, 12 aa, Homo sapiens
  CDR3 for alpha chain variable domain of TCR clone 344078 (TRAV12-3, TRAJ20)
CAMVRGDYRLSF

SEQ ID NO: 688156 - protein, 14 aa, Homo sapiens
  CDR3 for beta chain variable domain of TCR clone 344078 (TRBV4-1, TRBJ2-2)
CASSQAVNTGELFF

SEQ ID NO: 688157 - protein, 15 aa, Homo sapiens
  CDR3 for alpha chain variable domain of TCR clone 344079 (TRAV3, TRAJ7)
CAVRDKDNGNNRLAF

SEQ ID NO: 688158 - protein, 19 aa, Homo sapiens
  CDR3 for beta chain variable domain of TCR clone 344079 (TRBV5-8, TRBJ2-3)
CASSFLGTRGSHRTDTQYF

SEQ ID NO: 688159 - protein, 13 aa, Homo sapiens
  CDR3 for alpha chain variable domain of TCR clone 344080 (TRAV2, TRAJ40)
CAVVTSGTYKYTF

SEQ ID NO: 688160 - protein, 15 aa, Homo sapiens
  CDR3 for beta chain variable domain of TCR clone 344080 (TRBV11-3, TRBJ2-3)
CASLKDGREGDTRYF

SEQ ID NO: 688161 - protein, 15 aa, Homo sapiens
  CDR3 for alpha chain variable domain of TCR clone 344081 (TRAV20, TRAJ50)
CAVRQMKTSYDKVIF

SEQ ID NO: 688162 - protein, 15 aa, Homo sapiens
  CDR3 for beta chain variable domain of TCR clone 344081 (TRBV7-2, TRBJ2-1)
CASSSGLAGGNEQFF

SEQ ID NO: 688163 - protein, 13 aa, Homo sapiens
  CDR3 for alpha chain variable domain of TCR clone 344082 (TRAV16, TRAJ34)
CALTGYNTDKRIF

SEQ ID NO: 688164 - protein, 13 aa, Homo sapiens
  CDR3 for beta chain variable domain of TCR clone 344082 (TRBV6-1, TRBJ2-1)
CASREDGGHEQFF

SEQ ID NO: 688165 - protein, 13 aa, Homo sapiens
  CDR3 for alpha chain variable domain of TCR clone 344083 (TRAV12-1, TRAJ31)
CVVNMNNNARLKF

SEQ ID NO: 688166 - protein, 15 aa, Homo sapiens
  CDR3 for beta chain variable domain of TCR clone 344083 (TRBV4-1, TRBJ1-2)
CASSQGQGAAYGYTF

SEQ ID NO: 688167 - protein, 11 aa, Homo sapiens
  CDR3 for alpha chain variable domain of TCR clone 344084 (TRAV12-3, TRAJ27)
CAMANAGKSTF

SEQ ID NO: 688168 - protein, 13 aa, Homo sapiens
  CDR3 for beta chain variable domain of TCR clone 344084 (TRBV20-1, TRBJ1-1)
CSARVGGNTAAFF

SEQ ID NO: 688169 - protein, 14 aa, Homo sapiens
  CDR3 for alpha chain variable domain of TCR clone 344085 (TRAV16, TRAJ39)
CATRRFNAGNMLTF

SEQ ID NO: 688170 - protein, 18 aa, Homo sapiens
  CDR3 for beta chain variable domain of TCR clone 344085 (TRBV7-8, TRBJ2-1)
CASSPAEGLAGGLNEQFF

SEQ ID NO: 688171 - protein, 22 aa, Homo sapiens
  CDR3 for alpha chain variable domain of TCR clone 344086 (TRAV27, TRAJ10)
CALQGDTHGRRKQTHLWDRPSA

SEQ ID NO: 688172 - protein, 15 aa, Homo sapiens
  CDR3 for beta chain variable domain of TCR clone 344086 (TRBV9, TRBJ2-3)
CASSLEGGLTDTQYF

SEQ ID NO: 688173 - protein, 14 aa, Homo sapiens
  CDR3 for alpha chain variable domain of TCR clone 344087 (TRAV12-3, TRAJ10)
SHLPLTGGGNKLTF

SEQ ID NO: 688174 - protein, 13 aa, Homo sapiens
  CDR3 for beta chain variable domain of TCR clone 344087 (TRBV13, TRBJ2-2)
CASSGGNTGELFF

SEQ ID NO: 688175 - protein, 15 aa, Homo sapiens
  CDR3 for alpha chain variable domain of TCR clone 344088 (TRAV12-1, TRAJ52)
CVGNAGGTSYGKLTF

SEQ ID NO: 688176 - protein, 14 aa, Homo sapiens
  CDR3 for beta chain variable domain of TCR clone 344088 (TRBV7-2, TRBJ1-1)
CASSFLTGTTEAFF

SEQ ID NO: 688177 - protein, 14 aa, Homo sapiens
  CDR3 for alpha chain variable domain of TCR clone 344089 (TRAV2, TRAJ9)
CAVEDRSGGFKTIF

SEQ ID NO: 688178 - protein, 16 aa, Homo sapiens
  CDR3 for beta chain variable domain of TCR clone 344089 (TRBV7-2, TRBJ2-3)
CASSLVALYSTDTQYF

SEQ ID NO: 688179 - protein, 13 aa, Homo sapiens
  CDR3 for alpha chain variable domain of TCR clone 344090 (TRAV13-1, TRAJ10)
CAALEGGGNKLIF

SEQ ID NO: 688180 - protein, 13 aa, Homo sapiens
  CDR3 for beta chain variable domain of TCR clone 344090 (TRBV7-9, TRBJ1-2)
CASSLKQNYGYIF

SEQ ID NO: 688181 - protein, 12 aa, Homo sapiens
  CDR3 for alpha chain variable domain of TCR clone 344091 (TRAV12-1, TRAJ31)
CVVRGNNARLMF

SEQ ID NO: 688182 - protein, 15 aa, Homo sapiens
  CDR3 for beta chain variable domain of TCR clone 344091 (TRBV9, TRBJ2-1)
CASSLAGSSYNEQFF

SEQ ID NO: 688183 - protein, 13 aa, Homo sapiens
  CDR3 for alpha chain variable domain of TCR clone 344092 (TRAV21, TRAJ27)
CAARPGNAGKSTF

SEQ ID NO: 688184 - protein, 15 aa, Homo sapiens
  CDR3 for beta chain variable domain of TCR clone 344092 (TRBV7-9, TRBJ1-1)
CASSPELGGGTEAFF

SEQ ID NO: 688185 - protein, 16 aa, Homo sapiens
  CDR3 for alpha chain variable domain of TCR clone 344093 (TRAV30, TRAJ24)
CGTEIVDADSWGKFKF

SEQ ID NO: 688186 - protein, 14 aa, Homo sapiens
  CDR3 for beta chain variable domain of TCR clone 344093 (TRBV9, TRBJ2-7)
CASSVGVGSYEQYF

SEQ ID NO: 688187 - protein, 16 aa, Homo sapiens
  CDR3 for alpha chain variable domain of TCR clone 344094 (TRAV30, TRAJ24)
CGTEIVDTDSWGKFQF

SEQ ID NO: 688188 - protein, 14 aa, Homo sapiens
  CDR3 for beta chain variable domain of TCR clone 344094 (TRBV7-9, TRBJ2-4)
CASSLAMGGNIQYF

SEQ ID NO: 688189 - protein, 15 aa, Homo sapiens
  CDR3 for alpha chain variable domain of TCR clone 344095 (TRAV26-1, TRAJ29)
CIVRVEGSGNTPLVF

SEQ ID NO: 688190 - protein, 14 aa, Homo sapiens
  CDR3 for beta chain variable domain of TCR clone 344095 (TRBV25-1, TRBJ1-1)
CASTQLGGNTEAFF

SEQ ID NO: 688191 - protein, 14 aa, Homo sapiens
  CDR3 for alpha chain variable domain of TCR clone 344096 (TRAV12-3, TRAJ10)
SHLPLTGGGNKLTF

SEQ ID NO: 688192 - protein, 10 aa, Homo sapiens
  CDR3 for beta chain variable domain of TCR clone 344096 (TRBV2, TRBJ2-4)
CASRGSIQYF

SEQ ID NO: 688193 - protein, 16 aa, Homo sapiens
  CDR3 for alpha chain variable domain of TCR clone 344097 (TRAV12-3, TRAJ53)
CAMSPGSGGSNYKLTF

SEQ ID NO: 688194 - protein, 16 aa, Homo sapiens
  CDR3 for beta chain variable domain of TCR clone 344097 (TRBV4-2, TRBJ2-7)
CASSQEGLANSYEQYF

SEQ ID NO: 688195 - protein, 12 aa, Homo sapiens
  CDR3 for alpha chain variable domain of TCR clone 344098 (TRAV12-2, TRAJ21)
CAPSDNFNKFYF

SEQ ID NO: 688196 - protein, 16 aa, Homo sapiens
  CDR3 for beta chain variable domain of TCR clone 344098 (TRBV19, TRBJ2-1)
CASSKAGPSSYNEQFF

SEQ ID NO: 688197 - protein, 17 aa, Homo sapiens
  CDR3 for alpha chain variable domain of TCR clone 344099 (TRAV3, TRAJ7)
CTVRDMSPLEGTTDSLL

SEQ ID NO: 688198 - protein, 17 aa, Homo sapiens
  CDR3 for beta chain variable domain of TCR clone 344099 (TRBV15, TRBJ1-2)
CATSGREIDVVNYGYTF

SEQ ID NO: 688199 - protein, 12 aa, Homo sapiens
  CDR3 for alpha chain variable domain of TCR clone 344100 (TRAV3, TRAJ43)
CAVRDPNNDMRF

SEQ ID NO: 688200 - protein, 14 aa, Homo sapiens
  CDR3 for beta chain variable domain of TCR clone 344100 (TRBV11-2, TRBJ2-3)
CASSLYAGRDTQYF

SEQ ID NO: 688201 - protein, 16 aa, Homo sapiens
  CDR3 for alpha chain variable domain of TCR clone 344101 (TRAV3, TRAJ21)
CAVRDRAASTNFTLDL

SEQ ID NO: 688202 - protein, 16 aa, Homo sapiens
  CDR3 for beta chain variable domain of TCR clone 344101 (TRBV7-2, TRBJ2-5)
CASSLESAGGRETQYF

SEQ ID NO: 688203 - protein, 11 aa, Homo sapiens
  CDR3 for alpha chain variable domain of TCR clone 344102 (TRAV3, TRAJ21)
CAVDNFNKFYF

SEQ ID NO: 688204 - protein, 16 aa, Homo sapiens
  CDR3 for beta chain variable domain of TCR clone 344102 (TRBV19, TRBJ2-1)
CASSKAGPNSYNEQFF

SEQ ID NO: 688205 - protein, 13 aa, Homo sapiens
  CDR3 for alpha chain variable domain of TCR clone 344103 (TRAV17, TRAJ8)
CATGHEGFQKLVF

SEQ ID NO: 688206 - protein, 15 aa, Homo sapiens
  CDR3 for beta chain variable domain of TCR clone 344103 (TRBV20-1, TRBJ2-5)
CSAGRLPSGQETQYF

SEQ ID NO: 688207 - protein, 12 aa, Homo sapiens
  CDR3 for alpha chain variable domain of TCR clone 344104 (TRAV12-3, TRAJ17)
CAMTLTGNKLAF

SEQ ID NO: 688208 - protein, 13 aa, Homo sapiens
  CDR3 for beta chain variable domain of TCR clone 344104 (TRBV7-9, TRBJ1-2)
CASSLKQNYGYTF

SEQ ID NO: 688209 - protein, 17 aa, Homo sapiens
  CDR3 for alpha chain variable domain of TCR clone 344105 (TRAV8-2, )
CVVNIQNPDPVVYQLRD

SEQ ID NO: 688210 - protein, 14 aa, Homo sapiens
  CDR3 for beta chain variable domain of TCR clone 344105 (TRBV7-9, TRBJ2-5)
CASSLVGGEETQYF

SEQ ID NO: 688211 - protein, 13 aa, Homo sapiens
  CDR3 for alpha chain variable domain of TCR clone 344106 (TRAV21, TRAJ11)
CAVPNSGYSTLTF

SEQ ID NO: 688212 - protein, 14 aa, Homo sapiens
  CDR3 for beta chain variable domain of TCR clone 344106 (TRBV7-9, TRBJ2-3)
CASSLEDGTDTQYF

SEQ ID NO: 688213 - protein, 16 aa, Homo sapiens
  CDR3 for alpha chain variable domain of TCR clone 344107 (TRAV20, TRAJ38)
CAVQASNAGNNRQLIW

SEQ ID NO: 688214 - protein, 16 aa, Homo sapiens
  CDR3 for beta chain variable domain of TCR clone 344107 (TRBV7-8, TRBJ2-6)
CASRVGDSSGANVLTF

SEQ ID NO: 688215 - protein, 14 aa, Homo sapiens
  CDR3 for alpha chain variable domain of TCR clone 344108 (TRAV17, TRAJ57)
CATDPQGGSEKRVF

SEQ ID NO: 688216 - protein, 18 aa, Homo sapiens
  CDR3 for beta chain variable domain of TCR clone 344108 (TRBV6-6, TRBJ1-3)
CASSYSKWDSISGDTIYF

SEQ ID NO: 688217 - protein, 16 aa, Homo sapiens
  CDR3 for alpha chain variable domain of TCR clone 344109 (TRAV30, TRAJ24)
CGTEIVDADSWGKFQF

SEQ ID NO: 688218 - protein, 19 aa, Homo sapiens
  CDR3 for beta chain variable domain of TCR clone 344109 (TRBV19, TRBJ2-2)
CASTRPGLAGGRVTGELFF

SEQ ID NO: 688219 - protein, 10 aa, Homo sapiens
  CDR3 for alpha chain variable domain of TCR clone 344110 (TRAV30, TRAJ48)
CGIGNEKLTF

SEQ ID NO: 688220 - protein, 13 aa, Homo sapiens
  CDR3 for beta chain variable domain of TCR clone 344110 (TRBV5-7, TRBJ2-6)
CASTSRGANVLTF

SEQ ID NO: 688221 - protein, 13 aa, Homo sapiens
  CDR3 for alpha chain variable domain of TCR clone 344111 (TRAV21, TRAJ27)
CAARPGNAGKSTL

SEQ ID NO: 688222 - protein, 14 aa, Homo sapiens
  CDR3 for beta chain variable domain of TCR clone 344111 (TRBV7-2, TRBJ2-7)
CASSPKTSFYEQYF

SEQ ID NO: 688223 - protein, 13 aa, Homo sapiens
  CDR3 for alpha chain variable domain of TCR clone 344112 (TRAV13-1, TRAJ12)
CAASPDSSYKLIF

SEQ ID NO: 688224 - protein, 16 aa, Homo sapiens
  CDR3 for beta chain variable domain of TCR clone 344112 (TRBV19, TRBJ2-1)
CASSKAGPSSYNEQFF

SEQ ID NO: 688225 - protein, 17 aa, Homo sapiens
  CDR3 for alpha chain variable domain of TCR clone 344113 (TRAV26-1, TRAJ37)
CIVRVITVSSNTGKPIF

SEQ ID NO: 688226 - protein, 13 aa, Homo sapiens
  CDR3 for beta chain variable domain of TCR clone 344113 (TRBV2, TRBJ2-7)
CASSVGGSGEQYF

SEQ ID NO: 688227 - protein, 17 aa, Homo sapiens
  CDR3 for alpha chain variable domain of TCR clone 344114 (TRAV3, TRAJ38)
CAVRDCLNAGNNRKLIG

SEQ ID NO: 688228 - protein, 15 aa, Homo sapiens
  CDR3 for beta chain variable domain of TCR clone 344114 (TRBV27, TRBJ2-1)
CASSNGGGSSNEQFF

SEQ ID NO: 688229 - protein, 17 aa, Homo sapiens
  CDR3 for alpha chain variable domain of TCR clone 344115 (TRAV23/DV6, TRAJ57)
CAASSTLAQGGSEKLVF

SEQ ID NO: 688230 - protein, 15 aa, Homo sapiens
  CDR3 for beta chain variable domain of TCR clone 344115 (TRBV11-2, TRBJ2-1)
CASSLGTSGLNEQFF

SEQ ID NO: 688231 - protein, 17 aa, Homo sapiens
  CDR3 for alpha chain variable domain of TCR clone 344116 (TRAV3, TRAJ6)
CAVRDGPRAGGSYIPTF

SEQ ID NO: 688232 - protein, 13 aa, Homo sapiens
  CDR3 for beta chain variable domain of TCR clone 344116 (TRBV19, TRBJ2-7)
CASSIDRTYEHYF

SEQ ID NO: 688233 - protein, 17 aa, Homo sapiens
  CDR3 for alpha chain variable domain of TCR clone 344117 (TRAV2, TRAJ22)
ILQVREADAAEQRQLTF

SEQ ID NO: 688234 - protein, 13 aa, Homo sapiens
  CDR3 for beta chain variable domain of TCR clone 344117 (TRBV19, TRBJ1-2)
CASSVPGQDGYTF

SEQ ID NO: 688235 - protein, 13 aa, Homo sapiens
  CDR3 for alpha chain variable domain of TCR clone 344118 (TRAV8-2, TRAJ43)
CVVTPYNNNDMRL

SEQ ID NO: 688236 - protein, 16 aa, Homo sapiens
  CDR3 for beta chain variable domain of TCR clone 344118 (TRBV19, TRBJ2-1)
CASSKAGPSSYNEQFF

SEQ ID NO: 688237 - protein, 11 aa, Homo sapiens
  CDR3 for alpha chain variable domain of TCR clone 344119 (TRAV1-2, TRAJ20)
CAVSNDYKLSF

SEQ ID NO: 688238 - protein, 14 aa, Homo sapiens
  CDR3 for beta chain variable domain of TCR clone 344119 (TRBV19, TRBJ1-5)
CASRAPDSFLSQHF

SEQ ID NO: 688239 - protein, 13 aa, Homo sapiens
  CDR3 for alpha chain variable domain of TCR clone 344120 (TRAV16, TRAJ27)
CVLRRTNAGKSTF

SEQ ID NO: 688240 - protein, 15 aa, Homo sapiens
  CDR3 for beta chain variable domain of TCR clone 344120 (TRBV18, TRBJ2-1)
CASSPPSASYNEQFF

SEQ ID NO: 688241 - protein, 13 aa, Homo sapiens
  CDR3 for alpha chain variable domain of TCR clone 344121 (TRAV12-2, TRAJ42)
CAVKRGSQGNLIF

SEQ ID NO: 688242 - protein, 17 aa, Homo sapiens
  CDR3 for beta chain variable domain of TCR clone 344121 (TRBV4-1, TRBJ2-1)
CASSHRDSGSSYNGQFF

SEQ ID NO: 688243 - protein, 12 aa, Homo sapiens
  CDR3 for alpha chain variable domain of TCR clone 344122 (TRAV20, TRAJ39)
CAVGNAGNMLTV

SEQ ID NO: 688244 - protein, 16 aa, Homo sapiens
  CDR3 for beta chain variable domain of TCR clone 344122 (TRBV15, TRBJ1-2)
CATSRGPRTGGGGYTF

SEQ ID NO: 688245 - protein, 16 aa, Homo sapiens
  CDR3 for alpha chain variable domain of TCR clone 344123 (TRAV12-2, TRAJ32)
CAVNLGQGGATNKLIF

SEQ ID NO: 688246 - protein, 15 aa, Homo sapiens
  CDR3 for beta chain variable domain of TCR clone 344123 (TRBV20-1, TRBJ2-7)
CSTRGPLAGGREQYF

SEQ ID NO: 688247 - protein, 13 aa, Homo sapiens
  CDR3 for alpha chain variable domain of TCR clone 344124 (TRAV12-3, TRAJ33)
CAMSVNSNYQLIW

SEQ ID NO: 688248 - protein, 16 aa, Homo sapiens
  CDR3 for beta chain variable domain of TCR clone 344124 (TRBV7-3, TRBJ2-2)
CASSLKRGTLSGELFF

SEQ ID NO: 688249 - protein, 14 aa, Homo sapiens
  CDR3 for alpha chain variable domain of TCR clone 344125 (TRAV9-2, TRAJ39)
CALYTYNAGNMLTF

SEQ ID NO: 688250 - protein, 12 aa, Homo sapiens
  CDR3 for beta chain variable domain of TCR clone 344125 (TRBV12-4, TRBJ2-1)
CASSLQGSEQFF

SEQ ID NO: 688251 - protein, 12 aa, Homo sapiens
  CDR3 for alpha chain variable domain of TCR clone 344126 (TRAV1-1, TRAJ24)
CAVRGSWGKFQF

SEQ ID NO: 688252 - protein, 11 aa, Homo sapiens
  CDR3 for beta chain variable domain of TCR clone 344126 (TRBV29-1, TRBJ2-5)
CNEDRTGTQYF

SEQ ID NO: 688253 - protein, 15 aa, Homo sapiens
  CDR3 for alpha chain variable domain of TCR clone 344127 (TRAV23/DV6, TRAJ28)
CAALLAYFGAGSYQP

SEQ ID NO: 688254 - protein, 13 aa, Homo sapiens
  CDR3 for beta chain variable domain of TCR clone 344127 (TRBV4-2, TRBJ2-3)
CASSQGNTDTQYF

SEQ ID NO: 688255 - protein, 14 aa, Homo sapiens
  CDR3 for alpha chain variable domain of TCR clone 344128 (TRAV38-1, TRAJ45)
CAYYSGGGADGLTF

SEQ ID NO: 688256 - protein, 16 aa, Homo sapiens
  CDR3 for beta chain variable domain of TCR clone 344128 (TRBV19, TRBJ2-2)
CASRSPGTGATGELFF

SEQ ID NO: 688257 - protein, 13 aa, Homo sapiens
  CDR3 for alpha chain variable domain of TCR clone 344129 (TRAV12-3, TRAJ33)
CAMSVNSNYQLNW

SEQ ID NO: 688258 - protein, 13 aa, Homo sapiens
  CDR3 for beta chain variable domain of TCR clone 344129 (TRBV5-1, TRBJ1-1)
CARSADWDTEAFF

SEQ ID NO: 688259 - protein, 14 aa, Homo sapiens
  CDR3 for alpha chain variable domain of TCR clone 344130 (TRAV26-1, TRAJ39)
CIVRGSRAGNMLTF

SEQ ID NO: 688260 - protein, 17 aa, Homo sapiens
  CDR3 for beta chain variable domain of TCR clone 344130 (TRBV11-2, TRBJ2-6)
CASSQRDIFSGANVLTF

SEQ ID NO: 688261 - protein, 11 aa, Homo sapiens
  CDR3 for alpha chain variable domain of TCR clone 344131 (TRAV1-1, TRAJ20)
CAVCNDYKLSF

SEQ ID NO: 688262 - protein, 16 aa, Homo sapiens
  CDR3 for beta chain variable domain of TCR clone 344131 (TRBV29-1, TRBJ2-2)
CSVEKTSEGNTGELFF

SEQ ID NO: 688263 - protein, 12 aa, Homo sapiens
  CDR3 for alpha chain variable domain of TCR clone 344132 (TRAV12-2, TRAJ10)
WGVTGGGNKLTF

SEQ ID NO: 688264 - protein, 17 aa, Homo sapiens
  CDR3 for beta chain variable domain of TCR clone 344132 (TRBV4-3, TRBJ2-1)
CASSQFSSGRASGEQFF

SEQ ID NO: 688265 - protein, 10 aa, Homo sapiens
  CDR3 for alpha chain variable domain of TCR clone 344133 (TRAV36/DV7, TRAJ54)
CGPGAQKLVF

SEQ ID NO: 688266 - protein, 14 aa, Homo sapiens
  CDR3 for beta chain variable domain of TCR clone 344133 (TRBV7-3, TRBJ1-1)
CASSLKGGNTEAFF

SEQ ID NO: 688267 - protein, 14 aa, Homo sapiens
  CDR3 for alpha chain variable domain of TCR clone 344134 (TRAV12-3, TRAJ10)
SHLPLTGGGNKLTF

SEQ ID NO: 688268 - protein, 13 aa, Homo sapiens
  CDR3 for beta chain variable domain of TCR clone 344134 (TRBV7-3, TRBJ2-3)
CASSYLRGDTQYF

SEQ ID NO: 688269 - protein, 12 aa, Homo sapiens
  CDR3 for alpha chain variable domain of TCR clone 344135 (TRAV21, TRAJ33)
CAKMDSNYQLIW

SEQ ID NO: 688270 - protein, 14 aa, Homo sapiens
  CDR3 for beta chain variable domain of TCR clone 344135 (TRBV2, TRBJ2-7)
CASSLPAGGYEQYF

SEQ ID NO: 688271 - protein, 16 aa, Homo sapiens
  CDR3 for alpha chain variable domain of TCR clone 344136 (TRAV23/DV6, TRAJ57)
CAASSTLSPGGSEKLF

SEQ ID NO: 688272 - protein, 14 aa, Homo sapiens
  CDR3 for beta chain variable domain of TCR clone 344136 (TRBV25-1, TRBJ1-1)
CASTHLGGNTEAFF

SEQ ID NO: 688273 - protein, 15 aa, Homo sapiens
  CDR3 for alpha chain variable domain of TCR clone 344137 (TRAV13-2, TRAJ50)
CAEEPLKTSYDKVIF

SEQ ID NO: 688274 - protein, 15 aa, Homo sapiens
  CDR3 for beta chain variable domain of TCR clone 344137 (TRBV5-1, TRBJ2-5)
CASSLGLAEQETQYF

SEQ ID NO: 688275 - protein, 15 aa, Homo sapiens
  CDR3 for alpha chain variable domain of TCR clone 344138 (TRAV1-2, TRAJ30)
CAVRPHGNRDDKIIF

SEQ ID NO: 688276 - protein, 15 aa, Homo sapiens
  CDR3 for beta chain variable domain of TCR clone 344138 (TRBV6-3, TRBJ2-2)
CASSFLATLTGELFF

SEQ ID NO: 688277 - protein, 15 aa, Homo sapiens
  CDR3 for alpha chain variable domain of TCR clone 344139 (TRAV38-2/DV8, TRAJ48)
CAYRSPESGNEKLTF

SEQ ID NO: 688278 - protein, 13 aa, Homo sapiens
  CDR3 for beta chain variable domain of TCR clone 344139 (TRBV19, TRBJ2-1)
CASSMYRVNEQFF

SEQ ID NO: 688279 - protein, 13 aa, Homo sapiens
  CDR3 for alpha chain variable domain of TCR clone 344140 (TRAV1-1, TRAJ23)
CAVVANQGGKLIF

SEQ ID NO: 688280 - protein, 16 aa, Homo sapiens
  CDR3 for beta chain variable domain of TCR clone 344140 (TRBV5-5, TRBJ1-2)
CASSPTWGRGRYGYTF

SEQ ID NO: 688281 - protein, 12 aa, Homo sapiens
  CDR3 for alpha chain variable domain of TCR clone 344141 (TRAV26-1, TRAJ36)
CIVRVRADNLFF

SEQ ID NO: 688282 - protein, 14 aa, Homo sapiens
  CDR3 for beta chain variable domain of TCR clone 344141 (TRBV14, TRBJ2-3)
CASSRKLAAETQYF

SEQ ID NO: 688283 - protein, 13 aa, Homo sapiens
  CDR3 for alpha chain variable domain of TCR clone 344142 (TRAV12-2, TRAJ4)
CAVRSGGYNKRLF

SEQ ID NO: 688284 - protein, 15 aa, Homo sapiens
  CDR3 for beta chain variable domain of TCR clone 344142 (TRBV10-3, TRBJ2-1)
CAISDVQDRAYEQFF

SEQ ID NO: 688285 - protein, 14 aa, Homo sapiens
  CDR3 for alpha chain variable domain of TCR clone 344143 (TRAV1-2, TRAJ8)
CAVREDTGFQKLVF

SEQ ID NO: 688286 - protein, 13 aa, Homo sapiens
  CDR3 for beta chain variable domain of TCR clone 344143 (TRBV20-1, TRBJ1-6)
CSAPTGLGSPLHF

SEQ ID NO: 688287 - protein, 15 aa, Homo sapiens
  CDR3 for alpha chain variable domain of TCR clone 344144 (TRAV12-1, TRAJ44)
CVADLPTGTASKLTF

SEQ ID NO: 688288 - protein, 17 aa, Homo sapiens
  CDR3 for beta chain variable domain of TCR clone 344144 (TRBV7-2, TRBJ2-3)
CASSSYSGTRRADTQYF

SEQ ID NO: 688289 - protein, 14 aa, Homo sapiens
  CDR3 for alpha chain variable domain of TCR clone 344145 (TRAV1-2, TRAJ8)
CAVREDTGFQKLGF

SEQ ID NO: 688290 - protein, 12 aa, Homo sapiens
  CDR3 for beta chain variable domain of TCR clone 344145 (TRBV14, TRBJ2-5)
CASSQLKETQYF

SEQ ID NO: 688291 - protein, 11 aa, Homo sapiens
  CDR3 for alpha chain variable domain of TCR clone 344146 (TRAV12-3, TRAJ43)
CAMSASNDMRF

SEQ ID NO: 688292 - protein, 14 aa, Homo sapiens
  CDR3 for beta chain variable domain of TCR clone 344146 (TRBV5-5, TRBJ1-5)
CASSGQGVDQPQHF

SEQ ID NO: 688293 - protein, 13 aa, Homo sapiens
  CDR3 for alpha chain variable domain of TCR clone 344147 (TRAV21, TRAJ20)
CAVGLRVDYKLSF

SEQ ID NO: 688294 - protein, 14 aa, Homo sapiens
  CDR3 for beta chain variable domain of TCR clone 344147 (TRBV7-2, TRBJ2-3)
CASRRGLAADTQYF

SEQ ID NO: 688295 - protein, 17 aa, Homo sapiens
  CDR3 for alpha chain variable domain of TCR clone 344148 (TRAV3, TRAJ38)
CAVRDWLNAGNNRKLIW

SEQ ID NO: 688296 - protein, 13 aa, Homo sapiens
  CDR3 for beta chain variable domain of TCR clone 344148 (TRBV23-1, TRBJ1-4)
CASRGKFNEKLFF

SEQ ID NO: 688297 - protein, 15 aa, Homo sapiens
  CDR3 for alpha chain variable domain of TCR clone 344149 (TRAV8-3, TRAJ45)
CASSYPGGGADGLTF

SEQ ID NO: 688298 - protein, 22 aa, Homo sapiens
  CDR3 for beta chain variable domain of TCR clone 344149 (TRBV11-2, TRBJ1-4)
CASSLDITRRGIPRKDNEKLFF

SEQ ID NO: 688299 - protein, 17 aa, Homo sapiens
  CDR3 for alpha chain variable domain of TCR clone 344150 (TRAV23/DV6, TRAJ57)
CAASSTLSQGGSEKLVL

SEQ ID NO: 688300 - protein, 14 aa, Homo sapiens
  CDR3 for beta chain variable domain of TCR clone 344150 (TRBV25-1, TRBJ1-1)
CTSTHLGGNTEAFF

SEQ ID NO: 688301 - protein, 10 aa, Homo sapiens
  CDR3 for alpha chain variable domain of TCR clone 344151 (TRAV13-1, TRAJ52)
CAAKTPMLVV

SEQ ID NO: 688302 - protein, 13 aa, Homo sapiens
  CDR3 for beta chain variable domain of TCR clone 344151 (TRBV6-1, TRBJ2-5)
CASGYQSVETQYF

SEQ ID NO: 688303 - protein, 11 aa, Homo sapiens
  CDR3 for alpha chain variable domain of TCR clone 344152 (TRAV26-2, TRAJ8)
CILTGFQKLVF

SEQ ID NO: 688304 - protein, 13 aa, Homo sapiens
  CDR3 for beta chain variable domain of TCR clone 344152 (TRBV12-4, TRBJ1-2)
CASSLRQGKGYTF

SEQ ID NO: 688305 - protein, 14 aa, Homo sapiens
  CDR3 for alpha chain variable domain of TCR clone 344153 (TRAV12-3, TRAJ9)
CVVTGYTGGFKTIF

SEQ ID NO: 688306 - protein, 15 aa, Homo sapiens
  CDR3 for beta chain variable domain of TCR clone 344153 (TRBV4-2, TRBJ1-1)
CASSQQGAGDTEAFF

SEQ ID NO: 688307 - protein, 13 aa, Homo sapiens
  CDR3 for alpha chain variable domain of TCR clone 344154 (TRAV25, TRAJ26)
CAGMDNYGQNFVF

SEQ ID NO: 688308 - protein, 13 aa, Homo sapiens
  CDR3 for beta chain variable domain of TCR clone 344154 (TRBV7-9, TRBJ2-1)
CASSLDVGNEQFF

SEQ ID NO: 688309 - protein, 14 aa, Homo sapiens
  CDR3 for alpha chain variable domain of TCR clone 344155 (TRAV1-2, TRAJ16)
CAVNRFSDGQKLLS

SEQ ID NO: 688310 - protein, 15 aa, Homo sapiens
  CDR3 for beta chain variable domain of TCR clone 344155 (TRBV9, TRBJ1-6)
CASSVAGTGDSPLYF

SEQ ID NO: 688311 - protein, 14 aa, Homo sapiens
  CDR3 for alpha chain variable domain of TCR clone 344156 (TRAV1-2, TRAJ8)
CAVREDTGFQKLVF

SEQ ID NO: 688312 - protein, 14 aa, Homo sapiens
  CDR3 for beta chain variable domain of TCR clone 344156 (TRBV4-2, TRBJ2-7)
CASSQGQTAYEQYF

SEQ ID NO: 688313 - protein, 17 aa, Homo sapiens
  CDR3 for alpha chain variable domain of TCR clone 344157 (TRAV29/DV5, TRAJ52)
CAATSTADGTSYGKLTF

SEQ ID NO: 688314 - protein, 15 aa, Homo sapiens
  CDR3 for beta chain variable domain of TCR clone 344157 (TRBV3-1, TRBJ2-7)
CASSQEWTGSFEQYF

SEQ ID NO: 688315 - protein, 13 aa, Homo sapiens
  CDR3 for alpha chain variable domain of TCR clone 344158 (TRAV13-1, TRAJ35)
CAASLGFGNVLHC

SEQ ID NO: 688316 - protein, 15 aa, Homo sapiens
  CDR3 for beta chain variable domain of TCR clone 344158 (TRBV20-1, TRBJ2-7)
CSARDRVYGMDEQYF

SEQ ID NO: 688317 - protein, 17 aa, Homo sapiens
  CDR3 for alpha chain variable domain of TCR clone 344159 (TRAV17, TRAJ7)
CATLGRLAFGKGNQVVV

SEQ ID NO: 688318 - protein, 14 aa, Homo sapiens
  CDR3 for beta chain variable domain of TCR clone 344159 (TRBV7-2, TRBJ2-7)
CASSPKTSFYEQYF

SEQ ID NO: 688319 - protein, 16 aa, Homo sapiens
  CDR3 for alpha chain variable domain of TCR clone 344160 (TRAV30, TRAJ24)
CGTEIVDADSWGKFQF

SEQ ID NO: 688320 - protein, 12 aa, Homo sapiens
  CDR3 for beta chain variable domain of TCR clone 344160 (TRBV5-1, TRBJ1-1)
CASSLTGAEAFF

SEQ ID NO: 688321 - protein, 13 aa, Homo sapiens
  CDR3 for alpha chain variable domain of TCR clone 344161 (TRAV8-3, TRAJ32)
WVRRGGATNKLIF

SEQ ID NO: 688322 - protein, 15 aa, Homo sapiens
  CDR3 for beta chain variable domain of TCR clone 344161 (TRBV7-2, TRBJ2-1)
CASSSPGQYLGEQFF

SEQ ID NO: 688323 - protein, 11 aa, Homo sapiens
  CDR3 for alpha chain variable domain of TCR clone 344162 (TRAV3, TRAJ21)
CSVGNFNKFYF

SEQ ID NO: 688324 - protein, 13 aa, Homo sapiens
  CDR3 for beta chain variable domain of TCR clone 344162 (TRBV20-1, TRBJ2-2)
CSASAAGTGELFF

SEQ ID NO: 688325 - protein, 17 aa, Homo sapiens
  CDR3 for alpha chain variable domain of TCR clone 344163 (TRAV1-2, TRAJ26)
CAVRDLITMVRIFSLVP

SEQ ID NO: 688326 - protein, 17 aa, Homo sapiens
  CDR3 for beta chain variable domain of TCR clone 344163 (TRBV28, TRBJ2-5)
CASSRQGGLAGAETQYF

SEQ ID NO: 688327 - protein, 14 aa, Homo sapiens
  CDR3 for alpha chain variable domain of TCR clone 344164 (TRAV13-1, TRAJ35)
CAASKGGFGNGLHC

SEQ ID NO: 688328 - protein, 13 aa, Homo sapiens
  CDR3 for beta chain variable domain of TCR clone 344164 (TRBV7-3, TRBJ1-1)
CASSQEWGAEAFF

SEQ ID NO: 688329 - protein, 13 aa, Homo sapiens
  CDR3 for alpha chain variable domain of TCR clone 344165 (TRAV1-2, TRAJ9)
CAALNTGVFKTIF

SEQ ID NO: 688330 - protein, 13 aa, Homo sapiens
  CDR3 for beta chain variable domain of TCR clone 344165 (TRBV19, TRBJ1-2)
CASSVPGQDGYAF

SEQ ID NO: 688331 - protein, 13 aa, Homo sapiens
  CDR3 for alpha chain variable domain of TCR clone 344166 (TRAV12-1, TRAJ26)
CVVRRNYGQKFVF

SEQ ID NO: 688332 - protein, 15 aa, Homo sapiens
  CDR3 for beta chain variable domain of TCR clone 344166 (TRBV28, TRBJ2-1)
CASSIIAGGRSEQFF

SEQ ID NO: 688333 - protein, 12 aa, Homo sapiens
  CDR3 for alpha chain variable domain of TCR clone 344167 (TRAV12-1, TRAJ34)
CGDRHNTDELIF

SEQ ID NO: 688334 - protein, 14 aa, Homo sapiens
  CDR3 for beta chain variable domain of TCR clone 344167 (TRBV19, TRBJ2-1)
CASPTFVLSGEQFF

SEQ ID NO: 688335 - protein, 11 aa, Homo sapiens
  CDR3 for alpha chain variable domain of TCR clone 344168 (TRAV1-2, TRAJ31)
CAVNNNARLMF

SEQ ID NO: 688336 - protein, 12 aa, Homo sapiens
  CDR3 for beta chain variable domain of TCR clone 344168 (TRBV20-1, TRBJ2-7)
CSAGLKMGEQYF

SEQ ID NO: 688337 - protein, 13 aa, Homo sapiens
  CDR3 for alpha chain variable domain of TCR clone 344169 (TRAV13-1, TRAJ5)
CAARVTGRRALTF

SEQ ID NO: 688338 - protein, 15 aa, Homo sapiens
  CDR3 for beta chain variable domain of TCR clone 344169 (TRBV7-9, TRBJ2-7)
CASSPGGGLTNEQYF

SEQ ID NO: 688339 - protein, 13 aa, Homo sapiens
  CDR3 for alpha chain variable domain of TCR clone 344170 (TRAV3, TRAJ3)
CAVADSSASRIIF

SEQ ID NO: 688340 - protein, 12 aa, Homo sapiens
  CDR3 for beta chain variable domain of TCR clone 344170 (TRBV7-8, TRBJ2-7)
CASEGGPHGQYF

SEQ ID NO: 688341 - protein, 14 aa, Homo sapiens
  CDR3 for alpha chain variable domain of TCR clone 344171 (TRAV21, TRAJ35)
CDVMPIGFGNVLPC

SEQ ID NO: 688342 - protein, 12 aa, Homo sapiens
  CDR3 for beta chain variable domain of TCR clone 344171 (TRBV7-9, TRBJ2-7)
CASSIKREEQYF

SEQ ID NO: 688343 - protein, 13 aa, Homo sapiens
  CDR3 for alpha chain variable domain of TCR clone 344172 (TRAV17, TRAJ40)
CATAFSGTNKYIF

SEQ ID NO: 688344 - protein, 18 aa, Homo sapiens
  CDR3 for beta chain variable domain of TCR clone 344172 (TRBV28, TRBJ2-1)
CASSSGLAGGGSYNEQFF

SEQ ID NO: 688345 - protein, 14 aa, Homo sapiens
  CDR3 for alpha chain variable domain of TCR clone 344173 (TRAV8-4, TRAJ13)
CALTLSGGYQKVTF

SEQ ID NO: 688346 - protein, 16 aa, Homo sapiens
  CDR3 for beta chain variable domain of TCR clone 344173 (TRBV5-7, TRBJ1-4)
CASSPSGGLKTEKLFF

SEQ ID NO: 688347 - protein, 13 aa, Homo sapiens
  CDR3 for alpha chain variable domain of TCR clone 344174 (TRAV20, TRAJ34)
CAVSSYNTDKLIF

SEQ ID NO: 688348 - protein, 15 aa, Homo sapiens
  CDR3 for beta chain variable domain of TCR clone 344174 (TRBV6-3, TRBJ2-7)
CASSSPGTVFYEQYF

SEQ ID NO: 688349 - protein, 15 aa, Homo sapiens
  CDR3 for alpha chain variable domain of TCR clone 344175 (TRAV38-2/DV8, TRAJ45)
CAYWDSGGGADGLTF

SEQ ID NO: 688350 - protein, 14 aa, Homo sapiens
  CDR3 for beta chain variable domain of TCR clone 344175 (TRBV7-2, TRBJ2-7)
CASRSQGAAYERYF

SEQ ID NO: 688351 - protein, 13 aa, Homo sapiens
  CDR3 for alpha chain variable domain of TCR clone 344176 (TRAV20, TRAJ40)
CAVPFSGTYKYIF

SEQ ID NO: 688352 - protein, 15 aa, Homo sapiens
  CDR3 for beta chain variable domain of TCR clone 344176 (TRBV20-1, TRBJ2-7)
CSARDRVSGMDEQYF

SEQ ID NO: 688353 - protein, 11 aa, Homo sapiens
  CDR3 for alpha chain variable domain of TCR clone 344177 (TRAV17, TRAJ9)
CATTGGFKTIF

SEQ ID NO: 688354 - protein, 15 aa, Homo sapiens
  CDR3 for beta chain variable domain of TCR clone 344177 (TRBV18, TRBJ2-5)
CASSPDPGLQETQYF

SEQ ID NO: 688355 - protein, 14 aa, Homo sapiens
  CDR3 for alpha chain variable domain of TCR clone 344178 (TRAV1-2, TRAJ8)
CAVREDTGFQKLLF

SEQ ID NO: 688356 - protein, 16 aa, Homo sapiens
  CDR3 for beta chain variable domain of TCR clone 344178 (TRBV7-9, TRBJ2-1)
CARSDVAGGSYNEQFF

SEQ ID NO: 688357 - protein, 16 aa, Homo sapiens
  CDR3 for alpha chain variable domain of TCR clone 344179 (TRAV30, TRAJ24)
CGTEIVDADSRGKFQF

SEQ ID NO: 688358 - protein, 14 aa, Homo sapiens
  CDR3 for beta chain variable domain of TCR clone 344179 (TRBV12-5, TRBJ2-5)
CASCSRTHQETQYF

SEQ ID NO: 688359 - protein, 14 aa, Homo sapiens
  CDR3 for alpha chain variable domain of TCR clone 344180 (TRAV12-1, TRAJ23)
CVVIVFNQGGKLIF

SEQ ID NO: 688360 - protein, 13 aa, Homo sapiens
  CDR3 for beta chain variable domain of TCR clone 344180 (TRBV11-2, TRBJ2-5)
CASSFSSQETQYF

SEQ ID NO: 688361 - protein, 13 aa, Homo sapiens
  CDR3 for alpha chain variable domain of TCR clone 344181 (TRAV29/DV5, TRAJ47)
CAASAEYGNKLVF

SEQ ID NO: 688362 - protein, 12 aa, Homo sapiens
  CDR3 for beta chain variable domain of TCR clone 344181 (TRBV7-9, TRBJ1-4)
CASSTDREKLFF

SEQ ID NO: 688363 - protein, 14 aa, Homo sapiens
  CDR3 for alpha chain variable domain of TCR clone 344182 (TRAV12-2, TRAJ13)
CAGKKTGGDQKVTF

SEQ ID NO: 688364 - protein, 15 aa, Homo sapiens
  CDR3 for beta chain variable domain of TCR clone 344182 (TRBV27, TRBJ2-1)
CASSNGGGSSNEQFF

SEQ ID NO: 688365 - protein, 14 aa, Homo sapiens
  CDR3 for alpha chain variable domain of TCR clone 344183 (TRAV12-1, TRAJ17)
CVVNYKAAGNKLTF

SEQ ID NO: 688366 - protein, 16 aa, Homo sapiens
  CDR3 for beta chain variable domain of TCR clone 344183 (TRBV2, TRBJ1-1)
CASSPTLGGASTEAFF

SEQ ID NO: 688367 - protein, 14 aa, Homo sapiens
  CDR3 for alpha chain variable domain of TCR clone 344184 (TRAV17, TRAJ57)
CATDPQGGSEKLVF

SEQ ID NO: 688368 - protein, 11 aa, Homo sapiens
  CDR3 for beta chain variable domain of TCR clone 344184 (TRBV20-1, TRBJ2-5)
CSAATQAPQYF

SEQ ID NO: 688369 - protein, 16 aa, Homo sapiens
  CDR3 for alpha chain variable domain of TCR clone 344185 (TRAV8-4, TRAJ28)
CAVESNSGAGSYQLTF

SEQ ID NO: 688370 - protein, 13 aa, Homo sapiens
  CDR3 for beta chain variable domain of TCR clone 344185 (TRBV7-9, TRBJ1-2)
CASSLKQNYGYAF

SEQ ID NO: 688371 - protein, 14 aa, Homo sapiens
  CDR3 for alpha chain variable domain of TCR clone 344186 (TRAV12-2, TRAJ13)
CAVKKTGGYQKVTF

SEQ ID NO: 688372 - protein, 16 aa, Homo sapiens
  CDR3 for beta chain variable domain of TCR clone 344186 (TRBV19, TRBJ1-1)
CAGSPTRFWPGTEAFF

SEQ ID NO: 688373 - protein, 13 aa, Homo sapiens
  CDR3 for alpha chain variable domain of TCR clone 344187 (TRAV29/DV5, TRAJ31)
CAASRNNNARPMF

SEQ ID NO: 688374 - protein, 12 aa, Homo sapiens
  CDR3 for beta chain variable domain of TCR clone 344187 (TRBV11-2, TRBJ2-2)
CASSLGGGELFF

SEQ ID NO: 688375 - protein, 14 aa, Homo sapiens
  CDR3 for alpha chain variable domain of TCR clone 344188 (TRAV12-3, TRAJ15)
CAMIPPQAGTALIF

SEQ ID NO: 688376 - protein, 14 aa, Homo sapiens
  CDR3 for beta chain variable domain of TCR clone 344188 (TRBV20-1, TRBJ1-5)
CSATDRGSNQPQHF

SEQ ID NO: 688377 - protein, 13 aa, Homo sapiens
  CDR3 for alpha chain variable domain of TCR clone 344189 (TRAV12-1, TRAJ20)
CVVNRETDYKLSF

SEQ ID NO: 688378 - protein, 13 aa, Homo sapiens
  CDR3 for beta chain variable domain of TCR clone 344189 (TRBV4-2, TRBJ2-1)
CASSPGGYNEQFF

SEQ ID NO: 688379 - protein, 13 aa, Homo sapiens
  CDR3 for alpha chain variable domain of TCR clone 344190 (TRAV29/DV5, TRAJ31)
CAASRNNNARLMF

SEQ ID NO: 688380 - protein, 13 aa, Homo sapiens
  CDR3 for beta chain variable domain of TCR clone 344190 (TRBV19, TRBJ2-3)
CASMGASSDTQYF

SEQ ID NO: 688381 - protein, 12 aa, Homo sapiens
  CDR3 for alpha chain variable domain of TCR clone 344191 (TRAV13-1, TRAJ21)
CAAKEGFNNFYF

SEQ ID NO: 688382 - protein, 15 aa, Homo sapiens
  CDR3 for beta chain variable domain of TCR clone 344191 (TRBV15, TRBJ1-5)
CATSRDPDSNQPQHF

SEQ ID NO: 688383 - protein, 12 aa, Homo sapiens
  CDR3 for alpha chain variable domain of TCR clone 344192 (TRAV13-1, TRAJ21)
CAAKAGLNKFYF

SEQ ID NO: 688384 - protein, 14 aa, Homo sapiens
  CDR3 for beta chain variable domain of TCR clone 344192 (TRBV5-4, TRBJ1-1)
CASSLDSRRDEAFF

SEQ ID NO: 688385 - protein, 14 aa, Homo sapiens
  CDR3 for alpha chain variable domain of TCR clone 344193 (TRAV39, TRAJ42)
CAVDIARSQGNRIF

SEQ ID NO: 688386 - protein, 15 aa, Homo sapiens
  CDR3 for beta chain variable domain of TCR clone 344193 (TRBV27, TRBJ2-7)
CASSLFGTGLDEQYF

SEQ ID NO: 688387 - protein, 15 aa, Homo sapiens
  CDR3 for alpha chain variable domain of TCR clone 344194 (TRAV26-1, TRAJ44)
CIARAPFGTASKLTF

SEQ ID NO: 688388 - protein, 17 aa, Homo sapiens
  CDR3 for beta chain variable domain of TCR clone 344194 (TRBV24-1, TRBJ2-4)
CATSDAEARGVRNIQYF

SEQ ID NO: 688389 - protein, 14 aa, Homo sapiens
  CDR3 for alpha chain variable domain of TCR clone 344195 (TRAV17, TRAJ5)
CATDRDTGRRALTF

SEQ ID NO: 688390 - protein, 14 aa, Homo sapiens
  CDR3 for beta chain variable domain of TCR clone 344195 (TRBV5-1, TRBJ2-7)
CASSLQGAVDEQYF

SEQ ID NO: 688391 - protein, 13 aa, Homo sapiens
  CDR3 for alpha chain variable domain of TCR clone 344196 (TRAV16, TRAJ4)
CALRTGGYNKLIF

SEQ ID NO: 688392 - protein, 18 aa, Homo sapiens
  CDR3 for beta chain variable domain of TCR clone 344196 (TRBV11-2, TRBJ2-3)
CASSLGGASRGAPNTQYF

SEQ ID NO: 688393 - protein, 14 aa, Homo sapiens
  CDR3 for alpha chain variable domain of TCR clone 344197 (TRAV13-1, TRAJ24)
CAASRTDSWGKLQF

SEQ ID NO: 688394 - protein, 12 aa, Homo sapiens
  CDR3 for beta chain variable domain of TCR clone 344197 (TRBV12-4, TRBJ2-1)
CASSLQGSEQFF

SEQ ID NO: 688395 - protein, 21 aa, Homo sapiens
  CDR3 for alpha chain variable domain of TCR clone 344198 (TRAV29/DV5, TRAJ52)
CSVLLCSKREASGTSYGKLTF

SEQ ID NO: 688396 - protein, 15 aa, Homo sapiens
  CDR3 for beta chain variable domain of TCR clone 344198 (TRBV6-1, TRBJ2-1)
CASSELRGQYNEQFF

SEQ ID NO: 688397 - protein, 13 aa, Homo sapiens
  CDR3 for alpha chain variable domain of TCR clone 344199 (TRAV8-6, TRAJ21)
CAVSPSSLKKFYF

SEQ ID NO: 688398 - protein, 14 aa, Homo sapiens
  CDR3 for beta chain variable domain of TCR clone 344199 (TRBV7-9, TRBJ2-5)
CASSLDTAQETQYF

SEQ ID NO: 688399 - protein, 12 aa, Homo sapiens
  CDR3 for alpha chain variable domain of TCR clone 344200 (TRAV30, TRAJ43)
CGTEERGNDMRF

SEQ ID NO: 688400 - protein, 13 aa, Homo sapiens
  CDR3 for beta chain variable domain of TCR clone 344200 (TRBV7-9, TRBJ2-3)
CASSPGSTDTKYF

SEQ ID NO: 688401 - protein, 15 aa, Homo sapiens
  CDR3 for alpha chain variable domain of TCR clone 344201 (TRAV9-2, TRAJ18)
CALSGRGSTLGRLYF

SEQ ID NO: 688402 - protein, 14 aa, Homo sapiens
  CDR3 for beta chain variable domain of TCR clone 344201 (TRBV4-2, TRBJ1-2)
CASSQDRREGGYTF

SEQ ID NO: 688403 - protein, 14 aa, Homo sapiens
  CDR3 for alpha chain variable domain of TCR clone 344202 (TRAV1-2, TRAJ16)
CAVNRFSDGQKLLF

SEQ ID NO: 688404 - protein, 12 aa, Homo sapiens
  CDR3 for beta chain variable domain of TCR clone 344202 (TRBV3-1, TRBJ2-2)
CASSLFPGELFF

SEQ ID NO: 688405 - protein, 10 aa, Homo sapiens
  CDR3 for alpha chain variable domain of TCR clone 344203 (TRAV21, TRAJ35)
CAVFGNVLHC

SEQ ID NO: 688406 - protein, 19 aa, Homo sapiens
  CDR3 for beta chain variable domain of TCR clone 344203 (TRBV7-2, TRBJ2-3)
CASSSQGGPRLAGADTQYF

SEQ ID NO: 688407 - protein, 14 aa, Homo sapiens
  CDR3 for alpha chain variable domain of TCR clone 344204 (TRAV1-2, TRAJ8)
CAVREDTGFQELVF

SEQ ID NO: 688408 - protein, 15 aa, Homo sapiens
  CDR3 for beta chain variable domain of TCR clone 344204 (TRBV7-9, TRBJ1-1)
CASSHRGAVNTEAFF

SEQ ID NO: 688409 - protein, 12 aa, Homo sapiens
  CDR3 for alpha chain variable domain of TCR clone 344205 (TRAV38-2/DV8, TRAJ48)
CALLSGNEKLTF

SEQ ID NO: 688410 - protein, 14 aa, Homo sapiens
  CDR3 for beta chain variable domain of TCR clone 344205 (TRBV2, TRBJ2-1)
CASSDRGTHNEQFF

SEQ ID NO: 688411 - protein, 17 aa, Homo sapiens
  CDR3 for alpha chain variable domain of TCR clone 344206 (TRAV26-1, TRAJ37)
CIVRVITVSSNTGQLIF

SEQ ID NO: 688412 - protein, 13 aa, Homo sapiens
  CDR3 for beta chain variable domain of TCR clone 344206 (TRBV4-2, TRBJ1-1)
CASSQAGNTEAFF

SEQ ID NO: 688413 - protein, 13 aa, Homo sapiens
  CDR3 for alpha chain variable domain of TCR clone 344207 (TRAV13-2, TRAJ48)
CAEMDFGNEKLTF

SEQ ID NO: 688414 - protein, 16 aa, Homo sapiens
  CDR3 for beta chain variable domain of TCR clone 344207 (TRBV7-9, TRBJ2-2)
CASSLKRGTLSGELFF

SEQ ID NO: 688415 - protein, 15 aa, Homo sapiens
  CDR3 for alpha chain variable domain of TCR clone 344208 (TRAV9-2, TRAJ10)
CALSSLTGGGNKLPF

SEQ ID NO: 688416 - protein, 14 aa, Homo sapiens
  CDR3 for beta chain variable domain of TCR clone 344208 (TRBV7-3, TRBJ1-1)
CQQLRGQMNTEAFF

SEQ ID NO: 688417 - protein, 13 aa, Homo sapiens
  CDR3 for alpha chain variable domain of TCR clone 344209 (TRAV13-1, TRAJ6)
CAARRGGSSIPTF

SEQ ID NO: 688418 - protein, 16 aa, Homo sapiens
  CDR3 for beta chain variable domain of TCR clone 344209 (TRBV7-9, TRBJ2-2)
CASSLATGVGTGELFF

SEQ ID NO: 688419 - protein, 15 aa, Homo sapiens
  CDR3 for alpha chain variable domain of TCR clone 344210 (TRAV17, TRAJ16)
CATALRFSDGQKLLF

SEQ ID NO: 688420 - protein, 14 aa, Homo sapiens
  CDR3 for beta chain variable domain of TCR clone 344210 (TRBV7-9, TRBJ2-2)
CASSLVQDTGELFF

SEQ ID NO: 688421 - protein, 13 aa, Homo sapiens
  CDR3 for alpha chain variable domain of TCR clone 344211 (TRAV1-2, TRAJ9)
CAALNTGGFKTIF

SEQ ID NO: 688422 - protein, 16 aa, Homo sapiens
  CDR3 for beta chain variable domain of TCR clone 344211 (TRBV12-5, TRBJ2-5)
CASGPRTSGNQETQYL

SEQ ID NO: 688423 - protein, 16 aa, Homo sapiens
  CDR3 for alpha chain variable domain of TCR clone 344212 (TRAV30, TRAJ24)
CGTEIVDADSWGKFQF

SEQ ID NO: 688424 - protein, 15 aa, Homo sapiens
  CDR3 for beta chain variable domain of TCR clone 344212 (TRBV24-1, TRBJ2-1)
RATSDSGVSYNEQFF

SEQ ID NO: 688425 - protein, 14 aa, Homo sapiens
  CDR3 for alpha chain variable domain of TCR clone 344213 (TRAV1-2, TRAJ16)
CSVNRFSDGQKLLF

SEQ ID NO: 688426 - protein, 16 aa, Homo sapiens
  CDR3 for beta chain variable domain of TCR clone 344213 (TRBV12-4, TRBJ2-5)
CASSFFVRGRKETQYF

SEQ ID NO: 688427 - protein, 14 aa, Homo sapiens
  CDR3 for alpha chain variable domain of TCR clone 344214 (TRAV12-3, TRAJ33)
CAMSGRDSNYQLIW

SEQ ID NO: 688428 - protein, 15 aa, Homo sapiens
  CDR3 for beta chain variable domain of TCR clone 344214 (TRBV20-1, TRBJ2-7)
CSARVPAAYFYEQYF

SEQ ID NO: 688429 - protein, 18 aa, Homo sapiens
  CDR3 for alpha chain variable domain of TCR clone 344215 (TRAV21, TRAJ52)
CAVRPSPAGGTSYGKLTF

SEQ ID NO: 688430 - protein, 16 aa, Homo sapiens
  CDR3 for beta chain variable domain of TCR clone 344215 (TRBV27, TRBJ2-7)
CASSSERRDSAYEQYF

SEQ ID NO: 688431 - protein, 15 aa, Homo sapiens
  CDR3 for alpha chain variable domain of TCR clone 344216 (TRAV26-1, TRAJ12)
IASSELMDSSYKLIF

SEQ ID NO: 688432 - protein, 15 aa, Homo sapiens
  CDR3 for beta chain variable domain of TCR clone 344216 (TRBV11-3, TRBJ2-3)
CASLKDGREGDTQYF

SEQ ID NO: 688433 - protein, 14 aa, Homo sapiens
  CDR3 for alpha chain variable domain of TCR clone 344217 (TRAV12-3, TRAJ10)
SHLPLTGGGNKLTF

SEQ ID NO: 688434 - protein, 15 aa, Homo sapiens
  CDR3 for beta chain variable domain of TCR clone 344217 (TRBV4-1, TRBJ1-4)
CASSYTGGTNEKLFF

SEQ ID NO: 688435 - protein, 17 aa, Homo sapiens
  CDR3 for alpha chain variable domain of TCR clone 344218 (TRAV13-1, TRAJ53)
CAAIWKSSGGSNYKLTF

SEQ ID NO: 688436 - protein, 13 aa, Homo sapiens
  CDR3 for beta chain variable domain of TCR clone 344218 (TRBV7-9, TRBJ1-2)
CASSLKQNYGYTF

SEQ ID NO: 688437 - protein, 14 aa, Homo sapiens
  CDR3 for alpha chain variable domain of TCR clone 344219 (TRAV3, TRAJ21)
CAVIDKYNFNRFYF

SEQ ID NO: 688438 - protein, 14 aa, Homo sapiens
  CDR3 for beta chain variable domain of TCR clone 344219 (TRBV27, TRBJ2-3)
CASRDSPITDTQYF

SEQ ID NO: 688439 - protein, 17 aa, Homo sapiens
  CDR3 for alpha chain variable domain of TCR clone 344220 (TRAV27, TRAJ42)
CAERGIYYGGSQGNIIF

SEQ ID NO: 688440 - protein, 14 aa, Homo sapiens
  CDR3 for beta chain variable domain of TCR clone 344220 (TRBV6-6, TRBJ2-3)
CASRLQREADTQYF

SEQ ID NO: 688441 - protein, 15 aa, Homo sapiens
  CDR3 for alpha chain variable domain of TCR clone 344221 (TRAV27, TRAJ38)
CAARRNAGNNRKQIW

SEQ ID NO: 688442 - protein, 13 aa, Homo sapiens
  CDR3 for beta chain variable domain of TCR clone 344221 (TRBV12-5, TRBJ2-3)
CASGDRQSDTQYL

SEQ ID NO: 688443 - protein, 13 aa, Homo sapiens
  CDR3 for alpha chain variable domain of TCR clone 344222 (TRAV12-2, TRAJ3)
CLSLYSSASKIIF

SEQ ID NO: 688444 - protein, 14 aa, Homo sapiens
  CDR3 for beta chain variable domain of TCR clone 344222 (TRBV27, TRBJ2-1)
CAGSIAETYNEQFF

SEQ ID NO: 688445 - protein, 14 aa, Homo sapiens
  CDR3 for alpha chain variable domain of TCR clone 344223 (TRAV8-3, TRAJ4)
CAVGAAGGYNKLIF

SEQ ID NO: 688446 - protein, 16 aa, Homo sapiens
  CDR3 for beta chain variable domain of TCR clone 344223 (TRBV27, TRBJ2-1)
CASSSRLAGNYNEQFF

SEQ ID NO: 688447 - protein, 14 aa, Homo sapiens
  CDR3 for alpha chain variable domain of TCR clone 344224 (TRAV9-2, TRAJ39)
CALYINNAGNMLTF

SEQ ID NO: 688448 - protein, 14 aa, Homo sapiens
  CDR3 for beta chain variable domain of TCR clone 344224 (TRBV6-1, TRBJ1-3)
CASVQGGGGNTIYF

SEQ ID NO: 688449 - protein, 16 aa, Homo sapiens
  CDR3 for alpha chain variable domain of TCR clone 344225 (TRAV13-1, TRAJ48)
CGASIFGNFGNEKLTF

SEQ ID NO: 688450 - protein, 14 aa, Homo sapiens
  CDR3 for beta chain variable domain of TCR clone 344225 (TRBV7-3, TRBJ1-1)
CASSLKGGNTEAFF

SEQ ID NO: 688451 - protein, 15 aa, Homo sapiens
  CDR3 for alpha chain variable domain of TCR clone 344226 (TRAV21, TRAJ24)
CAARSSTDSWGKLQF

SEQ ID NO: 688452 - protein, 16 aa, Homo sapiens
  CDR3 for beta chain variable domain of TCR clone 344226 (TRBV12-4, TRBJ2-3)
CASSFPSNTNTDTQYF

SEQ ID NO: 688453 - protein, 17 aa, Homo sapiens
  CDR3 for alpha chain variable domain of TCR clone 344227 (TRAV3, TRAJ6)
CAVRVGPRAGGGYIPTF

SEQ ID NO: 688454 - protein, 14 aa, Homo sapiens
  CDR3 for beta chain variable domain of TCR clone 344227 (TRBV7-2, TRBJ2-7)
CASSPKTSFYEQYF

SEQ ID NO: 688455 - protein, 12 aa, Homo sapiens
  CDR3 for alpha chain variable domain of TCR clone 344228 (TRAV20, TRAJ24)
CAVYNSWGKLKF

SEQ ID NO: 688456 - protein, 15 aa, Homo sapiens
  CDR3 for beta chain variable domain of TCR clone 344228 (TRBV20-1, TRBJ2-5)
CSARVPPSGRETQYF

SEQ ID NO: 688457 - protein, 14 aa, Homo sapiens
  CDR3 for alpha chain variable domain of TCR clone 344229 (TRAV26-1, TRAJ38)
CIADNAGNNRKLIW

SEQ ID NO: 688458 - protein, 12 aa, Homo sapiens
  CDR3 for beta chain variable domain of TCR clone 344229 (TRBV20-1, TRBJ1-1)
QCRGGGNTEAFF

SEQ ID NO: 688459 - protein, 11 aa, Homo sapiens
  CDR3 for alpha chain variable domain of TCR clone 344230 (TRAV13-1, TRAJ15)
CAATPGTALIF

SEQ ID NO: 688460 - protein, 17 aa, Homo sapiens
  CDR3 for beta chain variable domain of TCR clone 344230 (TRBV13, TRBJ2-3)
CASSLSRVAGGRNMQYF

SEQ ID NO: 688461 - protein, 15 aa, Homo sapiens
  CDR3 for alpha chain variable domain of TCR clone 344231 (TRAV26-2, TRAJ21)
CILSNTTSTNFTLDL

SEQ ID NO: 688462 - protein, 16 aa, Homo sapiens
  CDR3 for beta chain variable domain of TCR clone 344231 (TRBV4-3, TRBJ2-6)
CASSQARSSGANVLTF

SEQ ID NO: 688463 - protein, 14 aa, Homo sapiens
  CDR3 for alpha chain variable domain of TCR clone 344232 (TRAV9-2, TRAJ39)
CALYIYNAGNMLTF

SEQ ID NO: 688464 - protein, 13 aa, Homo sapiens
  CDR3 for beta chain variable domain of TCR clone 344232 (TRBV18, TRBJ1-1)
CASSPSGDTEAFF

SEQ ID NO: 688465 - protein, 17 aa, Homo sapiens
  CDR3 for alpha chain variable domain of TCR clone 344233 (TRAV3, TRAJ6)
CAVRDGPRAGGSYIPTF

SEQ ID NO: 688466 - protein, 14 aa, Homo sapiens
  CDR3 for beta chain variable domain of TCR clone 344233 (TRBV7-7, TRBJ2-2)
CASSKGENTGELFF

SEQ ID NO: 688467 - protein, 19 aa, Homo sapiens
  CDR3 for alpha chain variable domain of TCR clone 344234 (TRAV3, TRAJ6)
CSVRDRNPTRSGGSYIPTF

SEQ ID NO: 688468 - protein, 15 aa, Homo sapiens
  CDR3 for beta chain variable domain of TCR clone 344234 (TRBV18, TRBJ2-7)
CASSPTFMDSYEQYF

SEQ ID NO: 688469 - protein, 13 aa, Homo sapiens
  CDR3 for alpha chain variable domain of TCR clone 344235 (TRAV21, TRAJ20)
CAVGLRVDYKLSF

SEQ ID NO: 688470 - protein, 18 aa, Homo sapiens
  CDR3 for beta chain variable domain of TCR clone 344235 (TRBV7-6, TRBJ2-1)
CASSRRTSGMSSYNEQFF

SEQ ID NO: 688471 - protein, 13 aa, Homo sapiens
  CDR3 for alpha chain variable domain of TCR clone 344236 (TRAV3, TRAJ27)
CAVRPRGAGKSTF

SEQ ID NO: 688472 - protein, 15 aa, Homo sapiens
  CDR3 for beta chain variable domain of TCR clone 344236 (TRBV20-1, TRBJ2-7)
CSARDRVSGMDEQYF

SEQ ID NO: 688473 - protein, 14 aa, Homo sapiens
  CDR3 for alpha chain variable domain of TCR clone 344237 (TRAV2, TRAJ37)
CAVDFTSNTVKLIF

SEQ ID NO: 688474 - protein, 16 aa, Homo sapiens
  CDR3 for beta chain variable domain of TCR clone 344237 (TRBV28, TRBJ2-7)
CASSRPRDRPSYEQYF

SEQ ID NO: 688475 - protein, 18 aa, Homo sapiens
  CDR3 for alpha chain variable domain of TCR clone 344238 (TRAV26-2, TRAJ33)
CCVLLHPEEPASNYQLIW

SEQ ID NO: 688476 - protein, 15 aa, Homo sapiens
  CDR3 for beta chain variable domain of TCR clone 344238 (TRBV10-2, TRBJ1-4)
CASTPIDRGNEKLFF

SEQ ID NO: 688477 - protein, 13 aa, Homo sapiens
  CDR3 for alpha chain variable domain of TCR clone 344239 (TRAV13-2, TRAJ54)
CAENYQGAQKLVF

SEQ ID NO: 688478 - protein, 12 aa, Homo sapiens
  CDR3 for beta chain variable domain of TCR clone 344239 (TRBV2, TRBJ2-1)
CASRPGPREQFF

SEQ ID NO: 688479 - protein, 13 aa, Homo sapiens
  CDR3 for alpha chain variable domain of TCR clone 344240 (TRAV6, TRAJ23)
CALDQNQGGKLIF

SEQ ID NO: 688480 - protein, 14 aa, Homo sapiens
  CDR3 for beta chain variable domain of TCR clone 344240 (TRBV28, TRBJ1-1)
CASSLDSRRDEAFF

SEQ ID NO: 688481 - protein, 11 aa, Homo sapiens
  CDR3 for alpha chain variable domain of TCR clone 344241 (TRAV29/DV5, TRAJ49)
CAAVPGNQSYF

SEQ ID NO: 688482 - protein, 17 aa, Homo sapiens
  CDR3 for beta chain variable domain of TCR clone 344241 (TRBV4-2, TRBJ1-1)
CASTQFGGGSGNTEAFF

SEQ ID NO: 688483 - protein, 22 aa, Homo sapiens
  CDR3 for alpha chain variable domain of TCR clone 344242 (TRAV8-2, TRAJ41)
CVVSELRRTQIPDIQNPDPAVY

SEQ ID NO: 688484 - protein, 14 aa, Homo sapiens
  CDR3 for beta chain variable domain of TCR clone 344242 (TRBV28, TRBJ1-5)
CASSLFPGVQPQHF

SEQ ID NO: 688485 - protein, 14 aa, Homo sapiens
  CDR3 for alpha chain variable domain of TCR clone 344243 (TRAV38-1, TRAJ29)
CVFITPSGNTPLVF

SEQ ID NO: 688486 - protein, 14 aa, Homo sapiens
  CDR3 for beta chain variable domain of TCR clone 344243 (TRBV18, TRBJ2-7)
CASSPRGGAYEQYF

SEQ ID NO: 688487 - protein, 12 aa, Homo sapiens
  CDR3 for alpha chain variable domain of TCR clone 344244 (TRAV20, TRAJ39)
CAVGNAGNTLTF

SEQ ID NO: 688488 - protein, 17 aa, Homo sapiens
  CDR3 for beta chain variable domain of TCR clone 344244 (TRBV4-1, TRBJ2-3)
CASSRGYVSGGTDTQYF

SEQ ID NO: 688489 - protein, 11 aa, Homo sapiens
  CDR3 for alpha chain variable domain of TCR clone 344245 (TRAV27, TRAJ47)
SIVEFGNKLVF

SEQ ID NO: 688490 - protein, 18 aa, Homo sapiens
  CDR3 for beta chain variable domain of TCR clone 344245 (TRBV2, TRBJ2-1)
CASRGLAGGPRTYNEQFF

SEQ ID NO: 688491 - protein, 11 aa, Homo sapiens
  CDR3 for alpha chain variable domain of TCR clone 344246 (TRAV13-2, TRAJ23)
CAESPRGKLIF

SEQ ID NO: 688492 - protein, 18 aa, Homo sapiens
  CDR3 for beta chain variable domain of TCR clone 344246 (TRBV6-5, TRBJ1-1)
CASSYSPPGGTGGTEAFF

SEQ ID NO: 688493 - protein, 14 aa, Homo sapiens
  CDR3 for alpha chain variable domain of TCR clone 344247 (TRAV22, TRAJ58)
CAVDDRTSGSRLTF

SEQ ID NO: 688494 - protein, 13 aa, Homo sapiens
  CDR3 for beta chain variable domain of TCR clone 344247 (TRBV5-5, TRBJ1-2)
CASSFWRGEDYTF

SEQ ID NO: 688495 - protein, 15 aa, Homo sapiens
  CDR3 for alpha chain variable domain of TCR clone 344248 (TRAV12-3, TRAJ6)
CAMSATTGGSYIPTF

SEQ ID NO: 688496 - protein, 15 aa, Homo sapiens
  CDR3 for beta chain variable domain of TCR clone 344248 (TRBV5-5, TRBJ1-5)
CASSSTPGSNQPQHF

SEQ ID NO: 688497 - protein, 17 aa, Homo sapiens
  CDR3 for alpha chain variable domain of TCR clone 344249 (TRAV8-6, TRAJ22)
CAVSLYPSSGSARQLTF

SEQ ID NO: 688498 - protein, 16 aa, Homo sapiens
  CDR3 for beta chain variable domain of TCR clone 344249 (TRBV19, TRBJ2-7)
CASSPAVSGSLNEQYF

SEQ ID NO: 688499 - protein, 12 aa, Homo sapiens
  CDR3 for alpha chain variable domain of TCR clone 344250 (TRAV12-3, TRAJ42)
CAPGGSQGNLIF

SEQ ID NO: 688500 - protein, 14 aa, Homo sapiens
  CDR3 for beta chain variable domain of TCR clone 344250 (TRBV7-2, TRBJ1-6)
CASSLQGDNSPLHF

SEQ ID NO: 688501 - protein, 13 aa, Homo sapiens
  CDR3 for alpha chain variable domain of TCR clone 344251 (TRAV21, TRAJ20)
CAVGLRVDYKLSF

SEQ ID NO: 688502 - protein, 12 aa, Homo sapiens
  CDR3 for beta chain variable domain of TCR clone 344251 (TRBV7-9, TRBJ1-2)
CASSPRGNGYTF

SEQ ID NO: 688503 - protein, 17 aa, Homo sapiens
  CDR3 for alpha chain variable domain of TCR clone 344252 (TRAV12-2, TRAJ52)
CAVNPYAGGTSYGKLTF

SEQ ID NO: 688504 - protein, 16 aa, Homo sapiens
  CDR3 for beta chain variable domain of TCR clone 344252 (TRBV7-2, TRBJ2-3)
CASSPQGLSNTDTQYF

SEQ ID NO: 688505 - protein, 12 aa, Homo sapiens
  CDR3 for alpha chain variable domain of TCR clone 344253 (TRAV23/DV6, TRAJ27)
CAASKSAGKSTF

SEQ ID NO: 688506 - protein, 14 aa, Homo sapiens
  CDR3 for beta chain variable domain of TCR clone 344253 (TRBV12-5, TRBJ2-5)
CASGSRTHQETQYF

SEQ ID NO: 688507 - protein, 14 aa, Homo sapiens
  CDR3 for alpha chain variable domain of TCR clone 344254 (TRAV17, TRAJ35)
CATDRPGFGNLLHC

SEQ ID NO: 688508 - protein, 14 aa, Homo sapiens
  CDR3 for beta chain variable domain of TCR clone 344254 (TRBV7-8, TRBJ2-3)
CASSLEAGTDTQYF

SEQ ID NO: 688509 - protein, 10 aa, Homo sapiens
  CDR3 for alpha chain variable domain of TCR clone 344255 (TRAV10, TRAJ38)
MAGNNRKLIW

SEQ ID NO: 688510 - protein, 18 aa, Homo sapiens
  CDR3 for beta chain variable domain of TCR clone 344255 (TRBV28, TRBJ2-1)
CDSSSTSGRANSYNEQFF

SEQ ID NO: 688511 - protein, 12 aa, Homo sapiens
  CDR3 for alpha chain variable domain of TCR clone 344256 (TRAV12-3, TRAJ42)
CAPGGSQGNPIF

SEQ ID NO: 688512 - protein, 13 aa, Homo sapiens
  CDR3 for beta chain variable domain of TCR clone 344256 (TRBV5-7, TRBJ2-6)
CASTASGANVLTF

SEQ ID NO: 688513 - protein, 14 aa, Homo sapiens
  CDR3 for alpha chain variable domain of TCR clone 344257 (TRAV12-2, TRAJ13)
CAVKKTGGYQKVTF

SEQ ID NO: 688514 - protein, 15 aa, Homo sapiens
  CDR3 for beta chain variable domain of TCR clone 344257 (TRBV6-4, TRBJ1-5)
CASSASSRINQPQHF

SEQ ID NO: 688515 - protein, 13 aa, Homo sapiens
  CDR3 for alpha chain variable domain of TCR clone 344258 (TRAV4, TRAJ42)
CLVGGGSQGNLIF

SEQ ID NO: 688516 - protein, 15 aa, Homo sapiens
  CDR3 for beta chain variable domain of TCR clone 344258 (TRBV20-1, TRBJ2-1)
CSARVSSSSYNEQFF

SEQ ID NO: 688517 - protein, 12 aa, Homo sapiens
  CDR3 for alpha chain variable domain of TCR clone 344259 (TRAV16, TRAJ27)
CALNHQCRQITL

SEQ ID NO: 688518 - protein, 17 aa, Homo sapiens
  CDR3 for beta chain variable domain of TCR clone 344259 (TRBV25-1, TRBJ2-1)
CASSAYGQGRGVYEQFF

SEQ ID NO: 688519 - protein, 14 aa, Homo sapiens
  CDR3 for alpha chain variable domain of TCR clone 344260 (TRAV3, TRAJ9)
CAVRLNPGGFKTIF

SEQ ID NO: 688520 - protein, 17 aa, Homo sapiens
  CDR3 for beta chain variable domain of TCR clone 344260 (TRBV9, TRBJ1-2)
CASSVEEKVSPWLHLRF

SEQ ID NO: 688521 - protein, 15 aa, Homo sapiens
  CDR3 for alpha chain variable domain of TCR clone 344261 (TRAV36/DV7, TRAJ53)
CAVEGSGVSNYKLTF

SEQ ID NO: 688522 - protein, 15 aa, Homo sapiens
  CDR3 for beta chain variable domain of TCR clone 344261 (TRBV27, TRBJ2-2)
CQQFIRFLGHRGAVF

SEQ ID NO: 688523 - protein, 14 aa, Homo sapiens
  CDR3 for alpha chain variable domain of TCR clone 344262 (TRAV13-1, TRAJ22)
CAASYSGSARQLTF

SEQ ID NO: 688524 - protein, 13 aa, Homo sapiens
  CDR3 for beta chain variable domain of TCR clone 344262 (TRBV6-3, TRBJ1-2)
CASSLTGDYGYTV

SEQ ID NO: 688525 - protein, 11 aa, Homo sapiens
  CDR3 for alpha chain variable domain of TCR clone 344263 (TRAV21, TRAJ41)
CAVRSGYALNF

SEQ ID NO: 688526 - protein, 13 aa, Homo sapiens
  CDR3 for beta chain variable domain of TCR clone 344263 (TRBV7-9, TRBJ1-2)
CARSLKQNYGYTF

SEQ ID NO: 688527 - protein, 15 aa, Homo sapiens
  CDR3 for alpha chain variable domain of TCR clone 344264 (TRAV1-2, TRAJ32)
CAVRGYGGATNKLLF

SEQ ID NO: 688528 - protein, 15 aa, Homo sapiens
  CDR3 for beta chain variable domain of TCR clone 344264 (TRBV25-1, TRBJ2-5)
CASSDTGTHQETQYF

SEQ ID NO: 688529 - protein, 16 aa, Homo sapiens
  CDR3 for alpha chain variable domain of TCR clone 344265 (TRAV30, TRAJ28)
CGTVTPRRAGSYQLTF

SEQ ID NO: 688530 - protein, 15 aa, Homo sapiens
  CDR3 for beta chain variable domain of TCR clone 344265 (TRBV10-3, TRBJ2-3)
CAISLTSGGTDTQYF

SEQ ID NO: 688531 - protein, 16 aa, Homo sapiens
  CDR3 for alpha chain variable domain of TCR clone 344266 (TRAV3, TRAJ31)
CTSVLGETDNNARLMF

SEQ ID NO: 688532 - protein, 15 aa, Homo sapiens
  CDR3 for beta chain variable domain of TCR clone 344266 (TRBV7-9, TRBJ1-2)
CASSSFGDTNYGYTF

SEQ ID NO: 688533 - protein, 11 aa, Homo sapiens
  CDR3 for alpha chain variable domain of TCR clone 344267 (TRAV2, TRAJ33)
CAVERNYQLIW

SEQ ID NO: 688534 - protein, 13 aa, Homo sapiens
  CDR3 for beta chain variable domain of TCR clone 344267 (TRBV10-3, TRBJ2-7)
CASRLAVNYEQYF

SEQ ID NO: 688535 - protein, 16 aa, Homo sapiens
  CDR3 for alpha chain variable domain of TCR clone 344268 (TRAV8-4, TRAJ27)
CAVKEGGFTNAGKSTF

SEQ ID NO: 688536 - protein, 13 aa, Homo sapiens
  CDR3 for beta chain variable domain of TCR clone 344268 (TRBV10-3, TRBJ2-7)
CASKLAVNYEQYF

SEQ ID NO: 688537 - protein, 15 aa, Homo sapiens
  CDR3 for alpha chain variable domain of TCR clone 344269 (TRAV8-3, TRAJ45)
CASSYSVGGAAGLTF

SEQ ID NO: 688538 - protein, 13 aa, Homo sapiens
  CDR3 for beta chain variable domain of TCR clone 344269 (TRBV10-3, TRBJ2-7)
CASKLAVNYEQYF

SEQ ID NO: 688539 - protein, 11 aa, Homo sapiens
  CDR3 for alpha chain variable domain of TCR clone 344270 (TRAV21, TRAJ11)
CAVNGYSTLTF

SEQ ID NO: 688540 - protein, 12 aa, Homo sapiens
  CDR3 for beta chain variable domain of TCR clone 344270 (TRBV29-1, TRBJ2-3)
CSVTGGADTQYF

SEQ ID NO: 688541 - protein, 14 aa, Homo sapiens
  CDR3 for alpha chain variable domain of TCR clone 344271 (TRAV21, TRAJ21)
CAAKGFGNFNKFYF

SEQ ID NO: 688542 - protein, 13 aa, Homo sapiens
  CDR3 for beta chain variable domain of TCR clone 344271 (TRBV18, TRBJ1-1)
CASSPETKPEAFF

SEQ ID NO: 688543 - protein, 14 aa, Homo sapiens
  CDR3 for alpha chain variable domain of TCR clone 344272 (TRAV12-3, TRAJ42)
CAMNHGGSQGNLIF

SEQ ID NO: 688544 - protein, 15 aa, Homo sapiens
  CDR3 for beta chain variable domain of TCR clone 344272 (TRBV5-7, TRBJ1-5)
CASSYGKLWDQPQHF

SEQ ID NO: 688545 - protein, 15 aa, Homo sapiens
  CDR3 for alpha chain variable domain of TCR clone 344273 (TRAV8-3, TRAJ27)
CAVGPSNTNAGNSTF

SEQ ID NO: 688546 - protein, 16 aa, Homo sapiens
  CDR3 for beta chain variable domain of TCR clone 344273 (TRBV6-6, TRBJ2-1)
CASSLLSDSSYNEQFF

SEQ ID NO: 688547 - protein, 14 aa, Homo sapiens
  CDR3 for alpha chain variable domain of TCR clone 344274 (TRAV12-2, TRAJ29)
CAVNWETGNTPLVF

SEQ ID NO: 688548 - protein, 16 aa, Homo sapiens
  CDR3 for beta chain variable domain of TCR clone 344274 (TRBV28, TRBJ2-7)
CASSLFFETGGPEQYF

SEQ ID NO: 688549 - protein, 13 aa, Homo sapiens
  CDR3 for alpha chain variable domain of TCR clone 344275 (TRAV8-3, TRAJ28)
CAVGAVRSYQLTF

SEQ ID NO: 688550 - protein, 15 aa, Homo sapiens
  CDR3 for beta chain variable domain of TCR clone 344275 (TRBV7-9, TRBJ1-5)
CASSQVHQPNQPQHF

SEQ ID NO: 688551 - protein, 16 aa, Homo sapiens
  CDR3 for alpha chain variable domain of TCR clone 344276 (TRAV8-6, TRAJ28)
CAVTSNPGAGSYQLTF

SEQ ID NO: 688552 - protein, 16 aa, Homo sapiens
  CDR3 for beta chain variable domain of TCR clone 344276 (TRBV12-4, TRBJ2-5)
CASSWRPSGDLETQYF

SEQ ID NO: 688553 - protein, 15 aa, Homo sapiens
  CDR3 for alpha chain variable domain of TCR clone 344277 (TRAV3, TRAJ22)
CAVRDRGGSARQQTF

SEQ ID NO: 688554 - protein, 15 aa, Homo sapiens
  CDR3 for beta chain variable domain of TCR clone 344277 (TRBV7-3, TRBJ2-1)
CASSPTGGGEVEQFF

SEQ ID NO: 688555 - protein, 15 aa, Homo sapiens
  CDR3 for alpha chain variable domain of TCR clone 344278 (TRAV17, TRAJ37)
CATDHGSSNTGKLIF

SEQ ID NO: 688556 - protein, 14 aa, Homo sapiens
  CDR3 for beta chain variable domain of TCR clone 344278 (TRBV7-2, TRBJ2-3)
CASSRTSGADMQYF

SEQ ID NO: 688557 - protein, 15 aa, Homo sapiens
  CDR3 for alpha chain variable domain of TCR clone 344279 (TRAV26-1, TRAJ44)
CIVRANTGTASKLTF

SEQ ID NO: 688558 - protein, 14 aa, Homo sapiens
  CDR3 for beta chain variable domain of TCR clone 344279 (TRBV11-2, TRBJ2-3)
CASSRLARTDTQYF

SEQ ID NO: 688559 - protein, 14 aa, Homo sapiens
  CDR3 for alpha chain variable domain of TCR clone 344280 (TRAV26-1, TRAJ45)
CIVRVVGGADGLTF

SEQ ID NO: 688560 - protein, 16 aa, Homo sapiens
  CDR3 for beta chain variable domain of TCR clone 344280 (TRBV7-9, TRBJ1-1)
CANRLTQVRSNTEAFF

SEQ ID NO: 688561 - protein, 14 aa, Homo sapiens
  CDR3 for alpha chain variable domain of TCR clone 344281 (TRAV12-3, TRAJ43)
CAMSLWGAGTRLPV

SEQ ID NO: 688562 - protein, 13 aa, Homo sapiens
  CDR3 for beta chain variable domain of TCR clone 344281 (TRBV7-9, TRBJ1-2)
CASSLKQNYGYTF

SEQ ID NO: 688563 - protein, 15 aa, Homo sapiens
  CDR3 for alpha chain variable domain of TCR clone 344282 (TRAV3, TRAJ9)
CAVRARNTGGFKTIF

SEQ ID NO: 688564 - protein, 12 aa, Homo sapiens
  CDR3 for beta chain variable domain of TCR clone 344282 (TRBV11-2, TRBJ2-2)
CASSLPTGELFF

SEQ ID NO: 688565 - protein, 19 aa, Homo sapiens
  CDR3 for alpha chain variable domain of TCR clone 344283 (TRAV26-1, TRAJ52)
CIVRVANNAGGTSYGKLTF

SEQ ID NO: 688566 - protein, 14 aa, Homo sapiens
  CDR3 for beta chain variable domain of TCR clone 344283 (TRBV19, TRBJ1-2)
CASIIGAGSYGYTF

SEQ ID NO: 688567 - protein, 16 aa, Homo sapiens
  CDR3 for alpha chain variable domain of TCR clone 344284 (TRAV3, TRAJ37)
CAVRPHGSGNTGKLIF

SEQ ID NO: 688568 - protein, 14 aa, Homo sapiens
  CDR3 for beta chain variable domain of TCR clone 344284 (TRBV20-1, TRBJ2-1)
CSARGCSSYNEQFF

SEQ ID NO: 688569 - protein, 12 aa, Homo sapiens
  CDR3 for alpha chain variable domain of TCR clone 344285 (TRAV3, TRAJ34)
CAVLGHTDKLIF

SEQ ID NO: 688570 - protein, 13 aa, Homo sapiens
  CDR3 for beta chain variable domain of TCR clone 344285 (TRBV19, TRBJ2-1)
CASSIGTGNEQFF

SEQ ID NO: 688571 - protein, 13 aa, Homo sapiens
  CDR3 for alpha chain variable domain of TCR clone 344286 (TRAV3, TRAJ26)
CAVSRGYGQNFVF

SEQ ID NO: 688572 - protein, 14 aa, Homo sapiens
  CDR3 for beta chain variable domain of TCR clone 344286 (TRBV19, TRBJ2-1)
CASPTFVLSGEQFF

SEQ ID NO: 688573 - protein, 15 aa, Homo sapiens
  CDR3 for alpha chain variable domain of TCR clone 344287 (TRAV8-4, TRAJ40)
CAVSSITSGTYKYIF

SEQ ID NO: 688574 - protein, 16 aa, Homo sapiens
  CDR3 for beta chain variable domain of TCR clone 344287 (TRBV4-1, TRBJ2-1)
CASSQEAGQGSDEQFF

SEQ ID NO: 688575 - protein, 23 aa, Homo sapiens
  CDR3 for alpha chain variable domain of TCR clone 344288 (TRAV16, TRAJ32)
CALSDMVVLQTSSSLELALCLLS

SEQ ID NO: 688576 - protein, 12 aa, Homo sapiens
  CDR3 for beta chain variable domain of TCR clone 344288 (TRBV7-9, TRBJ2-7)
CATRTDAYEQYF

SEQ ID NO: 688577 - protein, 11 aa, Homo sapiens
  CDR3 for alpha chain variable domain of TCR clone 344289 (TRAV21, TRAJ34)
CAHYNTDKLIF

SEQ ID NO: 688578 - protein, 13 aa, Homo sapiens
  CDR3 for beta chain variable domain of TCR clone 344289 (TRBV20-1, TRBJ2-7)
CSADPRATYEHYF

SEQ ID NO: 688579 - protein, 12 aa, Homo sapiens
  CDR3 for alpha chain variable domain of TCR clone 344290 (TRAV12-3, TRAJ40)
CVVYSGTYKYIF

SEQ ID NO: 688580 - protein, 18 aa, Homo sapiens
  CDR3 for beta chain variable domain of TCR clone 344290 (TRBV11-2, TRBJ2-3)
GASSLGGATRGAPNTQYF

SEQ ID NO: 688581 - protein, 14 aa, Homo sapiens
  CDR3 for alpha chain variable domain of TCR clone 344291 (TRAV30, TRAJ52)
CGTVGGTSYGKLTF

SEQ ID NO: 688582 - protein, 15 aa, Homo sapiens
  CDR3 for beta chain variable domain of TCR clone 344291 (TRBV11-2, TRBJ2-1)
CASSLGTSGLNEQFF

SEQ ID NO: 688583 - protein, 16 aa, Homo sapiens
  CDR3 for alpha chain variable domain of TCR clone 344292 (TRAV3, TRAJ37)
CAVRGRGSGNTGKIIF

SEQ ID NO: 688584 - protein, 13 aa, Homo sapiens
  CDR3 for beta chain variable domain of TCR clone 344292 (TRBV14, TRBJ2-7)
CASSQDRRGEQYF

SEQ ID NO: 688585 - protein, 13 aa, Homo sapiens
  CDR3 for alpha chain variable domain of TCR clone 344293 (TRAV14/DV4, TRAJ4)
CAMKAGGYNKLIF

SEQ ID NO: 688586 - protein, 15 aa, Homo sapiens
  CDR3 for beta chain variable domain of TCR clone 344293 (TRBV11-3, TRBJ1-1)
CASSLGGPRDTEAFF

SEQ ID NO: 688587 - protein, 17 aa, Homo sapiens
  CDR3 for alpha chain variable domain of TCR clone 344294 (TRAV3, TRAJ42)
CAVRDRDYGGSQGNLIF

SEQ ID NO: 688588 - protein, 17 aa, Homo sapiens
  CDR3 for beta chain variable domain of TCR clone 344294 (TRBV12-4, TRBJ2-3)
CASSGPGLAGGADTQYF

SEQ ID NO: 688589 - protein, 13 aa, Homo sapiens
  CDR3 for alpha chain variable domain of TCR clone 344295 (TRAV2, TRAJ20)
CAVEDPSQYKLSF

SEQ ID NO: 688590 - protein, 16 aa, Homo sapiens
  CDR3 for beta chain variable domain of TCR clone 344295 (TRBV25-1, TRBJ2-7)
CASSELTGGGIYEQYF

SEQ ID NO: 688591 - protein, 16 aa, Homo sapiens
  CDR3 for alpha chain variable domain of TCR clone 344296 (TRAV27, TRAJ52)
CAGAPAGGTSYGKLTF

SEQ ID NO: 688592 - protein, 14 aa, Homo sapiens
  CDR3 for beta chain variable domain of TCR clone 344296 (TRBV7-9, TRBJ1-1)
CASTPLQSYTEAFF

SEQ ID NO: 688593 - protein, 14 aa, Homo sapiens
  CDR3 for alpha chain variable domain of TCR clone 344297 (TRAV36/DV7, TRAJ13)
WGSGEEGGYQKVTF

SEQ ID NO: 688594 - protein, 15 aa, Homo sapiens
  CDR3 for beta chain variable domain of TCR clone 344297 (TRBV19, TRBJ2-1)
CASSTGTSSYNEQFF

SEQ ID NO: 688595 - protein, 18 aa, Homo sapiens
  CDR3 for alpha chain variable domain of TCR clone 344298 (TRAV21, TRAJ52)
CAVRPSTAGGTSYGKLTF

SEQ ID NO: 688596 - protein, 16 aa, Homo sapiens
  CDR3 for beta chain variable domain of TCR clone 344298 (TRBV19, TRBJ2-2)
CASRSPGTGATGELFF

SEQ ID NO: 688597 - protein, 15 aa, Homo sapiens
  CDR3 for alpha chain variable domain of TCR clone 344299 (TRAV23/DV6, TRAJ38)
CAARSNAGNNRKLIW

SEQ ID NO: 688598 - protein, 15 aa, Homo sapiens
  CDR3 for beta chain variable domain of TCR clone 344299 (TRBV18, TRBJ2-1)
CASSPPSASYNEQFF

SEQ ID NO: 688599 - protein, 15 aa, Homo sapiens
  CDR3 for alpha chain variable domain of TCR clone 344300 (TRAV4, TRAJ39)
CLVGPNNNAGNMLTF

SEQ ID NO: 688600 - protein, 15 aa, Homo sapiens
  CDR3 for beta chain variable domain of TCR clone 344300 (TRBV28, TRBJ2-3)
CAPTFRDWSTDTQYF

SEQ ID NO: 688601 - protein, 11 aa, Homo sapiens
  CDR3 for alpha chain variable domain of TCR clone 344301 (TRAV12-3, TRAJ26)
CAMSHGQNFVF

SEQ ID NO: 688602 - protein, 15 aa, Homo sapiens
  CDR3 for beta chain variable domain of TCR clone 344301 (TRBV2, TRBJ2-7)
CASSEGLARSYEQYF

SEQ ID NO: 688603 - protein, 10 aa, Homo sapiens
  CDR3 for alpha chain variable domain of TCR clone 344302 (TRAV23/DV6, TRAJ57)
CAASSTLSQC

SEQ ID NO: 688604 - protein, 15 aa, Homo sapiens
  CDR3 for beta chain variable domain of TCR clone 344302 (TRBV7-3, TRBJ2-2)
CASSETGQGTGELFF

SEQ ID NO: 688605 - protein, 14 aa, Homo sapiens
  CDR3 for alpha chain variable domain of TCR clone 344303 (TRAV12-2, TRAJ13)
CAVKKTGGYQKVTF

SEQ ID NO: 688606 - protein, 15 aa, Homo sapiens
  CDR3 for beta chain variable domain of TCR clone 344303 (TRBV27, TRBJ2-1)
CATSNGGGSSNGQFF

SEQ ID NO: 688607 - protein, 15 aa, Homo sapiens
  CDR3 for alpha chain variable domain of TCR clone 344304 (TRAV40, TRAJ45)
CLLGDLGGGADGLTF

SEQ ID NO: 688608 - protein, 13 aa, Homo sapiens
  CDR3 for beta chain variable domain of TCR clone 344304 (TRBV7-9, TRBJ1-2)
CASSLKQNYGHTF

SEQ ID NO: 688609 - protein, 15 aa, Homo sapiens
  CDR3 for alpha chain variable domain of TCR clone 344305 (TRAV12-2, TRAJ43)
CAFDMRIGAGTRLTV

SEQ ID NO: 688610 - protein, 17 aa, Homo sapiens
  CDR3 for beta chain variable domain of TCR clone 344305 (TRBV13, TRBJ2-3)
CASSLSRVAGGRNTQYF

SEQ ID NO: 688611 - protein, 15 aa, Homo sapiens
  CDR3 for alpha chain variable domain of TCR clone 344306 (TRAV26-1, TRAJ40)
CIVRVTTSGTYKYIF

SEQ ID NO: 688612 - protein, 14 aa, Homo sapiens
  CDR3 for beta chain variable domain of TCR clone 344306 (TRBV4-2, TRBJ2-1)
CASGLDRAYNEQFF

SEQ ID NO: 688613 - protein, 14 aa, Homo sapiens
  CDR3 for alpha chain variable domain of TCR clone 344307 (TRAV1-2, TRAJ8)
CAVREDTGFEKLVF

SEQ ID NO: 688614 - protein, 14 aa, Homo sapiens
  CDR3 for beta chain variable domain of TCR clone 344307 (TRBV29-1, TRBJ2-5)
CSVETSGSGETQYF

SEQ ID NO: 688615 - protein, 16 aa, Homo sapiens
  CDR3 for alpha chain variable domain of TCR clone 344308 (TRAV30, TRAJ24)
CGTEIVDADSWGKFQF

SEQ ID NO: 688616 - protein, 14 aa, Homo sapiens
  CDR3 for beta chain variable domain of TCR clone 344308 (TRBV7-8, TRBJ2-3)
CASSFKSSTDTQYF

SEQ ID NO: 688617 - protein, 14 aa, Homo sapiens
  CDR3 for alpha chain variable domain of TCR clone 344309 (TRAV12-3, TRAJ10)
SHLPLTGGGNRLTF

SEQ ID NO: 688618 - protein, 13 aa, Homo sapiens
  CDR3 for beta chain variable domain of TCR clone 344309 (TRBV7-7, TRBJ2-5)
CASSRSGQETQYF

SEQ ID NO: 688619 - protein, 13 aa, Homo sapiens
  CDR3 for alpha chain variable domain of TCR clone 344310 (TRAV13-2, TRAJ13)
CAERPGGYQKVTF

SEQ ID NO: 688620 - protein, 13 aa, Homo sapiens
  CDR3 for beta chain variable domain of TCR clone 344310 (TRBV20-1, TRBJ1-1)
CSARGGGNTEAFF

SEQ ID NO: 688621 - protein, 14 aa, Homo sapiens
  CDR3 for alpha chain variable domain of TCR clone 344311 (TRAV35, TRAJ50)
CAGHRKTSYDKGIF

SEQ ID NO: 688622 - protein, 15 aa, Homo sapiens
  CDR3 for beta chain variable domain of TCR clone 344311 (TRBV6-3, TRBJ2-7)
CASSSPGTVFYEQYF

SEQ ID NO: 688623 - protein, 14 aa, Homo sapiens
  CDR3 for alpha chain variable domain of TCR clone 344312 (TRAV26-1, TRAJ38)
CIADNAGNNRKLIW

SEQ ID NO: 688624 - protein, 19 aa, Homo sapiens
  CDR3 for beta chain variable domain of TCR clone 344312 (TRBV19, TRBJ2-5)
CASSIGQVTDFFLGETQYF

SEQ ID NO: 688625 - protein, 11 aa, Homo sapiens
  CDR3 for alpha chain variable domain of TCR clone 344313 (TRAV12-2, TRAJ43)
CAMSVSNDMRF

SEQ ID NO: 688626 - protein, 12 aa, Homo sapiens
  CDR3 for beta chain variable domain of TCR clone 344313 (TRBV20-1, TRBJ1-1)
KCSTWGGTEAFF

SEQ ID NO: 688627 - protein, 13 aa, Homo sapiens
  CDR3 for alpha chain variable domain of TCR clone 344314 (TRAV21, TRAJ20)
CAVGLRVDYKLSF

SEQ ID NO: 688628 - protein, 13 aa, Homo sapiens
  CDR3 for beta chain variable domain of TCR clone 344314 (TRBV6-1, TRBJ1-1)
CARSRQGNTGAFF

SEQ ID NO: 688629 - protein, 13 aa, Homo sapiens
  CDR3 for alpha chain variable domain of TCR clone 344315 (TRAV22, TRAJ29)
CAVGGSGNTPLVF

SEQ ID NO: 688630 - protein, 14 aa, Homo sapiens
  CDR3 for beta chain variable domain of TCR clone 344315 (TRBV18, TRBJ2-5)
CASSPGVSQETQYF

SEQ ID NO: 688631 - protein, 23 aa, Homo sapiens
  CDR3 for alpha chain variable domain of TCR clone 344316 (TRAV26-1, TRAJ38)
CIADNAGNNHIQNPDPAVYKLRD

SEQ ID NO: 688632 - protein, 17 aa, Homo sapiens
  CDR3 for beta chain variable domain of TCR clone 344316 (TRBV11-2, TRBJ2-6)
CASSQRDIFSGANVLTF

SEQ ID NO: 688633 - protein, 12 aa, Homo sapiens
  CDR3 for alpha chain variable domain of TCR clone 344317 (TRAV8-3, TRAJ26)
CAGDNYGQNFVF

SEQ ID NO: 688634 - protein, 15 aa, Homo sapiens
  CDR3 for beta chain variable domain of TCR clone 344317 (TRBV6-5, TRBJ2-1)
RASSYDAGAGNEQFF

SEQ ID NO: 688635 - protein, 17 aa, Homo sapiens
  CDR3 for alpha chain variable domain of TCR clone 344318 (TRAV3, TRAJ6)
CAVSRRTDPGGSYIPTF

SEQ ID NO: 688636 - protein, 18 aa, Homo sapiens
  CDR3 for beta chain variable domain of TCR clone 344318 (TRBV7-2, TRBJ2-3)
CASSLETSRGRKADTQYF

SEQ ID NO: 688637 - protein, 15 aa, Homo sapiens
  CDR3 for alpha chain variable domain of TCR clone 344319 (TRAV3, TRAJ22)
CAVRDRGGSARQLTL

SEQ ID NO: 688638 - protein, 18 aa, Homo sapiens
  CDR3 for beta chain variable domain of TCR clone 344319 (TRBV28, TRBJ2-1)
CASSSTSGRANSYNEQFF

SEQ ID NO: 688639 - protein, 16 aa, Homo sapiens
  CDR3 for alpha chain variable domain of TCR clone 344320 (TRAV3, TRAJ10)
CAVRDMRAGGGNKLTF

SEQ ID NO: 688640 - protein, 14 aa, Homo sapiens
  CDR3 for beta chain variable domain of TCR clone 344320 (TRBV4-1, TRBJ2-7)
CAGIPSREGFEQYF

SEQ ID NO: 688641 - protein, 16 aa, Homo sapiens
  CDR3 for alpha chain variable domain of TCR clone 344321 (TRAV12-2, TRAJ32)
CAMNLGQGGATNKLIF

SEQ ID NO: 688642 - protein, 14 aa, Homo sapiens
  CDR3 for beta chain variable domain of TCR clone 344321 (TRBV11-2, TRBJ2-3)
CASSRLARTDTQHF

SEQ ID NO: 688643 - protein, 14 aa, Homo sapiens
  CDR3 for alpha chain variable domain of TCR clone 344322 (TRAV26-1, TRAJ26)
CIVRVASYGQNFVF

SEQ ID NO: 688644 - protein, 11 aa, Homo sapiens
  CDR3 for beta chain variable domain of TCR clone 344322 (TRBV19, TRBJ2-5)
CASSIKETQYF

SEQ ID NO: 688645 - protein, 14 aa, Homo sapiens
  CDR3 for alpha chain variable domain of TCR clone 344323 (TRAV29/DV5, TRAJ36)
CAARRKTGANNLFF

SEQ ID NO: 688646 - protein, 20 aa, Homo sapiens
  CDR3 for beta chain variable domain of TCR clone 344323 (TRBV28, TRBJ2-1)
CASTLIGRSPGLAGGNEQFF

SEQ ID NO: 688647 - protein, 16 aa, Homo sapiens
  CDR3 for alpha chain variable domain of TCR clone 344324 (TRAV13-1, TRAJ58)
CAASSPYAPSGSRLTF

SEQ ID NO: 688648 - protein, 14 aa, Homo sapiens
  CDR3 for beta chain variable domain of TCR clone 344324 (TRBV20-1, TRBJ2-4)
CSASGRVGENIQYF

SEQ ID NO: 688649 - protein, 15 aa, Homo sapiens
  CDR3 for alpha chain variable domain of TCR clone 344325 (TRAV2, TRAJ24)
CAVVRLKNSWGTLQF

SEQ ID NO: 688650 - protein, 17 aa, Homo sapiens
  CDR3 for beta chain variable domain of TCR clone 344325 (TRBV13, TRBJ2-3)
CASSLSRVAGGRNTQYF

SEQ ID NO: 688651 - protein, 18 aa, Homo sapiens
  CDR3 for alpha chain variable domain of TCR clone 344326 (TRAV21, TRAJ52)
CAVRPSPAGGTSYGKLTF

SEQ ID NO: 688652 - protein, 13 aa, Homo sapiens
  CDR3 for beta chain variable domain of TCR clone 344326 (TRBV29-1, TRBJ2-1)
CSVEGGMVNEQFF

SEQ ID NO: 688653 - protein, 10 aa, Homo sapiens
  CDR3 for alpha chain variable domain of TCR clone 344327 (TRAV8-3, TRAJ17)
CAVGAEKLQA

SEQ ID NO: 688654 - protein, 14 aa, Homo sapiens
  CDR3 for beta chain variable domain of TCR clone 344327 (TRBV4-2, TRBJ1-2)
CASSQVGQNYGYTF

SEQ ID NO: 688655 - protein, 15 aa, Homo sapiens
  CDR3 for alpha chain variable domain of TCR clone 344328 (TRAV8-3, TRAJ45)
CASSYSGGGADGLTF

SEQ ID NO: 688656 - protein, 15 aa, Homo sapiens
  CDR3 for beta chain variable domain of TCR clone 344328 (TRBV4-1, TRBJ1-4)
CASSLATATNGKLFF

SEQ ID NO: 688657 - protein, 12 aa, Homo sapiens
  CDR3 for alpha chain variable domain of TCR clone 344329 (TRAV12-3, TRAJ17)
RAMTLTGNKLTF

SEQ ID NO: 688658 - protein, 15 aa, Homo sapiens
  CDR3 for beta chain variable domain of TCR clone 344329 (TRBV20-1, TRBJ2-7)
CSARDRVSGMDEQYV

SEQ ID NO: 688659 - protein, 16 aa, Homo sapiens
  CDR3 for alpha chain variable domain of TCR clone 344330 (TRAV3, TRAJ10)
YAVRDMRAGGGNKLTF

SEQ ID NO: 688660 - protein, 15 aa, Homo sapiens
  CDR3 for beta chain variable domain of TCR clone 344330 (TRBV9, TRBJ1-6)
CASSVAGTGDSPLHF

SEQ ID NO: 688661 - protein, 13 aa, Homo sapiens
  CDR3 for alpha chain variable domain of TCR clone 344331 (TRAV3, TRAJ4)
CAVRDGGYNKLIF

SEQ ID NO: 688662 - protein, 15 aa, Homo sapiens
  CDR3 for beta chain variable domain of TCR clone 344331 (TRBV5-1, TRBJ2-1)
CASSPPRATYNEQFF

SEQ ID NO: 688663 - protein, 12 aa, Homo sapiens
  CDR3 for alpha chain variable domain of TCR clone 344332 (TRAV13-1, TRAJ17)
CAAPRCRQQANF

SEQ ID NO: 688664 - protein, 13 aa, Homo sapiens
  CDR3 for beta chain variable domain of TCR clone 344332 (TRBV20-1, TRBJ2-5)
CSARYTGEETQYF

SEQ ID NO: 688665 - protein, 14 aa, Homo sapiens
  CDR3 for alpha chain variable domain of TCR clone 344333 (TRAV17, TRAJ37)
CAPDGSSNTGKLIF

SEQ ID NO: 688666 - protein, 13 aa, Homo sapiens
  CDR3 for beta chain variable domain of TCR clone 344333 (TRBV11-2, TRBJ2-1)
CASSLDLVNEQFF

SEQ ID NO: 688667 - protein, 16 aa, Homo sapiens
  CDR3 for alpha chain variable domain of TCR clone 344334 (TRAV3, TRAJ5)
CAVRNLMDTGRRALTF

SEQ ID NO: 688668 - protein, 16 aa, Homo sapiens
  CDR3 for beta chain variable domain of TCR clone 344334 (TRBV4-2, TRBJ2-7)
CASSQEGLANSYEPYF

SEQ ID NO: 688669 - protein, 18 aa, Homo sapiens
  CDR3 for alpha chain variable domain of TCR clone 344335 (TRAV8-3, TRAJ4)
WVRDPTSNDPGGYNKLIF

SEQ ID NO: 688670 - protein, 14 aa, Homo sapiens
  CDR3 for beta chain variable domain of TCR clone 344335 (TRBV7-6, TRBJ2-3)
CASSLGTVTDTQYF

SEQ ID NO: 688671 - protein, 14 aa, Homo sapiens
  CDR3 for alpha chain variable domain of TCR clone 344336 (TRAV12-3, TRAJ10)
SHLPLTGGGNKLTF

SEQ ID NO: 688672 - protein, 12 aa, Homo sapiens
  CDR3 for beta chain variable domain of TCR clone 344336 (TRBV7-9, TRBJ2-7)
CASSIKREEQFF

SEQ ID NO: 688673 - protein, 12 aa, Homo sapiens
  CDR3 for alpha chain variable domain of TCR clone 344337 (TRAV21, TRAJ12)
CAVMDSSYKLIF

SEQ ID NO: 688674 - protein, 16 aa, Homo sapiens
  CDR3 for beta chain variable domain of TCR clone 344337 (TRBV19, TRBJ2-2)
CASRSPGTGATGELFF

SEQ ID NO: 688675 - protein, 16 aa, Homo sapiens
  CDR3 for alpha chain variable domain of TCR clone 344338 (TRAV26-1, TRAJ48)
CIVRDPPNFGNEKLTF

SEQ ID NO: 688676 - protein, 12 aa, Homo sapiens
  CDR3 for beta chain variable domain of TCR clone 344338 (TRBV19, TRBJ2-1)
CASSRQGAEQFL

SEQ ID NO: 688677 - protein, 15 aa, Homo sapiens
  CDR3 for alpha chain variable domain of TCR clone 344339 (TRAV3, TRAJ29)
CAVRDLYSGNTPLVF

SEQ ID NO: 688678 - protein, 17 aa, Homo sapiens
  CDR3 for beta chain variable domain of TCR clone 344339 (TRBV20-1, TRBJ2-1)
CSARDPLAGVWENEQFF

SEQ ID NO: 688679 - protein, 12 aa, Homo sapiens
  CDR3 for alpha chain variable domain of TCR clone 344340 (TRAV12-3, TRAJ29)
CAMTLGNTPLVF

SEQ ID NO: 688680 - protein, 15 aa, Homo sapiens
  CDR3 for beta chain variable domain of TCR clone 344340 (TRBV5-7, TRBJ2-7)
CASSLPGQVFYEQYF

SEQ ID NO: 688681 - protein, 14 aa, Homo sapiens
  CDR3 for alpha chain variable domain of TCR clone 344341 (TRAV12-2, TRAJ17)
CAVLFKAAGNKLTF

SEQ ID NO: 688682 - protein, 13 aa, Homo sapiens
  CDR3 for beta chain variable domain of TCR clone 344341 (TRBV19, TRBJ1-2)
CASSLGQVYGYTF

SEQ ID NO: 688683 - protein, 15 aa, Homo sapiens
  CDR3 for alpha chain variable domain of TCR clone 344342 (TRAV12-2, TRAJ57)
CAVSRGQGGSEKLVF

SEQ ID NO: 688684 - protein, 14 aa, Homo sapiens
  CDR3 for beta chain variable domain of TCR clone 344342 (TRBV5-1, TRBJ2-3)
CASRGQTSTDTQYF

SEQ ID NO: 688685 - protein, 13 aa, Homo sapiens
  CDR3 for alpha chain variable domain of TCR clone 344343 (TRAV34, TRAJ13)
CGATTGGYQKVTF

SEQ ID NO: 688686 - protein, 14 aa, Homo sapiens
  CDR3 for beta chain variable domain of TCR clone 344343 (TRBV7-3, TRBJ2-1)
CASSLAGGTNEQFF

SEQ ID NO: 688687 - protein, 15 aa, Homo sapiens
  CDR3 for alpha chain variable domain of TCR clone 344344 (TRAV2, TRAJ15)
CAVEDREQAGTALIF

SEQ ID NO: 688688 - protein, 17 aa, Homo sapiens
  CDR3 for beta chain variable domain of TCR clone 344344 (TRBV7-8, TRBJ2-6)
CASSAGTGGAGANDLTF

SEQ ID NO: 688689 - protein, 13 aa, Homo sapiens
  CDR3 for alpha chain variable domain of TCR clone 344345 (TRAV2, TRAJ40)
CAVVTSGTYKYIF

SEQ ID NO: 688690 - protein, 19 aa, Homo sapiens
  CDR3 for beta chain variable domain of TCR clone 344345 (TRBV2, TRBJ2-7)
CASSDDETSGRANDYEQYF

SEQ ID NO: 688691 - protein, 13 aa, Homo sapiens
  CDR3 for alpha chain variable domain of TCR clone 344346 (TRAV21, TRAJ20)
CAVGLRVDYKLSF

SEQ ID NO: 688692 - protein, 14 aa, Homo sapiens
  CDR3 for beta chain variable domain of TCR clone 344346 (TRBV19, TRBJ1-2)
CASSIGAGSYGYTF

SEQ ID NO: 688693 - protein, 13 aa, Homo sapiens
  CDR3 for alpha chain variable domain of TCR clone 344347 (TRAV13-2, TRAJ48)
CAEMDFGNEKLTF

SEQ ID NO: 688694 - protein, 15 aa, Homo sapiens
  CDR3 for beta chain variable domain of TCR clone 344347 (TRBV7-2, TRBJ2-3)
CASSLAGAFIDTQYF

SEQ ID NO: 688695 - protein, 11 aa, Homo sapiens
  CDR3 for alpha chain variable domain of TCR clone 344348 (TRAV2, TRAJ33)
CAVESNYQLIW

SEQ ID NO: 688696 - protein, 12 aa, Homo sapiens
  CDR3 for beta chain variable domain of TCR clone 344348 (TRBV6-3, TRBJ2-7)
CASSLTPYEQYF

SEQ ID NO: 688697 - protein, 16 aa, Homo sapiens
  CDR3 for alpha chain variable domain of TCR clone 344349 (TRAV3, TRAJ21)
CAVRDIERGNFNKFYF

SEQ ID NO: 688698 - protein, 12 aa, Homo sapiens
  CDR3 for beta chain variable domain of TCR clone 344349 (TRBV2, TRBJ2-1)
CAKREGYNEQFF

SEQ ID NO: 688699 - protein, 14 aa, Homo sapiens
  CDR3 for alpha chain variable domain of TCR clone 344350 (TRAV1-2, TRAJ33)
CAVRAPDSNYQLIW

SEQ ID NO: 688700 - protein, 18 aa, Homo sapiens
  CDR3 for beta chain variable domain of TCR clone 344350 (TRBV7-8, TRBJ2-1)
CASSPYLGQRGSNNEQFF

SEQ ID NO: 688701 - protein, 17 aa, Homo sapiens
  CDR3 for alpha chain variable domain of TCR clone 344351 (TRAV3, TRAJ6)
CAVRDGPRAGGRYIPTF

SEQ ID NO: 688702 - protein, 14 aa, Homo sapiens
  CDR3 for beta chain variable domain of TCR clone 344351 (TRBV7-2, TRBJ2-7)
CASSPKTGFYEQYF

SEQ ID NO: 688703 - protein, 12 aa, Homo sapiens
  CDR3 for alpha chain variable domain of TCR clone 344352 (TRAV12-2, TRAJ42)
CAVGGSQGNLIF

SEQ ID NO: 688704 - protein, 15 aa, Homo sapiens
  CDR3 for beta chain variable domain of TCR clone 344352 (TRBV9, TRBJ1-6)
CASSVAGTGDSPLHC

SEQ ID NO: 688705 - protein, 12 aa, Homo sapiens
  CDR3 for alpha chain variable domain of TCR clone 344353 (TRAV13-1, TRAJ21)
CAAKEGFNKFYF

SEQ ID NO: 688706 - protein, 15 aa, Homo sapiens
  CDR3 for beta chain variable domain of TCR clone 344353 (TRBV5-1, TRBJ1-1)
CASSSTTGTNTEAFF

SEQ ID NO: 688707 - protein, 16 aa, Homo sapiens
  CDR3 for alpha chain variable domain of TCR clone 344354 (TRAV27, TRAJ13)
CAGAKSDSVGYQRVTF

SEQ ID NO: 688708 - protein, 15 aa, Homo sapiens
  CDR3 for beta chain variable domain of TCR clone 344354 (TRBV29-1, TRBJ2-1)
CSVGRHALFYNEQFF

SEQ ID NO: 688709 - protein, 13 aa, Homo sapiens
  CDR3 for alpha chain variable domain of TCR clone 344355 (TRAV2, TRAJ40)
CAVVTSGTYKYIL

SEQ ID NO: 688710 - protein, 16 aa, Homo sapiens
  CDR3 for beta chain variable domain of TCR clone 344355 (TRBV19, TRBJ2-1)
CASSKAGPSSYNEQFF

SEQ ID NO: 688711 - protein, 15 aa, Homo sapiens
  CDR3 for alpha chain variable domain of TCR clone 344356 (TRAV12-3, TRAJ6)
CAMSATTGGSYIPTF

SEQ ID NO: 688712 - protein, 16 aa, Homo sapiens
  CDR3 for beta chain variable domain of TCR clone 344356 (TRBV7-2, TRBJ2-6)
CASSERRASGANVLTF

SEQ ID NO: 688713 - protein, 14 aa, Homo sapiens
  CDR3 for alpha chain variable domain of TCR clone 344357 (TRAV27, TRAJ12)
CAGARMDSSYKLIF

SEQ ID NO: 688714 - protein, 18 aa, Homo sapiens
  CDR3 for beta chain variable domain of TCR clone 344357 (TRBV10-3, TRBJ2-7)
CAIRESGRPSGRRVEQYF

SEQ ID NO: 688715 - protein, 14 aa, Homo sapiens
  CDR3 for alpha chain variable domain of TCR clone 344358 (TRAV35, TRAJ22)
CDGLMPGSARQLTF

SEQ ID NO: 688716 - protein, 15 aa, Homo sapiens
  CDR3 for beta chain variable domain of TCR clone 344358 (TRBV12-4, TRBJ2-5)
CASSPPTGLQETQYF

SEQ ID NO: 688717 - protein, 14 aa, Homo sapiens
  CDR3 for alpha chain variable domain of TCR clone 344359 (TRAV3, TRAJ40)
CAVRYRRGTYKYIF

SEQ ID NO: 688718 - protein, 15 aa, Homo sapiens
  CDR3 for beta chain variable domain of TCR clone 344359 (TRBV11-1, TRBJ1-3)
CASTDPRAFGNTIDF

SEQ ID NO: 688719 - protein, 14 aa, Homo sapiens
  CDR3 for alpha chain variable domain of TCR clone 344360 (TRAV29/DV5, TRAJ48)
CAAMAPFGNEKLTF

SEQ ID NO: 688720 - protein, 15 aa, Homo sapiens
  CDR3 for beta chain variable domain of TCR clone 344360 (TRBV7-2, TRBJ2-1)
CASTHGTGIYNEQFF

SEQ ID NO: 688721 - protein, 13 aa, Homo sapiens
  CDR3 for alpha chain variable domain of TCR clone 344361 (TRAV12-1, TRAJ11)
CVVNRAGYSTLTF

SEQ ID NO: 688722 - protein, 16 aa, Homo sapiens
  CDR3 for beta chain variable domain of TCR clone 344361 (TRBV27, TRBJ2-2)
CASSLRPGGAPGELCF

SEQ ID NO: 688723 - protein, 11 aa, Homo sapiens
  CDR3 for alpha chain variable domain of TCR clone 344362 (TRAV12-3, TRAJ27)
CAMATAGKSTF

SEQ ID NO: 688724 - protein, 13 aa, Homo sapiens
  CDR3 for beta chain variable domain of TCR clone 344362 (TRBV20-1, TRBJ1-1)
CSARVGGKAEAFF

SEQ ID NO: 688725 - protein, 13 aa, Homo sapiens
  CDR3 for alpha chain variable domain of TCR clone 344363 (TRAV20, TRAJ34)
CAVSSYNTDKLIF

SEQ ID NO: 688726 - protein, 15 aa, Homo sapiens
  CDR3 for beta chain variable domain of TCR clone 344363 (TRBV20-1, TRBJ1-2)
CSSAGEGARIYGYTF

SEQ ID NO: 688727 - protein, 15 aa, Homo sapiens
  CDR3 for alpha chain variable domain of TCR clone 344364 (TRAV17, TRAJ35)
CATAFVVGFGNVLHC

SEQ ID NO: 688728 - protein, 15 aa, Homo sapiens
  CDR3 for beta chain variable domain of TCR clone 344364 (TRBV19, TRBJ2-4)
CASRGPRRGENIQYF

SEQ ID NO: 688729 - protein, 16 aa, Homo sapiens
  CDR3 for alpha chain variable domain of TCR clone 344365 (TRAV1-2, TRAJ10)
CAVRGVLTGGGNKLTF

SEQ ID NO: 688730 - protein, 12 aa, Homo sapiens
  CDR3 for beta chain variable domain of TCR clone 344365 (TRBV7-8, TRBJ2-7)
CASSIVDREQYF

SEQ ID NO: 688731 - protein, 13 aa, Homo sapiens
  CDR3 for alpha chain variable domain of TCR clone 344366 (TRAV17, TRAJ22)
CAHHSGSARQLTF

SEQ ID NO: 688732 - protein, 16 aa, Homo sapiens
  CDR3 for beta chain variable domain of TCR clone 344366 (TRBV4-1, TRBJ1-2)
CASSQDAGQVLYCYTF

SEQ ID NO: 688733 - protein, 20 aa, Homo sapiens
  CDR3 for alpha chain variable domain of TCR clone 344367 (TRAV8-2, TRAJ8)
CVVRDRSADEHRLSETCIWS

SEQ ID NO: 688734 - protein, 21 aa, Homo sapiens
  CDR3 for beta chain variable domain of TCR clone 344367 (TRBV7-3, TRBJ1-1)
GGTQPCISVPAARIGGAEAFF

SEQ ID NO: 688735 - protein, 12 aa, Homo sapiens
  CDR3 for alpha chain variable domain of TCR clone 344368 (TRAV12-3, TRAJ17)
CAMTPTGNKLTF

SEQ ID NO: 688736 - protein, 15 aa, Homo sapiens
  CDR3 for beta chain variable domain of TCR clone 344368 (TRBV7-9, TRBJ1-6)
CASSSPGRGNSPLHF

SEQ ID NO: 688737 - protein, 16 aa, Homo sapiens
  CDR3 for alpha chain variable domain of TCR clone 344369 (TRAV30, TRAJ24)
CGTEIVDADSWGKFQF

SEQ ID NO: 688738 - protein, 16 aa, Homo sapiens
  CDR3 for beta chain variable domain of TCR clone 344369 (TRBV7-2, TRBJ2-5)
CASSPFPTGGEETQYF

SEQ ID NO: 688739 - protein, 14 aa, Homo sapiens
  CDR3 for alpha chain variable domain of TCR clone 344370 (TRAV12-3, TRAJ42)
CAMNYGGSQGNLIF

SEQ ID NO: 688740 - protein, 15 aa, Homo sapiens
  CDR3 for beta chain variable domain of TCR clone 344370 (TRBV5-6, TRBJ1-5)
CASSHGKLWDQPQHF

SEQ ID NO: 688741 - protein, 14 aa, Homo sapiens
  CDR3 for alpha chain variable domain of TCR clone 344371 (TRAV3, TRAJ17)
CAVRDAAAGNKITF

SEQ ID NO: 688742 - protein, 13 aa, Homo sapiens
  CDR3 for beta chain variable domain of TCR clone 344371 (TRBV2, TRBJ1-1)
CASSVSGYTEAFF

SEQ ID NO: 688743 - protein, 17 aa, Homo sapiens
  CDR3 for alpha chain variable domain of TCR clone 344372 (TRAV3, TRAJ12)
CAVRDGGRMDCSYKLIF

SEQ ID NO: 688744 - protein, 13 aa, Homo sapiens
  CDR3 for beta chain variable domain of TCR clone 344372 (TRBV4-2, TRBJ1-1)
CASSQAGNTEAFF

SEQ ID NO: 688745 - protein, 14 aa, Homo sapiens
  CDR3 for alpha chain variable domain of TCR clone 344373 (TRAV1-2, TRAJ16)
CAVNRFSDGQKLLF

SEQ ID NO: 688746 - protein, 17 aa, Homo sapiens
  CDR3 for beta chain variable domain of TCR clone 344373 (TRBV20-1, TRBJ2-1)
CSASSSGLAGSYNELFF

SEQ ID NO: 688747 - protein, 13 aa, Homo sapiens
  CDR3 for alpha chain variable domain of TCR clone 344374 (TRAV13-2, TRAJ48)
CAEMDFGNEKLTF

SEQ ID NO: 688748 - protein, 14 aa, Homo sapiens
  CDR3 for beta chain variable domain of TCR clone 344374 (TRBV11-3, TRBJ2-2)
CASSRDTSTGELFF

SEQ ID NO: 688749 - protein, 13 aa, Homo sapiens
  CDR3 for alpha chain variable domain of TCR clone 344375 (TRAV3, TRAJ21)
CAVREPDFNKFYF

SEQ ID NO: 688750 - protein, 13 aa, Homo sapiens
  CDR3 for beta chain variable domain of TCR clone 344375 (TRBV9, TRBJ2-1)
CASIPSGGNEQFF

SEQ ID NO: 688751 - protein, 12 aa, Homo sapiens
  CDR3 for alpha chain variable domain of TCR clone 344376 (TRAV12-3, TRAJ17)
CAMTLTGNKLTL

SEQ ID NO: 688752 - protein, 15 aa, Homo sapiens
  CDR3 for beta chain variable domain of TCR clone 344376 (TRBV20-1, TRBJ2-7)
CSARDQVSGMDEQYF

SEQ ID NO: 688753 - protein, 13 aa, Homo sapiens
  CDR3 for alpha chain variable domain of TCR clone 344377 (TRAV8-3, TRAJ48)
CAVGRFGNEKLNF

SEQ ID NO: 688754 - protein, 16 aa, Homo sapiens
  CDR3 for beta chain variable domain of TCR clone 344377 (TRBV20-1, TRBJ2-5)
CSARDFASGIQETQYF

SEQ ID NO: 688755 - protein, 16 aa, Homo sapiens
  CDR3 for alpha chain variable domain of TCR clone 344378 (TRAV3, TRAJ10)
CAVRDMRAGGGNKLTF

SEQ ID NO: 688756 - protein, 11 aa, Homo sapiens
  CDR3 for beta chain variable domain of TCR clone 344378 (TRBV29-1, TRBJ2-5)
CSEDRTGTQFF

SEQ ID NO: 688757 - protein, 14 aa, Homo sapiens
  CDR3 for alpha chain variable domain of TCR clone 344379 (TRAV12-1, TRAJ12)
CVVTRMDSSYKLIF

SEQ ID NO: 688758 - protein, 16 aa, Homo sapiens
  CDR3 for beta chain variable domain of TCR clone 344379 (TRBV4-1, TRBJ2-7)
CASSQLRGGTSSTSGR

SEQ ID NO: 688759 - protein, 16 aa, Homo sapiens
  CDR3 for alpha chain variable domain of TCR clone 344380 (TRAV3, TRAJ21)
CAVRDIERGNFNKFYF

SEQ ID NO: 688760 - protein, 15 aa, Homo sapiens
  CDR3 for beta chain variable domain of TCR clone 344380 (TRBV7-8, TRBJ2-3)
CASSPRTGSTDTQYF

SEQ ID NO: 688761 - protein, 13 aa, Homo sapiens
  CDR3 for alpha chain variable domain of TCR clone 344381 (TRAV3, TRAJ5)
CAVRDTGRRALTF

SEQ ID NO: 688762 - protein, 14 aa, Homo sapiens
  CDR3 for beta chain variable domain of TCR clone 344381 (TRBV6-1, TRBJ1-3)
CASVQGGGGNTIYF

SEQ ID NO: 688763 - protein, 14 aa, Homo sapiens
  CDR3 for alpha chain variable domain of TCR clone 344382 (TRAV3, TRAJ34)
CAVRAPGNTDKLIF

SEQ ID NO: 688764 - protein, 17 aa, Homo sapiens
  CDR3 for beta chain variable domain of TCR clone 344382 (TRBV20-1, TRBJ2-7)
CSAAPGLAREISYEQYF

SEQ ID NO: 688765 - protein, 14 aa, Homo sapiens
  CDR3 for alpha chain variable domain of TCR clone 344383 (TRAV13-1, TRAJ22)
CAASYSGSARQLTF

SEQ ID NO: 688766 - protein, 20 aa, Homo sapiens
  CDR3 for beta chain variable domain of TCR clone 344383 (TRBV28, TRBJ2-1)
CASTPIGRSPGLAGGNEQFF

SEQ ID NO: 688767 - protein, 10 aa, Homo sapiens
  CDR3 for alpha chain variable domain of TCR clone 344384 (TRAV13-1, TRAJ5)
CAASRRALTF

SEQ ID NO: 688768 - protein, 15 aa, Homo sapiens
  CDR3 for beta chain variable domain of TCR clone 344384 (TRBV4-3, TRBJ2-3)
RSSQGGLAGTDTQYF

SEQ ID NO: 688769 - protein, 18 aa, Homo sapiens
  CDR3 for alpha chain variable domain of TCR clone 344385 (TRAV21, TRAJ52)
CAVRPSPAGGTSYGKLTF

SEQ ID NO: 688770 - protein, 14 aa, Homo sapiens
  CDR3 for beta chain variable domain of TCR clone 344385 (TRBV4-1, TRBJ2-2)
CASSQAVNTGELFY

SEQ ID NO: 688771 - protein, 11 aa, Homo sapiens
  CDR3 for alpha chain variable domain of TCR clone 344386 (TRAV21, TRAJ11)
CAVNGYSTPTF

SEQ ID NO: 688772 - protein, 15 aa, Homo sapiens
  CDR3 for beta chain variable domain of TCR clone 344386 (TRBV20-1, TRBJ2-7)
CSAESGTSGAYEQYF

SEQ ID NO: 688773 - protein, 13 aa, Homo sapiens
  CDR3 for alpha chain variable domain of TCR clone 344387 (TRAV13-1, TRAJ48)
CAAASFGNEKLTF

SEQ ID NO: 688774 - protein, 14 aa, Homo sapiens
  CDR3 for beta chain variable domain of TCR clone 344387 (TRBV18, TRBJ2-1)
CASLPGTSETEQFF

SEQ ID NO: 688775 - protein, 17 aa, Homo sapiens
  CDR3 for alpha chain variable domain of TCR clone 344388 (TRAV3, TRAJ42)
CAVRDRDYGGSQGNLIF

SEQ ID NO: 688776 - protein, 15 aa, Homo sapiens
  CDR3 for beta chain variable domain of TCR clone 344388 (TRBV7-9, TRBJ1-3)
CASSFRGSPGNTIYF

SEQ ID NO: 688777 - protein, 15 aa, Homo sapiens
  CDR3 for alpha chain variable domain of TCR clone 344389 (TRAV38-1, TRAJ57)
CAFMDSQGGSEKLVF

SEQ ID NO: 688778 - protein, 14 aa, Homo sapiens
  CDR3 for beta chain variable domain of TCR clone 344389 (TRBV7-2, TRBJ2-7)
CASSPKTSFYEQYF

SEQ ID NO: 688779 - protein, 13 aa, Homo sapiens
  CDR3 for alpha chain variable domain of TCR clone 344390 (TRAV21, TRAJ37)
CALSSGNTGKLIF

SEQ ID NO: 688780 - protein, 13 aa, Homo sapiens
  CDR3 for beta chain variable domain of TCR clone 344390 (TRBV7-6, TRBJ2-3)
CASSLRSDNTQYF

SEQ ID NO: 688781 - protein, 12 aa, Homo sapiens
  CDR3 for alpha chain variable domain of TCR clone 344391 (TRAV2, TRAJ31)
CAVEDNNARLMF

SEQ ID NO: 688782 - protein, 13 aa, Homo sapiens
  CDR3 for beta chain variable domain of TCR clone 344391 (TRBV18, TRBJ2-7)
CASSRSGSYEQYF

SEQ ID NO: 688783 - protein, 23 aa, Homo sapiens
  CDR3 for alpha chain variable domain of TCR clone 344392 (TRAV8-3, TRAJ32)
CAVGSLVVLQTSSSLELALCLLS

SEQ ID NO: 688784 - protein, 15 aa, Homo sapiens
  CDR3 for beta chain variable domain of TCR clone 344392 (TRBV4-1, TRBJ2-7)
CASSQQGQGFDEQYF

SEQ ID NO: 688785 - protein, 15 aa, Homo sapiens
  CDR3 for alpha chain variable domain of TCR clone 344393 (TRAV13-1, TRAJ18)
CAASGGGSTRGRLYF

SEQ ID NO: 688786 - protein, 13 aa, Homo sapiens
  CDR3 for beta chain variable domain of TCR clone 344393 (TRBV4-1, TRBJ2-1)
CASSQEVQYEQFF

SEQ ID NO: 688787 - protein, 12 aa, Homo sapiens
  CDR3 for alpha chain variable domain of TCR clone 344394 (TRAV21, TRAJ37)
CAVRGNTGKLIL

SEQ ID NO: 688788 - protein, 13 aa, Homo sapiens
  CDR3 for beta chain variable domain of TCR clone 344394 (TRBV19, TRBJ1-2)
CASSVPGQDGYTF

SEQ ID NO: 688789 - protein, 14 aa, Homo sapiens
  CDR3 for alpha chain variable domain of TCR clone 344395 (TRAV21, TRAJ35)
CAVMPIGFGNVLHC

SEQ ID NO: 688790 - protein, 12 aa, Homo sapiens
  CDR3 for beta chain variable domain of TCR clone 344395 (TRBV7-9, TRBJ2-7)
CASSIKREEQYV

SEQ ID NO: 688791 - protein, 13 aa, Homo sapiens
  CDR3 for alpha chain variable domain of TCR clone 344396 (TRAV12-2, TRAJ6)
CAVNVSRKLHTYI

SEQ ID NO: 688792 - protein, 17 aa, Homo sapiens
  CDR3 for beta chain variable domain of TCR clone 344396 (TRBV5-1, TRBJ2-7)
CASSKPEGREASYEQYF

SEQ ID NO: 688793 - protein, 11 aa, Homo sapiens
  CDR3 for alpha chain variable domain of TCR clone 344397 (TRAV12-3, TRAJ27)
CAMANAGKSTF

SEQ ID NO: 688794 - protein, 12 aa, Homo sapiens
  CDR3 for beta chain variable domain of TCR clone 344397 (TRBV2, TRBJ1-5)
CASSGRDQPQHF

SEQ ID NO: 688795 - protein, 14 aa, Homo sapiens
  CDR3 for alpha chain variable domain of TCR clone 344398 (TRAV12-2, TRAJ40)
CAVKIPSGTYKYIF

SEQ ID NO: 688796 - protein, 15 aa, Homo sapiens
  CDR3 for beta chain variable domain of TCR clone 344398 (TRBV4-1, TRBJ2-1)
CASSQDAGGLYEQFF

SEQ ID NO: 688797 - protein, 13 aa, Homo sapiens
  CDR3 for alpha chain variable domain of TCR clone 344399 (TRAV13-2, TRAJ5)
CAESDTGRRALTF

SEQ ID NO: 688798 - protein, 14 aa, Homo sapiens
  CDR3 for beta chain variable domain of TCR clone 344399 (TRBV2, TRBJ1-1)
CASTQVGENTDAFF

SEQ ID NO: 688799 - protein, 15 aa, Homo sapiens
  CDR3 for alpha chain variable domain of TCR clone 344400 (TRAV12-3, TRAJ6)
CAMSATTGGSYITTF

SEQ ID NO: 688800 - protein, 16 aa, Homo sapiens
  CDR3 for beta chain variable domain of TCR clone 344400 (TRBV20-1, TRBJ1-2)
CSASTGQGVANYGYTF

SEQ ID NO: 688801 - protein, 11 aa, Homo sapiens
  CDR3 for alpha chain variable domain of TCR clone 344401 (TRAV1-2, TRAJ31)
CAVNNNARLMF

SEQ ID NO: 688802 - protein, 15 aa, Homo sapiens
  CDR3 for beta chain variable domain of TCR clone 344401 (TRBV9, TRBJ1-6)
CASSVAGTGDSPLHS

SEQ ID NO: 688803 - protein, 14 aa, Homo sapiens
  CDR3 for alpha chain variable domain of TCR clone 344402 (TRAV36/DV7, TRAJ35)
CAGMPIGFGNVLHC

SEQ ID NO: 688804 - protein, 15 aa, Homo sapiens
  CDR3 for beta chain variable domain of TCR clone 344402 (TRBV19, TRBJ1-2)
CASSVGQGLNYGYTF

SEQ ID NO: 688805 - protein, 11 aa, Homo sapiens
  CDR3 for alpha chain variable domain of TCR clone 344403 (TRAV12-3, TRAJ43)
CAMSVSNDMRF

SEQ ID NO: 688806 - protein, 12 aa, Homo sapiens
  CDR3 for beta chain variable domain of TCR clone 344403 (TRBV20-1, TRBJ1-1)
QCSTWGGTESFF

SEQ ID NO: 688807 - protein, 16 aa, Homo sapiens
  CDR3 for alpha chain variable domain of TCR clone 344404 (TRAV4, TRAJ22)
CLVGDLYSGSARQLTF

SEQ ID NO: 688808 - protein, 16 aa, Homo sapiens
  CDR3 for beta chain variable domain of TCR clone 344404 (TRBV7-9, TRBJ2-1)
CASSDVAGGSYNEEFF

SEQ ID NO: 688809 - protein, 15 aa, Homo sapiens
  CDR3 for alpha chain variable domain of TCR clone 344405 (TRAV8-1, TRAJ6)
CAVNANPGGSYILTF

SEQ ID NO: 688810 - protein, 12 aa, Homo sapiens
  CDR3 for beta chain variable domain of TCR clone 344405 (TRBV5-7, TRBJ2-7)
CASSVQGGEQYF

SEQ ID NO: 688811 - protein, 11 aa, Homo sapiens
  CDR3 for alpha chain variable domain of TCR clone 344406 (TRAV12-3, TRAJ27)
CAMANAGKSTF

SEQ ID NO: 688812 - protein, 14 aa, Homo sapiens
  CDR3 for beta chain variable domain of TCR clone 344406 (TRBV4-1, TRBJ2-2)
CDSSQAVNTGELFF

SEQ ID NO: 688813 - protein, 14 aa, Homo sapiens
  CDR3 for alpha chain variable domain of TCR clone 344407 (TRAV2, TRAJ37)
CAVDFTNNTGKLIF

SEQ ID NO: 688814 - protein, 15 aa, Homo sapiens
  CDR3 for beta chain variable domain of TCR clone 344407 (TRBV20-1, TRBJ1-1)
CSASQGVTGNTEAFF

SEQ ID NO: 688815 - protein, 11 aa, Homo sapiens
  CDR3 for alpha chain variable domain of TCR clone 344408 (TRAV21, TRAJ34)
CAHYNTDKLIF

SEQ ID NO: 688816 - protein, 15 aa, Homo sapiens
  CDR3 for beta chain variable domain of TCR clone 344408 (TRBV5-1, TRBJ1-1)
CASSSTTGTNTEAFF

SEQ ID NO: 688817 - protein, 17 aa, Homo sapiens
  CDR3 for alpha chain variable domain of TCR clone 344409 (TRAV26-1, TRAJ53)
CIVRVDDSGGSNYKLTF

SEQ ID NO: 688818 - protein, 17 aa, Homo sapiens
  CDR3 for beta chain variable domain of TCR clone 344409 (TRBV19, TRBJ2-6)
CASSTGQVFSGANVLTF

SEQ ID NO: 688819 - protein, 14 aa, Homo sapiens
  CDR3 for alpha chain variable domain of TCR clone 344410 (TRAV8-3, TRAJ28)
CAVVPGAGRYQLTF

SEQ ID NO: 688820 - protein, 15 aa, Homo sapiens
  CDR3 for beta chain variable domain of TCR clone 344410 (TRBV20-1, TRBJ2-1)
CSANVVGGPWDEQFF

SEQ ID NO: 688821 - protein, 13 aa, Homo sapiens
  CDR3 for alpha chain variable domain of TCR clone 344411 (TRAV13-1, TRAJ40)
CAAISPRTYKYIF

SEQ ID NO: 688822 - protein, 13 aa, Homo sapiens
  CDR3 for beta chain variable domain of TCR clone 344411 (TRBV10-3, TRBJ2-7)
CAIRAGGPHEQYF

SEQ ID NO: 688823 - protein, 16 aa, Homo sapiens
  CDR3 for alpha chain variable domain of TCR clone 344412 (TRAV3, TRAJ10)
CAERDMRAGGGNKLTF

SEQ ID NO: 688824 - protein, 14 aa, Homo sapiens
  CDR3 for beta chain variable domain of TCR clone 344412 (TRBV7-2, TRBJ1-1)
CASSFLTGTTEAFF

SEQ ID NO: 688825 - protein, 15 aa, Homo sapiens
  CDR3 for alpha chain variable domain of TCR clone 344413 (TRAV36/DV7, TRAJ54)
CAVEKPVQGAQQLVF

SEQ ID NO: 688826 - protein, 17 aa, Homo sapiens
  CDR3 for beta chain variable domain of TCR clone 344413 (TRBV6-5, TRBJ1-2)
CASSSPWEGAFDYGYTF

SEQ ID NO: 688827 - protein, 14 aa, Homo sapiens
  CDR3 for alpha chain variable domain of TCR clone 344414 (TRAV12-2, TRAJ13)
CAVKKTGGYQKVTF

SEQ ID NO: 688828 - protein, 15 aa, Homo sapiens
  CDR3 for beta chain variable domain of TCR clone 344414 (TRBV19, TRBJ1-6)
CVSSTQGAVGSPLHF

SEQ ID NO: 688829 - protein, 12 aa, Homo sapiens
  CDR3 for alpha chain variable domain of TCR clone 344415 (TRAV12-3, TRAJ17)
CAMTLTGNRLTF

SEQ ID NO: 688830 - protein, 13 aa, Homo sapiens
  CDR3 for beta chain variable domain of TCR clone 344415 (TRBV7-9, TRBJ2-3)
CASSPGSTDTQYF

SEQ ID NO: 688831 - protein, 11 aa, Homo sapiens
  CDR3 for alpha chain variable domain of TCR clone 344416 (TRAV2, TRAJ33)
CAVDSNYQLIW

SEQ ID NO: 688832 - protein, 14 aa, Homo sapiens
  CDR3 for beta chain variable domain of TCR clone 344416 (TRBV12-4, TRBJ2-7)
CASSSREGHYEQYF

SEQ ID NO: 688833 - protein, 13 aa, Homo sapiens
  CDR3 for alpha chain variable domain of TCR clone 344417 (TRAV12-1, TRAJ26)
SATYLYYGQNFVF

SEQ ID NO: 688834 - protein, 15 aa, Homo sapiens
  CDR3 for beta chain variable domain of TCR clone 344417 (TRBV5-1, TRBJ2-6)
CASSLDPCGANVLTF

SEQ ID NO: 688835 - protein, 14 aa, Homo sapiens
  CDR3 for alpha chain variable domain of TCR clone 344418 (TRAV12-2, TRAJ45)
CAVNIGGGADGLTF

SEQ ID NO: 688836 - protein, 13 aa, Homo sapiens
  CDR3 for beta chain variable domain of TCR clone 344418 (TRBV20-1, TRBJ1-1)
CSAPLGGGTEAFF

SEQ ID NO: 688837 - protein, 15 aa, Homo sapiens
  CDR3 for alpha chain variable domain of TCR clone 344419 (TRAV13-1, TRAJ5)
CAASKTDTGRRALTF

SEQ ID NO: 688838 - protein, 16 aa, Homo sapiens
  CDR3 for beta chain variable domain of TCR clone 344419 (TRBV7-2, TRBJ2-1)
CASSLGRTSGDNEQFF

SEQ ID NO: 688839 - protein, 13 aa, Homo sapiens
  CDR3 for alpha chain variable domain of TCR clone 344420 (TRAV6, TRAJ33)
FALPMDSNYQLIW

SEQ ID NO: 688840 - protein, 15 aa, Homo sapiens
  CDR3 for beta chain variable domain of TCR clone 344420 (TRBV11-2, TRBJ2-2)
CASRGLAANTGELFF

SEQ ID NO: 688841 - protein, 14 aa, Homo sapiens
  CDR3 for alpha chain variable domain of TCR clone 344421 (TRAV17, TRAJ34)
CATDSLEGTDKLIF

SEQ ID NO: 688842 - protein, 14 aa, Homo sapiens
  CDR3 for beta chain variable domain of TCR clone 344421 (TRBV15, TRBJ2-7)
CATSNPVTSYEQYF

SEQ ID NO: 688843 - protein, 14 aa, Homo sapiens
  CDR3 for alpha chain variable domain of TCR clone 344422 (TRAV9-2, TRAJ39)
CALYIYNAGNMLTV

SEQ ID NO: 688844 - protein, 18 aa, Homo sapiens
  CDR3 for beta chain variable domain of TCR clone 344422 (TRBV20-1, TRBJ2-6)
CSAETTPTHGSGANVLTF

SEQ ID NO: 688845 - protein, 15 aa, Homo sapiens
  CDR3 for alpha chain variable domain of TCR clone 344423 (TRAV12-2, TRAJ43)
CAFDMRFGAGTRLTV

SEQ ID NO: 688846 - protein, 14 aa, Homo sapiens
  CDR3 for beta chain variable domain of TCR clone 344423 (TRBV7-9, TRBJ2-5)
CASSLVGGEETQYF

SEQ ID NO: 688847 - protein, 16 aa, Homo sapiens
  CDR3 for alpha chain variable domain of TCR clone 344424 (TRAV12-3, TRAJ10)
CAIKKGITGGGNKLTF

SEQ ID NO: 688848 - protein, 12 aa, Homo sapiens
  CDR3 for beta chain variable domain of TCR clone 344424 (TRBV20-1, TRBJ2-7)
CSAITPTKEQYF

SEQ ID NO: 688849 - protein, 17 aa, Homo sapiens
  CDR3 for alpha chain variable domain of TCR clone 344425 (TRAV3, TRAJ6)
CAVRDGPRAGGSYIPTF

SEQ ID NO: 688850 - protein, 13 aa, Homo sapiens
  CDR3 for beta chain variable domain of TCR clone 344425 (TRBV12-4, TRBJ1-2)
CASSSGLTVISTF

SEQ ID NO: 688851 - protein, 14 aa, Homo sapiens
  CDR3 for alpha chain variable domain of TCR clone 344426 (TRAV12-1, TRAJ17)
CVVNYKAAGNKLTF

SEQ ID NO: 688852 - protein, 17 aa, Homo sapiens
  CDR3 for beta chain variable domain of TCR clone 344426 (TRBV20-1, TRBJ2-1)
RSASSSGLAGSYNEQFL

SEQ ID NO: 688853 - protein, 14 aa, Homo sapiens
  CDR3 for alpha chain variable domain of TCR clone 344427 (TRAV17, TRAJ57)
CATDPQGGSEKLVF

SEQ ID NO: 688854 - protein, 15 aa, Homo sapiens
  CDR3 for beta chain variable domain of TCR clone 344427 (TRBV11-2, TRBJ1-6)
CASTGFGTAVSPLHF

SEQ ID NO: 688855 - protein, 16 aa, Homo sapiens
  CDR3 for alpha chain variable domain of TCR clone 344428 (TRAV16, TRAJ4)
CALSRMFSGGYNKLIF

SEQ ID NO: 688856 - protein, 12 aa, Homo sapiens
  CDR3 for beta chain variable domain of TCR clone 344428 (TRBV29-1, TRBJ2-3)
CSVTVGADTQYF

SEQ ID NO: 688857 - protein, 15 aa, Homo sapiens
  CDR3 for alpha chain variable domain of TCR clone 344429 (TRAV8-3, TRAJ11)
CAGGLLNSGYSTLTF

SEQ ID NO: 688858 - protein, 13 aa, Homo sapiens
  CDR3 for beta chain variable domain of TCR clone 344429 (TRBV11-2, TRBJ2-5)
CASSSTGEETQYF

SEQ ID NO: 688859 - protein, 15 aa, Homo sapiens
  CDR3 for alpha chain variable domain of TCR clone 344430 (TRAV26-1, TRAJ44)
CIVRANTGTASKLTF

SEQ ID NO: 688860 - protein, 12 aa, Homo sapiens
  CDR3 for beta chain variable domain of TCR clone 344430 (TRBV2, TRBJ2-1)
GRGLPSYNEQSF

SEQ ID NO: 688861 - protein, 11 aa, Homo sapiens
  CDR3 for alpha chain variable domain of TCR clone 344431 (TRAV26-1, TRAJ37)
CIVRVGRKLIF

SEQ ID NO: 688862 - protein, 13 aa, Homo sapiens
  CDR3 for beta chain variable domain of TCR clone 344431 (TRBV7-2, TRBJ1-1)
CASSLSRVAEAFF

SEQ ID NO: 688863 - protein, 13 aa, Homo sapiens
  CDR3 for alpha chain variable domain of TCR clone 344432 (TRAV2, TRAJ29)
CAVEPTGNTPLVF

SEQ ID NO: 688864 - protein, 15 aa, Homo sapiens
  CDR3 for beta chain variable domain of TCR clone 344432 (TRBV7-9, TRBJ1-5)
CASSQGHQPNQPQHF

SEQ ID NO: 688865 - protein, 12 aa, Homo sapiens
  CDR3 for alpha chain variable domain of TCR clone 344433 (TRAV21, TRAJ23)
CAVMLQGGKLIF

SEQ ID NO: 688866 - protein, 14 aa, Homo sapiens
  CDR3 for beta chain variable domain of TCR clone 344433 (TRBV7-9, TRBJ1-4)
CAITEGEANEKPFF

SEQ ID NO: 688867 - protein, 14 aa, Homo sapiens
  CDR3 for alpha chain variable domain of TCR clone 344434 (TRAV29/DV5, TRAJ57)
CASRSQGGSEKLVF

SEQ ID NO: 688868 - protein, 15 aa, Homo sapiens
  CDR3 for beta chain variable domain of TCR clone 344434 (TRBV28, TRBJ2-4)
CAAGSGTLLMGIQYF

SEQ ID NO: 688869 - protein, 15 aa, Homo sapiens
  CDR3 for alpha chain variable domain of TCR clone 344435 (TRAV23/DV6, TRAJ38)
CAARSNAGNKRKLIW

SEQ ID NO: 688870 - protein, 16 aa, Homo sapiens
  CDR3 for beta chain variable domain of TCR clone 344435 (TRBV10-2, TRBJ1-5)
CASSRDRDYSNQPQHF

SEQ ID NO: 688871 - protein, 14 aa, Homo sapiens
  CDR3 for alpha chain variable domain of TCR clone 344436 (TRAV12-3, TRAJ6)
CAMIATGGSYIPTF

SEQ ID NO: 688872 - protein, 16 aa, Homo sapiens
  CDR3 for beta chain variable domain of TCR clone 344436 (TRBV4-2, TRBJ2-1)
CASSPRAGQGANEQFF

SEQ ID NO: 688873 - protein, 15 aa, Homo sapiens
  CDR3 for alpha chain variable domain of TCR clone 344437 (TRAV21, TRAJ32)
CAAAPYGGATNKLIF

SEQ ID NO: 688874 - protein, 17 aa, Homo sapiens
  CDR3 for beta chain variable domain of TCR clone 344437 (TRBV18, TRBJ2-3)
CASSPFGDGGVTDTQYF

SEQ ID NO: 688875 - protein, 23 aa, Homo sapiens
  CDR3 for alpha chain variable domain of TCR clone 344438 (TRAV26-1, )
CIADNAGNSHIQNPDPAVFQLRN

SEQ ID NO: 688876 - protein, 12 aa, Homo sapiens
  CDR3 for beta chain variable domain of TCR clone 344438 (TRBV11-2, TRBJ2-2)
CASSLGGGELFF

SEQ ID NO: 688877 - protein, 21 aa, Homo sapiens
  CDR3 for alpha chain variable domain of TCR clone 344439 (TRAV26-1, TRAJ38)
CIADNAGNNHIQDPDPAVYQL

SEQ ID NO: 688878 - protein, 13 aa, Homo sapiens
  CDR3 for beta chain variable domain of TCR clone 344439 (TRBV20-1, TRBJ1-1)
CSARGGGNTEAFF

SEQ ID NO: 688879 - protein, 14 aa, Homo sapiens
  CDR3 for alpha chain variable domain of TCR clone 344440 (TRAV12-2, TRAJ23)
CVVGGYNQGGKLIF

SEQ ID NO: 688880 - protein, 15 aa, Homo sapiens
  CDR3 for beta chain variable domain of TCR clone 344440 (TRBV20-1, TRBJ2-3)
CSASSGGPRTDTQYF

SEQ ID NO: 688881 - protein, 14 aa, Homo sapiens
  CDR3 for alpha chain variable domain of TCR clone 344441 (TRAV1-1, TRAJ35)
CAVRSIGFGNVLHC

SEQ ID NO: 688882 - protein, 14 aa, Homo sapiens
  CDR3 for beta chain variable domain of TCR clone 344441 (TRBV5-7, TRBJ2-7)
CSSSGGLSSYEQYF

SEQ ID NO: 688883 - protein, 14 aa, Homo sapiens
  CDR3 for alpha chain variable domain of TCR clone 344442 (TRAV1-2, TRAJ16)
CDVNRFSDGQKLLF

SEQ ID NO: 688884 - protein, 15 aa, Homo sapiens
  CDR3 for beta chain variable domain of TCR clone 344442 (TRBV11-3, TRBJ2-3)
CASLKDGREGDTQYF

SEQ ID NO: 688885 - protein, 12 aa, Homo sapiens
  CDR3 for alpha chain variable domain of TCR clone 344443 (TRAV21, TRAJ6)
CAVKGGSYIPTF

SEQ ID NO: 688886 - protein, 12 aa, Homo sapiens
  CDR3 for beta chain variable domain of TCR clone 344443 (TRBV28, TRBJ2-5)
CASSGQTETQYF

SEQ ID NO: 688887 - protein, 11 aa, Homo sapiens
  CDR3 for alpha chain variable domain of TCR clone 344444 (TRAV13-1, TRAJ43)
CAAHNNNDMRF

SEQ ID NO: 688888 - protein, 16 aa, Homo sapiens
  CDR3 for beta chain variable domain of TCR clone 344444 (TRBV6-1, TRBJ2-5)
CASSETLDRGAETQYF

SEQ ID NO: 688889 - protein, 13 aa, Homo sapiens
  CDR3 for alpha chain variable domain of TCR clone 344445 (TRAV2, TRAJ40)
CAVVTSGAYKYIF

SEQ ID NO: 688890 - protein, 13 aa, Homo sapiens
  CDR3 for beta chain variable domain of TCR clone 344445 (TRBV19, TRBJ1-2)
CASSVPGQDGYTF

SEQ ID NO: 688891 - protein, 13 aa, Homo sapiens
  CDR3 for alpha chain variable domain of TCR clone 344446 (TRAV21, TRAJ27)
CAARPGNAGKSTF

SEQ ID NO: 688892 - protein, 12 aa, Homo sapiens
  CDR3 for beta chain variable domain of TCR clone 344446 (TRBV20-1, TRBJ2-1)
CSAQYTYNEQFF

SEQ ID NO: 688893 - protein, 16 aa, Homo sapiens
  CDR3 for alpha chain variable domain of TCR clone 344447 (TRAV38-1, TRAJ43)
CAFMKHNSGRHALCSR

SEQ ID NO: 688894 - protein, 11 aa, Homo sapiens
  CDR3 for beta chain variable domain of TCR clone 344447 (TRBV7-9, TRBJ2-3)
CAGSYTDTQYF

SEQ ID NO: 688895 - protein, 12 aa, Homo sapiens
  CDR3 for alpha chain variable domain of TCR clone 344448 (TRAV12-1, TRAJ20)
CVVNPDDYKLSF

SEQ ID NO: 688896 - protein, 12 aa, Homo sapiens
  CDR3 for beta chain variable domain of TCR clone 344448 (TRBV11-2, TRBJ2-2)
CASSLGGGELFS

SEQ ID NO: 688897 - protein, 12 aa, Homo sapiens
  CDR3 for alpha chain variable domain of TCR clone 344449 (TRAV12-3, TRAJ48)
CAMRTGNEKLTF

SEQ ID NO: 688898 - protein, 12 aa, Homo sapiens
  CDR3 for beta chain variable domain of TCR clone 344449 (TRBV13, TRBJ2-7)
CASSLQAYEQYF

SEQ ID NO: 688899 - protein, 16 aa, Homo sapiens
  CDR3 for alpha chain variable domain of TCR clone 344450 (TRAV21, TRAJ45)
CAVSWGSGGGAAGLTF

SEQ ID NO: 688900 - protein, 14 aa, Homo sapiens
  CDR3 for beta chain variable domain of TCR clone 344450 (TRBV4-2, TRBJ1-2)
CASSPGGSNYGCTF

SEQ ID NO: 688901 - protein, 21 aa, Homo sapiens
  CDR3 for alpha chain variable domain of TCR clone 344451 (TRAV1-1, TRAJ6)
CLLLLRCERLEMTGGSYIPTF

SEQ ID NO: 688902 - protein, 13 aa, Homo sapiens
  CDR3 for beta chain variable domain of TCR clone 344451 (TRBV10-2, TRBJ2-7)
CASGASGGYEQYF

SEQ ID NO: 688903 - protein, 14 aa, Homo sapiens
  CDR3 for alpha chain variable domain of TCR clone 344452 (TRAV26-1, TRAJ45)
CIEGTGGGADGLTF

SEQ ID NO: 688904 - protein, 16 aa, Homo sapiens
  CDR3 for beta chain variable domain of TCR clone 344452 (TRBV10-2, TRBJ1-1)
CASSEFGEGASTEAFF

SEQ ID NO: 688905 - protein, 12 aa, Homo sapiens
  CDR3 for alpha chain variable domain of TCR clone 344453 (TRAV27, TRAJ41)
CAGRNSGYALNF

SEQ ID NO: 688906 - protein, 17 aa, Homo sapiens
  CDR3 for beta chain variable domain of TCR clone 344453 (TRBV7-3, TRBJ2-2)
CASSLSGTSGGTGELFF

SEQ ID NO: 688907 - protein, 13 aa, Homo sapiens
  CDR3 for alpha chain variable domain of TCR clone 344454 (TRAV13-2, TRAJ41)
CRDSFNSGYALNF

SEQ ID NO: 688908 - protein, 14 aa, Homo sapiens
  CDR3 for beta chain variable domain of TCR clone 344454 (TRBV7-3, TRBJ1-1)
CASSLKGGNTEAFF

SEQ ID NO: 688909 - protein, 13 aa, Homo sapiens
  CDR3 for alpha chain variable domain of TCR clone 344455 (TRAV3, TRAJ15)
CAVRDQAGTALIF

SEQ ID NO: 688910 - protein, 14 aa, Homo sapiens
  CDR3 for beta chain variable domain of TCR clone 344455 (TRBV12-4, TRBJ2-7)
CASSPRQDLSEQYF

SEQ ID NO: 688911 - protein, 14 aa, Homo sapiens
  CDR3 for alpha chain variable domain of TCR clone 344456 (TRAV8-3, TRAJ4)
CAVGASGCYNKLIF

SEQ ID NO: 688912 - protein, 13 aa, Homo sapiens
  CDR3 for beta chain variable domain of TCR clone 344456 (TRBV18, TRBJ2-5)
CASSLQGQETQYF

SEQ ID NO: 688913 - protein, 14 aa, Homo sapiens
  CDR3 for alpha chain variable domain of TCR clone 344457 (TRAV8-2, TRAJ23)
CVVSDDNQGGKLIL

SEQ ID NO: 688914 - protein, 16 aa, Homo sapiens
  CDR3 for beta chain variable domain of TCR clone 344457 (TRBV4-2, TRBJ2-5)
CASSQELVGSQETQYF

SEQ ID NO: 688915 - protein, 12 aa, Homo sapiens
  CDR3 for alpha chain variable domain of TCR clone 344458 (TRAV13-2, TRAJ23)
CAERHRGGKLIF

SEQ ID NO: 688916 - protein, 15 aa, Homo sapiens
  CDR3 for beta chain variable domain of TCR clone 344458 (TRBV9, TRBJ1-6)
CASSVGGTGDSPLHF

SEQ ID NO: 688917 - protein, 15 aa, Homo sapiens
  CDR3 for alpha chain variable domain of TCR clone 344459 (TRAV23/DV6, TRAJ57)
CAASSTLSQGGSERL

SEQ ID NO: 688918 - protein, 14 aa, Homo sapiens
  CDR3 for beta chain variable domain of TCR clone 344459 (TRBV25-1, TRBJ1-1)
CASTHLGGNTEAFF

SEQ ID NO: 688919 - protein, 12 aa, Homo sapiens
  CDR3 for alpha chain variable domain of TCR clone 344460 (TRAV38-2/DV8, TRAJ48)
CALLSGNEELTF

SEQ ID NO: 688920 - protein, 13 aa, Homo sapiens
  CDR3 for beta chain variable domain of TCR clone 344460 (TRBV7-9, TRBJ1-2)
CASSLKQNYGYTF

SEQ ID NO: 688921 - protein, 16 aa, Homo sapiens
  CDR3 for alpha chain variable domain of TCR clone 344461 (TRAV3, TRAJ37)
CAVRGEGSGNTGKLIF

SEQ ID NO: 688922 - protein, 16 aa, Homo sapiens
  CDR3 for beta chain variable domain of TCR clone 344461 (TRBV12-5, TRBJ2-5)
CASGPRTSGSQETQYF

SEQ ID NO: 688923 - protein, 16 aa, Homo sapiens
  CDR3 for alpha chain variable domain of TCR clone 344462 (TRAV14/DV4, TRAJ54)
CAMREGRIQGAQKLGF

SEQ ID NO: 688924 - protein, 15 aa, Homo sapiens
  CDR3 for beta chain variable domain of TCR clone 344462 (TRBV11-1, TRBJ2-7)
CASSLNYGASYEQYF

SEQ ID NO: 688925 - protein, 14 aa, Homo sapiens
  CDR3 for alpha chain variable domain of TCR clone 344463 (TRAV12-2, TRAJ36)
CVVKISTGANNLFF

SEQ ID NO: 688926 - protein, 14 aa, Homo sapiens
  CDR3 for beta chain variable domain of TCR clone 344463 (TRBV25-1, TRBJ1-2)
CASSDTTGVVGYTF

SEQ ID NO: 688927 - protein, 17 aa, Homo sapiens
  CDR3 for alpha chain variable domain of TCR clone 344464 (TRAV17, TRAJ7)
CATLGRLAFGKGNQVVV

SEQ ID NO: 688928 - protein, 13 aa, Homo sapiens
  CDR3 for beta chain variable domain of TCR clone 344464 (TRBV12-4, TRBJ2-7)
CASSLEMVREQYF

SEQ ID NO: 688929 - protein, 15 aa, Homo sapiens
  CDR3 for alpha chain variable domain of TCR clone 344465 (TRAV2, TRAJ32)
CAVANYGGATNRLIF

SEQ ID NO: 688930 - protein, 15 aa, Homo sapiens
  CDR3 for beta chain variable domain of TCR clone 344465 (TRBV7-7, TRBJ2-5)
CDSSQLERAEETQYF

SEQ ID NO: 688931 - protein, 13 aa, Homo sapiens
  CDR3 for alpha chain variable domain of TCR clone 344466 (TRAV13-2, TRAJ48)
CAELDSGNEKLTF

SEQ ID NO: 688932 - protein, 15 aa, Homo sapiens
  CDR3 for beta chain variable domain of TCR clone 344466 (TRBV7-9, TRBJ1-6)
CASSSPGRGNSPLHF

SEQ ID NO: 688933 - protein, 17 aa, Homo sapiens
  CDR3 for alpha chain variable domain of TCR clone 344467 (TRAV3, TRAJ6)
YAVRDGPRAVGSYIPTF

SEQ ID NO: 688934 - protein, 14 aa, Homo sapiens
  CDR3 for beta chain variable domain of TCR clone 344467 (TRBV7-2, TRBJ2-7)
CASSPKTSFYEQYF

SEQ ID NO: 688935 - protein, 12 aa, Homo sapiens
  CDR3 for alpha chain variable domain of TCR clone 344468 (TRAV12-3, TRAJ17)
CAMMLTGNKLTF

SEQ ID NO: 688936 - protein, 15 aa, Homo sapiens
  CDR3 for beta chain variable domain of TCR clone 344468 (TRBV20-1, TRBJ2-7)
CSARDRVSGMNEQYF

SEQ ID NO: 688937 - protein, 16 aa, Homo sapiens
  CDR3 for alpha chain variable domain of TCR clone 344469 (TRAV3, TRAJ4)
CAVRPSPSGGYNKPIF

SEQ ID NO: 688938 - protein, 12 aa, Homo sapiens
  CDR3 for beta chain variable domain of TCR clone 344469 (TRBV7-9, TRBJ2-7)
CASSQGVYEQYF

SEQ ID NO: 688939 - protein, 12 aa, Homo sapiens
  CDR3 for alpha chain variable domain of TCR clone 344470 (TRAV13-1, TRAJ53)
AASGGSNHKMTF

SEQ ID NO: 688940 - protein, 15 aa, Homo sapiens
  CDR3 for beta chain variable domain of TCR clone 344470 (TRBV5-1, TRBJ2-1)
CASNPPRAPYNEQFF

SEQ ID NO: 688941 - protein, 12 aa, Homo sapiens
  CDR3 for alpha chain variable domain of TCR clone 344471 (TRAV2, TRAJ37)
CAVTMNTGKLIF

SEQ ID NO: 688942 - protein, 12 aa, Homo sapiens
  CDR3 for beta chain variable domain of TCR clone 344471 (TRBV11-2, TRBJ2-1)
CASSPGNNEQFF

SEQ ID NO: 688943 - protein, 12 aa, Homo sapiens
  CDR3 for alpha chain variable domain of TCR clone 344472 (TRAV12-2, TRAJ10)
WGVTGGGNKLTF

SEQ ID NO: 688944 - protein, 16 aa, Homo sapiens
  CDR3 for beta chain variable domain of TCR clone 344472 (TRBV6-4, TRBJ1-2)
CASSEAVGDPNYGCTF

SEQ ID NO: 688945 - protein, 14 aa, Homo sapiens
  CDR3 for alpha chain variable domain of TCR clone 344473 (TRAV1-2, TRAJ8)
CAVREDTGSQKLVF

SEQ ID NO: 688946 - protein, 13 aa, Homo sapiens
  CDR3 for beta chain variable domain of TCR clone 344473 (TRBV10-2, TRBJ2-7)
CASGASGGYEQYF

SEQ ID NO: 688947 - protein, 11 aa, Homo sapiens
  CDR3 for alpha chain variable domain of TCR clone 344474 (TRAV2, TRAJ13)
CASGGYQKVTF

SEQ ID NO: 688948 - protein, 12 aa, Homo sapiens
  CDR3 for beta chain variable domain of TCR clone 344474 (TRBV11-2, TRBJ2-2)
YASSLGGGELFF

SEQ ID NO: 688949 - protein, 15 aa, Homo sapiens
  CDR3 for alpha chain variable domain of TCR clone 344475 (TRAV3, TRAJ20)
CAVRDIKLSDYKLSF

SEQ ID NO: 688950 - protein, 16 aa, Homo sapiens
  CDR3 for beta chain variable domain of TCR clone 344475 (TRBV7-3, TRBJ2-1)
CASSSIRRAPTMSSSS

SEQ ID NO: 688951 - protein, 14 aa, Homo sapiens
  CDR3 for alpha chain variable domain of TCR clone 344476 (TRAV12-2, TRAJ13)
CAVKKTGGYQKVTF

SEQ ID NO: 688952 - protein, 13 aa, Homo sapiens
  CDR3 for beta chain variable domain of TCR clone 344476 (TRBV20-1, TRBJ1-1)
RSARLGQGTEAFF

SEQ ID NO: 688953 - protein, 12 aa, Homo sapiens
  CDR3 for alpha chain variable domain of TCR clone 344477 (TRAV12-3, TRAJ17)
CAITLTGNKLTF

SEQ ID NO: 688954 - protein, 16 aa, Homo sapiens
  CDR3 for beta chain variable domain of TCR clone 344477 (TRBV7-3, TRBJ2-1)
CASSLEGYRSYNEQFF

SEQ ID NO: 688955 - protein, 12 aa, Homo sapiens
  CDR3 for alpha chain variable domain of TCR clone 344478 (TRAV8-4, TRAJ43)
CAVSGNNNDMRF

SEQ ID NO: 688956 - protein, 13 aa, Homo sapiens
  CDR3 for beta chain variable domain of TCR clone 344478 (TRBV7-7, TRBJ1-1)
CASSLGANTEAFF

SEQ ID NO: 688957 - protein, 15 aa, Homo sapiens
  CDR3 for alpha chain variable domain of TCR clone 344479 (TRAV35, TRAJ40)
CAGQLGTSGTYKYIF

SEQ ID NO: 688958 - protein, 14 aa, Homo sapiens
  CDR3 for beta chain variable domain of TCR clone 344479 (TRBV7-3, TRBJ2-1)
CPSSLAGGTNEQFF

SEQ ID NO: 688959 - protein, 16 aa, Homo sapiens
  CDR3 for alpha chain variable domain of TCR clone 344480 (TRAV3, TRAJ21)
CAVRDIERGNFNKFYF

SEQ ID NO: 688960 - protein, 15 aa, Homo sapiens
  CDR3 for beta chain variable domain of TCR clone 344480 (TRBV7-2, TRBJ1-2)
CASSPRAGWNYGYTF

SEQ ID NO: 688961 - protein, 13 aa, Homo sapiens
  CDR3 for alpha chain variable domain of TCR clone 344481 (TRAV12-3, TRAJ41)
CAISPNSVYALNF

SEQ ID NO: 688962 - protein, 14 aa, Homo sapiens
  CDR3 for beta chain variable domain of TCR clone 344481 (TRBV7-2, TRBJ1-3)
CASSLGTAGNTIYF

SEQ ID NO: 688963 - protein, 12 aa, Homo sapiens
  CDR3 for alpha chain variable domain of TCR clone 344482 (TRAV8-6, TRAJ8)
CAVTPGFQKLVF

SEQ ID NO: 688964 - protein, 16 aa, Homo sapiens
  CDR3 for beta chain variable domain of TCR clone 344482 (TRBV7-3, TRBJ2-2)
CASSLERGTLSGELFF

SEQ ID NO: 688965 - protein, 14 aa, Homo sapiens
  CDR3 for alpha chain variable domain of TCR clone 344483 (TRAV4, TRAJ9)
CLVGSGTGGFKTSF

SEQ ID NO: 688966 - protein, 14 aa, Homo sapiens
  CDR3 for beta chain variable domain of TCR clone 344483 (TRBV7-9, TRBJ2-4)
CASSLAMGGNIQYF

SEQ ID NO: 688967 - protein, 17 aa, Homo sapiens
  CDR3 for alpha chain variable domain of TCR clone 344484 (TRAV8-6, TRAJ58)
CAVSSWVGETSGSRLAF

SEQ ID NO: 688968 - protein, 14 aa, Homo sapiens
  CDR3 for beta chain variable domain of TCR clone 344484 (TRBV19, TRBJ1-4)
CASSMGRHNEKLFF

SEQ ID NO: 688969 - protein, 13 aa, Homo sapiens
  CDR3 for alpha chain variable domain of TCR clone 344485 (TRAV1-2, TRAJ9)
CAALNTRGFRTIF

SEQ ID NO: 688970 - protein, 13 aa, Homo sapiens
  CDR3 for beta chain variable domain of TCR clone 344485 (TRBV19, TRBJ1-2)
CASSVPGQDGYTF

SEQ ID NO: 688971 - protein, 14 aa, Homo sapiens
  CDR3 for alpha chain variable domain of TCR clone 344486 (TRAV14/DV4, TRAJ7)
CAMREAYGNNRIAF

SEQ ID NO: 688972 - protein, 15 aa, Homo sapiens
  CDR3 for beta chain variable domain of TCR clone 344486 (TRBV19, TRBJ2-1)
CASSINREPSHEQFF

SEQ ID NO: 688973 - protein, 17 aa, Homo sapiens
  CDR3 for alpha chain variable domain of TCR clone 344487 (TRAV13-1, TRAJ52)
CAASSGACGTSYGKLTF

SEQ ID NO: 688974 - protein, 12 aa, Homo sapiens
  CDR3 for beta chain variable domain of TCR clone 344487 (TRBV11-2, TRBJ2-2)
CASSLGGGELFF

SEQ ID NO: 688975 - protein, 14 aa, Homo sapiens
  CDR3 for alpha chain variable domain of TCR clone 344488 (TRAV12-2, TRAJ44)
CAVNPAGTASTLTF

SEQ ID NO: 688976 - protein, 16 aa, Homo sapiens
  CDR3 for beta chain variable domain of TCR clone 344488 (TRBV2, TRBJ2-6)
CASSEVGGAGANVLTF

SEQ ID NO: 688977 - protein, 16 aa, Homo sapiens
  CDR3 for alpha chain variable domain of TCR clone 344489 (TRAV13-2, TRAJ52)
CRESPTGGTSYGKLTF

SEQ ID NO: 688978 - protein, 16 aa, Homo sapiens
  CDR3 for beta chain variable domain of TCR clone 344489 (TRBV7-7, TRBJ2-1)
CASSLASGTSYNEQFF

SEQ ID NO: 688979 - protein, 16 aa, Homo sapiens
  CDR3 for alpha chain variable domain of TCR clone 344490 (TRAV26-1, TRAJ32)
CIVRANYGGATNKLIF

SEQ ID NO: 688980 - protein, 14 aa, Homo sapiens
  CDR3 for beta chain variable domain of TCR clone 344490 (TRBV12-4, TRBJ2-7)
CASTFGLSTYEQYF

SEQ ID NO: 688981 - protein, 15 aa, Homo sapiens
  CDR3 for alpha chain variable domain of TCR clone 344491 (TRAV17, TRAJ56)
CATDANTGANRKLTF

SEQ ID NO: 688982 - protein, 12 aa, Homo sapiens
  CDR3 for beta chain variable domain of TCR clone 344491 (TRBV7-8, TRBJ2-7)
CASSLGDREQYF

SEQ ID NO: 688983 - protein, 13 aa, Homo sapiens
  CDR3 for alpha chain variable domain of TCR clone 344492 (TRAV12-2, TRAJ39)
CAVNNNAVNMLTF

SEQ ID NO: 688984 - protein, 15 aa, Homo sapiens
  CDR3 for beta chain variable domain of TCR clone 344492 (TRBV28, TRBJ2-5)
CASSPGQGSIETQYF

SEQ ID NO: 688985 - protein, 15 aa, Homo sapiens
  CDR3 for alpha chain variable domain of TCR clone 344493 (TRAV12-2, TRAJ43)
CAFDMRFGAGTRLTV

SEQ ID NO: 688986 - protein, 16 aa, Homo sapiens
  CDR3 for beta chain variable domain of TCR clone 344493 (TRBV12-4, TRBJ2-2)
CASSFWIVGNTGELFF

SEQ ID NO: 688987 - protein, 20 aa, Homo sapiens
  CDR3 for alpha chain variable domain of TCR clone 344494 (TRAV12-1, TRAJ42)
GSVIQPPTSVKGGSQGNLIF

SEQ ID NO: 688988 - protein, 18 aa, Homo sapiens
  CDR3 for beta chain variable domain of TCR clone 344494 (TRBV11-2, TRBJ2-3)
CASSLRGASRGAPNTQNF

SEQ ID NO: 688989 - protein, 17 aa, Homo sapiens
  CDR3 for alpha chain variable domain of TCR clone 344495 (TRAV3, TRAJ42)
CAVRDRDYGGSQGNLIF

SEQ ID NO: 688990 - protein, 14 aa, Homo sapiens
  CDR3 for beta chain variable domain of TCR clone 344495 (TRBV25-1, TRBJ1-1)
CASTRLGGNTEAFF

SEQ ID NO: 688991 - protein, 13 aa, Homo sapiens
  CDR3 for alpha chain variable domain of TCR clone 344496 (TRAV8-3, TRAJ40)
CAVDPSGPYKYIF

SEQ ID NO: 688992 - protein, 16 aa, Homo sapiens
  CDR3 for beta chain variable domain of TCR clone 344496 (TRBV7-8, TRBJ2-4)
CASSAERTLAQNIQYF

SEQ ID NO: 688993 - protein, 16 aa, Homo sapiens
  CDR3 for alpha chain variable domain of TCR clone 344497 (TRAV1-1, TRAJ34)
CAVREGITPTSSSLGL

SEQ ID NO: 688994 - protein, 18 aa, Homo sapiens
  CDR3 for beta chain variable domain of TCR clone 344497 (TRBV25-1, TRBJ1-2)
CASSGLQNGQGLIFGDTF

SEQ ID NO: 688995 - protein, 13 aa, Homo sapiens
  CDR3 for alpha chain variable domain of TCR clone 344498 (TRAV27, TRAJ45)
CRSSGGGADGLTF

SEQ ID NO: 688996 - protein, 14 aa, Homo sapiens
  CDR3 for beta chain variable domain of TCR clone 344498 (TRBV11-2, TRBJ2-7)
CASSLGAGAYEQYF

SEQ ID NO: 688997 - protein, 20 aa, Homo sapiens
  CDR3 for alpha chain variable domain of TCR clone 344499 (TRAV4, TRAJ39)
PRVSLSDTAVYYFCCNMLTF

SEQ ID NO: 688998 - protein, 18 aa, Homo sapiens
  CDR3 for beta chain variable domain of TCR clone 344499 (TRBV7-9, TRBJ2-1)
CASSLAVSGTSGRNEQFF

SEQ ID NO: 688999 - protein, 14 aa, Homo sapiens
  CDR3 for alpha chain variable domain of TCR clone 344500 (TRAV26-1, TRAJ34)
CIVRVAYNTDKLIF

SEQ ID NO: 689000 - protein, 15 aa, Homo sapiens
  CDR3 for beta chain variable domain of TCR clone 344500 (TRBV20-1, TRBJ2-7)
CSDRVPAAYFYEQYF

SEQ ID NO: 689001 - protein, 12 aa, Homo sapiens
  CDR3 for alpha chain variable domain of TCR clone 344501 (TRAV20, TRAJ54)
CAVQEGAQKLVF

SEQ ID NO: 689002 - protein, 15 aa, Homo sapiens
  CDR3 for beta chain variable domain of TCR clone 344501 (TRBV7-3, TRBJ2-1)
CASSLSSGSFDEQFF

SEQ ID NO: 689003 - protein, 12 aa, Homo sapiens
  CDR3 for alpha chain variable domain of TCR clone 344502 (TRAV35, TRAJ30)
CAGLNRDDKIIF

SEQ ID NO: 689004 - protein, 15 aa, Homo sapiens
  CDR3 for beta chain variable domain of TCR clone 344502 (TRBV9, TRBJ1-6)
CASSVAVTGDSPLHF

SEQ ID NO: 689005 - protein, 15 aa, Homo sapiens
  CDR3 for alpha chain variable domain of TCR clone 344503 (TRAV17, TRAJ57)
CATGPSQGRSETLVF

SEQ ID NO: 689006 - protein, 13 aa, Homo sapiens
  CDR3 for beta chain variable domain of TCR clone 344503 (TRBV19, TRBJ2-7)
CASSIDRTYEQYF

SEQ ID NO: 689007 - protein, 15 aa, Homo sapiens
  CDR3 for alpha chain variable domain of TCR clone 344504 (TRAV26-1, TRAJ22)
CIVRVSVWVCKATDL

SEQ ID NO: 689008 - protein, 13 aa, Homo sapiens
  CDR3 for beta chain variable domain of TCR clone 344504 (TRBV7-9, TRBJ1-2)
CASSLKQNYGYTF

SEQ ID NO: 689009 - protein, 15 aa, Homo sapiens
  CDR3 for alpha chain variable domain of TCR clone 344505 (TRAV8-6, TRAJ37)
CAVIFSSGNTGKLIF

SEQ ID NO: 689010 - protein, 15 aa, Homo sapiens
  CDR3 for beta chain variable domain of TCR clone 344505 (TRBV25-1, TRBJ2-4)
CASSETESAKNVQYF

SEQ ID NO: 689011 - protein, 11 aa, Homo sapiens
  CDR3 for alpha chain variable domain of TCR clone 344506 (TRAV13-1, TRAJ49)
CACVGGNQFYF

SEQ ID NO: 689012 - protein, 15 aa, Homo sapiens
  CDR3 for beta chain variable domain of TCR clone 344506 (TRBV27, TRBJ2-3)
CASSLGLAATDTQYF

SEQ ID NO: 689013 - protein, 14 aa, Homo sapiens
  CDR3 for alpha chain variable domain of TCR clone 344507 (TRAV8-3, TRAJ30)
CAVGEVNRDDKIIF

SEQ ID NO: 689014 - protein, 16 aa, Homo sapiens
  CDR3 for beta chain variable domain of TCR clone 344507 (TRBV7-2, TRBJ2-1)
CASSLVAGAGYNEQFF

SEQ ID NO: 689015 - protein, 13 aa, Homo sapiens
  CDR3 for alpha chain variable domain of TCR clone 344508 (TRAV10, TRAJ33)
CGERVDSNYQLIW

SEQ ID NO: 689016 - protein, 16 aa, Homo sapiens
  CDR3 for beta chain variable domain of TCR clone 344508 (TRBV12-4, TRBJ1-5)
CASSRPVGGSNQPQHF

SEQ ID NO: 689017 - protein, 13 aa, Homo sapiens
  CDR3 for alpha chain variable domain of TCR clone 344509 (TRAV27, TRAJ49)
CAPRPYTGNQFYF

SEQ ID NO: 689018 - protein, 18 aa, Homo sapiens
  CDR3 for beta chain variable domain of TCR clone 344509 (TRBV7-3, TRBJ2-5)
CASCLGGAAQGRWETQYF

SEQ ID NO: 689019 - protein, 14 aa, Homo sapiens
  CDR3 for alpha chain variable domain of TCR clone 344510 (TRAV17, TRAJ57)
CATDPQGGSETLVF

SEQ ID NO: 689020 - protein, 14 aa, Homo sapiens
  CDR3 for beta chain variable domain of TCR clone 344510 (TRBV7-8, TRBJ2-7)
CASSSRDRVYEQYF

SEQ ID NO: 689021 - protein, 13 aa, Homo sapiens
  CDR3 for alpha chain variable domain of TCR clone 344511 (TRAV1-2, TRAJ12)
CAVSMDRSYKLIF

SEQ ID NO: 689022 - protein, 16 aa, Homo sapiens
  CDR3 for beta chain variable domain of TCR clone 344511 (TRBV28, TRBJ2-7)
CASSLFFETGGPEQYF

SEQ ID NO: 689023 - protein, 13 aa, Homo sapiens
  CDR3 for alpha chain variable domain of TCR clone 344512 (TRAV27, TRAJ40)
WSGPPSGTYKYIF

SEQ ID NO: 689024 - protein, 13 aa, Homo sapiens
  CDR3 for beta chain variable domain of TCR clone 344512 (TRBV28, TRBJ1-2)
CAGRDRGNYGYTF

SEQ ID NO: 689025 - protein, 13 aa, Homo sapiens
  CDR3 for alpha chain variable domain of TCR clone 344513 (TRAV29/DV5, TRAJ33)
CAASVESNYQLIW

SEQ ID NO: 689026 - protein, 15 aa, Homo sapiens
  CDR3 for beta chain variable domain of TCR clone 344513 (TRBV18, TRBJ1-1)
CASSDRGIGDTEAFF

SEQ ID NO: 689027 - protein, 14 aa, Homo sapiens
  CDR3 for alpha chain variable domain of TCR clone 344514 (TRAV13-2, TRAJ41)
RAERPDWAGYALNF

SEQ ID NO: 689028 - protein, 16 aa, Homo sapiens
  CDR3 for beta chain variable domain of TCR clone 344514 (TRBV9, TRBJ2-3)
CASSGTSGKDTDTQYF

SEQ ID NO: 689029 - protein, 10 aa, Homo sapiens
  CDR3 for alpha chain variable domain of TCR clone 344515 (TRAV1-2, TRAJ20)
CAVTDHKLSF

SEQ ID NO: 689030 - protein, 15 aa, Homo sapiens
  CDR3 for beta chain variable domain of TCR clone 344515 (TRBV7-2, TRBJ2-7)
CASSLVSSGSYEQYF

SEQ ID NO: 689031 - protein, 13 aa, Homo sapiens
  CDR3 for alpha chain variable domain of TCR clone 344516 (TRAV12-1, TRAJ40)
VVVPTSGTYKYIF

SEQ ID NO: 689032 - protein, 18 aa, Homo sapiens
  CDR3 for beta chain variable domain of TCR clone 344516 (TRBV7-6, TRBJ2-1)
CASSPRTSGMSSYNEQFF

SEQ ID NO: 689033 - protein, 22 aa, Homo sapiens
  CDR3 for alpha chain variable domain of TCR clone 344517 (TRAV8-2, TRAJ45)
HLTKPSAHMSDAAEYSADGLTF

SEQ ID NO: 689034 - protein, 17 aa, Homo sapiens
  CDR3 for beta chain variable domain of TCR clone 344517 (TRBV28, TRBJ2-5)
CASSTPEGDALQETQYF

SEQ ID NO: 689035 - protein, 14 aa, Homo sapiens
  CDR3 for alpha chain variable domain of TCR clone 344518 (TRAV27, TRAJ49)
CAGRPEGTGNQFIF

SEQ ID NO: 689036 - protein, 15 aa, Homo sapiens
  CDR3 for beta chain variable domain of TCR clone 344518 (TRBV19, TRBJ2-1)
CASSIQATSYNEQFF

SEQ ID NO: 689037 - protein, 15 aa, Homo sapiens
  CDR3 for alpha chain variable domain of TCR clone 344519 (TRAV3, TRAJ22)
CAVRDRGGSARQLTF

SEQ ID NO: 689038 - protein, 14 aa, Homo sapiens
  CDR3 for beta chain variable domain of TCR clone 344519 (TRBV6-1, TRBJ1-5)
CASSETGMEQPQHF

SEQ ID NO: 689039 - protein, 15 aa, Homo sapiens
  CDR3 for alpha chain variable domain of TCR clone 344520 (TRAV8-3, TRAJ45)
CASSYLGGGADGLTF

SEQ ID NO: 689040 - protein, 13 aa, Homo sapiens
  CDR3 for beta chain variable domain of TCR clone 344520 (TRBV7-9, TRBJ2-7)
CASSFAGAYEQYF

SEQ ID NO: 689041 - protein, 19 aa, Homo sapiens
  CDR3 for alpha chain variable domain of TCR clone 344521 (TRAV17, TRAJ40)
TASRAADTASYFCASKYIF

SEQ ID NO: 689042 - protein, 15 aa, Homo sapiens
  CDR3 for beta chain variable domain of TCR clone 344521 (TRBV7-3, TRBJ2-2)
CASSLYGGDTGELFF

SEQ ID NO: 689043 - protein, 15 aa, Homo sapiens
  CDR3 for alpha chain variable domain of TCR clone 344522 (TRAV6, TRAJ32)
CALDMGGGATNKLIF

SEQ ID NO: 689044 - protein, 16 aa, Homo sapiens
  CDR3 for beta chain variable domain of TCR clone 344522 (TRBV20-1, TRBJ1-4)
CSAPGQGLLTNEKLFF

SEQ ID NO: 689045 - protein, 16 aa, Homo sapiens
  CDR3 for alpha chain variable domain of TCR clone 344523 (TRAV3, TRAJ37)
CAVRPHGSGNTGKLIF

SEQ ID NO: 689046 - protein, 16 aa, Homo sapiens
  CDR3 for beta chain variable domain of TCR clone 344523 (TRBV9, TRBJ2-1)
CASSVGGGGNYNEQFF

SEQ ID NO: 689047 - protein, 11 aa, Homo sapiens
  CDR3 for alpha chain variable domain of TCR clone 344524 (TRAV3, TRAJ13)
CAVTSYQKVTF

SEQ ID NO: 689048 - protein, 15 aa, Homo sapiens
  CDR3 for beta chain variable domain of TCR clone 344524 (TRBV7-9, TRBJ2-5)
CASSSSGLAVYEQYF

SEQ ID NO: 689049 - protein, 13 aa, Homo sapiens
  CDR3 for alpha chain variable domain of TCR clone 344525 (TRAV8-6, TRAJ49)
CAVITNTGNQLYF

SEQ ID NO: 689050 - protein, 13 aa, Homo sapiens
  CDR3 for beta chain variable domain of TCR clone 344525 (TRBV7-9, TRBJ1-2)
CASSLKQNYGYTF

SEQ ID NO: 689051 - protein, 14 aa, Homo sapiens
  CDR3 for alpha chain variable domain of TCR clone 344526 (TRAV20, TRAJ56)
CAVQFGGANSKLTF

SEQ ID NO: 689052 - protein, 18 aa, Homo sapiens
  CDR3 for beta chain variable domain of TCR clone 344526 (TRBV20-1, TRBJ2-3)
CSASGLAGGPGTTDTQYF

SEQ ID NO: 689053 - protein, 12 aa, Homo sapiens
  CDR3 for alpha chain variable domain of TCR clone 344527 (TRAV25, TRAJ11)
CAGASGYSTLTF

SEQ ID NO: 689054 - protein, 14 aa, Homo sapiens
  CDR3 for beta chain variable domain of TCR clone 344527 (TRBV5-8, TRBJ2-3)
CASSLGQGTDTQYS

SEQ ID NO: 689055 - protein, 14 aa, Homo sapiens
  CDR3 for alpha chain variable domain of TCR clone 344528 (TRAV13-1, TRAJ9)
CAASALTGGFKTIF

SEQ ID NO: 689056 - protein, 13 aa, Homo sapiens
  CDR3 for beta chain variable domain of TCR clone 344528 (TRBV20-1, TRBJ1-1)
CSAGSVGNTEAFL

SEQ ID NO: 689057 - protein, 14 aa, Homo sapiens
  CDR3 for alpha chain variable domain of TCR clone 344529 (TRAV12-2, TRAJ13)
CAVKKTGGYQKVTF

SEQ ID NO: 689058 - protein, 14 aa, Homo sapiens
  CDR3 for beta chain variable domain of TCR clone 344529 (TRBV7-2, TRBJ2-1)
CASLASGRVNEQFF

SEQ ID NO: 689059 - protein, 16 aa, Homo sapiens
  CDR3 for alpha chain variable domain of TCR clone 344530 (TRAV20, TRAJ38)
CAVQASNAGNTRKPIW

SEQ ID NO: 689060 - protein, 16 aa, Homo sapiens
  CDR3 for beta chain variable domain of TCR clone 344530 (TRBV7-8, TRBJ2-6)
CASRVGDSSGANVLTF

SEQ ID NO: 689061 - protein, 14 aa, Homo sapiens
  CDR3 for alpha chain variable domain of TCR clone 344531 (TRAV8-4, TRAJ16)
CAVSPVGRWPEAAL

SEQ ID NO: 689062 - protein, 14 aa, Homo sapiens
  CDR3 for beta chain variable domain of TCR clone 344531 (TRBV7-3, TRBJ1-6)
CQQLGRGAGSPLHF

SEQ ID NO: 689063 - protein, 13 aa, Homo sapiens
  CDR3 for alpha chain variable domain of TCR clone 344532 (TRAV30, TRAJ34)
CGTVGYNTDKLIF

SEQ ID NO: 689064 - protein, 14 aa, Homo sapiens
  CDR3 for beta chain variable domain of TCR clone 344532 (TRBV25-1, TRBJ1-1)
CASTHLGGNTEAFF

SEQ ID NO: 689065 - protein, 17 aa, Homo sapiens
  CDR3 for alpha chain variable domain of TCR clone 344533 (TRAV17, TRAJ28)
CATDPRRGGAGSYQLTF

SEQ ID NO: 689066 - protein, 18 aa, Homo sapiens
  CDR3 for beta chain variable domain of TCR clone 344533 (TRBV12-4, TRBJ2-2)
CASRPFGAGALNTGELFF

SEQ ID NO: 689067 - protein, 13 aa, Homo sapiens
  CDR3 for alpha chain variable domain of TCR clone 344534 (TRAV17, TRAJ11)
CATRNSGYCTLTF

SEQ ID NO: 689068 - protein, 12 aa, Homo sapiens
  CDR3 for beta chain variable domain of TCR clone 344534 (TRBV19, TRBJ1-1)
CASMNRYTEAFF

SEQ ID NO: 689069 - protein, 13 aa, Homo sapiens
  CDR3 for alpha chain variable domain of TCR clone 344535 (TRAV21, TRAJ27)
CAARPGNAVKSTF

SEQ ID NO: 689070 - protein, 15 aa, Homo sapiens
  CDR3 for beta chain variable domain of TCR clone 344535 (TRBV20-1, TRBJ2-7)
CSARDRVSGMDEQYF

SEQ ID NO: 689071 - protein, 11 aa, Homo sapiens
  CDR3 for alpha chain variable domain of TCR clone 344536 (TRAV2, TRAJ13)
CASGGYQNVTF

SEQ ID NO: 689072 - protein, 13 aa, Homo sapiens
  CDR3 for beta chain variable domain of TCR clone 344536 (TRBV20-1, TRBJ2-2)
CSASAAGTGELFF

SEQ ID NO: 689073 - protein, 18 aa, Homo sapiens
  CDR3 for alpha chain variable domain of TCR clone 344537 (TRAV12-3, TRAJ52)
CAMSVGGAGGTSYGKLTF

SEQ ID NO: 689074 - protein, 17 aa, Homo sapiens
  CDR3 for beta chain variable domain of TCR clone 344537 (TRBV13, TRBJ2-3)
CASSFSRVAGGRNTQYF

SEQ ID NO: 689075 - protein, 16 aa, Homo sapiens
  CDR3 for alpha chain variable domain of TCR clone 344538 (TRAV30, TRAJ24)
CGTAIVDADSWGKFPF

SEQ ID NO: 689076 - protein, 14 aa, Homo sapiens
  CDR3 for beta chain variable domain of TCR clone 344538 (TRBV20-1, TRBJ1-1)
CSAQTRIGGTEAFF

SEQ ID NO: 689077 - protein, 13 aa, Homo sapiens
  CDR3 for alpha chain variable domain of TCR clone 344539 (TRAV17, TRAJ22)
CAHHSGSARQLTF

SEQ ID NO: 689078 - protein, 16 aa, Homo sapiens
  CDR3 for beta chain variable domain of TCR clone 344539 (TRBV4-1, TRBJ1-2)
CASSQAAGQVLYGYTF

SEQ ID NO: 689079 - protein, 11 aa, Homo sapiens
  CDR3 for alpha chain variable domain of TCR clone 344540 (TRAV2, TRAJ13)
CASGGYQKVTF

SEQ ID NO: 689080 - protein, 16 aa, Homo sapiens
  CDR3 for beta chain variable domain of TCR clone 344540 (TRBV28, TRBJ2-7)
CASSSGTSGRGYEQYF

SEQ ID NO: 689081 - protein, 18 aa, Homo sapiens
  CDR3 for alpha chain variable domain of TCR clone 344541 (TRAV26-2, TRAJ45)
CILRVDKYSGGGADGLTF

SEQ ID NO: 689082 - protein, 15 aa, Homo sapiens
  CDR3 for beta chain variable domain of TCR clone 344541 (TRBV11-2, TRBJ2-1)
CASSKNRGLIYEQFF

SEQ ID NO: 689083 - protein, 16 aa, Homo sapiens
  CDR3 for alpha chain variable domain of TCR clone 344542 (TRAV30, TRAJ24)
CGTEIVDADSWGKFQF

SEQ ID NO: 689084 - protein, 13 aa, Homo sapiens
  CDR3 for beta chain variable domain of TCR clone 344542 (TRBV25-1, TRBJ1-5)
CASSGQVNQPQHF

SEQ ID NO: 689085 - protein, 13 aa, Homo sapiens
  CDR3 for alpha chain variable domain of TCR clone 344543 (TRAV21, TRAJ20)
CAVGLRVDYKLSF

SEQ ID NO: 689086 - protein, 16 aa, Homo sapiens
  CDR3 for beta chain variable domain of TCR clone 344543 (TRBV7-9, TRBJ1-1)
CASSLTQVRSNTEAFF

SEQ ID NO: 689087 - protein, 12 aa, Homo sapiens
  CDR3 for alpha chain variable domain of TCR clone 344544 (TRAV9-2, TRAJ26)
CALRGYGQNFVF

SEQ ID NO: 689088 - protein, 15 aa, Homo sapiens
  CDR3 for beta chain variable domain of TCR clone 344544 (TRBV19, TRBJ2-1)
CASSSPGVPLDEQFF

SEQ ID NO: 689089 - protein, 13 aa, Homo sapiens
  CDR3 for alpha chain variable domain of TCR clone 344545 (TRAV22, TRAJ48)
CAVERFGNEKLTF

SEQ ID NO: 689090 - protein, 13 aa, Homo sapiens
  CDR3 for beta chain variable domain of TCR clone 344545 (TRBV20-1, TRBJ2-5)
CSARGYYQETQYF

SEQ ID NO: 689091 - protein, 14 aa, Homo sapiens
  CDR3 for alpha chain variable domain of TCR clone 344546 (TRAV13-1, TRAJ35)
CAASKGGFGNVLHC

SEQ ID NO: 689092 - protein, 15 aa, Homo sapiens
  CDR3 for beta chain variable domain of TCR clone 344546 (TRBV11-3, TRBJ2-3)
CASLKDGREGDTQYF

SEQ ID NO: 689093 - protein, 13 aa, Homo sapiens
  CDR3 for alpha chain variable domain of TCR clone 344547 (TRAV8-3, TRAJ12)
CAVGPGSSYKLIF

SEQ ID NO: 689094 - protein, 15 aa, Homo sapiens
  CDR3 for beta chain variable domain of TCR clone 344547 (TRBV9, TRBJ1-6)
CASSVAGTGDSPLHF

SEQ ID NO: 689095 - protein, 17 aa, Homo sapiens
  CDR3 for alpha chain variable domain of TCR clone 344548 (TRAV8-6, TRAJ58)
CAVSSWVGETSGPRLTF

SEQ ID NO: 689096 - protein, 16 aa, Homo sapiens
  CDR3 for beta chain variable domain of TCR clone 344548 (TRBV4-1, TRBJ2-3)
CASSSWSGGARDTQYF

SEQ ID NO: 689097 - protein, 14 aa, Homo sapiens
  CDR3 for alpha chain variable domain of TCR clone 344549 (TRAV12-2, TRAJ17)
CAVLFKAAGNKLTC

SEQ ID NO: 689098 - protein, 11 aa, Homo sapiens
  CDR3 for beta chain variable domain of TCR clone 344549 (TRBV29-1, TRBJ2-5)
CSEDRTGTQYF

SEQ ID NO: 689099 - protein, 17 aa, Homo sapiens
  CDR3 for alpha chain variable domain of TCR clone 344550 (TRAV36/DV7, TRAJ52)
CAVAQRAGGTSYGKLTF

SEQ ID NO: 689100 - protein, 14 aa, Homo sapiens
  CDR3 for beta chain variable domain of TCR clone 344550 (TRBV20-1, TRBJ1-1)
CSAQTRIGGTETFF

SEQ ID NO: 689101 - protein, 13 aa, Homo sapiens
  CDR3 for alpha chain variable domain of TCR clone 344551 (TRAV21, TRAJ45)
CAVMGGGADGLTF

SEQ ID NO: 689102 - protein, 16 aa, Homo sapiens
  CDR3 for beta chain variable domain of TCR clone 344551 (TRBV4-2, TRBJ1-1)
CASRTLDGGGDTEAFF

SEQ ID NO: 689103 - protein, 14 aa, Homo sapiens
  CDR3 for alpha chain variable domain of TCR clone 344552 (TRAV36/DV7, TRAJ32)
CAVGHVGATNTLIF

SEQ ID NO: 689104 - protein, 11 aa, Homo sapiens
  CDR3 for beta chain variable domain of TCR clone 344552 (TRBV7-8, TRBJ2-7)
CASSLSLEQYF

SEQ ID NO: 689105 - protein, 14 aa, Homo sapiens
  CDR3 for alpha chain variable domain of TCR clone 344553 (TRAV12-3, TRAJ20)
CAMSARRGDYKLSF

SEQ ID NO: 689106 - protein, 14 aa, Homo sapiens
  CDR3 for beta chain variable domain of TCR clone 344553 (TRBV7-3, TRBJ2-3)
CASSPSARTETQYF

SEQ ID NO: 689107 - protein, 12 aa, Homo sapiens
  CDR3 for alpha chain variable domain of TCR clone 344554 (TRAV13-1, TRAJ49)
CAASPMGNQFYF

SEQ ID NO: 689108 - protein, 15 aa, Homo sapiens
  CDR3 for beta chain variable domain of TCR clone 344554 (TRBV6-3, TRBJ2-7)
CASSSPGTVFYEQYF

SEQ ID NO: 689109 - protein, 14 aa, Homo sapiens
  CDR3 for alpha chain variable domain of TCR clone 344555 (TRAV12-2, TRAJ45)
CAVYSGGGADGLTF

SEQ ID NO: 689110 - protein, 15 aa, Homo sapiens
  CDR3 for beta chain variable domain of TCR clone 344555 (TRBV7-3, TRBJ2-1)
CASSPTGGGEVEQFF

SEQ ID NO: 689111 - protein, 13 aa, Homo sapiens
  CDR3 for alpha chain variable domain of TCR clone 344556 (TRAV27, TRAJ56)
WAGKPGANSKLTF

SEQ ID NO: 689112 - protein, 18 aa, Homo sapiens
  CDR3 for beta chain variable domain of TCR clone 344556 (TRBV11-2, TRBJ2-3)
CASSLGGASRGAPNTQYF

SEQ ID NO: 689113 - protein, 16 aa, Homo sapiens
  CDR3 for alpha chain variable domain of TCR clone 344557 (TRAV23/DV6, TRAJ9)
CAASIGGNTGGFKTIF

SEQ ID NO: 689114 - protein, 15 aa, Homo sapiens
  CDR3 for beta chain variable domain of TCR clone 344557 (TRBV14, TRBJ1-1)
CASSQDGMGRREAFF

SEQ ID NO: 689115 - protein, 11 aa, Homo sapiens
  CDR3 for alpha chain variable domain of TCR clone 344558 (TRAV21, TRAJ11)
CAVNGYSTLTF

SEQ ID NO: 689116 - protein, 14 aa, Homo sapiens
  CDR3 for beta chain variable domain of TCR clone 344558 (TRBV18, TRBJ2-7)
CASSPRGGAYEQYF

SEQ ID NO: 689117 - protein, 13 aa, Homo sapiens
  CDR3 for alpha chain variable domain of TCR clone 344559 (TRAV8-4, TRAJ29)
CAVSATGNTPLFF

SEQ ID NO: 689118 - protein, 12 aa, Homo sapiens
  CDR3 for beta chain variable domain of TCR clone 344559 (TRBV11-3, TRBJ2-3)
CASSPDHRYAVF

SEQ ID NO: 689119 - protein, 16 aa, Homo sapiens
  CDR3 for alpha chain variable domain of TCR clone 344560 (TRAV17, TRAJ53)
CATDGGSGGSNYKLTF

SEQ ID NO: 689120 - protein, 17 aa, Homo sapiens
  CDR3 for beta chain variable domain of TCR clone 344560 (TRBV11-2, TRBJ2-1)
CASSLYPPGVEYNEQFF

SEQ ID NO: 689121 - protein, 20 aa, Homo sapiens
  CDR3 for alpha chain variable domain of TCR clone 344561 (TRAV21, )
CAVRQDAGNNHIKNPDPAVY

SEQ ID NO: 689122 - protein, 16 aa, Homo sapiens
  CDR3 for beta chain variable domain of TCR clone 344561 (TRBV4-2, TRBJ1-1)
CASRPLDGGGDTEAFF

SEQ ID NO: 689123 - protein, 17 aa, Homo sapiens
  CDR3 for alpha chain variable domain of TCR clone 344562 (TRAV26-2, TRAJ42)
CILRDESYGGSQGNLIF

SEQ ID NO: 689124 - protein, 15 aa, Homo sapiens
  CDR3 for beta chain variable domain of TCR clone 344562 (TRBV6-6, TRBJ2-7)
CASSYSYGGAYEQYV

SEQ ID NO: 689125 - protein, 11 aa, Homo sapiens
  CDR3 for alpha chain variable domain of TCR clone 344563 (TRAV2, TRAJ13)
CASGGYQKVTF

SEQ ID NO: 689126 - protein, 16 aa, Homo sapiens
  CDR3 for beta chain variable domain of TCR clone 344563 (TRBV2, TRBJ2-7)
CASSEPWTGPSYEQYF

SEQ ID NO: 689127 - protein, 13 aa, Homo sapiens
  CDR3 for alpha chain variable domain of TCR clone 344564 (TRAV13-1, TRAJ40)
CAARTSGTYKYIF

SEQ ID NO: 689128 - protein, 15 aa, Homo sapiens
  CDR3 for beta chain variable domain of TCR clone 344564 (TRBV19, TRBJ1-2)
CASSVGQVLNYGYTF

SEQ ID NO: 689129 - protein, 13 aa, Homo sapiens
  CDR3 for alpha chain variable domain of TCR clone 344565 (TRAV8-6, TRAJ8)
CAVSNTGFQKLVF

SEQ ID NO: 689130 - protein, 14 aa, Homo sapiens
  CDR3 for beta chain variable domain of TCR clone 344565 (TRBV12-4, TRBJ1-1)
CASSLGTGGTEAFF

SEQ ID NO: 689131 - protein, 15 aa, Homo sapiens
  CDR3 for alpha chain variable domain of TCR clone 344566 (TRAV20, TRAJ52)
CAVQAGGTSYGKLTF

SEQ ID NO: 689132 - protein, 17 aa, Homo sapiens
  CDR3 for beta chain variable domain of TCR clone 344566 (TRBV4-3, TRBJ1-5)
CASSQWGDGEPNQPQHF

SEQ ID NO: 689133 - protein, 11 aa, Homo sapiens
  CDR3 for alpha chain variable domain of TCR clone 344567 (TRAV1-1, TRAJ23)
CAVRQGAKLIF

SEQ ID NO: 689134 - protein, 20 aa, Homo sapiens
  CDR3 for beta chain variable domain of TCR clone 344567 (TRBV7-8, TRBJ2-2)
CASSHLFPGPTIHITGELFF

SEQ ID NO: 689135 - protein, 16 aa, Homo sapiens
  CDR3 for alpha chain variable domain of TCR clone 344568 (TRAV3, TRAJ18)
CAVRDGRGSTLGRLYF

SEQ ID NO: 689136 - protein, 15 aa, Homo sapiens
  CDR3 for beta chain variable domain of TCR clone 344568 (TRBV7-9, TRBJ1-6)
CASSSPGHGNSPLHF

SEQ ID NO: 689137 - protein, 13 aa, Homo sapiens
  CDR3 for alpha chain variable domain of TCR clone 344569 (TRAV1-2, TRAJ9)
CAVLNTGGFKTIF

SEQ ID NO: 689138 - protein, 15 aa, Homo sapiens
  CDR3 for beta chain variable domain of TCR clone 344569 (TRBV12-4, TRBJ1-2)
CASSFEAGLGYGYTF

SEQ ID NO: 689139 - protein, 13 aa, Homo sapiens
  CDR3 for alpha chain variable domain of TCR clone 344570 (TRAV8-6, TRAJ16)
WAVSSPDGQKLLF

SEQ ID NO: 689140 - protein, 16 aa, Homo sapiens
  CDR3 for beta chain variable domain of TCR clone 344570 (TRBV5-7, TRBJ2-3)
CASSSLGGAITDTQYF

SEQ ID NO: 689141 - protein, 18 aa, Homo sapiens
  CDR3 for alpha chain variable domain of TCR clone 344571 (TRAV26-2, TRAJ54)
CILRDVEVGIQGAQKLVF

SEQ ID NO: 689142 - protein, 16 aa, Homo sapiens
  CDR3 for beta chain variable domain of TCR clone 344571 (TRBV6-1, TRBJ2-5)
GASSETLDRGAETQYF

SEQ ID NO: 689143 - protein, 14 aa, Homo sapiens
  CDR3 for alpha chain variable domain of TCR clone 344572 (TRAV12-2, TRAJ13)
CAVKKTGGYQKVTF

SEQ ID NO: 689144 - protein, 14 aa, Homo sapiens
  CDR3 for beta chain variable domain of TCR clone 344572 (TRBV12-5, TRBJ2-5)
CASGSRTHQEAQYF

SEQ ID NO: 689145 - protein, 12 aa, Homo sapiens
  CDR3 for alpha chain variable domain of TCR clone 344573 (TRAV12-3, TRAJ5)
CAMDTGRRALTF

SEQ ID NO: 689146 - protein, 13 aa, Homo sapiens
  CDR3 for beta chain variable domain of TCR clone 344573 (TRBV7-7, TRBJ2-2)
CGSSLTSAGELFF

SEQ ID NO: 689147 - protein, 15 aa, Homo sapiens
  CDR3 for alpha chain variable domain of TCR clone 344574 (TRAV8-4, TRAJ3)
CAVREPYSSASKIIF

SEQ ID NO: 689148 - protein, 14 aa, Homo sapiens
  CDR3 for beta chain variable domain of TCR clone 344574 (TRBV7-2, TRBJ2-5)
CQQLKEQGRETQYF

SEQ ID NO: 689149 - protein, 14 aa, Homo sapiens
  CDR3 for alpha chain variable domain of TCR clone 344575 (TRAV30, TRAJ33)
CGTVAPRSNYQLIW

SEQ ID NO: 689150 - protein, 14 aa, Homo sapiens
  CDR3 for beta chain variable domain of TCR clone 344575 (TRBV5-1, TRBJ1-5)
CASSLAGGHQPQHF

SEQ ID NO: 689151 - protein, 18 aa, Homo sapiens
  CDR3 for alpha chain variable domain of TCR clone 344576 (TRAV12-1, TRAJ26)
SSVIQPPTSVPYGQNFVF

SEQ ID NO: 689152 - protein, 14 aa, Homo sapiens
  CDR3 for beta chain variable domain of TCR clone 344576 (TRBV4-3, TRBJ1-1)
CASSQGWTPARAFF

SEQ ID NO: 689153 - protein, 11 aa, Homo sapiens
  CDR3 for alpha chain variable domain of TCR clone 344577 (TRAV13-1, TRAJ39)
CASHAGNMPTF

SEQ ID NO: 689154 - protein, 15 aa, Homo sapiens
  CDR3 for beta chain variable domain of TCR clone 344577 (TRBV20-1, TRBJ2-7)
CSARDRVSGMDEQYF

SEQ ID NO: 689155 - protein, 19 aa, Homo sapiens
  CDR3 for alpha chain variable domain of TCR clone 344578 (TRAV26-1, TRAJ52)
CIVRVANNAGGTNYGKLTF

SEQ ID NO: 689156 - protein, 13 aa, Homo sapiens
  CDR3 for beta chain variable domain of TCR clone 344578 (TRBV10-3, TRBJ1-2)
CAINADLNYGYTF

SEQ ID NO: 689157 - protein, 18 aa, Homo sapiens
  CDR3 for alpha chain variable domain of TCR clone 344579 (TRAV26-2, TRAJ45)
CILRVDKYSGGGADGLTF

SEQ ID NO: 689158 - protein, 16 aa, Homo sapiens
  CDR3 for beta chain variable domain of TCR clone 344579 (TRBV5-1, TRBJ2-3)
CASSLTSGTSGGTQYF

SEQ ID NO: 689159 - protein, 14 aa, Homo sapiens
  CDR3 for alpha chain variable domain of TCR clone 344580 (TRAV1-1, TRAJ27)
CAVIYNTNAGKSTF

SEQ ID NO: 689160 - protein, 14 aa, Homo sapiens
  CDR3 for beta chain variable domain of TCR clone 344580 (TRBV6-5, TRBJ1-2)
CASSYDGTGGGYSF

SEQ ID NO: 689161 - protein, 15 aa, Homo sapiens
  CDR3 for alpha chain variable domain of TCR clone 344581 (TRAV21, TRAJ53)
CATLNRGGSNYKLTF

SEQ ID NO: 689162 - protein, 17 aa, Homo sapiens
  CDR3 for beta chain variable domain of TCR clone 344581 (TRBV20-1, TRBJ2-2)
CSASGSGQGGLTGELFF

SEQ ID NO: 689163 - protein, 15 aa, Homo sapiens
  CDR3 for alpha chain variable domain of TCR clone 344582 (TRAV23/DV6, TRAJ18)
CAARYRGSTLGGLYF

SEQ ID NO: 689164 - protein, 13 aa, Homo sapiens
  CDR3 for beta chain variable domain of TCR clone 344582 (TRBV7-2, TRBJ2-7)
CAISSPSGSEQYF

SEQ ID NO: 689165 - protein, 14 aa, Homo sapiens
  CDR3 for alpha chain variable domain of TCR clone 344583 (TRAV1-2, TRAJ8)
CAVRDDTGFQKLVF

SEQ ID NO: 689166 - protein, 16 aa, Homo sapiens
  CDR3 for beta chain variable domain of TCR clone 344583 (TRBV12-4, TRBJ1-5)
CASSRPVGGSNQPQHF

SEQ ID NO: 689167 - protein, 16 aa, Homo sapiens
  CDR3 for alpha chain variable domain of TCR clone 344584 (TRAV4, TRAJ22)
CLVGDLYSGSSRQLTF

SEQ ID NO: 689168 - protein, 16 aa, Homo sapiens
  CDR3 for beta chain variable domain of TCR clone 344584 (TRBV20-1, TRBJ1-2)
CSASTFGGAENYGYTF

SEQ ID NO: 689169 - protein, 15 aa, Homo sapiens
  CDR3 for alpha chain variable domain of TCR clone 344585 (TRAV8-4, TRAJ47)
CAVSDPEEYGNKLVF

SEQ ID NO: 689170 - protein, 15 aa, Homo sapiens
  CDR3 for beta chain variable domain of TCR clone 344585 (TRBV11-2, TRBJ2-1)
CASSLGPDSYNEQLF

SEQ ID NO: 689171 - protein, 14 aa, Homo sapiens
  CDR3 for alpha chain variable domain of TCR clone 344586 (TRAV10, TRAJ32)
CGEPRGGATNKLSF

SEQ ID NO: 689172 - protein, 14 aa, Homo sapiens
  CDR3 for beta chain variable domain of TCR clone 344586 (TRBV5-4, TRBJ2-2)
CASRLDGGTGELFF

SEQ ID NO: 689173 - protein, 13 aa, Homo sapiens
  CDR3 for alpha chain variable domain of TCR clone 344587 (TRAV13-1, TRAJ39)
CSKYSNAVNMLTF

SEQ ID NO: 689174 - protein, 16 aa, Homo sapiens
  CDR3 for beta chain variable domain of TCR clone 344587 (TRBV20-1, TRBJ1-4)
CSVPGQGLLTNEKLFF

SEQ ID NO: 689175 - protein, 12 aa, Homo sapiens
  CDR3 for alpha chain variable domain of TCR clone 344588 (TRAV21, TRAJ43)
CAGSWNNNDMRF

SEQ ID NO: 689176 - protein, 15 aa, Homo sapiens
  CDR3 for beta chain variable domain of TCR clone 344588 (TRBV20-1, TRBJ2-1)
CSASPPSGGYNEQFF

SEQ ID NO: 689177 - protein, 13 aa, Homo sapiens
  CDR3 for alpha chain variable domain of TCR clone 344589 (TRAV17, TRAJ5)
CAPMDTGRRALTF

SEQ ID NO: 689178 - protein, 16 aa, Homo sapiens
  CDR3 for beta chain variable domain of TCR clone 344589 (TRBV11-1, TRBJ2-2)
CASSAEGLKNTGELFF

SEQ ID NO: 689179 - protein, 12 aa, Homo sapiens
  CDR3 for alpha chain variable domain of TCR clone 344590 (TRAV16, TRAJ10)
CSRTGGGNKLTF

SEQ ID NO: 689180 - protein, 17 aa, Homo sapiens
  CDR3 for beta chain variable domain of TCR clone 344590 (TRBV6-3, TRBJ2-7)
CASSSPGHFSTSSTSGR

SEQ ID NO: 689181 - protein, 12 aa, Homo sapiens
  CDR3 for alpha chain variable domain of TCR clone 344591 (TRAV1-1, TRAJ8)
CAGGTGFQKFVF

SEQ ID NO: 689182 - protein, 15 aa, Homo sapiens
  CDR3 for beta chain variable domain of TCR clone 344591 (TRBV7-9, TRBJ1-4)
CASSRTGGFNEKLFV

SEQ ID NO: 689183 - protein, 14 aa, Homo sapiens
  CDR3 for alpha chain variable domain of TCR clone 344592 (TRAV12-3, TRAJ9)
CAMSPNTGVFKTIF

SEQ ID NO: 689184 - protein, 12 aa, Homo sapiens
  CDR3 for beta chain variable domain of TCR clone 344592 (TRBV11-2, TRBJ2-2)
CASSLGGGELFF

SEQ ID NO: 689185 - protein, 15 aa, Homo sapiens
  CDR3 for alpha chain variable domain of TCR clone 344593 (TRAV27, TRAJ33)
CAGADIMDSNNQLIW

SEQ ID NO: 689186 - protein, 13 aa, Homo sapiens
  CDR3 for beta chain variable domain of TCR clone 344593 (TRBV7-9, TRBJ1-2)
CASSLKQNYGYTF

SEQ ID NO: 689187 - protein, 13 aa, Homo sapiens
  CDR3 for alpha chain variable domain of TCR clone 344594 (TRAV13-1, TRAJ12)
CAASPDRSYKLIF

SEQ ID NO: 689188 - protein, 16 aa, Homo sapiens
  CDR3 for beta chain variable domain of TCR clone 344594 (TRBV15, TRBJ2-1)
CATSRERLAGAYEQFF

SEQ ID NO: 689189 - protein, 13 aa, Homo sapiens
  CDR3 for alpha chain variable domain of TCR clone 344595 (TRAV30, TRAJ49)
CGSEPNTGNQFYF

SEQ ID NO: 689190 - protein, 14 aa, Homo sapiens
  CDR3 for beta chain variable domain of TCR clone 344595 (TRBV29-1, TRBJ2-1)
CSVEFRGIPFEQFF

SEQ ID NO: 689191 - protein, 17 aa, Homo sapiens
  CDR3 for alpha chain variable domain of TCR clone 344596 (TRAV26-1, TRAJ27)
FIASTPWINTNAGKSTF

SEQ ID NO: 689192 - protein, 16 aa, Homo sapiens
  CDR3 for beta chain variable domain of TCR clone 344596 (TRBV7-9, TRBJ2-1)
CASSLDPGLAIDEQFF

SEQ ID NO: 689193 - protein, 14 aa, Homo sapiens
  CDR3 for alpha chain variable domain of TCR clone 344597 (TRAV35, TRAJ42)
CAGRYGGSQGNLIF

SEQ ID NO: 689194 - protein, 14 aa, Homo sapiens
  CDR3 for beta chain variable domain of TCR clone 344597 (TRBV7-9, TRBJ2-1)
CSSLGWGRANEQFF

SEQ ID NO: 689195 - protein, 15 aa, Homo sapiens
  CDR3 for alpha chain variable domain of TCR clone 344598 (TRAV38-1, TRAJ45)
CAFMKGGGGADGLTF

SEQ ID NO: 689196 - protein, 13 aa, Homo sapiens
  CDR3 for beta chain variable domain of TCR clone 344598 (TRBV7-9, TRBJ1-2)
CASGLKQNYGYTF

SEQ ID NO: 689197 - protein, 16 aa, Homo sapiens
  CDR3 for alpha chain variable domain of TCR clone 344599 (TRAV3, TRAJ23)
CAVKIGIYNQGGKLIF

SEQ ID NO: 689198 - protein, 18 aa, Homo sapiens
  CDR3 for beta chain variable domain of TCR clone 344599 (TRBV6-3, TRBJ1-2)
CASSYTRRFRPGYTGYTF

SEQ ID NO: 689199 - protein, 15 aa, Homo sapiens
  CDR3 for alpha chain variable domain of TCR clone 344600 (TRAV13-1, TRAJ44)
CAASRGGGTSSKLTF

SEQ ID NO: 689200 - protein, 15 aa, Homo sapiens
  CDR3 for beta chain variable domain of TCR clone 344600 (TRBV19, TRBJ2-1)
CASSIQATSYNEQFF

SEQ ID NO: 689201 - protein, 15 aa, Homo sapiens
  CDR3 for alpha chain variable domain of TCR clone 344601 (TRAV3, TRAJ20)
CAVRDIKLSAYKLSF

SEQ ID NO: 689202 - protein, 18 aa, Homo sapiens
  CDR3 for beta chain variable domain of TCR clone 344601 (TRBV20-1, TRBJ2-5)
CSQTGDSGRLGGKETQYF

SEQ ID NO: 689203 - protein, 15 aa, Homo sapiens
  CDR3 for alpha chain variable domain of TCR clone 344602 (TRAV21, TRAJ53)
CATLNSGGSNYKLTF

SEQ ID NO: 689204 - protein, 16 aa, Homo sapiens
  CDR3 for beta chain variable domain of TCR clone 344602 (TRBV12-4, TRBJ1-5)
CASSRPVGGSNQTQHF

SEQ ID NO: 689205 - protein, 13 aa, Homo sapiens
  CDR3 for alpha chain variable domain of TCR clone 344603 (TRAV13-2, TRAJ48)
CAEMDFGNEKLTF

SEQ ID NO: 689206 - protein, 14 aa, Homo sapiens
  CDR3 for beta chain variable domain of TCR clone 344603 (TRBV5-7, TRBJ2-1)
CASSLGDSYNEQFF

SEQ ID NO: 689207 - protein, 14 aa, Homo sapiens
  CDR3 for alpha chain variable domain of TCR clone 344604 (TRAV8-4, TRAJ17)
CAVREGAAGNKLTF

SEQ ID NO: 689208 - protein, 13 aa, Homo sapiens
  CDR3 for beta chain variable domain of TCR clone 344604 (TRBV19, TRBJ2-1)
CTSSMYRVNEQFF

SEQ ID NO: 689209 - protein, 14 aa, Homo sapiens
  CDR3 for alpha chain variable domain of TCR clone 344605 (TRAV13-1, TRAJ44)
CAAKATGTASKLTF

SEQ ID NO: 689210 - protein, 15 aa, Homo sapiens
  CDR3 for beta chain variable domain of TCR clone 344605 (TRBV4-3, TRBJ1-1)
CASSQELGRGTEDFF

SEQ ID NO: 689211 - protein, 20 aa, Homo sapiens
  CDR3 for alpha chain variable domain of TCR clone 344606 (TRAV12-1, TRAJ42)
SSVIQPPTSVKGGSQGNLIF

SEQ ID NO: 689212 - protein, 13 aa, Homo sapiens
  CDR3 for beta chain variable domain of TCR clone 344606 (TRBV11-2, TRBJ2-1)
CASSSFLDNEQFF

SEQ ID NO: 689213 - protein, 14 aa, Homo sapiens
  CDR3 for alpha chain variable domain of TCR clone 344607 (TRAV1-1, TRAJ27)
CAVIYNTNAGKSTF

SEQ ID NO: 689214 - protein, 15 aa, Homo sapiens
  CDR3 for beta chain variable domain of TCR clone 344607 (TRBV7-2, TRBJ2-1)
CASSSGLARGNEQFF

SEQ ID NO: 689215 - protein, 15 aa, Homo sapiens
  CDR3 for alpha chain variable domain of TCR clone 344608 (TRAV25, TRAJ53)
CPTSNSGGSNYKLTF

SEQ ID NO: 689216 - protein, 16 aa, Homo sapiens
  CDR3 for beta chain variable domain of TCR clone 344608 (TRBV5-5, TRBJ1-2)
CASSPTWGRGLYGYTF

SEQ ID NO: 689217 - protein, 12 aa, Homo sapiens
  CDR3 for alpha chain variable domain of TCR clone 344609 (TRAV2, TRAJ33)
CAVPDSNYQLIW

SEQ ID NO: 689218 - protein, 14 aa, Homo sapiens
  CDR3 for beta chain variable domain of TCR clone 344609 (TRBV11-2, TRBJ2-7)
CASSSTGEGYEQYF

SEQ ID NO: 689219 - protein, 11 aa, Homo sapiens
  CDR3 for alpha chain variable domain of TCR clone 344610 (TRAV8-1, TRAJ24)
CAVNAADSWEI

SEQ ID NO: 689220 - protein, 16 aa, Homo sapiens
  CDR3 for beta chain variable domain of TCR clone 344610 (TRBV4-3, TRBJ2-1)
CASSPALDRGVNEQFF

SEQ ID NO: 689221 - protein, 13 aa, Homo sapiens
  CDR3 for alpha chain variable domain of TCR clone 344611 (TRAV36/DV7, TRAJ53)
CALSGGSNYKLTF

SEQ ID NO: 689222 - protein, 17 aa, Homo sapiens
  CDR3 for beta chain variable domain of TCR clone 344611 (TRBV20-1, TRBJ2-1)
CSASSSGLAGSYNEQFF

SEQ ID NO: 689223 - protein, 13 aa, Homo sapiens
  CDR3 for alpha chain variable domain of TCR clone 344612 (TRAV30, TRAJ39)
CGTEKNAGNMLTF

SEQ ID NO: 689224 - protein, 19 aa, Homo sapiens
  CDR3 for beta chain variable domain of TCR clone 344612 (TRBV7-3, TRBJ2-2)
CASSLRAGGSGPNTGELFF

SEQ ID NO: 689225 - protein, 14 aa, Homo sapiens
  CDR3 for alpha chain variable domain of TCR clone 344613 (TRAV23/DV6, TRAJ45)
CAASWGGGADGLTF

SEQ ID NO: 689226 - protein, 15 aa, Homo sapiens
  CDR3 for beta chain variable domain of TCR clone 344613 (TRBV4-2, TRBJ1-2)
CASGRNTGAGYGYTF

SEQ ID NO: 689227 - protein, 12 aa, Homo sapiens
  CDR3 for alpha chain variable domain of TCR clone 344614 (TRAV26-1, TRAJ36)
CIVRVRADNLFF

SEQ ID NO: 689228 - protein, 14 aa, Homo sapiens
  CDR3 for beta chain variable domain of TCR clone 344614 (TRBV19, TRBJ2-1)
CASPTFVLGGEQFF

SEQ ID NO: 689229 - protein, 16 aa, Homo sapiens
  CDR3 for alpha chain variable domain of TCR clone 344615 (TRAV26-1, TRAJ32)
CIVRTNYGGATNKLIF

SEQ ID NO: 689230 - protein, 15 aa, Homo sapiens
  CDR3 for beta chain variable domain of TCR clone 344615 (TRBV7-2, TRBJ2-7)
CASSSGLAGRREQYF

SEQ ID NO: 689231 - protein, 15 aa, Homo sapiens
  CDR3 for alpha chain variable domain of TCR clone 344616 (TRAV26-1, TRAJ29)
CIVRVEGSGNTHLVF

SEQ ID NO: 689232 - protein, 15 aa, Homo sapiens
  CDR3 for beta chain variable domain of TCR clone 344616 (TRBV7-9, TRBJ1-5)
CASSQGHQPNQPQRF

SEQ ID NO: 689233 - protein, 12 aa, Homo sapiens
  CDR3 for alpha chain variable domain of TCR clone 344617 (TRAV3, TRAJ43)
CAVRDPNNDMRF

SEQ ID NO: 689234 - protein, 14 aa, Homo sapiens
  CDR3 for beta chain variable domain of TCR clone 344617 (TRBV19, TRBJ1-2)
CASSVPTGWLHLRF

SEQ ID NO: 689235 - protein, 14 aa, Homo sapiens
  CDR3 for alpha chain variable domain of TCR clone 344618 (TRAV12-2, TRAJ48)
CAVNAFFGNEKLTF

SEQ ID NO: 689236 - protein, 14 aa, Homo sapiens
  CDR3 for beta chain variable domain of TCR clone 344618 (TRBV12-5, TRBJ2-5)
CASGSRTHQETQYF

SEQ ID NO: 689237 - protein, 14 aa, Homo sapiens
  CDR3 for alpha chain variable domain of TCR clone 344619 (TRAV12-3, TRAJ10)
SHLTLAGGGNKLTF

SEQ ID NO: 689238 - protein, 15 aa, Homo sapiens
  CDR3 for beta chain variable domain of TCR clone 344619 (TRBV7-9, TRBJ1-4)
CASSRTGGFNEKLFF

SEQ ID NO: 689239 - protein, 11 aa, Homo sapiens
  CDR3 for alpha chain variable domain of TCR clone 344620 (TRAV3, TRAJ21)
CAVGNFNKFYF

SEQ ID NO: 689240 - protein, 12 aa, Homo sapiens
  CDR3 for beta chain variable domain of TCR clone 344620 (TRBV11-2, TRBJ2-2)
CASSLGGGELFC

SEQ ID NO: 689241 - protein, 13 aa, Homo sapiens
  CDR3 for alpha chain variable domain of TCR clone 344621 (TRAV3, TRAJ21)
CAVREPDFNKFYF

SEQ ID NO: 689242 - protein, 13 aa, Homo sapiens
  CDR3 for beta chain variable domain of TCR clone 344621 (TRBV9, TRBJ2-1)
CASSPSGENEQFF

SEQ ID NO: 689243 - protein, 14 aa, Homo sapiens
  CDR3 for alpha chain variable domain of TCR clone 344622 (TRAV12-3, TRAJ10)
SHLPLTGGGNKLTF

SEQ ID NO: 689244 - protein, 12 aa, Homo sapiens
  CDR3 for beta chain variable domain of TCR clone 344622 (TRBV7-3, TRBJ2-1)
CASSLGFNEQFF

SEQ ID NO: 689245 - protein, 14 aa, Homo sapiens
  CDR3 for alpha chain variable domain of TCR clone 344623 (TRAV17, TRAJ57)
CATDPQGGSEKLVF

SEQ ID NO: 689246 - protein, 14 aa, Homo sapiens
  CDR3 for beta chain variable domain of TCR clone 344623 (TRBV7-6, TRBJ2-3)
CASSVAGGTDTQYF

SEQ ID NO: 689247 - protein, 13 aa, Homo sapiens
  CDR3 for alpha chain variable domain of TCR clone 344624 (TRAV12-3, TRAJ53)
CAMRGGSNYKLTF

SEQ ID NO: 689248 - protein, 15 aa, Homo sapiens
  CDR3 for beta chain variable domain of TCR clone 344624 (TRBV2, TRBJ2-1)
CATQARRVMVGEQFF

SEQ ID NO: 689249 - protein, 16 aa, Homo sapiens
  CDR3 for alpha chain variable domain of TCR clone 344625 (TRAV16, TRAJ42)
CARKMNYGGRQGNLIF

SEQ ID NO: 689250 - protein, 15 aa, Homo sapiens
  CDR3 for beta chain variable domain of TCR clone 344625 (TRBV20-1, TRBJ2-7)
CSAREGRDSLYEQYF

SEQ ID NO: 689251 - protein, 14 aa, Homo sapiens
  CDR3 for alpha chain variable domain of TCR clone 344626 (TRAV26-1, TRAJ39)
CIVFTNNEGNMLTF

SEQ ID NO: 689252 - protein, 15 aa, Homo sapiens
  CDR3 for beta chain variable domain of TCR clone 344626 (TRBV19, TRBJ2-4)
CASSLTGLTKNIQYF

SEQ ID NO: 689253 - protein, 18 aa, Homo sapiens
  CDR3 for alpha chain variable domain of TCR clone 344627 (TRAV21, TRAJ52)
CSVRPSPAGGTSYGKLTF

SEQ ID NO: 689254 - protein, 15 aa, Homo sapiens
  CDR3 for beta chain variable domain of TCR clone 344627 (TRBV9, TRBJ1-6)
CASSVAGTGDSPLHF

SEQ ID NO: 689255 - protein, 14 aa, Homo sapiens
  CDR3 for alpha chain variable domain of TCR clone 344628 (TRAV1-2, TRAJ8)
CAVREDTGFKKLVF

SEQ ID NO: 689256 - protein, 12 aa, Homo sapiens
  CDR3 for beta chain variable domain of TCR clone 344628 (TRBV29-1, TRBJ2-3)
CSVTGGADTQYF

SEQ ID NO: 689257 - protein, 15 aa, Homo sapiens
  CDR3 for alpha chain variable domain of TCR clone 344629 (TRAV13-1, TRAJ11)
CAASNRNSGYSTLTF

SEQ ID NO: 689258 - protein, 13 aa, Homo sapiens
  CDR3 for beta chain variable domain of TCR clone 344629 (TRBV19, TRBJ1-3)
CASRLSLGNTIYC

SEQ ID NO: 689259 - protein, 14 aa, Homo sapiens
  CDR3 for alpha chain variable domain of TCR clone 344630 (TRAV3, TRAJ21)
CAVESQANFNKFYF

SEQ ID NO: 689260 - protein, 12 aa, Homo sapiens
  CDR3 for beta chain variable domain of TCR clone 344630 (TRBV6-3, TRBJ2-7)
CASRLTPYEQYF

SEQ ID NO: 689261 - protein, 12 aa, Homo sapiens
  CDR3 for alpha chain variable domain of TCR clone 344631 (TRAV23/DV6, TRAJ12)
CAVMDSSYKLIF

SEQ ID NO: 689262 - protein, 14 aa, Homo sapiens
  CDR3 for beta chain variable domain of TCR clone 344631 (TRBV19, TRBJ2-1)
CASTTARTGNEQFF

SEQ ID NO: 689263 - protein, 11 aa, Homo sapiens
  CDR3 for alpha chain variable domain of TCR clone 344632 (TRAV2, TRAJ33)
CAVDSNYQLIW

SEQ ID NO: 689264 - protein, 18 aa, Homo sapiens
  CDR3 for beta chain variable domain of TCR clone 344632 (TRBV20-1, TRBJ2-6)
CSARGSGTTRSEANVLTF

SEQ ID NO: 689265 - protein, 11 aa, Homo sapiens
  CDR3 for alpha chain variable domain of TCR clone 344633 (TRAV17, TRAJ49)
CATDAGNLFYF

SEQ ID NO: 689266 - protein, 16 aa, Homo sapiens
  CDR3 for beta chain variable domain of TCR clone 344633 (TRBV7-2, TRBJ1-2)
CARSPTSGTSLGGYTF

SEQ ID NO: 689267 - protein, 14 aa, Homo sapiens
  CDR3 for alpha chain variable domain of TCR clone 344634 (TRAV13-1, TRAJ35)
CAASKGGFGNVLHC

SEQ ID NO: 689268 - protein, 13 aa, Homo sapiens
  CDR3 for beta chain variable domain of TCR clone 344634 (TRBV7-3, TRBJ1-1)
CASSQGWGAEAVF

SEQ ID NO: 689269 - protein, 13 aa, Homo sapiens
  CDR3 for alpha chain variable domain of TCR clone 344635 (TRAV38-2/DV8, TRAJ34)
CAYRNYNTDMLIF

SEQ ID NO: 689270 - protein, 15 aa, Homo sapiens
  CDR3 for beta chain variable domain of TCR clone 344635 (TRBV20-1, TRBJ2-5)
CSAEGTGGLQETQYF

SEQ ID NO: 689271 - protein, 14 aa, Homo sapiens
  CDR3 for alpha chain variable domain of TCR clone 344636 (TRAV13-1, TRAJ52)
VWGAGGTSDGKLTF

SEQ ID NO: 689272 - protein, 13 aa, Homo sapiens
  CDR3 for beta chain variable domain of TCR clone 344636 (TRBV12-4, TRBJ2-7)
CASSPTEAYEQYF

SEQ ID NO: 689273 - protein, 14 aa, Homo sapiens
  CDR3 for alpha chain variable domain of TCR clone 344637 (TRAV13-1, TRAJ35)
RAASKGGFGNVLHC

SEQ ID NO: 689274 - protein, 16 aa, Homo sapiens
  CDR3 for beta chain variable domain of TCR clone 344637 (TRBV5-1, TRBJ2-2)
CASSSLTGGRTGELFF

SEQ ID NO: 689275 - protein, 13 aa, Homo sapiens
  CDR3 for alpha chain variable domain of TCR clone 344638 (TRAV21, TRAJ27)
CAARPGNAGKSTF

SEQ ID NO: 689276 - protein, 15 aa, Homo sapiens
  CDR3 for beta chain variable domain of TCR clone 344638 (TRBV7-6, TRBJ1-2)
CASSSGGRGGYGYTF

SEQ ID NO: 689277 - protein, 15 aa, Homo sapiens
  CDR3 for alpha chain variable domain of TCR clone 344639 (TRAV14/DV4, TRAJ12)
CAMREGWDSSHTLIF

SEQ ID NO: 689278 - protein, 16 aa, Homo sapiens
  CDR3 for beta chain variable domain of TCR clone 344639 (TRBV2, TRBJ2-5)
CASSETQGVGEETQYF

SEQ ID NO: 689279 - protein, 17 aa, Homo sapiens
  CDR3 for alpha chain variable domain of TCR clone 344640 (TRAV3, TRAJ38)
CAVRDCLNAGNNRKLIW

SEQ ID NO: 689280 - protein, 15 aa, Homo sapiens
  CDR3 for beta chain variable domain of TCR clone 344640 (TRBV19, TRBJ2-1)
CASSTGTSSYNEQFF

SEQ ID NO: 689281 - protein, 16 aa, Homo sapiens
  CDR3 for alpha chain variable domain of TCR clone 344641 (TRAV4, TRAJ42)
CLVGDHHGGSQGNLIF

SEQ ID NO: 689282 - protein, 14 aa, Homo sapiens
  CDR3 for beta chain variable domain of TCR clone 344641 (TRBV11-3, TRBJ1-1)
CVSSPGAWNTEAFF

SEQ ID NO: 689283 - protein, 16 aa, Homo sapiens
  CDR3 for alpha chain variable domain of TCR clone 344642 (TRAV3, TRAJ10)
CAVRDMWAGGGNKLTF

SEQ ID NO: 689284 - protein, 19 aa, Homo sapiens
  CDR3 for beta chain variable domain of TCR clone 344642 (TRBV6-3, TRBJ1-2)
CASSYSKGRTGPPNYGYSF

SEQ ID NO: 689285 - protein, 14 aa, Homo sapiens
  CDR3 for alpha chain variable domain of TCR clone 344643 (TRAV20, TRAJ32)
CCGRYGGATNKLIF

SEQ ID NO: 689286 - protein, 16 aa, Homo sapiens
  CDR3 for beta chain variable domain of TCR clone 344643 (TRBV19, TRBJ2-2)
CASRSPGTGATGELFF

SEQ ID NO: 689287 - protein, 15 aa, Homo sapiens
  CDR3 for alpha chain variable domain of TCR clone 344644 (TRAV12-2, TRAJ53)
CAVNGGGGGNYKLTF

SEQ ID NO: 689288 - protein, 11 aa, Homo sapiens
  CDR3 for beta chain variable domain of TCR clone 344644 (TRBV7-8, TRBJ2-7)
CASSLSLEQYF

SEQ ID NO: 689289 - protein, 19 aa, Homo sapiens
  CDR3 for alpha chain variable domain of TCR clone 344645 (TRAV26-1, TRAJ23)
CCVLLHRQSRYNQGGKLIF

SEQ ID NO: 689290 - protein, 17 aa, Homo sapiens
  CDR3 for beta chain variable domain of TCR clone 344645 (TRBV4-1, TRBJ1-4)
CASSQEGPRGVEEKLFF

SEQ ID NO: 689291 - protein, 13 aa, Homo sapiens
  CDR3 for alpha chain variable domain of TCR clone 344646 (TRAV17, TRAJ26)
CATVDNYDQNFVF

SEQ ID NO: 689292 - protein, 16 aa, Homo sapiens
  CDR3 for beta chain variable domain of TCR clone 344646 (TRBV2, TRBJ2-1)
CASSVGGSLSYNEQFF

SEQ ID NO: 689293 - protein, 12 aa, Homo sapiens
  CDR3 for alpha chain variable domain of TCR clone 344647 (TRAV25, TRAJ17)
CAGEAAGNKLTF

SEQ ID NO: 689294 - protein, 14 aa, Homo sapiens
  CDR3 for beta chain variable domain of TCR clone 344647 (TRBV5-1, TRBJ2-1)
CASSALWSGNEQFF

SEQ ID NO: 689295 - protein, 13 aa, Homo sapiens
  CDR3 for alpha chain variable domain of TCR clone 344648 (TRAV13-2, TRAJ48)
FAEMDFGNEKLTF

SEQ ID NO: 689296 - protein, 14 aa, Homo sapiens
  CDR3 for beta chain variable domain of TCR clone 344648 (TRBV15, TRBJ2-3)
CATRSGTSTDTQYF

SEQ ID NO: 689297 - protein, 13 aa, Homo sapiens
  CDR3 for alpha chain variable domain of TCR clone 344649 (TRAV36/DV7, TRAJ37)
CAVFSSNTGKLIF

SEQ ID NO: 689298 - protein, 15 aa, Homo sapiens
  CDR3 for beta chain variable domain of TCR clone 344649 (TRBV5-1, TRBJ2-2)
CASSSQGGDTGELFF

SEQ ID NO: 689299 - protein, 14 aa, Homo sapiens
  CDR3 for alpha chain variable domain of TCR clone 344650 (TRAV12-2, TRAJ3)
CAVSLYSSASKLIF

SEQ ID NO: 689300 - protein, 14 aa, Homo sapiens
  CDR3 for beta chain variable domain of TCR clone 344650 (TRBV27, TRBJ2-1)
CAGSMAETYNEQFF

SEQ ID NO: 689301 - protein, 11 aa, Homo sapiens
  CDR3 for alpha chain variable domain of TCR clone 344651 (TRAV12-2, TRAJ31)
CAVLNNARLMF

SEQ ID NO: 689302 - protein, 13 aa, Homo sapiens
  CDR3 for beta chain variable domain of TCR clone 344651 (TRBV20-1, TRBJ1-1)
CSARLGQGTEAFF

SEQ ID NO: 689303 - protein, 12 aa, Homo sapiens
  CDR3 for alpha chain variable domain of TCR clone 344652 (TRAV12-1, TRAJ20)
CVVNPDDYKLSF

SEQ ID NO: 689304 - protein, 14 aa, Homo sapiens
  CDR3 for beta chain variable domain of TCR clone 344652 (TRBV2, TRBJ1-5)
CASSENRDDQPQHF

SEQ ID NO: 689305 - protein, 12 aa, Homo sapiens
  CDR3 for alpha chain variable domain of TCR clone 344653 (TRAV13-2, TRAJ23)
CAERHRGGKLIF

SEQ ID NO: 689306 - protein, 15 aa, Homo sapiens
  CDR3 for beta chain variable domain of TCR clone 344653 (TRBV2, TRBJ2-7)
CASSEGLARSYEQYF

SEQ ID NO: 689307 - protein, 12 aa, Homo sapiens
  CDR3 for alpha chain variable domain of TCR clone 344654 (TRAV12-3, TRAJ17)
GAMTLTGNKLTF

SEQ ID NO: 689308 - protein, 15 aa, Homo sapiens
  CDR3 for beta chain variable domain of TCR clone 344654 (TRBV20-1, TRBJ2-7)
CSARDRVSGMDEQCF

SEQ ID NO: 689309 - protein, 14 aa, Homo sapiens
  CDR3 for alpha chain variable domain of TCR clone 344655 (TRAV12-2, TRAJ40)
CAVKIPSGTYKYIF

SEQ ID NO: 689310 - protein, 16 aa, Homo sapiens
  CDR3 for beta chain variable domain of TCR clone 344655 (TRBV4-2, TRBJ2-3)
CASSQELAGDTDTQYF

SEQ ID NO: 689311 - protein, 11 aa, Homo sapiens
  CDR3 for alpha chain variable domain of TCR clone 344656 (TRAV21, TRAJ39)
LLVNAGNILTF

SEQ ID NO: 689312 - protein, 15 aa, Homo sapiens
  CDR3 for beta chain variable domain of TCR clone 344656 (TRBV29-1, TRBJ2-1)
CSGRDRKSSYNEQFF

SEQ ID NO: 689313 - protein, 15 aa, Homo sapiens
  CDR3 for alpha chain variable domain of TCR clone 344657 (TRAV2, TRAJ11)
CAVGGRTSVYSTLTF

SEQ ID NO: 689314 - protein, 14 aa, Homo sapiens
  CDR3 for beta chain variable domain of TCR clone 344657 (TRBV20-1, TRBJ2-1)
CSAQIGGSANEQFF

SEQ ID NO: 689315 - protein, 11 aa, Homo sapiens
  CDR3 for alpha chain variable domain of TCR clone 344658 (TRAV2, TRAJ33)
CAVESNYQLIW

SEQ ID NO: 689316 - protein, 14 aa, Homo sapiens
  CDR3 for beta chain variable domain of TCR clone 344658 (TRBV28, TRBJ1-1)
CASSSEQGYTEAFF

SEQ ID NO: 689317 - protein, 15 aa, Homo sapiens
  CDR3 for alpha chain variable domain of TCR clone 344659 (TRAV13-1, TRAJ44)
CAASRGGGTASKLTF

SEQ ID NO: 689318 - protein, 15 aa, Homo sapiens
  CDR3 for beta chain variable domain of TCR clone 344659 (TRBV6-3, TRBJ2-3)
RLIHYSVGQADTQYF

SEQ ID NO: 689319 - protein, 13 aa, Homo sapiens
  CDR3 for alpha chain variable domain of TCR clone 344660 (TRAV20, TRAJ37)
CAGCSSNTGKLIF

SEQ ID NO: 689320 - protein, 21 aa, Homo sapiens
  CDR3 for beta chain variable domain of TCR clone 344660 (TRBV4-2, TRBJ2-3)
PCSQKTRPSISVPAAPDTQYF

SEQ ID NO: 689321 - protein, 16 aa, Homo sapiens
  CDR3 for alpha chain variable domain of TCR clone 344661 (TRAV13-2, TRAJ32)
CAENMNYGGSTNKLIF

SEQ ID NO: 689322 - protein, 14 aa, Homo sapiens
  CDR3 for beta chain variable domain of TCR clone 344661 (TRBV15, TRBJ2-5)
WATSSTGYQETLYF

SEQ ID NO: 689323 - protein, 11 aa, Homo sapiens
  CDR3 for alpha chain variable domain of TCR clone 344662 (TRAV8-6, TRAJ23)
CAVISGGKLIF

SEQ ID NO: 689324 - protein, 14 aa, Homo sapiens
  CDR3 for beta chain variable domain of TCR clone 344662 (TRBV12-5, TRBJ2-5)
CASGSRTHQETQYI

SEQ ID NO: 689325 - protein, 14 aa, Homo sapiens
  CDR3 for alpha chain variable domain of TCR clone 344663 (TRAV38-2/DV8, TRAJ30)
CAYRSADRDDKIIF

SEQ ID NO: 689326 - protein, 16 aa, Homo sapiens
  CDR3 for beta chain variable domain of TCR clone 344663 (TRBV15, TRBJ1-3)
CATSSTIGFSGNTIYF

SEQ ID NO: 689327 - protein, 20 aa, Homo sapiens
  CDR3 for alpha chain variable domain of TCR clone 344664 (TRAV26-1, TRAJ42)
CCVLLHRQTYYGGSQGNLIF

SEQ ID NO: 689328 - protein, 14 aa, Homo sapiens
  CDR3 for beta chain variable domain of TCR clone 344664 (TRBV7-3, TRBJ1-2)
CASSPDSLSYGYTF

SEQ ID NO: 689329 - protein, 15 aa, Homo sapiens
  CDR3 for alpha chain variable domain of TCR clone 344665 (TRAV21, TRAJ38)
CAVRQDAGNNGKLIW

SEQ ID NO: 689330 - protein, 16 aa, Homo sapiens
  CDR3 for beta chain variable domain of TCR clone 344665 (TRBV4-2, TRBJ1-1)
CASRPLDGGGDTEAFF

SEQ ID NO: 689331 - protein, 14 aa, Homo sapiens
  CDR3 for alpha chain variable domain of TCR clone 344666 (TRAV8-6, TRAJ30)
CAVRPVNRDDKIIL

SEQ ID NO: 689332 - protein, 17 aa, Homo sapiens
  CDR3 for beta chain variable domain of TCR clone 344666 (TRBV7-8, TRBJ2-6)
CASSAGTGGAGANVLTF

SEQ ID NO: 689333 - protein, 12 aa, Homo sapiens
  CDR3 for alpha chain variable domain of TCR clone 344667 (TRAV17, TRAJ39)
CATSAAGNMLTF

SEQ ID NO: 689334 - protein, 14 aa, Homo sapiens
  CDR3 for beta chain variable domain of TCR clone 344667 (TRBV7-9, TRBJ1-2)
CASSRQGANYGYTF

SEQ ID NO: 689335 - protein, 14 aa, Homo sapiens
  CDR3 for alpha chain variable domain of TCR clone 344668 (TRAV1-2, TRAJ16)
CAVNRFSDGQKLLF

SEQ ID NO: 689336 - protein, 14 aa, Homo sapiens
  CDR3 for beta chain variable domain of TCR clone 344668 (TRBV12-5, TRBJ2-5)
CASGSRTHQETQYV

SEQ ID NO: 689337 - protein, 12 aa, Homo sapiens
  CDR3 for alpha chain variable domain of TCR clone 344669 (TRAV1-2, TRAJ9)
CAGYTGGCKTIF

SEQ ID NO: 689338 - protein, 15 aa, Homo sapiens
  CDR3 for beta chain variable domain of TCR clone 344669 (TRBV11-2, TRBJ2-1)
CASSPAGQSLNEQFF

SEQ ID NO: 689339 - protein, 14 aa, Homo sapiens
  CDR3 for alpha chain variable domain of TCR clone 344670 (TRAV8-4, TRAJ48)
CAVSETFGNEKLTF

SEQ ID NO: 689340 - protein, 11 aa, Homo sapiens
  CDR3 for beta chain variable domain of TCR clone 344670 (TRBV11-2, TRBJ1-1)
CASSINTEAFF

SEQ ID NO: 689341 - protein, 15 aa, Homo sapiens
  CDR3 for alpha chain variable domain of TCR clone 344671 (TRAV12-1, TRAJ9)
CVVSFGDTGGFKTIF

SEQ ID NO: 689342 - protein, 15 aa, Homo sapiens
  CDR3 for beta chain variable domain of TCR clone 344671 (TRBV2, TRBJ2-4)
CASSLKTGSSNIQYF

SEQ ID NO: 689343 - protein, 15 aa, Homo sapiens
  CDR3 for alpha chain variable domain of TCR clone 344672 (TRAV8-3, TRAJ15)
CAGGAANQAGTALIF

SEQ ID NO: 689344 - protein, 14 aa, Homo sapiens
  CDR3 for beta chain variable domain of TCR clone 344672 (TRBV20-1, TRBJ2-1)
CSPNDEASYNEQFF

SEQ ID NO: 689345 - protein, 13 aa, Homo sapiens
  CDR3 for alpha chain variable domain of TCR clone 344673 (TRAV21, TRAJ27)
CAARPGNAGTSTF

SEQ ID NO: 689346 - protein, 13 aa, Homo sapiens
  CDR3 for beta chain variable domain of TCR clone 344673 (TRBV7-3, TRBJ1-1)
CASSQDWGAEAFF

SEQ ID NO: 689347 - protein, 17 aa, Homo sapiens
  CDR3 for alpha chain variable domain of TCR clone 344674 (TRAV3, TRAJ42)
CAVRDRDYGGSKGNLIF

SEQ ID NO: 689348 - protein, 14 aa, Homo sapiens
  CDR3 for beta chain variable domain of TCR clone 344674 (TRBV19, TRBJ2-5)
CASSMTGQQETQYF

SEQ ID NO: 689349 - protein, 19 aa, Homo sapiens
  CDR3 for alpha chain variable domain of TCR clone 344675 (TRAV1-2, TRAJ26)
CLLPLCCERTDNYGQNFVF

SEQ ID NO: 689350 - protein, 15 aa, Homo sapiens
  CDR3 for beta chain variable domain of TCR clone 344675 (TRBV9, TRBJ1-6)
CASSVAGTGDSPLHF

SEQ ID NO: 689351 - protein, 14 aa, Homo sapiens
  CDR3 for alpha chain variable domain of TCR clone 344676 (TRAV26-1, TRAJ38)
CIADNAGNNRKLMW

SEQ ID NO: 689352 - protein, 15 aa, Homo sapiens
  CDR3 for beta chain variable domain of TCR clone 344676 (TRBV20-1, TRBJ1-1)
CSARGGGTLKLSLDK

SEQ ID NO: 689353 - protein, 12 aa, Homo sapiens
  CDR3 for alpha chain variable domain of TCR clone 344677 (TRAV22, TRAJ22)
CAPGGSARQLTF

SEQ ID NO: 689354 - protein, 13 aa, Homo sapiens
  CDR3 for beta chain variable domain of TCR clone 344677 (TRBV15, TRBJ1-6)
CGTSGGLNSPLHF

SEQ ID NO: 689355 - protein, 13 aa, Homo sapiens
  CDR3 for alpha chain variable domain of TCR clone 344678 (TRAV8-3, TRAJ12)
CAVGPGSSYKLIF

SEQ ID NO: 689356 - protein, 13 aa, Homo sapiens
  CDR3 for beta chain variable domain of TCR clone 344678 (TRBV7-9, TRBJ1-2)
CASSLKQNYGYTF

SEQ ID NO: 689357 - protein, 16 aa, Homo sapiens
  CDR3 for alpha chain variable domain of TCR clone 344679 (TRAV8-4, TRAJ44)
CAVSASLTGTASKLTF

SEQ ID NO: 689358 - protein, 15 aa, Homo sapiens
  CDR3 for beta chain variable domain of TCR clone 344679 (TRBV5-1, TRBJ2-1)
CASSPPRAPYNEQFF

SEQ ID NO: 689359 - protein, 16 aa, Homo sapiens
  CDR3 for alpha chain variable domain of TCR clone 344680 (TRAV12-3, TRAJ53)
CAMSVGSGGSNYKLTF

SEQ ID NO: 689360 - protein, 12 aa, Homo sapiens
  CDR3 for beta chain variable domain of TCR clone 344680 (TRBV19, TRBJ1-5)
CASSIAQQPQHF

SEQ ID NO: 689361 - protein, 23 aa, Homo sapiens
  CDR3 for alpha chain variable domain of TCR clone 344681 (TRAV26-1, )
CIADNAGNDHIQKPDPAVYQLRD

SEQ ID NO: 689362 - protein, 13 aa, Homo sapiens
  CDR3 for beta chain variable domain of TCR clone 344681 (TRBV20-1, TRBJ1-1)
CSARGGGNTEAFF

SEQ ID NO: 689363 - protein, 16 aa, Homo sapiens
  CDR3 for alpha chain variable domain of TCR clone 344682 (TRAV4, TRAJ5)
CLVGPDHGHGQESTYF

SEQ ID NO: 689364 - protein, 15 aa, Homo sapiens
  CDR3 for beta chain variable domain of TCR clone 344682 (TRBV27, TRBJ2-5)
CASSLILSGGETQYF

SEQ ID NO: 689365 - protein, 11 aa, Homo sapiens
  CDR3 for alpha chain variable domain of TCR clone 344683 (TRAV12-2, TRAJ11)
CAVNPYSTPTF

SEQ ID NO: 689366 - protein, 12 aa, Homo sapiens
  CDR3 for beta chain variable domain of TCR clone 344683 (TRBV9, TRBJ2-2)
CASSAYTGELFF

SEQ ID NO: 689367 - protein, 21 aa, Homo sapiens
  CDR3 for alpha chain variable domain of TCR clone 344684 (TRAV12-1, TRAJ37)
CVVNGWLWQHRQTNLWARDNF

SEQ ID NO: 689368 - protein, 12 aa, Homo sapiens
  CDR3 for beta chain variable domain of TCR clone 344684 (TRBV20-1, TRBJ1-2)
CSAPGFNYGYTF

SEQ ID NO: 689369 - protein, 17 aa, Homo sapiens
  CDR3 for alpha chain variable domain of TCR clone 344685 (TRAV4, TRAJ13)
CLLGVQGSSGGYQKVTF

SEQ ID NO: 689370 - protein, 13 aa, Homo sapiens
  CDR3 for beta chain variable domain of TCR clone 344685 (TRBV10-3, TRBJ2-7)
CASKLAVNYEQYF

SEQ ID NO: 689371 - protein, 11 aa, Homo sapiens
  CDR3 for alpha chain variable domain of TCR clone 344686 (TRAV3, TRAJ21)
CAVGNFNKFYF

SEQ ID NO: 689372 - protein, 14 aa, Homo sapiens
  CDR3 for beta chain variable domain of TCR clone 344686 (TRBV29-1, TRBJ2-2)
CSGRGSGSTGELFF

SEQ ID NO: 689373 - protein, 14 aa, Homo sapiens
  CDR3 for alpha chain variable domain of TCR clone 344687 (TRAV29/DV5, TRAJ36)
CAARRKTGATTLFF

SEQ ID NO: 689374 - protein, 13 aa, Homo sapiens
  CDR3 for beta chain variable domain of TCR clone 344687 (TRBV12-4, TRBJ2-7)
CASSLERVREQYF

SEQ ID NO: 689375 - protein, 12 aa, Homo sapiens
  CDR3 for alpha chain variable domain of TCR clone 344688 (TRAV13-1, TRAJ21)
CAAKEGVNKFYF

SEQ ID NO: 689376 - protein, 13 aa, Homo sapiens
  CDR3 for beta chain variable domain of TCR clone 344688 (TRBV19, TRBJ1-2)
CASSVPGQDGYTF

SEQ ID NO: 689377 - protein, 13 aa, Homo sapiens
  CDR3 for alpha chain variable domain of TCR clone 344689 (TRAV12-2, TRAJ13)
CREEDWGLQKVTF

SEQ ID NO: 689378 - protein, 15 aa, Homo sapiens
  CDR3 for beta chain variable domain of TCR clone 344689 (TRBV27, TRBJ2-1)
CASSNGGGSSNEQSF

SEQ ID NO: 689379 - protein, 11 aa, Homo sapiens
  CDR3 for alpha chain variable domain of TCR clone 344690 (TRAV2, TRAJ13)
CASGGYQKVTF

SEQ ID NO: 689380 - protein, 14 aa, Homo sapiens
  CDR3 for beta chain variable domain of TCR clone 344690 (TRBV7-3, TRBJ2-1)
CASSLGTSANEQFF

SEQ ID NO: 689381 - protein, 12 aa, Homo sapiens
  CDR3 for alpha chain variable domain of TCR clone 344691 (TRAV8-3, TRAJ20)
CALGGGDYKLSF

SEQ ID NO: 689382 - protein, 14 aa, Homo sapiens
  CDR3 for beta chain variable domain of TCR clone 344691 (TRBV5-1, TRBJ2-7)
CASSRGESLYEQYF

SEQ ID NO: 689383 - protein, 13 aa, Homo sapiens
  CDR3 for alpha chain variable domain of TCR clone 344692 (TRAV8-3, TRAJ49)
CAVGRHTGNQFYF

SEQ ID NO: 689384 - protein, 12 aa, Homo sapiens
  CDR3 for beta chain variable domain of TCR clone 344692 (TRBV11-2, TRBJ2-2)
CASSLGGGELFF

SEQ ID NO: 689385 - protein, 14 aa, Homo sapiens
  CDR3 for alpha chain variable domain of TCR clone 344693 (TRAV6, TRAJ6)
CDLPTSGGSYIPTF

SEQ ID NO: 689386 - protein, 17 aa, Homo sapiens
  CDR3 for beta chain variable domain of TCR clone 344693 (TRBV5-1, TRBJ2-5)
CASSPVALGQSQETQYF

SEQ ID NO: 689387 - protein, 16 aa, Homo sapiens
  CDR3 for alpha chain variable domain of TCR clone 344694 (TRAV26-1, TRAJ52)
CIVSNAGGTSYGKLTF

SEQ ID NO: 689388 - protein, 15 aa, Homo sapiens
  CDR3 for beta chain variable domain of TCR clone 344694 (TRBV7-3, TRBJ2-1)
CASSPTGGGEVEQFC

SEQ ID NO: 689389 - protein, 12 aa, Homo sapiens
  CDR3 for alpha chain variable domain of TCR clone 344695 (TRAV12-3, TRAJ17)
CAMTLTGNKLTF

SEQ ID NO: 689390 - protein, 13 aa, Homo sapiens
  CDR3 for beta chain variable domain of TCR clone 344695 (TRBV5-1, TRBJ2-5)
CASSWEGEETQYF

SEQ ID NO: 689391 - protein, 18 aa, Homo sapiens
  CDR3 for alpha chain variable domain of TCR clone 344696 (TRAV29/DV5, TRAJ52)
CAAGFRGAGGTTYGKLTF

SEQ ID NO: 689392 - protein, 16 aa, Homo sapiens
  CDR3 for beta chain variable domain of TCR clone 344696 (TRBV7-3, TRBJ2-2)
CASSLKRGTLSGELFF

SEQ ID NO: 689393 - protein, 13 aa, Homo sapiens
  CDR3 for alpha chain variable domain of TCR clone 344697 (TRAV21, TRAJ10)
CAVPTGGGNKLTF

SEQ ID NO: 689394 - protein, 22 aa, Homo sapiens
  CDR3 for beta chain variable domain of TCR clone 344697 (TRBV19, TRBJ2-1)
CASSVRDRVTGTSGRIYNEQFV

SEQ ID NO: 689395 - protein, 17 aa, Homo sapiens
  CDR3 for alpha chain variable domain of TCR clone 344698 (TRAV35, TRAJ47)
GLLDCRTHTEYGNKLFF

SEQ ID NO: 689396 - protein, 11 aa, Homo sapiens
  CDR3 for beta chain variable domain of TCR clone 344698 (TRBV29-1, TRBJ1-1)
CSVEVGTRTFF

SEQ ID NO: 689397 - protein, 14 aa, Homo sapiens
  CDR3 for alpha chain variable domain of TCR clone 344699 (TRAV1-2, TRAJ16)
CAVNRFSDGQKLLF

SEQ ID NO: 689398 - protein, 13 aa, Homo sapiens
  CDR3 for beta chain variable domain of TCR clone 344699 (TRBV7-8, TRBJ1-5)
CASSQGENQPQHF

SEQ ID NO: 689399 - protein, 18 aa, Homo sapiens
  CDR3 for alpha chain variable domain of TCR clone 344700 (TRAV26-1, TRAJ37)
CIVRVDMHGSSNTGKLIF

SEQ ID NO: 689400 - protein, 14 aa, Homo sapiens
  CDR3 for beta chain variable domain of TCR clone 344700 (TRBV7-2, TRBJ1-1)
CASSFLTGTTEAFF

SEQ ID NO: 689401 - protein, 13 aa, Homo sapiens
  CDR3 for alpha chain variable domain of TCR clone 344701 (TRAV6, TRAJ15)
CALEYEAGTALIF

SEQ ID NO: 689402 - protein, 11 aa, Homo sapiens
  CDR3 for beta chain variable domain of TCR clone 344701 (TRBV6-3, TRBJ2-3)
CATGQADTQYF

SEQ ID NO: 689403 - protein, 14 aa, Homo sapiens
  CDR3 for alpha chain variable domain of TCR clone 344702 (TRAV13-1, TRAJ23)
CAASRLGRGVRLIF

SEQ ID NO: 689404 - protein, 15 aa, Homo sapiens
  CDR3 for beta chain variable domain of TCR clone 344702 (TRBV7-2, TRBJ2-1)
CASSLVAGRYNEQFF

SEQ ID NO: 689405 - protein, 17 aa, Homo sapiens
  CDR3 for alpha chain variable domain of TCR clone 344703 (TRAV13-1, TRAJ28)
CAASPPYSGAGSSQLTF

SEQ ID NO: 689406 - protein, 12 aa, Homo sapiens
  CDR3 for beta chain variable domain of TCR clone 344703 (TRBV11-2, TRBJ2-2)
CASSLPTGGLFF

SEQ ID NO: 689407 - protein, 15 aa, Homo sapiens
  CDR3 for alpha chain variable domain of TCR clone 344704 (TRAV30, TRAJ32)
CGTEILGGATNKLIF

SEQ ID NO: 689408 - protein, 17 aa, Homo sapiens
  CDR3 for beta chain variable domain of TCR clone 344704 (TRBV11-2, TRBJ2-1)
CASSLYPPGVEYNEQFF

SEQ ID NO: 689409 - protein, 15 aa, Homo sapiens
  CDR3 for alpha chain variable domain of TCR clone 344705 (TRAV8-3, TRAJ45)
CASSYSGGGSDGLTF

SEQ ID NO: 689410 - protein, 16 aa, Homo sapiens
  CDR3 for beta chain variable domain of TCR clone 344705 (TRBV7-9, TRBJ2-2)
CASSGVGGANTGELFF

SEQ ID NO: 689411 - protein, 15 aa, Homo sapiens
  CDR3 for alpha chain variable domain of TCR clone 344706 (TRAV8-2, TRAJ17)
CVVRHDQSCRQQANF

SEQ ID NO: 689412 - protein, 13 aa, Homo sapiens
  CDR3 for beta chain variable domain of TCR clone 344706 (TRBV7-9, TRBJ1-2)
CASSLKQNYGYTF

SEQ ID NO: 689413 - protein, 14 aa, Homo sapiens
  CDR3 for alpha chain variable domain of TCR clone 344707 (TRAV38-1, TRAJ45)
CSSHSGGGADGLTF

SEQ ID NO: 689414 - protein, 15 aa, Homo sapiens
  CDR3 for beta chain variable domain of TCR clone 344707 (TRBV6-3, TRBJ2-7)
CASSSPGTVFYEQYF

SEQ ID NO: 689415 - protein, 14 aa, Homo sapiens
  CDR3 for alpha chain variable domain of TCR clone 344708 (TRAV36/DV7, TRAJ32)
CAVGHVGATNKLIF

SEQ ID NO: 689416 - protein, 17 aa, Homo sapiens
  CDR3 for beta chain variable domain of TCR clone 344708 (TRBV24-1, TRBJ2-1)
CATSDVSTSGTYNEQFF

SEQ ID NO: 689417 - protein, 23 aa, Homo sapiens
  CDR3 for alpha chain variable domain of TCR clone 344709 (TRAV26-1, TRAJ38)
CSADNAGNNHIQNPDPAVYQLRD

SEQ ID NO: 689418 - protein, 13 aa, Homo sapiens
  CDR3 for beta chain variable domain of TCR clone 344709 (TRBV20-1, TRBJ1-1)
CSARGGGNTEAFF

SEQ ID NO: 689419 - protein, 16 aa, Homo sapiens
  CDR3 for alpha chain variable domain of TCR clone 344710 (TRAV3, TRAJ10)
CAVRDMRAGGGNKLTL

SEQ ID NO: 689420 - protein, 15 aa, Homo sapiens
  CDR3 for beta chain variable domain of TCR clone 344710 (TRBV9, TRBJ1-6)
CASSVAGTGDSPLHF

SEQ ID NO: 689421 - protein, 15 aa, Homo sapiens
  CDR3 for alpha chain variable domain of TCR clone 344711 (TRAV26-2, TRAJ50)
CILRDEETSYDKVIF

SEQ ID NO: 689422 - protein, 17 aa, Homo sapiens
  CDR3 for beta chain variable domain of TCR clone 344711 (TRBV7-7, TRBJ2-2)
CASSSVPAGGEIGELFF

SEQ ID NO: 689423 - protein, 13 aa, Homo sapiens
  CDR3 for alpha chain variable domain of TCR clone 344712 (TRAV17, TRAJ15)
CATVNQAGTALIF

SEQ ID NO: 689424 - protein, 12 aa, Homo sapiens
  CDR3 for beta chain variable domain of TCR clone 344712 (TRBV11-2, TRBJ2-2)
CASSLGGGELFF

SEQ ID NO: 689425 - protein, 13 aa, Homo sapiens
  CDR3 for alpha chain variable domain of TCR clone 344713 (TRAV12-2, TRAJ42)
RAVKRGSQGNLIF

SEQ ID NO: 689426 - protein, 13 aa, Homo sapiens
  CDR3 for beta chain variable domain of TCR clone 344713 (TRBV7-9, TRBJ2-3)
CASSPGSTDTQYF

SEQ ID NO: 689427 - protein, 15 aa, Homo sapiens
  CDR3 for alpha chain variable domain of TCR clone 344714 (TRAV8-3, TRAJ6)
CAVGSAGGGSYIPTF

SEQ ID NO: 689428 - protein, 15 aa, Homo sapiens
  CDR3 for beta chain variable domain of TCR clone 344714 (TRBV15, TRBJ1-5)
CATSRDPVSNQPQHF

SEQ ID NO: 689429 - protein, 12 aa, Homo sapiens
  CDR3 for alpha chain variable domain of TCR clone 344715 (TRAV13-1, TRAJ21)
CAAKEGFIKFYF

SEQ ID NO: 689430 - protein, 14 aa, Homo sapiens
  CDR3 for beta chain variable domain of TCR clone 344715 (TRBV5-4, TRBJ1-1)
CASSLDSRRDEAFF

SEQ ID NO: 689431 - protein, 15 aa, Homo sapiens
  CDR3 for alpha chain variable domain of TCR clone 344716 (TRAV21, TRAJ10)
CAVRGLTGGGNKLTF

SEQ ID NO: 689432 - protein, 14 aa, Homo sapiens
  CDR3 for beta chain variable domain of TCR clone 344716 (TRBV7-2, TRBJ2-1)
CASSPGTFYNEQFF

SEQ ID NO: 689433 - protein, 14 aa, Homo sapiens
  CDR3 for alpha chain variable domain of TCR clone 344717 (TRAV1-2, TRAJ16)
CAVNRFSDGQKLLF

SEQ ID NO: 689434 - protein, 16 aa, Homo sapiens
  CDR3 for beta chain variable domain of TCR clone 344717 (TRBV20-1, TRBJ1-4)
CSTPGQGLLTNEKLFF

SEQ ID NO: 689435 - protein, 14 aa, Homo sapiens
  CDR3 for alpha chain variable domain of TCR clone 344718 (TRAV3, TRAJ33)
CAVRDMDSNNQLIW

SEQ ID NO: 689436 - protein, 19 aa, Homo sapiens
  CDR3 for beta chain variable domain of TCR clone 344718 (TRBV7-3, TRBJ1-2)
CASSFPQGNDGELWLHLRF

SEQ ID NO: 689437 - protein, 14 aa, Homo sapiens
  CDR3 for alpha chain variable domain of TCR clone 344719 (TRAV8-3, TRAJ39)
CAVGENNAGNMLTF

SEQ ID NO: 689438 - protein, 13 aa, Homo sapiens
  CDR3 for beta chain variable domain of TCR clone 344719 (TRBV3-1, TRBJ2-5)
CASSPVLSETQYF

SEQ ID NO: 689439 - protein, 13 aa, Homo sapiens
  CDR3 for alpha chain variable domain of TCR clone 344720 (TRAV17, TRAJ9)
CATGSTGGFKTIF

SEQ ID NO: 689440 - protein, 16 aa, Homo sapiens
  CDR3 for beta chain variable domain of TCR clone 344720 (TRBV7-8, TRBJ2-7)
CASTLGGGLTSSTSGR

SEQ ID NO: 689441 - protein, 12 aa, Homo sapiens
  CDR3 for alpha chain variable domain of TCR clone 344721 (TRAV29/DV5, TRAJ15)
CASNQAGTALIF

SEQ ID NO: 689442 - protein, 16 aa, Homo sapiens
  CDR3 for beta chain variable domain of TCR clone 344721 (TRBV20-1, TRBJ2-1)
CSARDFSGRIGDEQFF

SEQ ID NO: 689443 - protein, 12 aa, Homo sapiens
  CDR3 for alpha chain variable domain of TCR clone 344722 (TRAV8-3, TRAJ20)
CAVDFNDYKLSF

SEQ ID NO: 689444 - protein, 13 aa, Homo sapiens
  CDR3 for beta chain variable domain of TCR clone 344722 (TRBV5-7, TRBJ2-3)
CASSLGRTDTQYS

SEQ ID NO: 689445 - protein, 13 aa, Homo sapiens
  CDR3 for alpha chain variable domain of TCR clone 344723 (TRAV36/DV7, TRAJ49)
CAGDSNTGNQFYF

SEQ ID NO: 689446 - protein, 13 aa, Homo sapiens
  CDR3 for beta chain variable domain of TCR clone 344723 (TRBV11-2, TRBJ2-7)
CASSLEGANEQYF

SEQ ID NO: 689447 - protein, 15 aa, Homo sapiens
  CDR3 for alpha chain variable domain of TCR clone 344724 (TRAV35, TRAJ40)
CAGQLGTSGTYKYIF

SEQ ID NO: 689448 - protein, 13 aa, Homo sapiens
  CDR3 for beta chain variable domain of TCR clone 344724 (TRBV7-3, TRBJ2-2)
CASSLAVTGELFF

SEQ ID NO: 689449 - protein, 14 aa, Homo sapiens
  CDR3 for alpha chain variable domain of TCR clone 344725 (TRAV12-1, TRAJ17)
CVVNPKAAGNKLTF

SEQ ID NO: 689450 - protein, 15 aa, Homo sapiens
  CDR3 for beta chain variable domain of TCR clone 344725 (TRBV27, TRBJ1-6)
CASSFDRGLGSPLHF

SEQ ID NO: 689451 - protein, 15 aa, Homo sapiens
  CDR3 for alpha chain variable domain of TCR clone 344726 (TRAV12-3, TRAJ49)
CAMAVTPNTGNQFYF

SEQ ID NO: 689452 - protein, 17 aa, Homo sapiens
  CDR3 for beta chain variable domain of TCR clone 344726 (TRBV20-1, TRBJ1-5)
CSASLSPGQGGNQPQHF

SEQ ID NO: 689453 - protein, 11 aa, Homo sapiens
  CDR3 for alpha chain variable domain of TCR clone 344727 (TRAV12-2, TRAJ42)
CAPGSQGNLIF

SEQ ID NO: 689454 - protein, 18 aa, Homo sapiens
  CDR3 for beta chain variable domain of TCR clone 344727 (TRBV7-9, TRBJ2-7)
CASSLTTSGSRTWYEQYF

SEQ ID NO: 689455 - protein, 14 aa, Homo sapiens
  CDR3 for alpha chain variable domain of TCR clone 344728 (TRAV17, TRAJ57)
CATDPQGGSEKLVF

SEQ ID NO: 689456 - protein, 13 aa, Homo sapiens
  CDR3 for beta chain variable domain of TCR clone 344728 (TRBV29-1, TRBJ2-1)
CGVEGGRVNEQFF

SEQ ID NO: 689457 - protein, 16 aa, Homo sapiens
  CDR3 for alpha chain variable domain of TCR clone 344729 (TRAV1-2, TRAJ10)
CAVRGVLTGGGNKLTF

SEQ ID NO: 689458 - protein, 17 aa, Homo sapiens
  CDR3 for beta chain variable domain of TCR clone 344729 (TRBV15, TRBJ1-5)
CATSRAPPGTRNQPQHV

SEQ ID NO: 689459 - protein, 15 aa, Homo sapiens
  CDR3 for alpha chain variable domain of TCR clone 344730 (TRAV8-3, TRAJ11)
CAVGLLNSGYSTLTF

SEQ ID NO: 689460 - protein, 23 aa, Homo sapiens
  CDR3 for beta chain variable domain of TCR clone 344730 (TRBV7-9, TRBJ1-2)
EAKLEKSRLLSDRFSSGEDGYTF

SEQ ID NO: 689461 - protein, 22 aa, Homo sapiens
  CDR3 for alpha chain variable domain of TCR clone 344731 (TRAV8-2, TRAJ45)
HLTNPSAHMSDAAEYSADGLTF

SEQ ID NO: 689462 - protein, 13 aa, Homo sapiens
  CDR3 for beta chain variable domain of TCR clone 344731 (TRBV7-3, TRBJ2-1)
CASSPVAYNEQFF

SEQ ID NO: 689463 - protein, 13 aa, Homo sapiens
  CDR3 for alpha chain variable domain of TCR clone 344732 (TRAV8-2, TRAJ43)
CVVSDQGDNDMRV

SEQ ID NO: 689464 - protein, 12 aa, Homo sapiens
  CDR3 for beta chain variable domain of TCR clone 344732 (TRBV7-9, TRBJ2-7)
CASRTGFDEQYF

SEQ ID NO: 689465 - protein, 13 aa, Homo sapiens
  CDR3 for alpha chain variable domain of TCR clone 344733 (TRAV29/DV5, TRAJ29)
CAASAAGNTPLVF

SEQ ID NO: 689466 - protein, 14 aa, Homo sapiens
  CDR3 for beta chain variable domain of TCR clone 344733 (TRBV19, TRBJ2-3)
CASSAPRGTDTQYF

SEQ ID NO: 689467 - protein, 20 aa, Homo sapiens
  CDR3 for alpha chain variable domain of TCR clone 344734 (TRAV14/DV4, TRAJ22)
CAMREGPFSISSGSARQLTF

SEQ ID NO: 689468 - protein, 13 aa, Homo sapiens
  CDR3 for beta chain variable domain of TCR clone 344734 (TRBV4-2, TRBJ2-3)
CASSQDWQHTQYF

SEQ ID NO: 689469 - protein, 16 aa, Homo sapiens
  CDR3 for alpha chain variable domain of TCR clone 344735 (TRAV12-2, TRAJ40)
CAVIRGGTSGTYKYIL

SEQ ID NO: 689470 - protein, 13 aa, Homo sapiens
  CDR3 for beta chain variable domain of TCR clone 344735 (TRBV10-3, TRBJ2-7)
CASKLAVNYEQYF

SEQ ID NO: 689471 - protein, 19 aa, Homo sapiens
  CDR3 for alpha chain variable domain of TCR clone 344736 (TRAV29/DV5, TRAJ49)
CSVLLCSKLTVVTGNQFYF

SEQ ID NO: 689472 - protein, 17 aa, Homo sapiens
  CDR3 for beta chain variable domain of TCR clone 344736 (TRBV13, TRBJ2-3)
CASSLSRVAGGRNTQYF

SEQ ID NO: 689473 - protein, 12 aa, Homo sapiens
  CDR3 for alpha chain variable domain of TCR clone 344737 (TRAV13-1, TRAJ21)
CAAKEGFNKFYF

SEQ ID NO: 689474 - protein, 14 aa, Homo sapiens
  CDR3 for beta chain variable domain of TCR clone 344737 (TRBV28, TRBJ1-1)
CASSESGRGTEAFF

SEQ ID NO: 689475 - protein, 14 aa, Homo sapiens
  CDR3 for alpha chain variable domain of TCR clone 344738 (TRAV17, TRAJ39)
CATDPVRAGNMLTF

SEQ ID NO: 689476 - protein, 13 aa, Homo sapiens
  CDR3 for beta chain variable domain of TCR clone 344738 (TRBV19, TRBJ1-2)
CASSVPGQDCYTF

SEQ ID NO: 689477 - protein, 16 aa, Homo sapiens
  CDR3 for alpha chain variable domain of TCR clone 344739 (TRAV20, TRAJ28)
CAVRDPSGAGSYQLTF

SEQ ID NO: 689478 - protein, 14 aa, Homo sapiens
  CDR3 for beta chain variable domain of TCR clone 344739 (TRBV7-8, TRBJ2-3)
CASSLEAGTDTQYF

SEQ ID NO: 689479 - protein, 16 aa, Homo sapiens
  CDR3 for alpha chain variable domain of TCR clone 344740 (TRAV1-2, TRAJ16)
CAVNRFQMARSRSLQG

SEQ ID NO: 689480 - protein, 15 aa, Homo sapiens
  CDR3 for beta chain variable domain of TCR clone 344740 (TRBV9, TRBJ1-6)
CASSVAGTGDSPLHF

SEQ ID NO: 689481 - protein, 16 aa, Homo sapiens
  CDR3 for alpha chain variable domain of TCR clone 344741 (TRAV26-1, TRAJ53)
CIVRVAMGGSNYKLTF

SEQ ID NO: 689482 - protein, 12 aa, Homo sapiens
  CDR3 for beta chain variable domain of TCR clone 344741 (TRBV7-9, TRBJ1-5)
CDSSPQGQHQHF

SEQ ID NO: 689483 - protein, 15 aa, Homo sapiens
  CDR3 for alpha chain variable domain of TCR clone 344742 (TRAV9-2, TRAJ10)
CALKVLTGGGNKLTF

SEQ ID NO: 689484 - protein, 16 aa, Homo sapiens
  CDR3 for beta chain variable domain of TCR clone 344742 (TRBV20-1, TRBJ2-5)
PAVLVGLAGGGETQYF

SEQ ID NO: 689485 - protein, 10 aa, Homo sapiens
  CDR3 for alpha chain variable domain of TCR clone 344743 (TRAV4, TRAJ15)
CLPFWTALIV

SEQ ID NO: 689486 - protein, 15 aa, Homo sapiens
  CDR3 for beta chain variable domain of TCR clone 344743 (TRBV5-1, TRBJ2-1)
CASSFSGTGYNEQFF

SEQ ID NO: 689487 - protein, 14 aa, Homo sapiens
  CDR3 for alpha chain variable domain of TCR clone 344744 (TRAV9-2, TRAJ39)
CALYIYNAGNMLTF

SEQ ID NO: 689488 - protein, 14 aa, Homo sapiens
  CDR3 for beta chain variable domain of TCR clone 344744 (TRBV6-1, TRBJ1-3)
CASVQGGGGYTMYF

SEQ ID NO: 689489 - protein, 14 aa, Homo sapiens
  CDR3 for alpha chain variable domain of TCR clone 344745 (TRAV14/DV4, TRAJ34)
CAMREGRPHRQAHL

SEQ ID NO: 689490 - protein, 15 aa, Homo sapiens
  CDR3 for beta chain variable domain of TCR clone 344745 (TRBV10-3, TRBJ2-1)
CAISDVQDRAYEQFF

SEQ ID NO: 689491 - protein, 19 aa, Homo sapiens
  CDR3 for alpha chain variable domain of TCR clone 344746 (TRAV26-1, TRAJ42)
CVLLHRQTYYGGSQGNLIF

SEQ ID NO: 689492 - protein, 16 aa, Homo sapiens
  CDR3 for beta chain variable domain of TCR clone 344746 (TRBV4-1, TRBJ1-1)
CASSSMSERPNTEAFF

SEQ ID NO: 689493 - protein, 13 aa, Homo sapiens
  CDR3 for alpha chain variable domain of TCR clone 344747 (TRAV21, TRAJ27)
CAARPGNAGQSTF

SEQ ID NO: 689494 - protein, 15 aa, Homo sapiens
  CDR3 for beta chain variable domain of TCR clone 344747 (TRBV7-2, TRBJ2-3)
CASSSTGLETDTQYF

SEQ ID NO: 689495 - protein, 16 aa, Homo sapiens
  CDR3 for alpha chain variable domain of TCR clone 344748 (TRAV3, TRAJ21)
CAVSDIERGNFNKFYF

SEQ ID NO: 689496 - protein, 13 aa, Homo sapiens
  CDR3 for beta chain variable domain of TCR clone 344748 (TRBV27, TRBJ2-7)
CASNLTTGYEQYF

SEQ ID NO: 689497 - protein, 13 aa, Homo sapiens
  CDR3 for alpha chain variable domain of TCR clone 344749 (TRAV13-2, TRAJ48)
CAGMDFGNDKLTF

SEQ ID NO: 689498 - protein, 15 aa, Homo sapiens
  CDR3 for beta chain variable domain of TCR clone 344749 (TRBV7-9, TRBJ1-6)
CASSSPGRGNSPLHF

SEQ ID NO: 689499 - protein, 12 aa, Homo sapiens
  CDR3 for alpha chain variable domain of TCR clone 344750 (TRAV12-3, TRAJ17)
CAMTLTGNKLTF

SEQ ID NO: 689500 - protein, 12 aa, Homo sapiens
  CDR3 for beta chain variable domain of TCR clone 344750 (TRBV11-2, TRBJ2-2)
GAISLGGGELFF

SEQ ID NO: 689501 - protein, 17 aa, Homo sapiens
  CDR3 for alpha chain variable domain of TCR clone 344751 (TRAV14/DV4, TRAJ4)
CAMREASGRGGYNKLIF

SEQ ID NO: 689502 - protein, 14 aa, Homo sapiens
  CDR3 for beta chain variable domain of TCR clone 344751 (TRBV20-1, TRBJ2-7)
CSAWTALSSYEQYF

SEQ ID NO: 689503 - protein, 13 aa, Homo sapiens
  CDR3 for alpha chain variable domain of TCR clone 344752 (TRAV13-2, TRAJ48)
CAEMDVGNEKLTF

SEQ ID NO: 689504 - protein, 13 aa, Homo sapiens
  CDR3 for beta chain variable domain of TCR clone 344752 (TRBV7-9, TRBJ1-2)
CASSLKQNYGYTF

SEQ ID NO: 689505 - protein, 17 aa, Homo sapiens
  CDR3 for alpha chain variable domain of TCR clone 344753 (TRAV3, TRAJ6)
CAVRDGPRAGGSYKPTF

SEQ ID NO: 689506 - protein, 14 aa, Homo sapiens
  CDR3 for beta chain variable domain of TCR clone 344753 (TRBV7-2, TRBJ2-7)
CASSPKTSLYEQYF

SEQ ID NO: 689507 - protein, 11 aa, Homo sapiens
  CDR3 for alpha chain variable domain of TCR clone 344754 (TRAV35, TRAJ34)
CWARNTDKLIF

SEQ ID NO: 689508 - protein, 16 aa, Homo sapiens
  CDR3 for beta chain variable domain of TCR clone 344754 (TRBV19, TRBJ1-2)
CASSKFRDTTNYGYTF

SEQ ID NO: 689509 - protein, 12 aa, Homo sapiens
  CDR3 for alpha chain variable domain of TCR clone 344755 (TRAV12-3, TRAJ17)
CAMTLTGNKLTF

SEQ ID NO: 689510 - protein, 15 aa, Homo sapiens
  CDR3 for beta chain variable domain of TCR clone 344755 (TRBV5-1, TRBJ2-5)
CASSLGTGEQETQYF

SEQ ID NO: 689511 - protein, 17 aa, Homo sapiens
  CDR3 for alpha chain variable domain of TCR clone 344756 (TRAV38-2/DV8, TRAJ23)
CALSRKLIFGQGTELSV

SEQ ID NO: 689512 - protein, 19 aa, Homo sapiens
  CDR3 for beta chain variable domain of TCR clone 344756 (TRBV25-1, TRBJ2-2)
CAILVYRVDRGRKTGELFF

SEQ ID NO: 689513 - protein, 15 aa, Homo sapiens
  CDR3 for alpha chain variable domain of TCR clone 344757 (TRAV26-1, TRAJ29)
CIVRVEGSGNTTLVF

SEQ ID NO: 689514 - protein, 15 aa, Homo sapiens
  CDR3 for beta chain variable domain of TCR clone 344757 (TRBV7-9, TRBJ1-5)
CASGQGHQPNQPQHF

SEQ ID NO: 689515 - protein, 14 aa, Homo sapiens
  CDR3 for alpha chain variable domain of TCR clone 344758 (TRAV12-3, TRAJ10)
SHLPLTGRGNKLTF

SEQ ID NO: 689516 - protein, 15 aa, Homo sapiens
  CDR3 for beta chain variable domain of TCR clone 344758 (TRBV9, TRBJ1-6)
CASSVAGTGDSPLHF

SEQ ID NO: 689517 - protein, 14 aa, Homo sapiens
  CDR3 for alpha chain variable domain of TCR clone 344759 (TRAV21, TRAJ32)
CCELLWCATNKLIF

SEQ ID NO: 689518 - protein, 18 aa, Homo sapiens
  CDR3 for beta chain variable domain of TCR clone 344759 (TRBV7-9, TRBJ2-1)
CASSTGLAEGSSYNEQFF

SEQ ID NO: 689519 - protein, 11 aa, Homo sapiens
  CDR3 for alpha chain variable domain of TCR clone 344760 (TRAV12-1, TRAJ30)
CVVNGQDKIIF

SEQ ID NO: 689520 - protein, 13 aa, Homo sapiens
  CDR3 for beta chain variable domain of TCR clone 344760 (TRBV11-2, TRBJ2-1)
CASSLDLVNEQFF

SEQ ID NO: 689521 - protein, 14 aa, Homo sapiens
  CDR3 for alpha chain variable domain of TCR clone 344761 (TRAV1-2, TRAJ15)
CAVRDRQAGTALIF

SEQ ID NO: 689522 - protein, 15 aa, Homo sapiens
  CDR3 for beta chain variable domain of TCR clone 344761 (TRBV5-5, TRBJ1-5)
CASSSTPGSNQPQHF

SEQ ID NO: 689523 - protein, 12 aa, Homo sapiens
  CDR3 for alpha chain variable domain of TCR clone 344762 (TRAV13-1, TRAJ13)
CAASPMGNQFYF

SEQ ID NO: 689524 - protein, 13 aa, Homo sapiens
  CDR3 for beta chain variable domain of TCR clone 344762 (TRBV12-4, TRBJ2-5)
CASSPGTEETQYF

SEQ ID NO: 689525 - protein, 14 aa, Homo sapiens
  CDR3 for alpha chain variable domain of TCR clone 344763 (TRAV1-2, TRAJ16)
CAVNRFSDGQKLLF

SEQ ID NO: 689526 - protein, 15 aa, Homo sapiens
  CDR3 for beta chain variable domain of TCR clone 344763 (TRBV7-8, TRBJ2-1)
CASSLAGGLYNEQFF

SEQ ID NO: 689527 - protein, 14 aa, Homo sapiens
  CDR3 for alpha chain variable domain of TCR clone 344764 (TRAV22, TRAJ6)
CAGVGPGGSYIPTF

SEQ ID NO: 689528 - protein, 14 aa, Homo sapiens
  CDR3 for beta chain variable domain of TCR clone 344764 (TRBV4-2, TRBJ1-2)
CASSQDRREGGYTF

SEQ ID NO: 689529 - protein, 11 aa, Homo sapiens
  CDR3 for alpha chain variable domain of TCR clone 344765 (TRAV1-2, TRAJ13)
CAVPPYFTFRT

SEQ ID NO: 689530 - protein, 11 aa, Homo sapiens
  CDR3 for beta chain variable domain of TCR clone 344765 (TRBV7-9, TRBJ2-3)
CASSGPDTQYF

SEQ ID NO: 689531 - protein, 14 aa, Homo sapiens
  CDR3 for alpha chain variable domain of TCR clone 344766 (TRAV16, TRAJ17)
CAPRIKAAGNKLTF

SEQ ID NO: 689532 - protein, 17 aa, Homo sapiens
  CDR3 for beta chain variable domain of TCR clone 344766 (TRBV7-2, TRBJ2-3)
FASSSYSGTRRADTQYF

SEQ ID NO: 689533 - protein, 14 aa, Homo sapiens
  CDR3 for alpha chain variable domain of TCR clone 344767 (TRAV1-2, TRAJ16)
CAVNRFSDGQKLLF

SEQ ID NO: 689534 - protein, 12 aa, Homo sapiens
  CDR3 for beta chain variable domain of TCR clone 344767 (TRBV7-6, TRBJ2-7)
CASSLEDSEQYF

SEQ ID NO: 689535 - protein, 15 aa, Homo sapiens
  CDR3 for alpha chain variable domain of TCR clone 344768 (TRAV26-1, TRAJ13)
CIVRHEAGGYQKVTF

SEQ ID NO: 689536 - protein, 13 aa, Homo sapiens
  CDR3 for beta chain variable domain of TCR clone 344768 (TRBV12-5, TRBJ2-3)
CASGDRQSDTQYF

SEQ ID NO: 689537 - protein, 13 aa, Homo sapiens
  CDR3 for alpha chain variable domain of TCR clone 344769 (TRAV38-1, TRAJ42)
CARWGGSQGNLIF

SEQ ID NO: 689538 - protein, 14 aa, Homo sapiens
  CDR3 for beta chain variable domain of TCR clone 344769 (TRBV2, TRBJ2-5)
CASSAQPSTSGQAR

SEQ ID NO: 689539 - protein, 14 aa, Homo sapiens
  CDR3 for alpha chain variable domain of TCR clone 344770 (TRAV12-1, TRAJ30)
CVVNIGNRDDKIIF

SEQ ID NO: 689540 - protein, 12 aa, Homo sapiens
  CDR3 for beta chain variable domain of TCR clone 344770 (TRBV5-4, TRBJ1-1)
CASSFGQTEAFF

SEQ ID NO: 689541 - protein, 22 aa, Homo sapiens
  CDR3 for alpha chain variable domain of TCR clone 344771 (TRAV4, )
CLGGRVKPNIQNPDPAVYKLRD

SEQ ID NO: 689542 - protein, 13 aa, Homo sapiens
  CDR3 for beta chain variable domain of TCR clone 344771 (TRBV7-9, TRBJ1-2)
CASSLKQNYGYTF

SEQ ID NO: 689543 - protein, 14 aa, Homo sapiens
  CDR3 for alpha chain variable domain of TCR clone 344772 (TRAV12-2, TRAJ13)
CAVKNTGGYQKVTF

SEQ ID NO: 689544 - protein, 15 aa, Homo sapiens
  CDR3 for beta chain variable domain of TCR clone 344772 (TRBV27, TRBJ2-1)
CASSNGGGSSNEQFL

SEQ ID NO: 689545 - protein, 13 aa, Homo sapiens
  CDR3 for alpha chain variable domain of TCR clone 344773 (TRAV35, TRAJ44)
CAGLSGTASKLTF

SEQ ID NO: 689546 - protein, 17 aa, Homo sapiens
  CDR3 for beta chain variable domain of TCR clone 344773 (TRBV7-8, TRBJ1-2)
CASSLRPLQGHLYGYPF

SEQ ID NO: 689547 - protein, 14 aa, Homo sapiens
  CDR3 for alpha chain variable domain of TCR clone 344774 (TRAV4, TRAJ17)
CLVGYMAAGNKLTF

SEQ ID NO: 689548 - protein, 14 aa, Homo sapiens
  CDR3 for beta chain variable domain of TCR clone 344774 (TRBV7-6, TRBJ2-3)
CASSLGTVTDTQYF

SEQ ID NO: 689549 - protein, 13 aa, Homo sapiens
  CDR3 for alpha chain variable domain of TCR clone 344775 (TRAV2, TRAJ13)
CASGGYQKVTFNW

SEQ ID NO: 689550 - protein, 12 aa, Homo sapiens
  CDR3 for beta chain variable domain of TCR clone 344775 (TRBV19, TRBJ1-4)
CASKDWPGGLFF

SEQ ID NO: 689551 - protein, 13 aa, Homo sapiens
  CDR3 for alpha chain variable domain of TCR clone 344776 (TRAV8-6, TRAJ37)
CAVSAGNTGKLIF

SEQ ID NO: 689552 - protein, 16 aa, Homo sapiens
  CDR3 for beta chain variable domain of TCR clone 344776 (TRBV3-1, TRBJ1-2)
CASSQGQGVQRGGYTF

SEQ ID NO: 689553 - protein, 14 aa, Homo sapiens
  CDR3 for alpha chain variable domain of TCR clone 344777 (TRAV1-2, TRAJ16)
CAVNRFSDGQKLLF

SEQ ID NO: 689554 - protein, 18 aa, Homo sapiens
  CDR3 for beta chain variable domain of TCR clone 344777 (TRBV11-3, TRBJ2-3)
CASSLGGASRGAPNTQYF

SEQ ID NO: 689555 - protein, 11 aa, Homo sapiens
  CDR3 for alpha chain variable domain of TCR clone 344778 (TRAV21, TRAJ34)
CAVTNTDNLIF

SEQ ID NO: 689556 - protein, 17 aa, Homo sapiens
  CDR3 for beta chain variable domain of TCR clone 344778 (TRBV20-1, TRBJ2-1)
CSARSPSGGPPTMSSSL

SEQ ID NO: 689557 - protein, 16 aa, Homo sapiens
  CDR3 for alpha chain variable domain of TCR clone 344779 (TRAV8-4, TRAJ45)
CAVSPQGGGGADGLTF

SEQ ID NO: 689558 - protein, 17 aa, Homo sapiens
  CDR3 for beta chain variable domain of TCR clone 344779 (TRBV4-2, TRBJ1-1)
CASTQFGGGSGNTEAFF

SEQ ID NO: 689559 - protein, 13 aa, Homo sapiens
  CDR3 for alpha chain variable domain of TCR clone 344780 (TRAV27, TRAJ49)
CAPRPYTVNQFYF

SEQ ID NO: 689560 - protein, 18 aa, Homo sapiens
  CDR3 for beta chain variable domain of TCR clone 344780 (TRBV7-3, TRBJ2-5)
CASSLGGAAQGRWETQYF

SEQ ID NO: 689561 - protein, 14 aa, Homo sapiens
  CDR3 for alpha chain variable domain of TCR clone 344781 (TRAV36/DV7, TRAJ57)
CAVGFPGGSEMLVF

SEQ ID NO: 689562 - protein, 12 aa, Homo sapiens
  CDR3 for beta chain variable domain of TCR clone 344781 (TRBV19, TRBJ2-7)
CASTSGTYEQYF

SEQ ID NO: 689563 - protein, 14 aa, Homo sapiens
  CDR3 for alpha chain variable domain of TCR clone 344782 (TRAV1-2, TRAJ16)
CAVNRFSDGQKLLF

SEQ ID NO: 689564 - protein, 16 aa, Homo sapiens
  CDR3 for beta chain variable domain of TCR clone 344782 (TRBV12-5, TRBJ2-5)
CASGPRTSGNQETQYV

SEQ ID NO: 689565 - protein, 13 aa, Homo sapiens
  CDR3 for alpha chain variable domain of TCR clone 344783 (TRAV12-2, TRAJ37)
CAGGSGNTGKLIF

SEQ ID NO: 689566 - protein, 18 aa, Homo sapiens
  CDR3 for beta chain variable domain of TCR clone 344783 (TRBV7-7, TRBJ2-1)
CASSLALTSGRSYNEQFF

SEQ ID NO: 689567 - protein, 15 aa, Homo sapiens
  CDR3 for alpha chain variable domain of TCR clone 344784 (TRAV8-3, TRAJ41)
CAVGSNSSSGYALNF

SEQ ID NO: 689568 - protein, 17 aa, Homo sapiens
  CDR3 for beta chain variable domain of TCR clone 344784 (TRBV25-1, TRBJ2-1)
CASSAYGQGRGVYEQFF

SEQ ID NO: 689569 - protein, 14 aa, Homo sapiens
  CDR3 for alpha chain variable domain of TCR clone 344785 (TRAV12-2, TRAJ13)
CAVKKTGGYQKVTF

SEQ ID NO: 689570 - protein, 14 aa, Homo sapiens
  CDR3 for beta chain variable domain of TCR clone 344785 (TRBV10-3, TRBJ2-5)
CAIKSGGQGETQYF

SEQ ID NO: 689571 - protein, 14 aa, Homo sapiens
  CDR3 for alpha chain variable domain of TCR clone 344786 (TRAV17, TRAJ35)
CATGRPGFGNVLHC

SEQ ID NO: 689572 - protein, 19 aa, Homo sapiens
  CDR3 for beta chain variable domain of TCR clone 344786 (TRBV11-3, TRBJ2-2)
CASSTRPGAKTTNTGELFC

SEQ ID NO: 689573 - protein, 15 aa, Homo sapiens
  CDR3 for alpha chain variable domain of TCR clone 344787 (TRAV8-3, TRAJ45)
CASSYSGGGADGLTF

SEQ ID NO: 689574 - protein, 15 aa, Homo sapiens
  CDR3 for beta chain variable domain of TCR clone 344787 (TRBV6-3, TRBJ2-2)
CASSFLATLTGELFL

SEQ ID NO: 689575 - protein, 13 aa, Homo sapiens
  CDR3 for alpha chain variable domain of TCR clone 344788 (TRAV21, TRAJ58)
CAVKGASGSRLTF

SEQ ID NO: 689576 - protein, 16 aa, Homo sapiens
  CDR3 for beta chain variable domain of TCR clone 344788 (TRBV7-2, TRBJ2-5)
CASSPFPTGGEETQYF

SEQ ID NO: 689577 - protein, 17 aa, Homo sapiens
  CDR3 for alpha chain variable domain of TCR clone 344789 (TRAV13-1, TRAJ28)
CAASPPYSGAGSYQLTF

SEQ ID NO: 689578 - protein, 14 aa, Homo sapiens
  CDR3 for beta chain variable domain of TCR clone 344789 (TRBV18, TRBJ2-7)
CASSPRGGAYEQYF

SEQ ID NO: 689579 - protein, 13 aa, Homo sapiens
  CDR3 for alpha chain variable domain of TCR clone 344790 (TRAV12-1, TRAJ10)
CVVSTGGGNKLTF

SEQ ID NO: 689580 - protein, 14 aa, Homo sapiens
  CDR3 for beta chain variable domain of TCR clone 344790 (TRBV7-8, TRBJ2-3)
CASSFPDGQDTQYF

SEQ ID NO: 689581 - protein, 10 aa, Homo sapiens
  CDR3 for alpha chain variable domain of TCR clone 344791 (TRAV12-2, TRAJ43)
CAVKVLSMRF

SEQ ID NO: 689582 - protein, 16 aa, Homo sapiens
  CDR3 for beta chain variable domain of TCR clone 344791 (TRBV19, TRBJ2-1)
CASSKAGPSSYDEQFF

SEQ ID NO: 689583 - protein, 13 aa, Homo sapiens
  CDR3 for alpha chain variable domain of TCR clone 344792 (TRAV8-3, TRAJ36)
CAVGATGANNRFF

SEQ ID NO: 689584 - protein, 15 aa, Homo sapiens
  CDR3 for beta chain variable domain of TCR clone 344792 (TRBV7-2, TRBJ1-2)
CASSPRAGWNDGYTF

SEQ ID NO: 689585 - protein, 14 aa, Homo sapiens
  CDR3 for alpha chain variable domain of TCR clone 344793 (TRAV12-2, TRAJ44)
CAVNPAGTASKLTF

SEQ ID NO: 689586 - protein, 15 aa, Homo sapiens
  CDR3 for beta chain variable domain of TCR clone 344793 (TRBV28, TRBJ2-7)
CASSVIQVSSYEQYF

SEQ ID NO: 689587 - protein, 16 aa, Homo sapiens
  CDR3 for alpha chain variable domain of TCR clone 344794 (TRAV3, TRAJ37)
CAVRPHGSGNTGKLIF

SEQ ID NO: 689588 - protein, 17 aa, Homo sapiens
  CDR3 for beta chain variable domain of TCR clone 344794 (TRBV5-1, TRBJ2-5)
CASSPVAMGQNQETQYF

SEQ ID NO: 689589 - protein, 12 aa, Homo sapiens
  CDR3 for alpha chain variable domain of TCR clone 344795 (TRAV12-3, TRAJ17)
CAMTLTGNKLTF

SEQ ID NO: 689590 - protein, 19 aa, Homo sapiens
  CDR3 for beta chain variable domain of TCR clone 344795 (TRBV19, TRBJ2-5)
CASSIGQVTEFFLGETQYF

SEQ ID NO: 689591 - protein, 15 aa, Homo sapiens
  CDR3 for alpha chain variable domain of TCR clone 344796 (TRAV8-4, TRAJ37)
CAVSRGSGNTGKLIV

SEQ ID NO: 689592 - protein, 16 aa, Homo sapiens
  CDR3 for beta chain variable domain of TCR clone 344796 (TRBV7-3, TRBJ2-3)
CASSLSGYRPEDTQYF

SEQ ID NO: 689593 - protein, 11 aa, Homo sapiens
  CDR3 for alpha chain variable domain of TCR clone 344797 (TRAV4, TRAJ31)
CLVGDNARLLF

SEQ ID NO: 689594 - protein, 14 aa, Homo sapiens
  CDR3 for beta chain variable domain of TCR clone 344797 (TRBV2, TRBJ1-5)
CASSEAAGGQPQHF

SEQ ID NO: 689595 - protein, 14 aa, Homo sapiens
  CDR3 for alpha chain variable domain of TCR clone 344798 (TRAV8-4, TRAJ13)
CAVTLSGGYQKVTF

SEQ ID NO: 689596 - protein, 16 aa, Homo sapiens
  CDR3 for beta chain variable domain of TCR clone 344798 (TRBV4-2, TRBJ2-5)
CASSQELVGSQETQYF

SEQ ID NO: 689597 - protein, 12 aa, Homo sapiens
  CDR3 for alpha chain variable domain of TCR clone 344799 (TRAV12-3, TRAJ17)
CAMTLTGNKLTF

SEQ ID NO: 689598 - protein, 14 aa, Homo sapiens
  CDR3 for beta chain variable domain of TCR clone 344799 (TRBV4-1, TRBJ2-3)
CASSQDWSTDAQYF

SEQ ID NO: 689599 - protein, 13 aa, Homo sapiens
  CDR3 for alpha chain variable domain of TCR clone 344800 (TRAV13-1, TRAJ39)
CSKYSNAGNMLTF

SEQ ID NO: 689600 - protein, 16 aa, Homo sapiens
  CDR3 for beta chain variable domain of TCR clone 344800 (TRBV7-2, TRBJ2-3)
CASSLVALDSTDTQYF

SEQ ID NO: 689601 - protein, 14 aa, Homo sapiens
  CDR3 for alpha chain variable domain of TCR clone 344801 (TRAV12-1, TRAJ17)
CVVNYKAAGNKLTF

SEQ ID NO: 689602 - protein, 16 aa, Homo sapiens
  CDR3 for beta chain variable domain of TCR clone 344801 (TRBV7-2, TRBJ1-6)
CASSSFESSYNSPLLF

SEQ ID NO: 689603 - protein, 16 aa, Homo sapiens
  CDR3 for alpha chain variable domain of TCR clone 344802 (TRAV26-1, TRAJ28)
CIVRPYSGAGSYQLTF

SEQ ID NO: 689604 - protein, 18 aa, Homo sapiens
  CDR3 for beta chain variable domain of TCR clone 344802 (TRBV20-1, TRBJ2-2)
CSARDFTSGSMDTGELFF

SEQ ID NO: 689605 - protein, 13 aa, Homo sapiens
  CDR3 for alpha chain variable domain of TCR clone 344803 (TRAV23/DV6, TRAJ22)
CAPWGGSARQLTV

SEQ ID NO: 689606 - protein, 14 aa, Homo sapiens
  CDR3 for beta chain variable domain of TCR clone 344803 (TRBV18, TRBJ2-7)
CASSPTSGGYEQYF

SEQ ID NO: 689607 - protein, 15 aa, Homo sapiens
  CDR3 for alpha chain variable domain of TCR clone 344804 (TRAV8-2, TRAJ24)
CVVSDRTDSWGKLQF

SEQ ID NO: 689608 - protein, 13 aa, Homo sapiens
  CDR3 for beta chain variable domain of TCR clone 344804 (TRBV19, TRBJ2-7)
CASRKAGGSEQYF

SEQ ID NO: 689609 - protein, 13 aa, Homo sapiens
  CDR3 for alpha chain variable domain of TCR clone 344805 (TRAV35, TRAJ42)
CAGFPGSQGNLIF

SEQ ID NO: 689610 - protein, 15 aa, Homo sapiens
  CDR3 for beta chain variable domain of TCR clone 344805 (TRBV27, TRBJ1-6)
CASSFDRGLGSPLHF

SEQ ID NO: 689611 - protein, 12 aa, Homo sapiens
  CDR3 for alpha chain variable domain of TCR clone 344806 (TRAV29/DV5, TRAJ49)
CAATDTGNQFSF

SEQ ID NO: 689612 - protein, 15 aa, Homo sapiens
  CDR3 for beta chain variable domain of TCR clone 344806 (TRBV7-9, TRBJ1-5)
CASSQGHQPNQPQHF

SEQ ID NO: 689613 - protein, 14 aa, Homo sapiens
  CDR3 for alpha chain variable domain of TCR clone 344807 (TRAV13-1, TRAJ10)
CAALFTGGGNKLTF

SEQ ID NO: 689614 - protein, 15 aa, Homo sapiens
  CDR3 for beta chain variable domain of TCR clone 344807 (TRBV10-3, TRBJ2-2)
CAISEEDRAAGELFF

SEQ ID NO: 689615 - protein, 17 aa, Homo sapiens
  CDR3 for alpha chain variable domain of TCR clone 344808 (TRAV8-6, TRAJ58)
CAVSSWVGETSGSRLTL

SEQ ID NO: 689616 - protein, 14 aa, Homo sapiens
  CDR3 for beta chain variable domain of TCR clone 344808 (TRBV2, TRBJ2-7)
CASRPPGGRYEQYF

SEQ ID NO: 689617 - protein, 14 aa, Homo sapiens
  CDR3 for alpha chain variable domain of TCR clone 344809 (TRAV29/DV5, TRAJ34)
CAASASRETAKPIF

SEQ ID NO: 689618 - protein, 14 aa, Homo sapiens
  CDR3 for beta chain variable domain of TCR clone 344809 (TRBV18, TRBJ2-5)
CASSPGVSQETQYF

SEQ ID NO: 689619 - protein, 14 aa, Homo sapiens
  CDR3 for alpha chain variable domain of TCR clone 344810 (TRAV27, TRAJ22)
CAGLPSGSARQMTF

SEQ ID NO: 689620 - protein, 13 aa, Homo sapiens
  CDR3 for beta chain variable domain of TCR clone 344810 (TRBV7-2, TRBJ2-7)
CASSSPSGSEQYF

SEQ ID NO: 689621 - protein, 10 aa, Homo sapiens
  CDR3 for alpha chain variable domain of TCR clone 344811 (TRAV1-2, TRAJ20)
CALNDYKLSF

SEQ ID NO: 689622 - protein, 16 aa, Homo sapiens
  CDR3 for beta chain variable domain of TCR clone 344811 (TRBV20-1, TRBJ1-1)
CSARAITQGMNTEAFF

SEQ ID NO: 689623 - protein, 14 aa, Homo sapiens
  CDR3 for alpha chain variable domain of TCR clone 344812 (TRAV20, TRAJ29)
CAVQAWVGNKPLVF

SEQ ID NO: 689624 - protein, 14 aa, Homo sapiens
  CDR3 for beta chain variable domain of TCR clone 344812 (TRBV11-2, TRBJ2-3)
CASSRLARTDTQYF

SEQ ID NO: 689625 - protein, 14 aa, Homo sapiens
  CDR3 for alpha chain variable domain of TCR clone 344813 (TRAV17, TRAJ8)
CATQSGTGFQKLVF

SEQ ID NO: 689626 - protein, 13 aa, Homo sapiens
  CDR3 for beta chain variable domain of TCR clone 344813 (TRBV11-2, TRBJ1-5)
CASSLDRNQPQHF

SEQ ID NO: 689627 - protein, 15 aa, Homo sapiens
  CDR3 for alpha chain variable domain of TCR clone 344814 (TRAV3, TRAJ5)
CAVRDLDTGRRALTF

SEQ ID NO: 689628 - protein, 13 aa, Homo sapiens
  CDR3 for beta chain variable domain of TCR clone 344814 (TRBV12-3, TRBJ2-7)
CASRPTETYEQYF

SEQ ID NO: 689629 - protein, 15 aa, Homo sapiens
  CDR3 for alpha chain variable domain of TCR clone 344815 (TRAV21, TRAJ13)
CVVRPTSGGYQKVTF

SEQ ID NO: 689630 - protein, 15 aa, Homo sapiens
  CDR3 for beta chain variable domain of TCR clone 344815 (TRBV28, TRBJ2-7)
CASSPGGRGFYEQYF

SEQ ID NO: 689631 - protein, 13 aa, Homo sapiens
  CDR3 for alpha chain variable domain of TCR clone 344816 (TRAV12-3, TRAJ29)
CAMTLSGNTPLVF

SEQ ID NO: 689632 - protein, 16 aa, Homo sapiens
  CDR3 for beta chain variable domain of TCR clone 344816 (TRBV4-1, TRBJ2-3)
CASSQSTSGAEDTQYF

SEQ ID NO: 689633 - protein, 11 aa, Homo sapiens
  CDR3 for alpha chain variable domain of TCR clone 344817 (TRAV3, TRAJ21)
CAVGNFNKFYF

SEQ ID NO: 689634 - protein, 14 aa, Homo sapiens
  CDR3 for beta chain variable domain of TCR clone 344817 (TRBV25-1, TRBJ1-1)
CASTHLGGNTEAFS

SEQ ID NO: 689635 - protein, 13 aa, Homo sapiens
  CDR3 for alpha chain variable domain of TCR clone 344818 (TRAV3, TRAJ20)
CAVRPLKDYKLSF

SEQ ID NO: 689636 - protein, 12 aa, Homo sapiens
  CDR3 for beta chain variable domain of TCR clone 344818 (TRBV6-1, TRBJ2-1)
CATYGLNNEQFF

SEQ ID NO: 689637 - protein, 15 aa, Homo sapiens
  CDR3 for alpha chain variable domain of TCR clone 344819 (TRAV35, TRAJ41)
CAGQLFSNSGYALNF

SEQ ID NO: 689638 - protein, 14 aa, Homo sapiens
  CDR3 for beta chain variable domain of TCR clone 344819 (TRBV7-2, TRBJ1-2)
CASSRGGANYGYAF

SEQ ID NO: 689639 - protein, 17 aa, Homo sapiens
  CDR3 for alpha chain variable domain of TCR clone 344820 (TRAV39, TRAJ32)
CAVDIKWVGGATHKLIL

SEQ ID NO: 689640 - protein, 11 aa, Homo sapiens
  CDR3 for beta chain variable domain of TCR clone 344820 (TRBV18, TRBJ1-2)
CASSPLNGYTF

SEQ ID NO: 689641 - protein, 14 aa, Homo sapiens
  CDR3 for alpha chain variable domain of TCR clone 344821 (TRAV12-2, TRAJ40)
CAVKIPSGTYKYIF

SEQ ID NO: 689642 - protein, 17 aa, Homo sapiens
  CDR3 for beta chain variable domain of TCR clone 344821 (TRBV13, TRBJ2-3)
CASSLSRVAGGRKTQYF

SEQ ID NO: 689643 - protein, 15 aa, Homo sapiens
  CDR3 for alpha chain variable domain of TCR clone 344822 (TRAV17, TRAJ54)
CATTRSEQGAQKLVF

SEQ ID NO: 689644 - protein, 16 aa, Homo sapiens
  CDR3 for beta chain variable domain of TCR clone 344822 (TRBV12-4, TRBJ2-3)
CASSLRRAETTDTQYF

SEQ ID NO: 689645 - protein, 16 aa, Homo sapiens
  CDR3 for alpha chain variable domain of TCR clone 344823 (TRAV12-3, TRAJ53)
CAMSVGRGGSNYKMTF

SEQ ID NO: 689646 - protein, 13 aa, Homo sapiens
  CDR3 for beta chain variable domain of TCR clone 344823 (TRBV7-6, TRBJ1-2)
CASSLVADYGYTF

SEQ ID NO: 689647 - protein, 14 aa, Homo sapiens
  CDR3 for alpha chain variable domain of TCR clone 344824 (TRAV30, TRAJ26)
CGTEIVSYGQNFVF

SEQ ID NO: 689648 - protein, 13 aa, Homo sapiens
  CDR3 for beta chain variable domain of TCR clone 344824 (TRBV4-2, TRBJ1-1)
CASSQAGNTEAFF

SEQ ID NO: 689649 - protein, 15 aa, Homo sapiens
  CDR3 for alpha chain variable domain of TCR clone 344825 (TRAV2, TRAJ13)
CATPSYSGGYQKVNF

SEQ ID NO: 689650 - protein, 14 aa, Homo sapiens
  CDR3 for beta chain variable domain of TCR clone 344825 (TRBV11-2, TRBJ2-3)
CASSRLARTDTQYF

SEQ ID NO: 689651 - protein, 15 aa, Homo sapiens
  CDR3 for alpha chain variable domain of TCR clone 344826 (TRAV8-3, TRAJ23)
CAVGDRYNQGGKLTF

SEQ ID NO: 689652 - protein, 22 aa, Homo sapiens
  CDR3 for beta chain variable domain of TCR clone 344826 (TRBV29-1, TRBJ2-5)
AVSNMSPEDSSIYLCSAGTQYF

SEQ ID NO: 689653 - protein, 11 aa, Homo sapiens
  CDR3 for alpha chain variable domain of TCR clone 344827 (TRAV16, TRAJ33)
CALHSNYQLIW

SEQ ID NO: 689654 - protein, 17 aa, Homo sapiens
  CDR3 for beta chain variable domain of TCR clone 344827 (TRBV11-2, TRBJ2-1)
CASSLYPPGVEYNEQFS

SEQ ID NO: 689655 - protein, 13 aa, Homo sapiens
  CDR3 for alpha chain variable domain of TCR clone 344828 (TRAV35, TRAJ33)
CAGLMDSDYQLIW

SEQ ID NO: 689656 - protein, 13 aa, Homo sapiens
  CDR3 for beta chain variable domain of TCR clone 344828 (TRBV10-3, TRBJ2-1)
CAISEFSGREQFF

SEQ ID NO: 689657 - protein, 11 aa, Homo sapiens
  CDR3 for alpha chain variable domain of TCR clone 344829 (TRAV35, TRAJ30)
CAGPGDDKIIF

SEQ ID NO: 689658 - protein, 13 aa, Homo sapiens
  CDR3 for beta chain variable domain of TCR clone 344829 (TRBV5-4, TRBJ1-1)
CASSVDLGTEAFF

SEQ ID NO: 689659 - protein, 16 aa, Homo sapiens
  CDR3 for alpha chain variable domain of TCR clone 344830 (TRAV12-3, TRAJ53)
CAMSPGSGGSNYKLTF

SEQ ID NO: 689660 - protein, 16 aa, Homo sapiens
  CDR3 for beta chain variable domain of TCR clone 344830 (TRBV4-2, TRBJ1-1)
CASSQAGFGMKTEAFF

SEQ ID NO: 689661 - protein, 13 aa, Homo sapiens
  CDR3 for alpha chain variable domain of TCR clone 344831 (TRAV20, TRAJ37)
CVGCSSNTGKPIF

SEQ ID NO: 689662 - protein, 11 aa, Homo sapiens
  CDR3 for beta chain variable domain of TCR clone 344831 (TRBV12-4, TRBJ2-3)
CASTATHTQYF

SEQ ID NO: 689663 - protein, 13 aa, Homo sapiens
  CDR3 for alpha chain variable domain of TCR clone 344832 (TRAV8-3, TRAJ43)
CAVVPDNNNDMRF

SEQ ID NO: 689664 - protein, 14 aa, Homo sapiens
  CDR3 for beta chain variable domain of TCR clone 344832 (TRBV19, TRBJ2-1)
CASPTFVLSGEQFF

SEQ ID NO: 689665 - protein, 13 aa, Homo sapiens
  CDR3 for alpha chain variable domain of TCR clone 344833 (TRAV26-1, TRAJ36)
CIVVGTGANNLLF

SEQ ID NO: 689666 - protein, 16 aa, Homo sapiens
  CDR3 for beta chain variable domain of TCR clone 344833 (TRBV10-3, TRBJ2-1)
CAISGVGDGGGGEQFF

SEQ ID NO: 689667 - protein, 12 aa, Homo sapiens
  CDR3 for alpha chain variable domain of TCR clone 344834 (TRAV8-1, TRAJ23)
CAVGNQGGKHIF

SEQ ID NO: 689668 - protein, 16 aa, Homo sapiens
  CDR3 for beta chain variable domain of TCR clone 344834 (TRBV7-3, TRBJ2-2)
CASSLKRGTLSGELFF

SEQ ID NO: 689669 - protein, 14 aa, Homo sapiens
  CDR3 for alpha chain variable domain of TCR clone 344835 (TRAV1-2, TRAJ8)
CAVREDTGFQKLVF

SEQ ID NO: 689670 - protein, 13 aa, Homo sapiens
  CDR3 for beta chain variable domain of TCR clone 344835 (TRBV20-1, TRBJ2-7)
CSATHTSGYEQYF

SEQ ID NO: 689671 - protein, 13 aa, Homo sapiens
  CDR3 for alpha chain variable domain of TCR clone 344836 (TRAV21, TRAJ27)
CAARLGNAGKSTF

SEQ ID NO: 689672 - protein, 14 aa, Homo sapiens
  CDR3 for beta chain variable domain of TCR clone 344836 (TRBV7-6, TRBJ2-3)
CASSLGTVTDTRYF

SEQ ID NO: 689673 - protein, 15 aa, Homo sapiens
  CDR3 for alpha chain variable domain of TCR clone 344837 (TRAV1-2, TRAJ28)
CAVQYSGAGTYQLTF

SEQ ID NO: 689674 - protein, 13 aa, Homo sapiens
  CDR3 for beta chain variable domain of TCR clone 344837 (TRBV20-1, TRBJ2-7)
CSATHTSGYEQYF

SEQ ID NO: 689675 - protein, 15 aa, Homo sapiens
  CDR3 for alpha chain variable domain of TCR clone 344838 (TRAV26-1, TRAJ29)
CIVRGGGSGNTPLVF

SEQ ID NO: 689676 - protein, 14 aa, Homo sapiens
  CDR3 for beta chain variable domain of TCR clone 344838 (TRBV18, TRBJ2-5)
CASSPGVSQETQYF

SEQ ID NO: 689677 - protein, 19 aa, Homo sapiens
  CDR3 for alpha chain variable domain of TCR clone 344839 (TRAV26-1, TRAJ22)
CIVRVSFWFCKATDLWMTP

SEQ ID NO: 689678 - protein, 15 aa, Homo sapiens
  CDR3 for beta chain variable domain of TCR clone 344839 (TRBV27, TRBJ2-1)
CASSNGGGSSNEQFF

SEQ ID NO: 689679 - protein, 11 aa, Homo sapiens
  CDR3 for alpha chain variable domain of TCR clone 344840 (TRAV30, TRAJ43)
CGTDGNNDMRF

SEQ ID NO: 689680 - protein, 17 aa, Homo sapiens
  CDR3 for beta chain variable domain of TCR clone 344840 (TRBV7-3, TRBJ2-2)
CASSLSGTSGGTGELFF

SEQ ID NO: 689681 - protein, 11 aa, Homo sapiens
  CDR3 for alpha chain variable domain of TCR clone 344841 (TRAV12-3, TRAJ27)
CAMANAGKSTF

SEQ ID NO: 689682 - protein, 13 aa, Homo sapiens
  CDR3 for beta chain variable domain of TCR clone 344841 (TRBV7-2, TRBJ2-2)
CGSSLAVTGELFF

SEQ ID NO: 689683 - protein, 14 aa, Homo sapiens
  CDR3 for alpha chain variable domain of TCR clone 344842 (TRAV1-2, TRAJ16)
CAVNRFSDGQKLLF

SEQ ID NO: 689684 - protein, 15 aa, Homo sapiens
  CDR3 for beta chain variable domain of TCR clone 344842 (TRBV7-9, TRBJ2-3)
CASSPGAGTADTQYF

SEQ ID NO: 689685 - protein, 15 aa, Homo sapiens
  CDR3 for alpha chain variable domain of TCR clone 344843 (TRAV8-4, TRAJ47)
CAVSDPEEYGNKLVF

SEQ ID NO: 689686 - protein, 15 aa, Homo sapiens
  CDR3 for beta chain variable domain of TCR clone 344843 (TRBV11-2, TRBJ2-1)
CASSLGPYSYNEQFF

SEQ ID NO: 689687 - protein, 14 aa, Homo sapiens
  CDR3 for alpha chain variable domain of TCR clone 344844 (TRAV1-2, TRAJ8)
CAVREDTGFQNLVF

SEQ ID NO: 689688 - protein, 20 aa, Homo sapiens
  CDR3 for beta chain variable domain of TCR clone 344844 (TRBV28, TRBJ2-1)
CASTPIGRSPGLAGGNEQFF

SEQ ID NO: 689689 - protein, 11 aa, Homo sapiens
  CDR3 for alpha chain variable domain of TCR clone 344845 (TRAV2, TRAJ33)
CAVDSNYQLIG

SEQ ID NO: 689690 - protein, 13 aa, Homo sapiens
  CDR3 for beta chain variable domain of TCR clone 344845 (TRBV19, TRBJ2-2)
CASSIWSTGELFF

SEQ ID NO: 689691 - protein, 15 aa, Homo sapiens
  CDR3 for alpha chain variable domain of TCR clone 344846 (TRAV20, TRAJ24)
CAVQAAPDSWGKFQF

SEQ ID NO: 689692 - protein, 14 aa, Homo sapiens
  CDR3 for beta chain variable domain of TCR clone 344846 (TRBV20-1, TRBJ1-1)
CSARDRGQGCEAFF

SEQ ID NO: 689693 - protein, 14 aa, Homo sapiens
  CDR3 for alpha chain variable domain of TCR clone 344847 (TRAV13-1, TRAJ35)
CAASKGVFGNVLHC

SEQ ID NO: 689694 - protein, 13 aa, Homo sapiens
  CDR3 for beta chain variable domain of TCR clone 344847 (TRBV7-3, TRBJ1-1)
CASSQDWRAEAFF

SEQ ID NO: 689695 - protein, 14 aa, Homo sapiens
  CDR3 for alpha chain variable domain of TCR clone 344848 (TRAV8-4, TRAJ16)
CAVSPVGRWPEAAL

SEQ ID NO: 689696 - protein, 15 aa, Homo sapiens
  CDR3 for beta chain variable domain of TCR clone 344848 (TRBV7-3, TRBJ1-6)
CDSSLGRGAGSPLHF

SEQ ID NO: 689697 - protein, 13 aa, Homo sapiens
  CDR3 for alpha chain variable domain of TCR clone 344849 (TRAV1-2, TRAJ9)
RVALNTGGFKTIF

SEQ ID NO: 689698 - protein, 16 aa, Homo sapiens
  CDR3 for beta chain variable domain of TCR clone 344849 (TRBV19, TRBJ2-3)
CASSPGAASRTDTQYF

SEQ ID NO: 689699 - protein, 13 aa, Homo sapiens
  CDR3 for alpha chain variable domain of TCR clone 344850 (TRAV13-2, TRAJ48)
CAEMDFGNEKLTF

SEQ ID NO: 689700 - protein, 15 aa, Homo sapiens
  CDR3 for beta chain variable domain of TCR clone 344850 (TRBV7-3, TRBJ2-1)
CASSQRGGALNEQFF

SEQ ID NO: 689701 - protein, 15 aa, Homo sapiens
  CDR3 for alpha chain variable domain of TCR clone 344851 (TRAV17, TRAJ57)
CATGPSQGGSEKLVF

SEQ ID NO: 689702 - protein, 13 aa, Homo sapiens
  CDR3 for beta chain variable domain of TCR clone 344851 (TRBV6-5, TRBJ2-1)
CASRGRVGNEQFF

SEQ ID NO: 689703 - protein, 14 aa, Homo sapiens
  CDR3 for alpha chain variable domain of TCR clone 344852 (TRAV1-2, TRAJ8)
CAVREDTGFQKLVF

SEQ ID NO: 689704 - protein, 14 aa, Homo sapiens
  CDR3 for beta chain variable domain of TCR clone 344852 (TRBV6-3, TRBJ2-7)
CQQSPGTVFYEQYF

SEQ ID NO: 689705 - protein, 14 aa, Homo sapiens
  CDR3 for alpha chain variable domain of TCR clone 344853 (TRAV12-2, TRAJ45)
CALPERGGADGLTF

SEQ ID NO: 689706 - protein, 16 aa, Homo sapiens
  CDR3 for beta chain variable domain of TCR clone 344853 (TRBV18, TRBJ1-5)
CASSPGNSISPSILVM

SEQ ID NO: 689707 - protein, 14 aa, Homo sapiens
  CDR3 for alpha chain variable domain of TCR clone 344854 (TRAV29/DV5, TRAJ36)
CAARRKTGANNLFF

SEQ ID NO: 689708 - protein, 17 aa, Homo sapiens
  CDR3 for beta chain variable domain of TCR clone 344854 (TRBV4-1, TRBJ1-4)
CASSQEGPRGVEEKLFF

SEQ ID NO: 689709 - protein, 15 aa, Homo sapiens
  CDR3 for alpha chain variable domain of TCR clone 344855 (TRAV26-1, TRAJ29)
CIVSVEGSGNTPLVF

SEQ ID NO: 689710 - protein, 13 aa, Homo sapiens
  CDR3 for beta chain variable domain of TCR clone 344855 (TRBV27, TRBJ1-1)
CASSLSIGAEAFF

SEQ ID NO: 689711 - protein, 15 aa, Homo sapiens
  CDR3 for alpha chain variable domain of TCR clone 344856 (TRAV3, TRAJ22)
CAVRDRGGSARPLTF

SEQ ID NO: 689712 - protein, 17 aa, Homo sapiens
  CDR3 for beta chain variable domain of TCR clone 344856 (TRBV10-1, TRBJ2-1)
CASSPQRAGGPFNEQFF

SEQ ID NO: 689713 - protein, 15 aa, Homo sapiens
  CDR3 for alpha chain variable domain of TCR clone 344857 (TRAV4, TRAJ36)
CLVSDRQTGANNLFF

SEQ ID NO: 689714 - protein, 15 aa, Homo sapiens
  CDR3 for beta chain variable domain of TCR clone 344857 (TRBV7-6, TRBJ2-1)
CAGSSLAGEGNEQFF

SEQ ID NO: 689715 - protein, 16 aa, Homo sapiens
  CDR3 for alpha chain variable domain of TCR clone 344858 (TRAV30, TRAJ24)
CGTEIVNADSWGKFQF

SEQ ID NO: 689716 - protein, 14 aa, Homo sapiens
  CDR3 for beta chain variable domain of TCR clone 344858 (TRBV12-5, TRBJ2-5)
CASGSRTHQETQYF

SEQ ID NO: 689717 - protein, 15 aa, Homo sapiens
  CDR3 for alpha chain variable domain of TCR clone 344859 (TRAV12-2, TRAJ53)
CAVNGGGGSNYKLTF

SEQ ID NO: 689718 - protein, 14 aa, Homo sapiens
  CDR3 for beta chain variable domain of TCR clone 344859 (TRBV19, TRBJ2-2)
CASSTLLRSGELFF

SEQ ID NO: 689719 - protein, 13 aa, Homo sapiens
  CDR3 for alpha chain variable domain of TCR clone 344860 (TRAV29/DV5, TRAJ34)
CAARVDNTDKLIF

SEQ ID NO: 689720 - protein, 15 aa, Homo sapiens
  CDR3 for beta chain variable domain of TCR clone 344860 (TRBV4-1, TRBJ1-4)
CASSDTGGTNEKLFF

SEQ ID NO: 689721 - protein, 13 aa, Homo sapiens
  CDR3 for alpha chain variable domain of TCR clone 344861 (TRAV8-3, TRAJ43)
CAVGPDNNNDMSF

SEQ ID NO: 689722 - protein, 13 aa, Homo sapiens
  CDR3 for beta chain variable domain of TCR clone 344861 (TRBV20-1, TRBJ1-1)
CSAPLGGGTEAFF

SEQ ID NO: 689723 - protein, 15 aa, Homo sapiens
  CDR3 for alpha chain variable domain of TCR clone 344862 (TRAV29/DV5, TRAJ24)
CAASGATDSWGKFPL

SEQ ID NO: 689724 - protein, 14 aa, Homo sapiens
  CDR3 for beta chain variable domain of TCR clone 344862 (TRBV12-5, TRBJ2-5)
CASGSRTHQETQYF

SEQ ID NO: 689725 - protein, 14 aa, Homo sapiens
  CDR3 for alpha chain variable domain of TCR clone 344863 (TRAV12-3, TRAJ58)
CAMSTETSGSRLTF

SEQ ID NO: 689726 - protein, 14 aa, Homo sapiens
  CDR3 for beta chain variable domain of TCR clone 344863 (TRBV19, TRBJ2-1)
CASSDNQGANEQFF

SEQ ID NO: 689727 - protein, 17 aa, Homo sapiens
  CDR3 for alpha chain variable domain of TCR clone 344864 (TRAV16, TRAJ42)
CLLSPKLYGGSQGNLIF

SEQ ID NO: 689728 - protein, 13 aa, Homo sapiens
  CDR3 for beta chain variable domain of TCR clone 344864 (TRBV19, TRBJ1-5)
CASSTRRDQPQHF

SEQ ID NO: 689729 - protein, 13 aa, Homo sapiens
  CDR3 for alpha chain variable domain of TCR clone 344865 (TRAV8-3, TRAJ12)
CAVGPGSSYKLIF

SEQ ID NO: 689730 - protein, 11 aa, Homo sapiens
  CDR3 for beta chain variable domain of TCR clone 344865 (TRBV29-1, TRBJ2-5)
CSEDRTGTQYF

SEQ ID NO: 689731 - protein, 16 aa, Homo sapiens
  CDR3 for alpha chain variable domain of TCR clone 344866 (TRAV17, TRAJ35)
CATAEGGIGFGNVLHC

SEQ ID NO: 689732 - protein, 14 aa, Homo sapiens
  CDR3 for beta chain variable domain of TCR clone 344866 (TRBV19, TRBJ2-7)
CASSIFSGTYEQYF

SEQ ID NO: 689733 - protein, 14 aa, Homo sapiens
  CDR3 for alpha chain variable domain of TCR clone 344867 (TRAV26-1, TRAJ48)
CIIRVGLGNEKLTF

SEQ ID NO: 689734 - protein, 13 aa, Homo sapiens
  CDR3 for beta chain variable domain of TCR clone 344867 (TRBV11-3, TRBJ2-3)
CASSHDTKDTQYF

SEQ ID NO: 689735 - protein, 11 aa, Homo sapiens
  CDR3 for alpha chain variable domain of TCR clone 344868 (TRAV12-1, TRAJ37)
CVVNTPGKLIF

SEQ ID NO: 689736 - protein, 14 aa, Homo sapiens
  CDR3 for beta chain variable domain of TCR clone 344868 (TRBV11-2, TRBJ2-3)
CASSRLARTDTQYF

SEQ ID NO: 689737 - protein, 14 aa, Homo sapiens
  CDR3 for alpha chain variable domain of TCR clone 344869 (TRAV14/DV4, TRAJ42)
CPRGSLRSQGNLIF

SEQ ID NO: 689738 - protein, 12 aa, Homo sapiens
  CDR3 for beta chain variable domain of TCR clone 344869 (TRBV27, TRBJ2-2)
CASKLFAGELFF

SEQ ID NO: 689739 - protein, 14 aa, Homo sapiens
  CDR3 for alpha chain variable domain of TCR clone 344870 (TRAV3, TRAJ30)
CAVRDIGRDDKIIL

SEQ ID NO: 689740 - protein, 15 aa, Homo sapiens
  CDR3 for beta chain variable domain of TCR clone 344870 (TRBV10-3, TRBJ1-1)
CAISEAGTGGTEAFF

SEQ ID NO: 689741 - protein, 15 aa, Homo sapiens
  CDR3 for alpha chain variable domain of TCR clone 344871 (TRAV26-2, TRAJ50)
CILRDEETSYDKVIF

SEQ ID NO: 689742 - protein, 16 aa, Homo sapiens
  CDR3 for beta chain variable domain of TCR clone 344871 (TRBV9, TRBJ2-1)
CASSGGGGGSYNEQFF

SEQ ID NO: 689743 - protein, 15 aa, Homo sapiens
  CDR3 for alpha chain variable domain of TCR clone 344872 (TRAV2, TRAJ9)
CAVEDRGTGGFKTIF

SEQ ID NO: 689744 - protein, 14 aa, Homo sapiens
  CDR3 for beta chain variable domain of TCR clone 344872 (TRBV7-3, TRBJ1-1)
CASSLKGGNTEAFF

SEQ ID NO: 689745 - protein, 14 aa, Homo sapiens
  CDR3 for alpha chain variable domain of TCR clone 344873 (TRAV8-4, TRAJ15)
CAVTIREAGTALIF

SEQ ID NO: 689746 - protein, 13 aa, Homo sapiens
  CDR3 for beta chain variable domain of TCR clone 344873 (TRBV7-9, TRBJ1-2)
CASSLKQNYGYTF

SEQ ID NO: 689747 - protein, 11 aa, Homo sapiens
  CDR3 for alpha chain variable domain of TCR clone 344874 (TRAV12-1, TRAJ34)
CVVNKGREIIF

SEQ ID NO: 689748 - protein, 12 aa, Homo sapiens
  CDR3 for beta chain variable domain of TCR clone 344874 (TRBV2, TRBJ2-1)
CAYGPPGNEQFF

SEQ ID NO: 689749 - protein, 16 aa, Homo sapiens
  CDR3 for alpha chain variable domain of TCR clone 344875 (TRAV30, TRAJ24)
CGTEIVDADSWGKFQL

SEQ ID NO: 689750 - protein, 15 aa, Homo sapiens
  CDR3 for beta chain variable domain of TCR clone 344875 (TRBV12-4, TRBJ2-5)
CASSPPTGLQETQYF

SEQ ID NO: 689751 - protein, 13 aa, Homo sapiens
  CDR3 for alpha chain variable domain of TCR clone 344876 (TRAV29/DV5, TRAJ31)
CAASRNNNARLMF

SEQ ID NO: 689752 - protein, 13 aa, Homo sapiens
  CDR3 for beta chain variable domain of TCR clone 344876 (TRBV27, TRBJ2-7)
CASSFSQGYEQYF

SEQ ID NO: 689753 - protein, 11 aa, Homo sapiens
  CDR3 for alpha chain variable domain of TCR clone 344877 (TRAV35, TRAJ30)
CAGPGDDKIIF

SEQ ID NO: 689754 - protein, 14 aa, Homo sapiens
  CDR3 for beta chain variable domain of TCR clone 344877 (TRBV7-6, TRBJ1-6)
CASSRAGGGSPLHF

SEQ ID NO: 689755 - protein, 12 aa, Homo sapiens
  CDR3 for alpha chain variable domain of TCR clone 344878 (TRAV12-3, TRAJ17)
CAMTLTGNKLTF

SEQ ID NO: 689756 - protein, 16 aa, Homo sapiens
  CDR3 for beta chain variable domain of TCR clone 344878 (TRBV7-3, TRBJ2-1)
CASSLEGYGSYNEQFF

SEQ ID NO: 689757 - protein, 15 aa, Homo sapiens
  CDR3 for alpha chain variable domain of TCR clone 344879 (TRAV26-1, TRAJ29)
CIVRVEGSGETPLVF

SEQ ID NO: 689758 - protein, 15 aa, Homo sapiens
  CDR3 for beta chain variable domain of TCR clone 344879 (TRBV7-9, TRBJ1-5)
CASSQGHQPNQPQHF

SEQ ID NO: 689759 - protein, 13 aa, Homo sapiens
  CDR3 for alpha chain variable domain of TCR clone 344880 (TRAV8-3, TRAJ21)
CAVVAYNFNKFYF

SEQ ID NO: 689760 - protein, 16 aa, Homo sapiens
  CDR3 for beta chain variable domain of TCR clone 344880 (TRBV19, TRBJ2-1)
CASSMGGGSSYNEQFF

SEQ ID NO: 689761 - protein, 14 aa, Homo sapiens
  CDR3 for alpha chain variable domain of TCR clone 344881 (TRAV1-1, TRAJ27)
CAVIYNTNAGKSTF

SEQ ID NO: 689762 - protein, 15 aa, Homo sapiens
  CDR3 for beta chain variable domain of TCR clone 344881 (TRBV7-2, TRBJ2-1)
CASSAGLAGGNEQLF

SEQ ID NO: 689763 - protein, 14 aa, Homo sapiens
  CDR3 for alpha chain variable domain of TCR clone 344882 (TRAV12-3, TRAJ57)
CARALEGGSEKLVF

SEQ ID NO: 689764 - protein, 13 aa, Homo sapiens
  CDR3 for beta chain variable domain of TCR clone 344882 (TRBV12-4, TRBJ1-2)
CASSSGSKDGYTF

SEQ ID NO: 689765 - protein, 13 aa, Homo sapiens
  CDR3 for alpha chain variable domain of TCR clone 344883 (TRAV12-2, TRAJ52)
CAVSGTSYGKLTF

SEQ ID NO: 689766 - protein, 15 aa, Homo sapiens
  CDR3 for beta chain variable domain of TCR clone 344883 (TRBV12-4, TRBJ2-5)
CASSPPTGLQETQYF

SEQ ID NO: 689767 - protein, 13 aa, Homo sapiens
  CDR3 for alpha chain variable domain of TCR clone 344884 (TRAV13-1, TRAJ49)
CAAPDYPVTSSIL

SEQ ID NO: 689768 - protein, 15 aa, Homo sapiens
  CDR3 for beta chain variable domain of TCR clone 344884 (TRBV6-3, TRBJ1-1)
CASSYSSVGQRLAFF

SEQ ID NO: 689769 - protein, 12 aa, Homo sapiens
  CDR3 for alpha chain variable domain of TCR clone 344885 (TRAV12-2, TRAJ10)
WGVTGGGNKLTF

SEQ ID NO: 689770 - protein, 16 aa, Homo sapiens
  CDR3 for beta chain variable domain of TCR clone 344885 (TRBV6-4, TRBJ1-2)
CASSEAVGDLNYGYTF

SEQ ID NO: 689771 - protein, 13 aa, Homo sapiens
  CDR3 for alpha chain variable domain of TCR clone 344886 (TRAV8-3, TRAJ43)
CAVVPYNNNDMRF

SEQ ID NO: 689772 - protein, 17 aa, Homo sapiens
  CDR3 for beta chain variable domain of TCR clone 344886 (TRBV7-7, TRBJ1-1)
FASIGDRPNLGVTEAFF

SEQ ID NO: 689773 - protein, 16 aa, Homo sapiens
  CDR3 for alpha chain variable domain of TCR clone 344887 (TRAV3, TRAJ10)
CAVRDMREGGGNKLTF

SEQ ID NO: 689774 - protein, 14 aa, Homo sapiens
  CDR3 for beta chain variable domain of TCR clone 344887 (TRBV7-8, TRBJ2-3)
CASSLEAGTDTQYF

SEQ ID NO: 689775 - protein, 18 aa, Homo sapiens
  CDR3 for alpha chain variable domain of TCR clone 344888 (TRAV29/DV5, TRAJ52)
CAACFRGAGGTSYGKLTF

SEQ ID NO: 689776 - protein, 16 aa, Homo sapiens
  CDR3 for beta chain variable domain of TCR clone 344888 (TRBV7-3, TRBJ2-2)
CASSLKRGTLSGELFF

SEQ ID NO: 689777 - protein, 13 aa, Homo sapiens
  CDR3 for alpha chain variable domain of TCR clone 344889 (TRAV13-2, TRAJ8)
CAFMNTGFQKLVF

SEQ ID NO: 689778 - protein, 14 aa, Homo sapiens
  CDR3 for beta chain variable domain of TCR clone 344889 (TRBV19, TRBJ2-3)
CRWGHERPNDTQYF

SEQ ID NO: 689779 - protein, 14 aa, Homo sapiens
  CDR3 for alpha chain variable domain of TCR clone 344890 (TRAV1-2, TRAJ8)
CAVREDTGFQKLVF

SEQ ID NO: 689780 - protein, 12 aa, Homo sapiens
  CDR3 for beta chain variable domain of TCR clone 344890 (TRBV5-1, TRBJ1-1)
CASSLTGAEAFF

SEQ ID NO: 689781 - protein, 16 aa, Homo sapiens
  CDR3 for alpha chain variable domain of TCR clone 344891 (TRAV12-3, TRAJ53)
CAMSPGSGGSNYKLTF

SEQ ID NO: 689782 - protein, 15 aa, Homo sapiens
  CDR3 for beta chain variable domain of TCR clone 344891 (TRBV25-1, TRBJ1-4)
CAGSKRIATNEKLFF

SEQ ID NO: 689783 - protein, 15 aa, Homo sapiens
  CDR3 for alpha chain variable domain of TCR clone 344892 (TRAV12-1, TRAJ10)
CVVNKLTGGGNKLTF

SEQ ID NO: 689784 - protein, 17 aa, Homo sapiens
  CDR3 for beta chain variable domain of TCR clone 344892 (TRBV5-1, TRBJ1-6)
GASSPSLQGSDNSPLHF

SEQ ID NO: 689785 - protein, 19 aa, Homo sapiens
  CDR3 for alpha chain variable domain of TCR clone 344893 (TRAV2, TRAJ20)
ILQVREADAAVYRDCKLSF

SEQ ID NO: 689786 - protein, 14 aa, Homo sapiens
  CDR3 for beta chain variable domain of TCR clone 344893 (TRBV7-3, TRBJ2-2)
CASSSGGYTGELFF

SEQ ID NO: 689787 - protein, 15 aa, Homo sapiens
  CDR3 for alpha chain variable domain of TCR clone 344894 (TRAV3, TRAJ5)
CAVRDLDTGRRALTF

SEQ ID NO: 689788 - protein, 14 aa, Homo sapiens
  CDR3 for beta chain variable domain of TCR clone 344894 (TRBV12-4, TRBJ2-7)
CASSPTETYEQYFG

SEQ ID NO: 689789 - protein, 15 aa, Homo sapiens
  CDR3 for alpha chain variable domain of TCR clone 344895 (TRAV20, TRAJ53)
CAVQASGGSYYKLTF

SEQ ID NO: 689790 - protein, 12 aa, Homo sapiens
  CDR3 for beta chain variable domain of TCR clone 344895 (TRBV7-8, TRBJ2-7)
CASSLGDREQYF

SEQ ID NO: 689791 - protein, 13 aa, Homo sapiens
  CDR3 for alpha chain variable domain of TCR clone 344896 (TRAV29/DV5, TRAJ31)
CAASRNNNSRLMF

SEQ ID NO: 689792 - protein, 12 aa, Homo sapiens
  CDR3 for beta chain variable domain of TCR clone 344896 (TRBV14, TRBJ2-5)
CASSQLKETQYF

SEQ ID NO: 689793 - protein, 16 aa, Homo sapiens
  CDR3 for alpha chain variable domain of TCR clone 344897 (TRAV8-3, TRAJ44)
CAVGTLMTGTASKLTF

SEQ ID NO: 689794 - protein, 13 aa, Homo sapiens
  CDR3 for beta chain variable domain of TCR clone 344897 (TRBV11-2, TRBJ2-1)
CASSLRLTHGQFV

SEQ ID NO: 689795 - protein, 12 aa, Homo sapiens
  CDR3 for alpha chain variable domain of TCR clone 344898 (TRAV12-3, TRAJ3)
CAIDSSASKIIC

SEQ ID NO: 689796 - protein, 17 aa, Homo sapiens
  CDR3 for beta chain variable domain of TCR clone 344898 (TRBV7-9, TRBJ2-3)
CASSLEEAGAYPDTQYF

SEQ ID NO: 689797 - protein, 13 aa, Homo sapiens
  CDR3 for alpha chain variable domain of TCR clone 344899 (TRAV20, TRAJ37)
CAGCSSNTGQLIF

SEQ ID NO: 689798 - protein, 15 aa, Homo sapiens
  CDR3 for beta chain variable domain of TCR clone 344899 (TRBV7-2, TRBJ2-1)
CASSFQADEYNEQFF

SEQ ID NO: 689799 - protein, 14 aa, Homo sapiens
  CDR3 for alpha chain variable domain of TCR clone 344900 (TRAV12-3, TRAJ30)
CAMSLLNRDDKTIF

SEQ ID NO: 689800 - protein, 12 aa, Homo sapiens
  CDR3 for beta chain variable domain of TCR clone 344900 (TRBV11-2, TRBJ2-2)
CASSLGGGELFF

SEQ ID NO: 689801 - protein, 12 aa, Homo sapiens
  CDR3 for alpha chain variable domain of TCR clone 344901 (TRAV38-2/DV8, TRAJ47)
CVLMEYGNKLVF

SEQ ID NO: 689802 - protein, 14 aa, Homo sapiens
  CDR3 for beta chain variable domain of TCR clone 344901 (TRBV20-1, TRBJ1-5)
CRATDRGSNQPQHF

SEQ ID NO: 689803 - protein, 13 aa, Homo sapiens
  CDR3 for alpha chain variable domain of TCR clone 344902 (TRAV2, TRAJ21)
CAVEDLNFNKFYF

SEQ ID NO: 689804 - protein, 18 aa, Homo sapiens
  CDR3 for beta chain variable domain of TCR clone 344902 (TRBV20-1, TRBJ2-3)
CSASGLAGGPGTTDTQYF

SEQ ID NO: 689805 - protein, 13 aa, Homo sapiens
  CDR3 for alpha chain variable domain of TCR clone 344903 (TRAV1-2, TRAJ9)
CAALNTGGFKTIF

SEQ ID NO: 689806 - protein, 14 aa, Homo sapiens
  CDR3 for beta chain variable domain of TCR clone 344903 (TRBV10-3, TRBJ1-1)
CAISDGSGVTEAFF

SEQ ID NO: 689807 - protein, 15 aa, Homo sapiens
  CDR3 for alpha chain variable domain of TCR clone 344904 (TRAV17, TRAJ38)
CATVLNAGNNRKLIW

SEQ ID NO: 689808 - protein, 14 aa, Homo sapiens
  CDR3 for beta chain variable domain of TCR clone 344904 (TRBV7-6, TRBJ2-3)
CASSLGTVTDTQYF

SEQ ID NO: 689809 - protein, 13 aa, Homo sapiens
  CDR3 for alpha chain variable domain of TCR clone 344905 (TRAV12-2, TRAJ50)
CAVIVPSYDKVIF

SEQ ID NO: 689810 - protein, 14 aa, Homo sapiens
  CDR3 for beta chain variable domain of TCR clone 344905 (TRBV7-2, TRBJ1-1)
CASSFLTGTTEAFF

SEQ ID NO: 689811 - protein, 11 aa, Homo sapiens
  CDR3 for alpha chain variable domain of TCR clone 344906 (TRAV1-2, TRAJ20)
CAVANDYKPSF

SEQ ID NO: 689812 - protein, 18 aa, Homo sapiens
  CDR3 for beta chain variable domain of TCR clone 344906 (TRBV20-1, TRBJ2-6)
CSAETTTTHGSGANVLTF

SEQ ID NO: 689813 - protein, 17 aa, Homo sapiens
  CDR3 for alpha chain variable domain of TCR clone 344907 (TRAV16, TRAJ42)
CALSPELYGGSQGNLIF

SEQ ID NO: 689814 - protein, 13 aa, Homo sapiens
  CDR3 for beta chain variable domain of TCR clone 344907 (TRBV19, TRBJ1-5)
CASSTRRDQPQHF

SEQ ID NO: 689815 - protein, 15 aa, Homo sapiens
  CDR3 for alpha chain variable domain of TCR clone 344908 (TRAV13-1, TRAJ17)
CAASIERAAGNKLTF

SEQ ID NO: 689816 - protein, 15 aa, Homo sapiens
  CDR3 for beta chain variable domain of TCR clone 344908 (TRBV5-1, TRBJ2-1)
CASSPPRAPYNEQFF

SEQ ID NO: 689817 - protein, 15 aa, Homo sapiens
  CDR3 for alpha chain variable domain of TCR clone 344909 (TRAV8-3, TRAJ23)
CAVGDRYNQGGKLIF

SEQ ID NO: 689818 - protein, 17 aa, Homo sapiens
  CDR3 for beta chain variable domain of TCR clone 344909 (TRBV4-1, TRBJ1-4)
CASGQEGPRGVEEKLFF

SEQ ID NO: 689819 - protein, 14 aa, Homo sapiens
  CDR3 for alpha chain variable domain of TCR clone 344910 (TRAV12-2, TRAJ13)
CAVNKTGGYQKVTF

SEQ ID NO: 689820 - protein, 12 aa, Homo sapiens
  CDR3 for beta chain variable domain of TCR clone 344910 (TRBV29-1, TRBJ1-1)
CSESDGNTEAFF

SEQ ID NO: 689821 - protein, 12 aa, Homo sapiens
  CDR3 for alpha chain variable domain of TCR clone 344911 (TRAV3, TRAJ20)
CAVRDPDYKLSF

SEQ ID NO: 689822 - protein, 14 aa, Homo sapiens
  CDR3 for beta chain variable domain of TCR clone 344911 (TRBV7-2, TRBJ1-5)
CASSTQGAGQPQHF

SEQ ID NO: 689823 - protein, 12 aa, Homo sapiens
  CDR3 for alpha chain variable domain of TCR clone 344912 (TRAV17, TRAJ4)
CATDGGYNKLIF

SEQ ID NO: 689824 - protein, 13 aa, Homo sapiens
  CDR3 for beta chain variable domain of TCR clone 344912 (TRBV5-1, TRBJ2-1)
CASSLGSYNEQFF

SEQ ID NO: 689825 - protein, 11 aa, Homo sapiens
  CDR3 for alpha chain variable domain of TCR clone 344913 (TRAV16, TRAJ34)
CALYNTDKLIF

SEQ ID NO: 689826 - protein, 13 aa, Homo sapiens
  CDR3 for beta chain variable domain of TCR clone 344913 (TRBV25-1, TRBJ1-1)
RASSGQVRAEAFF

SEQ ID NO: 689827 - protein, 14 aa, Homo sapiens
  CDR3 for alpha chain variable domain of TCR clone 344914 (TRAV9-2, TRAJ39)
CALYIYNAGNMLTF

SEQ ID NO: 689828 - protein, 15 aa, Homo sapiens
  CDR3 for beta chain variable domain of TCR clone 344914 (TRBV27, TRBJ1-6)
CASGFDRGLGSPLHF

SEQ ID NO: 689829 - protein, 12 aa, Homo sapiens
  CDR3 for alpha chain variable domain of TCR clone 344915 (TRAV21, TRAJ33)
CAVPNSNYQLIW

SEQ ID NO: 689830 - protein, 14 aa, Homo sapiens
  CDR3 for beta chain variable domain of TCR clone 344915 (TRBV18, TRBJ2-5)
CASSPGVSQETQYF

SEQ ID NO: 689831 - protein, 15 aa, Homo sapiens
  CDR3 for alpha chain variable domain of TCR clone 344916 (TRAV8-3, TRAJ11)
CAVGLLNSGYSTLTF

SEQ ID NO: 689832 - protein, 17 aa, Homo sapiens
  CDR3 for beta chain variable domain of TCR clone 344916 (TRBV20-1, TRBJ2-1)
CSASSSGLAGSYSEQFF

SEQ ID NO: 689833 - protein, 14 aa, Homo sapiens
  CDR3 for alpha chain variable domain of TCR clone 344917 (TRAV26-1, TRAJ39)
CIVRGSRAGNMLTF

SEQ ID NO: 689834 - protein, 17 aa, Homo sapiens
  CDR3 for beta chain variable domain of TCR clone 344917 (TRBV7-9, TRBJ1-5)
CASSQGHQPNQPRHLVM

SEQ ID NO: 689835 - protein, 11 aa, Homo sapiens
  CDR3 for alpha chain variable domain of TCR clone 344918 (TRAV8-6, TRAJ23)
CAVISGGKLSS

SEQ ID NO: 689836 - protein, 14 aa, Homo sapiens
  CDR3 for beta chain variable domain of TCR clone 344918 (TRBV12-5, TRBJ2-5)
CASGSRTHQETQYF

SEQ ID NO: 689837 - protein, 12 aa, Homo sapiens
  CDR3 for alpha chain variable domain of TCR clone 344919 (TRAV27, TRAJ42)
CAGGGSQGNHIF

SEQ ID NO: 689838 - protein, 13 aa, Homo sapiens
  CDR3 for beta chain variable domain of TCR clone 344919 (TRBV19, TRBJ2-7)
CASSIRSSYEQYF

SEQ ID NO: 689839 - protein, 13 aa, Homo sapiens
  CDR3 for alpha chain variable domain of TCR clone 344920 (TRAV12-2, TRAJ52)
CAVSGTSYGKLTL

SEQ ID NO: 689840 - protein, 14 aa, Homo sapiens
  CDR3 for beta chain variable domain of TCR clone 344920 (TRBV11-2, TRBJ1-5)
CASSLDRGRQPQHF

SEQ ID NO: 689841 - protein, 11 aa, Homo sapiens
  CDR3 for alpha chain variable domain of TCR clone 344921 (TRAV29/DV5, TRAJ47)
CAAERGNKLVF

SEQ ID NO: 689842 - protein, 12 aa, Homo sapiens
  CDR3 for beta chain variable domain of TCR clone 344921 (TRBV11-2, TRBJ2-7)
CASSLPTYEQYF

SEQ ID NO: 689843 - protein, 11 aa, Homo sapiens
  CDR3 for alpha chain variable domain of TCR clone 344922 (TRAV21, TRAJ34)
CAMTNTDKLIF

SEQ ID NO: 689844 - protein, 16 aa, Homo sapiens
  CDR3 for beta chain variable domain of TCR clone 344922 (TRBV18, TRBJ1-1)
CASSPGVGGRGGEAFF

SEQ ID NO: 689845 - protein, 14 aa, Homo sapiens
  CDR3 for alpha chain variable domain of TCR clone 344923 (TRAV13-1, TRAJ48)
CAASTDFGNEKLPF

SEQ ID NO: 689846 - protein, 14 aa, Homo sapiens
  CDR3 for beta chain variable domain of TCR clone 344923 (TRBV10-3, TRBJ2-5)
CATKGGNNQETQYF

SEQ ID NO: 689847 - protein, 12 aa, Homo sapiens
  CDR3 for alpha chain variable domain of TCR clone 344924 (TRAV21, TRAJ8)
CAVDTGFPRLVF

SEQ ID NO: 689848 - protein, 13 aa, Homo sapiens
  CDR3 for beta chain variable domain of TCR clone 344924 (TRBV6-3, TRBJ2-1)
CASSYDNYNEQFF

SEQ ID NO: 689849 - protein, 16 aa, Homo sapiens
  CDR3 for alpha chain variable domain of TCR clone 344925 (TRAV3, TRAJ37)
CAVRPHGSGNTGKLIF

SEQ ID NO: 689850 - protein, 15 aa, Homo sapiens
  CDR3 for beta chain variable domain of TCR clone 344925 (TRBV9, TRBJ2-1)
CASSLAGSSYNEQFF

SEQ ID NO: 689851 - protein, 12 aa, Homo sapiens
  CDR3 for alpha chain variable domain of TCR clone 344926 (TRAV2, TRAJ9)
CAVGAGGFKTIF

SEQ ID NO: 689852 - protein, 15 aa, Homo sapiens
  CDR3 for beta chain variable domain of TCR clone 344926 (TRBV15, TRBJ2-7)
CATSRGVTPTYEQYF

SEQ ID NO: 689853 - protein, 16 aa, Homo sapiens
  CDR3 for alpha chain variable domain of TCR clone 344927 (TRAV14/DV4, TRAJ54)
CAMREGRIQGAQQLVF

SEQ ID NO: 689854 - protein, 13 aa, Homo sapiens
  CDR3 for beta chain variable domain of TCR clone 344927 (TRBV4-2, TRBJ1-1)
CASSQAGNTEAFF

SEQ ID NO: 689855 - protein, 16 aa, Homo sapiens
  CDR3 for alpha chain variable domain of TCR clone 344928 (TRAV30, TRAJ24)
CGTDIVDADSWGKFQF

SEQ ID NO: 689856 - protein, 14 aa, Homo sapiens
  CDR3 for beta chain variable domain of TCR clone 344928 (TRBV13, TRBJ2-1)
CASSPRPRYNEQFF

SEQ ID NO: 689857 - protein, 13 aa, Homo sapiens
  CDR3 for alpha chain variable domain of TCR clone 344929 (TRAV36/DV7, TRAJ54)
CAVLIQGAQKLVS

SEQ ID NO: 689858 - protein, 13 aa, Homo sapiens
  CDR3 for beta chain variable domain of TCR clone 344929 (TRBV29-1, TRBJ2-4)
CSLGEGTKNIQYF

SEQ ID NO: 689859 - protein, 14 aa, Homo sapiens
  CDR3 for alpha chain variable domain of TCR clone 344930 (TRAV8-1, TRAJ13)
CAVKSSGGYQKVTF

SEQ ID NO: 689860 - protein, 18 aa, Homo sapiens
  CDR3 for beta chain variable domain of TCR clone 344930 (TRBV20-1, TRBJ2-6)
CSARTLAGGPSGANVLTF

SEQ ID NO: 689861 - protein, 14 aa, Homo sapiens
  CDR3 for alpha chain variable domain of TCR clone 344931 (TRAV12-2, TRAJ36)
CAVKISTGANNLFF

SEQ ID NO: 689862 - protein, 16 aa, Homo sapiens
  CDR3 for beta chain variable domain of TCR clone 344931 (TRBV19, TRBJ2-1)
CASSKAGPSSYNEQFF

SEQ ID NO: 689863 - protein, 12 aa, Homo sapiens
  CDR3 for alpha chain variable domain of TCR clone 344932 (TRAV2, TRAJ31)
CAVEDNNARLMF

SEQ ID NO: 689864 - protein, 11 aa, Homo sapiens
  CDR3 for beta chain variable domain of TCR clone 344932 (TRBV11-2, TRBJ2-2)
CASSLPGELFF

SEQ ID NO: 689865 - protein, 10 aa, Homo sapiens
  CDR3 for alpha chain variable domain of TCR clone 344933 (TRAV12-3, TRAJ4)
CAMTGAGTRL

SEQ ID NO: 689866 - protein, 14 aa, Homo sapiens
  CDR3 for beta chain variable domain of TCR clone 344933 (TRBV10-3, TRBJ1-1)
CAISDTGRGVEAFF

SEQ ID NO: 689867 - protein, 14 aa, Homo sapiens
  CDR3 for alpha chain variable domain of TCR clone 344934 (TRAV17, TRAJ57)
CATDPQGGSEKLVF

SEQ ID NO: 689868 - protein, 13 aa, Homo sapiens
  CDR3 for beta chain variable domain of TCR clone 344934 (TRBV7-7, TRBJ1-1)
CASSLGANTEAFF

SEQ ID NO: 689869 - protein, 15 aa, Homo sapiens
  CDR3 for alpha chain variable domain of TCR clone 344935 (TRAV1-2, TRAJ10)
CAVRGFTGGGNKLTF

SEQ ID NO: 689870 - protein, 14 aa, Homo sapiens
  CDR3 for beta chain variable domain of TCR clone 344935 (TRBV11-2, TRBJ2-5)
CASSRTGGIETQYF

SEQ ID NO: 689871 - protein, 13 aa, Homo sapiens
  CDR3 for alpha chain variable domain of TCR clone 344936 (TRAV8-3, TRAJ28)
CAVGAVGSYQLTF

SEQ ID NO: 689872 - protein, 13 aa, Homo sapiens
  CDR3 for beta chain variable domain of TCR clone 344936 (TRBV7-3, TRBJ2-5)
CASSIGFFETQYF

SEQ ID NO: 689873 - protein, 15 aa, Homo sapiens
  CDR3 for alpha chain variable domain of TCR clone 344937 (TRAV27, TRAJ38)
CAARRNAGNNRKLMW

SEQ ID NO: 689874 - protein, 13 aa, Homo sapiens
  CDR3 for beta chain variable domain of TCR clone 344937 (TRBV7-9, TRBJ1-2)
CASSPRGLSNTMA

SEQ ID NO: 689875 - protein, 15 aa, Homo sapiens
  CDR3 for alpha chain variable domain of TCR clone 344938 (TRAV25, TRAJ53)
CPTSSSGGSKYKLTF

SEQ ID NO: 689876 - protein, 14 aa, Homo sapiens
  CDR3 for beta chain variable domain of TCR clone 344938 (TRBV11-2, TRBJ2-3)
CASSRLARTDTQYF

SEQ ID NO: 689877 - protein, 13 aa, Homo sapiens
  CDR3 for alpha chain variable domain of TCR clone 344939 (TRAV6, TRAJ31)
YWARLMFGDGTQL

SEQ ID NO: 689878 - protein, 15 aa, Homo sapiens
  CDR3 for beta chain variable domain of TCR clone 344939 (TRBV28, TRBJ2-1)
CASSIIAGGRSEQFF

SEQ ID NO: 689879 - protein, 13 aa, Homo sapiens
  CDR3 for alpha chain variable domain of TCR clone 344940 (TRAV13-1, TRAJ40)
CAAISPGTYKYIF

SEQ ID NO: 689880 - protein, 15 aa, Homo sapiens
  CDR3 for beta chain variable domain of TCR clone 344940 (TRBV2, TRBJ2-5)
CASTRDGGPQETQYF

SEQ ID NO: 689881 - protein, 14 aa, Homo sapiens
  CDR3 for alpha chain variable domain of TCR clone 344941 (TRAV12-2, TRAJ40)
CAVKIPSGTYKYVF

SEQ ID NO: 689882 - protein, 14 aa, Homo sapiens
  CDR3 for beta chain variable domain of TCR clone 344941 (TRBV20-1, TRBJ1-1)
CSAQTRVGGTEAFF

SEQ ID NO: 689883 - protein, 23 aa, Homo sapiens
  CDR3 for alpha chain variable domain of TCR clone 344942 (TRAV30, TRAJ43)
GLPAQLLRNLLLGTEERGNDMRF

SEQ ID NO: 689884 - protein, 13 aa, Homo sapiens
  CDR3 for beta chain variable domain of TCR clone 344942 (TRBV27, TRBJ2-7)
CASSFSQGYEQYF

SEQ ID NO: 689885 - protein, 15 aa, Homo sapiens
  CDR3 for alpha chain variable domain of TCR clone 344943 (TRAV17, TRAJ57)
CATGPSQGGSEKLVF

SEQ ID NO: 689886 - protein, 14 aa, Homo sapiens
  CDR3 for beta chain variable domain of TCR clone 344943 (TRBV11-2, TRBJ2-5)
CASSRTGGIETQYF

SEQ ID NO: 689887 - protein, 14 aa, Homo sapiens
  CDR3 for alpha chain variable domain of TCR clone 344944 (TRAV3, TRAJ34)
CAVRAPGNTDKLIF

SEQ ID NO: 689888 - protein, 15 aa, Homo sapiens
  CDR3 for beta chain variable domain of TCR clone 344944 (TRBV11-2, TRBJ1-2)
CASSLTGSVSYGYTF

SEQ ID NO: 689889 - protein, 16 aa, Homo sapiens
  CDR3 for alpha chain variable domain of TCR clone 344945 (TRAV3, TRAJ37)
CAVRGKGSGNTGKPIF

SEQ ID NO: 689890 - protein, 13 aa, Homo sapiens
  CDR3 for beta chain variable domain of TCR clone 344945 (TRBV4-2, TRBJ1-1)
CASSQAGNTEAFF

SEQ ID NO: 689891 - protein, 12 aa, Homo sapiens
  CDR3 for alpha chain variable domain of TCR clone 344946 (TRAV21, TRAJ11)
CAATSGYSTLTF

SEQ ID NO: 689892 - protein, 14 aa, Homo sapiens
  CDR3 for beta chain variable domain of TCR clone 344946 (TRBV20-1, TRBJ2-7)
CNAPELAGVGEQYF

SEQ ID NO: 689893 - protein, 13 aa, Homo sapiens
  CDR3 for alpha chain variable domain of TCR clone 344947 (TRAV8-3, TRAJ31)
CAVGARNNARPMF

SEQ ID NO: 689894 - protein, 16 aa, Homo sapiens
  CDR3 for beta chain variable domain of TCR clone 344947 (TRBV18, TRBJ1-3)
CASSLGILNGENTIYF

SEQ ID NO: 689895 - protein, 15 aa, Homo sapiens
  CDR3 for alpha chain variable domain of TCR clone 344948 (TRAV12-1, TRAJ44)
CVVFVNTGTASKLTF

SEQ ID NO: 689896 - protein, 13 aa, Homo sapiens
  CDR3 for beta chain variable domain of TCR clone 344948 (TRBV29-1, TRBJ2-1)
CSVEGGRVNEQFF

SEQ ID NO: 689897 - protein, 18 aa, Homo sapiens
  CDR3 for alpha chain variable domain of TCR clone 344949 (TRAV12-3, TRAJ52)
CAMSVGGAGGTSYGKLTF

SEQ ID NO: 689898 - protein, 14 aa, Homo sapiens
  CDR3 for beta chain variable domain of TCR clone 344949 (TRBV7-3, TRBJ2-7)
CASSLSGVSYEQYF

SEQ ID NO: 689899 - protein, 16 aa, Homo sapiens
  CDR3 for alpha chain variable domain of TCR clone 344950 (TRAV26-1, TRAJ32)
CIVRTNYGGATNKLIF

SEQ ID NO: 689900 - protein, 16 aa, Homo sapiens
  CDR3 for beta chain variable domain of TCR clone 344950 (TRBV27, TRBJ1-1)
CACSLLSGLSEASLDK

SEQ ID NO: 689901 - protein, 16 aa, Homo sapiens
  CDR3 for alpha chain variable domain of TCR clone 344951 (TRAV30, TRAJ24)
CGTEIVDADSWGKFQF

SEQ ID NO: 689902 - protein, 11 aa, Homo sapiens
  CDR3 for beta chain variable domain of TCR clone 344951 (TRBV24-1, TRBJ2-3)
CATSDLDTQYF

SEQ ID NO: 689903 - protein, 16 aa, Homo sapiens
  CDR3 for alpha chain variable domain of TCR clone 344952 (TRAV30, TRAJ24)
CGTEIVDADSWGKFQF

SEQ ID NO: 689904 - protein, 15 aa, Homo sapiens
  CDR3 for beta chain variable domain of TCR clone 344952 (TRBV4-3, TRBJ1-5)
CASSQEAVWGQPQHF

SEQ ID NO: 689905 - protein, 11 aa, Homo sapiens
  CDR3 for alpha chain variable domain of TCR clone 344953 (TRAV13-2, TRAJ54)
CAESGSGSPEA

SEQ ID NO: 689906 - protein, 15 aa, Homo sapiens
  CDR3 for beta chain variable domain of TCR clone 344953 (TRBV4-1, TRBJ1-4)
CASSDTGGTNEKLFF

SEQ ID NO: 689907 - protein, 16 aa, Homo sapiens
  CDR3 for alpha chain variable domain of TCR clone 344954 (TRAV12-2, TRAJ10)
CAVNRVLTGGGNKFTF

SEQ ID NO: 689908 - protein, 12 aa, Homo sapiens
  CDR3 for beta chain variable domain of TCR clone 344954 (TRBV28, TRBJ2-7)
CASSFSSYEQYF

SEQ ID NO: 689909 - protein, 14 aa, Homo sapiens
  CDR3 for alpha chain variable domain of TCR clone 344955 (TRAV8-3, TRAJ35)
CAVGRGGFGNVLHC

SEQ ID NO: 689910 - protein, 15 aa, Homo sapiens
  CDR3 for beta chain variable domain of TCR clone 344955 (TRBV7-3, TRBJ2-2)
CASSETGQGTGELFF

SEQ ID NO: 689911 - protein, 14 aa, Homo sapiens
  CDR3 for alpha chain variable domain of TCR clone 344956 (TRAV1-2, TRAJ16)
CAVNLFSDGQKLLF

SEQ ID NO: 689912 - protein, 14 aa, Homo sapiens
  CDR3 for beta chain variable domain of TCR clone 344956 (TRBV7-2, TRBJ2-7)
CASSLYPGRYEQYF

SEQ ID NO: 689913 - protein, 15 aa, Homo sapiens
  CDR3 for alpha chain variable domain of TCR clone 344957 (TRAV8-1, TRAJ6)
GAVNTPPGGSYIPTF

SEQ ID NO: 689914 - protein, 14 aa, Homo sapiens
  CDR3 for beta chain variable domain of TCR clone 344957 (TRBV12-4, TRBJ2-1)
CASSLGQGASEQFF

SEQ ID NO: 689915 - protein, 15 aa, Homo sapiens
  CDR3 for alpha chain variable domain of TCR clone 344958 (TRAV3, TRAJ32)
CAVSADGGATNKLIF

SEQ ID NO: 689916 - protein, 13 aa, Homo sapiens
  CDR3 for beta chain variable domain of TCR clone 344958 (TRBV20-1, TRBJ2-7)
CSARPSTNYEQYF

SEQ ID NO: 689917 - protein, 16 aa, Homo sapiens
  CDR3 for alpha chain variable domain of TCR clone 344959 (TRAV4, TRAJ9)
CLVGDPNRPGGFKTNF

SEQ ID NO: 689918 - protein, 16 aa, Homo sapiens
  CDR3 for beta chain variable domain of TCR clone 344959 (TRBV28, TRBJ1-4)
WASSPPCRGRSEKLFF

SEQ ID NO: 689919 - protein, 11 aa, Homo sapiens
  CDR3 for alpha chain variable domain of TCR clone 344960 (TRAV21, TRAJ33)
CAVLSNYQLIW

SEQ ID NO: 689920 - protein, 15 aa, Homo sapiens
  CDR3 for beta chain variable domain of TCR clone 344960 (TRBV11-2, TRBJ2-7)
CASSFMGGGSYEQYF

SEQ ID NO: 689921 - protein, 19 aa, Homo sapiens
  CDR3 for alpha chain variable domain of TCR clone 344961 (TRAV26-1, TRAJ44)
CCVLLHRQSQYRHCSKLTF

SEQ ID NO: 689922 - protein, 16 aa, Homo sapiens
  CDR3 for beta chain variable domain of TCR clone 344961 (TRBV7-7, TRBJ2-1)
CASSLASGTSYNEQFF

SEQ ID NO: 689923 - protein, 14 aa, Homo sapiens
  CDR3 for alpha chain variable domain of TCR clone 344962 (TRAV12-1, TRAJ9)
CVVTGYTGGFKTIF

SEQ ID NO: 689924 - protein, 13 aa, Homo sapiens
  CDR3 for beta chain variable domain of TCR clone 344962 (TRBV20-1, TRBJ1-1)
CSARAGGNNEAFF

SEQ ID NO: 689925 - protein, 15 aa, Homo sapiens
  CDR3 for alpha chain variable domain of TCR clone 344963 (TRAV38-1, TRAJ37)
CAFIFGSGNTGKLIF

SEQ ID NO: 689926 - protein, 16 aa, Homo sapiens
  CDR3 for beta chain variable domain of TCR clone 344963 (TRBV6-1, TRBJ2-3)
CAISEVIGQGTDTQYF

SEQ ID NO: 689927 - protein, 15 aa, Homo sapiens
  CDR3 for alpha chain variable domain of TCR clone 344964 (TRAV21, TRAJ53)
CATLNSGGSNSKLTF

SEQ ID NO: 689928 - protein, 13 aa, Homo sapiens
  CDR3 for beta chain variable domain of TCR clone 344964 (TRBV12-4, TRBJ2-7)
CASSFVPTAEQYF

SEQ ID NO: 689929 - protein, 13 aa, Homo sapiens
  CDR3 for alpha chain variable domain of TCR clone 344965 (TRAV8-3, TRAJ48)
CAVVPFGNEKLTF

SEQ ID NO: 689930 - protein, 13 aa, Homo sapiens
  CDR3 for beta chain variable domain of TCR clone 344965 (TRBV2, TRBJ2-3)
CASGRGRTDTQYF

SEQ ID NO: 689931 - protein, 16 aa, Homo sapiens
  CDR3 for alpha chain variable domain of TCR clone 344966 (TRAV30, TRAJ24)
CGTEAVDADSWGKFQF

SEQ ID NO: 689932 - protein, 15 aa, Homo sapiens
  CDR3 for beta chain variable domain of TCR clone 344966 (TRBV7-9, TRBJ1-5)
CASSQGHQPNQPQHF

SEQ ID NO: 689933 - protein, 17 aa, Homo sapiens
  CDR3 for alpha chain variable domain of TCR clone 344967 (TRAV3, TRAJ42)
CAVRDRDYGGRQGNLIF

SEQ ID NO: 689934 - protein, 20 aa, Homo sapiens
  CDR3 for beta chain variable domain of TCR clone 344967 (TRBV28, TRBJ2-1)
CASTPIGRSPGLAGGNEQFF

SEQ ID NO: 689935 - protein, 17 aa, Homo sapiens
  CDR3 for alpha chain variable domain of TCR clone 344968 (TRAV35, TRAJ47)
CAGAFGLSDSYGILKQT

SEQ ID NO: 689936 - protein, 11 aa, Homo sapiens
  CDR3 for beta chain variable domain of TCR clone 344968 (TRBV29-1, TRBJ1-1)
CSVEVGTRTFF

SEQ ID NO: 689937 - protein, 22 aa, Homo sapiens
  CDR3 for alpha chain variable domain of TCR clone 344969 (TRAV12-2, TRAJ53)
SPVIQPPTSVPPILSSNYNLTF

SEQ ID NO: 689938 - protein, 13 aa, Homo sapiens
  CDR3 for beta chain variable domain of TCR clone 344969 (TRBV7-7, TRBJ2-3)
CASSLSRADTQYF

SEQ ID NO: 689939 - protein, 15 aa, Homo sapiens
  CDR3 for alpha chain variable domain of TCR clone 344970 (TRAV2, TRAJ28)
CAVPYSGAGSYQLTF

SEQ ID NO: 689940 - protein, 18 aa, Homo sapiens
  CDR3 for beta chain variable domain of TCR clone 344970 (TRBV4-1, TRBJ1-5)
CASSQDPRGQGLNQPQHF

SEQ ID NO: 689941 - protein, 12 aa, Homo sapiens
  CDR3 for alpha chain variable domain of TCR clone 344971 (TRAV13-1, TRAJ52)
NAGGTSYGKLTF

SEQ ID NO: 689942 - protein, 15 aa, Homo sapiens
  CDR3 for beta chain variable domain of TCR clone 344971 (TRBV6-1, TRBJ2-3)
CASSERGGITDTQYF

SEQ ID NO: 689943 - protein, 17 aa, Homo sapiens
  CDR3 for alpha chain variable domain of TCR clone 344972 (TRAV12-2, TRAJ48)
CASNEKLTFGTGTRLTI

SEQ ID NO: 689944 - protein, 14 aa, Homo sapiens
  CDR3 for beta chain variable domain of TCR clone 344972 (TRBV5-1, TRBJ2-5)
WASSLAGKQETQYF

SEQ ID NO: 689945 - protein, 15 aa, Homo sapiens
  CDR3 for alpha chain variable domain of TCR clone 344973 (TRAV26-2, TRAJ13)
CILRALSGGYQKVTY

SEQ ID NO: 689946 - protein, 11 aa, Homo sapiens
  CDR3 for beta chain variable domain of TCR clone 344973 (TRBV7-9, TRBJ2-3)
CASSYTDTQYF

SEQ ID NO: 689947 - protein, 18 aa, Homo sapiens
  CDR3 for alpha chain variable domain of TCR clone 344974 (TRAV26-1, TRAJ23)
CIVRVGLEVWNQGGKLIF

SEQ ID NO: 689948 - protein, 13 aa, Homo sapiens
  CDR3 for beta chain variable domain of TCR clone 344974 (TRBV7-2, TRBJ2-4)
CASSREHANIQYF

SEQ ID NO: 689949 - protein, 14 aa, Homo sapiens
  CDR3 for alpha chain variable domain of TCR clone 344975 (TRAV16, TRAJ33)
CALSAMDSNYQLIW

SEQ ID NO: 689950 - protein, 16 aa, Homo sapiens
  CDR3 for beta chain variable domain of TCR clone 344975 (TRBV12-4, TRBJ2-3)
CASSFPSNTNADTQYF

SEQ ID NO: 689951 - protein, 15 aa, Homo sapiens
  CDR3 for alpha chain variable domain of TCR clone 344976 (TRAV8-3, TRAJ40)
CAAPSLGSGTYKYIF

SEQ ID NO: 689952 - protein, 15 aa, Homo sapiens
  CDR3 for beta chain variable domain of TCR clone 344976 (TRBV6-1, TRBJ2-1)
CASSELRGQYNEQFF

SEQ ID NO: 689953 - protein, 16 aa, Homo sapiens
  CDR3 for alpha chain variable domain of TCR clone 344977 (TRAV26-1, TRAJ41)
CIVRVAIANSGYALNF

SEQ ID NO: 689954 - protein, 15 aa, Homo sapiens
  CDR3 for beta chain variable domain of TCR clone 344977 (TRBV6-1, TRBJ1-1)
CASSEYPRMNTEAFF

SEQ ID NO: 689955 - protein, 14 aa, Homo sapiens
  CDR3 for alpha chain variable domain of TCR clone 344978 (TRAV29/DV5, TRAJ20)
CAASAPIEAYKLSF

SEQ ID NO: 689956 - protein, 13 aa, Homo sapiens
  CDR3 for beta chain variable domain of TCR clone 344978 (TRBV4-2, TRBJ1-1)
CASSQAGNTEAFF

SEQ ID NO: 689957 - protein, 13 aa, Homo sapiens
  CDR3 for alpha chain variable domain of TCR clone 344979 (TRAV13-1, TRAJ21)
CAASINNFNKFYF

SEQ ID NO: 689958 - protein, 15 aa, Homo sapiens
  CDR3 for beta chain variable domain of TCR clone 344979 (TRBV9, TRBJ2-1)
CASSLAGSSYNEQFF

SEQ ID NO: 689959 - protein, 13 aa, Homo sapiens
  CDR3 for alpha chain variable domain of TCR clone 344980 (TRAV20, TRAJ31)
CAVQAWNNARLMF

SEQ ID NO: 689960 - protein, 14 aa, Homo sapiens
  CDR3 for beta chain variable domain of TCR clone 344980 (TRBV19, TRBJ1-1)
CASSIEVSGGSAFF

SEQ ID NO: 689961 - protein, 15 aa, Homo sapiens
  CDR3 for alpha chain variable domain of TCR clone 344981 (TRAV23/DV6, TRAJ12)
CAAIDLGAMDSSYKL

SEQ ID NO: 689962 - protein, 12 aa, Homo sapiens
  CDR3 for beta chain variable domain of TCR clone 344981 (TRBV10-3, TRBJ2-2)
CATRENTGELFF

SEQ ID NO: 689963 - protein, 16 aa, Homo sapiens
  CDR3 for alpha chain variable domain of TCR clone 344982 (TRAV12-2, TRAJ32)
CAVNLGQGGATNKLIF

SEQ ID NO: 689964 - protein, 13 aa, Homo sapiens
  CDR3 for beta chain variable domain of TCR clone 344982 (TRBV9, TRBJ2-2)
CASSPRPAGELFF

SEQ ID NO: 689965 - protein, 14 aa, Homo sapiens
  CDR3 for alpha chain variable domain of TCR clone 344983 (TRAV1-2, TRAJ16)
CAANRVSDGQKLLF

SEQ ID NO: 689966 - protein, 12 aa, Homo sapiens
  CDR3 for beta chain variable domain of TCR clone 344983 (TRBV6-5, TRBJ2-5)
CASSEGSETQYF

SEQ ID NO: 689967 - protein, 15 aa, Homo sapiens
  CDR3 for alpha chain variable domain of TCR clone 344984 (TRAV12-2, TRAJ53)
CAVNGGGGSNYKLTS

SEQ ID NO: 689968 - protein, 14 aa, Homo sapiens
  CDR3 for beta chain variable domain of TCR clone 344984 (TRBV18, TRBJ2-7)
CASSPRGGAYEQYF

SEQ ID NO: 689969 - protein, 19 aa, Homo sapiens
  CDR3 for alpha chain variable domain of TCR clone 344985 (TRAV2, TRAJ20)
ILQVHRADAAVYRDCIFSF

SEQ ID NO: 689970 - protein, 13 aa, Homo sapiens
  CDR3 for beta chain variable domain of TCR clone 344985 (TRBV15, TRBJ1-6)
CATSGGLNSPLHF

SEQ ID NO: 689971 - protein, 13 aa, Homo sapiens
  CDR3 for alpha chain variable domain of TCR clone 344986 (TRAV20, TRAJ37)
CAGCSSNTEKLIF

SEQ ID NO: 689972 - protein, 11 aa, Homo sapiens
  CDR3 for beta chain variable domain of TCR clone 344986 (TRBV12-4, TRBJ2-3)
CASTATDTQYF

SEQ ID NO: 689973 - protein, 12 aa, Homo sapiens
  CDR3 for alpha chain variable domain of TCR clone 344987 (TRAV13-1, TRAJ11)
CAASKGYSTLTV

SEQ ID NO: 689974 - protein, 14 aa, Homo sapiens
  CDR3 for beta chain variable domain of TCR clone 344987 (TRBV12-4, TRBJ2-7)
CASSPRQDLYEQYF

SEQ ID NO: 689975 - protein, 11 aa, Homo sapiens
  CDR3 for alpha chain variable domain of TCR clone 344988 (TRAV2, TRAJ31)
CAVYNNARFMF

SEQ ID NO: 689976 - protein, 16 aa, Homo sapiens
  CDR3 for beta chain variable domain of TCR clone 344988 (TRBV28, TRBJ1-6)
CASSSLLEGDNSPLHF

SEQ ID NO: 689977 - protein, 13 aa, Homo sapiens
  CDR3 for alpha chain variable domain of TCR clone 344989 (TRAV12-3, TRAJ7)
CAMSDSGNNRLAF

SEQ ID NO: 689978 - protein, 14 aa, Homo sapiens
  CDR3 for beta chain variable domain of TCR clone 344989 (TRBV13, TRBJ2-5)
CASSLGPRGETQYF

SEQ ID NO: 689979 - protein, 17 aa, Homo sapiens
  CDR3 for alpha chain variable domain of TCR clone 344990 (TRAV12-2, TRAJ52)
CAVNPYAGGTSYGKLTF

SEQ ID NO: 689980 - protein, 16 aa, Homo sapiens
  CDR3 for beta chain variable domain of TCR clone 344990 (TRBV5-1, TRBJ2-2)
CASSSRTGGRTGELFF

SEQ ID NO: 689981 - protein, 11 aa, Homo sapiens
  CDR3 for alpha chain variable domain of TCR clone 344991 (TRAV30, TRAJ24)
WMLTAGGKFQF

SEQ ID NO: 689982 - protein, 16 aa, Homo sapiens
  CDR3 for beta chain variable domain of TCR clone 344991 (TRBV6-1, TRBJ2-3)
CASSEVIGQGTDTQYF

SEQ ID NO: 689983 - protein, 12 aa, Homo sapiens
  CDR3 for alpha chain variable domain of TCR clone 344992 (TRAV12-3, TRAJ40)
CAMSAGTYNYIF

SEQ ID NO: 689984 - protein, 15 aa, Homo sapiens
  CDR3 for beta chain variable domain of TCR clone 344992 (TRBV24-1, TRBJ2-5)
CATSDRRQEQETQYF

SEQ ID NO: 689985 - protein, 13 aa, Homo sapiens
  CDR3 for alpha chain variable domain of TCR clone 344993 (TRAV26-2, TRAJ57)
CILSRGGSEKMVF

SEQ ID NO: 689986 - protein, 16 aa, Homo sapiens
  CDR3 for beta chain variable domain of TCR clone 344993 (TRBV18, TRBJ1-5)
CASSPRTGGGNQPQHF

SEQ ID NO: 689987 - protein, 12 aa, Homo sapiens
  CDR3 for alpha chain variable domain of TCR clone 344994 (TRAV13-2, TRAJ54)
CGAHEGAQTLVF

SEQ ID NO: 689988 - protein, 16 aa, Homo sapiens
  CDR3 for beta chain variable domain of TCR clone 344994 (TRBV12-5, TRBJ2-5)
CASGPRTSGNQETQYF

SEQ ID NO: 689989 - protein, 14 aa, Homo sapiens
  CDR3 for alpha chain variable domain of TCR clone 344995 (TRAV1-2, TRAJ16)
CAVNRFSDGEKLLF

SEQ ID NO: 689990 - protein, 12 aa, Homo sapiens
  CDR3 for beta chain variable domain of TCR clone 344995 (TRBV28, TRBJ2-6)
CAIQAGANVLTF

SEQ ID NO: 689991 - protein, 14 aa, Homo sapiens
  CDR3 for alpha chain variable domain of TCR clone 344996 (TRAV13-1, TRAJ35)
CAASKGGFGNVMHC

SEQ ID NO: 689992 - protein, 14 aa, Homo sapiens
  CDR3 for beta chain variable domain of TCR clone 344996 (TRBV7-8, TRBJ2-3)
CASSFADGQDTQYF

SEQ ID NO: 689993 - protein, 14 aa, Homo sapiens
  CDR3 for alpha chain variable domain of TCR clone 344997 (TRAV13-2, TRAJ16)
CAENNWGDGQKLLF

SEQ ID NO: 689994 - protein, 14 aa, Homo sapiens
  CDR3 for beta chain variable domain of TCR clone 344997 (TRBV7-9, TRBJ1-1)
CASSLGGLKTEAFF

SEQ ID NO: 689995 - protein, 15 aa, Homo sapiens
  CDR3 for alpha chain variable domain of TCR clone 344998 (TRAV27, TRAJ38)
CAGRFNAGNNRKLIW

SEQ ID NO: 689996 - protein, 16 aa, Homo sapiens
  CDR3 for beta chain variable domain of TCR clone 344998 (TRBV19, TRBJ2-3)
CASSPGAASRTDTQYF

SEQ ID NO: 689997 - protein, 17 aa, Homo sapiens
  CDR3 for alpha chain variable domain of TCR clone 344999 (TRAV23/DV6, TRAJ57)
CAASSTLSQGGSEKLVF

SEQ ID NO: 689998 - protein, 11 aa, Homo sapiens
  CDR3 for beta chain variable domain of TCR clone 344999 (TRBV12-4, TRBJ2-3)
CASTATDTQYF

SEQ ID NO: 689999 - protein, 11 aa, Homo sapiens
  CDR3 for alpha chain variable domain of TCR clone 345000 (TRAV1-1, TRAJ5)
CAVRVRRALTF

SEQ ID NO: 690000 - protein, 13 aa, Homo sapiens
  CDR3 for beta chain variable domain of TCR clone 345000 (TRBV28, TRBJ2-7)
CASRFTPRPEQYS

SEQ ID NO: 690001 - protein, 13 aa, Homo sapiens
  CDR3 for alpha chain variable domain of TCR clone 345001 (TRAV12-2, TRAJ39)
CAVNNNAGNMLTF

SEQ ID NO: 690002 - protein, 12 aa, Homo sapiens
  CDR3 for beta chain variable domain of TCR clone 345001 (TRBV7-9, TRBJ2-7)
CASSLEGYEQYF

SEQ ID NO: 690003 - protein, 14 aa, Homo sapiens
  CDR3 for alpha chain variable domain of TCR clone 345002 (TRAV23/DV6, TRAJ50)
CAADMKTSYDKVIF

SEQ ID NO: 690004 - protein, 17 aa, Homo sapiens
  CDR3 for beta chain variable domain of TCR clone 345002 (TRBV4-3, TRBJ1-1)
CASSQDLSGLVNTEAFF

SEQ ID NO: 690005 - protein, 14 aa, Homo sapiens
  CDR3 for alpha chain variable domain of TCR clone 345003 (TRAV23/DV6, TRAJ13)
CSLAGGGGYQKVTF

SEQ ID NO: 690006 - protein, 14 aa, Homo sapiens
  CDR3 for beta chain variable domain of TCR clone 345003 (TRBV20-1, TRBJ2-5)
CSAHRQGLWETQYF

SEQ ID NO: 690007 - protein, 12 aa, Homo sapiens
  CDR3 for alpha chain variable domain of TCR clone 345004 (TRAV12-3, TRAJ17)
CAMTRTGNKLTF

SEQ ID NO: 690008 - protein, 13 aa, Homo sapiens
  CDR3 for beta chain variable domain of TCR clone 345004 (TRBV7-9, TRBJ1-2)
CASSLKQNYGYTF

SEQ ID NO: 690009 - protein, 14 aa, Homo sapiens
  CDR3 for alpha chain variable domain of TCR clone 345005 (TRAV1-2, TRAJ8)
CAVREDTCCQKLVF

SEQ ID NO: 690010 - protein, 15 aa, Homo sapiens
  CDR3 for beta chain variable domain of TCR clone 345005 (TRBV6-3, TRBJ2-7)
CASSSPGTVFYEQYF

SEQ ID NO: 690011 - protein, 15 aa, Homo sapiens
  CDR3 for alpha chain variable domain of TCR clone 345006 (TRAV29/DV5, TRAJ48)
CAASLGGFGNEKLTF

SEQ ID NO: 690012 - protein, 14 aa, Homo sapiens
  CDR3 for beta chain variable domain of TCR clone 345006 (TRBV7-2, TRBJ2-7)
CASSPKTSFYEQYF

SEQ ID NO: 690013 - protein, 16 aa, Homo sapiens
  CDR3 for alpha chain variable domain of TCR clone 345007 (TRAV30, TRAJ24)
CGTEIVDADSWGKFQF

SEQ ID NO: 690014 - protein, 12 aa, Homo sapiens
  CDR3 for beta chain variable domain of TCR clone 345007 (TRBV28, TRBJ2-7)
CASSRSGYEQYF

SEQ ID NO: 690015 - protein, 17 aa, Homo sapiens
  CDR3 for alpha chain variable domain of TCR clone 345008 (TRAV8-6, TRAJ58)
CAVSSWVGETSSSRLTF

SEQ ID NO: 690016 - protein, 17 aa, Homo sapiens
  CDR3 for beta chain variable domain of TCR clone 345008 (TRBV4-3, TRBJ1-2)
CASSSRLQAGGSVGYTF

SEQ ID NO: 690017 - protein, 15 aa, Homo sapiens
  CDR3 for alpha chain variable domain of TCR clone 345009 (TRAV3, TRAJ4)
CAVRDGTGGYNKLIF

SEQ ID NO: 690018 - protein, 15 aa, Homo sapiens
  CDR3 for beta chain variable domain of TCR clone 345009 (TRBV11-3, TRBJ2-7)
CASSLLSGSSYEQYF

SEQ ID NO: 690019 - protein, 12 aa, Homo sapiens
  CDR3 for alpha chain variable domain of TCR clone 345010 (TRAV8-3, TRAJ20)
CAVGANDSKLSF

SEQ ID NO: 690020 - protein, 15 aa, Homo sapiens
  CDR3 for beta chain variable domain of TCR clone 345010 (TRBV11-2, TRBJ2-1)
CASSLGTSGLNEQFF

SEQ ID NO: 690021 - protein, 12 aa, Homo sapiens
  CDR3 for alpha chain variable domain of TCR clone 345011 (TRAV13-1, TRAJ48)
CAANFGNEKLTF

SEQ ID NO: 690022 - protein, 12 aa, Homo sapiens
  CDR3 for beta chain variable domain of TCR clone 345011 (TRBV11-2, TRBJ2-3)
CASSPGNNEQSF

SEQ ID NO: 690023 - protein, 14 aa, Homo sapiens
  CDR3 for alpha chain variable domain of TCR clone 345012 (TRAV1-2, TRAJ8)
CAVREDTGFQKLVF

SEQ ID NO: 690024 - protein, 15 aa, Homo sapiens
  CDR3 for beta chain variable domain of TCR clone 345012 (TRBV6-3, TRBJ2-3)
CASSTRTFYTDTQYF

SEQ ID NO: 690025 - protein, 21 aa, Homo sapiens
  CDR3 for alpha chain variable domain of TCR clone 345013 (TRAV9-2, )
CALIQIGDIQNPDPAVSQLRD

SEQ ID NO: 690026 - protein, 17 aa, Homo sapiens
  CDR3 for beta chain variable domain of TCR clone 345013 (TRBV7-8, TRBJ2-6)
CASSAGTGGAGANDLTF

SEQ ID NO: 690027 - protein, 14 aa, Homo sapiens
  CDR3 for alpha chain variable domain of TCR clone 345014 (TRAV2, TRAJ9)
CAVEDRSGGFKTIF

SEQ ID NO: 690028 - protein, 14 aa, Homo sapiens
  CDR3 for beta chain variable domain of TCR clone 345014 (TRBV12-4, TRBJ2-5)
CASSLWQKQETQYF

SEQ ID NO: 690029 - protein, 13 aa, Homo sapiens
  CDR3 for alpha chain variable domain of TCR clone 345015 (TRAV3, TRAJ3)
CAVRALGASKIIF

SEQ ID NO: 690030 - protein, 16 aa, Homo sapiens
  CDR3 for beta chain variable domain of TCR clone 345015 (TRBV12-4, TRBJ2-5)
CTSGPAVLRGGETQYF

SEQ ID NO: 690031 - protein, 16 aa, Homo sapiens
  CDR3 for alpha chain variable domain of TCR clone 345016 (TRAV30, TRAJ24)
CGTEIVDADSWGKFQF

SEQ ID NO: 690032 - protein, 12 aa, Homo sapiens
  CDR3 for beta chain variable domain of TCR clone 345016 (TRBV27, TRBJ2-1)
CTSRGFYNEQFF

SEQ ID NO: 690033 - protein, 13 aa, Homo sapiens
  CDR3 for alpha chain variable domain of TCR clone 345017 (TRAV20, TRAJ20)
CAVQAGSGYKLSF

SEQ ID NO: 690034 - protein, 13 aa, Homo sapiens
  CDR3 for beta chain variable domain of TCR clone 345017 (TRBV10-3, TRBJ2-7)
CASKLAVNYEQYF

SEQ ID NO: 690035 - protein, 14 aa, Homo sapiens
  CDR3 for alpha chain variable domain of TCR clone 345018 (TRAV12-1, TRAJ17)
CVVNYKAAGYKLTF

SEQ ID NO: 690036 - protein, 14 aa, Homo sapiens
  CDR3 for beta chain variable domain of TCR clone 345018 (TRBV11-2, TRBJ1-5)
CASSLDRGRQPQHF

SEQ ID NO: 690037 - protein, 12 aa, Homo sapiens
  CDR3 for alpha chain variable domain of TCR clone 345019 (TRAV12-3, TRAJ17)
CALTLTGNKLTV

SEQ ID NO: 690038 - protein, 15 aa, Homo sapiens
  CDR3 for beta chain variable domain of TCR clone 345019 (TRBV20-1, TRBJ2-7)
CSARDRVSGMDEQYF

SEQ ID NO: 690039 - protein, 11 aa, Homo sapiens
  CDR3 for alpha chain variable domain of TCR clone 345020 (TRAV2, TRAJ21)
CAVFNFNKFYF

SEQ ID NO: 690040 - protein, 16 aa, Homo sapiens
  CDR3 for beta chain variable domain of TCR clone 345020 (TRBV3-1, TRBJ2-5)
CASSQDWASGQETQYF

SEQ ID NO: 690041 - protein, 11 aa, Homo sapiens
  CDR3 for alpha chain variable domain of TCR clone 345021 (TRAV2, TRAJ23)
CAVETRGKLIF

SEQ ID NO: 690042 - protein, 17 aa, Homo sapiens
  CDR3 for beta chain variable domain of TCR clone 345021 (TRBV11-2, TRBJ2-1)
CASSLYPPGVEYNEQFF

SEQ ID NO: 690043 - protein, 11 aa, Homo sapiens
  CDR3 for alpha chain variable domain of TCR clone 345022 (TRAV36/DV7, TRAJ36)
CAVIARRQTTS

SEQ ID NO: 690044 - protein, 14 aa, Homo sapiens
  CDR3 for beta chain variable domain of TCR clone 345022 (TRBV4-3, TRBJ1-4)
CASSPLQRNEKLFF

SEQ ID NO: 690045 - protein, 14 aa, Homo sapiens
  CDR3 for alpha chain variable domain of TCR clone 345023 (TRAV13-1, TRAJ5)
CAAPLGTGRRALTF

SEQ ID NO: 690046 - protein, 15 aa, Homo sapiens
  CDR3 for beta chain variable domain of TCR clone 345023 (TRBV28, TRBJ2-5)
CASSPPWSYQETQYF

SEQ ID NO: 690047 - protein, 15 aa, Homo sapiens
  CDR3 for alpha chain variable domain of TCR clone 345024 (TRAV21, TRAJ24)
CAARSSTDSWGKLQF

SEQ ID NO: 690048 - protein, 19 aa, Homo sapiens
  CDR3 for beta chain variable domain of TCR clone 345024 (TRBV14, TRBJ2-1)
WASSQDQLWEAPEYNEQFF

SEQ ID NO: 690049 - protein, 17 aa, Homo sapiens
  CDR3 for alpha chain variable domain of TCR clone 345025 (TRAV13-1, TRAJ5)
CSNPSLSRDTGRRALTF

SEQ ID NO: 690050 - protein, 15 aa, Homo sapiens
  CDR3 for beta chain variable domain of TCR clone 345025 (TRBV27, TRBJ1-6)
CASSFDRGLGSPLHF

SEQ ID NO: 690051 - protein, 14 aa, Homo sapiens
  CDR3 for alpha chain variable domain of TCR clone 345026 (TRAV3, TRAJ27)
CAVRDDTNAGKSTF

SEQ ID NO: 690052 - protein, 15 aa, Homo sapiens
  CDR3 for beta chain variable domain of TCR clone 345026 (TRBV7-7, TRBJ2-2)
CATSRLAKNTGELFF

SEQ ID NO: 690053 - protein, 17 aa, Homo sapiens
  CDR3 for alpha chain variable domain of TCR clone 345027 (TRAV8-1, TRAJ42)
CAVKWGNYGGSQGNLIF

SEQ ID NO: 690054 - protein, 13 aa, Homo sapiens
  CDR3 for beta chain variable domain of TCR clone 345027 (TRBV20-1, TRBJ2-7)
CSASPFSSYEQYF

SEQ ID NO: 690055 - protein, 11 aa, Homo sapiens
  CDR3 for alpha chain variable domain of TCR clone 345028 (TRAV2, TRAJ33)
CAVESNYQLIW

SEQ ID NO: 690056 - protein, 18 aa, Homo sapiens
  CDR3 for beta chain variable domain of TCR clone 345028 (TRBV7-9, TRBJ2-1)
CASSTGLAEGSSYNEQFF

SEQ ID NO: 690057 - protein, 13 aa, Homo sapiens
  CDR3 for alpha chain variable domain of TCR clone 345029 (TRAV25, TRAJ30)
CAGRVDRDDKIIF

SEQ ID NO: 690058 - protein, 14 aa, Homo sapiens
  CDR3 for beta chain variable domain of TCR clone 345029 (TRBV7-8, TRBJ2-3)
CASSLEAGTDTQYF

SEQ ID NO: 690059 - protein, 17 aa, Homo sapiens
  CDR3 for alpha chain variable domain of TCR clone 345030 (TRAV13-2, TRAJ31)
CAENARLMFGDGTQLVV

SEQ ID NO: 690060 - protein, 14 aa, Homo sapiens
  CDR3 for beta chain variable domain of TCR clone 345030 (TRBV19, TRBJ2-1)
CASKDPSSYNEQFF

SEQ ID NO: 690061 - protein, 16 aa, Homo sapiens
  CDR3 for alpha chain variable domain of TCR clone 345031 (TRAV8-3, TRAJ44)
CAVGASNTGTVSRLTF

SEQ ID NO: 690062 - protein, 15 aa, Homo sapiens
  CDR3 for beta chain variable domain of TCR clone 345031 (TRBV27, TRBJ1-5)
CASTFNRGSNQPQHF

SEQ ID NO: 690063 - protein, 12 aa, Homo sapiens
  CDR3 for alpha chain variable domain of TCR clone 345032 (TRAV27, TRAJ13)
CAGAGGYQKVTF

SEQ ID NO: 690064 - protein, 15 aa, Homo sapiens
  CDR3 for beta chain variable domain of TCR clone 345032 (TRBV20-1, TRBJ2-6)
CSARDKGPGANVLTF

SEQ ID NO: 690065 - protein, 13 aa, Homo sapiens
  CDR3 for alpha chain variable domain of TCR clone 345033 (TRAV12-3, TRAJ40)
CAMSDSGTYKYIF

SEQ ID NO: 690066 - protein, 15 aa, Homo sapiens
  CDR3 for beta chain variable domain of TCR clone 345033 (TRBV7-9, TRBJ1-4)
CASSRTGGFNEKLFF

SEQ ID NO: 690067 - protein, 14 aa, Homo sapiens
  CDR3 for alpha chain variable domain of TCR clone 345034 (TRAV14/DV4, TRAJ49)
CAMREGVNGNQFYF

SEQ ID NO: 690068 - protein, 14 aa, Homo sapiens
  CDR3 for beta chain variable domain of TCR clone 345034 (TRBV5-1, TRBJ1-5)
CASSLESGSRTQHF

SEQ ID NO: 690069 - protein, 14 aa, Homo sapiens
  CDR3 for alpha chain variable domain of TCR clone 345035 (TRAV29/DV5, TRAJ36)
CAARRKTGANNLFF

SEQ ID NO: 690070 - protein, 15 aa, Homo sapiens
  CDR3 for beta chain variable domain of TCR clone 345035 (TRBV2, TRBJ2-5)
CASSERGGYRETQYF

SEQ ID NO: 690071 - protein, 12 aa, Homo sapiens
  CDR3 for alpha chain variable domain of TCR clone 345036 (TRAV12-3, TRAJ17)
CAMTLTGNKLTF

SEQ ID NO: 690072 - protein, 16 aa, Homo sapiens
  CDR3 for beta chain variable domain of TCR clone 345036 (TRBV7-3, TRBJ2-2)
CASSLKGARDTGELFF

SEQ ID NO: 690073 - protein, 13 aa, Homo sapiens
  CDR3 for alpha chain variable domain of TCR clone 345037 (TRAV26-1, TRAJ33)
CIVRVDSNYQLIW

SEQ ID NO: 690074 - protein, 15 aa, Homo sapiens
  CDR3 for beta chain variable domain of TCR clone 345037 (TRBV7-2, TRBJ1-5)
CASSFSAGINQPQLF

SEQ ID NO: 690075 - protein, 12 aa, Homo sapiens
  CDR3 for alpha chain variable domain of TCR clone 345038 (TRAV23/DV6, TRAJ17)
CARGSCRQQANF

SEQ ID NO: 690076 - protein, 13 aa, Homo sapiens
  CDR3 for beta chain variable domain of TCR clone 345038 (TRBV27, TRBJ2-7)
CASSSGDSYEQYF

SEQ ID NO: 690077 - protein, 15 aa, Homo sapiens
  CDR3 for alpha chain variable domain of TCR clone 345039 (TRAV25, TRAJ52)
CAGRPGGTSYGKLTF

SEQ ID NO: 690078 - protein, 16 aa, Homo sapiens
  CDR3 for beta chain variable domain of TCR clone 345039 (TRBV4-1, TRBJ1-5)
CASSQGGHTTNQPQHF

SEQ ID NO: 690079 - protein, 11 aa, Homo sapiens
  CDR3 for alpha chain variable domain of TCR clone 345040 (TRAV1-2, TRAJ20)
CAVANDCKLSF

SEQ ID NO: 690080 - protein, 15 aa, Homo sapiens
  CDR3 for beta chain variable domain of TCR clone 345040 (TRBV2, TRBJ2-1)
CASSELAGSYNEQFF

SEQ ID NO: 690081 - protein, 16 aa, Homo sapiens
  CDR3 for alpha chain variable domain of TCR clone 345041 (TRAV13-2, TRAJ22)
CAENRGSSGSVRQLTF

SEQ ID NO: 690082 - protein, 17 aa, Homo sapiens
  CDR3 for beta chain variable domain of TCR clone 345041 (TRBV14, TRBJ2-1)
CASSQDRRVSSYNEQFF

SEQ ID NO: 690083 - protein, 11 aa, Homo sapiens
  CDR3 for alpha chain variable domain of TCR clone 345042 (TRAV23/DV6, TRAJ58)
CAARLLRGETS

SEQ ID NO: 690084 - protein, 15 aa, Homo sapiens
  CDR3 for beta chain variable domain of TCR clone 345042 (TRBV5-1, TRBJ2-1)
CASTGSGRTYNEQFF

SEQ ID NO: 690085 - protein, 16 aa, Homo sapiens
  CDR3 for alpha chain variable domain of TCR clone 345043 (TRAV26-1, TRAJ56)
CIVRVAETGANSKLTF

SEQ ID NO: 690086 - protein, 15 aa, Homo sapiens
  CDR3 for beta chain variable domain of TCR clone 345043 (TRBV5-7, IGLJ4)
CASSLWHQGGEKLFF

SEQ ID NO: 690087 - protein, 15 aa, Homo sapiens
  CDR3 for alpha chain variable domain of TCR clone 345044 (TRAV12-2, TRAJ53)
CAVNGGGGSYDKLTF

SEQ ID NO: 690088 - protein, 13 aa, Homo sapiens
  CDR3 for beta chain variable domain of TCR clone 345044 (TRBV3-1, TRBJ1-1)
CASSPGVITEAFF

SEQ ID NO: 690089 - protein, 15 aa, Homo sapiens
  CDR3 for alpha chain variable domain of TCR clone 345045 (TRAV13-1, TRAJ52)
CAASLPSTSYGKLTF

SEQ ID NO: 690090 - protein, 13 aa, Homo sapiens
  CDR3 for beta chain variable domain of TCR clone 345045 (TRBV27, TRBJ2-5)
CASGLSSLETQYF

SEQ ID NO: 690091 - protein, 16 aa, Homo sapiens
  CDR3 for alpha chain variable domain of TCR clone 345046 (TRAV8-3, TRAJ8)
CAVPRDGNTGFQKLVF

SEQ ID NO: 690092 - protein, 15 aa, Homo sapiens
  CDR3 for beta chain variable domain of TCR clone 345046 (TRBV6-1, TRBJ2-6)
CASSSRASGANALTF

SEQ ID NO: 690093 - protein, 12 aa, Homo sapiens
  CDR3 for alpha chain variable domain of TCR clone 345047 (TRAV27, TRAJ13)
CAGAGGYQKVTF

SEQ ID NO: 690094 - protein, 13 aa, Homo sapiens
  CDR3 for beta chain variable domain of TCR clone 345047 (TRBV7-9, TRBJ2-3)
CASSPGSTDTQYF

SEQ ID NO: 690095 - protein, 14 aa, Homo sapiens
  CDR3 for alpha chain variable domain of TCR clone 345048 (TRAV29/DV5, TRAJ36)
CAARRQTGANNLFF

SEQ ID NO: 690096 - protein, 16 aa, Homo sapiens
  CDR3 for beta chain variable domain of TCR clone 345048 (TRBV7-2, TRBJ2-1)
CASSLVGGPELNEQFF

SEQ ID NO: 690097 - protein, 13 aa, Homo sapiens
  CDR3 for alpha chain variable domain of TCR clone 345049 (TRAV21, TRAJ45)
CAVMGGGADGLTF

SEQ ID NO: 690098 - protein, 15 aa, Homo sapiens
  CDR3 for beta chain variable domain of TCR clone 345049 (TRBV2, TRBJ2-3)
CASSDFEKAADTQYF

SEQ ID NO: 690099 - protein, 13 aa, Homo sapiens
  CDR3 for alpha chain variable domain of TCR clone 345050 (TRAV27, TRAJ45)
CRSSGGGADGLTF

SEQ ID NO: 690100 - protein, 15 aa, Homo sapiens
  CDR3 for beta chain variable domain of TCR clone 345050 (TRBV4-1, TRBJ2-1)
CASSQVLAGRDEQFF

SEQ ID NO: 690101 - protein, 15 aa, Homo sapiens
  CDR3 for alpha chain variable domain of TCR clone 345051 (TRAV26-1, TRAJ53)
CIVRVGGGSNYKLTF

SEQ ID NO: 690102 - protein, 14 aa, Homo sapiens
  CDR3 for beta chain variable domain of TCR clone 345051 (TRBV4-3, TRBJ2-1)
CASSQDRWRGEQFF

SEQ ID NO: 690103 - protein, 14 aa, Homo sapiens
  CDR3 for alpha chain variable domain of TCR clone 345052 (TRAV13-1, TRAJ35)
CAASKGGFGNVLHC

SEQ ID NO: 690104 - protein, 15 aa, Homo sapiens
  CDR3 for beta chain variable domain of TCR clone 345052 (TRBV11-2, TRBJ1-6)
CASSLDPWAVSPLHF

SEQ ID NO: 690105 - protein, 12 aa, Homo sapiens
  CDR3 for alpha chain variable domain of TCR clone 345053 (TRAV8-4, TRAJ43)
CAVSVNNNDMRF

SEQ ID NO: 690106 - protein, 14 aa, Homo sapiens
  CDR3 for beta chain variable domain of TCR clone 345053 (TRBV11-2, TRBJ1-2)
CASSLETANYGYTF

SEQ ID NO: 690107 - protein, 11 aa, Homo sapiens
  CDR3 for alpha chain variable domain of TCR clone 345054 (TRAV36/DV7, TRAJ50)
CAVEPENLLRQ

SEQ ID NO: 690108 - protein, 13 aa, Homo sapiens
  CDR3 for beta chain variable domain of TCR clone 345054 (TRBV7-2, TRBJ2-7)
CASSSPRGSEQYF

SEQ ID NO: 690109 - protein, 12 aa, Homo sapiens
  CDR3 for alpha chain variable domain of TCR clone 345055 (TRAV12-2, TRAJ6)
CAVKVGSYIPTF

SEQ ID NO: 690110 - protein, 13 aa, Homo sapiens
  CDR3 for beta chain variable domain of TCR clone 345055 (TRBV7-3, TRBJ1-1)
CASSQDWGAETFF

SEQ ID NO: 690111 - protein, 13 aa, Homo sapiens
  CDR3 for alpha chain variable domain of TCR clone 345056 (TRAV13-2, TRAJ53)
CAENMGSNYKLTF

SEQ ID NO: 690112 - protein, 14 aa, Homo sapiens
  CDR3 for beta chain variable domain of TCR clone 345056 (TRBV7-7, TRBJ2-2)
CATRQDSDTGELFF

SEQ ID NO: 690113 - protein, 14 aa, Homo sapiens
  CDR3 for alpha chain variable domain of TCR clone 345057 (TRAV12-2, TRAJ13)
CAAKKTGGYQKVTF

SEQ ID NO: 690114 - protein, 14 aa, Homo sapiens
  CDR3 for beta chain variable domain of TCR clone 345057 (TRBV6-5, TRBJ1-1)
CASRKPDRDTEAFF

SEQ ID NO: 690115 - protein, 10 aa, Homo sapiens
  CDR3 for alpha chain variable domain of TCR clone 345058 (TRAV8-3, TRAJ33)
CAVGAIATIS

SEQ ID NO: 690116 - protein, 13 aa, Homo sapiens
  CDR3 for beta chain variable domain of TCR clone 345058 (TRBV7-3, TRBJ1-1)
CASSQDWGAEAFF

SEQ ID NO: 690117 - protein, 15 aa, Homo sapiens
  CDR3 for alpha chain variable domain of TCR clone 345059 (TRAV26-1, TRAJ21)
CIVRVPNYNFNKFYF

SEQ ID NO: 690118 - protein, 14 aa, Homo sapiens
  CDR3 for beta chain variable domain of TCR clone 345059 (TRBV19, TRBJ2-1)
CASPTFVLSGEQFF

SEQ ID NO: 690119 - protein, 13 aa, Homo sapiens
  CDR3 for alpha chain variable domain of TCR clone 345060 (TRAV2, TRAJ40)
CAVVTSGTYKYIF

SEQ ID NO: 690120 - protein, 14 aa, Homo sapiens
  CDR3 for beta chain variable domain of TCR clone 345060 (TRBV19, TRBJ1-5)
CASSLSGGSQPQHF

SEQ ID NO: 690121 - protein, 13 aa, Homo sapiens
  CDR3 for alpha chain variable domain of TCR clone 345061 (TRAV8-1, TRAJ34)
CAVRPYTTDKLIF

SEQ ID NO: 690122 - protein, 15 aa, Homo sapiens
  CDR3 for beta chain variable domain of TCR clone 345061 (TRBV7-9, TRBJ1-3)
CASSLRSSSGNTIYF

SEQ ID NO: 690123 - protein, 14 aa, Homo sapiens
  CDR3 for alpha chain variable domain of TCR clone 345062 (TRAV1-2, TRAJ8)
CAVREDTGFQKLVF

SEQ ID NO: 690124 - protein, 15 aa, Homo sapiens
  CDR3 for beta chain variable domain of TCR clone 345062 (TRBV7-3, TRBJ2-7)
CASSLTGQGKYEQYF

SEQ ID NO: 690125 - protein, 11 aa, Homo sapiens
  CDR3 for alpha chain variable domain of TCR clone 345063 (TRAV20, TRAJ23)
CAYNQGGKLIF

SEQ ID NO: 690126 - protein, 15 aa, Homo sapiens
  CDR3 for beta chain variable domain of TCR clone 345063 (TRBV7-9, TRBJ2-7)
CASSLALAEAYEQYF

SEQ ID NO: 690127 - protein, 13 aa, Homo sapiens
  CDR3 for alpha chain variable domain of TCR clone 345064 (TRAV21, TRAJ27)
CAARPGNAGKSTF

SEQ ID NO: 690128 - protein, 15 aa, Homo sapiens
  CDR3 for beta chain variable domain of TCR clone 345064 (TRBV7-2, TRBJ2-2)
CASSTRTGYTGELFF

SEQ ID NO: 690129 - protein, 13 aa, Homo sapiens
  CDR3 for alpha chain variable domain of TCR clone 345065 (TRAV13-1, TRAJ38)
CAAGGGNNRKLIW

SEQ ID NO: 690130 - protein, 14 aa, Homo sapiens
  CDR3 for beta chain variable domain of TCR clone 345065 (TRBV18, TRBJ2-7)
CASSPRGGAYEQYF

SEQ ID NO: 690131 - protein, 15 aa, Homo sapiens
  CDR3 for alpha chain variable domain of TCR clone 345066 (TRAV12-3, TRAJ6)
CAMSATSGGSYIPTF

SEQ ID NO: 690132 - protein, 17 aa, Homo sapiens
  CDR3 for beta chain variable domain of TCR clone 345066 (TRBV13, TRBJ2-3)
CASSLSRVAGGGNTQYF

SEQ ID NO: 690133 - protein, 14 aa, Homo sapiens
  CDR3 for alpha chain variable domain of TCR clone 345067 (TRAV13-1, TRAJ44)
CAAKSTGTASKLTF

SEQ ID NO: 690134 - protein, 12 aa, Homo sapiens
  CDR3 for beta chain variable domain of TCR clone 345067 (TRBV19, TRBJ1-5)
CASSIAQQPQHF

SEQ ID NO: 690135 - protein, 13 aa, Homo sapiens
  CDR3 for alpha chain variable domain of TCR clone 345068 (TRAV2, TRAJ40)
CAVVTSGTYKYIF

SEQ ID NO: 690136 - protein, 16 aa, Homo sapiens
  CDR3 for beta chain variable domain of TCR clone 345068 (TRBV6-3, TRBJ1-2)
CASSRELSGTPYGYTF

SEQ ID NO: 690137 - protein, 13 aa, Homo sapiens
  CDR3 for alpha chain variable domain of TCR clone 345069 (TRAV29/DV5, TRAJ36)
CAASATGANNLFF

SEQ ID NO: 690138 - protein, 14 aa, Homo sapiens
  CDR3 for beta chain variable domain of TCR clone 345069 (TRBV19, TRBJ2-1)
CASPTFVLSGEQFF

SEQ ID NO: 690139 - protein, 13 aa, Homo sapiens
  CDR3 for alpha chain variable domain of TCR clone 345070 (TRAV12-1, TRAJ29)
CVVNGPGNTPIVF

SEQ ID NO: 690140 - protein, 13 aa, Homo sapiens
  CDR3 for beta chain variable domain of TCR clone 345070 (TRBV7-2, TRBJ2-5)
CASSRGGLETQYF

SEQ ID NO: 690141 - protein, 17 aa, Homo sapiens
  CDR3 for alpha chain variable domain of TCR clone 345071 (TRAV13-1, TRAJ28)
CAASPPYSGAGSYQLTF

SEQ ID NO: 690142 - protein, 13 aa, Homo sapiens
  CDR3 for beta chain variable domain of TCR clone 345071 (TRBV28, TRBJ1-5)
CASSDRGNQPQHF

SEQ ID NO: 690143 - protein, 14 aa, Homo sapiens
  CDR3 for alpha chain variable domain of TCR clone 345072 (TRAV1-2, TRAJ8)
CAVREDTGFQKLAF

SEQ ID NO: 690144 - protein, 18 aa, Homo sapiens
  CDR3 for beta chain variable domain of TCR clone 345072 (TRBV10-3, TRBJ2-7)
CAISESGRPSGGRVEQYF

SEQ ID NO: 690145 - protein, 15 aa, Homo sapiens
  CDR3 for alpha chain variable domain of TCR clone 345073 (TRAV26-1, TRAJ52)
CIVGEGGTSYGKLTF

SEQ ID NO: 690146 - protein, 12 aa, Homo sapiens
  CDR3 for beta chain variable domain of TCR clone 345073 (TRBV28, TRBJ2-7)
CASTGNHYEQYF

SEQ ID NO: 690147 - protein, 14 aa, Homo sapiens
  CDR3 for alpha chain variable domain of TCR clone 345074 (TRAV17, TRAJ22)
CATSPSGSARQLTV

SEQ ID NO: 690148 - protein, 14 aa, Homo sapiens
  CDR3 for beta chain variable domain of TCR clone 345074 (TRBV7-2, TRBJ2-2)
CAGRGQGAAGELFF

SEQ ID NO: 690149 - protein, 13 aa, Homo sapiens
  CDR3 for alpha chain variable domain of TCR clone 345075 (TRAV21, TRAJ27)
CAARPGNAGNSTF

SEQ ID NO: 690150 - protein, 14 aa, Homo sapiens
  CDR3 for beta chain variable domain of TCR clone 345075 (TRBV7-6, TRBJ2-3)
CASSLGTGTDTQYF

SEQ ID NO: 690151 - protein, 17 aa, Homo sapiens
  CDR3 for alpha chain variable domain of TCR clone 345076 (TRAV27, TRAJ26)
CAGARSPLDNYGQNFVF

SEQ ID NO: 690152 - protein, 15 aa, Homo sapiens
  CDR3 for beta chain variable domain of TCR clone 345076 (TRBV11-2, TRBJ2-5)
CASSPRSGGLETQYF

SEQ ID NO: 690153 - protein, 18 aa, Homo sapiens
  CDR3 for alpha chain variable domain of TCR clone 345077 (TRAV21, TRAJ52)
CAVRPSPAGGTSYGKLTF

SEQ ID NO: 690154 - protein, 13 aa, Homo sapiens
  CDR3 for beta chain variable domain of TCR clone 345077 (TRBV10-3, TRBJ2-7)
CAYKLAVNYEQYF

SEQ ID NO: 690155 - protein, 10 aa, Homo sapiens
  CDR3 for alpha chain variable domain of TCR clone 345078 (TRAV20, TRAJ22)
CAAPPRQLTF

SEQ ID NO: 690156 - protein, 14 aa, Homo sapiens
  CDR3 for beta chain variable domain of TCR clone 345078 (TRBV19, TRBJ2-1)
CASSMGSGATEQFF

SEQ ID NO: 690157 - protein, 16 aa, Homo sapiens
  CDR3 for alpha chain variable domain of TCR clone 345079 (TRAV3, TRAJ10)
CAVRAMRAGGGNKLTF

SEQ ID NO: 690158 - protein, 16 aa, Homo sapiens
  CDR3 for beta chain variable domain of TCR clone 345079 (TRBV12-4, TRBJ1-5)
CASSRPVGGSNQPQHF

SEQ ID NO: 690159 - protein, 14 aa, Homo sapiens
  CDR3 for alpha chain variable domain of TCR clone 345080 (TRAV36/DV7, TRAJ13)
WGSGENGCYQKVTF

SEQ ID NO: 690160 - protein, 15 aa, Homo sapiens
  CDR3 for beta chain variable domain of TCR clone 345080 (TRBV19, TRBJ2-1)
CASSTGTSSYNEQFF

SEQ ID NO: 690161 - protein, 16 aa, Homo sapiens
  CDR3 for alpha chain variable domain of TCR clone 345081 (TRAV2, TRAJ13)
CAARLLGVTRKLPLEL

SEQ ID NO: 690162 - protein, 14 aa, Homo sapiens
  CDR3 for beta chain variable domain of TCR clone 345081 (TRBV19, TRBJ2-1)
CASEATGARNEQFF

SEQ ID NO: 690163 - protein, 14 aa, Homo sapiens
  CDR3 for alpha chain variable domain of TCR clone 345082 (TRAV13-1, TRAJ44)
CAAKATGTASKLTF

SEQ ID NO: 690164 - protein, 15 aa, Homo sapiens
  CDR3 for beta chain variable domain of TCR clone 345082 (TRBV7-2, TRBJ2-2)
CASSLVAGSAGELFF

SEQ ID NO: 690165 - protein, 14 aa, Homo sapiens
  CDR3 for alpha chain variable domain of TCR clone 345083 (TRAV1-2, TRAJ8)
CAVREDTGFQKIVF

SEQ ID NO: 690166 - protein, 15 aa, Homo sapiens
  CDR3 for beta chain variable domain of TCR clone 345083 (TRBV7-9, TRBJ1-1)
CASSHRGTVNTEAFF

SEQ ID NO: 690167 - protein, 11 aa, Homo sapiens
  CDR3 for alpha chain variable domain of TCR clone 345084 (TRAV16, TRAJ31)
CALFNNARLMF

SEQ ID NO: 690168 - protein, 16 aa, Homo sapiens
  CDR3 for beta chain variable domain of TCR clone 345084 (TRBV29-1, TRBJ2-7)
CSVEVVGTSGSYEQYF

SEQ ID NO: 690169 - protein, 13 aa, Homo sapiens
  CDR3 for alpha chain variable domain of TCR clone 345085 (TRAV13-1, TRAJ9)
CAARGTGGFKTIF

SEQ ID NO: 690170 - protein, 12 aa, Homo sapiens
  CDR3 for beta chain variable domain of TCR clone 345085 (TRBV19, TRBJ2-7)
CASTDRGYEQYF

SEQ ID NO: 690171 - protein, 14 aa, Homo sapiens
  CDR3 for alpha chain variable domain of TCR clone 345086 (TRAV26-1, TRAJ49)
CIVRLTNTGDQFYF

SEQ ID NO: 690172 - protein, 11 aa, Homo sapiens
  CDR3 for beta chain variable domain of TCR clone 345086 (TRBV29-1, TRBJ2-5)
CSEDRTGTQYF

SEQ ID NO: 690173 - protein, 13 aa, Homo sapiens
  CDR3 for alpha chain variable domain of TCR clone 345087 (TRAV2, TRAJ40)
CAVVTSGTYKYIF

SEQ ID NO: 690174 - protein, 13 aa, Homo sapiens
  CDR3 for beta chain variable domain of TCR clone 345087 (TRBV6-5, TRBJ2-5)
CATAPSPQETQYF

SEQ ID NO: 690175 - protein, 16 aa, Homo sapiens
  CDR3 for alpha chain variable domain of TCR clone 345088 (TRAV3, TRAJ37)
CAVRGKGSGNTGKLIF

SEQ ID NO: 690176 - protein, 16 aa, Homo sapiens
  CDR3 for beta chain variable domain of TCR clone 345088 (TRBV15, TRBJ2-3)
CATSRDLGIVTDTQYF

SEQ ID NO: 690177 - protein, 15 aa, Homo sapiens
  CDR3 for alpha chain variable domain of TCR clone 345089 (TRAV27, TRAJ38)
CAARRNAGNNRKLIW

SEQ ID NO: 690178 - protein, 15 aa, Homo sapiens
  CDR3 for beta chain variable domain of TCR clone 345089 (TRBV20-1, TRBJ1-1)
CSARAGGNTEAFLDK

SEQ ID NO: 690179 - protein, 14 aa, Homo sapiens
  CDR3 for alpha chain variable domain of TCR clone 345090 (TRAV26-1, TRAJ38)
CIADNAGNNRKLIW

SEQ ID NO: 690180 - protein, 14 aa, Homo sapiens
  CDR3 for beta chain variable domain of TCR clone 345090 (TRBV11-2, TRBJ1-2)
CASSDRMGNYGYTF

SEQ ID NO: 690181 - protein, 15 aa, Homo sapiens
  CDR3 for alpha chain variable domain of TCR clone 345091 (TRAV35, TRAJ58)
CAGRRQETSGSRLTF

SEQ ID NO: 690182 - protein, 16 aa, Homo sapiens
  CDR3 for beta chain variable domain of TCR clone 345091 (TRBV2, TRBJ2-1)
CASSVGGSLSYNEQFF

SEQ ID NO: 690183 - protein, 13 aa, Homo sapiens
  CDR3 for alpha chain variable domain of TCR clone 345092 (TRAV3, TRAJ30)
CAVRDRGDDKIIF

SEQ ID NO: 690184 - protein, 16 aa, Homo sapiens
  CDR3 for beta chain variable domain of TCR clone 345092 (TRBV7-3, TRBJ2-2)
CASSLKRGTLWGELFF

SEQ ID NO: 690185 - protein, 14 aa, Homo sapiens
  CDR3 for alpha chain variable domain of TCR clone 345093 (TRAV16, TRAJ15)
CALSFNQAGTALIF

SEQ ID NO: 690186 - protein, 15 aa, Homo sapiens
  CDR3 for beta chain variable domain of TCR clone 345093 (TRBV6-5, TRBJ2-1)
CASSYDAGAGNEQFF

SEQ ID NO: 690187 - protein, 12 aa, Homo sapiens
  CDR3 for alpha chain variable domain of TCR clone 345094 (TRAV22, TRAJ36)
CAVGTGANNLFF

SEQ ID NO: 690188 - protein, 14 aa, Homo sapiens
  CDR3 for beta chain variable domain of TCR clone 345094 (TRBV12-5, TRBJ2-5)
CASGSRTHQETQYF

SEQ ID NO: 690189 - protein, 14 aa, Homo sapiens
  CDR3 for alpha chain variable domain of TCR clone 345095 (TRAV13-2, TRAJ22)
CADGTSGSARQLTF

SEQ ID NO: 690190 - protein, 16 aa, Homo sapiens
  CDR3 for beta chain variable domain of TCR clone 345095 (TRBV19, TRBJ2-1)
CASSSKGTRSYNEQFF

SEQ ID NO: 690191 - protein, 14 aa, Homo sapiens
  CDR3 for alpha chain variable domain of TCR clone 345096 (TRAV35, TRAJ56)
CAGQLTGANSKLTF

SEQ ID NO: 690192 - protein, 14 aa, Homo sapiens
  CDR3 for beta chain variable domain of TCR clone 345096 (TRBV19, TRBJ2-1)
CASPTFVLSGEQFF

SEQ ID NO: 690193 - protein, 16 aa, Homo sapiens
  CDR3 for alpha chain variable domain of TCR clone 345097 (TRAV38-2/DV8, TRAJ33)
CAYRTRLFDSNYQLIW

SEQ ID NO: 690194 - protein, 13 aa, Homo sapiens
  CDR3 for beta chain variable domain of TCR clone 345097 (TRBV27, TRBJ1-4)
CASSLMGDEKLFF

SEQ ID NO: 690195 - protein, 16 aa, Homo sapiens
  CDR3 for alpha chain variable domain of TCR clone 345098 (TRAV12-3, TRAJ53)
CAMSPGSGGSNYKLTF

SEQ ID NO: 690196 - protein, 11 aa, Homo sapiens
  CDR3 for beta chain variable domain of TCR clone 345098 (TRBV29-1, TRBJ2-5)
CSEERTATQYF

SEQ ID NO: 690197 - protein, 12 aa, Homo sapiens
  CDR3 for alpha chain variable domain of TCR clone 345099 (TRAV12-1, TRAJ40)
CVFYSGTYKYIF

SEQ ID NO: 690198 - protein, 15 aa, Homo sapiens
  CDR3 for beta chain variable domain of TCR clone 345099 (TRBV11-2, TRBJ2-5)
CASSSTTGGRETQYF

SEQ ID NO: 690199 - protein, 15 aa, Homo sapiens
  CDR3 for alpha chain variable domain of TCR clone 345100 (TRAV16, TRAJ48)
CALFISNFGNEKLTF

SEQ ID NO: 690200 - protein, 16 aa, Homo sapiens
  CDR3 for beta chain variable domain of TCR clone 345100 (TRBV10-3, TRBJ2-1)
CAISGVGDGGGGEQFF

SEQ ID NO: 690201 - protein, 12 aa, Homo sapiens
  CDR3 for alpha chain variable domain of TCR clone 345101 (TRAV12-1, TRAJ40)
CVVYSGTYKYIF

SEQ ID NO: 690202 - protein, 18 aa, Homo sapiens
  CDR3 for beta chain variable domain of TCR clone 345101 (TRBV11-2, TRBJ2-3)
CAISLGGAARGAPNTQYF

SEQ ID NO: 690203 - protein, 13 aa, Homo sapiens
  CDR3 for alpha chain variable domain of TCR clone 345102 (TRAV17, TRAJ26)
CATVDNYGQNFVF

SEQ ID NO: 690204 - protein, 12 aa, Homo sapiens
  CDR3 for beta chain variable domain of TCR clone 345102 (TRBV29-1, TRBJ2-3)
CSVTGGADTQYF

SEQ ID NO: 690205 - protein, 12 aa, Homo sapiens
  CDR3 for alpha chain variable domain of TCR clone 345103 (TRAV27, TRAJ35)
CAGADFGNVLRC

SEQ ID NO: 690206 - protein, 16 aa, Homo sapiens
  CDR3 for beta chain variable domain of TCR clone 345103 (TRBV6-1, TRBJ2-1)
CASILRQGSSYNEQFF

SEQ ID NO: 690207 - protein, 15 aa, Homo sapiens
  CDR3 for alpha chain variable domain of TCR clone 345104 (TRAV8-6, TRAJ10)
CAVSDQAGGGNKPTF

SEQ ID NO: 690208 - protein, 15 aa, Homo sapiens
  CDR3 for beta chain variable domain of TCR clone 345104 (TRBV3-1, TRBJ2-5)
CASSANLGGPETQYF

SEQ ID NO: 690209 - protein, 15 aa, Homo sapiens
  CDR3 for alpha chain variable domain of TCR clone 345105 (TRAV10, TRAJ39)
CVVSASGKAGNMLTF

SEQ ID NO: 690210 - protein, 13 aa, Homo sapiens
  CDR3 for beta chain variable domain of TCR clone 345105 (TRBV18, TRBJ2-7)
CASQSGGGYEQYF

SEQ ID NO: 690211 - protein, 18 aa, Homo sapiens
  CDR3 for alpha chain variable domain of TCR clone 345106 (TRAV21, TRAJ52)
CAVRPSPAGGTSYGKLTF

SEQ ID NO: 690212 - protein, 16 aa, Homo sapiens
  CDR3 for beta chain variable domain of TCR clone 345106 (TRBV7-2, TRBJ2-7)
CASSLEAGGPWYEQYF

SEQ ID NO: 690213 - protein, 14 aa, Homo sapiens
  CDR3 for alpha chain variable domain of TCR clone 345107 (TRAV13-1, TRAJ35)
CAASKGGFVNVLHC

SEQ ID NO: 690214 - protein, 15 aa, Homo sapiens
  CDR3 for beta chain variable domain of TCR clone 345107 (TRBV7-9, TRBJ1-6)
CASSSPGRGNSPLHF

SEQ ID NO: 690215 - protein, 17 aa, Homo sapiens
  CDR3 for alpha chain variable domain of TCR clone 345108 (TRAV12-3, TRAJ6)
CTMSARGGAGGSYIPTS

SEQ ID NO: 690216 - protein, 16 aa, Homo sapiens
  CDR3 for beta chain variable domain of TCR clone 345108 (TRBV9, TRBJ1-2)
CASSVEEKVPPYGYTF

SEQ ID NO: 690217 - protein, 15 aa, Homo sapiens
  CDR3 for alpha chain variable domain of TCR clone 345109 (TRAV13-1, TRAJ43)
CAASTAGLNNNDMLF

SEQ ID NO: 690218 - protein, 16 aa, Homo sapiens
  CDR3 for beta chain variable domain of TCR clone 345109 (TRBV7-6, TRBJ2-1)
CASSAPGPSSYNEQFF

SEQ ID NO: 690219 - protein, 13 aa, Homo sapiens
  CDR3 for alpha chain variable domain of TCR clone 345110 (TRAV17, TRAJ5)
CAPMDTGRRALTF

SEQ ID NO: 690220 - protein, 12 aa, Homo sapiens
  CDR3 for beta chain variable domain of TCR clone 345110 (TRBV29-1, TRBJ2-3)
CSVTGGADTQYF

SEQ ID NO: 690221 - protein, 11 aa, Homo sapiens
  CDR3 for alpha chain variable domain of TCR clone 345111 (TRAV21, TRAJ11)
CAVNGDSTLTF

SEQ ID NO: 690222 - protein, 11 aa, Homo sapiens
  CDR3 for beta chain variable domain of TCR clone 345111 (TRBV19, TRBJ1-1)
CASSSGSEAFF

SEQ ID NO: 690223 - protein, 13 aa, Homo sapiens
  CDR3 for alpha chain variable domain of TCR clone 345112 (TRAV13-1, TRAJ43)
CAASLSNNNDMRF

SEQ ID NO: 690224 - protein, 12 aa, Homo sapiens
  CDR3 for beta chain variable domain of TCR clone 345112 (TRBV4-3, TRBJ2-1)
CASSLSGYEQFF

SEQ ID NO: 690225 - protein, 15 aa, Homo sapiens
  CDR3 for alpha chain variable domain of TCR clone 345113 (TRAV3, TRAJ5)
CAVRDLDTGRRALTF

SEQ ID NO: 690226 - protein, 14 aa, Homo sapiens
  CDR3 for beta chain variable domain of TCR clone 345113 (TRBV2, TRBJ1-5)
CASSEAAGGQPQHF

SEQ ID NO: 690227 - protein, 16 aa, Homo sapiens
  CDR3 for alpha chain variable domain of TCR clone 345114 (TRAV30, TRAJ24)
CGTEIVDAGSWGKFQF

SEQ ID NO: 690228 - protein, 14 aa, Homo sapiens
  CDR3 for beta chain variable domain of TCR clone 345114 (TRBV7-8, TRBJ2-7)
CASSPRDRVYEQYF

SEQ ID NO: 690229 - protein, 18 aa, Homo sapiens
  CDR3 for alpha chain variable domain of TCR clone 345115 (TRAV21, TRAJ52)
CAVRPSPAGGTSYGKLTF

SEQ ID NO: 690230 - protein, 13 aa, Homo sapiens
  CDR3 for beta chain variable domain of TCR clone 345115 (TRBV7-3, TRBJ1-1)
CASSQDWGAESFF

SEQ ID NO: 690231 - protein, 15 aa, Homo sapiens
  CDR3 for alpha chain variable domain of TCR clone 345116 (TRAV26-1, TRAJ15)
CIVRPANQAGTALIF

SEQ ID NO: 690232 - protein, 15 aa, Homo sapiens
  CDR3 for beta chain variable domain of TCR clone 345116 (TRBV5-7, TRBJ2-1)
CASSFLAGVGNEQFF

SEQ ID NO: 690233 - protein, 14 aa, Homo sapiens
  CDR3 for alpha chain variable domain of TCR clone 345117 (TRAV12-2, TRAJ5)
CAVNRSTGRRALTF

SEQ ID NO: 690234 - protein, 12 aa, Homo sapiens
  CDR3 for beta chain variable domain of TCR clone 345117 (TRBV19, TRBJ1-5)
CASSIAQEPQHF

SEQ ID NO: 690235 - protein, 15 aa, Homo sapiens
  CDR3 for alpha chain variable domain of TCR clone 345118 (TRAV8-2, TRAJ40)
CVVLGTTSGTYKYIF

SEQ ID NO: 690236 - protein, 16 aa, Homo sapiens
  CDR3 for beta chain variable domain of TCR clone 345118 (TRBV7-3, TRBJ2-1)
CASSLEGYRSYTEQFF

SEQ ID NO: 690237 - protein, 16 aa, Homo sapiens
  CDR3 for alpha chain variable domain of TCR clone 345119 (TRAV1-2, TRAJ10)
CAVRGVLTGGGNKLTF

SEQ ID NO: 690238 - protein, 13 aa, Homo sapiens
  CDR3 for beta chain variable domain of TCR clone 345119 (TRBV11-2, TRBJ2-1)
CASSSEAYNEQFF

SEQ ID NO: 690239 - protein, 15 aa, Homo sapiens
  CDR3 for alpha chain variable domain of TCR clone 345120 (TRAV13-1, TRAJ44)
CAESRGGGTARKLTF

SEQ ID NO: 690240 - protein, 14 aa, Homo sapiens
  CDR3 for beta chain variable domain of TCR clone 345120 (TRBV7-2, TRBJ2-5)
CASSPRGSSETQYF

SEQ ID NO: 690241 - protein, 15 aa, Homo sapiens
  CDR3 for alpha chain variable domain of TCR clone 345121 (TRAV20, TRAJ4)
CAVEGSSGGYTKLIF

SEQ ID NO: 690242 - protein, 14 aa, Homo sapiens
  CDR3 for beta chain variable domain of TCR clone 345121 (TRBV7-8, TRBJ2-7)
CASTLGGALGEQYF

SEQ ID NO: 690243 - protein, 17 aa, Homo sapiens
  CDR3 for alpha chain variable domain of TCR clone 345122 (TRAV3, TRAJ6)
CAVRDGPRVGGSYIPKF

SEQ ID NO: 690244 - protein, 12 aa, Homo sapiens
  CDR3 for beta chain variable domain of TCR clone 345122 (TRBV11-2, TRBJ2-2)
CASSLGGGELFF

SEQ ID NO: 690245 - protein, 12 aa, Homo sapiens
  CDR3 for alpha chain variable domain of TCR clone 345123 (TRAV13-1, TRAJ20)
CAAPMGFTSSTL

SEQ ID NO: 690246 - protein, 14 aa, Homo sapiens
  CDR3 for beta chain variable domain of TCR clone 345123 (TRBV28, TRBJ2-5)
CASTGAGGVETQYF

SEQ ID NO: 690247 - protein, 14 aa, Homo sapiens
  CDR3 for alpha chain variable domain of TCR clone 345124 (TRAV12-2, TRAJ3)
CAVSLYSSASKIIF

SEQ ID NO: 690248 - protein, 14 aa, Homo sapiens
  CDR3 for beta chain variable domain of TCR clone 345124 (TRBV27, TRBJ2-1)
CAGSIAESYNEQFF

SEQ ID NO: 690249 - protein, 16 aa, Homo sapiens
  CDR3 for alpha chain variable domain of TCR clone 345125 (TRAV30, TRAJ24)
CGTEIVDADSWGKFQF

SEQ ID NO: 690250 - protein, 13 aa, Homo sapiens
  CDR3 for beta chain variable domain of TCR clone 345125 (TRBV19, TRBJ2-5)
CASSMGGAGTQYF

SEQ ID NO: 690251 - protein, 15 aa, Homo sapiens
  CDR3 for alpha chain variable domain of TCR clone 345126 (TRAV12-2, TRAJ53)
CAGRRSGGSKYKLTF

SEQ ID NO: 690252 - protein, 14 aa, Homo sapiens
  CDR3 for beta chain variable domain of TCR clone 345126 (TRBV28, TRBJ2-7)
CASSYRTGSYEQYF

SEQ ID NO: 690253 - protein, 14 aa, Homo sapiens
  CDR3 for alpha chain variable domain of TCR clone 345127 (TRAV1-2, TRAJ16)
CAVNRFSDGQKLLL

SEQ ID NO: 690254 - protein, 13 aa, Homo sapiens
  CDR3 for beta chain variable domain of TCR clone 345127 (TRBV20-1, TRBJ2-2)
CSALSGGAGELFF

SEQ ID NO: 690255 - protein, 14 aa, Homo sapiens
  CDR3 for alpha chain variable domain of TCR clone 345128 (TRAV17, TRAJ37)
CATDGSSNTGKLIF

SEQ ID NO: 690256 - protein, 15 aa, Homo sapiens
  CDR3 for beta chain variable domain of TCR clone 345128 (TRBV4-1, TRBJ1-4)
CASSDTGGTNEKLFF

SEQ ID NO: 690257 - protein, 12 aa, Homo sapiens
  CDR3 for alpha chain variable domain of TCR clone 345129 (TRAV17, TRAJ12)
CATLRSSYKLIF

SEQ ID NO: 690258 - protein, 13 aa, Homo sapiens
  CDR3 for beta chain variable domain of TCR clone 345129 (TRBV2, TRBJ1-4)
CASSERAGEKLFF

SEQ ID NO: 690259 - protein, 15 aa, Homo sapiens
  CDR3 for alpha chain variable domain of TCR clone 345130 (TRAV25, TRAJ52)
CAGRPGGTSYGKLTF

SEQ ID NO: 690260 - protein, 17 aa, Homo sapiens
  CDR3 for beta chain variable domain of TCR clone 345130 (TRBV7-8, TRBJ2-6)
CASSPGTGGAGANVLTF

SEQ ID NO: 690261 - protein, 13 aa, Homo sapiens
  CDR3 for alpha chain variable domain of TCR clone 345131 (TRAV12-2, TRAJ15)
CAVFNQAGTALIF

SEQ ID NO: 690262 - protein, 15 aa, Homo sapiens
  CDR3 for beta chain variable domain of TCR clone 345131 (TRBV7-8, TRBJ1-5)
CASSRGGGDDQPQHF

SEQ ID NO: 690263 - protein, 23 aa, Homo sapiens
  CDR3 for alpha chain variable domain of TCR clone 345132 (TRAV8-4, TRAJ32)
CAADMVVLQTSSSLELALCLLSS

SEQ ID NO: 690264 - protein, 16 aa, Homo sapiens
  CDR3 for beta chain variable domain of TCR clone 345132 (TRBV27, TRBJ2-2)
CASSPLAAANTGELFF

SEQ ID NO: 690265 - protein, 12 aa, Homo sapiens
  CDR3 for alpha chain variable domain of TCR clone 345133 (TRAV35, TRAJ39)
LAPNNAGIMLTF

SEQ ID NO: 690266 - protein, 16 aa, Homo sapiens
  CDR3 for beta chain variable domain of TCR clone 345133 (TRBV2, TRBJ2-3)
CASSTSVEGVTDTQYF

SEQ ID NO: 690267 - protein, 14 aa, Homo sapiens
  CDR3 for alpha chain variable domain of TCR clone 345134 (TRAV20, TRAJ10)
CSVRVEGGGNKLTS

SEQ ID NO: 690268 - protein, 13 aa, Homo sapiens
  CDR3 for beta chain variable domain of TCR clone 345134 (TRBV13, TRBJ2-2)
CASSPGLTGELFF

SEQ ID NO: 690269 - protein, 13 aa, Homo sapiens
  CDR3 for alpha chain variable domain of TCR clone 345135 (TRAV12-2, TRAJ20)
CAVYPSNDYKLSF

SEQ ID NO: 690270 - protein, 15 aa, Homo sapiens
  CDR3 for beta chain variable domain of TCR clone 345135 (TRBV11-2, TRBJ2-1)
CASSKNRGLIYEQFF

SEQ ID NO: 690271 - protein, 14 aa, Homo sapiens
  CDR3 for alpha chain variable domain of TCR clone 345136 (TRAV29/DV5, TRAJ36)
CAARRKTGANNLFF

SEQ ID NO: 690272 - protein, 14 aa, Homo sapiens
  CDR3 for beta chain variable domain of TCR clone 345136 (TRBV12-5, TRBJ2-5)
CASGSRTHQETLYF

SEQ ID NO: 690273 - protein, 13 aa, Homo sapiens
  CDR3 for alpha chain variable domain of TCR clone 345137 (TRAV30, TRAJ49)
CGTESQPATSSIL

SEQ ID NO: 690274 - protein, 13 aa, Homo sapiens
  CDR3 for beta chain variable domain of TCR clone 345137 (TRBV7-2, TRBJ2-2)
CASSLAVTGELFF

SEQ ID NO: 690275 - protein, 14 aa, Homo sapiens
  CDR3 for alpha chain variable domain of TCR clone 345138 (TRAV12-2, TRAJ5)
CAVNRSTGRRALTF

SEQ ID NO: 690276 - protein, 19 aa, Homo sapiens
  CDR3 for beta chain variable domain of TCR clone 345138 (TRBV7-2, TRBJ2-3)
CASSFLSRNWGGGTDTQYF

SEQ ID NO: 690277 - protein, 17 aa, Homo sapiens
  CDR3 for alpha chain variable domain of TCR clone 345139 (TRAV13-1, TRAJ28)
CAASPPYSGAGSYQLTF

SEQ ID NO: 690278 - protein, 15 aa, Homo sapiens
  CDR3 for beta chain variable domain of TCR clone 345139 (TRBV5-1, TRBJ2-1)
CASTGSGRTYNEQFF

SEQ ID NO: 690279 - protein, 12 aa, Homo sapiens
  CDR3 for alpha chain variable domain of TCR clone 345140 (TRAV12-3, TRAJ17)
CAMTLTGNKLTF

SEQ ID NO: 690280 - protein, 12 aa, Homo sapiens
  CDR3 for beta chain variable domain of TCR clone 345140 (TRBV2, TRBJ2-1)
CPYGPPGNEQFF

SEQ ID NO: 690281 - protein, 15 aa, Homo sapiens
  CDR3 for alpha chain variable domain of TCR clone 345141 (TRAV8-3, TRAJ23)
CALGDRYNQGGKLIF

SEQ ID NO: 690282 - protein, 17 aa, Homo sapiens
  CDR3 for beta chain variable domain of TCR clone 345141 (TRBV4-1, TRBJ1-4)
CASSQEGPRGVEEKLFF

SEQ ID NO: 690283 - protein, 23 aa, Homo sapiens
  CDR3 for alpha chain variable domain of TCR clone 345142 (TRAV35, TRAJ30)
CAGERETRSSLEKGHDFIFSPIS

SEQ ID NO: 690284 - protein, 14 aa, Homo sapiens
  CDR3 for beta chain variable domain of TCR clone 345142 (TRBV15, TRBJ2-5)
CATSGDRGQETQYF

SEQ ID NO: 690285 - protein, 13 aa, Homo sapiens
  CDR3 for alpha chain variable domain of TCR clone 345143 (TRAV35, TRAJ44)
CAGRDGTASKLTF

SEQ ID NO: 690286 - protein, 15 aa, Homo sapiens
  CDR3 for beta chain variable domain of TCR clone 345143 (TRBV10-2, TRBJ2-6)
CASSEQGTGANVLTF

SEQ ID NO: 690287 - protein, 11 aa, Homo sapiens
  CDR3 for alpha chain variable domain of TCR clone 345144 (TRAV1-1, TRAJ5)
CAVRVRRALTF

SEQ ID NO: 690288 - protein, 16 aa, Homo sapiens
  CDR3 for beta chain variable domain of TCR clone 345144 (TRBV13, TRBJ2-2)
CASSPRTGEHTGELFF

SEQ ID NO: 690289 - protein, 16 aa, Homo sapiens
  CDR3 for alpha chain variable domain of TCR clone 345145 (TRAV23/DV6, TRAJ9)
CAASIGGNTGGFKTIF

SEQ ID NO: 690290 - protein, 14 aa, Homo sapiens
  CDR3 for beta chain variable domain of TCR clone 345145 (TRBV9, TRBJ2-5)
CASSVGVGSYEQYF

SEQ ID NO: 690291 - protein, 16 aa, Homo sapiens
  CDR3 for alpha chain variable domain of TCR clone 345146 (TRAV27, TRAJ13)
CAGAKSDSGGYQKVTF

SEQ ID NO: 690292 - protein, 14 aa, Homo sapiens
  CDR3 for beta chain variable domain of TCR clone 345146 (TRBV28, TRBJ1-5)
CASSLDRLNQPQHF

SEQ ID NO: 690293 - protein, 16 aa, Homo sapiens
  CDR3 for alpha chain variable domain of TCR clone 345147 (TRAV21, TRAJ37)
CAVRTAGSSNTGKLIF

SEQ ID NO: 690294 - protein, 12 aa, Homo sapiens
  CDR3 for beta chain variable domain of TCR clone 345147 (TRBV6-1, TRBJ2-7)
CASSDYSYEQYF

SEQ ID NO: 690295 - protein, 14 aa, Homo sapiens
  CDR3 for alpha chain variable domain of TCR clone 345148 (TRAV2, TRAJ29)
CAGPFQYGNTPLVF

SEQ ID NO: 690296 - protein, 15 aa, Homo sapiens
  CDR3 for beta chain variable domain of TCR clone 345148 (TRBV7-2, TRBJ2-1)
CASSLVGSSYNEQFF

SEQ ID NO: 690297 - protein, 11 aa, Homo sapiens
  CDR3 for alpha chain variable domain of TCR clone 345149 (TRAV1-1, TRAJ23)
CAVRQGGKLIF

SEQ ID NO: 690298 - protein, 20 aa, Homo sapiens
  CDR3 for beta chain variable domain of TCR clone 345149 (TRBV11-2, TRBJ1-6)
CASSLVFATGGSVQPSTLGT

SEQ ID NO: 690299 - protein, 13 aa, Homo sapiens
  CDR3 for alpha chain variable domain of TCR clone 345150 (TRAV12-2, TRAJ20)
CAVYPSNDYKLSF

SEQ ID NO: 690300 - protein, 15 aa, Homo sapiens
  CDR3 for beta chain variable domain of TCR clone 345150 (TRBV18, TRBJ1-2)
CASSPGNGLWYGYTF

SEQ ID NO: 690301 - protein, 14 aa, Homo sapiens
  CDR3 for alpha chain variable domain of TCR clone 345151 (TRAV1-2, TRAJ16)
CAVNRFSDGQKLLF

SEQ ID NO: 690302 - protein, 15 aa, Homo sapiens
  CDR3 for beta chain variable domain of TCR clone 345151 (TRBV2, TRBJ2-1)
CASSKEREGDNEQFF

SEQ ID NO: 690303 - protein, 13 aa, Homo sapiens
  CDR3 for alpha chain variable domain of TCR clone 345152 (TRAV21, TRAJ3)
CAVRGSSASKIIF

SEQ ID NO: 690304 - protein, 17 aa, Homo sapiens
  CDR3 for beta chain variable domain of TCR clone 345152 (TRBV5-7, TRBJ2-5)
CASSWIQDRGREGTQFF

SEQ ID NO: 690305 - protein, 15 aa, Homo sapiens
  CDR3 for alpha chain variable domain of TCR clone 345153 (TRAV13-2, TRAJ10)
CAENRDTGGGNKLTF

SEQ ID NO: 690306 - protein, 16 aa, Homo sapiens
  CDR3 for beta chain variable domain of TCR clone 345153 (TRBV6-1, TRBJ2-5)
CASSETLDRGAETQYF

SEQ ID NO: 690307 - protein, 15 aa, Homo sapiens
  CDR3 for alpha chain variable domain of TCR clone 345154 (TRAV9-2, TRAJ49)
CALSPPDYTGNQFYF

SEQ ID NO: 690308 - protein, 14 aa, Homo sapiens
  CDR3 for beta chain variable domain of TCR clone 345154 (TRBV12-4, TRBJ1-1)
CASSLGTGGTEAFF

SEQ ID NO: 690309 - protein, 14 aa, Homo sapiens
  CDR3 for alpha chain variable domain of TCR clone 345155 (TRAV13-1, TRAJ53)
CAANSGGSNYKLTF

SEQ ID NO: 690310 - protein, 16 aa, Homo sapiens
  CDR3 for beta chain variable domain of TCR clone 345155 (TRBV12-5, TRBJ2-5)
CASGPRTSGNQETQYF

SEQ ID NO: 690311 - protein, 18 aa, Homo sapiens
  CDR3 for alpha chain variable domain of TCR clone 345156 (TRAV9-2, TRAJ52)
GALSRHNAGGTSYGKLTF

SEQ ID NO: 690312 - protein, 13 aa, Homo sapiens
  CDR3 for beta chain variable domain of TCR clone 345156 (TRBV7-9, TRBJ1-2)
CASSLKQNYGYTL

SEQ ID NO: 690313 - protein, 13 aa, Homo sapiens
  CDR3 for alpha chain variable domain of TCR clone 345157 (TRAV8-6, TRAJ54)
CAVEAQGAQKLVF

SEQ ID NO: 690314 - protein, 13 aa, Homo sapiens
  CDR3 for beta chain variable domain of TCR clone 345157 (TRBV12-4, TRBJ2-7)
CASSPTETYEQYF

SEQ ID NO: 690315 - protein, 12 aa, Homo sapiens
  CDR3 for alpha chain variable domain of TCR clone 345158 (TRAV17, TRAJ53)
CAGGGSNYKLTF

SEQ ID NO: 690316 - protein, 15 aa, Homo sapiens
  CDR3 for beta chain variable domain of TCR clone 345158 (TRBV6-3, TRBJ2-2)
CASSFLATLTGELFF

SEQ ID NO: 690317 - protein, 11 aa, Homo sapiens
  CDR3 for alpha chain variable domain of TCR clone 345159 (TRAV21, TRAJ34)
CAVTNTDKLIF

SEQ ID NO: 690318 - protein, 16 aa, Homo sapiens
  CDR3 for beta chain variable domain of TCR clone 345159 (TRBV12-5, TRBJ2-5)
CASGSRTSGNQETQYF

SEQ ID NO: 690319 - protein, 16 aa, Homo sapiens
  CDR3 for alpha chain variable domain of TCR clone 345160 (TRAV3, TRAJ5)
CAVRNLMDTARRALTF

SEQ ID NO: 690320 - protein, 16 aa, Homo sapiens
  CDR3 for beta chain variable domain of TCR clone 345160 (TRBV4-2, TRBJ2-7)
CASSQEGLANSYEQYF

SEQ ID NO: 690321 - protein, 14 aa, Homo sapiens
  CDR3 for alpha chain variable domain of TCR clone 345161 (TRAV1-2, TRAJ8)
CAVREDTGFQKLVF

SEQ ID NO: 690322 - protein, 17 aa, Homo sapiens
  CDR3 for beta chain variable domain of TCR clone 345161 (TRBV7-8, TRBJ1-5)
CASSRRDRAPLGQPQHF

SEQ ID NO: 690323 - protein, 14 aa, Homo sapiens
  CDR3 for alpha chain variable domain of TCR clone 345162 (TRAV26-1, TRAJ21)
CNVRVGHNFNKFYF

SEQ ID NO: 690324 - protein, 15 aa, Homo sapiens
  CDR3 for beta chain variable domain of TCR clone 345162 (TRBV4-3, TRBJ2-1)
CASSQGLAGSNEQFF

SEQ ID NO: 690325 - protein, 14 aa, Homo sapiens
  CDR3 for alpha chain variable domain of TCR clone 345163 (TRAV16, TRAJ33)
CGLSAMDSNYKLIW

SEQ ID NO: 690326 - protein, 16 aa, Homo sapiens
  CDR3 for beta chain variable domain of TCR clone 345163 (TRBV12-4, TRBJ2-3)
CASSFPSNTNTDTQYF

SEQ ID NO: 690327 - protein, 12 aa, Homo sapiens
  CDR3 for alpha chain variable domain of TCR clone 345164 (TRAV30, TRAJ31)
CGTAKHNARLMF

SEQ ID NO: 690328 - protein, 16 aa, Homo sapiens
  CDR3 for beta chain variable domain of TCR clone 345164 (TRBV2, TRBJ2-1)
CASSVGGSLSYNEQFF

SEQ ID NO: 690329 - protein, 14 aa, Homo sapiens
  CDR3 for alpha chain variable domain of TCR clone 345165 (TRAV1-2, TRAJ8)
CAVREDTGFQKLVF

SEQ ID NO: 690330 - protein, 12 aa, Homo sapiens
  CDR3 for beta chain variable domain of TCR clone 345165 (TRBV14, TRBJ2-7)
CTSSSLKGEQYF

SEQ ID NO: 690331 - protein, 13 aa, Homo sapiens
  CDR3 for alpha chain variable domain of TCR clone 345166 (TRAV20, TRAJ21)
CAVEGYNFNKFYF

SEQ ID NO: 690332 - protein, 14 aa, Homo sapiens
  CDR3 for beta chain variable domain of TCR clone 345166 (TRBV12-5, TRBJ2-5)
CASGSRTHQETQYV

SEQ ID NO: 690333 - protein, 14 aa, Homo sapiens
  CDR3 for alpha chain variable domain of TCR clone 345167 (TRAV20, TRAJ26)
CAVQAAIYGQTFVF

SEQ ID NO: 690334 - protein, 14 aa, Homo sapiens
  CDR3 for beta chain variable domain of TCR clone 345167 (TRBV27, TRBJ2-2)
CASSLGDTTGELFF

SEQ ID NO: 690335 - protein, 16 aa, Homo sapiens
  CDR3 for alpha chain variable domain of TCR clone 345168 (TRAV30, TRAJ24)
CGTEIVDADSWGKFQV

SEQ ID NO: 690336 - protein, 14 aa, Homo sapiens
  CDR3 for beta chain variable domain of TCR clone 345168 (TRBV12-5, TRBJ2-5)
CAGGSRTHQETQYF

SEQ ID NO: 690337 - protein, 14 aa, Homo sapiens
  CDR3 for alpha chain variable domain of TCR clone 345169 (TRAV26-1, TRAJ49)
CIVRLTNTGNQFYF

SEQ ID NO: 690338 - protein, 14 aa, Homo sapiens
  CDR3 for beta chain variable domain of TCR clone 345169 (TRBV7-6, TRBJ2-3)
CASSLGTVTDTQYF

SEQ ID NO: 690339 - protein, 12 aa, Homo sapiens
  CDR3 for alpha chain variable domain of TCR clone 345170 (TRAV13-1, TRAJ42)
VNYGGSQGNLIF

SEQ ID NO: 690340 - protein, 14 aa, Homo sapiens
  CDR3 for beta chain variable domain of TCR clone 345170 (TRBV7-9, TRBJ2-7)
CASSLEGTSSTSGR

SEQ ID NO: 690341 - protein, 12 aa, Homo sapiens
  CDR3 for alpha chain variable domain of TCR clone 345171 (TRAV35, TRAJ43)
CAGAYNNNDLRF

SEQ ID NO: 690342 - protein, 14 aa, Homo sapiens
  CDR3 for beta chain variable domain of TCR clone 345171 (TRBV2, TRBJ2-2)
CASSWQGATGELFF

SEQ ID NO: 690343 - protein, 13 aa, Homo sapiens
  CDR3 for alpha chain variable domain of TCR clone 345172 (TRAV8-3, TRAJ42)
CAVDGGSQGNLIF

SEQ ID NO: 690344 - protein, 14 aa, Homo sapiens
  CDR3 for beta chain variable domain of TCR clone 345172 (TRBV4-2, TRBJ2-7)
CASSHRTGEYEQYF

SEQ ID NO: 690345 - protein, 11 aa, Homo sapiens
  CDR3 for alpha chain variable domain of TCR clone 345173 (TRAV12-3, TRAJ49)
CAANTGNQFYF

SEQ ID NO: 690346 - protein, 16 aa, Homo sapiens
  CDR3 for beta chain variable domain of TCR clone 345173 (TRBV7-9, TRBJ2-3)
CASSPWRAVGTDTQYF

SEQ ID NO: 690347 - protein, 11 aa, Homo sapiens
  CDR3 for alpha chain variable domain of TCR clone 345174 (TRAV1-1, TRAJ5)
CAVRVRRALTF

SEQ ID NO: 690348 - protein, 18 aa, Homo sapiens
  CDR3 for beta chain variable domain of TCR clone 345174 (TRBV12-4, TRBJ1-2)
CASSPNPGQAGPYYGYAF

SEQ ID NO: 690349 - protein, 15 aa, Homo sapiens
  CDR3 for alpha chain variable domain of TCR clone 345175 (TRAV20, TRAJ52)
CAVQAGGTSYGKLTF

SEQ ID NO: 690350 - protein, 13 aa, Homo sapiens
  CDR3 for beta chain variable domain of TCR clone 345175 (TRBV20-1, TRBJ1-1)
CSARGGGNTEAFF

SEQ ID NO: 690351 - protein, 18 aa, Homo sapiens
  CDR3 for alpha chain variable domain of TCR clone 345176 (TRAV1-2, TRAJ18)
CAVRDMGDRGSTLGRLYF

SEQ ID NO: 690352 - protein, 16 aa, Homo sapiens
  CDR3 for beta chain variable domain of TCR clone 345176 (TRBV29-1, TRBJ1-2)
CSIEANRDIANYGYTF

SEQ ID NO: 690353 - protein, 14 aa, Homo sapiens
  CDR3 for alpha chain variable domain of TCR clone 345177 (TRAV12-2, TRAJ3)
CAVILYSSASKIIF

SEQ ID NO: 690354 - protein, 14 aa, Homo sapiens
  CDR3 for beta chain variable domain of TCR clone 345177 (TRBV27, TRBJ2-1)
CAGSIAETYNEQFF

SEQ ID NO: 690355 - protein, 15 aa, Homo sapiens
  CDR3 for alpha chain variable domain of TCR clone 345178 (TRAV26-1, TRAJ15)
CIVRAANQAGTALIF

SEQ ID NO: 690356 - protein, 15 aa, Homo sapiens
  CDR3 for beta chain variable domain of TCR clone 345178 (TRBV20-1, TRBJ1-1)
CSARSAATSITEAFF

SEQ ID NO: 690357 - protein, 13 aa, Homo sapiens
  CDR3 for alpha chain variable domain of TCR clone 345179 (TRAV3, TRAJ38)
CAVRDCLNAGNNH

SEQ ID NO: 690358 - protein, 15 aa, Homo sapiens
  CDR3 for beta chain variable domain of TCR clone 345179 (TRBV6-5, TRBJ2-1)
CASSYDAGAGNEQFF

SEQ ID NO: 690359 - protein, 12 aa, Homo sapiens
  CDR3 for alpha chain variable domain of TCR clone 345180 (TRAV13-2, TRAJ8)
CAPWLGFQKLVF

SEQ ID NO: 690360 - protein, 15 aa, Homo sapiens
  CDR3 for beta chain variable domain of TCR clone 345180 (TRBV19, TRBJ2-3)
CASSMSTTSTDTQYF

SEQ ID NO: 690361 - protein, 18 aa, Homo sapiens
  CDR3 for alpha chain variable domain of TCR clone 345181 (TRAV29/DV5, TRAJ52)
CAPGFRVAGGTSYGKLTF

SEQ ID NO: 690362 - protein, 16 aa, Homo sapiens
  CDR3 for beta chain variable domain of TCR clone 345181 (TRBV7-3, TRBJ2-2)
CASSLKRGTLSGELFF

SEQ ID NO: 690363 - protein, 15 aa, Homo sapiens
  CDR3 for alpha chain variable domain of TCR clone 345182 (TRAV2, TRAJ15)
CAVEDRNQAGTALIF

SEQ ID NO: 690364 - protein, 13 aa, Homo sapiens
  CDR3 for beta chain variable domain of TCR clone 345182 (TRBV10-2, TRBJ2-7)
CDSSESGVYEQYF

SEQ ID NO: 690365 - protein, 13 aa, Homo sapiens
  CDR3 for alpha chain variable domain of TCR clone 345183 (TRAV8-4, TRAJ54)
CAVRIQGAQKRVF

SEQ ID NO: 690366 - protein, 15 aa, Homo sapiens
  CDR3 for beta chain variable domain of TCR clone 345183 (TRBV5-5, TRBJ2-7)
CASSLAAPLSYEQYF

SEQ ID NO: 690367 - protein, 16 aa, Homo sapiens
  CDR3 for alpha chain variable domain of TCR clone 345184 (TRAV16, TRAJ52)
CALSGGGGTSYGKLTF

SEQ ID NO: 690368 - protein, 14 aa, Homo sapiens
  CDR3 for beta chain variable domain of TCR clone 345184 (TRBV19, TRBJ1-2)
CASSLQGQAYGYTF

SEQ ID NO: 690369 - protein, 14 aa, Homo sapiens
  CDR3 for alpha chain variable domain of TCR clone 345185 (TRAV3, TRAJ9)
CAVIGNTGGFKTIF

SEQ ID NO: 690370 - protein, 16 aa, Homo sapiens
  CDR3 for beta chain variable domain of TCR clone 345185 (TRBV7-2, TRBJ2-7)
CASSLGLAGGAYEQYF

SEQ ID NO: 690371 - protein, 16 aa, Homo sapiens
  CDR3 for alpha chain variable domain of TCR clone 345186 (TRAV3, TRAJ21)
CAVRDIERGNFNKFYF

SEQ ID NO: 690372 - protein, 13 aa, Homo sapiens
  CDR3 for beta chain variable domain of TCR clone 345186 (TRBV27, TRBJ2-7)
RTSSLTTGYEQYF

SEQ ID NO: 690373 - protein, 11 aa, Homo sapiens
  CDR3 for alpha chain variable domain of TCR clone 345187 (TRAV2, TRAJ13)
CASGGYQKVTF

SEQ ID NO: 690374 - protein, 17 aa, Homo sapiens
  CDR3 for beta chain variable domain of TCR clone 345187 (TRBV7-8, TRBJ2-6)
WASSAGTGGAGANVLTF

SEQ ID NO: 690375 - protein, 13 aa, Homo sapiens
  CDR3 for alpha chain variable domain of TCR clone 345188 (TRAV13-1, TRAJ39)
CSASIWAGNMLTF

SEQ ID NO: 690376 - protein, 15 aa, Homo sapiens
  CDR3 for beta chain variable domain of TCR clone 345188 (TRBV7-9, TRBJ1-1)
CASSLLEQGGNEAFF

SEQ ID NO: 690377 - protein, 16 aa, Homo sapiens
  CDR3 for alpha chain variable domain of TCR clone 345189 (TRAV27, TRAJ13)
CAGAKSDSGGYQKVTF

SEQ ID NO: 690378 - protein, 15 aa, Homo sapiens
  CDR3 for beta chain variable domain of TCR clone 345189 (TRBV12-4, TRBJ2-2)
CASGPGQLNTGELFF

SEQ ID NO: 690379 - protein, 12 aa, Homo sapiens
  CDR3 for alpha chain variable domain of TCR clone 345190 (TRAV20, TRAJ33)
CAVRGSNYHLIW

SEQ ID NO: 690380 - protein, 13 aa, Homo sapiens
  CDR3 for beta chain variable domain of TCR clone 345190 (TRBV4-3, TRBJ1-1)
CASSPTGNTEAFF

SEQ ID NO: 690381 - protein, 15 aa, Homo sapiens
  CDR3 for alpha chain variable domain of TCR clone 345191 (TRAV3, TRAJ16)
CAVRDGLSDGQKLLF

SEQ ID NO: 690382 - protein, 17 aa, Homo sapiens
  CDR3 for beta chain variable domain of TCR clone 345191 (TRBV6-1, TRBJ2-3)
CASRTRGLAQSTDTQYF

SEQ ID NO: 690383 - protein, 17 aa, Homo sapiens
  CDR3 for alpha chain variable domain of TCR clone 345192 (TRAV3, TRAJ38)
CAVRGCLNAGNNRKLIW

SEQ ID NO: 690384 - protein, 16 aa, Homo sapiens
  CDR3 for beta chain variable domain of TCR clone 345192 (TRBV20-1, TRBJ1-4)
YSAPGQGLLTNEKLFF

SEQ ID NO: 690385 - protein, 16 aa, Homo sapiens
  CDR3 for alpha chain variable domain of TCR clone 345193 (TRAV20, TRAJ22)
CSVQASSSGSASQLTF

SEQ ID NO: 690386 - protein, 13 aa, Homo sapiens
  CDR3 for beta chain variable domain of TCR clone 345193 (TRBV7-2, TRBJ2-5)
CASSQTSVETQYF

SEQ ID NO: 690387 - protein, 12 aa, Homo sapiens
  CDR3 for alpha chain variable domain of TCR clone 345194 (TRAV12-3, TRAJ17)
CAMTLTGNKLTF

SEQ ID NO: 690388 - protein, 19 aa, Homo sapiens
  CDR3 for beta chain variable domain of TCR clone 345194 (TRBV4-2, TRBJ2-6)
CASSQIRDRYISGANVLTF

SEQ ID NO: 690389 - protein, 13 aa, Homo sapiens
  CDR3 for alpha chain variable domain of TCR clone 345195 (TRAV12-3, TRAJ13)
CAMTSGGYQKVTF

SEQ ID NO: 690390 - protein, 15 aa, Homo sapiens
  CDR3 for beta chain variable domain of TCR clone 345195 (TRBV11-3, TRBJ2-3)
CASLKDGREGDTQYF

SEQ ID NO: 690391 - protein, 11 aa, Homo sapiens
  CDR3 for alpha chain variable domain of TCR clone 345196 (TRAV22, TRAJ30)
CAGNRDDKIIF

SEQ ID NO: 690392 - protein, 12 aa, Homo sapiens
  CDR3 for beta chain variable domain of TCR clone 345196 (TRBV11-2, TRBJ2-2)
CASSLPTGELFF

SEQ ID NO: 690393 - protein, 15 aa, Homo sapiens
  CDR3 for alpha chain variable domain of TCR clone 345197 (TRAV27, TRAJ38)
CAARRNAGNNRKLIW

SEQ ID NO: 690394 - protein, 17 aa, Homo sapiens
  CDR3 for beta chain variable domain of TCR clone 345197 (TRBV20-1, TRBJ2-1)
CSAPPRLAGTRYNEQFF

SEQ ID NO: 690395 - protein, 12 aa, Homo sapiens
  CDR3 for alpha chain variable domain of TCR clone 345198 (TRAV21, TRAJ27)
CAANTNAGKSTF

SEQ ID NO: 690396 - protein, 16 aa, Homo sapiens
  CDR3 for beta chain variable domain of TCR clone 345198 (TRBV7-2, TRBJ1-2)
CASSPTSGTSLGGYTF

SEQ ID NO: 690397 - protein, 16 aa, Homo sapiens
  CDR3 for alpha chain variable domain of TCR clone 345199 (TRAV26-1, )
CIDIQNPDPAVYQLRD

SEQ ID NO: 690398 - protein, 19 aa, Homo sapiens
  CDR3 for beta chain variable domain of TCR clone 345199 (TRBV19, TRBJ2-5)
CASSVGQVTDFFLGETQYF

SEQ ID NO: 690399 - protein, 16 aa, Homo sapiens
  CDR3 for alpha chain variable domain of TCR clone 345200 (TRAV21, TRAJ17)
CAVRPGDEAAGNKLTL

SEQ ID NO: 690400 - protein, 16 aa, Homo sapiens
  CDR3 for beta chain variable domain of TCR clone 345200 (TRBV2, TRBJ2-7)
CASSEPWTGPSYEQYF

SEQ ID NO: 690401 - protein, 11 aa, Homo sapiens
  CDR3 for alpha chain variable domain of TCR clone 345201 (TRAV2, TRAJ33)
CAVDSNYQLIW

SEQ ID NO: 690402 - protein, 15 aa, Homo sapiens
  CDR3 for beta chain variable domain of TCR clone 345201 (TRBV19, TRBJ1-2)
CASSVGQFLNYGYTF

SEQ ID NO: 690403 - protein, 13 aa, Homo sapiens
  CDR3 for alpha chain variable domain of TCR clone 345202 (TRAV20, TRAJ37)
CAGCSSNTCKLIF

SEQ ID NO: 690404 - protein, 13 aa, Homo sapiens
  CDR3 for beta chain variable domain of TCR clone 345202 (TRBV10-3, TRBJ2-7)
CASKLAVNYEQYF

SEQ ID NO: 690405 - protein, 15 aa, Homo sapiens
  CDR3 for alpha chain variable domain of TCR clone 345203 (TRAV3, TRAJ5)
CAVRDRKTGRRALTF

SEQ ID NO: 690406 - protein, 14 aa, Homo sapiens
  CDR3 for beta chain variable domain of TCR clone 345203 (TRBV7-8, TRBJ2-1)
CSSLADSLYNEQFF

SEQ ID NO: 690407 - protein, 11 aa, Homo sapiens
  CDR3 for alpha chain variable domain of TCR clone 345204 (TRAV35, TRAJ34)
CWARNTDTLIF

SEQ ID NO: 690408 - protein, 13 aa, Homo sapiens
  CDR3 for beta chain variable domain of TCR clone 345204 (TRBV19, TRBJ2-7)
CASSIDRTYEQYF

SEQ ID NO: 690409 - protein, 14 aa, Homo sapiens
  CDR3 for alpha chain variable domain of TCR clone 345205 (TRAV1-2, TRAJ8)
CAVREDTGFQKLVF

SEQ ID NO: 690410 - protein, 13 aa, Homo sapiens
  CDR3 for beta chain variable domain of TCR clone 345205 (TRBV27, TRBJ1-1)
CSSSLSIGAEAFF

SEQ ID NO: 690411 - protein, 10 aa, Homo sapiens
  CDR3 for alpha chain variable domain of TCR clone 345206 (TRAV23/DV6, TRAJ57)
CAAISTLSQV

SEQ ID NO: 690412 - protein, 14 aa, Homo sapiens
  CDR3 for beta chain variable domain of TCR clone 345206 (TRBV25-1, TRBJ1-1)
CASTHLGGNTEAFF

SEQ ID NO: 690413 - protein, 15 aa, Homo sapiens
  CDR3 for alpha chain variable domain of TCR clone 345207 (TRAV4, TRAJ39)
CLEGPNNNAGNMLTF

SEQ ID NO: 690414 - protein, 13 aa, Homo sapiens
  CDR3 for beta chain variable domain of TCR clone 345207 (TRBV11-2, TRBJ2-5)
CASSSTGEETQYF

SEQ ID NO: 690415 - protein, 15 aa, Homo sapiens
  CDR3 for alpha chain variable domain of TCR clone 345208 (TRAV23/DV6, TRAJ37)
CAAGEGSSNTGKLIF

SEQ ID NO: 690416 - protein, 12 aa, Homo sapiens
  CDR3 for beta chain variable domain of TCR clone 345208 (TRBV7-8, TRBJ2-7)
CASSLGDREQYF

SEQ ID NO: 690417 - protein, 15 aa, Homo sapiens
  CDR3 for alpha chain variable domain of TCR clone 345209 (TRAV12-2, TRAJ53)
CAVNGGGGSNYKLTL

SEQ ID NO: 690418 - protein, 13 aa, Homo sapiens
  CDR3 for beta chain variable domain of TCR clone 345209 (TRBV12-4, TRBJ1-5)
CASSPDRTQPQHF

SEQ ID NO: 690419 - protein, 12 aa, Homo sapiens
  CDR3 for alpha chain variable domain of TCR clone 345210 (TRAV25, TRAJ17)
CAGEAAGNKLTF

SEQ ID NO: 690420 - protein, 14 aa, Homo sapiens
  CDR3 for beta chain variable domain of TCR clone 345210 (TRBV5-1, TRBJ2-1)
CASSALWAGNEQFS

SEQ ID NO: 690421 - protein, 11 aa, Homo sapiens
  CDR3 for alpha chain variable domain of TCR clone 345211 (TRAV29/DV5, TRAJ31)
CAESYRERLMF

SEQ ID NO: 690422 - protein, 19 aa, Homo sapiens
  CDR3 for beta chain variable domain of TCR clone 345211 (TRBV19, TRBJ2-5)
CASSIGQVTDFFLGETQYF

SEQ ID NO: 690423 - protein, 14 aa, Homo sapiens
  CDR3 for alpha chain variable domain of TCR clone 345212 (TRAV8-4, TRAJ54)
CAVSEVLGAQKLVF

SEQ ID NO: 690424 - protein, 13 aa, Homo sapiens
  CDR3 for beta chain variable domain of TCR clone 345212 (TRBV27, TRBJ2-7)
CASSFVFSYEQYF

SEQ ID NO: 690425 - protein, 11 aa, Homo sapiens
  CDR3 for alpha chain variable domain of TCR clone 345213 (TRAV1-2, TRAJ31)
CAVNNNARLMF

SEQ ID NO: 690426 - protein, 15 aa, Homo sapiens
  CDR3 for beta chain variable domain of TCR clone 345213 (TRBV28, TRBJ2-1)
CASSIITGGRSERFF

SEQ ID NO: 690427 - protein, 14 aa, Homo sapiens
  CDR3 for alpha chain variable domain of TCR clone 345214 (TRAV27, TRAJ22)
CAGVVPGSARQLTF

SEQ ID NO: 690428 - protein, 14 aa, Homo sapiens
  CDR3 for beta chain variable domain of TCR clone 345214 (TRBV7-2, TRBJ2-7)
CASSPKTSFYEQYF

SEQ ID NO: 690429 - protein, 14 aa, Homo sapiens
  CDR3 for alpha chain variable domain of TCR clone 345215 (TRAV29/DV5, TRAJ13)
CASSLSGGYQKVTF

SEQ ID NO: 690430 - protein, 15 aa, Homo sapiens
  CDR3 for beta chain variable domain of TCR clone 345215 (TRBV10-1, TRBJ2-1)
CASSTGTELYNEQFF

SEQ ID NO: 690431 - protein, 18 aa, Homo sapiens
  CDR3 for alpha chain variable domain of TCR clone 345216 (TRAV3, TRAJ17)
CAVRDGPPKAAAGNKLTF

SEQ ID NO: 690432 - protein, 14 aa, Homo sapiens
  CDR3 for beta chain variable domain of TCR clone 345216 (TRBV4-1, TRBJ2-2)
CASSQAVNTGELFF

SEQ ID NO: 690433 - protein, 12 aa, Homo sapiens
  CDR3 for alpha chain variable domain of TCR clone 345217 (TRAV1-1, TRAJ8)
CAGGTGFQKLVF

SEQ ID NO: 690434 - protein, 14 aa, Homo sapiens
  CDR3 for beta chain variable domain of TCR clone 345217 (TRBV7-9, TRBJ1-1)
CASSLGGANTEAFF

SEQ ID NO: 690435 - protein, 12 aa, Homo sapiens
  CDR3 for alpha chain variable domain of TCR clone 345218 (TRAV17, TRAJ20)
CATALNDCKLSF

SEQ ID NO: 690436 - protein, 12 aa, Homo sapiens
  CDR3 for beta chain variable domain of TCR clone 345218 (TRBV10-3, TRBJ2-7)
CAHGADSGEQYF

SEQ ID NO: 690437 - protein, 12 aa, Homo sapiens
  CDR3 for alpha chain variable domain of TCR clone 345219 (TRAV12-3, TRAJ41)
CAMSYSGYALNF

SEQ ID NO: 690438 - protein, 13 aa, Homo sapiens
  CDR3 for beta chain variable domain of TCR clone 345219 (TRBV7-3, TRBJ2-7)
CASSLDSYNEQFF

SEQ ID NO: 690439 - protein, 15 aa, Homo sapiens
  CDR3 for alpha chain variable domain of TCR clone 345220 (TRAV26-1, TRAJ56)
CIVRVATGANSKLTF

SEQ ID NO: 690440 - protein, 17 aa, Homo sapiens
  CDR3 for beta chain variable domain of TCR clone 345220 (TRBV7-3, TRBJ2-3)
CASSLMKRMRGADTQYF

SEQ ID NO: 690441 - protein, 18 aa, Homo sapiens
  CDR3 for alpha chain variable domain of TCR clone 345221 (TRAV26-1, TRAJ23)
CIVRVGLEAGNQGGKLIF

SEQ ID NO: 690442 - protein, 16 aa, Homo sapiens
  CDR3 for beta chain variable domain of TCR clone 345221 (TRBV12-4, TRBJ2-5)
CASSFFVRGRQETQYF

SEQ ID NO: 690443 - protein, 17 aa, Homo sapiens
  CDR3 for alpha chain variable domain of TCR clone 345222 (TRAV17, TRAJ52)
CATDRNAGGTSYGKLTF

SEQ ID NO: 690444 - protein, 20 aa, Homo sapiens
  CDR3 for beta chain variable domain of TCR clone 345222 (TRBV7-8, TRBJ2-2)
CASSHLFPGPTIHITGELFF

SEQ ID NO: 690445 - protein, 14 aa, Homo sapiens
  CDR3 for alpha chain variable domain of TCR clone 345223 (TRAV12-3, TRAJ10)
SHLPLTGGGNKLTF

SEQ ID NO: 690446 - protein, 15 aa, Homo sapiens
  CDR3 for beta chain variable domain of TCR clone 345223 (TRBV7-2, TRBJ2-1)
CASRKTGSSYNEQFF

SEQ ID NO: 690447 - protein, 15 aa, Homo sapiens
  CDR3 for alpha chain variable domain of TCR clone 345224 (TRAV26-1, TRAJ31)
CIVRVEGGNNARLMF

SEQ ID NO: 690448 - protein, 17 aa, Homo sapiens
  CDR3 for beta chain variable domain of TCR clone 345224 (TRBV5-5, TRBJ1-5)
CASSSRVHDPGNQPQHF

SEQ ID NO: 690449 - protein, 14 aa, Homo sapiens
  CDR3 for alpha chain variable domain of TCR clone 345225 (TRAV12-2, TRAJ23)
CAVGGYNQGGKLIF

SEQ ID NO: 690450 - protein, 15 aa, Homo sapiens
  CDR3 for beta chain variable domain of TCR clone 345225 (TRBV20-1, TRBJ2-3)
CSASSEGPRTDTQYF

SEQ ID NO: 690451 - protein, 16 aa, Homo sapiens
  CDR3 for alpha chain variable domain of TCR clone 345226 (TRAV26-1, TRAJ37)
CIVRGDGSGNTGKLIF

SEQ ID NO: 690452 - protein, 17 aa, Homo sapiens
  CDR3 for beta chain variable domain of TCR clone 345226 (TRBV20-1, TRBJ2-7)
CSAAGTSGGGSSYEQYF

SEQ ID NO: 690453 - protein, 14 aa, Homo sapiens
  CDR3 for alpha chain variable domain of TCR clone 345227 (TRAV1-2, TRAJ8)
CAVREDTGFQKLVF

SEQ ID NO: 690454 - protein, 13 aa, Homo sapiens
  CDR3 for beta chain variable domain of TCR clone 345227 (TRBV28, TRBJ2-7)
CAGAQQGLDEQYF

SEQ ID NO: 690455 - protein, 16 aa, Homo sapiens
  CDR3 for alpha chain variable domain of TCR clone 345228 (TRAV30, TRAJ24)
CGTEIVDADSWGKFQF

SEQ ID NO: 690456 - protein, 11 aa, Homo sapiens
  CDR3 for beta chain variable domain of TCR clone 345228 (TRBV7-9, TRBJ1-6)
CASSSNSPLHF

SEQ ID NO: 690457 - protein, 16 aa, Homo sapiens
  CDR3 for alpha chain variable domain of TCR clone 345229 (TRAV12-2, TRAJ45)
CAVIFLSGGGADGLTF

SEQ ID NO: 690458 - protein, 12 aa, Homo sapiens
  CDR3 for beta chain variable domain of TCR clone 345229 (TRBV11-2, TRBJ2-2)
CASSLGGGELFF

SEQ ID NO: 690459 - protein, 13 aa, Homo sapiens
  CDR3 for alpha chain variable domain of TCR clone 345230 (TRAV16, TRAJ10)
CAPAREEETNSTL

SEQ ID NO: 690460 - protein, 13 aa, Homo sapiens
  CDR3 for beta chain variable domain of TCR clone 345230 (TRBV10-3, TRBJ2-7)
CASKLAVNYEQYF

SEQ ID NO: 690461 - protein, 12 aa, Homo sapiens
  CDR3 for alpha chain variable domain of TCR clone 345231 (TRAV21, TRAJ26)
CAVDNYGQNFVF

SEQ ID NO: 690462 - protein, 10 aa, Homo sapiens
  CDR3 for beta chain variable domain of TCR clone 345231 (TRBV2, TRBJ2-5)
CASSAATQCF

SEQ ID NO: 690463 - protein, 11 aa, Homo sapiens
  CDR3 for alpha chain variable domain of TCR clone 345232 (TRAV12-2, TRAJ3)
CAVKRASKIIF

SEQ ID NO: 690464 - protein, 14 aa, Homo sapiens
  CDR3 for beta chain variable domain of TCR clone 345232 (TRBV11-2, TRBJ2-3)
CASSRLARADTQYF

SEQ ID NO: 690465 - protein, 14 aa, Homo sapiens
  CDR3 for alpha chain variable domain of TCR clone 345233 (TRAV12-2, TRAJ26)
CAVNDDNYGQNFVF

SEQ ID NO: 690466 - protein, 13 aa, Homo sapiens
  CDR3 for beta chain variable domain of TCR clone 345233 (TRBV3-1, TRBJ2-5)
CASSPVLSETQYL

SEQ ID NO: 690467 - protein, 12 aa, Homo sapiens
  CDR3 for alpha chain variable domain of TCR clone 345234 (TRAV17, TRAJ20)
CVTYSNDYKLSF

SEQ ID NO: 690468 - protein, 11 aa, Homo sapiens
  CDR3 for beta chain variable domain of TCR clone 345234 (TRBV4-1, TRBJ2-2)
CASEHTGELFF

SEQ ID NO: 690469 - protein, 12 aa, Homo sapiens
  CDR3 for alpha chain variable domain of TCR clone 345235 (TRAV8-3, TRAJ4)
WVGSGGYNKLIF

SEQ ID NO: 690470 - protein, 19 aa, Homo sapiens
  CDR3 for beta chain variable domain of TCR clone 345235 (TRBV19, TRBJ2-5)
CASSIGQVTDFFLGETQYF

SEQ ID NO: 690471 - protein, 16 aa, Homo sapiens
  CDR3 for alpha chain variable domain of TCR clone 345236 (TRAV20, TRAJ22)
CAVQASSSGSARQLTF

SEQ ID NO: 690472 - protein, 13 aa, Homo sapiens
  CDR3 for beta chain variable domain of TCR clone 345236 (TRBV12-4, TRBJ1-1)
CASSLGGTTEAFF

SEQ ID NO: 690473 - protein, 14 aa, Homo sapiens
  CDR3 for alpha chain variable domain of TCR clone 345237 (TRAV1-2, TRAJ16)
CAVNRFSDGQKLLF

SEQ ID NO: 690474 - protein, 17 aa, Homo sapiens
  CDR3 for beta chain variable domain of TCR clone 345237 (TRBV19, TRBJ1-1)
CASSIAGRGLMNTEAFF

SEQ ID NO: 690475 - protein, 17 aa, Homo sapiens
  CDR3 for alpha chain variable domain of TCR clone 345238 (TRAV3, TRAJ6)
CAVSRRTETGGSYIPAF

SEQ ID NO: 690476 - protein, 18 aa, Homo sapiens
  CDR3 for beta chain variable domain of TCR clone 345238 (TRBV7-2, TRBJ2-3)
CASSLETSRGRKADTQYF

SEQ ID NO: 690477 - protein, 14 aa, Homo sapiens
  CDR3 for alpha chain variable domain of TCR clone 345239 (TRAV12-2, TRAJ5)
CAVNRSTGRRALTF

SEQ ID NO: 690478 - protein, 12 aa, Homo sapiens
  CDR3 for beta chain variable domain of TCR clone 345239 (TRBV19, TRBJ1-5)
CACSIAQQPQHF

SEQ ID NO: 690479 - protein, 12 aa, Homo sapiens
  CDR3 for alpha chain variable domain of TCR clone 345240 (TRAV13-1, TRAJ21)
CAAKEGFNQFYF

SEQ ID NO: 690480 - protein, 13 aa, Homo sapiens
  CDR3 for beta chain variable domain of TCR clone 345240 (TRBV19, TRBJ1-2)
CASSVPGQDGYTF

SEQ ID NO: 690481 - protein, 12 aa, Homo sapiens
  CDR3 for alpha chain variable domain of TCR clone 345241 (TRAV13-1, TRAJ21)
CAAKEGFNKFYF

SEQ ID NO: 690482 - protein, 14 aa, Homo sapiens
  CDR3 for beta chain variable domain of TCR clone 345241 (TRBV5-4, TRBJ1-1)
CASSLDIRRYEAFF

SEQ ID NO: 690483 - protein, 14 aa, Homo sapiens
  CDR3 for alpha chain variable domain of TCR clone 345242 (TRAV12-1, TRAJ23)
CVVIVYNQGGKLIF

SEQ ID NO: 690484 - protein, 13 aa, Homo sapiens
  CDR3 for beta chain variable domain of TCR clone 345242 (TRBV10-3, TRBJ2-7)
CASKLAVNYEQYF

SEQ ID NO: 690485 - protein, 16 aa, Homo sapiens
  CDR3 for alpha chain variable domain of TCR clone 345243 (TRAV12-1, TRAJ42)
CVVTPYYGGSQGNLIF

SEQ ID NO: 690486 - protein, 13 aa, Homo sapiens
  CDR3 for beta chain variable domain of TCR clone 345243 (TRBV7-9, TRBJ2-5)
CASLPSGRETQYF

SEQ ID NO: 690487 - protein, 13 aa, Homo sapiens
  CDR3 for alpha chain variable domain of TCR clone 345244 (TRAV2, TRAJ40)
CAVVTSGTYKYFF

SEQ ID NO: 690488 - protein, 15 aa, Homo sapiens
  CDR3 for beta chain variable domain of TCR clone 345244 (TRBV11-3, TRBJ2-3)
CASLKDGREGDTQYF

SEQ ID NO: 690489 - protein, 15 aa, Homo sapiens
  CDR3 for alpha chain variable domain of TCR clone 345245 (TRAV27, TRAJ24)
CAGGTSADSWGKLQF

SEQ ID NO: 690490 - protein, 13 aa, Homo sapiens
  CDR3 for beta chain variable domain of TCR clone 345245 (TRBV7-2, TRBJ2-2)
CASSLAVTGELFF

SEQ ID NO: 690491 - protein, 15 aa, Homo sapiens
  CDR3 for alpha chain variable domain of TCR clone 345246 (TRAV8-3, TRAJ45)
CASSYSGGGADGLTF

SEQ ID NO: 690492 - protein, 16 aa, Homo sapiens
  CDR3 for beta chain variable domain of TCR clone 345246 (TRBV20-1, TRBJ2-2)
CSASASEIPGAGELFF

SEQ ID NO: 690493 - protein, 18 aa, Homo sapiens
  CDR3 for alpha chain variable domain of TCR clone 345247 (TRAV26-2, TRAJ45)
CILRLWGYSGGGDDGLTF

SEQ ID NO: 690494 - protein, 17 aa, Homo sapiens
  CDR3 for beta chain variable domain of TCR clone 345247 (TRBV28, TRBJ2-3)
CASSPTPAGGRVDTQYF

SEQ ID NO: 690495 - protein, 15 aa, Homo sapiens
  CDR3 for alpha chain variable domain of TCR clone 345248 (TRAV26-1, TRAJ12)
IASSELMDSSYKLIF

SEQ ID NO: 690496 - protein, 10 aa, Homo sapiens
  CDR3 for beta chain variable domain of TCR clone 345248 (TRBV7-9, TRBJ2-3)
CQQPPDTQYF

SEQ ID NO: 690497 - protein, 13 aa, Homo sapiens
  CDR3 for alpha chain variable domain of TCR clone 345249 (TRAV30, TRAJ27)
CAARPGNAGKSTF

SEQ ID NO: 690498 - protein, 14 aa, Homo sapiens
  CDR3 for beta chain variable domain of TCR clone 345249 (TRBV7-6, TRBJ2-3)
CASSLGTVTDTQYF

SEQ ID NO: 690499 - protein, 14 aa, Homo sapiens
  CDR3 for alpha chain variable domain of TCR clone 345250 (TRAV20, TRAJ42)
CAVQAGGSQGNLIF

SEQ ID NO: 690500 - protein, 15 aa, Homo sapiens
  CDR3 for beta chain variable domain of TCR clone 345250 (TRBV2, TRBJ2-1)
CASSEEREGDNEQFF

SEQ ID NO: 690501 - protein, 15 aa, Homo sapiens
  CDR3 for alpha chain variable domain of TCR clone 345251 (TRAV27, TRAJ38)
CAARRNAGNNRKLIW

SEQ ID NO: 690502 - protein, 16 aa, Homo sapiens
  CDR3 for beta chain variable domain of TCR clone 345251 (TRBV6-1, TRBJ2-5)
CASSETLGRGAETQYF

SEQ ID NO: 690503 - protein, 14 aa, Homo sapiens
  CDR3 for alpha chain variable domain of TCR clone 345252 (TRAV12-2, TRAJ40)
CAVKIPSGTYKYLF

SEQ ID NO: 690504 - protein, 17 aa, Homo sapiens
  CDR3 for beta chain variable domain of TCR clone 345252 (TRBV7-8, TRBJ2-6)
CASSAGTGGAGANVLTF

SEQ ID NO: 690505 - protein, 11 aa, Homo sapiens
  CDR3 for alpha chain variable domain of TCR clone 345253 (TRAV12-2, TRAJ31)
CAVTRWARLMF

SEQ ID NO: 690506 - protein, 15 aa, Homo sapiens
  CDR3 for beta chain variable domain of TCR clone 345253 (TRBV9, TRBJ1-6)
CASSVAGTGDSPLQF

SEQ ID NO: 690507 - protein, 14 aa, Homo sapiens
  CDR3 for alpha chain variable domain of TCR clone 345254 (TRAV12-3, TRAJ10)
SHLPLTGGGNKLTF

SEQ ID NO: 690508 - protein, 15 aa, Homo sapiens
  CDR3 for beta chain variable domain of TCR clone 345254 (TRBV19, TRBJ2-1)
CASSRPGQNYNEQFF

SEQ ID NO: 690509 - protein, 12 aa, Homo sapiens
  CDR3 for alpha chain variable domain of TCR clone 345255 (TRAV12-2, TRAJ20)
CAVRPSDYKLSF

SEQ ID NO: 690510 - protein, 13 aa, Homo sapiens
  CDR3 for beta chain variable domain of TCR clone 345255 (TRBV7-2, TRBJ2-5)
CASSQTSVETQYF

SEQ ID NO: 690511 - protein, 11 aa, Homo sapiens
  CDR3 for alpha chain variable domain of TCR clone 345256 (TRAV3, TRAJ21)
CAVGNFNTFYF

SEQ ID NO: 690512 - protein, 16 aa, Homo sapiens
  CDR3 for beta chain variable domain of TCR clone 345256 (TRBV19, TRBJ2-1)
CASSKAVPSSYNEQFF

SEQ ID NO: 690513 - protein, 16 aa, Homo sapiens
  CDR3 for alpha chain variable domain of TCR clone 345257 (TRAV8-6, TRAJ22)
CAVSPISSGSAWQLTF

SEQ ID NO: 690514 - protein, 14 aa, Homo sapiens
  CDR3 for beta chain variable domain of TCR clone 345257 (TRBV2, TRBJ2-1)
CASSARAAYNEQFF

SEQ ID NO: 690515 - protein, 16 aa, Homo sapiens
  CDR3 for alpha chain variable domain of TCR clone 345258 (TRAV30, TRAJ24)
CGTEIVAADSWGKFQF

SEQ ID NO: 690516 - protein, 14 aa, Homo sapiens
  CDR3 for beta chain variable domain of TCR clone 345258 (TRBV12-5, TRBJ2-5)
RASGSRTHQETQYF

SEQ ID NO: 690517 - protein, 14 aa, Homo sapiens
  CDR3 for alpha chain variable domain of TCR clone 345259 (TRAV1-2, TRAJ16)
CAVKRFSDGQKLLF

SEQ ID NO: 690518 - protein, 13 aa, Homo sapiens
  CDR3 for beta chain variable domain of TCR clone 345259 (TRBV20-1, TRBJ1-1)
CSAGGGGNTEAFF

SEQ ID NO: 690519 - protein, 15 aa, Homo sapiens
  CDR3 for alpha chain variable domain of TCR clone 345260 (TRAV35, TRAJ58)
CAGRRQETSGSRLTF

SEQ ID NO: 690520 - protein, 13 aa, Homo sapiens
  CDR3 for beta chain variable domain of TCR clone 345260 (TRBV12-4, TRBJ2-5)
CASRLAVQETQYF

SEQ ID NO: 690521 - protein, 13 aa, Homo sapiens
  CDR3 for alpha chain variable domain of TCR clone 345261 (TRAV12-2, TRAJ20)
CAVYPSNDYKLCF

SEQ ID NO: 690522 - protein, 15 aa, Homo sapiens
  CDR3 for beta chain variable domain of TCR clone 345261 (TRBV27, TRBJ2-5)
CASSLYPRGGETQYF

SEQ ID NO: 690523 - protein, 13 aa, Homo sapiens
  CDR3 for alpha chain variable domain of TCR clone 345262 (TRAV13-1, TRAJ42)
CAASELWRKPRKS

SEQ ID NO: 690524 - protein, 15 aa, Homo sapiens
  CDR3 for beta chain variable domain of TCR clone 345262 (TRBV20-1, TRBJ2-1)
CSASSARSSYNEQFF

SEQ ID NO: 690525 - protein, 15 aa, Homo sapiens
  CDR3 for alpha chain variable domain of TCR clone 345263 (TRAV27, TRAJ22)
CAGAPLTGSARQLTF

SEQ ID NO: 690526 - protein, 16 aa, Homo sapiens
  CDR3 for beta chain variable domain of TCR clone 345263 (TRBV19, TRBJ2-2)
CASTLGASGAPGELFF

SEQ ID NO: 690527 - protein, 10 aa, Homo sapiens
  CDR3 for alpha chain variable domain of TCR clone 345264 (TRAV38-2/DV8, TRAJ40)
CASGTFKYIF

SEQ ID NO: 690528 - protein, 14 aa, Homo sapiens
  CDR3 for beta chain variable domain of TCR clone 345264 (TRBV7-9, TRBJ2-1)
CASSPRDSLYEQFF

SEQ ID NO: 690529 - protein, 16 aa, Homo sapiens
  CDR3 for alpha chain variable domain of TCR clone 345265 (TRAV27, TRAJ52)
CAGAGAGGTSYGKLTF

SEQ ID NO: 690530 - protein, 17 aa, Homo sapiens
  CDR3 for beta chain variable domain of TCR clone 345265 (TRBV24-1, TRBJ2-3)
CAASDLPSGEDTDTQYF

SEQ ID NO: 690531 - protein, 16 aa, Homo sapiens
  CDR3 for alpha chain variable domain of TCR clone 345266 (TRAV3, TRAJ37)
CAVRGKGSGNTGKLFF

SEQ ID NO: 690532 - protein, 20 aa, Homo sapiens
  CDR3 for beta chain variable domain of TCR clone 345266 (TRBV28, TRBJ2-1)
CASTPIGRSPGLAGGNEQFF

SEQ ID NO: 690533 - protein, 13 aa, Homo sapiens
  CDR3 for alpha chain variable domain of TCR clone 345267 (TRAV26-2, TRAJ37)
CIRGSSNTGKLIF

SEQ ID NO: 690534 - protein, 16 aa, Homo sapiens
  CDR3 for beta chain variable domain of TCR clone 345267 (TRBV7-2, TRBJ2-5)
CASSPGGARRGETQYF

SEQ ID NO: 690535 - protein, 11 aa, Homo sapiens
  CDR3 for alpha chain variable domain of TCR clone 345268 (TRAV26-1, TRAJ37)
CIVRVGRKLIF

SEQ ID NO: 690536 - protein, 15 aa, Homo sapiens
  CDR3 for beta chain variable domain of TCR clone 345268 (TRBV7-3, TRBJ2-2)
CASSETGQGTGELFF

SEQ ID NO: 690537 - protein, 13 aa, Homo sapiens
  CDR3 for alpha chain variable domain of TCR clone 345269 (TRAV17, TRAJ5)
CAPMDTGRRALAF

SEQ ID NO: 690538 - protein, 15 aa, Homo sapiens
  CDR3 for beta chain variable domain of TCR clone 345269 (TRBV6-6, TRBJ2-5)
CASSPGGGLVETQYF

SEQ ID NO: 690539 - protein, 14 aa, Homo sapiens
  CDR3 for alpha chain variable domain of TCR clone 345270 (TRAV4, TRAJ9)
CLVGSGTGGFKTIF

SEQ ID NO: 690540 - protein, 13 aa, Homo sapiens
  CDR3 for beta chain variable domain of TCR clone 345270 (TRBV7-9, TRBJ2-1)
CASSLDVGNEQFF

SEQ ID NO: 690541 - protein, 13 aa, Homo sapiens
  CDR3 for alpha chain variable domain of TCR clone 345271 (TRAV16, TRAJ29)
CALSRRGNTPLVF

SEQ ID NO: 690542 - protein, 16 aa, Homo sapiens
  CDR3 for beta chain variable domain of TCR clone 345271 (TRBV14, TRBJ2-2)
CASSRSLGDDTGELFF

SEQ ID NO: 690543 - protein, 12 aa, Homo sapiens
  CDR3 for alpha chain variable domain of TCR clone 345272 (TRAV12-2, TRAJ52)
IGGGTSYGKLTF

SEQ ID NO: 690544 - protein, 13 aa, Homo sapiens
  CDR3 for beta chain variable domain of TCR clone 345272 (TRBV12-4, TRBJ1-1)
RASSPGTGFGAFF

SEQ ID NO: 690545 - protein, 14 aa, Homo sapiens
  CDR3 for alpha chain variable domain of TCR clone 345273 (TRAV2, TRAJ22)
CAVEDSGSARQLTF

SEQ ID NO: 690546 - protein, 15 aa, Homo sapiens
  CDR3 for beta chain variable domain of TCR clone 345273 (TRBV28, TRBJ1-2)
CASSLPVGHGDGYSF

SEQ ID NO: 690547 - protein, 14 aa, Homo sapiens
  CDR3 for alpha chain variable domain of TCR clone 345274 (TRAV1-2, TRAJ8)
CAVREDTGFQKLVF

SEQ ID NO: 690548 - protein, 15 aa, Homo sapiens
  CDR3 for beta chain variable domain of TCR clone 345274 (TRBV4-1, TRBJ2-7)
CASSKNTGRLYEQYF

SEQ ID NO: 690549 - protein, 13 aa, Homo sapiens
  CDR3 for alpha chain variable domain of TCR clone 345275 (TRAV12-1, TRAJ6)
CVVFPGGSYIPTF

SEQ ID NO: 690550 - protein, 13 aa, Homo sapiens
  CDR3 for beta chain variable domain of TCR clone 345275 (TRBV19, TRBJ2-2)
CASSIWSTGELFF

SEQ ID NO: 690551 - protein, 14 aa, Homo sapiens
  CDR3 for alpha chain variable domain of TCR clone 345276 (TRAV1-2, TRAJ29)
CAVRTDSGNKPLVF

SEQ ID NO: 690552 - protein, 14 aa, Homo sapiens
  CDR3 for beta chain variable domain of TCR clone 345276 (TRBV7-2, TRBJ2-7)
CASSPKTSFYEQYF

SEQ ID NO: 690553 - protein, 14 aa, Homo sapiens
  CDR3 for alpha chain variable domain of TCR clone 345277 (TRAV12-1, TRAJ40)
CVVNRDSGTYKYIF

SEQ ID NO: 690554 - protein, 13 aa, Homo sapiens
  CDR3 for beta chain variable domain of TCR clone 345277 (TRBV24-1, TRBJ2-2)
CATSDWSTGELFF

SEQ ID NO: 690555 - protein, 15 aa, Homo sapiens
  CDR3 for alpha chain variable domain of TCR clone 345278 (TRAV8-3, TRAJ45)
CALSYSGGGAGGLTF

SEQ ID NO: 690556 - protein, 13 aa, Homo sapiens
  CDR3 for beta chain variable domain of TCR clone 345278 (TRBV10-3, TRBJ2-7)
CASKLAVNYEQYF

SEQ ID NO: 690557 - protein, 14 aa, Homo sapiens
  CDR3 for alpha chain variable domain of TCR clone 345279 (TRAV12-2, TRAJ17)
CAVNIKAAGNKLTF

SEQ ID NO: 690558 - protein, 12 aa, Homo sapiens
  CDR3 for beta chain variable domain of TCR clone 345279 (TRBV20-1, TRBJ1-2)
CSAPPRQGPDTF

SEQ ID NO: 690559 - protein, 13 aa, Homo sapiens
  CDR3 for alpha chain variable domain of TCR clone 345280 (TRAV20, TRAJ42)
CAVKGGSQGNLIF

SEQ ID NO: 690560 - protein, 15 aa, Homo sapiens
  CDR3 for beta chain variable domain of TCR clone 345280 (TRBV10-1, TRBJ2-1)
CASSEWRGTYNEQFF

SEQ ID NO: 690561 - protein, 12 aa, Homo sapiens
  CDR3 for alpha chain variable domain of TCR clone 345281 (TRAV38-2/DV8, TRAJ48)
CALLSGNEKLAF

SEQ ID NO: 690562 - protein, 14 aa, Homo sapiens
  CDR3 for beta chain variable domain of TCR clone 345281 (TRBV19, TRBJ2-1)
CASPTFVLSGEQFF

SEQ ID NO: 690563 - protein, 15 aa, Homo sapiens
  CDR3 for alpha chain variable domain of TCR clone 345282 (TRAV27, TRAJ38)
CAGRFNAGHNRKLIW

SEQ ID NO: 690564 - protein, 13 aa, Homo sapiens
  CDR3 for beta chain variable domain of TCR clone 345282 (TRBV20-1, TRBJ2-1)
TSGALPPGNEQFF

SEQ ID NO: 690565 - protein, 18 aa, Homo sapiens
  CDR3 for alpha chain variable domain of TCR clone 345283 (TRAV13-1, TRAJ52)
CAAKNPNAGGTSYGKLTF

SEQ ID NO: 690566 - protein, 15 aa, Homo sapiens
  CDR3 for beta chain variable domain of TCR clone 345283 (TRBV28, TRBJ1-1)
CASTSTRGLNTEAFF

SEQ ID NO: 690567 - protein, 12 aa, Homo sapiens
  CDR3 for alpha chain variable domain of TCR clone 345284 (TRAV29/DV5, TRAJ34)
CAASGNTDKRIF

SEQ ID NO: 690568 - protein, 15 aa, Homo sapiens
  CDR3 for beta chain variable domain of TCR clone 345284 (TRBV10-2, TRBJ2-6)
CASSEQGTGANVLTF

SEQ ID NO: 690569 - protein, 13 aa, Homo sapiens
  CDR3 for alpha chain variable domain of TCR clone 345285 (TRAV22, TRAJ44)
CALNPGTASKLTF

SEQ ID NO: 690570 - protein, 12 aa, Homo sapiens
  CDR3 for beta chain variable domain of TCR clone 345285 (TRBV14, TRBJ2-5)
CASSQLKETQYF

SEQ ID NO: 690571 - protein, 12 aa, Homo sapiens
  CDR3 for alpha chain variable domain of TCR clone 345286 (TRAV26-2, TRAJ21)
CILKGNFNKFYF

SEQ ID NO: 690572 - protein, 14 aa, Homo sapiens
  CDR3 for beta chain variable domain of TCR clone 345286 (TRBV7-6, TRBJ2-3)
CASSVAGGTDTQYF

SEQ ID NO: 690573 - protein, 17 aa, Homo sapiens
  CDR3 for alpha chain variable domain of TCR clone 345287 (TRAV13-1, TRAJ28)
CAASPPYSGAGSYQLTF

SEQ ID NO: 690574 - protein, 16 aa, Homo sapiens
  CDR3 for beta chain variable domain of TCR clone 345287 (TRBV7-3, TRBJ2-3)
CASSLSGYRPEDTQYF

SEQ ID NO: 690575 - protein, 11 aa, Homo sapiens
  CDR3 for alpha chain variable domain of TCR clone 345288 (TRAV12-1, TRAJ21)
CVVSNFNKFYF

SEQ ID NO: 690576 - protein, 15 aa, Homo sapiens
  CDR3 for beta chain variable domain of TCR clone 345288 (TRBV7-2, TRBJ2-1)
CASSLASGRVNEQFF

SEQ ID NO: 690577 - protein, 10 aa, Homo sapiens
  CDR3 for alpha chain variable domain of TCR clone 345289 (TRAV8-4, TRAJ43)
CAVSADDMRF

SEQ ID NO: 690578 - protein, 13 aa, Homo sapiens
  CDR3 for beta chain variable domain of TCR clone 345289 (TRBV23-1, TRBJ1-4)
CASRGKFNEKLFF

SEQ ID NO: 690579 - protein, 18 aa, Homo sapiens
  CDR3 for alpha chain variable domain of TCR clone 345290 (TRAV8-3, TRAJ34)
LGTSVLWASGYNTDKLIS

SEQ ID NO: 690580 - protein, 13 aa, Homo sapiens
  CDR3 for beta chain variable domain of TCR clone 345290 (TRBV6-4, TRBJ2-3)
CASSVSWADTQYF

SEQ ID NO: 690581 - protein, 12 aa, Homo sapiens
  CDR3 for alpha chain variable domain of TCR clone 345291 (TRAV1-2, TRAJ26)
CAVRYYGQNFVF

SEQ ID NO: 690582 - protein, 15 aa, Homo sapiens
  CDR3 for beta chain variable domain of TCR clone 345291 (TRBV28, TRBJ2-1)
CASSFQEGVYNEQFF

SEQ ID NO: 690583 - protein, 13 aa, Homo sapiens
  CDR3 for alpha chain variable domain of TCR clone 345292 (TRAV30, TRAJ24)
CGTVTDSWGKLQF

SEQ ID NO: 690584 - protein, 14 aa, Homo sapiens
  CDR3 for beta chain variable domain of TCR clone 345292 (TRBV6-3, TRBJ2-2)
CASTYTPGTWELFF

SEQ ID NO: 690585 - protein, 12 aa, Homo sapiens
  CDR3 for alpha chain variable domain of TCR clone 345293 (TRAV16, TRAJ10)
CSRTGGGNKLTF

SEQ ID NO: 690586 - protein, 14 aa, Homo sapiens
  CDR3 for beta chain variable domain of TCR clone 345293 (TRBV7-8, TRBJ2-7)
CASSLSAGAYEQYF

SEQ ID NO: 690587 - protein, 12 aa, Homo sapiens
  CDR3 for alpha chain variable domain of TCR clone 345294 (TRAV8-3, TRAJ4)
PAFSGGYNKLIF

SEQ ID NO: 690588 - protein, 16 aa, Homo sapiens
  CDR3 for beta chain variable domain of TCR clone 345294 (TRBV12-4, TRBJ1-5)
CASSRPVGGSNQPQHF

SEQ ID NO: 690589 - protein, 12 aa, Homo sapiens
  CDR3 for alpha chain variable domain of TCR clone 345295 (TRAV13-1, TRAJ48)
CAANFGNEKLTF

SEQ ID NO: 690590 - protein, 16 aa, Homo sapiens
  CDR3 for beta chain variable domain of TCR clone 345295 (TRBV24-1, TRBJ2-3)
CATSDPGTGATDTQYF

SEQ ID NO: 690591 - protein, 14 aa, Homo sapiens
  CDR3 for alpha chain variable domain of TCR clone 345296 (TRAV10, TRAJ47)
CVVSLIEYGNKLVF

SEQ ID NO: 690592 - protein, 16 aa, Homo sapiens
  CDR3 for beta chain variable domain of TCR clone 345296 (TRBV28, TRBJ2-3)
CASSLFTGVSTDTQYF

SEQ ID NO: 690593 - protein, 14 aa, Homo sapiens
  CDR3 for alpha chain variable domain of TCR clone 345297 (TRAV12-1, TRAJ12)
CVVTRMESSYKLIF

SEQ ID NO: 690594 - protein, 13 aa, Homo sapiens
  CDR3 for beta chain variable domain of TCR clone 345297 (TRBV20-1, TRBJ1-1)
CSARGGGNTEAFF

SEQ ID NO: 690595 - protein, 12 aa, Homo sapiens
  CDR3 for alpha chain variable domain of TCR clone 345298 (TRAV17, TRAJ12)
CATLRSSYKLIF

SEQ ID NO: 690596 - protein, 16 aa, Homo sapiens
  CDR3 for beta chain variable domain of TCR clone 345298 (TRBV28, TRBJ2-7)
CASSLFIETGGPEQYF

SEQ ID NO: 690597 - protein, 17 aa, Homo sapiens
  CDR3 for alpha chain variable domain of TCR clone 345299 (TRAV4, TRAJ13)
CLVGVQGSSGGYQKVTF

SEQ ID NO: 690598 - protein, 16 aa, Homo sapiens
  CDR3 for beta chain variable domain of TCR clone 345299 (TRBV19, TRBJ2-1)
CASSKAGPSSYNEQFF

SEQ ID NO: 690599 - protein, 11 aa, Homo sapiens
  CDR3 for alpha chain variable domain of TCR clone 345300 (TRAV13-2, TRAJ20)
CADSNDYKLSF

SEQ ID NO: 690600 - protein, 15 aa, Homo sapiens
  CDR3 for beta chain variable domain of TCR clone 345300 (TRBV4-1, TRBJ1-4)
CASSDTEGTNEKLFF

SEQ ID NO: 690601 - protein, 14 aa, Homo sapiens
  CDR3 for alpha chain variable domain of TCR clone 345301 (TRAV20, TRAJ42)
CAVQAGGSQGNLIF

SEQ ID NO: 690602 - protein, 14 aa, Homo sapiens
  CDR3 for beta chain variable domain of TCR clone 345301 (TRBV5-1, TRBJ2-2)
CASSLGGGSGELFF

SEQ ID NO: 690603 - protein, 12 aa, Homo sapiens
  CDR3 for alpha chain variable domain of TCR clone 345302 (TRAV12-3, TRAJ17)
CAMTLTGKKLTF

SEQ ID NO: 690604 - protein, 15 aa, Homo sapiens
  CDR3 for beta chain variable domain of TCR clone 345302 (TRBV20-1, TRBJ2-7)
FSARDRVSGMDEQYF

SEQ ID NO: 690605 - protein, 13 aa, Homo sapiens
  CDR3 for alpha chain variable domain of TCR clone 345303 (TRAV21, TRAJ56)
CAVRLGANSTLTF

SEQ ID NO: 690606 - protein, 12 aa, Homo sapiens
  CDR3 for beta chain variable domain of TCR clone 345303 (TRBV12-4, TRBJ2-3)
CASSSTTDTQYF

SEQ ID NO: 690607 - protein, 13 aa, Homo sapiens
  CDR3 for alpha chain variable domain of TCR clone 345304 (TRAV13-1, TRAJ33)
CAASRAGNYQLIC

SEQ ID NO: 690608 - protein, 15 aa, Homo sapiens
  CDR3 for beta chain variable domain of TCR clone 345304 (TRBV2, TRBJ2-7)
EDSAMYFCSSSEQYF

SEQ ID NO: 690609 - protein, 17 aa, Homo sapiens
  CDR3 for alpha chain variable domain of TCR clone 345305 (TRAV3, TRAJ42)
CAVRDRDYGGSQGNLIF

SEQ ID NO: 690610 - protein, 11 aa, Homo sapiens
  CDR3 for beta chain variable domain of TCR clone 345305 (TRBV7-9, TRBJ2-5)
CASSLGETQYF

SEQ ID NO: 690611 - protein, 12 aa, Homo sapiens
  CDR3 for alpha chain variable domain of TCR clone 345306 (TRAV3, TRAJ26)
CAVRDYGQNFVF

SEQ ID NO: 690612 - protein, 18 aa, Homo sapiens
  CDR3 for beta chain variable domain of TCR clone 345306 (TRBV11-2, TRBJ2-3)
CASSLGGASRGAPNTQYF

SEQ ID NO: 690613 - protein, 13 aa, Homo sapiens
  CDR3 for alpha chain variable domain of TCR clone 345307 (TRAV34, TRAJ33)
CGADMNSNYQLIW

SEQ ID NO: 690614 - protein, 16 aa, Homo sapiens
  CDR3 for beta chain variable domain of TCR clone 345307 (TRBV20-1, TRBJ2-7)
CSASTSGRLSSYEQYF

SEQ ID NO: 690615 - protein, 13 aa, Homo sapiens
  CDR3 for alpha chain variable domain of TCR clone 345308 (TRAV17, TRAJ9)
CATDYSGGFKTIF

SEQ ID NO: 690616 - protein, 16 aa, Homo sapiens
  CDR3 for beta chain variable domain of TCR clone 345308 (TRBV7-7, TRBJ2-1)
CASSLASGTSYNEQFF

SEQ ID NO: 690617 - protein, 14 aa, Homo sapiens
  CDR3 for alpha chain variable domain of TCR clone 345309 (TRAV1-2, TRAJ8)
CAVREDTGFQKIVF

SEQ ID NO: 690618 - protein, 13 aa, Homo sapiens
  CDR3 for beta chain variable domain of TCR clone 345309 (TRBV7-2, TRBJ2-7)
CASSSPSGSEQYF

SEQ ID NO: 690619 - protein, 14 aa, Homo sapiens
  CDR3 for alpha chain variable domain of TCR clone 345310 (TRAV1-2, TRAJ8)
CAVREDTGFQKLVF

SEQ ID NO: 690620 - protein, 16 aa, Homo sapiens
  CDR3 for beta chain variable domain of TCR clone 345310 (TRBV19, TRBJ2-3)
CASSFYTTGIGDTQYF

SEQ ID NO: 690621 - protein, 14 aa, Homo sapiens
  CDR3 for alpha chain variable domain of TCR clone 345311 (TRAV35, TRAJ42)
CCVPYGGSQGNLIF

SEQ ID NO: 690622 - protein, 18 aa, Homo sapiens
  CDR3 for beta chain variable domain of TCR clone 345311 (TRBV13, TRBJ2-6)
CASSTMTSGGSGANVLTF

SEQ ID NO: 690623 - protein, 16 aa, Homo sapiens
  CDR3 for alpha chain variable domain of TCR clone 345312 (TRAV12-3, TRAJ58)
CAMTDTEETSGSRLTF

SEQ ID NO: 690624 - protein, 15 aa, Homo sapiens
  CDR3 for beta chain variable domain of TCR clone 345312 (TRBV11-3, TRBJ2-2)
CASSYFSTGTGELFF

SEQ ID NO: 690625 - protein, 14 aa, Homo sapiens
  CDR3 for alpha chain variable domain of TCR clone 345313 (TRAV35, TRAJ50)
CAGHRKTSYDKVIF

SEQ ID NO: 690626 - protein, 13 aa, Homo sapiens
  CDR3 for beta chain variable domain of TCR clone 345313 (TRBV7-7, TRBJ2-3)
CASSLSCADTQNF

SEQ ID NO: 690627 - protein, 10 aa, Homo sapiens
  CDR3 for alpha chain variable domain of TCR clone 345314 (TRAV30, TRAJ24)
DADSWGKFQF

SEQ ID NO: 690628 - protein, 14 aa, Homo sapiens
  CDR3 for beta chain variable domain of TCR clone 345314 (TRBV19, TRBJ2-1)
CASPTFVLSGEQFF

SEQ ID NO: 690629 - protein, 16 aa, Homo sapiens
  CDR3 for alpha chain variable domain of TCR clone 345315 (TRAV3, TRAJ18)
CAVRDGRGSTLGRLYF

SEQ ID NO: 690630 - protein, 15 aa, Homo sapiens
  CDR3 for beta chain variable domain of TCR clone 345315 (TRBV7-9, TRBJ1-6)
CASSSPGRGKSPLHF

SEQ ID NO: 690631 - protein, 15 aa, Homo sapiens
  CDR3 for alpha chain variable domain of TCR clone 345316 (TRAV27, TRAJ38)
CAGRFNAGNNRKLIW

SEQ ID NO: 690632 - protein, 18 aa, Homo sapiens
  CDR3 for beta chain variable domain of TCR clone 345316 (TRBV11-2, TRBJ2-3)
CASSLGGASRGAPNTQYF

SEQ ID NO: 690633 - protein, 16 aa, Homo sapiens
  CDR3 for alpha chain variable domain of TCR clone 345317 (TRAV12-2, TRAJ52)
CRLANAGGTSYGKVTF

SEQ ID NO: 690634 - protein, 13 aa, Homo sapiens
  CDR3 for beta chain variable domain of TCR clone 345317 (TRBV10-3, TRBJ2-7)
CASKLAVNYEQYF

SEQ ID NO: 690635 - protein, 11 aa, Homo sapiens
  CDR3 for alpha chain variable domain of TCR clone 345318 (TRAV3, TRAJ21)
CAVGNFYNFYF

SEQ ID NO: 690636 - protein, 16 aa, Homo sapiens
  CDR3 for beta chain variable domain of TCR clone 345318 (TRBV19, TRBJ2-1)
CASSKAGPSSYNEQFF

SEQ ID NO: 690637 - protein, 10 aa, Homo sapiens
  CDR3 for alpha chain variable domain of TCR clone 345319 (TRAV2, TRAJ15)
RGQAGTALIF

SEQ ID NO: 690638 - protein, 13 aa, Homo sapiens
  CDR3 for beta chain variable domain of TCR clone 345319 (TRBV27, TRBJ2-1)
CASRTLGVGEQFV

SEQ ID NO: 690639 - protein, 11 aa, Homo sapiens
  CDR3 for alpha chain variable domain of TCR clone 345320 (TRAV3, TRAJ17)
CAESAGNKLTF

SEQ ID NO: 690640 - protein, 15 aa, Homo sapiens
  CDR3 for beta chain variable domain of TCR clone 345320 (TRBV12-4, TRBJ2-7)
CASSLGSGGPYEQYF

SEQ ID NO: 690641 - protein, 16 aa, Homo sapiens
  CDR3 for alpha chain variable domain of TCR clone 345321 (TRAV14/DV4, TRAJ53)
CAMREGGGGSNYKLTF

SEQ ID NO: 690642 - protein, 15 aa, Homo sapiens
  CDR3 for beta chain variable domain of TCR clone 345321 (TRBV7-6, TRBJ2-1)
CASSSLAGEGNEQFF

SEQ ID NO: 690643 - protein, 14 aa, Homo sapiens
  CDR3 for alpha chain variable domain of TCR clone 345322 (TRAV17, TRAJ48)
CATEGNFGNEKLTF

SEQ ID NO: 690644 - protein, 13 aa, Homo sapiens
  CDR3 for beta chain variable domain of TCR clone 345322 (TRBV11-2, TRBJ2-5)
CASSRGPSETQYF

SEQ ID NO: 690645 - protein, 14 aa, Homo sapiens
  CDR3 for alpha chain variable domain of TCR clone 345323 (TRAV13-1, TRAJ6)
CAASITGGSYIPTF

SEQ ID NO: 690646 - protein, 17 aa, Homo sapiens
  CDR3 for beta chain variable domain of TCR clone 345323 (TRBV28, TRBJ2-5)
CASSRQGGLAGAETQYF

SEQ ID NO: 690647 - protein, 15 aa, Homo sapiens
  CDR3 for alpha chain variable domain of TCR clone 345324 (TRAV12-2, TRAJ10)
GRGWRLTGGGNKLTF

SEQ ID NO: 690648 - protein, 13 aa, Homo sapiens
  CDR3 for beta chain variable domain of TCR clone 345324 (TRBV12-4, TRBJ1-1)
CASSSRAGAEAFF

SEQ ID NO: 690649 - protein, 14 aa, Homo sapiens
  CDR3 for alpha chain variable domain of TCR clone 345325 (TRAV27, TRAJ22)
CAGLPSGSARQLTF

SEQ ID NO: 690650 - protein, 16 aa, Homo sapiens
  CDR3 for beta chain variable domain of TCR clone 345325 (TRBV7-3, TRBJ2-2)
YASSLKRGTLSGELFF

SEQ ID NO: 690651 - protein, 15 aa, Homo sapiens
  CDR3 for alpha chain variable domain of TCR clone 345326 (TRAV21, TRAJ10)
CAVPLLTGGGNKLTL

SEQ ID NO: 690652 - protein, 14 aa, Homo sapiens
  CDR3 for beta chain variable domain of TCR clone 345326 (TRBV12-4, TRBJ1-1)
CASSLGTGGTEAFF

SEQ ID NO: 690653 - protein, 14 aa, Homo sapiens
  CDR3 for alpha chain variable domain of TCR clone 345327 (TRAV17, TRAJ12)
CAILPMDSSYKLIF

SEQ ID NO: 690654 - protein, 15 aa, Homo sapiens
  CDR3 for beta chain variable domain of TCR clone 345327 (TRBV7-2, TRBJ2-7)
CASSTPGLTRGEQYF

SEQ ID NO: 690655 - protein, 16 aa, Homo sapiens
  CDR3 for alpha chain variable domain of TCR clone 345328 (TRAV30, TRAJ24)
CGTEIMDADSWGKFQF

SEQ ID NO: 690656 - protein, 14 aa, Homo sapiens
  CDR3 for beta chain variable domain of TCR clone 345328 (TRBV7-2, TRBJ1-2)
CASSQTGSTYGYTF

SEQ ID NO: 690657 - protein, 16 aa, Homo sapiens
  CDR3 for alpha chain variable domain of TCR clone 345329 (TRAV17, TRAJ52)
CATGIIGGISYGKLTF

SEQ ID NO: 690658 - protein, 12 aa, Homo sapiens
  CDR3 for beta chain variable domain of TCR clone 345329 (TRBV7-3, TRBJ2-1)
CASSFINNEQFF

SEQ ID NO: 690659 - protein, 14 aa, Homo sapiens
  CDR3 for alpha chain variable domain of TCR clone 345330 (TRAV26-1, TRAJ11)
CIVPLYSGYSTLTF

SEQ ID NO: 690660 - protein, 15 aa, Homo sapiens
  CDR3 for beta chain variable domain of TCR clone 345330 (TRBV20-1, TRBJ2-7)
CSARDRVSGMDEQYF

SEQ ID NO: 690661 - protein, 12 aa, Homo sapiens
  CDR3 for alpha chain variable domain of TCR clone 345331 (TRAV13-1, TRAJ49)
CAASPMGNQFYS

SEQ ID NO: 690662 - protein, 17 aa, Homo sapiens
  CDR3 for beta chain variable domain of TCR clone 345331 (TRBV11-2, TRBJ2-1)
CASSLYPPGVEYNEQFF

SEQ ID NO: 690663 - protein, 12 aa, Homo sapiens
  CDR3 for alpha chain variable domain of TCR clone 345332 (TRAV1-2, TRAJ33)
CAALDSNYQLIW

SEQ ID NO: 690664 - protein, 16 aa, Homo sapiens
  CDR3 for beta chain variable domain of TCR clone 345332 (TRBV7-6, TRBJ2-3)
CASSLRREMGPDTQYF

SEQ ID NO: 690665 - protein, 14 aa, Homo sapiens
  CDR3 for alpha chain variable domain of TCR clone 345333 (TRAV2, TRAJ9)
CAVEDRSGGFKTIF

SEQ ID NO: 690666 - protein, 14 aa, Homo sapiens
  CDR3 for beta chain variable domain of TCR clone 345333 (TRBV18, TRBJ2-7)
CASSPTSGGYEQYF

SEQ ID NO: 690667 - protein, 14 aa, Homo sapiens
  CDR3 for alpha chain variable domain of TCR clone 345334 (TRAV20, TRAJ56)
CAVQFGGANSKLMF

SEQ ID NO: 690668 - protein, 14 aa, Homo sapiens
  CDR3 for beta chain variable domain of TCR clone 345334 (TRBV20-1, TRBJ2-7)
CSAKRGRSSYEQYF

SEQ ID NO: 690669 - protein, 15 aa, Homo sapiens
  CDR3 for alpha chain variable domain of TCR clone 345335 (TRAV23/DV6, TRAJ10)
CAARGFTGGGNKLTF

SEQ ID NO: 690670 - protein, 13 aa, Homo sapiens
  CDR3 for beta chain variable domain of TCR clone 345335 (TRBV7-9, TRBJ1-2)
CASSLKQNYGYAF

SEQ ID NO: 690671 - protein, 14 aa, Homo sapiens
  CDR3 for alpha chain variable domain of TCR clone 345336 (TRAV12-1, TRAJ9)
CVVTGYTGGFKTIY

SEQ ID NO: 690672 - protein, 13 aa, Homo sapiens
  CDR3 for beta chain variable domain of TCR clone 345336 (TRBV20-1, TRBJ1-1)
CSARAGGNTEAFF

SEQ ID NO: 690673 - protein, 15 aa, Homo sapiens
  CDR3 for alpha chain variable domain of TCR clone 345337 (TRAV17, TRAJ22)
CATVAPSGSARQLTF

SEQ ID NO: 690674 - protein, 15 aa, Homo sapiens
  CDR3 for beta chain variable domain of TCR clone 345337 (TRBV27, TRBJ1-6)
CASSFDRGRGSPLHF

SEQ ID NO: 690675 - protein, 13 aa, Homo sapiens
  CDR3 for alpha chain variable domain of TCR clone 345338 (TRAV35, TRAJ48)
CAAHEFGNEKLTF

SEQ ID NO: 690676 - protein, 13 aa, Homo sapiens
  CDR3 for beta chain variable domain of TCR clone 345338 (TRBV7-2, TRBJ1-6)
CASSLVGSSPLHF

SEQ ID NO: 690677 - protein, 18 aa, Homo sapiens
  CDR3 for alpha chain variable domain of TCR clone 345339 (TRAV26-1, TRAJ48)
CCVLFIVRVPFGNEKLTF

SEQ ID NO: 690678 - protein, 16 aa, Homo sapiens
  CDR3 for beta chain variable domain of TCR clone 345339 (TRBV18, TRBJ2-1)
CASSPYLSIRGDEQFF

SEQ ID NO: 690679 - protein, 12 aa, Homo sapiens
  CDR3 for alpha chain variable domain of TCR clone 345340 (TRAV12-2, TRAJ8)
CAVKTGFQTLVF

SEQ ID NO: 690680 - protein, 15 aa, Homo sapiens
  CDR3 for beta chain variable domain of TCR clone 345340 (TRBV7-8, TRBJ1-5)
CASSLERRGLEPQHF

SEQ ID NO: 690681 - protein, 14 aa, Homo sapiens
  CDR3 for alpha chain variable domain of TCR clone 345341 (TRAV1-2, TRAJ16)
CAVNRFSDGQKLLF

SEQ ID NO: 690682 - protein, 14 aa, Homo sapiens
  CDR3 for beta chain variable domain of TCR clone 345341 (TRBV11-2, TRBJ2-5)
WASSRTGGIETQYF

SEQ ID NO: 690683 - protein, 14 aa, Homo sapiens
  CDR3 for alpha chain variable domain of TCR clone 345342 (TRAV13-1, TRAJ10)
CAALFTVGGNKLNF

SEQ ID NO: 690684 - protein, 15 aa, Homo sapiens
  CDR3 for beta chain variable domain of TCR clone 345342 (TRBV10-3, TRBJ2-2)
CAISEGDRAAGELFF

SEQ ID NO: 690685 - protein, 18 aa, Homo sapiens
  CDR3 for alpha chain variable domain of TCR clone 345343 (TRAV21, TRAJ52)
CAVRPSPAGGTSYGKLTF

SEQ ID NO: 690686 - protein, 14 aa, Homo sapiens
  CDR3 for beta chain variable domain of TCR clone 345343 (TRBV6-1, TRBJ1-3)
CASVQRGGGNTIYF

SEQ ID NO: 690687 - protein, 16 aa, Homo sapiens
  CDR3 for alpha chain variable domain of TCR clone 345344 (TRAV30, TRAJ24)
CRTEIVDADSWGKFQF

SEQ ID NO: 690688 - protein, 15 aa, Homo sapiens
  CDR3 for beta chain variable domain of TCR clone 345344 (TRBV7-9, TRBJ1-4)
CASSARTGGNEKLFF

SEQ ID NO: 690689 - protein, 10 aa, Homo sapiens
  CDR3 for alpha chain variable domain of TCR clone 345345 (TRAV38-1, TRAJ37)
MAGNTGKLIF

SEQ ID NO: 690690 - protein, 12 aa, Homo sapiens
  CDR3 for beta chain variable domain of TCR clone 345345 (TRBV7-9, TRBJ2-7)
CASSFGSYEQYF

SEQ ID NO: 690691 - protein, 14 aa, Homo sapiens
  CDR3 for alpha chain variable domain of TCR clone 345346 (TRAV13-1, TRAJ35)
CAASKGGFGNVLHC

SEQ ID NO: 690692 - protein, 13 aa, Homo sapiens
  CDR3 for beta chain variable domain of TCR clone 345346 (TRBV7-3, TRBJ1-1)
CASSQEWGAKAFF

SEQ ID NO: 690693 - protein, 14 aa, Homo sapiens
  CDR3 for alpha chain variable domain of TCR clone 345347 (TRAV38-2/DV8, TRAJ30)
CAYRSADRDDKTIF

SEQ ID NO: 690694 - protein, 16 aa, Homo sapiens
  CDR3 for beta chain variable domain of TCR clone 345347 (TRBV15, TRBJ1-3)
CATSSPIGFSGNTIYF

SEQ ID NO: 690695 - protein, 13 aa, Homo sapiens
  CDR3 for alpha chain variable domain of TCR clone 345348 (TRAV20, TRAJ26)
CAVPTSYGLNFVF

SEQ ID NO: 690696 - protein, 16 aa, Homo sapiens
  CDR3 for beta chain variable domain of TCR clone 345348 (TRBV28, TRBJ2-7)
CASSSPQGRDVYEQYF

SEQ ID NO: 690697 - protein, 11 aa, Homo sapiens
  CDR3 for alpha chain variable domain of TCR clone 345349 (TRAV12-3, TRAJ43)
CALCVSNDMRF

SEQ ID NO: 690698 - protein, 13 aa, Homo sapiens
  CDR3 for beta chain variable domain of TCR clone 345349 (TRBV20-1, TRBJ1-1)
CSAPLGGGTEAFF

SEQ ID NO: 690699 - protein, 14 aa, Homo sapiens
  CDR3 for alpha chain variable domain of TCR clone 345350 (TRAV1-1, TRAJ30)
CAVRSLNRDDKIIF

SEQ ID NO: 690700 - protein, 14 aa, Homo sapiens
  CDR3 for beta chain variable domain of TCR clone 345350 (TRBV7-8, TRBJ2-3)
CASSLEVGTDTQYF

SEQ ID NO: 690701 - protein, 15 aa, Homo sapiens
  CDR3 for alpha chain variable domain of TCR clone 345351 (TRAV21, TRAJ24)
CAARSSTDSWGKLQF

SEQ ID NO: 690702 - protein, 11 aa, Homo sapiens
  CDR3 for beta chain variable domain of TCR clone 345351 (TRBV19, TRBJ1-1)
CASSIGSEAFF

SEQ ID NO: 690703 - protein, 14 aa, Homo sapiens
  CDR3 for alpha chain variable domain of TCR clone 345352 (TRAV12-3, TRAJ54)
CAMRGIQGAQKLVF

SEQ ID NO: 690704 - protein, 13 aa, Homo sapiens
  CDR3 for beta chain variable domain of TCR clone 345352 (TRBV19, TRBJ1-1)
CASSLSNGGEAFF

SEQ ID NO: 690705 - protein, 13 aa, Homo sapiens
  CDR3 for alpha chain variable domain of TCR clone 345353 (TRAV22, TRAJ12)
CAGRMDSSYKLIF

SEQ ID NO: 690706 - protein, 15 aa, Homo sapiens
  CDR3 for beta chain variable domain of TCR clone 345353 (TRBV7-9, TRBJ1-4)
CASSARTGGNEKLFF

SEQ ID NO: 690707 - protein, 12 aa, Homo sapiens
  CDR3 for alpha chain variable domain of TCR clone 345354 (TRAV21, TRAJ31)
CAVSAARGRLMF

SEQ ID NO: 690708 - protein, 14 aa, Homo sapiens
  CDR3 for beta chain variable domain of TCR clone 345354 (TRBV28, TRBJ2-7)
CASSLLRISYEQYF

SEQ ID NO: 690709 - protein, 14 aa, Homo sapiens
  CDR3 for alpha chain variable domain of TCR clone 345355 (TRAV17, TRAJ11)
CATDTSRGYSTLTF

SEQ ID NO: 690710 - protein, 13 aa, Homo sapiens
  CDR3 for beta chain variable domain of TCR clone 345355 (TRBV19, TRBJ2-5)
CASRDSRRDTQYF

SEQ ID NO: 690711 - protein, 13 aa, Homo sapiens
  CDR3 for alpha chain variable domain of TCR clone 345356 (TRAV12-1, TRAJ6)
CVVYPGGSYIPTF

SEQ ID NO: 690712 - protein, 13 aa, Homo sapiens
  CDR3 for beta chain variable domain of TCR clone 345356 (TRBV4-2, TRBJ1-1)
CASSQAGNTDAFF

SEQ ID NO: 690713 - protein, 11 aa, Homo sapiens
  CDR3 for alpha chain variable domain of TCR clone 345357 (TRAV16, TRAJ42)
CALASQGNLIF

SEQ ID NO: 690714 - protein, 20 aa, Homo sapiens
  CDR3 for beta chain variable domain of TCR clone 345357 (TRBV7-8, TRBJ2-2)
CASSHLFPGPTIHITGELFF

SEQ ID NO: 690715 - protein, 13 aa, Homo sapiens
  CDR3 for alpha chain variable domain of TCR clone 345358 (TRAV12-3, TRAJ39)
CAMIDNAGNMLTF

SEQ ID NO: 690716 - protein, 15 aa, Homo sapiens
  CDR3 for beta chain variable domain of TCR clone 345358 (TRBV20-1, TRBJ2-7)
CSARDRVSGMDEQYF

SEQ ID NO: 690717 - protein, 11 aa, Homo sapiens
  CDR3 for alpha chain variable domain of TCR clone 345359 (TRAV8-1, TRAJ27)
CAVNAAGKSTC

SEQ ID NO: 690718 - protein, 12 aa, Homo sapiens
  CDR3 for beta chain variable domain of TCR clone 345359 (TRBV11-2, TRBJ2-3)
CASRPGTDTQYF

SEQ ID NO: 690719 - protein, 16 aa, Homo sapiens
  CDR3 for alpha chain variable domain of TCR clone 345360 (TRAV8-6, TRAJ58)
CDVSDHTETSGSRLTF

SEQ ID NO: 690720 - protein, 14 aa, Homo sapiens
  CDR3 for beta chain variable domain of TCR clone 345360 (TRBV7-2, TRBJ1-5)
CASSPRGGPQPQHF

SEQ ID NO: 690721 - protein, 14 aa, Homo sapiens
  CDR3 for alpha chain variable domain of TCR clone 345361 (TRAV13-1, TRAJ44)
CAAKATVTASKLTF

SEQ ID NO: 690722 - protein, 12 aa, Homo sapiens
  CDR3 for beta chain variable domain of TCR clone 345361 (TRBV7-8, TRBJ2-7)
CASSLGDREQYF

SEQ ID NO: 690723 - protein, 13 aa, Homo sapiens
  CDR3 for alpha chain variable domain of TCR clone 345362 (TRAV8-3, TRAJ48)
CSVVPFGNEKLTF

SEQ ID NO: 690724 - protein, 15 aa, Homo sapiens
  CDR3 for beta chain variable domain of TCR clone 345362 (TRBV6-5, TRBJ2-1)
CASSYDAGAGNEQFF

SEQ ID NO: 690725 - protein, 13 aa, Homo sapiens
  CDR3 for alpha chain variable domain of TCR clone 345363 (TRAV2, TRAJ24)
CAVEDAGRGKFQF

SEQ ID NO: 690726 - protein, 13 aa, Homo sapiens
  CDR3 for beta chain variable domain of TCR clone 345363 (TRBV10-3, TRBJ2-7)
CASKLAVNYEQYF

SEQ ID NO: 690727 - protein, 14 aa, Homo sapiens
  CDR3 for alpha chain variable domain of TCR clone 345364 (TRAV12-2, TRAJ53)
CAVKGGGSNYTLTF

SEQ ID NO: 690728 - protein, 14 aa, Homo sapiens
  CDR3 for beta chain variable domain of TCR clone 345364 (TRBV7-7, TRBJ2-2)
CATRQDSDTGELFF

SEQ ID NO: 690729 - protein, 13 aa, Homo sapiens
  CDR3 for alpha chain variable domain of TCR clone 345365 (TRAV17, TRAJ40)
CAGALGGTYKYIF

SEQ ID NO: 690730 - protein, 16 aa, Homo sapiens
  CDR3 for beta chain variable domain of TCR clone 345365 (TRBV7-2, TRBJ1-4)
CASSIAPGRRDEKLFF

SEQ ID NO: 690731 - protein, 16 aa, Homo sapiens
  CDR3 for alpha chain variable domain of TCR clone 345366 (TRAV26-1, TRAJ38)
CIVRAYNAGNNRKLIW

SEQ ID NO: 690732 - protein, 13 aa, Homo sapiens
  CDR3 for beta chain variable domain of TCR clone 345366 (TRBV4-2, TRBJ2-7)
CASSRDPHDELYF

SEQ ID NO: 690733 - protein, 13 aa, Homo sapiens
  CDR3 for alpha chain variable domain of TCR clone 345367 (TRAV16, TRAJ9)
FALRATGGVKTIF

SEQ ID NO: 690734 - protein, 16 aa, Homo sapiens
  CDR3 for beta chain variable domain of TCR clone 345367 (TRBV5-1, TRBJ1-3)
CASSRSGEDSGNTIYF

SEQ ID NO: 690735 - protein, 11 aa, Homo sapiens
  CDR3 for alpha chain variable domain of TCR clone 345368 (TRAV2, TRAJ40)
CAVEGTYKYIF

SEQ ID NO: 690736 - protein, 17 aa, Homo sapiens
  CDR3 for beta chain variable domain of TCR clone 345368 (TRBV10-3, TRBJ1-2)
CAISQTGSASGVDGDTF

SEQ ID NO: 690737 - protein, 16 aa, Homo sapiens
  CDR3 for alpha chain variable domain of TCR clone 345369 (TRAV13-1, TRAJ15)
CAANGGPVRPGTALIF

SEQ ID NO: 690738 - protein, 13 aa, Homo sapiens
  CDR3 for beta chain variable domain of TCR clone 345369 (TRBV20-1, TRBJ2-3)
CSATSGSRDTQYF

SEQ ID NO: 690739 - protein, 13 aa, Homo sapiens
  CDR3 for alpha chain variable domain of TCR clone 345370 (TRAV23/DV6, TRAJ27)
CAASKPMQANQPL

SEQ ID NO: 690740 - protein, 15 aa, Homo sapiens
  CDR3 for beta chain variable domain of TCR clone 345370 (TRBV5-4, TRBJ2-1)
CASSSGLAELNEQFF

SEQ ID NO: 690741 - protein, 14 aa, Homo sapiens
  CDR3 for alpha chain variable domain of TCR clone 345371 (TRAV8-4, TRAJ13)
CAVTLSGGYQKVPF

SEQ ID NO: 690742 - protein, 16 aa, Homo sapiens
  CDR3 for beta chain variable domain of TCR clone 345371 (TRBV19, TRBJ2-2)
CASRSPGTGATGELFF

SEQ ID NO: 690743 - protein, 15 aa, Homo sapiens
  CDR3 for alpha chain variable domain of TCR clone 345372 (TRAV8-2, TRAJ24)
CVVSDRTDSWGKLQF

SEQ ID NO: 690744 - protein, 14 aa, Homo sapiens
  CDR3 for beta chain variable domain of TCR clone 345372 (TRBV19, TRBJ2-7)
CASSIEASSYEQYL

SEQ ID NO: 690745 - protein, 14 aa, Homo sapiens
  CDR3 for alpha chain variable domain of TCR clone 345373 (TRAV2, TRAJ37)
RAVGFTSNTGKLIF

SEQ ID NO: 690746 - protein, 14 aa, Homo sapiens
  CDR3 for beta chain variable domain of TCR clone 345373 (TRBV5-1, TRBJ2-5)
CASSFGGSQETQYF

SEQ ID NO: 690747 - protein, 15 aa, Homo sapiens
  CDR3 for alpha chain variable domain of TCR clone 345374 (TRAV13-2, TRAJ45)
CAEHHSGGGADGLTF

SEQ ID NO: 690748 - protein, 15 aa, Homo sapiens
  CDR3 for beta chain variable domain of TCR clone 345374 (TRBV7-9, TRBJ1-5)
CASSQGHQPNQPQHF

SEQ ID NO: 690749 - protein, 16 aa, Homo sapiens
  CDR3 for alpha chain variable domain of TCR clone 345375 (TRAV3, TRAJ10)
CAVRDMRAGGGNKRTF

SEQ ID NO: 690750 - protein, 15 aa, Homo sapiens
  CDR3 for beta chain variable domain of TCR clone 345375 (TRBV11-2, TRBJ1-6)
CASTGFGTAVSPLHF

SEQ ID NO: 690751 - protein, 14 aa, Homo sapiens
  CDR3 for alpha chain variable domain of TCR clone 345376 (TRAV23/DV6, TRAJ53)
CAARGGGSNYKLTF

SEQ ID NO: 690752 - protein, 14 aa, Homo sapiens
  CDR3 for beta chain variable domain of TCR clone 345376 (TRBV27, TRBJ1-1)
CASSPQGKRAEAFF

SEQ ID NO: 690753 - protein, 15 aa, Homo sapiens
  CDR3 for alpha chain variable domain of TCR clone 345377 (TRAV20, TRAJ43)
CAVQAGESRNNDMRF

SEQ ID NO: 690754 - protein, 13 aa, Homo sapiens
  CDR3 for beta chain variable domain of TCR clone 345377 (TRBV27, TRBJ1-1)
CASSLSIGAEAFF

SEQ ID NO: 690755 - protein, 13 aa, Homo sapiens
  CDR3 for alpha chain variable domain of TCR clone 345378 (TRAV17, TRAJ4)
CATKSGGYNKLIF

SEQ ID NO: 690756 - protein, 14 aa, Homo sapiens
  CDR3 for beta chain variable domain of TCR clone 345378 (TRBV20-1, TRBJ1-5)
FSARDDRGNQPQHF

SEQ ID NO: 690757 - protein, 14 aa, Homo sapiens
  CDR3 for alpha chain variable domain of TCR clone 345379 (TRAV17, TRAJ57)
CATDASGGSDKLVF

SEQ ID NO: 690758 - protein, 14 aa, Homo sapiens
  CDR3 for beta chain variable domain of TCR clone 345379 (TRBV4-2, TRBJ2-1)
CASGLDRAYNEQFF

SEQ ID NO: 690759 - protein, 13 aa, Homo sapiens
  CDR3 for alpha chain variable domain of TCR clone 345380 (TRAV3, TRAJ41)
CSVSSNSGYALNF

SEQ ID NO: 690760 - protein, 14 aa, Homo sapiens
  CDR3 for beta chain variable domain of TCR clone 345380 (TRBV7-2, TRBJ2-7)
CASSPKTSFYEQYF

SEQ ID NO: 690761 - protein, 13 aa, Homo sapiens
  CDR3 for alpha chain variable domain of TCR clone 345381 (TRAV2, TRAJ40)
CAVVTSGTYKYIF

SEQ ID NO: 690762 - protein, 14 aa, Homo sapiens
  CDR3 for beta chain variable domain of TCR clone 345381 (TRBV19, TRBJ2-1)
CAIPTFVLGGEQFF

SEQ ID NO: 690763 - protein, 12 aa, Homo sapiens
  CDR3 for alpha chain variable domain of TCR clone 345382 (TRAV36/DV7, TRAJ54)
CAVVRGAQKLVF

SEQ ID NO: 690764 - protein, 13 aa, Homo sapiens
  CDR3 for beta chain variable domain of TCR clone 345382 (TRBV20-1, TRBJ1-1)
CGARGGGNTEAFF

SEQ ID NO: 690765 - protein, 15 aa, Homo sapiens
  CDR3 for alpha chain variable domain of TCR clone 345383 (TRAV8-4, TRAJ10)
CAVSDGPGGGNKLTF

SEQ ID NO: 690766 - protein, 13 aa, Homo sapiens
  CDR3 for beta chain variable domain of TCR clone 345383 (TRBV28, TRBJ1-3)
CASSFLGLGTIYF

SEQ ID NO: 690767 - protein, 16 aa, Homo sapiens
  CDR3 for alpha chain variable domain of TCR clone 345384 (TRAV17, TRAJ54)
CATDSDIIQGAQKLVF

SEQ ID NO: 690768 - protein, 17 aa, Homo sapiens
  CDR3 for beta chain variable domain of TCR clone 345384 (TRBV7-3, TRBJ2-3)
RASSLMKRMRGADTQYF

SEQ ID NO: 690769 - protein, 12 aa, Homo sapiens
  CDR3 for alpha chain variable domain of TCR clone 345385 (TRAV21, TRAJ11)
CAATSGCSTLTF

SEQ ID NO: 690770 - protein, 16 aa, Homo sapiens
  CDR3 for beta chain variable domain of TCR clone 345385 (TRBV28, TRBJ2-2)
CASSLEGGSNTGELFF

SEQ ID NO: 690771 - protein, 12 aa, Homo sapiens
  CDR3 for alpha chain variable domain of TCR clone 345386 (TRAV1-1, TRAJ39)
CAVPVVGNMLTF

SEQ ID NO: 690772 - protein, 15 aa, Homo sapiens
  CDR3 for beta chain variable domain of TCR clone 345386 (TRBV7-2, TRBJ2-1)
CASTHGTGIYNEQFF

SEQ ID NO: 690773 - protein, 16 aa, Homo sapiens
  CDR3 for alpha chain variable domain of TCR clone 345387 (TRAV16, TRAJ52)
CALSGVGGTSYGKLTF

SEQ ID NO: 690774 - protein, 13 aa, Homo sapiens
  CDR3 for beta chain variable domain of TCR clone 345387 (TRBV7-9, TRBJ2-7)
CASSFAGAYEQYF

SEQ ID NO: 690775 - protein, 13 aa, Homo sapiens
  CDR3 for alpha chain variable domain of TCR clone 345388 (TRAV8-6, TRAJ21)
CAVSPPSLNKFYF

SEQ ID NO: 690776 - protein, 18 aa, Homo sapiens
  CDR3 for beta chain variable domain of TCR clone 345388 (TRBV11-2, TRBJ2-3)
CASSLGGASRGAPNTQYF

SEQ ID NO: 690777 - protein, 14 aa, Homo sapiens
  CDR3 for alpha chain variable domain of TCR clone 345389 (TRAV1-2, TRAJ8)
CAVREDTGFQKLVF

SEQ ID NO: 690778 - protein, 16 aa, Homo sapiens
  CDR3 for beta chain variable domain of TCR clone 345389 (TRBV7-3, TRBJ2-1)
WASSLEGYRSYNEQFF

SEQ ID NO: 690779 - protein, 13 aa, Homo sapiens
  CDR3 for alpha chain variable domain of TCR clone 345390 (TRAV1-1, TRAJ28)
CVTSGAGSYQLTF

SEQ ID NO: 690780 - protein, 17 aa, Homo sapiens
  CDR3 for beta chain variable domain of TCR clone 345390 (TRBV18, TRBJ2-2)
CASSQRSSGQGPGELLF

SEQ ID NO: 690781 - protein, 14 aa, Homo sapiens
  CDR3 for alpha chain variable domain of TCR clone 345391 (TRAV21, TRAJ38)
CAVANAGNNRKLIW

SEQ ID NO: 690782 - protein, 15 aa, Homo sapiens
  CDR3 for beta chain variable domain of TCR clone 345391 (TRBV7-9, TRBJ1-4)
CASSARTGGNEKLFF

SEQ ID NO: 690783 - protein, 12 aa, Homo sapiens
  CDR3 for alpha chain variable domain of TCR clone 345392 (TRAV27, TRAJ33)
CAGDGSNYQLIW

SEQ ID NO: 690784 - protein, 15 aa, Homo sapiens
  CDR3 for beta chain variable domain of TCR clone 345392 (TRBV5-7, TRBJ2-1)
CASSRRLAGDNEQFF

SEQ ID NO: 690785 - protein, 14 aa, Homo sapiens
  CDR3 for alpha chain variable domain of TCR clone 345393 (TRAV13-1, TRAJ39)
CAASKNNAGNMLTF

SEQ ID NO: 690786 - protein, 15 aa, Homo sapiens
  CDR3 for beta chain variable domain of TCR clone 345393 (TRBV7-9, TRBJ1-6)
CSSSSPGRGNSPLHF

SEQ ID NO: 690787 - protein, 11 aa, Homo sapiens
  CDR3 for alpha chain variable domain of TCR clone 345394 (TRAV2, TRAJ33)
CAVDSNYQLIW

SEQ ID NO: 690788 - protein, 13 aa, Homo sapiens
  CDR3 for beta chain variable domain of TCR clone 345394 (TRBV4-3, TRBJ1-5)
CASSQDYNGPQHF

SEQ ID NO: 690789 - protein, 15 aa, Homo sapiens
  CDR3 for alpha chain variable domain of TCR clone 345395 (TRAV12-3, TRAJ47)
CAMSALVEYGNKLVF

SEQ ID NO: 690790 - protein, 16 aa, Homo sapiens
  CDR3 for beta chain variable domain of TCR clone 345395 (TRBV7-7, TRBJ2-1)
CASSLASGTSYNEQFF

SEQ ID NO: 690791 - protein, 11 aa, Homo sapiens
  CDR3 for alpha chain variable domain of TCR clone 345396 (TRAV3, TRAJ21)
CAVGNFNKFYF

SEQ ID NO: 690792 - protein, 16 aa, Homo sapiens
  CDR3 for beta chain variable domain of TCR clone 345396 (TRBV5-1, TRBJ2-3)
CASSLGLAVYTDTQYF

SEQ ID NO: 690793 - protein, 13 aa, Homo sapiens
  CDR3 for alpha chain variable domain of TCR clone 345397 (TRAV35, TRAJ33)
CAGQLYGEYQLIW

SEQ ID NO: 690794 - protein, 13 aa, Homo sapiens
  CDR3 for beta chain variable domain of TCR clone 345397 (TRBV7-3, TRBJ1-1)
CASSQDWGAEAFF

SEQ ID NO: 690795 - protein, 12 aa, Homo sapiens
  CDR3 for alpha chain variable domain of TCR clone 345398 (TRAV17, TRAJ53)
CAGGGSNYKLTF

SEQ ID NO: 690796 - protein, 16 aa, Homo sapiens
  CDR3 for beta chain variable domain of TCR clone 345398 (TRBV11-2, TRBJ2-3)
CASSVQGRGALDTQYF

SEQ ID NO: 690797 - protein, 15 aa, Homo sapiens
  CDR3 for alpha chain variable domain of TCR clone 345399 (TRAV26-1, TRAJ22)
CIVSVSLWFCKATDL

SEQ ID NO: 690798 - protein, 14 aa, Homo sapiens
  CDR3 for beta chain variable domain of TCR clone 345399 (TRBV18, TRBJ2-7)
CASSPRGGAYEQYF

SEQ ID NO: 690799 - protein, 14 aa, Homo sapiens
  CDR3 for alpha chain variable domain of TCR clone 345400 (TRAV8-3, TRAJ4)
CAVGAAGGYNKLIF

SEQ ID NO: 690800 - protein, 15 aa, Homo sapiens
  CDR3 for beta chain variable domain of TCR clone 345400 (TRBV20-1, TRBJ2-5)
CSAPPRTGVGETQYF

SEQ ID NO: 690801 - protein, 12 aa, Homo sapiens
  CDR3 for alpha chain variable domain of TCR clone 345401 (TRAV2, TRAJ31)
CAVADNNARLLF

SEQ ID NO: 690802 - protein, 14 aa, Homo sapiens
  CDR3 for beta chain variable domain of TCR clone 345401 (TRBV19, TRBJ2-5)
CASSMTGQQETQYF

SEQ ID NO: 690803 - protein, 14 aa, Homo sapiens
  CDR3 for alpha chain variable domain of TCR clone 345402 (TRAV12-1, TRAJ17)
CVVNYKAAGNKLTF

SEQ ID NO: 690804 - protein, 11 aa, Homo sapiens
  CDR3 for beta chain variable domain of TCR clone 345402 (TRBV19, TRBJ1-1)
CASSIGSEAFF

SEQ ID NO: 690805 - protein, 16 aa, Homo sapiens
  CDR3 for alpha chain variable domain of TCR clone 345403 (TRAV3, TRAJ37)
CAVRPHGSGNTGKLIF

SEQ ID NO: 690806 - protein, 13 aa, Homo sapiens
  CDR3 for beta chain variable domain of TCR clone 345403 (TRBV9, TRBJ1-2)
CASSVEERSPPMA

SEQ ID NO: 690807 - protein, 14 aa, Homo sapiens
  CDR3 for alpha chain variable domain of TCR clone 345404 (TRAV1-2, TRAJ16)
CAVNRFSDGQKLLF

SEQ ID NO: 690808 - protein, 12 aa, Homo sapiens
  CDR3 for beta chain variable domain of TCR clone 345404 (TRBV11-2, TRBJ2-1)
CASSPGNNQQFF

SEQ ID NO: 690809 - protein, 13 aa, Homo sapiens
  CDR3 for alpha chain variable domain of TCR clone 345405 (TRAV22, TRAJ31)
CAVKGRDNARLMF

SEQ ID NO: 690810 - protein, 14 aa, Homo sapiens
  CDR3 for beta chain variable domain of TCR clone 345405 (TRBV12-5, TRBJ2-5)
CASGSRTHQETQYF

SEQ ID NO: 690811 - protein, 14 aa, Homo sapiens
  CDR3 for alpha chain variable domain of TCR clone 345406 (TRAV8-3, TRAJ15)
CAVGRHQAGTALIF

SEQ ID NO: 690812 - protein, 13 aa, Homo sapiens
  CDR3 for beta chain variable domain of TCR clone 345406 (TRBV9, TRBJ2-7)
CASSASESYEQYF

SEQ ID NO: 690813 - protein, 15 aa, Homo sapiens
  CDR3 for alpha chain variable domain of TCR clone 345407 (TRAV17, TRAJ16)
CATALRFSDGQKLLF

SEQ ID NO: 690814 - protein, 13 aa, Homo sapiens
  CDR3 for beta chain variable domain of TCR clone 345407 (TRBV20-1, TRBJ2-5)
CSARYTGEETQYF

SEQ ID NO: 690815 - protein, 17 aa, Homo sapiens
  CDR3 for alpha chain variable domain of TCR clone 345408 (TRAV3, TRAJ6)
CAVRDGPRAGGSYIPTF

SEQ ID NO: 690816 - protein, 14 aa, Homo sapiens
  CDR3 for beta chain variable domain of TCR clone 345408 (TRBV7-2, TRBJ2-7)
CASRSQVAAYEQYF

SEQ ID NO: 690817 - protein, 13 aa, Homo sapiens
  CDR3 for alpha chain variable domain of TCR clone 345409 (TRAV17, TRAJ54)
CATVIQVAQKLVY

SEQ ID NO: 690818 - protein, 15 aa, Homo sapiens
  CDR3 for beta chain variable domain of TCR clone 345409 (TRBV13, TRBJ2-1)
CASSLLSGLNNEQFF

SEQ ID NO: 690819 - protein, 14 aa, Homo sapiens
  CDR3 for alpha chain variable domain of TCR clone 345410 (TRAV1-1, TRAJ30)
SALRESRIDDKIIF

SEQ ID NO: 690820 - protein, 16 aa, Homo sapiens
  CDR3 for beta chain variable domain of TCR clone 345410 (TRBV7-2, TRBJ1-4)
CASSPVGRFDREKLFF

SEQ ID NO: 690821 - protein, 16 aa, Homo sapiens
  CDR3 for alpha chain variable domain of TCR clone 345411 (TRAV8-6, TRAJ39)
CAVMPMNNNAGNILTF

SEQ ID NO: 690822 - protein, 16 aa, Homo sapiens
  CDR3 for beta chain variable domain of TCR clone 345411 (TRBV15, TRBJ2-5)
CATSRYREAAQETQYF

SEQ ID NO: 690823 - protein, 15 aa, Homo sapiens
  CDR3 for alpha chain variable domain of TCR clone 345412 (TRAV23/DV6, TRAJ13)
CAAWPGGGGYQKVTF

SEQ ID NO: 690824 - protein, 17 aa, Homo sapiens
  CDR3 for beta chain variable domain of TCR clone 345412 (TRBV19, TRBJ2-7)
CASSISFYYSYPYEQYF

SEQ ID NO: 690825 - protein, 14 aa, Homo sapiens
  CDR3 for alpha chain variable domain of TCR clone 345413 (TRAV12-2, TRAJ13)
CAVKKTGGYQKVTF

SEQ ID NO: 690826 - protein, 16 aa, Homo sapiens
  CDR3 for beta chain variable domain of TCR clone 345413 (TRBV20-1, TRBJ1-4)
CSAPGQGLLTNDKLFF

SEQ ID NO: 690827 - protein, 14 aa, Homo sapiens
  CDR3 for alpha chain variable domain of TCR clone 345414 (TRAV12-2, TRAJ40)
CAVKIPSGTNKYIF

SEQ ID NO: 690828 - protein, 17 aa, Homo sapiens
  CDR3 for beta chain variable domain of TCR clone 345414 (TRBV13, TRBJ2-3)
CASSLSRVAGGRNTQYF

SEQ ID NO: 690829 - protein, 16 aa, Homo sapiens
  CDR3 for alpha chain variable domain of TCR clone 345415 (TRAV1-1, TRAJ29)
CAVRSTRNSGNTPLVF

SEQ ID NO: 690830 - protein, 19 aa, Homo sapiens
  CDR3 for beta chain variable domain of TCR clone 345415 (TRBV28, TRBJ2-7)
CASSYSGTSRLGWVYEQYF

SEQ ID NO: 690831 - protein, 13 aa, Homo sapiens
  CDR3 for alpha chain variable domain of TCR clone 345416 (TRAV21, TRAJ27)
CAARPGNAGKSTF

SEQ ID NO: 690832 - protein, 17 aa, Homo sapiens
  CDR3 for beta chain variable domain of TCR clone 345416 (TRBV4-1, TRBJ1-4)
CASRQEGPRGVEEKLFF

SEQ ID NO: 690833 - protein, 16 aa, Homo sapiens
  CDR3 for alpha chain variable domain of TCR clone 345417 (TRAV12-3, TRAJ53)
CAMSVGSGGSNYKLTF

SEQ ID NO: 690834 - protein, 11 aa, Homo sapiens
  CDR3 for beta chain variable domain of TCR clone 345417 (TRBV29-1, TRBJ2-5)
CSVASGETQYV

SEQ ID NO: 690835 - protein, 14 aa, Homo sapiens
  CDR3 for alpha chain variable domain of TCR clone 345418 (TRAV1-2, TRAJ6)
CAVRSSGGSYIPTF

SEQ ID NO: 690836 - protein, 16 aa, Homo sapiens
  CDR3 for beta chain variable domain of TCR clone 345418 (TRBV7-3, TRBJ2-2)
CASSLKRGTVSGELFF

SEQ ID NO: 690837 - protein, 12 aa, Homo sapiens
  CDR3 for alpha chain variable domain of TCR clone 345419 (TRAV21, TRAJ23)
CAVGPQGGKLIF

SEQ ID NO: 690838 - protein, 13 aa, Homo sapiens
  CDR3 for beta chain variable domain of TCR clone 345419 (TRBV20-1, TRBJ2-7)
CSARTGAVYEQYF

SEQ ID NO: 690839 - protein, 18 aa, Homo sapiens
  CDR3 for alpha chain variable domain of TCR clone 345420 (TRAV26-1, TRAJ5)
CIVRVVPPRDTGRGALTF

SEQ ID NO: 690840 - protein, 12 aa, Homo sapiens
  CDR3 for beta chain variable domain of TCR clone 345420 (TRBV12-4, TRBJ2-7)
CASSLVGYEQYF

SEQ ID NO: 690841 - protein, 13 aa, Homo sapiens
  CDR3 for alpha chain variable domain of TCR clone 345421 (TRAV2, TRAJ40)
CAVVTSGTYKYIF

SEQ ID NO: 690842 - protein, 16 aa, Homo sapiens
  CDR3 for beta chain variable domain of TCR clone 345421 (TRBV19, TRBJ2-1)
SISGPVRLSFSGEQFF

SEQ ID NO: 690843 - protein, 15 aa, Homo sapiens
  CDR3 for alpha chain variable domain of TCR clone 345422 (TRAV8-6, TRAJ10)
CAVSDQAGGGNKLNF

SEQ ID NO: 690844 - protein, 15 aa, Homo sapiens
  CDR3 for beta chain variable domain of TCR clone 345422 (TRBV3-1, TRBJ2-5)
CASSANLGGPETQYF

SEQ ID NO: 690845 - protein, 11 aa, Homo sapiens
  CDR3 for alpha chain variable domain of TCR clone 345423 (TRAV3, TRAJ21)
CAVDNFNKFYF

SEQ ID NO: 690846 - protein, 16 aa, Homo sapiens
  CDR3 for beta chain variable domain of TCR clone 345423 (TRBV19, TRBJ2-1)
CASSKAGPSSYNEQFF

SEQ ID NO: 690847 - protein, 11 aa, Homo sapiens
  CDR3 for alpha chain variable domain of TCR clone 345424 (TRAV22, TRAJ47)
CAVLYGNKLVF

SEQ ID NO: 690848 - protein, 15 aa, Homo sapiens
  CDR3 for beta chain variable domain of TCR clone 345424 (TRBV20-1, TRBJ2-7)
CSARVPAAYFYERYF

SEQ ID NO: 690849 - protein, 13 aa, Homo sapiens
  CDR3 for alpha chain variable domain of TCR clone 345425 (TRAV8-3, TRAJ37)
CAVGSGNTGTLIF

SEQ ID NO: 690850 - protein, 11 aa, Homo sapiens
  CDR3 for beta chain variable domain of TCR clone 345425 (TRBV29-1, TRBJ1-1)
CSLQQNTEAFF

SEQ ID NO: 690851 - protein, 15 aa, Homo sapiens
  CDR3 for alpha chain variable domain of TCR clone 345426 (TRAV17, TRAJ40)
CATVSSTSGTYKYIF

SEQ ID NO: 690852 - protein, 14 aa, Homo sapiens
  CDR3 for beta chain variable domain of TCR clone 345426 (TRBV19, TRBJ2-1)
CASSRLASINEQFF

SEQ ID NO: 690853 - protein, 13 aa, Homo sapiens
  CDR3 for alpha chain variable domain of TCR clone 345427 (TRAV30, TRAJ39)
CGTEKNAGNMLTF

SEQ ID NO: 690854 - protein, 12 aa, Homo sapiens
  CDR3 for beta chain variable domain of TCR clone 345427 (TRBV12-4, TRBJ2-5)
CASSPAQETQYF

SEQ ID NO: 690855 - protein, 11 aa, Homo sapiens
  CDR3 for alpha chain variable domain of TCR clone 345428 (TRAV3, TRAJ21)
WAVGNFNKFYF

SEQ ID NO: 690856 - protein, 16 aa, Homo sapiens
  CDR3 for beta chain variable domain of TCR clone 345428 (TRBV19, TRBJ2-1)
CASSKAGPSSYNEQFF

SEQ ID NO: 690857 - protein, 11 aa, Homo sapiens
  CDR3 for alpha chain variable domain of TCR clone 345429 (TRAV2, TRAJ33)
CAVECNYQLIW

SEQ ID NO: 690858 - protein, 15 aa, Homo sapiens
  CDR3 for beta chain variable domain of TCR clone 345429 (TRBV19, TRBJ1-1)
CASTSGQIKNTEAFF

SEQ ID NO: 690859 - protein, 20 aa, Homo sapiens
  CDR3 for alpha chain variable domain of TCR clone 345430 (TRAV1-1, TRAJ4)
CLLLLRCEDFLSGGYNKLIF

SEQ ID NO: 690860 - protein, 16 aa, Homo sapiens
  CDR3 for beta chain variable domain of TCR clone 345430 (TRBV28, TRBJ1-4)
CASSPPYRGRSEKLFF

SEQ ID NO: 690861 - protein, 10 aa, Homo sapiens
  CDR3 for alpha chain variable domain of TCR clone 345431 (TRAV23/DV6, TRAJ43)
CAAAVPALEQ

SEQ ID NO: 690862 - protein, 13 aa, Homo sapiens
  CDR3 for beta chain variable domain of TCR clone 345431 (TRBV12-4, TRBJ1-2)
CASSLRQGKGYTF

SEQ ID NO: 690863 - protein, 13 aa, Homo sapiens
  CDR3 for alpha chain variable domain of TCR clone 345432 (TRAV8-1, TRAJ39)
CAGLNNAGNMLNF

SEQ ID NO: 690864 - protein, 16 aa, Homo sapiens
  CDR3 for beta chain variable domain of TCR clone 345432 (TRBV28, TRBJ1-4)
CASSPPYRGRSEKLFF

SEQ ID NO: 690865 - protein, 13 aa, Homo sapiens
  CDR3 for alpha chain variable domain of TCR clone 345433 (TRAV35, TRAJ40)
CAGQLSGTYKYIF

SEQ ID NO: 690866 - protein, 14 aa, Homo sapiens
  CDR3 for beta chain variable domain of TCR clone 345433 (TRBV3-1, TRBJ2-5)
CASSLQRAGETQDF

SEQ ID NO: 690867 - protein, 13 aa, Homo sapiens
  CDR3 for alpha chain variable domain of TCR clone 345434 (TRAV21, TRAJ33)
CAVAGDSNYQLIW

SEQ ID NO: 690868 - protein, 15 aa, Homo sapiens
  CDR3 for beta chain variable domain of TCR clone 345434 (TRBV20-1, TRBJ2-7)
CSARDRVSGMDEQYF

SEQ ID NO: 690869 - protein, 11 aa, Homo sapiens
  CDR3 for alpha chain variable domain of TCR clone 345435 (TRAV12-3, TRAJ3)
CNDSSASKIIF

SEQ ID NO: 690870 - protein, 17 aa, Homo sapiens
  CDR3 for beta chain variable domain of TCR clone 345435 (TRBV7-9, TRBJ2-3)
CASSLEEAGAYPDTQYF

SEQ ID NO: 690871 - protein, 13 aa, Homo sapiens
  CDR3 for alpha chain variable domain of TCR clone 345436 (TRAV21, TRAJ27)
CAARPGNAGKSTF

SEQ ID NO: 690872 - protein, 13 aa, Homo sapiens
  CDR3 for beta chain variable domain of TCR clone 345436 (TRBV11-3, TRBJ1-1)
CASTGSLNTEAFF

SEQ ID NO: 690873 - protein, 14 aa, Homo sapiens
  CDR3 for alpha chain variable domain of TCR clone 345437 (TRAV35, TRAJ13)
CAGRSPGGYQKVTF

SEQ ID NO: 690874 - protein, 14 aa, Homo sapiens
  CDR3 for beta chain variable domain of TCR clone 345437 (TRBV19, TRBJ2-2)
CTSSMVGLSGELFF

SEQ ID NO: 690875 - protein, 12 aa, Homo sapiens
  CDR3 for alpha chain variable domain of TCR clone 345438 (TRAV17, TRAJ57)
CATDGGSEKLVC

SEQ ID NO: 690876 - protein, 12 aa, Homo sapiens
  CDR3 for beta chain variable domain of TCR clone 345438 (TRBV29-1, TRBJ2-2)
CSVDKYTGELFF

SEQ ID NO: 690877 - protein, 14 aa, Homo sapiens
  CDR3 for alpha chain variable domain of TCR clone 345439 (TRAV2, TRAJ9)
CAVEDRSGGFKTNF

SEQ ID NO: 690878 - protein, 12 aa, Homo sapiens
  CDR3 for beta chain variable domain of TCR clone 345439 (TRBV12-4, TRBJ2-4)
CASSSSGNSQYF

SEQ ID NO: 690879 - protein, 11 aa, Homo sapiens
  CDR3 for alpha chain variable domain of TCR clone 345440 (TRAV12-1, TRAJ30)
CVVNGQDKIIF

SEQ ID NO: 690880 - protein, 14 aa, Homo sapiens
  CDR3 for beta chain variable domain of TCR clone 345440 (TRBV7-2, TRBJ2-1)
CASSPGTFYNEQFF

SEQ ID NO: 690881 - protein, 15 aa, Homo sapiens
  CDR3 for alpha chain variable domain of TCR clone 345441 (TRAV3, TRAJ3)
CCERPLYSSASKIIF

SEQ ID NO: 690882 - protein, 16 aa, Homo sapiens
  CDR3 for beta chain variable domain of TCR clone 345441 (TRBV19, TRBJ1-5)
CASSIDRGGPRQPQHF

SEQ ID NO: 690883 - protein, 16 aa, Homo sapiens
  CDR3 for alpha chain variable domain of TCR clone 345442 (TRAV30, TRAJ24)
CGTEILDADSCGKFQF

SEQ ID NO: 690884 - protein, 14 aa, Homo sapiens
  CDR3 for beta chain variable domain of TCR clone 345442 (TRBV12-5, TRBJ2-5)
CASGSRTHQETQYF

SEQ ID NO: 690885 - protein, 15 aa, Homo sapiens
  CDR3 for alpha chain variable domain of TCR clone 345443 (TRAV3, TRAJ30)
CAVRDEYGRDNKIIF

SEQ ID NO: 690886 - protein, 16 aa, Homo sapiens
  CDR3 for beta chain variable domain of TCR clone 345443 (TRBV5-1, TRBJ2-5)
CASSLANHRGRETQYF

SEQ ID NO: 690887 - protein, 15 aa, Homo sapiens
  CDR3 for alpha chain variable domain of TCR clone 345444 (TRAV14/DV4, TRAJ10)
CAMRELTGGGNKLTF

SEQ ID NO: 690888 - protein, 13 aa, Homo sapiens
  CDR3 for beta chain variable domain of TCR clone 345444 (TRBV19, TRBJ1-5)
CASSIGGNQPQHF

SEQ ID NO: 690889 - protein, 16 aa, Homo sapiens
  CDR3 for alpha chain variable domain of TCR clone 345445 (TRAV26-1, )
CIDIQNPDPAVYQLRD

SEQ ID NO: 690890 - protein, 17 aa, Homo sapiens
  CDR3 for beta chain variable domain of TCR clone 345445 (TRBV18, TRBJ2-3)
CASSAAGTSGSTDTQYF

SEQ ID NO: 690891 - protein, 16 aa, Homo sapiens
  CDR3 for alpha chain variable domain of TCR clone 345446 (TRAV12-2, TRAJ28)
CAVITDSGAGSYQLTF

SEQ ID NO: 690892 - protein, 14 aa, Homo sapiens
  CDR3 for beta chain variable domain of TCR clone 345446 (TRBV11-2, TRBJ2-5)
CASSRTGGIETQYF

SEQ ID NO: 690893 - protein, 13 aa, Homo sapiens
  CDR3 for alpha chain variable domain of TCR clone 345447 (TRAV3, TRAJ20)
CAVRSLNVYKLSF

SEQ ID NO: 690894 - protein, 13 aa, Homo sapiens
  CDR3 for beta chain variable domain of TCR clone 345447 (TRBV6-1, TRBJ2-1)
CAGMDPTNNEQFF

SEQ ID NO: 690895 - protein, 14 aa, Homo sapiens
  CDR3 for alpha chain variable domain of TCR clone 345448 (TRAV13-1, TRAJ44)
CAAKATGTASKLTF

SEQ ID NO: 690896 - protein, 14 aa, Homo sapiens
  CDR3 for beta chain variable domain of TCR clone 345448 (TRBV2, TRBJ2-7)
CASRLTSGGYEQYF

SEQ ID NO: 690897 - protein, 16 aa, Homo sapiens
  CDR3 for alpha chain variable domain of TCR clone 345449 (TRAV12-1, TRAJ21)
CVVLSGYFGSGTKLNG

SEQ ID NO: 690898 - protein, 13 aa, Homo sapiens
  CDR3 for beta chain variable domain of TCR clone 345449 (TRBV7-3, TRBJ1-1)
CASSQDWGAEAFF

SEQ ID NO: 690899 - protein, 18 aa, Homo sapiens
  CDR3 for alpha chain variable domain of TCR clone 345450 (TRAV13-1, TRAJ52)
CAAKNPNAGGTSYGKLTF

SEQ ID NO: 690900 - protein, 13 aa, Homo sapiens
  CDR3 for beta chain variable domain of TCR clone 345450 (TRBV19, TRBJ2-3)
CASASGSTDTQYF

SEQ ID NO: 690901 - protein, 14 aa, Homo sapiens
  CDR3 for alpha chain variable domain of TCR clone 345451 (TRAV9-2, TRAJ39)
CALYIYNAGNMLTF

SEQ ID NO: 690902 - protein, 13 aa, Homo sapiens
  CDR3 for beta chain variable domain of TCR clone 345451 (TRBV6-1, TRBJ2-1)
CASEGSSYNEQFF

SEQ ID NO: 690903 - protein, 12 aa, Homo sapiens
  CDR3 for alpha chain variable domain of TCR clone 345452 (TRAV12-1, TRAJ6)
CVVSERSYIPTF

SEQ ID NO: 690904 - protein, 21 aa, Homo sapiens
  CDR3 for beta chain variable domain of TCR clone 345452 (TRBV7-3, TRBJ2-1)
GVTQPCISVPAAYGLAGAQFF

SEQ ID NO: 690905 - protein, 17 aa, Homo sapiens
  CDR3 for alpha chain variable domain of TCR clone 345453 (TRAV3, TRAJ6)
CAVGDGPRAGGSYIPTF

SEQ ID NO: 690906 - protein, 16 aa, Homo sapiens
  CDR3 for beta chain variable domain of TCR clone 345453 (TRBV12-5, TRBJ2-5)
CASGPRTSGNQETQYF

SEQ ID NO: 690907 - protein, 12 aa, Homo sapiens
  CDR3 for alpha chain variable domain of TCR clone 345454 (TRAV1-2, TRAJ29)
CAVPSGNTPLVF

SEQ ID NO: 690908 - protein, 15 aa, Homo sapiens
  CDR3 for beta chain variable domain of TCR clone 345454 (TRBV5-4, TRBJ2-1)
CASSFSGGSYNEQFF

SEQ ID NO: 690909 - protein, 15 aa, Homo sapiens
  CDR3 for alpha chain variable domain of TCR clone 345455 (TRAV8-2, TRAJ13)
CVVSDLSGGYQKVTL

SEQ ID NO: 690910 - protein, 16 aa, Homo sapiens
  CDR3 for beta chain variable domain of TCR clone 345455 (TRBV27, TRBJ2-2)
CASSFRGLVRTGELFF

SEQ ID NO: 690911 - protein, 13 aa, Homo sapiens
  CDR3 for alpha chain variable domain of TCR clone 345456 (TRAV17, TRAJ39)
CATDTNAGNMLTF

SEQ ID NO: 690912 - protein, 13 aa, Homo sapiens
  CDR3 for beta chain variable domain of TCR clone 345456 (TRBV12-4, TRBJ2-2)
CASSITGSGELFF

SEQ ID NO: 690913 - protein, 14 aa, Homo sapiens
  CDR3 for alpha chain variable domain of TCR clone 345457 (TRAV20, TRAJ26)
CAVQAAIYGENFVF

SEQ ID NO: 690914 - protein, 14 aa, Homo sapiens
  CDR3 for beta chain variable domain of TCR clone 345457 (TRBV27, TRBJ2-2)
CASSLGDTTGELFF

SEQ ID NO: 690915 - protein, 17 aa, Homo sapiens
  CDR3 for alpha chain variable domain of TCR clone 345458 (TRAV3, TRAJ6)
CAVSDGPMAGGSYIPTF

SEQ ID NO: 690916 - protein, 14 aa, Homo sapiens
  CDR3 for beta chain variable domain of TCR clone 345458 (TRBV7-2, TRBJ2-7)
CASSPKTSFYEQYF

SEQ ID NO: 690917 - protein, 15 aa, Homo sapiens
  CDR3 for alpha chain variable domain of TCR clone 345459 (TRAV38-2/DV8, TRAJ48)
CAYRSGGFGNEKLTF

SEQ ID NO: 690918 - protein, 16 aa, Homo sapiens
  CDR3 for beta chain variable domain of TCR clone 345459 (TRBV28, TRBJ2-7)
CASSPCVATGDLSQYF

SEQ ID NO: 690919 - protein, 14 aa, Homo sapiens
  CDR3 for alpha chain variable domain of TCR clone 345460 (TRAV13-1, TRAJ44)
CAAKATGTASKLTF

SEQ ID NO: 690920 - protein, 15 aa, Homo sapiens
  CDR3 for beta chain variable domain of TCR clone 345460 (TRBV12-4, TRBJ1-1)
CASSLAVSRGAEAVF

SEQ ID NO: 690921 - protein, 13 aa, Homo sapiens
  CDR3 for alpha chain variable domain of TCR clone 345461 (TRAV36/DV7, TRAJ54)
CAVLIQGAQKLVF

SEQ ID NO: 690922 - protein, 16 aa, Homo sapiens
  CDR3 for beta chain variable domain of TCR clone 345461 (TRBV23-1, TRBJ2-1)
CASSQAQRGGGNEQFF

SEQ ID NO: 690923 - protein, 14 aa, Homo sapiens
  CDR3 for alpha chain variable domain of TCR clone 345462 (TRAV20, TRAJ26)
CAVQADIYGQNFVF

SEQ ID NO: 690924 - protein, 14 aa, Homo sapiens
  CDR3 for beta chain variable domain of TCR clone 345462 (TRBV27, TRBJ2-2)
CASSLGDTNGELFF

SEQ ID NO: 690925 - protein, 13 aa, Homo sapiens
  CDR3 for alpha chain variable domain of TCR clone 345463 (TRAV13-2, TRAJ5)
CAVMDTGRRALTF

SEQ ID NO: 690926 - protein, 12 aa, Homo sapiens
  CDR3 for beta chain variable domain of TCR clone 345463 (TRBV28, TRBJ2-7)
CASSSSSYEQYF

SEQ ID NO: 690927 - protein, 12 aa, Homo sapiens
  CDR3 for alpha chain variable domain of TCR clone 345464 (TRAV17, TRAJ12)
CATLRSSYKLIF

SEQ ID NO: 690928 - protein, 16 aa, Homo sapiens
  CDR3 for beta chain variable domain of TCR clone 345464 (TRBV28, TRBJ2-7)
CASSLFFETGGLEQYF

SEQ ID NO: 690929 - protein, 15 aa, Homo sapiens
  CDR3 for alpha chain variable domain of TCR clone 345465 (TRAV3, TRAJ22)
CAVRDRGGSARPLPF

SEQ ID NO: 690930 - protein, 12 aa, Homo sapiens
  CDR3 for beta chain variable domain of TCR clone 345465 (TRBV7-8, TRBJ2-1)
CASSLGHNEQFF

SEQ ID NO: 690931 - protein, 14 aa, Homo sapiens
  CDR3 for alpha chain variable domain of TCR clone 345466 (TRAV17, TRAJ12)
CATDEKDSSYKLIF

SEQ ID NO: 690932 - protein, 13 aa, Homo sapiens
  CDR3 for beta chain variable domain of TCR clone 345466 (TRBV10-3, TRBJ1-2)
CAISERDSYGYTF

SEQ ID NO: 690933 - protein, 14 aa, Homo sapiens
  CDR3 for alpha chain variable domain of TCR clone 345467 (TRAV3, TRAJ8)
CAVSLNTGFQKLVF

SEQ ID NO: 690934 - protein, 13 aa, Homo sapiens
  CDR3 for beta chain variable domain of TCR clone 345467 (TRBV4-2, TRBJ2-2)
CASEDRGTGELFF

SEQ ID NO: 690935 - protein, 17 aa, Homo sapiens
  CDR3 for alpha chain variable domain of TCR clone 345468 (TRAV12-1, TRAJ32)
CVVNMQGYGGATNKLIF

SEQ ID NO: 690936 - protein, 13 aa, Homo sapiens
  CDR3 for beta chain variable domain of TCR clone 345468 (TRBV12-4, TRBJ1-2)
CASSLRQGKGYTF

SEQ ID NO: 690937 - protein, 15 aa, Homo sapiens
  CDR3 for alpha chain variable domain of TCR clone 345469 (TRAV17, TRAJ22)
CATVAPSGSASQLTF

SEQ ID NO: 690938 - protein, 16 aa, Homo sapiens
  CDR3 for beta chain variable domain of TCR clone 345469 (TRBV10-3, TRBJ2-7)
CAISADFADRPYEQYF

SEQ ID NO: 690939 - protein, 13 aa, Homo sapiens
  CDR3 for alpha chain variable domain of TCR clone 345470 (TRAV1-1, TRAJ9)
CAAKNTGGFKTIF

SEQ ID NO: 690940 - protein, 16 aa, Homo sapiens
  CDR3 for beta chain variable domain of TCR clone 345470 (TRBV7-3, TRBJ2-1)
CASSLEGYRSYNEQFF

SEQ ID NO: 690941 - protein, 13 aa, Homo sapiens
  CDR3 for alpha chain variable domain of TCR clone 345471 (TRAV12-3, TRAJ9)
CAMRNTGGFKTIF

SEQ ID NO: 690942 - protein, 13 aa, Homo sapiens
  CDR3 for beta chain variable domain of TCR clone 345471 (TRBV6-3, TRBJ1-2)
CASSYRGPDGYTF

SEQ ID NO: 690943 - protein, 18 aa, Homo sapiens
  CDR3 for alpha chain variable domain of TCR clone 345472 (TRAV3, TRAJ32)
CAARDIRGFGGSTNKLIF

SEQ ID NO: 690944 - protein, 15 aa, Homo sapiens
  CDR3 for beta chain variable domain of TCR clone 345472 (TRBV12-4, TRBJ2-2)
CASSLGVRHTGELFF

SEQ ID NO: 690945 - protein, 15 aa, Homo sapiens
  CDR3 for alpha chain variable domain of TCR clone 345473 (TRAV3, TRAJ17)
CAVSPKEPAGNKLTF

SEQ ID NO: 690946 - protein, 12 aa, Homo sapiens
  CDR3 for beta chain variable domain of TCR clone 345473 (TRBV7-9, TRBJ1-6)
CASSLMTSPLHF

SEQ ID NO: 690947 - protein, 12 aa, Homo sapiens
  CDR3 for alpha chain variable domain of TCR clone 345474 (TRAV3, TRAJ20)
CPVRDPDYKLSF

SEQ ID NO: 690948 - protein, 13 aa, Homo sapiens
  CDR3 for beta chain variable domain of TCR clone 345474 (TRBV9, TRBJ2-1)
CASGVGQGGEQFF

SEQ ID NO: 690949 - protein, 10 aa, Homo sapiens
  CDR3 for alpha chain variable domain of TCR clone 345475 (TRAV1-2, TRAJ20)
CACNDYKLSF

SEQ ID NO: 690950 - protein, 16 aa, Homo sapiens
  CDR3 for beta chain variable domain of TCR clone 345475 (TRBV20-1, TRBJ2-1)
CIARDLKQGMNNEQFF

SEQ ID NO: 690951 - protein, 16 aa, Homo sapiens
  CDR3 for alpha chain variable domain of TCR clone 345476 (TRAV26-1, TRAJ53)
CIVRVAMGGSNYKLTF

SEQ ID NO: 690952 - protein, 15 aa, Homo sapiens
  CDR3 for beta chain variable domain of TCR clone 345476 (TRBV11-3, TRBJ2-3)
CASLKDGREGDTQYF

SEQ ID NO: 690953 - protein, 14 aa, Homo sapiens
  CDR3 for alpha chain variable domain of TCR clone 345477 (TRAV12-1, TRAJ11)
CVVRPNSGYSTLTF

SEQ ID NO: 690954 - protein, 16 aa, Homo sapiens
  CDR3 for beta chain variable domain of TCR clone 345477 (TRBV12-5, TRBJ2-5)
CASGPRTSGNQETQYF

SEQ ID NO: 690955 - protein, 12 aa, Homo sapiens
  CDR3 for alpha chain variable domain of TCR clone 345478 (TRAV12-3, TRAJ42)
CAPGGSQGNLIF

SEQ ID NO: 690956 - protein, 14 aa, Homo sapiens
  CDR3 for beta chain variable domain of TCR clone 345478 (TRBV4-2, TRBJ2-1)
CASGLDRAYNEQFF

SEQ ID NO: 690957 - protein, 15 aa, Homo sapiens
  CDR3 for alpha chain variable domain of TCR clone 345479 (TRAV3, TRAJ29)
CAVRDSISGNTPLVF

SEQ ID NO: 690958 - protein, 16 aa, Homo sapiens
  CDR3 for beta chain variable domain of TCR clone 345479 (TRBV12-4, TRBJ2-7)
CASSLIGGTGTYEQYF

SEQ ID NO: 690959 - protein, 15 aa, Homo sapiens
  CDR3 for alpha chain variable domain of TCR clone 345480 (TRAV20, TRAJ53)
CAVQASGGSNYKLTF

SEQ ID NO: 690960 - protein, 15 aa, Homo sapiens
  CDR3 for beta chain variable domain of TCR clone 345480 (TRBV9, TRBJ2-1)
CASSLAGSSYNEQFY

SEQ ID NO: 690961 - protein, 14 aa, Homo sapiens
  CDR3 for alpha chain variable domain of TCR clone 345481 (TRAV13-1, TRAJ44)
CAAKTTGTASKLTF

SEQ ID NO: 690962 - protein, 14 aa, Homo sapiens
  CDR3 for beta chain variable domain of TCR clone 345481 (TRBV7-8, TRBJ2-3)
CASSLEAGTDTQYF

SEQ ID NO: 690963 - protein, 16 aa, Homo sapiens
  CDR3 for alpha chain variable domain of TCR clone 345482 (TRAV30, TRAJ24)
CGTEIVDADSWGKFQF

SEQ ID NO: 690964 - protein, 15 aa, Homo sapiens
  CDR3 for beta chain variable domain of TCR clone 345482 (TRBV7-2, TRBJ2-1)
CASRKTGSSYNEQFF

SEQ ID NO: 690965 - protein, 17 aa, Homo sapiens
  CDR3 for alpha chain variable domain of TCR clone 345483 (TRAV3, TRAJ17)
DSALHSPRGAAGNKLTF

SEQ ID NO: 690966 - protein, 12 aa, Homo sapiens
  CDR3 for beta chain variable domain of TCR clone 345483 (TRBV11-2, TRBJ2-2)
CASSLGGGELFF

SEQ ID NO: 690967 - protein, 12 aa, Homo sapiens
  CDR3 for alpha chain variable domain of TCR clone 345484 (TRAV35, TRAJ30)
CAGVNRDDKIIL

SEQ ID NO: 690968 - protein, 15 aa, Homo sapiens
  CDR3 for beta chain variable domain of TCR clone 345484 (TRBV18, TRBJ2-3)
CASSPLAGETDTQYF

SEQ ID NO: 690969 - protein, 13 aa, Homo sapiens
  CDR3 for alpha chain variable domain of TCR clone 345485 (TRAV12-1, TRAJ17)
CVVSKAEGNKLTF

SEQ ID NO: 690970 - protein, 17 aa, Homo sapiens
  CDR3 for beta chain variable domain of TCR clone 345485 (TRBV4-1, TRBJ2-5)
CASSQDPSGGPQETQYF

SEQ ID NO: 690971 - protein, 15 aa, Homo sapiens
  CDR3 for alpha chain variable domain of TCR clone 345486 (TRAV2, TRAJ15)
CAVEDRNQAGTALIF

SEQ ID NO: 690972 - protein, 14 aa, Homo sapiens
  CDR3 for beta chain variable domain of TCR clone 345486 (TRBV7-9, TRBJ2-7)
CASSLVSGTKYYYF

SEQ ID NO: 690973 - protein, 13 aa, Homo sapiens
  CDR3 for alpha chain variable domain of TCR clone 345487 (TRAV35, TRAJ42)
CAGFPGSQGNLIF

SEQ ID NO: 690974 - protein, 13 aa, Homo sapiens
  CDR3 for beta chain variable domain of TCR clone 345487 (TRBV7-3, TRBJ2-1)
CASSLWPYNEQFF

SEQ ID NO: 690975 - protein, 15 aa, Homo sapiens
  CDR3 for alpha chain variable domain of TCR clone 345488 (TRAV12-1, TRAJ42)
CVVTRDGGSQGNLIF

SEQ ID NO: 690976 - protein, 14 aa, Homo sapiens
  CDR3 for beta chain variable domain of TCR clone 345488 (TRBV11-2, TRBJ2-3)
CASSLGGGANTQYC

SEQ ID NO: 690977 - protein, 21 aa, Homo sapiens
  CDR3 for alpha chain variable domain of TCR clone 345489 (TRAV36/DV7, TRAJ39)
TATQTGDSAIYLPNAGNMLTF

SEQ ID NO: 690978 - protein, 12 aa, Homo sapiens
  CDR3 for beta chain variable domain of TCR clone 345489 (TRBV5-1, TRBJ2-3)
CASSLAADTQYF

SEQ ID NO: 690979 - protein, 11 aa, Homo sapiens
  CDR3 for alpha chain variable domain of TCR clone 345490 (TRAV13-2, TRAJ31)
CAENMDARLMF

SEQ ID NO: 690980 - protein, 12 aa, Homo sapiens
  CDR3 for beta chain variable domain of TCR clone 345490 (TRBV19, TRBJ1-2)
CASSRTESGYTF

SEQ ID NO: 690981 - protein, 16 aa, Homo sapiens
  CDR3 for alpha chain variable domain of TCR clone 345491 (TRAV17, TRAJ53)
CATDALSGGSNCKLTF

SEQ ID NO: 690982 - protein, 15 aa, Homo sapiens
  CDR3 for beta chain variable domain of TCR clone 345491 (TRBV20-1, TRBJ2-7)
CSARDRVSGMDEQYF

SEQ ID NO: 690983 - protein, 12 aa, Homo sapiens
  CDR3 for alpha chain variable domain of TCR clone 345492 (TRAV13-1, TRAJ49)
CAASIRSNQFYF

SEQ ID NO: 690984 - protein, 17 aa, Homo sapiens
  CDR3 for beta chain variable domain of TCR clone 345492 (TRBV7-2, TRBJ2-1)
CASSLYPPGVEYNEQFF

SEQ ID NO: 690985 - protein, 13 aa, Homo sapiens
  CDR3 for alpha chain variable domain of TCR clone 345493 (TRAV12-1, TRAJ49)
CVVSTNTGNQFYF

SEQ ID NO: 690986 - protein, 17 aa, Homo sapiens
  CDR3 for beta chain variable domain of TCR clone 345493 (TRBV7-3, TRBJ2-3)
CASSLMKRMRGADTQYF

SEQ ID NO: 690987 - protein, 13 aa, Homo sapiens
  CDR3 for alpha chain variable domain of TCR clone 345494 (TRAV12-1, TRAJ7)
CVVNMRGNNRLAF

SEQ ID NO: 690988 - protein, 16 aa, Homo sapiens
  CDR3 for beta chain variable domain of TCR clone 345494 (TRBV10-3, TRBJ2-1)
CAIRGGGRGDYNEQFF

SEQ ID NO: 690989 - protein, 14 aa, Homo sapiens
  CDR3 for alpha chain variable domain of TCR clone 345495 (TRAV3, TRAJ9)
CAVRFHTGGFKTIF

SEQ ID NO: 690990 - protein, 14 aa, Homo sapiens
  CDR3 for beta chain variable domain of TCR clone 345495 (TRBV18, TRBJ2-2)
CASSPGQNTGELFF

SEQ ID NO: 690991 - protein, 14 aa, Homo sapiens
  CDR3 for alpha chain variable domain of TCR clone 345496 (TRAV35, TRAJ22)
CAGLGPGSARQLTF

SEQ ID NO: 690992 - protein, 15 aa, Homo sapiens
  CDR3 for beta chain variable domain of TCR clone 345496 (TRBV12-4, TRBJ2-5)
SASSPPTGLQETQYF

SEQ ID NO: 690993 - protein, 13 aa, Homo sapiens
  CDR3 for alpha chain variable domain of TCR clone 345497 (TRAV8-6, TRAJ21)
CAVSPSSLSKFYF

SEQ ID NO: 690994 - protein, 14 aa, Homo sapiens
  CDR3 for beta chain variable domain of TCR clone 345497 (TRBV7-9, TRBJ2-5)
CTSSLDTAQETQYF

SEQ ID NO: 690995 - protein, 14 aa, Homo sapiens
  CDR3 for alpha chain variable domain of TCR clone 345498 (TRAV3, TRAJ21)
CALRRGSTNFTLDL

SEQ ID NO: 690996 - protein, 14 aa, Homo sapiens
  CDR3 for beta chain variable domain of TCR clone 345498 (TRBV7-9, TRBJ2-4)
CASSLAMGGNIQYF

SEQ ID NO: 690997 - protein, 15 aa, Homo sapiens
  CDR3 for alpha chain variable domain of TCR clone 345499 (TRAV34, TRAJ36)
CGAPSRLGGANNLFF

SEQ ID NO: 690998 - protein, 16 aa, Homo sapiens
  CDR3 for beta chain variable domain of TCR clone 345499 (TRBV4-3, TRBJ2-1)
CASSYRRLWSWDEQFF

SEQ ID NO: 690999 - protein, 12 aa, Homo sapiens
  CDR3 for alpha chain variable domain of TCR clone 345500 (TRAV30, TRAJ43)
CGTEARGNDMRF

SEQ ID NO: 691000 - protein, 11 aa, Homo sapiens
  CDR3 for beta chain variable domain of TCR clone 345500 (TRBV29-1, TRBJ2-5)
CSEDRTGTQYF

SEQ ID NO: 691001 - protein, 13 aa, Homo sapiens
  CDR3 for alpha chain variable domain of TCR clone 345501 (TRAV23/DV6, TRAJ24)
CAASTDSWGKFQF

SEQ ID NO: 691002 - protein, 15 aa, Homo sapiens
  CDR3 for beta chain variable domain of TCR clone 345501 (TRBV11-2, TRBJ2-2)
CASSSDRVNAGELFF

SEQ ID NO: 691003 - protein, 15 aa, Homo sapiens
  CDR3 for alpha chain variable domain of TCR clone 345502 (TRAV13-1, TRAJ10)
CAATILTGGGNKLTF

SEQ ID NO: 691004 - protein, 14 aa, Homo sapiens
  CDR3 for beta chain variable domain of TCR clone 345502 (TRBV7-9, TRBJ2-3)
CASSLEDGTDTQYF

SEQ ID NO: 691005 - protein, 14 aa, Homo sapiens
  CDR3 for alpha chain variable domain of TCR clone 345503 (TRAV12-2, TRAJ17)
CSVLFKAAGNKLTF

SEQ ID NO: 691006 - protein, 12 aa, Homo sapiens
  CDR3 for beta chain variable domain of TCR clone 345503 (TRBV29-1, TRBJ2-3)
CSVTGGADTQYF

SEQ ID NO: 691007 - protein, 15 aa, Homo sapiens
  CDR3 for alpha chain variable domain of TCR clone 345504 (TRAV8-3, TRAJ45)
CASSYSGGGADVLTF

SEQ ID NO: 691008 - protein, 15 aa, Homo sapiens
  CDR3 for beta chain variable domain of TCR clone 345504 (TRBV27, TRBJ2-1)
CASSNGGGSSNEQFF

SEQ ID NO: 691009 - protein, 16 aa, Homo sapiens
  CDR3 for alpha chain variable domain of TCR clone 345505 (TRAV30, TRAJ24)
CGTEIVDADSWGKFPF

SEQ ID NO: 691010 - protein, 14 aa, Homo sapiens
  CDR3 for beta chain variable domain of TCR clone 345505 (TRBV2, TRBJ2-7)
CASSEIDRGVEQYF

SEQ ID NO: 691011 - protein, 17 aa, Homo sapiens
  CDR3 for alpha chain variable domain of TCR clone 345506 (TRAV3, TRAJ6)
CAVRDGPRAGGSYQPTF

SEQ ID NO: 691012 - protein, 20 aa, Homo sapiens
  CDR3 for beta chain variable domain of TCR clone 345506 (TRBV28, TRBJ2-1)
CASTPIGRSPGLAGGNEQFF

SEQ ID NO: 691013 - protein, 15 aa, Homo sapiens
  CDR3 for alpha chain variable domain of TCR clone 345507 (TRAV3, TRAJ5)
CAVRDLDTGRSAFTF

SEQ ID NO: 691014 - protein, 13 aa, Homo sapiens
  CDR3 for beta chain variable domain of TCR clone 345507 (TRBV12-4, TRBJ2-7)
YASSPTETYEQYF

SEQ ID NO: 691015 - protein, 15 aa, Homo sapiens
  CDR3 for alpha chain variable domain of TCR clone 345508 (TRAV13-1, TRAJ5)
CAASKADTGRRALPF

SEQ ID NO: 691016 - protein, 15 aa, Homo sapiens
  CDR3 for beta chain variable domain of TCR clone 345508 (TRBV19, TRBJ2-1)
CASSMGWNSNNEQFF

SEQ ID NO: 691017 - protein, 15 aa, Homo sapiens
  CDR3 for alpha chain variable domain of TCR clone 345509 (TRAV3, TRAJ22)
CAVRGRGGSARQLTF

SEQ ID NO: 691018 - protein, 14 aa, Homo sapiens
  CDR3 for beta chain variable domain of TCR clone 345509 (TRBV4-1, TRBJ2-2)
CASSQAVNTGELFF

SEQ ID NO: 691019 - protein, 14 aa, Homo sapiens
  CDR3 for alpha chain variable domain of TCR clone 345510 (TRAV12-3, TRAJ35)
CAMSLIGFGNVLHC

SEQ ID NO: 691020 - protein, 13 aa, Homo sapiens
  CDR3 for beta chain variable domain of TCR clone 345510 (TRBV5-7, TRBJ1-1)
CASSLFQNTEAFF

SEQ ID NO: 691021 - protein, 14 aa, Homo sapiens
  CDR3 for alpha chain variable domain of TCR clone 345511 (TRAV12-3, TRAJ10)
SHLPLTGGGHKLTF

SEQ ID NO: 691022 - protein, 14 aa, Homo sapiens
  CDR3 for beta chain variable domain of TCR clone 345511 (TRBV4-1, TRBJ2-2)
CASSQAVNTGELFF

SEQ ID NO: 691023 - protein, 12 aa, Homo sapiens
  CDR3 for alpha chain variable domain of TCR clone 345512 (TRAV17, TRAJ12)
CATLRSSYKLIF

SEQ ID NO: 691024 - protein, 19 aa, Homo sapiens
  CDR3 for beta chain variable domain of TCR clone 345512 (TRBV25-1, TRBJ2-2)
CAILVYRVDRGRKTGELFF

SEQ ID NO: 691025 - protein, 19 aa, Homo sapiens
  CDR3 for alpha chain variable domain of TCR clone 345513 (TRAV2, TRAJ20)
ILQVREADAAVYRDCKLSL

SEQ ID NO: 691026 - protein, 18 aa, Homo sapiens
  CDR3 for beta chain variable domain of TCR clone 345513 (TRBV20-1, TRBJ2-3)
CSASGLAGGPGTTDTQYF

SEQ ID NO: 691027 - protein, 12 aa, Homo sapiens
  CDR3 for alpha chain variable domain of TCR clone 345514 (TRAV12-3, TRAJ29)
CAAREGNTPLVF

SEQ ID NO: 691028 - protein, 15 aa, Homo sapiens
  CDR3 for beta chain variable domain of TCR clone 345514 (TRBV6-3, TRBJ2-7)
CASSSPGTVFYEQYF

SEQ ID NO: 691029 - protein, 12 aa, Homo sapiens
  CDR3 for alpha chain variable domain of TCR clone 345515 (TRAV20, TRAJ24)
CAVYNSWGKLQF

SEQ ID NO: 691030 - protein, 15 aa, Homo sapiens
  CDR3 for beta chain variable domain of TCR clone 345515 (TRBV20-1, TRBJ2-7)
CSARDRVSGMDEQYF

SEQ ID NO: 691031 - protein, 22 aa, Homo sapiens
  CDR3 for alpha chain variable domain of TCR clone 345516 (TRAV21, TRAJ39)
AASQPGDSATPKGAKAGNMLTF

SEQ ID NO: 691032 - protein, 15 aa, Homo sapiens
  CDR3 for beta chain variable domain of TCR clone 345516 (TRBV9, TRBJ1-6)
CASSVAGTGDSPLHF

SEQ ID NO: 691033 - protein, 17 aa, Homo sapiens
  CDR3 for alpha chain variable domain of TCR clone 345517 (TRAV8-6, TRAJ58)
CAVSSWVAETSGSRLTF

SEQ ID NO: 691034 - protein, 15 aa, Homo sapiens
  CDR3 for beta chain variable domain of TCR clone 345517 (TRBV6-5, TRBJ2-1)
CASSYDAGAGNEQFF

SEQ ID NO: 691035 - protein, 13 aa, Homo sapiens
  CDR3 for alpha chain variable domain of TCR clone 345518 (TRAV13-1, TRAJ43)
CAASIQNNNDMRF

SEQ ID NO: 691036 - protein, 13 aa, Homo sapiens
  CDR3 for beta chain variable domain of TCR clone 345518 (TRBV27, TRBJ2-7)
CASSFSQGYEQYF

SEQ ID NO: 691037 - protein, 15 aa, Homo sapiens
  CDR3 for alpha chain variable domain of TCR clone 345519 (TRAV12-3, TRAJ6)
CAMSATSGGSYIPTF

SEQ ID NO: 691038 - protein, 11 aa, Homo sapiens
  CDR3 for beta chain variable domain of TCR clone 345519 (TRBV20-1, TRBJ1-5)
CIAQGDQPQHF

SEQ ID NO: 691039 - protein, 11 aa, Homo sapiens
  CDR3 for alpha chain variable domain of TCR clone 345520 (TRAV21, TRAJ11)
CAVNGYSTLTF

SEQ ID NO: 691040 - protein, 15 aa, Homo sapiens
  CDR3 for beta chain variable domain of TCR clone 345520 (TRBV4-1, TRBJ1-4)
CASSDTGGTNEKLLF

SEQ ID NO: 691041 - protein, 16 aa, Homo sapiens
  CDR3 for alpha chain variable domain of TCR clone 345521 (TRAV29/DV5, TRAJ36)
CAASAHYQSGANNLFC

SEQ ID NO: 691042 - protein, 16 aa, Homo sapiens
  CDR3 for beta chain variable domain of TCR clone 345521 (TRBV4-2, TRBJ2-3)
CASSQELAGDTDTQYF

SEQ ID NO: 691043 - protein, 11 aa, Homo sapiens
  CDR3 for alpha chain variable domain of TCR clone 345522 (TRAV13-1, TRAJ43)
CAASGANDMRF

SEQ ID NO: 691044 - protein, 14 aa, Homo sapiens
  CDR3 for beta chain variable domain of TCR clone 345522 (TRBV12-5, TRBJ2-5)
CASGSRTHQETQYF

SEQ ID NO: 691045 - protein, 13 aa, Homo sapiens
  CDR3 for alpha chain variable domain of TCR clone 345523 (TRAV12-3, TRAJ53)
CAMSGGSNYKLTF

SEQ ID NO: 691046 - protein, 15 aa, Homo sapiens
  CDR3 for beta chain variable domain of TCR clone 345523 (TRBV2, TRBJ2-1)
CATQARLVRIGEQFF

SEQ ID NO: 691047 - protein, 14 aa, Homo sapiens
  CDR3 for alpha chain variable domain of TCR clone 345524 (TRAV20, TRAJ35)
CAVQAIGFGNVLHC

SEQ ID NO: 691048 - protein, 13 aa, Homo sapiens
  CDR3 for beta chain variable domain of TCR clone 345524 (TRBV4-2, TRBJ1-1)
CASSQAGNTEAFF

SEQ ID NO: 691049 - protein, 14 aa, Homo sapiens
  CDR3 for alpha chain variable domain of TCR clone 345525 (TRAV35, TRAJ42)
CAGRYGGSQGYLIF

SEQ ID NO: 691050 - protein, 15 aa, Homo sapiens
  CDR3 for beta chain variable domain of TCR clone 345525 (TRBV7-9, TRBJ2-1)
CASSLGWGRANEQFF

SEQ ID NO: 691051 - protein, 14 aa, Homo sapiens
  CDR3 for alpha chain variable domain of TCR clone 345526 (TRAV12-2, TRAJ13)
CAVKKTGGYQKVTL

SEQ ID NO: 691052 - protein, 14 aa, Homo sapiens
  CDR3 for beta chain variable domain of TCR clone 345526 (TRBV4-1, TRBJ2-2)
CASSQAVNTGELFF

SEQ ID NO: 691053 - protein, 14 aa, Homo sapiens
  CDR3 for alpha chain variable domain of TCR clone 345527 (TRAV12-2, TRAJ3)
CAVSLYSSASKIIF

SEQ ID NO: 691054 - protein, 14 aa, Homo sapiens
  CDR3 for beta chain variable domain of TCR clone 345527 (TRBV7-2, TRBJ2-7)
CASRSQGAAYEQYF

SEQ ID NO: 691055 - protein, 11 aa, Homo sapiens
  CDR3 for alpha chain variable domain of TCR clone 345528 (TRAV2, TRAJ13)
CASGGYQKVTF

SEQ ID NO: 691056 - protein, 11 aa, Homo sapiens
  CDR3 for beta chain variable domain of TCR clone 345528 (TRBV5-6, TRBJ2-5)
CPSSLERTQYF

SEQ ID NO: 691057 - protein, 13 aa, Homo sapiens
  CDR3 for alpha chain variable domain of TCR clone 345529 (TRAV13-2, TRAJ48)
CAEMDVGNEKLTF

SEQ ID NO: 691058 - protein, 13 aa, Homo sapiens
  CDR3 for beta chain variable domain of TCR clone 345529 (TRBV13, TRBJ2-5)
CASSPEVGETQYF

SEQ ID NO: 691059 - protein, 13 aa, Homo sapiens
  CDR3 for alpha chain variable domain of TCR clone 345530 (TRAV17, TRAJ9)
CATFLTVGFKTIF

SEQ ID NO: 691060 - protein, 16 aa, Homo sapiens
  CDR3 for beta chain variable domain of TCR clone 345530 (TRBV5-7, TRBJ1-4)
CASSPSGGLKTEKLFF

SEQ ID NO: 691061 - protein, 13 aa, Homo sapiens
  CDR3 for alpha chain variable domain of TCR clone 345531 (TRAV1-2, TRAJ9)
CASLNTGGFKTIF

SEQ ID NO: 691062 - protein, 16 aa, Homo sapiens
  CDR3 for beta chain variable domain of TCR clone 345531 (TRBV28, TRBJ2-2)
CASSLEGGSNTGELFF

SEQ ID NO: 691063 - protein, 19 aa, Homo sapiens
  CDR3 for alpha chain variable domain of TCR clone 345532 (TRAV3, TRAJ6)
CAVRDRNPSRSGGSYIPTF

SEQ ID NO: 691064 - protein, 15 aa, Homo sapiens
  CDR3 for beta chain variable domain of TCR clone 345532 (TRBV18, TRBJ2-5)
CASSPTFMDSYEQYF

SEQ ID NO: 691065 - protein, 15 aa, Homo sapiens
  CDR3 for alpha chain variable domain of TCR clone 345533 (TRAV21, TRAJ57)
CAVIITQGGSEKLVF

SEQ ID NO: 691066 - protein, 14 aa, Homo sapiens
  CDR3 for beta chain variable domain of TCR clone 345533 (TRBV5-1, TRBJ2-2)
CTSSLIWIPGELFF

SEQ ID NO: 691067 - protein, 13 aa, Homo sapiens
  CDR3 for alpha chain variable domain of TCR clone 345534 (TRAV16, TRAJ10)
CALLTGGGNKLTF

SEQ ID NO: 691068 - protein, 16 aa, Homo sapiens
  CDR3 for beta chain variable domain of TCR clone 345534 (TRBV19, TRBJ1-5)
CASSTRGTRSNQPQHF

SEQ ID NO: 691069 - protein, 19 aa, Homo sapiens
  CDR3 for alpha chain variable domain of TCR clone 345535 (TRAV1-2, TRAJ26)
CLLPLCCERPDNYGQNFVF

SEQ ID NO: 691070 - protein, 13 aa, Homo sapiens
  CDR3 for beta chain variable domain of TCR clone 345535 (TRBV12-4, TRBJ1-1)
CASSPGTGFEAFF

SEQ ID NO: 691071 - protein, 13 aa, Homo sapiens
  CDR3 for alpha chain variable domain of TCR clone 345536 (TRAV38-1, TRAJ17)
CAFIKAAGNKLTF

SEQ ID NO: 691072 - protein, 16 aa, Homo sapiens
  CDR3 for beta chain variable domain of TCR clone 345536 (TRBV18, TRBJ1-3)
CASSLGILDGENTMYF

SEQ ID NO: 691073 - protein, 13 aa, Homo sapiens
  CDR3 for alpha chain variable domain of TCR clone 345537 (TRAV12-2, TRAJ40)
CAVKRTGTYKYIF

SEQ ID NO: 691074 - protein, 13 aa, Homo sapiens
  CDR3 for beta chain variable domain of TCR clone 345537 (TRBV12-4, TRBJ2-5)
YASRLAVQETQYF

SEQ ID NO: 691075 - protein, 15 aa, Homo sapiens
  CDR3 for alpha chain variable domain of TCR clone 345538 (TRAV8-3, TRAJ45)
CASSYSGGGADGLTF

SEQ ID NO: 691076 - protein, 15 aa, Homo sapiens
  CDR3 for beta chain variable domain of TCR clone 345538 (TRBV27, TRBJ1-2)
CASSLSSTVNYGYTF

SEQ ID NO: 691077 - protein, 15 aa, Homo sapiens
  CDR3 for alpha chain variable domain of TCR clone 345539 (TRAV3, TRAJ32)
CAVSSYGGATNKLMF

SEQ ID NO: 691078 - protein, 13 aa, Homo sapiens
  CDR3 for beta chain variable domain of TCR clone 345539 (TRBV20-1, TRBJ2-7)
CSARPSTNYEQYF

SEQ ID NO: 691079 - protein, 14 aa, Homo sapiens
  CDR3 for alpha chain variable domain of TCR clone 345540 (TRAV12-3, TRAJ6)
CALSATGGSYIPTF

SEQ ID NO: 691080 - protein, 16 aa, Homo sapiens
  CDR3 for beta chain variable domain of TCR clone 345540 (TRBV4-2, TRBJ2-1)
CASSPRAGQGANEQFF

SEQ ID NO: 691081 - protein, 13 aa, Homo sapiens
  CDR3 for alpha chain variable domain of TCR clone 345541 (TRAV17, TRAJ26)
CATVDNYGQNFGF

SEQ ID NO: 691082 - protein, 16 aa, Homo sapiens
  CDR3 for beta chain variable domain of TCR clone 345541 (TRBV2, TRBJ2-1)
CANSVGGSPSYNEQFF

SEQ ID NO: 691083 - protein, 14 aa, Homo sapiens
  CDR3 for alpha chain variable domain of TCR clone 345542 (TRAV17, TRAJ57)
CATEAQGGSEKLVF

SEQ ID NO: 691084 - protein, 14 aa, Homo sapiens
  CDR3 for beta chain variable domain of TCR clone 345542 (TRBV25-1, TRBJ2-4)
CASSRNSAKNIQYF

SEQ ID NO: 691085 - protein, 11 aa, Homo sapiens
  CDR3 for alpha chain variable domain of TCR clone 345543 (TRAV3, TRAJ21)
CAVGNFNKFYF

SEQ ID NO: 691086 - protein, 15 aa, Homo sapiens
  CDR3 for beta chain variable domain of TCR clone 345543 (TRBV19, TRBJ2-1)
CASSKGPSSYNEQFF

SEQ ID NO: 691087 - protein, 12 aa, Homo sapiens
  CDR3 for alpha chain variable domain of TCR clone 345544 (TRAV12-2, TRAJ44)
CADTGTASKLTF

SEQ ID NO: 691088 - protein, 17 aa, Homo sapiens
  CDR3 for beta chain variable domain of TCR clone 345544 (TRBV20-1, TRBJ1-1)
CSARGTGGSYGNTGDFF

SEQ ID NO: 691089 - protein, 14 aa, Homo sapiens
  CDR3 for alpha chain variable domain of TCR clone 345545 (TRAV9-2, TRAJ36)
CALPWRTGANNLFF

SEQ ID NO: 691090 - protein, 14 aa, Homo sapiens
  CDR3 for beta chain variable domain of TCR clone 345545 (TRBV2, TRBJ1-2)
CACSELQVNYGYTF

SEQ ID NO: 691091 - protein, 14 aa, Homo sapiens
  CDR3 for alpha chain variable domain of TCR clone 345546 (TRAV3, TRAJ20)
CAVPPAPNDYKLSF

SEQ ID NO: 691092 - protein, 20 aa, Homo sapiens
  CDR3 for beta chain variable domain of TCR clone 345546 (TRBV28, TRBJ2-1)
CASTPIGRSPGLAGGNEQFF

SEQ ID NO: 691093 - protein, 15 aa, Homo sapiens
  CDR3 for alpha chain variable domain of TCR clone 345547 (TRAV8-6, TRAJ27)
CAVREVNTNAGKSTF

SEQ ID NO: 691094 - protein, 12 aa, Homo sapiens
  CDR3 for beta chain variable domain of TCR clone 345547 (TRBV11-2, TRBJ2-2)
CASSLGGGELFF

SEQ ID NO: 691095 - protein, 13 aa, Homo sapiens
  CDR3 for alpha chain variable domain of TCR clone 345548 (TRAV39, TRAJ49)
CAVDRNTGNQFYF

SEQ ID NO: 691096 - protein, 14 aa, Homo sapiens
  CDR3 for beta chain variable domain of TCR clone 345548 (TRBV4-1, TRBJ1-1)
CARSRSGQSFEAFF

SEQ ID NO: 691097 - protein, 17 aa, Homo sapiens
  CDR3 for alpha chain variable domain of TCR clone 345549 (TRAV8-3, TRAJ10)
EASNTVILTGGGNKLTF

SEQ ID NO: 691098 - protein, 16 aa, Homo sapiens
  CDR3 for beta chain variable domain of TCR clone 345549 (TRBV7-9, TRBJ1-2)
CASSLGFSSGEDGDTF

SEQ ID NO: 691099 - protein, 12 aa, Homo sapiens
  CDR3 for alpha chain variable domain of TCR clone 345550 (TRAV17, TRAJ28)
WDSAAGSYQLTF

SEQ ID NO: 691100 - protein, 13 aa, Homo sapiens
  CDR3 for beta chain variable domain of TCR clone 345550 (TRBV11-3, TRBJ1-1)
CASSRQPNTEAFF

SEQ ID NO: 691101 - protein, 14 aa, Homo sapiens
  CDR3 for alpha chain variable domain of TCR clone 345551 (TRAV12-2, TRAJ13)
CAVKKTGCYQKVTF

SEQ ID NO: 691102 - protein, 15 aa, Homo sapiens
  CDR3 for beta chain variable domain of TCR clone 345551 (TRBV28, TRBJ2-5)
CASSPPWSYQETQYF

SEQ ID NO: 691103 - protein, 19 aa, Homo sapiens
  CDR3 for alpha chain variable domain of TCR clone 345552 (TRAV12-1, TRAJ30)
CVVNGKTRSSLEKGHDFIF

SEQ ID NO: 691104 - protein, 12 aa, Homo sapiens
  CDR3 for beta chain variable domain of TCR clone 345552 (TRBV27, TRBJ2-2)
CASKLFTGELFF

SEQ ID NO: 691105 - protein, 14 aa, Homo sapiens
  CDR3 for alpha chain variable domain of TCR clone 345553 (TRAV20, TRAJ20)
CAVRRGYNDYKLSF

SEQ ID NO: 691106 - protein, 13 aa, Homo sapiens
  CDR3 for beta chain variable domain of TCR clone 345553 (TRBV19, TRBJ2-5)
CASSETARETQYF

SEQ ID NO: 691107 - protein, 15 aa, Homo sapiens
  CDR3 for alpha chain variable domain of TCR clone 345554 (TRAV8-1, TRAJ6)
CAVNTPPGVSYIPTF

SEQ ID NO: 691108 - protein, 15 aa, Homo sapiens
  CDR3 for beta chain variable domain of TCR clone 345554 (TRBV11-2, TRBJ2-2)
CASSSDRVNAGELFF

SEQ ID NO: 691109 - protein, 16 aa, Homo sapiens
  CDR3 for alpha chain variable domain of TCR clone 345555 (TRAV20, TRAJ22)
CDVQASSSGSARQLTF

SEQ ID NO: 691110 - protein, 17 aa, Homo sapiens
  CDR3 for beta chain variable domain of TCR clone 345555 (TRBV7-2, TRBJ2-5)
CASSQTSVETVLRARHA

SEQ ID NO: 691111 - protein, 15 aa, Homo sapiens
  CDR3 for alpha chain variable domain of TCR clone 345556 (TRAV12-1, TRAJ42)
CVVTRDGGSQGNLIF

SEQ ID NO: 691112 - protein, 14 aa, Homo sapiens
  CDR3 for beta chain variable domain of TCR clone 345556 (TRBV11-2, TRBJ2-3)
CASSLCGGANTQYF

SEQ ID NO: 691113 - protein, 12 aa, Homo sapiens
  CDR3 for alpha chain variable domain of TCR clone 345557 (TRAV12-3, TRAJ17)
CAMTLTGNKLTF

SEQ ID NO: 691114 - protein, 15 aa, Homo sapiens
  CDR3 for beta chain variable domain of TCR clone 345557 (TRBV20-1, TRBJ2-7)
CSARDRVSGTDDQYF

SEQ ID NO: 691115 - protein, 16 aa, Homo sapiens
  CDR3 for alpha chain variable domain of TCR clone 345558 (TRAV30, TRAJ24)
CGTEIVDADSWGKFQF

SEQ ID NO: 691116 - protein, 12 aa, Homo sapiens
  CDR3 for beta chain variable domain of TCR clone 345558 (TRBV11-2, TRBJ2-2)
CASSLGGGKLFF

SEQ ID NO: 691117 - protein, 14 aa, Homo sapiens
  CDR3 for alpha chain variable domain of TCR clone 345559 (TRAV1-2, TRAJ16)
CAVNRFSDGQKLLF

SEQ ID NO: 691118 - protein, 13 aa, Homo sapiens
  CDR3 for beta chain variable domain of TCR clone 345559 (TRBV7-2, TRBJ2-7)
CASSSPGGSEQYF

SEQ ID NO: 691119 - protein, 14 aa, Homo sapiens
  CDR3 for alpha chain variable domain of TCR clone 345560 (TRAV21, TRAJ45)
CAVVSGGGADGLTF

SEQ ID NO: 691120 - protein, 14 aa, Homo sapiens
  CDR3 for beta chain variable domain of TCR clone 345560 (TRBV20-1, TRBJ2-3)
CSALGLEGEDTQYF

SEQ ID NO: 691121 - protein, 13 aa, Homo sapiens
  CDR3 for alpha chain variable domain of TCR clone 345561 (TRAV3, TRAJ20)
CCEAFCNDYKLSF

SEQ ID NO: 691122 - protein, 12 aa, Homo sapiens
  CDR3 for beta chain variable domain of TCR clone 345561 (TRBV12-4, TRBJ2-1)
CASSLVRVEQFF

SEQ ID NO: 691123 - protein, 12 aa, Homo sapiens
  CDR3 for alpha chain variable domain of TCR clone 345562 (TRAV12-3, TRAJ42)
CAPGGSQGNLIF

SEQ ID NO: 691124 - protein, 14 aa, Homo sapiens
  CDR3 for beta chain variable domain of TCR clone 345562 (TRBV7-2, TRBJ1-6)
CASSLQGANAPLHF

SEQ ID NO: 691125 - protein, 16 aa, Homo sapiens
  CDR3 for alpha chain variable domain of TCR clone 345563 (TRAV12-2, TRAJ40)
RAVIRGGTSGTYKYIF

SEQ ID NO: 691126 - protein, 13 aa, Homo sapiens
  CDR3 for beta chain variable domain of TCR clone 345563 (TRBV7-9, TRBJ1-2)
CASSLKQNYGYTF

SEQ ID NO: 691127 - protein, 15 aa, Homo sapiens
  CDR3 for alpha chain variable domain of TCR clone 345564 (TRAV36/DV7, TRAJ54)
CAVEKPVQGAQKLVF

SEQ ID NO: 691128 - protein, 17 aa, Homo sapiens
  CDR3 for beta chain variable domain of TCR clone 345564 (TRBV6-5, TRBJ1-2)
CASSSTWEGAFDYGYTF

SEQ ID NO: 691129 - protein, 16 aa, Homo sapiens
  CDR3 for alpha chain variable domain of TCR clone 345565 (TRAV12-3, TRAJ53)
CAMSPGSGGSNYRLTF

SEQ ID NO: 691130 - protein, 15 aa, Homo sapiens
  CDR3 for beta chain variable domain of TCR clone 345565 (TRBV15, TRBJ2-3)
CATSRDPRGTDTQYF

SEQ ID NO: 691131 - protein, 14 aa, Homo sapiens
  CDR3 for alpha chain variable domain of TCR clone 345566 (TRAV3, TRAJ42)
CAVQAGGSQGNLIF

SEQ ID NO: 691132 - protein, 14 aa, Homo sapiens
  CDR3 for beta chain variable domain of TCR clone 345566 (TRBV28, TRBJ1-2)
CASRIQGANYGYTF

SEQ ID NO: 691133 - protein, 16 aa, Homo sapiens
  CDR3 for alpha chain variable domain of TCR clone 345567 (TRAV30, TRAJ24)
CGTEIVDADSWGKFQF

SEQ ID NO: 691134 - protein, 16 aa, Homo sapiens
  CDR3 for beta chain variable domain of TCR clone 345567 (TRBV5-1, TRBJ2-7)
CASSPMTGALSYEQYF

SEQ ID NO: 691135 - protein, 16 aa, Homo sapiens
  CDR3 for alpha chain variable domain of TCR clone 345568 (TRAV14/DV4, TRAJ53)
CAMREGGGGSNYKLTF

SEQ ID NO: 691136 - protein, 18 aa, Homo sapiens
  CDR3 for beta chain variable domain of TCR clone 345568 (TRBV18, TRBJ1-3)
CTSSPRGGAGPSGNTIYF

SEQ ID NO: 691137 - protein, 13 aa, Homo sapiens
  CDR3 for alpha chain variable domain of TCR clone 345569 (TRAV12-1, TRAJ39)
CVAPNNAGNMLTF

SEQ ID NO: 691138 - protein, 17 aa, Homo sapiens
  CDR3 for beta chain variable domain of TCR clone 345569 (TRBV6-1, TRBJ2-3)
CASSEFVTGGPTDTQYF

SEQ ID NO: 691139 - protein, 15 aa, Homo sapiens
  CDR3 for alpha chain variable domain of TCR clone 345570 (TRAV8-4, TRAJ47)
CAVSDPLGYGNKLVF

SEQ ID NO: 691140 - protein, 16 aa, Homo sapiens
  CDR3 for beta chain variable domain of TCR clone 345570 (TRBV19, TRBJ2-2)
CASSPSGGLNTGELFF

SEQ ID NO: 691141 - protein, 14 aa, Homo sapiens
  CDR3 for alpha chain variable domain of TCR clone 345571 (TRAV1-2, TRAJ16)
CAVNRFSDGQKLLF

SEQ ID NO: 691142 - protein, 16 aa, Homo sapiens
  CDR3 for beta chain variable domain of TCR clone 345571 (TRBV29-1, TRBJ2-7)
CSVEVVGTSGSYEEYF

SEQ ID NO: 691143 - protein, 14 aa, Homo sapiens
  CDR3 for alpha chain variable domain of TCR clone 345572 (TRAV14/DV4, TRAJ41)
CARGGPDSWYALNF

SEQ ID NO: 691144 - protein, 15 aa, Homo sapiens
  CDR3 for beta chain variable domain of TCR clone 345572 (TRBV19, TRBJ2-1)
CASSIQATSYNEQFF

SEQ ID NO: 691145 - protein, 12 aa, Homo sapiens
  CDR3 for alpha chain variable domain of TCR clone 345573 (TRAV12-2, TRAJ21)
CAPSDNFNKFYF

SEQ ID NO: 691146 - protein, 16 aa, Homo sapiens
  CDR3 for beta chain variable domain of TCR clone 345573 (TRBV4-2, TRBJ1-1)
CASSQAGFGMNTEAFF

SEQ ID NO: 691147 - protein, 13 aa, Homo sapiens
  CDR3 for alpha chain variable domain of TCR clone 345574 (TRAV1-1, TRAJ23)
CAVVANQGGKLIF

SEQ ID NO: 691148 - protein, 18 aa, Homo sapiens
  CDR3 for beta chain variable domain of TCR clone 345574 (TRBV2, TRBJ2-1)
CASRGLAGGPRTYNEQFF

SEQ ID NO: 691149 - protein, 14 aa, Homo sapiens
  CDR3 for alpha chain variable domain of TCR clone 345575 (TRAV8-3, TRAJ9)
CAVVYNTGGFKTIF

SEQ ID NO: 691150 - protein, 15 aa, Homo sapiens
  CDR3 for beta chain variable domain of TCR clone 345575 (TRBV7-3, TRBJ2-2)
CASSETGQGTGELFF

SEQ ID NO: 691151 - protein, 18 aa, Homo sapiens
  CDR3 for alpha chain variable domain of TCR clone 345576 (TRAV13-1, TRAJ52)
CAAKNPNPGGTSYGKLTF

SEQ ID NO: 691152 - protein, 15 aa, Homo sapiens
  CDR3 for beta chain variable domain of TCR clone 345576 (TRBV20-1, TRBJ2-7)
CSARDRVSGMDEQYF

SEQ ID NO: 691153 - protein, 13 aa, Homo sapiens
  CDR3 for alpha chain variable domain of TCR clone 345577 (TRAV8-1, TRAJ23)
CAWRDNQGGKLIF

SEQ ID NO: 691154 - protein, 10 aa, Homo sapiens
  CDR3 for beta chain variable domain of TCR clone 345577 (TRBV2, TRBJ2-5)
GASSAATQYF

SEQ ID NO: 691155 - protein, 14 aa, Homo sapiens
  CDR3 for alpha chain variable domain of TCR clone 345578 (TRAV12-2, TRAJ44)
CSVNPAGTASKLTF

SEQ ID NO: 691156 - protein, 13 aa, Homo sapiens
  CDR3 for beta chain variable domain of TCR clone 345578 (TRBV20-1, TRBJ1-6)
CSAPLGVGSPLHF

SEQ ID NO: 691157 - protein, 19 aa, Homo sapiens
  CDR3 for alpha chain variable domain of TCR clone 345579 (TRAV2, TRAJ20)
ILQVREADAAVYRDCKLSF

SEQ ID NO: 691158 - protein, 12 aa, Homo sapiens
  CDR3 for beta chain variable domain of TCR clone 345579 (TRBV28, TRBJ2-1)
CASSVQINEQFF

SEQ ID NO: 691159 - protein, 10 aa, Homo sapiens
  CDR3 for alpha chain variable domain of TCR clone 345580 (TRAV12-3, TRAJ49)
CAMNDYQFYF

SEQ ID NO: 691160 - protein, 13 aa, Homo sapiens
  CDR3 for beta chain variable domain of TCR clone 345580 (TRBV12-4, TRBJ1-1)
CASSPETGFEAFF

SEQ ID NO: 691161 - protein, 14 aa, Homo sapiens
  CDR3 for alpha chain variable domain of TCR clone 345581 (TRAV26-1, TRAJ21)
CIVRVVYNFNKCYF

SEQ ID NO: 691162 - protein, 17 aa, Homo sapiens
  CDR3 for beta chain variable domain of TCR clone 345581 (TRBV11-2, TRBJ2-1)
CASSLYPPGVEYNEQFF

SEQ ID NO: 691163 - protein, 12 aa, Homo sapiens
  CDR3 for alpha chain variable domain of TCR clone 345582 (TRAV35, TRAJ30)
CAGLDRDDKIIF

SEQ ID NO: 691164 - protein, 15 aa, Homo sapiens
  CDR3 for beta chain variable domain of TCR clone 345582 (TRBV18, TRBJ2-3)
CASSPLAGETDTQYF

SEQ ID NO: 691165 - protein, 14 aa, Homo sapiens
  CDR3 for alpha chain variable domain of TCR clone 345583 (TRAV9-2, TRAJ39)
CALYIYNAGNMLTF

SEQ ID NO: 691166 - protein, 10 aa, Homo sapiens
  CDR3 for beta chain variable domain of TCR clone 345583 (TRBV7-4, TRBJ2-6)
CASSSQSGFW

SEQ ID NO: 691167 - protein, 13 aa, Homo sapiens
  CDR3 for alpha chain variable domain of TCR clone 345584 (TRAV21, TRAJ15)
CAVANQAGTALIF

SEQ ID NO: 691168 - protein, 14 aa, Homo sapiens
  CDR3 for beta chain variable domain of TCR clone 345584 (TRBV19, TRBJ2-2)
CASSGQGIAGELFF

SEQ ID NO: 691169 - protein, 14 aa, Homo sapiens
  CDR3 for alpha chain variable domain of TCR clone 345585 (TRAV12-2, TRAJ13)
CAVTKTGGSQKVTF

SEQ ID NO: 691170 - protein, 15 aa, Homo sapiens
  CDR3 for beta chain variable domain of TCR clone 345585 (TRBV27, TRBJ2-1)
CASSNGGGSSNEQFF

SEQ ID NO: 691171 - protein, 17 aa, Homo sapiens
  CDR3 for alpha chain variable domain of TCR clone 345586 (TRAV4, TRAJ18)
CLVVAAGRGSTLGRLYF

SEQ ID NO: 691172 - protein, 17 aa, Homo sapiens
  CDR3 for beta chain variable domain of TCR clone 345586 (TRBV28, TRBJ2-2)
CARSLATGMGDAGELFF

SEQ ID NO: 691173 - protein, 16 aa, Homo sapiens
  CDR3 for alpha chain variable domain of TCR clone 345587 (TRAV30, TRAJ24)
CGTEIVDADSWGKFQF

SEQ ID NO: 691174 - protein, 16 aa, Homo sapiens
  CDR3 for beta chain variable domain of TCR clone 345587 (TRBV7-2, TRBJ1-1)
CASSSNGGVMNTEAFF

SEQ ID NO: 691175 - protein, 11 aa, Homo sapiens
  CDR3 for alpha chain variable domain of TCR clone 345588 (TRAV13-1, TRAJ30)
CPASRDDKIIF

SEQ ID NO: 691176 - protein, 15 aa, Homo sapiens
  CDR3 for beta chain variable domain of TCR clone 345588 (TRBV18, TRBJ1-1)
CASSPSSWVNTEAFF

SEQ ID NO: 691177 - protein, 13 aa, Homo sapiens
  CDR3 for alpha chain variable domain of TCR clone 345589 (TRAV38-1, TRAJ42)
CARWGGSQGNLIF

SEQ ID NO: 691178 - protein, 17 aa, Homo sapiens
  CDR3 for beta chain variable domain of TCR clone 345589 (TRBV20-1, TRBJ2-1)
SAVLDPLAGVWDNEQFF

SEQ ID NO: 691179 - protein, 15 aa, Homo sapiens
  CDR3 for alpha chain variable domain of TCR clone 345590 (TRAV12-2, TRAJ32)
CAVNNYGGATNKLIF

SEQ ID NO: 691180 - protein, 14 aa, Homo sapiens
  CDR3 for beta chain variable domain of TCR clone 345590 (TRBV27, TRBJ2-1)
CASSFGREANEQFF

SEQ ID NO: 691181 - protein, 13 aa, Homo sapiens
  CDR3 for alpha chain variable domain of TCR clone 345591 (TRAV21, TRAJ27)
CAARPGNAGESTF

SEQ ID NO: 691182 - protein, 14 aa, Homo sapiens
  CDR3 for beta chain variable domain of TCR clone 345591 (TRBV7-6, TRBJ2-3)
GASSLGTVTDTQYF

SEQ ID NO: 691183 - protein, 21 aa, Homo sapiens
  CDR3 for alpha chain variable domain of TCR clone 345592 (TRAV17, TRAJ6)
CATGFGEATYLPLEEEPALLF

SEQ ID NO: 691184 - protein, 14 aa, Homo sapiens
  CDR3 for beta chain variable domain of TCR clone 345592 (TRBV5-1, TRBJ2-5)
CASSFGGSQETQYF

SEQ ID NO: 691185 - protein, 13 aa, Homo sapiens
  CDR3 for alpha chain variable domain of TCR clone 345593 (TRAV12-2, TRAJ12)
CAGPEASSYKLIF

SEQ ID NO: 691186 - protein, 13 aa, Homo sapiens
  CDR3 for beta chain variable domain of TCR clone 345593 (TRBV28, TRBJ2-1)
CASSLIGRDEQFF

SEQ ID NO: 691187 - protein, 16 aa, Homo sapiens
  CDR3 for alpha chain variable domain of TCR clone 345594 (TRAV30, TRAJ24)
CGTEIVDADSWGKFQF

SEQ ID NO: 691188 - protein, 16 aa, Homo sapiens
  CDR3 for beta chain variable domain of TCR clone 345594 (TRBV2, TRBJ1-3)
CASSGGAGWSGNTIYF

SEQ ID NO: 691189 - protein, 14 aa, Homo sapiens
  CDR3 for alpha chain variable domain of TCR clone 345595 (TRAV29/DV5, TRAJ32)
CAAAYGGATNKLIF

SEQ ID NO: 691190 - protein, 14 aa, Homo sapiens
  CDR3 for beta chain variable domain of TCR clone 345595 (TRBV7-2, TRBJ2-7)
CASRSQGAAYEQYF

SEQ ID NO: 691191 - protein, 12 aa, Homo sapiens
  CDR3 for alpha chain variable domain of TCR clone 345596 (TRAV12-3, TRAJ17)
CAMTLTGNKLTF

SEQ ID NO: 691192 - protein, 15 aa, Homo sapiens
  CDR3 for beta chain variable domain of TCR clone 345596 (TRBV9, TRBJ1-6)
CASSIAGTGDSPLHF

SEQ ID NO: 691193 - protein, 13 aa, Homo sapiens
  CDR3 for alpha chain variable domain of TCR clone 345597 (TRAV22, TRAJ29)
CAVGGSGNTPLVF

SEQ ID NO: 691194 - protein, 18 aa, Homo sapiens
  CDR3 for beta chain variable domain of TCR clone 345597 (TRBV10-3, TRBJ2-3)
CAISGSRVGPMRGDTQYF

SEQ ID NO: 691195 - protein, 16 aa, Homo sapiens
  CDR3 for alpha chain variable domain of TCR clone 345598 (TRAV30, TRAJ24)
CGTELVDADSWGKFQF

SEQ ID NO: 691196 - protein, 12 aa, Homo sapiens
  CDR3 for beta chain variable domain of TCR clone 345598 (TRBV7-8, TRBJ2-7)
CASSLGDREQYF

SEQ ID NO: 691197 - protein, 14 aa, Homo sapiens
  CDR3 for alpha chain variable domain of TCR clone 345599 (TRAV1-2, TRAJ16)
CAVNRFSDGQKLLF

SEQ ID NO: 691198 - protein, 17 aa, Homo sapiens
  CDR3 for beta chain variable domain of TCR clone 345599 (TRBV13, TRBJ2-3)
CASSRSRVAGGRNTQYF

SEQ ID NO: 691199 - protein, 14 aa, Homo sapiens
  CDR3 for alpha chain variable domain of TCR clone 345600 (TRAV2, TRAJ9)
CAVEDRSGGFKTIF

SEQ ID NO: 691200 - protein, 15 aa, Homo sapiens
  CDR3 for beta chain variable domain of TCR clone 345600 (TRBV11-3, TRBJ2-3)
RASSAGTVVTNTQYF

SEQ ID NO: 691201 - protein, 22 aa, Homo sapiens
  CDR3 for alpha chain variable domain of TCR clone 345601 (TRAV8-2, TRAJ45)
HLTKPSAHMSDAAEYSADGLTF

SEQ ID NO: 691202 - protein, 13 aa, Homo sapiens
  CDR3 for beta chain variable domain of TCR clone 345601 (TRBV7-3, TRBJ2-1)
CASSPVAYNDQFF

SEQ ID NO: 691203 - protein, 14 aa, Homo sapiens
  CDR3 for alpha chain variable domain of TCR clone 345602 (TRAV13-2, TRAJ17)
CAENSKAAGNKLTF

SEQ ID NO: 691204 - protein, 14 aa, Homo sapiens
  CDR3 for beta chain variable domain of TCR clone 345602 (TRBV7-9, TRBJ2-7)
CASSLAPSLGEQYF

SEQ ID NO: 691205 - protein, 13 aa, Homo sapiens
  CDR3 for alpha chain variable domain of TCR clone 345603 (TRAV3, TRAJ21)
CAVREPDFNKFYF

SEQ ID NO: 691206 - protein, 17 aa, Homo sapiens
  CDR3 for beta chain variable domain of TCR clone 345603 (TRBV7-8, TRBJ2-6)
CASSAGTGGAGANVPTF

SEQ ID NO: 691207 - protein, 15 aa, Homo sapiens
  CDR3 for alpha chain variable domain of TCR clone 345604 (TRAV3, TRAJ5)
CALRDLDTGRRALTF

SEQ ID NO: 691208 - protein, 14 aa, Homo sapiens
  CDR3 for beta chain variable domain of TCR clone 345604 (TRBV25-1, TRBJ1-1)
CASTHLGGNTEDFF

SEQ ID NO: 691209 - protein, 14 aa, Homo sapiens
  CDR3 for alpha chain variable domain of TCR clone 345605 (TRAV35, TRAJ33)
CDGSSQDSNYQLLW

SEQ ID NO: 691210 - protein, 15 aa, Homo sapiens
  CDR3 for beta chain variable domain of TCR clone 345605 (TRBV20-1, TRBJ2-7)
CSAESGTSGAYEQYF

SEQ ID NO: 691211 - protein, 13 aa, Homo sapiens
  CDR3 for alpha chain variable domain of TCR clone 345606 (TRAV3, TRAJ43)
CAVKARNKNDIRF

SEQ ID NO: 691212 - protein, 16 aa, Homo sapiens
  CDR3 for beta chain variable domain of TCR clone 345606 (TRBV7-9, TRBJ2-3)
CASSFSVAGGTDTQYF

SEQ ID NO: 691213 - protein, 19 aa, Homo sapiens
  CDR3 for alpha chain variable domain of TCR clone 345607 (TRAV16, )
CALSGDIQNPDPAVYQLRD

SEQ ID NO: 691214 - protein, 16 aa, Homo sapiens
  CDR3 for beta chain variable domain of TCR clone 345607 (TRBV12-5, TRBJ2-5)
CASGPLTSGNQETQYF

SEQ ID NO: 691215 - protein, 16 aa, Homo sapiens
  CDR3 for alpha chain variable domain of TCR clone 345608 (TRAV12-3, TRAJ53)
CAMSPGSGGSNYKLTF

SEQ ID NO: 691216 - protein, 15 aa, Homo sapiens
  CDR3 for beta chain variable domain of TCR clone 345608 (TRBV25-1, TRBJ1-4)
CASSKSIATNEKLFF

SEQ ID NO: 691217 - protein, 14 aa, Homo sapiens
  CDR3 for alpha chain variable domain of TCR clone 345609 (TRAV9-2, TRAJ39)
CALYIYNAGNMLTF

SEQ ID NO: 691218 - protein, 17 aa, Homo sapiens
  CDR3 for beta chain variable domain of TCR clone 345609 (TRBV15, TRBJ1-2)
CATSGREIDVVNYGYTF

SEQ ID NO: 691219 - protein, 12 aa, Homo sapiens
  CDR3 for alpha chain variable domain of TCR clone 345610 (TRAV8-4, TRAJ43)
CAVGVNNNDMRF

SEQ ID NO: 691220 - protein, 16 aa, Homo sapiens
  CDR3 for beta chain variable domain of TCR clone 345610 (TRBV7-2, TRBJ2-6)
CASSLAGRSGANVLTF

SEQ ID NO: 691221 - protein, 12 aa, Homo sapiens
  CDR3 for alpha chain variable domain of TCR clone 345611 (TRAV12-3, TRAJ17)
CAMTLTGNKLTF

SEQ ID NO: 691222 - protein, 14 aa, Homo sapiens
  CDR3 for beta chain variable domain of TCR clone 345611 (TRBV7-2, TRBJ1-5)
CASSRDGSNQPQHF

SEQ ID NO: 691223 - protein, 11 aa, Homo sapiens
  CDR3 for alpha chain variable domain of TCR clone 345612 (TRAV1-2, TRAJ31)
CAVNNNARLMF

SEQ ID NO: 691224 - protein, 15 aa, Homo sapiens
  CDR3 for beta chain variable domain of TCR clone 345612 (TRBV28, TRBJ2-5)
CASSSGRTIQETQYF

SEQ ID NO: 691225 - protein, 13 aa, Homo sapiens
  CDR3 for alpha chain variable domain of TCR clone 345613 (TRAV8-3, TRAJ48)
CCGCNFVNEKLTF

SEQ ID NO: 691226 - protein, 12 aa, Homo sapiens
  CDR3 for beta chain variable domain of TCR clone 345613 (TRBV7-2, TRBJ2-5)
CASSQYQETQYF

SEQ ID NO: 691227 - protein, 12 aa, Homo sapiens
  CDR3 for alpha chain variable domain of TCR clone 345614 (TRAV21, TRAJ42)
CAVGGSQGNLIF

SEQ ID NO: 691228 - protein, 14 aa, Homo sapiens
  CDR3 for beta chain variable domain of TCR clone 345614 (TRBV12-4, TRBJ1-1)
CASSLGTGCTEAFF

SEQ ID NO: 691229 - protein, 14 aa, Homo sapiens
  CDR3 for alpha chain variable domain of TCR clone 345615 (TRAV8-4, TRAJ13)
CAETLSGGYQKVTF

SEQ ID NO: 691230 - protein, 14 aa, Homo sapiens
  CDR3 for beta chain variable domain of TCR clone 345615 (TRBV7-2, TRBJ1-2)
CASSQTGSTYGYTF

SEQ ID NO: 691231 - protein, 18 aa, Homo sapiens
  CDR3 for alpha chain variable domain of TCR clone 345616 (TRAV12-3, TRAJ52)
CAMSVGGAGGTSYGKLTF

SEQ ID NO: 691232 - protein, 13 aa, Homo sapiens
  CDR3 for beta chain variable domain of TCR clone 345616 (TRBV28, TRBJ2-7)
CASKAGGVYEQYF

SEQ ID NO: 691233 - protein, 11 aa, Homo sapiens
  CDR3 for alpha chain variable domain of TCR clone 345617 (TRAV12-3, TRAJ17)
CAMTLRQQANF

SEQ ID NO: 691234 - protein, 13 aa, Homo sapiens
  CDR3 for beta chain variable domain of TCR clone 345617 (TRBV7-9, TRBJ1-2)
CASSLKQNYGYTF

SEQ ID NO: 691235 - protein, 16 aa, Homo sapiens
  CDR3 for alpha chain variable domain of TCR clone 345618 (TRAV2, TRAJ4)
CAVEDRFSGGYNKLIF

SEQ ID NO: 691236 - protein, 13 aa, Homo sapiens
  CDR3 for beta chain variable domain of TCR clone 345618 (TRBV7-7, TRBJ2-5)
CASSRSGQESQYF

SEQ ID NO: 691237 - protein, 12 aa, Homo sapiens
  CDR3 for alpha chain variable domain of TCR clone 345619 (TRAV22, TRAJ29)
CAPPSGNTPLVF

SEQ ID NO: 691238 - protein, 14 aa, Homo sapiens
  CDR3 for beta chain variable domain of TCR clone 345619 (TRBV11-2, TRBJ2-7)
CASSLGAGAHEQYF

SEQ ID NO: 691239 - protein, 18 aa, Homo sapiens
  CDR3 for alpha chain variable domain of TCR clone 345620 (TRAV12-2, )
CAVEDIQNPDPAVYQLRD

SEQ ID NO: 691240 - protein, 12 aa, Homo sapiens
  CDR3 for beta chain variable domain of TCR clone 345620 (TRBV12-5, TRBJ2-5)
CASGQGVETQYF

SEQ ID NO: 691241 - protein, 13 aa, Homo sapiens
  CDR3 for alpha chain variable domain of TCR clone 345621 (TRAV21, TRAJ57)
CAMIEGGSEKLVF

SEQ ID NO: 691242 - protein, 15 aa, Homo sapiens
  CDR3 for beta chain variable domain of TCR clone 345621 (TRBV10-3, TRBJ2-5)
CAISEFGRGQETQYF

SEQ ID NO: 691243 - protein, 13 aa, Homo sapiens
  CDR3 for alpha chain variable domain of TCR clone 345622 (TRAV29/DV5, TRAJ31)
CAASRNHNARLMF

SEQ ID NO: 691244 - protein, 12 aa, Homo sapiens
  CDR3 for beta chain variable domain of TCR clone 345622 (TRBV14, TRBJ2-5)
CASSQLKETQYF

SEQ ID NO: 691245 - protein, 13 aa, Homo sapiens
  CDR3 for alpha chain variable domain of TCR clone 345623 (TRAV21, TRAJ56)
CAGCVGANSKLTF

SEQ ID NO: 691246 - protein, 13 aa, Homo sapiens
  CDR3 for beta chain variable domain of TCR clone 345623 (TRBV11-2, TRBJ1-1)
CASSSTRNTEAFF

SEQ ID NO: 691247 - protein, 14 aa, Homo sapiens
  CDR3 for alpha chain variable domain of TCR clone 345624 (TRAV9-2, TRAJ39)
CAIYIYNAGNMLTF

SEQ ID NO: 691248 - protein, 14 aa, Homo sapiens
  CDR3 for beta chain variable domain of TCR clone 345624 (TRBV7-9, TRBJ2-1)
CASSPRDSLYEQFF

SEQ ID NO: 691249 - protein, 14 aa, Homo sapiens
  CDR3 for alpha chain variable domain of TCR clone 345625 (TRAV22, TRAJ6)
CAGVGPGGSYIPTF

SEQ ID NO: 691250 - protein, 13 aa, Homo sapiens
  CDR3 for beta chain variable domain of TCR clone 345625 (TRBV15, TRBJ1-6)
CATSGGLNSPLHF

SEQ ID NO: 691251 - protein, 15 aa, Homo sapiens
  CDR3 for alpha chain variable domain of TCR clone 345626 (TRAV34, TRAJ38)
CGADFTPGNTRKLIW

SEQ ID NO: 691252 - protein, 14 aa, Homo sapiens
  CDR3 for beta chain variable domain of TCR clone 345626 (TRBV11-2, TRBJ2-3)
CASSLGGGANTQYF

SEQ ID NO: 691253 - protein, 10 aa, Homo sapiens
  CDR3 for alpha chain variable domain of TCR clone 345627 (TRAV38-1, TRAJ34)
CAFMDDKLIF

SEQ ID NO: 691254 - protein, 14 aa, Homo sapiens
  CDR3 for beta chain variable domain of TCR clone 345627 (TRBV7-2, TRBJ2-2)
CASSLNSNTGEPFF

SEQ ID NO: 691255 - protein, 16 aa, Homo sapiens
  CDR3 for alpha chain variable domain of TCR clone 345628 (TRAV20, TRAJ10)
CAVLRGLTGGGNKHTF

SEQ ID NO: 691256 - protein, 17 aa, Homo sapiens
  CDR3 for beta chain variable domain of TCR clone 345628 (TRBV7-3, TRBJ2-3)
CASSLMKRMRGADTQYF

SEQ ID NO: 691257 - protein, 14 aa, Homo sapiens
  CDR3 for alpha chain variable domain of TCR clone 345629 (TRAV12-1, TRAJ30)
CVVNIGGRDGKIIF

SEQ ID NO: 691258 - protein, 14 aa, Homo sapiens
  CDR3 for beta chain variable domain of TCR clone 345629 (TRBV7-6, TRBJ2-3)
CVSSLWTVTDTQYF

SEQ ID NO: 691259 - protein, 18 aa, Homo sapiens
  CDR3 for alpha chain variable domain of TCR clone 345630 (TRAV21, TRAJ52)
CAVRPSPAGGTSYGKLTF

SEQ ID NO: 691260 - protein, 13 aa, Homo sapiens
  CDR3 for beta chain variable domain of TCR clone 345630 (TRBV2, TRBJ1-5)
CATAGPGNQPRHF

SEQ ID NO: 691261 - protein, 14 aa, Homo sapiens
  CDR3 for alpha chain variable domain of TCR clone 345631 (TRAV1-2, TRAJ16)
CAVNRFSDAQKLLF

SEQ ID NO: 691262 - protein, 15 aa, Homo sapiens
  CDR3 for beta chain variable domain of TCR clone 345631 (TRBV9, TRBJ1-6)
CASSVAGTGDSPLLF

SEQ ID NO: 691263 - protein, 12 aa, Homo sapiens
  CDR3 for alpha chain variable domain of TCR clone 345632 (TRAV21, TRAJ23)
CAVPNQGGKIIF

SEQ ID NO: 691264 - protein, 15 aa, Homo sapiens
  CDR3 for beta chain variable domain of TCR clone 345632 (TRBV27, TRBJ2-1)
CASSFGAGTGPEQFF

SEQ ID NO: 691265 - protein, 15 aa, Homo sapiens
  CDR3 for alpha chain variable domain of TCR clone 345633 (TRAV26-1, TRAJ44)
CIVRLATGTASKLTF

SEQ ID NO: 691266 - protein, 18 aa, Homo sapiens
  CDR3 for beta chain variable domain of TCR clone 345633 (TRBV20-1, TRBJ2-3)
CSAKPLVRVARRTDTQYF

SEQ ID NO: 691267 - protein, 15 aa, Homo sapiens
  CDR3 for alpha chain variable domain of TCR clone 345634 (TRAV13-1, TRAJ57)
CAASNTQGGSEKLVC

SEQ ID NO: 691268 - protein, 16 aa, Homo sapiens
  CDR3 for beta chain variable domain of TCR clone 345634 (TRBV19, TRBJ2-1)
CASSKAGPSSYNEQFF

SEQ ID NO: 691269 - protein, 13 aa, Homo sapiens
  CDR3 for alpha chain variable domain of TCR clone 345635 (TRAV12-1, TRAJ13)
CVVALLCYQKVTF

SEQ ID NO: 691270 - protein, 13 aa, Homo sapiens
  CDR3 for beta chain variable domain of TCR clone 345635 (TRBV20-1, TRBJ2-5)
CSAILTGQETQYF

SEQ ID NO: 691271 - protein, 16 aa, Homo sapiens
  CDR3 for alpha chain variable domain of TCR clone 345636 (TRAV3, TRAJ37)
CAVRPHGSGNTGKLIF

SEQ ID NO: 691272 - protein, 13 aa, Homo sapiens
  CDR3 for beta chain variable domain of TCR clone 345636 (TRBV7-3, TRBJ1-2)
CASSLKRGYGYTF

SEQ ID NO: 691273 - protein, 11 aa, Homo sapiens
  CDR3 for alpha chain variable domain of TCR clone 345637 (TRAV12-1, TRAJ8)
CVLTGFQKLVF

SEQ ID NO: 691274 - protein, 14 aa, Homo sapiens
  CDR3 for beta chain variable domain of TCR clone 345637 (TRBV19, TRBJ2-1)
CASGKSTQYNEQFF

SEQ ID NO: 691275 - protein, 15 aa, Homo sapiens
  CDR3 for alpha chain variable domain of TCR clone 345638 (TRAV12-1, TRAJ49)
CAMAVTPNTGNQFYF

SEQ ID NO: 691276 - protein, 18 aa, Homo sapiens
  CDR3 for beta chain variable domain of TCR clone 345638 (TRBV4-1, TRBJ1-5)
CASSQDPRGQGLNQPQHF

SEQ ID NO: 691277 - protein, 13 aa, Homo sapiens
  CDR3 for alpha chain variable domain of TCR clone 345639 (TRAV26-1, TRAJ36)
CIVVGTGPNNLFF

SEQ ID NO: 691278 - protein, 14 aa, Homo sapiens
  CDR3 for beta chain variable domain of TCR clone 345639 (TRBV6-1, TRBJ1-3)
CASVQGGGGNTMYF

SEQ ID NO: 691279 - protein, 13 aa, Homo sapiens
  CDR3 for alpha chain variable domain of TCR clone 345640 (TRAV36/DV7, TRAJ57)
GAVVLGGSEKLVF

SEQ ID NO: 691280 - protein, 14 aa, Homo sapiens
  CDR3 for beta chain variable domain of TCR clone 345640 (TRBV4-1, TRBJ1-2)
CASSQDGQVRGYTF

SEQ ID NO: 691281 - protein, 13 aa, Homo sapiens
  CDR3 for alpha chain variable domain of TCR clone 345641 (TRAV12-3, TRAJ13)
CAMSSGGYQKVTF

SEQ ID NO: 691282 - protein, 14 aa, Homo sapiens
  CDR3 for beta chain variable domain of TCR clone 345641 (TRBV2, TRBJ2-1)
CASRTGSAYNEQFF

SEQ ID NO: 691283 - protein, 15 aa, Homo sapiens
  CDR3 for alpha chain variable domain of TCR clone 345642 (TRAV38-2/DV8, TRAJ45)
CAYWDLGGGGDGLTF

SEQ ID NO: 691284 - protein, 16 aa, Homo sapiens
  CDR3 for beta chain variable domain of TCR clone 345642 (TRBV19, TRBJ1-1)
CASSPTRFWPGTEAFF

SEQ ID NO: 691285 - protein, 15 aa, Homo sapiens
  CDR3 for alpha chain variable domain of TCR clone 345643 (TRAV21, TRAJ52)
CAVRGGGTSYGKLTF

SEQ ID NO: 691286 - protein, 14 aa, Homo sapiens
  CDR3 for beta chain variable domain of TCR clone 345643 (TRBV7-3, TRBJ1-1)
CASSLKGGNTEAFF

SEQ ID NO: 691287 - protein, 18 aa, Homo sapiens
  CDR3 for alpha chain variable domain of TCR clone 345644 (TRAV26-1, TRAJ56)
CIVRVASRVTGANSKLTF

SEQ ID NO: 691288 - protein, 15 aa, Homo sapiens
  CDR3 for beta chain variable domain of TCR clone 345644 (TRBV7-9, TRBJ2-5)
CASSDPGRGRETQYF

SEQ ID NO: 691289 - protein, 15 aa, Homo sapiens
  CDR3 for alpha chain variable domain of TCR clone 345645 (TRAV25, TRAJ53)
CAATGGGGSNYKMTF

SEQ ID NO: 691290 - protein, 11 aa, Homo sapiens
  CDR3 for beta chain variable domain of TCR clone 345645 (TRBV11-3, TRBJ2-2)
CASSSGGELFF

SEQ ID NO: 691291 - protein, 13 aa, Homo sapiens
  CDR3 for alpha chain variable domain of TCR clone 345646 (TRAV27, TRAJ26)
CAGVANYGQNFVF

SEQ ID NO: 691292 - protein, 15 aa, Homo sapiens
  CDR3 for beta chain variable domain of TCR clone 345646 (TRBV7-8, TRBJ2-1)
CASSLADSLYNEQFF

SEQ ID NO: 691293 - protein, 15 aa, Homo sapiens
  CDR3 for alpha chain variable domain of TCR clone 345647 (TRAV12-2, TRAJ53)
CAVNGGGGSNYKLTF

SEQ ID NO: 691294 - protein, 13 aa, Homo sapiens
  CDR3 for beta chain variable domain of TCR clone 345647 (TRBV11-3, TRBJ1-1)
CATEEGLNTEAFF

SEQ ID NO: 691295 - protein, 14 aa, Homo sapiens
  CDR3 for alpha chain variable domain of TCR clone 345648 (TRAV2, TRAJ9)
CTVEDRSGGFKTIF

SEQ ID NO: 691296 - protein, 14 aa, Homo sapiens
  CDR3 for beta chain variable domain of TCR clone 345648 (TRBV18, TRBJ2-7)
CASSPRGGAYEQYF

SEQ ID NO: 691297 - protein, 12 aa, Homo sapiens
  CDR3 for alpha chain variable domain of TCR clone 345649 (TRAV27, TRAJ42)
CAGGGTQGNLIF

SEQ ID NO: 691298 - protein, 13 aa, Homo sapiens
  CDR3 for beta chain variable domain of TCR clone 345649 (TRBV19, TRBJ2-7)
CASSIRSSYEQYF

SEQ ID NO: 691299 - protein, 13 aa, Homo sapiens
  CDR3 for alpha chain variable domain of TCR clone 345650 (TRAV14/DV4, TRAJ10)
CTSPPGGGNKLTF

SEQ ID NO: 691300 - protein, 15 aa, Homo sapiens
  CDR3 for beta chain variable domain of TCR clone 345650 (TRBV6-1, TRBJ2-1)
CASSELRGQYNEQFF

SEQ ID NO: 691301 - protein, 14 aa, Homo sapiens
  CDR3 for alpha chain variable domain of TCR clone 345651 (TRAV12-1, TRAJ9)
CVVNRRTGGFKTNF

SEQ ID NO: 691302 - protein, 16 aa, Homo sapiens
  CDR3 for beta chain variable domain of TCR clone 345651 (TRBV4-1, TRBJ2-3)
CASSQSTSGAEDTQYF

SEQ ID NO: 691303 - protein, 14 aa, Homo sapiens
  CDR3 for alpha chain variable domain of TCR clone 345652 (TRAV12-2, TRAJ49)
CAVTLGLYGNQFYF

SEQ ID NO: 691304 - protein, 15 aa, Homo sapiens
  CDR3 for beta chain variable domain of TCR clone 345652 (TRBV7-2, TRBJ2-2)
CASRRPGQNTGELFF

SEQ ID NO: 691305 - protein, 17 aa, Homo sapiens
  CDR3 for alpha chain variable domain of TCR clone 345653 (TRAV4, TRAJ42)
CLVGVLNYGGSQGNLIF

SEQ ID NO: 691306 - protein, 12 aa, Homo sapiens
  CDR3 for beta chain variable domain of TCR clone 345653 (TRBV20-1, TRBJ2-1)
CGAQYTYNEQFF

SEQ ID NO: 691307 - protein, 12 aa, Homo sapiens
  CDR3 for alpha chain variable domain of TCR clone 345654 (TRAV16, TRAJ12)
CAHGDSSYKLIC

SEQ ID NO: 691308 - protein, 12 aa, Homo sapiens
  CDR3 for beta chain variable domain of TCR clone 345654 (TRBV28, TRBJ2-1)
CASSRLVGEQFF

SEQ ID NO: 691309 - protein, 13 aa, Homo sapiens
  CDR3 for alpha chain variable domain of TCR clone 345655 (TRAV23/DV6, TRAJ58)
CAATGSSGSRLTF

SEQ ID NO: 691310 - protein, 13 aa, Homo sapiens
  CDR3 for beta chain variable domain of TCR clone 345655 (TRBV5-5, TRBJ1-2)
CASSFWRGEDYTF

SEQ ID NO: 691311 - protein, 18 aa, Homo sapiens
  CDR3 for alpha chain variable domain of TCR clone 345656 (TRAV13-1, TRAJ52)
CAAKNPNAGGTSYGKLTF

SEQ ID NO: 691312 - protein, 15 aa, Homo sapiens
  CDR3 for beta chain variable domain of TCR clone 345656 (TRBV19, TRBJ2-4)
CASRGPRRGENIQYF

SEQ ID NO: 691313 - protein, 21 aa, Homo sapiens
  CDR3 for alpha chain variable domain of TCR clone 345657 (TRAV2, TRAJ23)
ILQVREADAAVYYFVGGKLIF

SEQ ID NO: 691314 - protein, 20 aa, Homo sapiens
  CDR3 for beta chain variable domain of TCR clone 345657 (TRBV20-1, TRBJ2-5)
CSVRAGLAGRLAGHLETQYF

SEQ ID NO: 691315 - protein, 15 aa, Homo sapiens
  CDR3 for alpha chain variable domain of TCR clone 345658 (TRAV12-3, TRAJ8)
CAMSLLNTGFQKLVL

SEQ ID NO: 691316 - protein, 11 aa, Homo sapiens
  CDR3 for beta chain variable domain of TCR clone 345658 (TRBV29-1, TRBJ2-5)
CSEDRTGTQYF

SEQ ID NO: 691317 - protein, 19 aa, Homo sapiens
  CDR3 for alpha chain variable domain of TCR clone 345659 (TRAV26-1, TRAJ52)
CIVRAHRNAGGASYGKLTF

SEQ ID NO: 691318 - protein, 15 aa, Homo sapiens
  CDR3 for beta chain variable domain of TCR clone 345659 (TRBV29-1, TRBJ2-1)
CSGTDRKSSYNEQFF

SEQ ID NO: 691319 - protein, 14 aa, Homo sapiens
  CDR3 for alpha chain variable domain of TCR clone 345660 (TRAV16, TRAJ32)
CALESGGATNKLIF

SEQ ID NO: 691320 - protein, 13 aa, Homo sapiens
  CDR3 for beta chain variable domain of TCR clone 345660 (TRBV7-7, TRBJ2-3)
CASSLSRADTQYF

SEQ ID NO: 691321 - protein, 14 aa, Homo sapiens
  CDR3 for alpha chain variable domain of TCR clone 345661 (TRAV8-1, TRAJ5)
CAVRTDTGRRALTF

SEQ ID NO: 691322 - protein, 14 aa, Homo sapiens
  CDR3 for beta chain variable domain of TCR clone 345661 (TRBV7-2, TRBJ2-1)
CASSPGLAGNEQFF

SEQ ID NO: 691323 - protein, 17 aa, Homo sapiens
  CDR3 for alpha chain variable domain of TCR clone 345662 (TRAV26-1, TRAJ53)
CIVRVDDSGGSNYKLTF

SEQ ID NO: 691324 - protein, 16 aa, Homo sapiens
  CDR3 for beta chain variable domain of TCR clone 345662 (TRBV6-1, TRBJ2-5)
CASSETLDRGAETQYF

SEQ ID NO: 691325 - protein, 12 aa, Homo sapiens
  CDR3 for alpha chain variable domain of TCR clone 345663 (TRAV29/DV5, TRAJ41)
CAAISSGYALNF

SEQ ID NO: 691326 - protein, 17 aa, Homo sapiens
  CDR3 for beta chain variable domain of TCR clone 345663 (TRBV13, TRBJ2-3)
CASSLSRVAGGRNTQYF

SEQ ID NO: 691327 - protein, 10 aa, Homo sapiens
  CDR3 for alpha chain variable domain of TCR clone 345664 (TRAV2, TRAJ34)
CAVVHDKLIF

SEQ ID NO: 691328 - protein, 15 aa, Homo sapiens
  CDR3 for beta chain variable domain of TCR clone 345664 (TRBV20-1, TRBJ2-3)
CSARPSGFYTDTQYF

SEQ ID NO: 691329 - protein, 12 aa, Homo sapiens
  CDR3 for alpha chain variable domain of TCR clone 345665 (TRAV12-2, TRAJ21)
CAVNRNFNKFYF

SEQ ID NO: 691330 - protein, 14 aa, Homo sapiens
  CDR3 for beta chain variable domain of TCR clone 345665 (TRBV12-4, TRBJ2-3)
CASRLSGATDTQYF

SEQ ID NO: 691331 - protein, 14 aa, Homo sapiens
  CDR3 for alpha chain variable domain of TCR clone 345666 (TRAV8-4, TRAJ8)
CAWSLNTGFQKLEF

SEQ ID NO: 691332 - protein, 13 aa, Homo sapiens
  CDR3 for beta chain variable domain of TCR clone 345666 (TRBV7-9, TRBJ2-3)
CASSPGSTDTQYF

SEQ ID NO: 691333 - protein, 12 aa, Homo sapiens
  CDR3 for alpha chain variable domain of TCR clone 345667 (TRAV23/DV6, TRAJ30)
CAASKGDDKIIF

SEQ ID NO: 691334 - protein, 18 aa, Homo sapiens
  CDR3 for beta chain variable domain of TCR clone 345667 (TRBV10-3, TRBJ2-3)
CAISESRVGPMRGDTQYC

SEQ ID NO: 691335 - protein, 14 aa, Homo sapiens
  CDR3 for alpha chain variable domain of TCR clone 345668 (TRAV23/DV6, TRAJ13)
CAASDSGGYQKVTF

SEQ ID NO: 691336 - protein, 12 aa, Homo sapiens
  CDR3 for beta chain variable domain of TCR clone 345668 (TRBV11-2, TRBJ2-7)
CASSLPTYEQYF

SEQ ID NO: 691337 - protein, 14 aa, Homo sapiens
  CDR3 for alpha chain variable domain of TCR clone 345669 (TRAV2, TRAJ37)
CAVEFTSNTGKLIF

SEQ ID NO: 691338 - protein, 16 aa, Homo sapiens
  CDR3 for beta chain variable domain of TCR clone 345669 (TRBV20-1, TRBJ1-2)
CSASMGQGVANYGYTF

SEQ ID NO: 691339 - protein, 12 aa, Homo sapiens
  CDR3 for alpha chain variable domain of TCR clone 345670 (TRAV13-1, TRAJ48)
CAADFGNEKLTF

SEQ ID NO: 691340 - protein, 12 aa, Homo sapiens
  CDR3 for beta chain variable domain of TCR clone 345670 (TRBV7-8, TRBJ2-7)
CAGSLGDREQYF

SEQ ID NO: 691341 - protein, 15 aa, Homo sapiens
  CDR3 for alpha chain variable domain of TCR clone 345671 (TRAV26-1, TRAJ29)
CIVRVEGSGNTPLVF

SEQ ID NO: 691342 - protein, 15 aa, Homo sapiens
  CDR3 for beta chain variable domain of TCR clone 345671 (TRBV5-1, TRBJ1-1)
CASSSGGRRVTEAFF

SEQ ID NO: 691343 - protein, 13 aa, Homo sapiens
  CDR3 for alpha chain variable domain of TCR clone 345672 (TRAV23/DV6, TRAJ22)
CAPFSGSPRQLTF

SEQ ID NO: 691344 - protein, 15 aa, Homo sapiens
  CDR3 for beta chain variable domain of TCR clone 345672 (TRBV11-2, TRBJ1-6)
CASSLDPWAVSPLHF

SEQ ID NO: 691345 - protein, 16 aa, Homo sapiens
  CDR3 for alpha chain variable domain of TCR clone 345673 (TRAV3, TRAJ37)
CAVRGKGSGNTGKLSF

SEQ ID NO: 691346 - protein, 15 aa, Homo sapiens
  CDR3 for beta chain variable domain of TCR clone 345673 (TRBV7-3, TRBJ2-2)
CASSETGQGTGELFF

SEQ ID NO: 691347 - protein, 18 aa, Homo sapiens
  CDR3 for alpha chain variable domain of TCR clone 345674 (TRAV12-2, )
CAVEDIQNPDPAVYQLRD

SEQ ID NO: 691348 - protein, 15 aa, Homo sapiens
  CDR3 for beta chain variable domain of TCR clone 345674 (TRBV11-1, TRBJ2-7)
CASSLNYGDSYEQYF

SEQ ID NO: 691349 - protein, 15 aa, Homo sapiens
  CDR3 for alpha chain variable domain of TCR clone 345675 (TRAV17, TRAJ16)
CATALRFSDGQKLLF

SEQ ID NO: 691350 - protein, 16 aa, Homo sapiens
  CDR3 for beta chain variable domain of TCR clone 345675 (TRBV7-9, TRBJ1-2)
CASSLGFSSGEDGYTF

SEQ ID NO: 691351 - protein, 15 aa, Homo sapiens
  CDR3 for alpha chain variable domain of TCR clone 345676 (TRAV12-2, TRAJ43)
CAFDMRFGAGTRLTV

SEQ ID NO: 691352 - protein, 18 aa, Homo sapiens
  CDR3 for beta chain variable domain of TCR clone 345676 (TRBV20-1, TRBJ2-3)
CSASGLTGGPGTTDTQYF

SEQ ID NO: 691353 - protein, 16 aa, Homo sapiens
  CDR3 for alpha chain variable domain of TCR clone 345677 (TRAV30, TRAJ24)
CGTEFVDADSWGKFQF

SEQ ID NO: 691354 - protein, 20 aa, Homo sapiens
  CDR3 for beta chain variable domain of TCR clone 345677 (TRBV12-5, TRBJ2-5)
CASGPRTSGNQETSTSGQAR

SEQ ID NO: 691355 - protein, 13 aa, Homo sapiens
  CDR3 for alpha chain variable domain of TCR clone 345678 (TRAV3, TRAJ43)
CAVKARNNNDMRF

SEQ ID NO: 691356 - protein, 16 aa, Homo sapiens
  CDR3 for beta chain variable domain of TCR clone 345678 (TRBV11-3, TRBJ2-5)
CASSSVVAGSTETQYF

SEQ ID NO: 691357 - protein, 17 aa, Homo sapiens
  CDR3 for alpha chain variable domain of TCR clone 345679 (TRAV8-6, TRAJ58)
CAVSSWVGETSGSRWTF

SEQ ID NO: 691358 - protein, 14 aa, Homo sapiens
  CDR3 for beta chain variable domain of TCR clone 345679 (TRBV20-1, TRBJ2-1)
CSAQIGGSANEQFF

SEQ ID NO: 691359 - protein, 14 aa, Homo sapiens
  CDR3 for alpha chain variable domain of TCR clone 345680 (TRAV12-3, TRAJ29)
CAMILLSGNTPLVF

SEQ ID NO: 691360 - protein, 14 aa, Homo sapiens
  CDR3 for beta chain variable domain of TCR clone 345680 (TRBV11-1, TRBJ2-7)
CASSFRQGSYEQYF

SEQ ID NO: 691361 - protein, 15 aa, Homo sapiens
  CDR3 for alpha chain variable domain of TCR clone 345681 (TRAV29/DV5, TRAJ29)
CAASERSSGSTPLVF

SEQ ID NO: 691362 - protein, 17 aa, Homo sapiens
  CDR3 for beta chain variable domain of TCR clone 345681 (TRBV4-1, TRBJ1-4)
CASSQEGPRGVEEKLFF

SEQ ID NO: 691363 - protein, 16 aa, Homo sapiens
  CDR3 for alpha chain variable domain of TCR clone 345682 (TRAV17, TRAJ28)
CATASVSGAGSYQLTF

SEQ ID NO: 691364 - protein, 18 aa, Homo sapiens
  CDR3 for beta chain variable domain of TCR clone 345682 (TRBV11-2, TRBJ2-3)
CASSLGGASRGAPNTQYF

SEQ ID NO: 691365 - protein, 14 aa, Homo sapiens
  CDR3 for alpha chain variable domain of TCR clone 345683 (TRAV16, TRAJ39)
CALSKNNAGNMLTF

SEQ ID NO: 691366 - protein, 18 aa, Homo sapiens
  CDR3 for beta chain variable domain of TCR clone 345683 (TRBV23-1, TRBJ1-2)
CASSNTGGGLLWLHLRFG

SEQ ID NO: 691367 - protein, 15 aa, Homo sapiens
  CDR3 for alpha chain variable domain of TCR clone 345684 (TRAV21, TRAJ13)
CAVRPTSGGYQKVTF

SEQ ID NO: 691368 - protein, 15 aa, Homo sapiens
  CDR3 for beta chain variable domain of TCR clone 345684 (TRBV28, TRBJ2-7)
CARSPGGRGFYEQYF

SEQ ID NO: 691369 - protein, 15 aa, Homo sapiens
  CDR3 for alpha chain variable domain of TCR clone 345685 (TRAV2, TRAJ37)
CAVGDGSSNTGKQIF

SEQ ID NO: 691370 - protein, 13 aa, Homo sapiens
  CDR3 for beta chain variable domain of TCR clone 345685 (TRBV20-1, TRBJ2-7)
CSAQTGLSYEQYF

SEQ ID NO: 691371 - protein, 15 aa, Homo sapiens
  CDR3 for alpha chain variable domain of TCR clone 345686 (TRAV17, TRAJ23)
CATDAEDNQGGKLIY

SEQ ID NO: 691372 - protein, 12 aa, Homo sapiens
  CDR3 for beta chain variable domain of TCR clone 345686 (TRBV2, TRBJ2-1)
CAKREGYNEQFF

SEQ ID NO: 691373 - protein, 15 aa, Homo sapiens
  CDR3 for alpha chain variable domain of TCR clone 345687 (TRAV17, TRAJ57)
CATGPSQGGSEKLVF

SEQ ID NO: 691374 - protein, 13 aa, Homo sapiens
  CDR3 for beta chain variable domain of TCR clone 345687 (TRBV4-1, TRBJ2-2)
CASSQENTGELFF

SEQ ID NO: 691375 - protein, 13 aa, Homo sapiens
  CDR3 for alpha chain variable domain of TCR clone 345688 (TRAV2, TRAJ40)
CAVVTSGTYKYIF

SEQ ID NO: 691376 - protein, 13 aa, Homo sapiens
  CDR3 for beta chain variable domain of TCR clone 345688 (TRBV14, TRBJ1-2)
CASSEDRRYGYTF

SEQ ID NO: 691377 - protein, 15 aa, Homo sapiens
  CDR3 for alpha chain variable domain of TCR clone 345689 (TRAV12-2, TRAJ28)
CRERILWGWEYQLTF

SEQ ID NO: 691378 - protein, 14 aa, Homo sapiens
  CDR3 for beta chain variable domain of TCR clone 345689 (TRBV18, TRBJ2-3)
CASSLGGGSNTQYF

SEQ ID NO: 691379 - protein, 17 aa, Homo sapiens
  CDR3 for alpha chain variable domain of TCR clone 345690 (TRAV3, TRAJ38)
CAVRDCLNSANNRKLIW

SEQ ID NO: 691380 - protein, 15 aa, Homo sapiens
  CDR3 for beta chain variable domain of TCR clone 345690 (TRBV27, TRBJ2-1)
CASSNGGGSSNEQFF

SEQ ID NO: 691381 - protein, 13 aa, Homo sapiens
  CDR3 for alpha chain variable domain of TCR clone 345691 (TRAV2, TRAJ40)
CAVVTSGTYNYIF

SEQ ID NO: 691382 - protein, 17 aa, Homo sapiens
  CDR3 for beta chain variable domain of TCR clone 345691 (TRBV7-3, TRBJ2-3)
CASSLMKRMRGADTQYF

SEQ ID NO: 691383 - protein, 11 aa, Homo sapiens
  CDR3 for alpha chain variable domain of TCR clone 345692 (TRAV2, TRAJ13)
CASGCCQKVTF

SEQ ID NO: 691384 - protein, 16 aa, Homo sapiens
  CDR3 for beta chain variable domain of TCR clone 345692 (TRBV6-1, TRBJ2-5)
CASSETLDRGAETQYF

SEQ ID NO: 691385 - protein, 17 aa, Homo sapiens
  CDR3 for alpha chain variable domain of TCR clone 345693 (TRAV23/DV6, TRAJ57)
CAASSTLSQGGSEKLVF

SEQ ID NO: 691386 - protein, 15 aa, Homo sapiens
  CDR3 for beta chain variable domain of TCR clone 345693 (TRBV7-9, TRBJ1-6)
CASSSPGRGNSPLHF

SEQ ID NO: 691387 - protein, 12 aa, Homo sapiens
  CDR3 for alpha chain variable domain of TCR clone 345694 (TRAV12-1, TRAJ40)
CVVYSGTYKYIF

SEQ ID NO: 691388 - protein, 15 aa, Homo sapiens
  CDR3 for beta chain variable domain of TCR clone 345694 (TRBV7-9, TRBJ1-6)
CASSSTGRGNSPLHF

SEQ ID NO: 691389 - protein, 11 aa, Homo sapiens
  CDR3 for alpha chain variable domain of TCR clone 345695 (TRAV2, TRAJ33)
CAVESNYQLIW

SEQ ID NO: 691390 - protein, 14 aa, Homo sapiens
  CDR3 for beta chain variable domain of TCR clone 345695 (TRBV2, TRBJ2-1)
CASSEARQGVSEFF

SEQ ID NO: 691391 - protein, 13 aa, Homo sapiens
  CDR3 for alpha chain variable domain of TCR clone 345696 (TRAV2, TRAJ40)
CAVVTSGTYKYIF

SEQ ID NO: 691392 - protein, 14 aa, Homo sapiens
  CDR3 for beta chain variable domain of TCR clone 345696 (TRBV19, TRBJ2-1)
CASPAFAVSGEQFF

SEQ ID NO: 691393 - protein, 14 aa, Homo sapiens
  CDR3 for alpha chain variable domain of TCR clone 345697 (TRAV12-2, TRAJ6)
CAVIASGGSYIPTF

SEQ ID NO: 691394 - protein, 15 aa, Homo sapiens
  CDR3 for beta chain variable domain of TCR clone 345697 (TRBV20-1, TRBJ2-7)
CSARDRVPGMDEQYF

SEQ ID NO: 691395 - protein, 16 aa, Homo sapiens
  CDR3 for alpha chain variable domain of TCR clone 345698 (TRAV3, TRAJ4)
CAVRPSPSGGYNKLIF

SEQ ID NO: 691396 - protein, 12 aa, Homo sapiens
  CDR3 for beta chain variable domain of TCR clone 345698 (TRBV7-9, TRBJ2-7)
CASSLGVYEQYF

SEQ ID NO: 691397 - protein, 13 aa, Homo sapiens
  CDR3 for alpha chain variable domain of TCR clone 345699 (TRAV2, TRAJ24)
CAVEDSGRGKFQF

SEQ ID NO: 691398 - protein, 13 aa, Homo sapiens
  CDR3 for beta chain variable domain of TCR clone 345699 (TRBV10-3, TRBJ2-7)
CASKLAVNYEQHF

SEQ ID NO: 691399 - protein, 13 aa, Homo sapiens
  CDR3 for alpha chain variable domain of TCR clone 345700 (TRAV36/DV7, TRAJ33)
CAVDMDSNYQLIW

SEQ ID NO: 691400 - protein, 16 aa, Homo sapiens
  CDR3 for beta chain variable domain of TCR clone 345700 (TRBV15, TRBJ2-3)
CATRLSGGRDPDTQYF

SEQ ID NO: 691401 - protein, 12 aa, Homo sapiens
  CDR3 for alpha chain variable domain of TCR clone 345701 (TRAV35, TRAJ28)
GVEGAGSYQLTF

SEQ ID NO: 691402 - protein, 17 aa, Homo sapiens
  CDR3 for beta chain variable domain of TCR clone 345701 (TRBV28, TRBJ2-3)
CASSPTPAGGRVDTQYF

SEQ ID NO: 691403 - protein, 12 aa, Homo sapiens
  CDR3 for alpha chain variable domain of TCR clone 345702 (TRAV13-1, TRAJ21)
CASKEGFNKFYF

SEQ ID NO: 691404 - protein, 17 aa, Homo sapiens
  CDR3 for beta chain variable domain of TCR clone 345702 (TRBV20-1, TRBJ2-1)
CSASSSGLAGSYNEQFF

SEQ ID NO: 691405 - protein, 14 aa, Homo sapiens
  CDR3 for alpha chain variable domain of TCR clone 345703 (TRAV22, TRAJ6)
CAGVGPGGSYTPTF

SEQ ID NO: 691406 - protein, 14 aa, Homo sapiens
  CDR3 for beta chain variable domain of TCR clone 345703 (TRBV9, TRBJ2-7)
CASSVGVGSYEQYF

SEQ ID NO: 691407 - protein, 11 aa, Homo sapiens
  CDR3 for alpha chain variable domain of TCR clone 345704 (TRAV12-2, TRAJ33)
CAVGSNYQVIW

SEQ ID NO: 691408 - protein, 14 aa, Homo sapiens
  CDR3 for beta chain variable domain of TCR clone 345704 (TRBV6-1, TRBJ2-2)
CASVEHSESGELFF

SEQ ID NO: 691409 - protein, 11 aa, Homo sapiens
  CDR3 for alpha chain variable domain of TCR clone 345705 (TRAV2, TRAJ33)
CAVDSNYQLLW

SEQ ID NO: 691410 - protein, 15 aa, Homo sapiens
  CDR3 for beta chain variable domain of TCR clone 345705 (TRBV19, TRBJ1-2)
CASSVGQVLNYGYTF

SEQ ID NO: 691411 - protein, 14 aa, Homo sapiens
  CDR3 for alpha chain variable domain of TCR clone 345706 (TRAV4, TRAJ10)
CLVGDTGGGNKLTF

SEQ ID NO: 691412 - protein, 16 aa, Homo sapiens
  CDR3 for beta chain variable domain of TCR clone 345706 (TRBV28, TRBJ1-4)
CASSPPYRGRSEKLFF

SEQ ID NO: 691413 - protein, 11 aa, Homo sapiens
  CDR3 for alpha chain variable domain of TCR clone 345707 (TRAV21, TRAJ11)
CAVNGYSTLTF

SEQ ID NO: 691414 - protein, 16 aa, Homo sapiens
  CDR3 for beta chain variable domain of TCR clone 345707 (TRBV7-3, TRBJ2-2)
CASSLKRGTLSGELFF

SEQ ID NO: 691415 - protein, 14 aa, Homo sapiens
  CDR3 for alpha chain variable domain of TCR clone 345708 (TRAV12-3, TRAJ10)
SHLPLTGGGNKLTF

SEQ ID NO: 691416 - protein, 14 aa, Homo sapiens
  CDR3 for beta chain variable domain of TCR clone 345708 (TRBV6-1, TRBJ1-3)
CVSVQGGCGNTIYF

SEQ ID NO: 691417 - protein, 14 aa, Homo sapiens
  CDR3 for alpha chain variable domain of TCR clone 345709 (TRAV26-1, TRAJ38)
CIADNAGNNRKLIW

SEQ ID NO: 691418 - protein, 15 aa, Homo sapiens
  CDR3 for beta chain variable domain of TCR clone 345709 (TRBV29-1, TRBJ2-5)
CSVAPGQGARETQYF

SEQ ID NO: 691419 - protein, 12 aa, Homo sapiens
  CDR3 for alpha chain variable domain of TCR clone 345710 (TRAV1-1, TRAJ39)
CAVPVVGNMLTF

SEQ ID NO: 691420 - protein, 13 aa, Homo sapiens
  CDR3 for beta chain variable domain of TCR clone 345710 (TRBV3-1, TRBJ2-2)
CASLARGSGELFF

SEQ ID NO: 691421 - protein, 14 aa, Homo sapiens
  CDR3 for alpha chain variable domain of TCR clone 345711 (TRAV12-1, TRAJ17)
CVVSPKAAGNKLTF

SEQ ID NO: 691422 - protein, 16 aa, Homo sapiens
  CDR3 for beta chain variable domain of TCR clone 345711 (TRBV20-1, TRBJ2-1)
CSASASGYSSYNEQFF

SEQ ID NO: 691423 - protein, 14 aa, Homo sapiens
  CDR3 for alpha chain variable domain of TCR clone 345712 (TRAV8-4, TRAJ8)
CAVSLNTGLQKLLF

SEQ ID NO: 691424 - protein, 13 aa, Homo sapiens
  CDR3 for beta chain variable domain of TCR clone 345712 (TRBV7-9, TRBJ2-3)
CASSPGSTDTQYF

SEQ ID NO: 691425 - protein, 13 aa, Homo sapiens
  CDR3 for alpha chain variable domain of TCR clone 345713 (TRAV2, TRAJ40)
CAVVTSGTYKYIF

SEQ ID NO: 691426 - protein, 15 aa, Homo sapiens
  CDR3 for beta chain variable domain of TCR clone 345713 (TRBV5-1, TRBJ2-3)
CASSLETASTDTQYF

SEQ ID NO: 691427 - protein, 10 aa, Homo sapiens
  CDR3 for alpha chain variable domain of TCR clone 345714 (TRAV2, TRAJ34)
CAVVNDKPIF

SEQ ID NO: 691428 - protein, 20 aa, Homo sapiens
  CDR3 for beta chain variable domain of TCR clone 345714 (TRBV19, TRBJ2-1)
CASSISRTVTSTRLNNEQFF

SEQ ID NO: 691429 - protein, 14 aa, Homo sapiens
  CDR3 for alpha chain variable domain of TCR clone 345715 (TRAV12-2, TRAJ3)
CAVKGYSSASKIIF

SEQ ID NO: 691430 - protein, 14 aa, Homo sapiens
  CDR3 for beta chain variable domain of TCR clone 345715 (TRBV4-2, TRBJ2-1)
CASGLDRAYNEQLF

SEQ ID NO: 691431 - protein, 20 aa, Homo sapiens
  CDR3 for alpha chain variable domain of TCR clone 345716 (TRAV25, TRAJ33)
TATQTTDVGTSRGSNHQLIW

SEQ ID NO: 691432 - protein, 14 aa, Homo sapiens
  CDR3 for beta chain variable domain of TCR clone 345716 (TRBV7-2, TRBJ2-5)
CASSTGGELKTQYF

SEQ ID NO: 691433 - protein, 14 aa, Homo sapiens
  CDR3 for alpha chain variable domain of TCR clone 345717 (TRAV26-1, TRAJ39)
CIVRGSRAGNMPPF

SEQ ID NO: 691434 - protein, 15 aa, Homo sapiens
  CDR3 for beta chain variable domain of TCR clone 345717 (TRBV7-9, TRBJ1-5)
CASSQGHQPNQPQHF

SEQ ID NO: 691435 - protein, 17 aa, Homo sapiens
  CDR3 for alpha chain variable domain of TCR clone 345718 (TRAV3, TRAJ12)
CAVSDGGRLDSSYKLIF

SEQ ID NO: 691436 - protein, 16 aa, Homo sapiens
  CDR3 for beta chain variable domain of TCR clone 345718 (TRBV9, TRBJ2-2)
CASSAMGKGNTGELFF

SEQ ID NO: 691437 - protein, 13 aa, Homo sapiens
  CDR3 for alpha chain variable domain of TCR clone 345719 (TRAV21, TRAJ27)
CAARPGNAVKSTF

SEQ ID NO: 691438 - protein, 13 aa, Homo sapiens
  CDR3 for beta chain variable domain of TCR clone 345719 (TRBV20-1, TRBJ1-1)
CSARGGGNTEAFF

SEQ ID NO: 691439 - protein, 14 aa, Homo sapiens
  CDR3 for alpha chain variable domain of TCR clone 345720 (TRAV1-2, TRAJ8)
CAVREDTGFQKLVF

SEQ ID NO: 691440 - protein, 16 aa, Homo sapiens
  CDR3 for beta chain variable domain of TCR clone 345720 (TRBV7-3, TRBJ2-3)
CASSLSGYRPEDTQYF

SEQ ID NO: 691441 - protein, 15 aa, Homo sapiens
  CDR3 for alpha chain variable domain of TCR clone 345721 (TRAV27, TRAJ38)
CAGRFNAGYNRKLIW

SEQ ID NO: 691442 - protein, 13 aa, Homo sapiens
  CDR3 for beta chain variable domain of TCR clone 345721 (TRBV12-5, TRBJ2-3)
CASQNRGTDTQYF

SEQ ID NO: 691443 - protein, 14 aa, Homo sapiens
  CDR3 for alpha chain variable domain of TCR clone 345722 (TRAV16, TRAJ17)
CALSGRAAGNKLTF

SEQ ID NO: 691444 - protein, 15 aa, Homo sapiens
  CDR3 for beta chain variable domain of TCR clone 345722 (TRBV6-1, TRBJ2-4)
CASSEAVWTINIQYF

SEQ ID NO: 691445 - protein, 14 aa, Homo sapiens
  CDR3 for alpha chain variable domain of TCR clone 345723 (TRAV1-2, TRAJ16)
CAVNRFSDGQKLLF

SEQ ID NO: 691446 - protein, 15 aa, Homo sapiens
  CDR3 for beta chain variable domain of TCR clone 345723 (TRBV5-1, TRBJ2-2)
CASSSQGGNTGELFL

SEQ ID NO: 691447 - protein, 14 aa, Homo sapiens
  CDR3 for alpha chain variable domain of TCR clone 345724 (TRAV12-2, TRAJ36)
CAVKISTGANNLFF

SEQ ID NO: 691448 - protein, 14 aa, Homo sapiens
  CDR3 for beta chain variable domain of TCR clone 345724 (TRBV25-1, TRBJ1-2)
CASNDTTGVVGYTL

SEQ ID NO: 691449 - protein, 10 aa, Homo sapiens
  CDR3 for alpha chain variable domain of TCR clone 345725 (TRAV12-3, TRAJ49)
CAMNDDQFYF

SEQ ID NO: 691450 - protein, 13 aa, Homo sapiens
  CDR3 for beta chain variable domain of TCR clone 345725 (TRBV28, TRBJ1-2)
CARIQGANYGYTF

SEQ ID NO: 691451 - protein, 14 aa, Homo sapiens
  CDR3 for alpha chain variable domain of TCR clone 345726 (TRAV8-6, TRAJ5)
CAVSVDTGRRALTF

SEQ ID NO: 691452 - protein, 11 aa, Homo sapiens
  CDR3 for beta chain variable domain of TCR clone 345726 (TRBV7-3, TRBJ2-5)
CASSLSETQCF

SEQ ID NO: 691453 - protein, 13 aa, Homo sapiens
  CDR3 for alpha chain variable domain of TCR clone 345727 (TRAV12-2, TRAJ10)
CAVPTGGGDKLTF

SEQ ID NO: 691454 - protein, 16 aa, Homo sapiens
  CDR3 for beta chain variable domain of TCR clone 345727 (TRBV5-1, TRBJ2-3)
CASSVFPMSSTDTQYF

SEQ ID NO: 691455 - protein, 12 aa, Homo sapiens
  CDR3 for alpha chain variable domain of TCR clone 345728 (TRAV8-3, TRAJ5)
CAVGGGLRALTF

SEQ ID NO: 691456 - protein, 15 aa, Homo sapiens
  CDR3 for beta chain variable domain of TCR clone 345728 (TRBV7-2, TRBJ2-3)
CASSLVVRGPDTQYF

SEQ ID NO: 691457 - protein, 14 aa, Homo sapiens
  CDR3 for alpha chain variable domain of TCR clone 345729 (TRAV25, TRAJ45)
CAGNSGGGADGLTF

SEQ ID NO: 691458 - protein, 14 aa, Homo sapiens
  CDR3 for beta chain variable domain of TCR clone 345729 (TRBV29-1, TRBJ1-2)
CSARRVTQTSGYTF

SEQ ID NO: 691459 - protein, 14 aa, Homo sapiens
  CDR3 for alpha chain variable domain of TCR clone 345730 (TRAV1-2, TRAJ16)
CTVNRFSDGQQLLF

SEQ ID NO: 691460 - protein, 14 aa, Homo sapiens
  CDR3 for beta chain variable domain of TCR clone 345730 (TRBV23-1, TRBJ2-5)
CASSFLRSQETQYF

SEQ ID NO: 691461 - protein, 13 aa, Homo sapiens
  CDR3 for alpha chain variable domain of TCR clone 345731 (TRAV1-2, TRAJ24)
CAVTTDSWGKLQF

SEQ ID NO: 691462 - protein, 14 aa, Homo sapiens
  CDR3 for beta chain variable domain of TCR clone 345731 (TRBV19, TRBJ2-1)
CASPTFALSGEQFF

SEQ ID NO: 691463 - protein, 12 aa, Homo sapiens
  CDR3 for alpha chain variable domain of TCR clone 345732 (TRAV26-1, TRAJ36)
CIVRVRADILFF

SEQ ID NO: 691464 - protein, 13 aa, Homo sapiens
  CDR3 for beta chain variable domain of TCR clone 345732 (TRBV11-2, TRBJ2-5)
CASSRGPSETQYF

SEQ ID NO: 691465 - protein, 16 aa, Homo sapiens
  CDR3 for alpha chain variable domain of TCR clone 345733 (TRAV16, TRAJ4)
CALSRMFSGGYNKLIF

SEQ ID NO: 691466 - protein, 13 aa, Homo sapiens
  CDR3 for beta chain variable domain of TCR clone 345733 (TRBV15, TRBJ1-6)
CATSGGLNSPLHF

SEQ ID NO: 691467 - protein, 17 aa, Homo sapiens
  CDR3 for alpha chain variable domain of TCR clone 345734 (TRAV4, )
CLVDIQNPDPAVYQLRD

SEQ ID NO: 691468 - protein, 12 aa, Homo sapiens
  CDR3 for beta chain variable domain of TCR clone 345734 (TRBV6-3, TRBJ2-7)
CASSLTPYEQYF

SEQ ID NO: 691469 - protein, 15 aa, Homo sapiens
  CDR3 for alpha chain variable domain of TCR clone 345735 (TRAV12-3, TRAJ27)
CAMRSYNTNAGKTTF

SEQ ID NO: 691470 - protein, 13 aa, Homo sapiens
  CDR3 for beta chain variable domain of TCR clone 345735 (TRBV11-2, TRBJ2-5)
CASSRGPSETQYF

SEQ ID NO: 691471 - protein, 14 aa, Homo sapiens
  CDR3 for alpha chain variable domain of TCR clone 345736 (TRAV26-1, TRAJ22)
CIVRVYGSARQLTF

SEQ ID NO: 691472 - protein, 17 aa, Homo sapiens
  CDR3 for beta chain variable domain of TCR clone 345736 (TRBV7-3, TRBJ2-3)
CDSSPGGLAGFGDTQYF

SEQ ID NO: 691473 - protein, 14 aa, Homo sapiens
  CDR3 for alpha chain variable domain of TCR clone 345737 (TRAV12-1, TRAJ30)
WVVNIGGRDGKIIF

SEQ ID NO: 691474 - protein, 14 aa, Homo sapiens
  CDR3 for beta chain variable domain of TCR clone 345737 (TRBV7-6, TRBJ2-3)
CASSLGTVTDTQYF

SEQ ID NO: 691475 - protein, 10 aa, Homo sapiens
  CDR3 for alpha chain variable domain of TCR clone 345738 (TRAV16, TRAJ26)
CAPEELWSEF

SEQ ID NO: 691476 - protein, 15 aa, Homo sapiens
  CDR3 for beta chain variable domain of TCR clone 345738 (TRBV7-2, TRBJ2-3)
CASSLTGTGTDTQYF

SEQ ID NO: 691477 - protein, 14 aa, Homo sapiens
  CDR3 for alpha chain variable domain of TCR clone 345739 (TRAV12-2, TRAJ40)
CAVKIPSGTYKYIF

SEQ ID NO: 691478 - protein, 13 aa, Homo sapiens
  CDR3 for beta chain variable domain of TCR clone 345739 (TRBV7-9, TRBJ1-2)
CASSLKQNYGYTF

SEQ ID NO: 691479 - protein, 13 aa, Homo sapiens
  CDR3 for alpha chain variable domain of TCR clone 345740 (TRAV35, TRAJ42)
CAGFPGSQGALIF

SEQ ID NO: 691480 - protein, 14 aa, Homo sapiens
  CDR3 for beta chain variable domain of TCR clone 345740 (TRBV4-1, TRBJ2-2)
CASSQAVNTGELFF

SEQ ID NO: 691481 - protein, 19 aa, Homo sapiens
  CDR3 for alpha chain variable domain of TCR clone 345741 (TRAV8-3, TRAJ8)
LSTFVLWDPMNTGFQKLVF

SEQ ID NO: 691482 - protein, 13 aa, Homo sapiens
  CDR3 for beta chain variable domain of TCR clone 345741 (TRBV10-2, TRBJ2-3)
CASSESGDHTQYF

SEQ ID NO: 691483 - protein, 18 aa, Homo sapiens
  CDR3 for alpha chain variable domain of TCR clone 345742 (TRAV26-2, TRAJ54)
CILRDVEVGIQGAQKLVF

SEQ ID NO: 691484 - protein, 11 aa, Homo sapiens
  CDR3 for beta chain variable domain of TCR clone 345742 (TRBV6-9, TRBJ2-7)
CAGRVASEQYF

SEQ ID NO: 691485 - protein, 15 aa, Homo sapiens
  CDR3 for alpha chain variable domain of TCR clone 345743 (TRAV12-3, TRAJ27)
CAMRAYNTNAGKSTF

SEQ ID NO: 691486 - protein, 13 aa, Homo sapiens
  CDR3 for beta chain variable domain of TCR clone 345743 (TRBV11-2, TRBJ2-5)
CASSRGPCETQYF

SEQ ID NO: 691487 - protein, 18 aa, Homo sapiens
  CDR3 for alpha chain variable domain of TCR clone 345744 (TRAV29/DV5, TRAJ37)
CSVLLCSEGSGNTGKLIF

SEQ ID NO: 691488 - protein, 14 aa, Homo sapiens
  CDR3 for beta chain variable domain of TCR clone 345744 (TRBV5-1, TRBJ1-1)
CASSLAAGSGEAFF

SEQ ID NO: 691489 - protein, 13 aa, Homo sapiens
  CDR3 for alpha chain variable domain of TCR clone 345745 (TRAV12-2, TRAJ32)
CAAYGGATNKPIF

SEQ ID NO: 691490 - protein, 16 aa, Homo sapiens
  CDR3 for beta chain variable domain of TCR clone 345745 (TRBV19, TRBJ2-3)
CASGTGPNDGTDTQYF

SEQ ID NO: 691491 - protein, 16 aa, Homo sapiens
  CDR3 for alpha chain variable domain of TCR clone 345746 (TRAV38-1, TRAJ32)
CAFMKGGGGATNKLIF

SEQ ID NO: 691492 - protein, 15 aa, Homo sapiens
  CDR3 for beta chain variable domain of TCR clone 345746 (TRBV5-1, TRBJ2-7)
CASSLGDFTTYEQYF

SEQ ID NO: 691493 - protein, 22 aa, Homo sapiens
  CDR3 for alpha chain variable domain of TCR clone 345747 (TRAV27, TRAJ38)
CAARRNAGNNHIQNPGPAVYQL

SEQ ID NO: 691494 - protein, 13 aa, Homo sapiens
  CDR3 for beta chain variable domain of TCR clone 345747 (TRBV12-5, TRBJ2-3)
CASGDRQSDTQYF

SEQ ID NO: 691495 - protein, 16 aa, Homo sapiens
  CDR3 for alpha chain variable domain of TCR clone 345748 (TRAV12-3, TRAJ53)
CAMSPGSGGSNYKLTF

SEQ ID NO: 691496 - protein, 13 aa, Homo sapiens
  CDR3 for beta chain variable domain of TCR clone 345748 (TRBV3-1, TRBJ1-1)
CASSQLQGAEAFF

SEQ ID NO: 691497 - protein, 11 aa, Homo sapiens
  CDR3 for alpha chain variable domain of TCR clone 345749 (TRAV13-1, TRAJ43)
CAAHNNNDMRF

SEQ ID NO: 691498 - protein, 15 aa, Homo sapiens
  CDR3 for beta chain variable domain of TCR clone 345749 (TRBV6-6, TRBJ2-7)
CASSYSYGGSYEQYF

SEQ ID NO: 691499 - protein, 14 aa, Homo sapiens
  CDR3 for alpha chain variable domain of TCR clone 345750 (TRAV1-2, TRAJ16)
CAVNRFSDGQKLLF

SEQ ID NO: 691500 - protein, 14 aa, Homo sapiens
  CDR3 for beta chain variable domain of TCR clone 345750 (TRBV12-5, TRBJ2-7)
CASGSRTHQETQYF

SEQ ID NO: 691501 - protein, 19 aa, Homo sapiens
  CDR3 for alpha chain variable domain of TCR clone 345751 (TRAV35, TRAJ22)
CAGQLATVDASGSARQLTF

SEQ ID NO: 691502 - protein, 16 aa, Homo sapiens
  CDR3 for beta chain variable domain of TCR clone 345751 (TRBV4-1, TRBJ1-2)
CASSQDAGQVLYGYTF

SEQ ID NO: 691503 - protein, 19 aa, Homo sapiens
  CDR3 for alpha chain variable domain of TCR clone 345752 (TRAV1-2, TRAJ26)
CLLPLCCERPDKYGQNFVF

SEQ ID NO: 691504 - protein, 14 aa, Homo sapiens
  CDR3 for beta chain variable domain of TCR clone 345752 (TRBV19, TRBJ2-1)
CASPTFVLSGEQFF

SEQ ID NO: 691505 - protein, 15 aa, Homo sapiens
  CDR3 for alpha chain variable domain of TCR clone 345753 (TRAV21, TRAJ53)
CATLNSGGSNYKLTF

SEQ ID NO: 691506 - protein, 13 aa, Homo sapiens
  CDR3 for beta chain variable domain of TCR clone 345753 (TRBV11-2, TRBJ2-5)
CASSPTGEETQYF

SEQ ID NO: 691507 - protein, 15 aa, Homo sapiens
  CDR3 for alpha chain variable domain of TCR clone 345754 (TRAV4, TRAJ39)
CLGGPNNNAGNMLTF

SEQ ID NO: 691508 - protein, 14 aa, Homo sapiens
  CDR3 for beta chain variable domain of TCR clone 345754 (TRBV19, TRBJ2-7)
CASNFRDTFTGMYF

SEQ ID NO: 691509 - protein, 10 aa, Homo sapiens
  CDR3 for alpha chain variable domain of TCR clone 345755 (TRAV27, TRAJ20)
CRSGRLKLSF

SEQ ID NO: 691510 - protein, 12 aa, Homo sapiens
  CDR3 for beta chain variable domain of TCR clone 345755 (TRBV2, TRBJ1-1)
CATPSRGTEAFF

SEQ ID NO: 691511 - protein, 13 aa, Homo sapiens
  CDR3 for alpha chain variable domain of TCR clone 345756 (TRAV4, TRAJ36)
CLVGPTGANNLFF

SEQ ID NO: 691512 - protein, 15 aa, Homo sapiens
  CDR3 for beta chain variable domain of TCR clone 345756 (TRBV13, TRBJ1-5)
CASSFGQGGVQPQHF

SEQ ID NO: 691513 - protein, 12 aa, Homo sapiens
  CDR3 for alpha chain variable domain of TCR clone 345757 (TRAV17, TRAJ28)
WDAGAGSYQLTF

SEQ ID NO: 691514 - protein, 13 aa, Homo sapiens
  CDR3 for beta chain variable domain of TCR clone 345757 (TRBV11-3, TRBJ1-1)
CASSRQPNTEAFF

SEQ ID NO: 691515 - protein, 14 aa, Homo sapiens
  CDR3 for alpha chain variable domain of TCR clone 345758 (TRAV13-2, TRAJ39)
GDSARNNAGNMLTF

SEQ ID NO: 691516 - protein, 13 aa, Homo sapiens
  CDR3 for beta chain variable domain of TCR clone 345758 (TRBV20-1, TRBJ2-7)
CSAPGLADYEQYF

SEQ ID NO: 691517 - protein, 16 aa, Homo sapiens
  CDR3 for alpha chain variable domain of TCR clone 345759 (TRAV3, TRAJ23)
CAVKIGIFHQGGKLIF

SEQ ID NO: 691518 - protein, 17 aa, Homo sapiens
  CDR3 for beta chain variable domain of TCR clone 345759 (TRBV10-3, TRBJ2-6)
CAISESTAPSGANVLTF

SEQ ID NO: 691519 - protein, 14 aa, Homo sapiens
  CDR3 for alpha chain variable domain of TCR clone 345760 (TRAV12-2, TRAJ11)
CAVNRESGYSTLTF

SEQ ID NO: 691520 - protein, 10 aa, Homo sapiens
  CDR3 for beta chain variable domain of TCR clone 345760 (TRBV20-1, TRBJ2-5)
CSARFENQYF

SEQ ID NO: 691521 - protein, 15 aa, Homo sapiens
  CDR3 for alpha chain variable domain of TCR clone 345761 (TRAV12-2, TRAJ43)
CAFDMRFGAGTRLTV

SEQ ID NO: 691522 - protein, 16 aa, Homo sapiens
  CDR3 for beta chain variable domain of TCR clone 345761 (TRBV2, TRBJ2-3)
CASSTSVEGVTDTQYF

SEQ ID NO: 691523 - protein, 14 aa, Homo sapiens
  CDR3 for alpha chain variable domain of TCR clone 345762 (TRAV30, TRAJ33)
CGTVAPRSNYQLIW

SEQ ID NO: 691524 - protein, 14 aa, Homo sapiens
  CDR3 for beta chain variable domain of TCR clone 345762 (TRBV7-8, TRBJ2-7)
CASSLQGIRYEQYF

SEQ ID NO: 691525 - protein, 14 aa, Homo sapiens
  CDR3 for alpha chain variable domain of TCR clone 345763 (TRAV12-1, TRAJ26)
CAVKGSNYGQNFVF

SEQ ID NO: 691526 - protein, 14 aa, Homo sapiens
  CDR3 for beta chain variable domain of TCR clone 345763 (TRBV5-4, TRBJ1-1)
CASSLDSRRDEAFF

SEQ ID NO: 691527 - protein, 15 aa, Homo sapiens
  CDR3 for alpha chain variable domain of TCR clone 345764 (TRAV2, TRAJ37)
CAVEDGSSNTGKLIF

SEQ ID NO: 691528 - protein, 13 aa, Homo sapiens
  CDR3 for beta chain variable domain of TCR clone 345764 (TRBV20-1, TRBJ1-6)
CSTFRGGNSPLHF

SEQ ID NO: 691529 - protein, 11 aa, Homo sapiens
  CDR3 for alpha chain variable domain of TCR clone 345765 (TRAV12-3, TRAJ27)
CAMANAGKSTF

SEQ ID NO: 691530 - protein, 14 aa, Homo sapiens
  CDR3 for beta chain variable domain of TCR clone 345765 (TRBV7-2, TRBJ1-6)
CASSLQGANSPLHF

SEQ ID NO: 691531 - protein, 15 aa, Homo sapiens
  CDR3 for alpha chain variable domain of TCR clone 345766 (TRAV2, TRAJ22)
CAVPSRGGSARQLPF

SEQ ID NO: 691532 - protein, 16 aa, Homo sapiens
  CDR3 for beta chain variable domain of TCR clone 345766 (TRBV7-3, TRBJ2-2)
CASSLKRGTLSGELFF

SEQ ID NO: 691533 - protein, 12 aa, Homo sapiens
  CDR3 for alpha chain variable domain of TCR clone 345767 (TRAV36/DV7, TRAJ26)
CAADNYCQNFVF

SEQ ID NO: 691534 - protein, 16 aa, Homo sapiens
  CDR3 for beta chain variable domain of TCR clone 345767 (TRBV7-3, TRBJ2-1)
CASSLEGYRSYNEQFF

SEQ ID NO: 691535 - protein, 13 aa, Homo sapiens
  CDR3 for alpha chain variable domain of TCR clone 345768 (TRAV30, TRAJ24)
CGTVTDSWGKWQF

SEQ ID NO: 691536 - protein, 16 aa, Homo sapiens
  CDR3 for beta chain variable domain of TCR clone 345768 (TRBV7-3, TRBJ2-2)
CASSLKRGTLSGELFF

SEQ ID NO: 691537 - protein, 18 aa, Homo sapiens
  CDR3 for alpha chain variable domain of TCR clone 345769 (TRAV38-1, TRAJ45)
CDVFLCYYSGGGADGLTF

SEQ ID NO: 691538 - protein, 20 aa, Homo sapiens
  CDR3 for beta chain variable domain of TCR clone 345769 (TRBV28, TRBJ2-1)
CASTPIGRSPGLAGGNEQFF

SEQ ID NO: 691539 - protein, 23 aa, Homo sapiens
  CDR3 for alpha chain variable domain of TCR clone 345770 (TRAV4, TRAJ26)
IPADRKSSTLSLPRVYYGQNFVF

SEQ ID NO: 691540 - protein, 16 aa, Homo sapiens
  CDR3 for beta chain variable domain of TCR clone 345770 (TRBV7-2, TRBJ1-2)
CASNSNQDRRGHGYAF

SEQ ID NO: 691541 - protein, 18 aa, Homo sapiens
  CDR3 for alpha chain variable domain of TCR clone 345771 (TRAV21, TRAJ52)
CAVRPSPAGGTSYGKLTF

SEQ ID NO: 691542 - protein, 12 aa, Homo sapiens
  CDR3 for beta chain variable domain of TCR clone 345771 (TRBV11-2, TRBJ2-2)
CASSLGGGELVF

SEQ ID NO: 691543 - protein, 13 aa, Homo sapiens
  CDR3 for alpha chain variable domain of TCR clone 345772 (TRAV23/DV6, TRAJ47)
CAASMNRGNKLVF

SEQ ID NO: 691544 - protein, 13 aa, Homo sapiens
  CDR3 for beta chain variable domain of TCR clone 345772 (TRBV9, TRBJ2-2)
CASSTFSSGELFF

SEQ ID NO: 691545 - protein, 12 aa, Homo sapiens
  CDR3 for alpha chain variable domain of TCR clone 345773 (TRAV16, TRAJ26)
CALRSYGQNFVF

SEQ ID NO: 691546 - protein, 14 aa, Homo sapiens
  CDR3 for beta chain variable domain of TCR clone 345773 (TRBV10-3, TRBJ2-1)
CGISSYLAYNEQFF

SEQ ID NO: 691547 - protein, 16 aa, Homo sapiens
  CDR3 for alpha chain variable domain of TCR clone 345774 (TRAV3, TRAJ37)
CAVRGKGSGNTGKLIF

SEQ ID NO: 691548 - protein, 21 aa, Homo sapiens
  CDR3 for beta chain variable domain of TCR clone 345774 (TRBV15, TRBJ2-1)
AWGTQPCTCVLPAEVDTARFF

SEQ ID NO: 691549 - protein, 17 aa, Homo sapiens
  CDR3 for alpha chain variable domain of TCR clone 345775 (TRAV13-1, TRAJ53)
CAASWKSRGGSNYKLTF

SEQ ID NO: 691550 - protein, 19 aa, Homo sapiens
  CDR3 for beta chain variable domain of TCR clone 345775 (TRBV7-9, TRBJ2-1)
CASSHNRGALLRSYNEQFF

SEQ ID NO: 691551 - protein, 16 aa, Homo sapiens
  CDR3 for alpha chain variable domain of TCR clone 345776 (TRAV12-2, TRAJ10)
CAVNRVLTGGGNKLTF

SEQ ID NO: 691552 - protein, 13 aa, Homo sapiens
  CDR3 for beta chain variable domain of TCR clone 345776 (TRBV11-3, TRBJ1-1)
CASTGSLNTEAFF

SEQ ID NO: 691553 - protein, 16 aa, Homo sapiens
  CDR3 for alpha chain variable domain of TCR clone 345777 (TRAV30, TRAJ24)
CGTEIVDADSWGKFLF

SEQ ID NO: 691554 - protein, 15 aa, Homo sapiens
  CDR3 for beta chain variable domain of TCR clone 345777 (TRBV20-1, TRBJ2-7)
CSARDRVSGMDEQYF

SEQ ID NO: 691555 - protein, 17 aa, Homo sapiens
  CDR3 for alpha chain variable domain of TCR clone 345778 (TRAV17, TRAJ7)
CATLGRLAFGKGNQVVV

SEQ ID NO: 691556 - protein, 13 aa, Homo sapiens
  CDR3 for beta chain variable domain of TCR clone 345778 (TRBV12-4, TRBJ2-7)
CDSSLERVREQYF

SEQ ID NO: 691557 - protein, 13 aa, Homo sapiens
  CDR3 for alpha chain variable domain of TCR clone 345779 (TRAV8-1, TRAJ9)
CAVNSVRGFKTIF

SEQ ID NO: 691558 - protein, 15 aa, Homo sapiens
  CDR3 for beta chain variable domain of TCR clone 345779 (TRBV11-2, TRBJ2-3)
CASSGRDGLTDTQYF

SEQ ID NO: 691559 - protein, 15 aa, Homo sapiens
  CDR3 for alpha chain variable domain of TCR clone 345780 (TRAV13-2, TRAJ45)
CAEHHSGGGADGLTF

SEQ ID NO: 691560 - protein, 13 aa, Homo sapiens
  CDR3 for beta chain variable domain of TCR clone 345780 (TRBV7-3, TRBJ1-1)
CASSQDWGAEAFF

SEQ ID NO: 691561 - protein, 13 aa, Homo sapiens
  CDR3 for alpha chain variable domain of TCR clone 345781 (TRAV3, TRAJ30)
CAVRDRGDDKIIF

SEQ ID NO: 691562 - protein, 15 aa, Homo sapiens
  CDR3 for beta chain variable domain of TCR clone 345781 (TRBV5-1, TRBJ2-1)
CASSWGPGPGGEQFF

SEQ ID NO: 691563 - protein, 14 aa, Homo sapiens
  CDR3 for alpha chain variable domain of TCR clone 345782 (TRAV20, TRAJ42)
CAVQAGGSQGNLIF

SEQ ID NO: 691564 - protein, 12 aa, Homo sapiens
  CDR3 for beta chain variable domain of TCR clone 345782 (TRBV11-2, TRBJ2-7)
CASSLPTYEQYF

SEQ ID NO: 691565 - protein, 12 aa, Homo sapiens
  CDR3 for alpha chain variable domain of TCR clone 345783 (TRAV1-1, TRAJ39)
CAVPVVGNMLTF

SEQ ID NO: 691566 - protein, 14 aa, Homo sapiens
  CDR3 for beta chain variable domain of TCR clone 345783 (TRBV4-1, TRBJ2-7)
CASRLTSGSYEQYF

SEQ ID NO: 691567 - protein, 18 aa, Homo sapiens
  CDR3 for alpha chain variable domain of TCR clone 345784 (TRAV3, TRAJ32)
CAVRDIRGYGGATNKLIF

SEQ ID NO: 691568 - protein, 15 aa, Homo sapiens
  CDR3 for beta chain variable domain of TCR clone 345784 (TRBV12-4, TRBJ2-2)
CASSLGVRHTGELLF

SEQ ID NO: 691569 - protein, 15 aa, Homo sapiens
  CDR3 for alpha chain variable domain of TCR clone 345785 (TRAV29/DV5, TRAJ24)
CAASGATDSWGKFQF

SEQ ID NO: 691570 - protein, 12 aa, Homo sapiens
  CDR3 for beta chain variable domain of TCR clone 345785 (TRBV11-2, TRBJ2-2)
CASSLPTRELFF

SEQ ID NO: 691571 - protein, 11 aa, Homo sapiens
  CDR3 for alpha chain variable domain of TCR clone 345786 (TRAV17, TRAJ43)
CATPRSNVMRF

SEQ ID NO: 691572 - protein, 15 aa, Homo sapiens
  CDR3 for beta chain variable domain of TCR clone 345786 (TRBV11-2, TRBJ2-1)
CASSLGTSGLNEQFF

SEQ ID NO: 691573 - protein, 16 aa, Homo sapiens
  CDR3 for alpha chain variable domain of TCR clone 345787 (TRAV16, TRAJ4)
CITVLPFSGGYNKLIF

SEQ ID NO: 691574 - protein, 14 aa, Homo sapiens
  CDR3 for beta chain variable domain of TCR clone 345787 (TRBV19, TRBJ2-7)
CDSSMGQGAIEQYF

SEQ ID NO: 691575 - protein, 13 aa, Homo sapiens
  CDR3 for alpha chain variable domain of TCR clone 345788 (TRAV16, TRAJ34)
CALSPYNTDKLIF

SEQ ID NO: 691576 - protein, 13 aa, Homo sapiens
  CDR3 for beta chain variable domain of TCR clone 345788 (TRBV12-4, TRBJ2-2)
CASRSRDTGELFF

SEQ ID NO: 691577 - protein, 16 aa, Homo sapiens
  CDR3 for alpha chain variable domain of TCR clone 345789 (TRAV27, TRAJ53)
CAAPEGSGGSNYQLTF

SEQ ID NO: 691578 - protein, 14 aa, Homo sapiens
  CDR3 for beta chain variable domain of TCR clone 345789 (TRBV4-3, TRBJ1-5)
CASSQGGQGWPQHF

SEQ ID NO: 691579 - protein, 13 aa, Homo sapiens
  CDR3 for alpha chain variable domain of TCR clone 345790 (TRAV3, TRAJ21)
CSLREPDSNKFYF

SEQ ID NO: 691580 - protein, 13 aa, Homo sapiens
  CDR3 for beta chain variable domain of TCR clone 345790 (TRBV9, TRBJ2-1)
CASSPSGGNEQFF

SEQ ID NO: 691581 - protein, 15 aa, Homo sapiens
  CDR3 for alpha chain variable domain of TCR clone 345791 (TRAV1-2, TRAJ20)
CAPTPPGGNDYKLSF

SEQ ID NO: 691582 - protein, 14 aa, Homo sapiens
  CDR3 for beta chain variable domain of TCR clone 345791 (TRBV18, TRBJ2-7)
CASSPRGGAYEQYF

SEQ ID NO: 691583 - protein, 14 aa, Homo sapiens
  CDR3 for alpha chain variable domain of TCR clone 345792 (TRAV9-2, TRAJ39)
CALYIYNAGHMLTF

SEQ ID NO: 691584 - protein, 14 aa, Homo sapiens
  CDR3 for beta chain variable domain of TCR clone 345792 (TRBV12-5, TRBJ2-5)
CASGSRTHQETQYF

SEQ ID NO: 691585 - protein, 16 aa, Homo sapiens
  CDR3 for alpha chain variable domain of TCR clone 345793 (TRAV3, TRAJ5)
CAVRNLMDTGRRALTF

SEQ ID NO: 691586 - protein, 19 aa, Homo sapiens
  CDR3 for beta chain variable domain of TCR clone 345793 (TRBV25-1, TRBJ2-2)
CAILVYRVDRGRKTGELFF

SEQ ID NO: 691587 - protein, 11 aa, Homo sapiens
  CDR3 for alpha chain variable domain of TCR clone 345794 (TRAV4, TRAJ23)
CLVAPGGKLIF

SEQ ID NO: 691588 - protein, 15 aa, Homo sapiens
  CDR3 for beta chain variable domain of TCR clone 345794 (TRBV7-2, TRBJ2-1)
CASSFQADEYNEQFY

SEQ ID NO: 691589 - protein, 14 aa, Homo sapiens
  CDR3 for alpha chain variable domain of TCR clone 345795 (TRAV16, TRAJ32)
CALKSGGATNQLIF

SEQ ID NO: 691590 - protein, 13 aa, Homo sapiens
  CDR3 for beta chain variable domain of TCR clone 345795 (TRBV11-3, TRBJ2-3)
CASSFTGPDTQYF

SEQ ID NO: 691591 - protein, 14 aa, Homo sapiens
  CDR3 for alpha chain variable domain of TCR clone 345796 (TRAV8-3, TRAJ4)
CAVGAAGGYNKLIF

SEQ ID NO: 691592 - protein, 14 aa, Homo sapiens
  CDR3 for beta chain variable domain of TCR clone 345796 (TRBV15, TRBJ2-7)
CATSRVARGYEQYF

SEQ ID NO: 691593 - protein, 12 aa, Homo sapiens
  CDR3 for alpha chain variable domain of TCR clone 345797 (TRAV1-1, TRAJ40)
CAVAEGTYKYIF

SEQ ID NO: 691594 - protein, 15 aa, Homo sapiens
  CDR3 for beta chain variable domain of TCR clone 345797 (TRBV11-1, TRBJ2-7)
CASSLNYGASYEQYF

SEQ ID NO: 691595 - protein, 14 aa, Homo sapiens
  CDR3 for alpha chain variable domain of TCR clone 345798 (TRAV12-3, TRAJ58)
CAMSTETSGSRLTF

SEQ ID NO: 691596 - protein, 15 aa, Homo sapiens
  CDR3 for beta chain variable domain of TCR clone 345798 (TRBV4-1, TRBJ1-4)
CASSDKGGTNEKLFF

SEQ ID NO: 691597 - protein, 14 aa, Homo sapiens
  CDR3 for alpha chain variable domain of TCR clone 345799 (TRAV12-2, TRAJ40)
CAVKIPSGTYKSIF

SEQ ID NO: 691598 - protein, 13 aa, Homo sapiens
  CDR3 for beta chain variable domain of TCR clone 345799 (TRBV7-9, TRBJ1-2)
CASSLKQNYGYTF

SEQ ID NO: 691599 - protein, 14 aa, Homo sapiens
  CDR3 for alpha chain variable domain of TCR clone 345800 (TRAV8-2, TRAJ45)
CVVSAGGGADGLNS

SEQ ID NO: 691600 - protein, 12 aa, Homo sapiens
  CDR3 for beta chain variable domain of TCR clone 345800 (TRBV12-4, TRBJ2-1)
CASSLVRVEQFF

SEQ ID NO: 691601 - protein, 12 aa, Homo sapiens
  CDR3 for alpha chain variable domain of TCR clone 345801 (TRAV3, TRAJ20)
CAVRDHNYKLSF

SEQ ID NO: 691602 - protein, 13 aa, Homo sapiens
  CDR3 for beta chain variable domain of TCR clone 345801 (TRBV9, TRBJ2-7)
CASSVGQGGEQYF

SEQ ID NO: 691603 - protein, 12 aa, Homo sapiens
  CDR3 for alpha chain variable domain of TCR clone 345802 (TRAV3, TRAJ7)
CAGLLWEQQTRF

SEQ ID NO: 691604 - protein, 11 aa, Homo sapiens
  CDR3 for beta chain variable domain of TCR clone 345802 (TRBV29-1, TRBJ2-5)
CSEDRTGTQYF

SEQ ID NO: 691605 - protein, 13 aa, Homo sapiens
  CDR3 for alpha chain variable domain of TCR clone 345803 (TRAV21, TRAJ3)
CCEPYSSASMIIF

SEQ ID NO: 691606 - protein, 14 aa, Homo sapiens
  CDR3 for beta chain variable domain of TCR clone 345803 (TRBV20-1, TRBJ2-5)
CSALVPGYQETQYF

SEQ ID NO: 691607 - protein, 15 aa, Homo sapiens
  CDR3 for alpha chain variable domain of TCR clone 345804 (TRAV29/DV5, TRAJ12)
CAAAPRMDSSYKLIF

SEQ ID NO: 691608 - protein, 13 aa, Homo sapiens
  CDR3 for beta chain variable domain of TCR clone 345804 (TRBV4-2, TRBJ1-1)
CASSQAGNTEAFF

SEQ ID NO: 691609 - protein, 11 aa, Homo sapiens
  CDR3 for alpha chain variable domain of TCR clone 345805 (TRAV35, TRAJ30)
CAPGGGDKIIF

SEQ ID NO: 691610 - protein, 17 aa, Homo sapiens
  CDR3 for beta chain variable domain of TCR clone 345805 (TRBV7-6, TRBJ2-1)
CIAVPAAWGGGADEQFF

SEQ ID NO: 691611 - protein, 16 aa, Homo sapiens
  CDR3 for alpha chain variable domain of TCR clone 345806 (TRAV26-1, TRAJ45)
CIVEKYAGGGADGLTF

SEQ ID NO: 691612 - protein, 16 aa, Homo sapiens
  CDR3 for beta chain variable domain of TCR clone 345806 (TRBV10-3, TRBJ1-6)
CAISERRGQGNSPLHF

SEQ ID NO: 691613 - protein, 12 aa, Homo sapiens
  CDR3 for alpha chain variable domain of TCR clone 345807 (TRAV23/DV6, TRAJ43)
CAASYIKGDMRF

SEQ ID NO: 691614 - protein, 11 aa, Homo sapiens
  CDR3 for beta chain variable domain of TCR clone 345807 (TRBV29-1, TRBJ2-3)
CSVQLNRYAVF

SEQ ID NO: 691615 - protein, 14 aa, Homo sapiens
  CDR3 for alpha chain variable domain of TCR clone 345808 (TRAV9-2, TRAJ39)
CALYIYNAGNMLTF

SEQ ID NO: 691616 - protein, 13 aa, Homo sapiens
  CDR3 for beta chain variable domain of TCR clone 345808 (TRBV20-1, TRBJ2-1)
CSARPGRYNEQFS

SEQ ID NO: 691617 - protein, 15 aa, Homo sapiens
  CDR3 for alpha chain variable domain of TCR clone 345809 (TRAV34, TRAJ38)
CGADFTPGNNRKLIW

SEQ ID NO: 691618 - protein, 12 aa, Homo sapiens
  CDR3 for beta chain variable domain of TCR clone 345809 (TRBV7-6, TRBJ2-3)
CASSTGTDTQYF

SEQ ID NO: 691619 - protein, 14 aa, Homo sapiens
  CDR3 for alpha chain variable domain of TCR clone 345810 (TRAV9-2, TRAJ36)
CALPWRTGANNLFF

SEQ ID NO: 691620 - protein, 14 aa, Homo sapiens
  CDR3 for beta chain variable domain of TCR clone 345810 (TRBV2, TRBJ1-2)
CASSELQVNYGYTS

SEQ ID NO: 691621 - protein, 11 aa, Homo sapiens
  CDR3 for alpha chain variable domain of TCR clone 345811 (TRAV35, TRAJ30)
CAAERDDKIIF

SEQ ID NO: 691622 - protein, 14 aa, Homo sapiens
  CDR3 for beta chain variable domain of TCR clone 345811 (TRBV15, TRBJ2-5)
CATSGDRGQETQYF

SEQ ID NO: 691623 - protein, 15 aa, Homo sapiens
  CDR3 for alpha chain variable domain of TCR clone 345812 (TRAV26-1, TRAJ29)
CIVRVEGSGNTPLVF

SEQ ID NO: 691624 - protein, 15 aa, Homo sapiens
  CDR3 for beta chain variable domain of TCR clone 345812 (TRBV7-9, TRBJ1-5)
CAGSQGHQPSQPQHF

SEQ ID NO: 691625 - protein, 15 aa, Homo sapiens
  CDR3 for alpha chain variable domain of TCR clone 345813 (TRAV26-1, TRAJ29)
CIVRGEGSGNTPLVF

SEQ ID NO: 691626 - protein, 14 aa, Homo sapiens
  CDR3 for beta chain variable domain of TCR clone 345813 (TRBV25-1, TRBJ1-1)
CASTHLGGNTEAFF

SEQ ID NO: 691627 - protein, 14 aa, Homo sapiens
  CDR3 for alpha chain variable domain of TCR clone 345814 (TRAV1-2, TRAJ8)
CAVREDPGFQKLVF

SEQ ID NO: 691628 - protein, 15 aa, Homo sapiens
  CDR3 for beta chain variable domain of TCR clone 345814 (TRBV20-1, TRBJ2-7)
CSARDRVSGMDEQYF

SEQ ID NO: 691629 - protein, 15 aa, Homo sapiens
  CDR3 for alpha chain variable domain of TCR clone 345815 (TRAV26-1, TRAJ29)
CIVRDEGSGNTPLVF

SEQ ID NO: 691630 - protein, 14 aa, Homo sapiens
  CDR3 for beta chain variable domain of TCR clone 345815 (TRBV18, TRBJ2-5)
CASSPGVSKETQYF

SEQ ID NO: 691631 - protein, 12 aa, Homo sapiens
  CDR3 for alpha chain variable domain of TCR clone 345816 (TRAV30, TRAJ43)
CGTEERGNDMLF

SEQ ID NO: 691632 - protein, 11 aa, Homo sapiens
  CDR3 for beta chain variable domain of TCR clone 345816 (TRBV29-1, TRBJ2-5)
CSEDRTGTQYF

SEQ ID NO: 691633 - protein, 14 aa, Homo sapiens
  CDR3 for alpha chain variable domain of TCR clone 345817 (TRAV17, TRAJ16)
CATADFSDGQKLLF

SEQ ID NO: 691634 - protein, 14 aa, Homo sapiens
  CDR3 for beta chain variable domain of TCR clone 345817 (TRBV19, TRBJ2-7)
CASSMGQGAIEQYF

SEQ ID NO: 691635 - protein, 13 aa, Homo sapiens
  CDR3 for alpha chain variable domain of TCR clone 345818 (TRAV21, TRAJ57)
CAVTQGGSEKLVF

SEQ ID NO: 691636 - protein, 13 aa, Homo sapiens
  CDR3 for beta chain variable domain of TCR clone 345818 (TRBV25-1, TRBJ2-5)
CVSSPPARGEEYF

SEQ ID NO: 691637 - protein, 15 aa, Homo sapiens
  CDR3 for alpha chain variable domain of TCR clone 345819 (TRAV2, TRAJ9)
CAVEDRGTGGFKTIF

SEQ ID NO: 691638 - protein, 15 aa, Homo sapiens
  CDR3 for beta chain variable domain of TCR clone 345819 (TRBV5-1, TRBJ2-7)
CASSLDLTSSYEQYF

SEQ ID NO: 691639 - protein, 14 aa, Homo sapiens
  CDR3 for alpha chain variable domain of TCR clone 345820 (TRAV1-2, TRAJ16)
CAVNRFSDGQKLLF

SEQ ID NO: 691640 - protein, 16 aa, Homo sapiens
  CDR3 for beta chain variable domain of TCR clone 345820 (TRBV3-1, TRBJ2-5)
CASSPGQFNGFGTPYF

SEQ ID NO: 691641 - protein, 15 aa, Homo sapiens
  CDR3 for alpha chain variable domain of TCR clone 345821 (TRAV21, TRAJ24)
CAARSSTDSWGKLQF

SEQ ID NO: 691642 - protein, 12 aa, Homo sapiens
  CDR3 for beta chain variable domain of TCR clone 345821 (TRBV28, TRBJ1-1)
CASMGRNTEAFF

SEQ ID NO: 691643 - protein, 16 aa, Homo sapiens
  CDR3 for alpha chain variable domain of TCR clone 345822 (TRAV38-1, TRAJ34)
CAFMKHDETYTDKLIF

SEQ ID NO: 691644 - protein, 13 aa, Homo sapiens
  CDR3 for beta chain variable domain of TCR clone 345822 (TRBV19, TRBJ1-3)
CASRLSLGNTIYF

SEQ ID NO: 691645 - protein, 14 aa, Homo sapiens
  CDR3 for alpha chain variable domain of TCR clone 345823 (TRAV20, TRAJ22)
CALALGGSARQLTF

SEQ ID NO: 691646 - protein, 15 aa, Homo sapiens
  CDR3 for beta chain variable domain of TCR clone 345823 (TRBV7-2, TRBJ1-1)
CASSFAGDRDTEAFF

SEQ ID NO: 691647 - protein, 14 aa, Homo sapiens
  CDR3 for alpha chain variable domain of TCR clone 345824 (TRAV12-1, TRAJ9)
CVVTGYTGGFKNIF

SEQ ID NO: 691648 - protein, 13 aa, Homo sapiens
  CDR3 for beta chain variable domain of TCR clone 345824 (TRBV20-1, TRBJ1-1)
CSARAGGNTEAFF

SEQ ID NO: 691649 - protein, 17 aa, Homo sapiens
  CDR3 for alpha chain variable domain of TCR clone 345825 (TRAV29/DV5, TRAJ31)
CAARGITMPDSCLEMEL

SEQ ID NO: 691650 - protein, 12 aa, Homo sapiens
  CDR3 for beta chain variable domain of TCR clone 345825 (TRBV14, TRBJ2-7)
CASSLYKDEQYF

SEQ ID NO: 691651 - protein, 17 aa, Homo sapiens
  CDR3 for alpha chain variable domain of TCR clone 345826 (TRAV3, TRAJ6)
CAVRDGPRAGGSYIPTF

SEQ ID NO: 691652 - protein, 14 aa, Homo sapiens
  CDR3 for beta chain variable domain of TCR clone 345826 (TRBV19, TRBJ2-2)
CASSIAGAFGELFF

SEQ ID NO: 691653 - protein, 15 aa, Homo sapiens
  CDR3 for alpha chain variable domain of TCR clone 345827 (TRAV26-2, TRAJ45)
CILRDRVDQEEALTD

SEQ ID NO: 691654 - protein, 15 aa, Homo sapiens
  CDR3 for beta chain variable domain of TCR clone 345827 (TRBV7-6, TRBJ2-5)
CASSKPTGPQETQYF

SEQ ID NO: 691655 - protein, 12 aa, Homo sapiens
  CDR3 for alpha chain variable domain of TCR clone 345828 (TRAV12-2, TRAJ21)
CAPSDNFNKFYF

SEQ ID NO: 691656 - protein, 14 aa, Homo sapiens
  CDR3 for beta chain variable domain of TCR clone 345828 (TRBV4-2, TRBJ2-1)
CASGLDRAYNEQFF

SEQ ID NO: 691657 - protein, 12 aa, Homo sapiens
  CDR3 for alpha chain variable domain of TCR clone 345829 (TRAV20, TRAJ33)
CAVRGSNYQLIW

SEQ ID NO: 691658 - protein, 13 aa, Homo sapiens
  CDR3 for beta chain variable domain of TCR clone 345829 (TRBV4-3, TRBJ1-1)
CASSPTGNTEACF

SEQ ID NO: 691659 - protein, 13 aa, Homo sapiens
  CDR3 for alpha chain variable domain of TCR clone 345830 (TRAV27, TRAJ6)
CAGGTRGSYVPTF

SEQ ID NO: 691660 - protein, 15 aa, Homo sapiens
  CDR3 for beta chain variable domain of TCR clone 345830 (TRBV5-5, TRBJ2-7)
CASSLAAPLSYEQYY

SEQ ID NO: 691661 - protein, 16 aa, Homo sapiens
  CDR3 for alpha chain variable domain of TCR clone 345831 (TRAV3, TRAJ10)
CAVRDMRAGGGNKRTF

SEQ ID NO: 691662 - protein, 15 aa, Homo sapiens
  CDR3 for beta chain variable domain of TCR clone 345831 (TRBV20-1, TRBJ2-1)
CSASSAGSSYNEQFF

SEQ ID NO: 691663 - protein, 14 aa, Homo sapiens
  CDR3 for alpha chain variable domain of TCR clone 345832 (TRAV16, TRAJ33)
CALSAMDSNYQLIW

SEQ ID NO: 691664 - protein, 13 aa, Homo sapiens
  CDR3 for beta chain variable domain of TCR clone 345832 (TRBV10-3, TRBJ1-2)
CAISERDSYGYTF

SEQ ID NO: 691665 - protein, 14 aa, Homo sapiens
  CDR3 for alpha chain variable domain of TCR clone 345833 (TRAV12-2, TRAJ44)
CAVNPAGTASKLTF

SEQ ID NO: 691666 - protein, 14 aa, Homo sapiens
  CDR3 for beta chain variable domain of TCR clone 345833 (TRBV4-2, TRBJ2-1)
CASGLDRAYNEQFF

SEQ ID NO: 691667 - protein, 13 aa, Homo sapiens
  CDR3 for alpha chain variable domain of TCR clone 345834 (TRAV13-1, TRAJ45)
CAESGGGADGLAF

SEQ ID NO: 691668 - protein, 14 aa, Homo sapiens
  CDR3 for beta chain variable domain of TCR clone 345834 (TRBV7-8, TRBJ2-3)
CASSLEAGTDTQYF

SEQ ID NO: 691669 - protein, 14 aa, Homo sapiens
  CDR3 for alpha chain variable domain of TCR clone 345835 (TRAV2, TRAJ9)
CAVEDRSGGFKTIF

SEQ ID NO: 691670 - protein, 14 aa, Homo sapiens
  CDR3 for beta chain variable domain of TCR clone 345835 (TRBV18, TRBJ2-7)
GASSPRGGAYEQYF

SEQ ID NO: 691671 - protein, 14 aa, Homo sapiens
  CDR3 for alpha chain variable domain of TCR clone 345836 (TRAV1-2, TRAJ16)
CAVNRFSDGQKLLF

SEQ ID NO: 691672 - protein, 15 aa, Homo sapiens
  CDR3 for beta chain variable domain of TCR clone 345836 (TRBV6-6, TRBJ2-5)
CASSYGKIIQETQYF

SEQ ID NO: 691673 - protein, 15 aa, Homo sapiens
  CDR3 for alpha chain variable domain of TCR clone 345837 (TRAV29/DV5, TRAJ29)
CAASERSSGNTPLVF

SEQ ID NO: 691674 - protein, 18 aa, Homo sapiens
  CDR3 for beta chain variable domain of TCR clone 345837 (TRBV25-1, TRBJ1-2)
CASSGLQNGQGLIFGYTF

SEQ ID NO: 691675 - protein, 14 aa, Homo sapiens
  CDR3 for alpha chain variable domain of TCR clone 345838 (TRAV8-1, TRAJ23)
CAVGAYNQGGKLIF

SEQ ID NO: 691676 - protein, 15 aa, Homo sapiens
  CDR3 for beta chain variable domain of TCR clone 345838 (TRBV2, TRBJ2-1)
CASSELAGGYNEQFF

SEQ ID NO: 691677 - protein, 12 aa, Homo sapiens
  CDR3 for alpha chain variable domain of TCR clone 345839 (TRAV38-1, TRAJ20)
CACIWNDYKLSF

SEQ ID NO: 691678 - protein, 14 aa, Homo sapiens
  CDR3 for beta chain variable domain of TCR clone 345839 (TRBV19, TRBJ2-1)
CASSMGSGATEQFF

SEQ ID NO: 691679 - protein, 14 aa, Homo sapiens
  CDR3 for alpha chain variable domain of TCR clone 345840 (TRAV14/DV4, TRAJ15)
CAMRRDQAGTALIF

SEQ ID NO: 691680 - protein, 15 aa, Homo sapiens
  CDR3 for beta chain variable domain of TCR clone 345840 (TRBV11-3, TRBJ2-5)
CASSDTSGGIETQYF

SEQ ID NO: 691681 - protein, 12 aa, Homo sapiens
  CDR3 for alpha chain variable domain of TCR clone 345841 (TRAV12-2, TRAJ44)
CADTGTASKLTF

SEQ ID NO: 691682 - protein, 17 aa, Homo sapiens
  CDR3 for beta chain variable domain of TCR clone 345841 (TRBV20-1, TRBJ1-1)
CSARRTGGSYGNTGAFF

SEQ ID NO: 691683 - protein, 18 aa, Homo sapiens
  CDR3 for alpha chain variable domain of TCR clone 345842 (TRAV35, TRAJ52)
CAGLLRYPGGTSYGNLTF

SEQ ID NO: 691684 - protein, 15 aa, Homo sapiens
  CDR3 for beta chain variable domain of TCR clone 345842 (TRBV27, TRBJ2-1)
CASSNGGGSSNEQFF

SEQ ID NO: 691685 - protein, 21 aa, Homo sapiens
  CDR3 for alpha chain variable domain of TCR clone 345843 (TRAV25, TRAJ3)
TASQTTDVGTFAYSSASKIIF

SEQ ID NO: 691686 - protein, 14 aa, Homo sapiens
  CDR3 for beta chain variable domain of TCR clone 345843 (TRBV5-1, TRBJ2-7)
CASSATGGYDEQYF

SEQ ID NO: 691687 - protein, 15 aa, Homo sapiens
  CDR3 for alpha chain variable domain of TCR clone 345844 (TRAV8-2, TRAJ15)
CVVTMGNQAGTALIF

SEQ ID NO: 691688 - protein, 12 aa, Homo sapiens
  CDR3 for beta chain variable domain of TCR clone 345844 (TRBV6-1, TRBJ2-7)
CASRDYSYEQYF

SEQ ID NO: 691689 - protein, 14 aa, Homo sapiens
  CDR3 for alpha chain variable domain of TCR clone 345845 (TRAV2, TRAJ9)
CAVVDRSGGFNTIF

SEQ ID NO: 691690 - protein, 13 aa, Homo sapiens
  CDR3 for beta chain variable domain of TCR clone 345845 (TRBV19, TRBJ1-2)
CASSPGTGVGYAF

SEQ ID NO: 691691 - protein, 20 aa, Homo sapiens
  CDR3 for alpha chain variable domain of TCR clone 345846 (TRAV25, TRAJ21)
TATQTTDVGTYPLSFNKFYF

SEQ ID NO: 691692 - protein, 15 aa, Homo sapiens
  CDR3 for beta chain variable domain of TCR clone 345846 (TRBV3-1, TRBJ2-5)
CASSANLGGPETQYF

SEQ ID NO: 691693 - protein, 13 aa, Homo sapiens
  CDR3 for alpha chain variable domain of TCR clone 345847 (TRAV13-2, TRAJ48)
CAEMDFGNEKLTV

SEQ ID NO: 691694 - protein, 13 aa, Homo sapiens
  CDR3 for beta chain variable domain of TCR clone 345847 (TRBV13, TRBJ2-5)
CASSPEVGETQYF

SEQ ID NO: 691695 - protein, 14 aa, Homo sapiens
  CDR3 for alpha chain variable domain of TCR clone 345848 (TRAV1-2, TRAJ8)
CAVREDTGFQKLVF

SEQ ID NO: 691696 - protein, 12 aa, Homo sapiens
  CDR3 for beta chain variable domain of TCR clone 345848 (TRBV12-4, TRBJ1-2)
CASIGTGHGYTF

SEQ ID NO: 691697 - protein, 15 aa, Homo sapiens
  CDR3 for alpha chain variable domain of TCR clone 345849 (TRAV2, TRAJ24)
CAVVRLKNSWGKLQF

SEQ ID NO: 691698 - protein, 16 aa, Homo sapiens
  CDR3 for beta chain variable domain of TCR clone 345849 (TRBV7-7, TRBJ2-3)
CASSPGTCGSTDTQYF

SEQ ID NO: 691699 - protein, 14 aa, Homo sapiens
  CDR3 for alpha chain variable domain of TCR clone 345850 (TRAV12-2, TRAJ40)
CAVKIPSGTYKYIF

SEQ ID NO: 691700 - protein, 14 aa, Homo sapiens
  CDR3 for beta chain variable domain of TCR clone 345850 (TRBV20-1, TRBJ1-1)
CSARTLIGGTEAFF

SEQ ID NO: 691701 - protein, 11 aa, Homo sapiens
  CDR3 for alpha chain variable domain of TCR clone 345851 (TRAV3, TRAJ21)
CAVGNFNKFYF

SEQ ID NO: 691702 - protein, 15 aa, Homo sapiens
  CDR3 for beta chain variable domain of TCR clone 345851 (TRBV20-1, TRBJ2-7)
WSARDRVSGMDEQYF

SEQ ID NO: 691703 - protein, 13 aa, Homo sapiens
  CDR3 for alpha chain variable domain of TCR clone 345852 (TRAV20, TRAJ42)
CAVQGGSQGNLIF

SEQ ID NO: 691704 - protein, 14 aa, Homo sapiens
  CDR3 for beta chain variable domain of TCR clone 345852 (TRBV7-2, TRBJ2-7)
CASRSQGAAYEQYF

SEQ ID NO: 691705 - protein, 14 aa, Homo sapiens
  CDR3 for alpha chain variable domain of TCR clone 345853 (TRAV26-1, TRAJ21)
SIVRPPYNFNKFYF

SEQ ID NO: 691706 - protein, 16 aa, Homo sapiens
  CDR3 for beta chain variable domain of TCR clone 345853 (TRBV7-3, TRBJ2-2)
CASSLKRGTLSGELFF

SEQ ID NO: 691707 - protein, 13 aa, Homo sapiens
  CDR3 for alpha chain variable domain of TCR clone 345854 (TRAV3, TRAJ21)
CAGREPDFNKFYF

SEQ ID NO: 691708 - protein, 18 aa, Homo sapiens
  CDR3 for beta chain variable domain of TCR clone 345854 (TRBV20-1, TRBJ2-6)
CSAETTPTHGSGANVLTF

SEQ ID NO: 691709 - protein, 15 aa, Homo sapiens
  CDR3 for alpha chain variable domain of TCR clone 345855 (TRAV26-1, TRAJ29)
CIVRVEGSGNIPLVF

SEQ ID NO: 691710 - protein, 14 aa, Homo sapiens
  CDR3 for beta chain variable domain of TCR clone 345855 (TRBV25-1, TRBJ1-1)
CASTHLGGNTEAFF

SEQ ID NO: 691711 - protein, 13 aa, Homo sapiens
  CDR3 for alpha chain variable domain of TCR clone 345856 (TRAV3, TRAJ20)
CAVRDTPRYKLSF

SEQ ID NO: 691712 - protein, 16 aa, Homo sapiens
  CDR3 for beta chain variable domain of TCR clone 345856 (TRBV20-1, TRBJ2-7)
CSARAPGLALSYEQYV

SEQ ID NO: 691713 - protein, 14 aa, Homo sapiens
  CDR3 for alpha chain variable domain of TCR clone 345857 (TRAV12-2, TRAJ13)
CAVKKTGGYQKVTF

SEQ ID NO: 691714 - protein, 18 aa, Homo sapiens
  CDR3 for beta chain variable domain of TCR clone 345857 (TRBV7-3, TRBJ2-3)
CASSTTGTYPGSTDTQYF

SEQ ID NO: 691715 - protein, 13 aa, Homo sapiens
  CDR3 for alpha chain variable domain of TCR clone 345858 (TRAV29/DV5, TRAJ47)
CAASAEYGNKLVF

SEQ ID NO: 691716 - protein, 13 aa, Homo sapiens
  CDR3 for beta chain variable domain of TCR clone 345858 (TRBV7-2, TRBJ1-6)
CASSLKFDSPLHF

SEQ ID NO: 691717 - protein, 12 aa, Homo sapiens
  CDR3 for alpha chain variable domain of TCR clone 345859 (TRAV3, TRAJ34)
CAVLGNTDKLIF

SEQ ID NO: 691718 - protein, 14 aa, Homo sapiens
  CDR3 for beta chain variable domain of TCR clone 345859 (TRBV6-3, TRBJ1-1)
CASRYTGESTEAFF

SEQ ID NO: 691719 - protein, 14 aa, Homo sapiens
  CDR3 for alpha chain variable domain of TCR clone 345860 (TRAV26-1, TRAJ5)
CIVRVRFNRRALTF

SEQ ID NO: 691720 - protein, 14 aa, Homo sapiens
  CDR3 for beta chain variable domain of TCR clone 345860 (TRBV6-5, TRBJ2-7)
CASSPHRGLREQYF

SEQ ID NO: 691721 - protein, 14 aa, Homo sapiens
  CDR3 for alpha chain variable domain of TCR clone 345861 (TRAV12-2, TRAJ40)
CAVKILSGTYKYIF

SEQ ID NO: 691722 - protein, 13 aa, Homo sapiens
  CDR3 for beta chain variable domain of TCR clone 345861 (TRBV20-1, TRBJ1-3)
CSARVQWRDTIYF

SEQ ID NO: 691723 - protein, 16 aa, Homo sapiens
  CDR3 for alpha chain variable domain of TCR clone 345862 (TRAV14/DV4, TRAJ21)
CAMREGPENNFNKCYF

SEQ ID NO: 691724 - protein, 12 aa, Homo sapiens
  CDR3 for beta chain variable domain of TCR clone 345862 (TRBV29-1, TRBJ2-2)
CSVDKYTGELFF

SEQ ID NO: 691725 - protein, 14 aa, Homo sapiens
  CDR3 for alpha chain variable domain of TCR clone 345863 (TRAV12-2, TRAJ40)
CAAKNPSGTYKYIF

SEQ ID NO: 691726 - protein, 14 aa, Homo sapiens
  CDR3 for beta chain variable domain of TCR clone 345863 (TRBV20-1, TRBJ1-1)
CSAQTRIGGTEAFF

SEQ ID NO: 691727 - protein, 11 aa, Homo sapiens
  CDR3 for alpha chain variable domain of TCR clone 345864 (TRAV3, TRAJ21)
CAVGNFNKFYF

SEQ ID NO: 691728 - protein, 14 aa, Homo sapiens
  CDR3 for beta chain variable domain of TCR clone 345864 (TRBV7-8, TRBJ2-3)
CASSSRDSTDTQYF

SEQ ID NO: 691729 - protein, 14 aa, Homo sapiens
  CDR3 for alpha chain variable domain of TCR clone 345865 (TRAV8-3, TRAJ7)
CAAIELCGNNRLAF

SEQ ID NO: 691730 - protein, 15 aa, Homo sapiens
  CDR3 for beta chain variable domain of TCR clone 345865 (TRBV3-1, TRBJ2-1)
CASSTGDTNYNEQFF

SEQ ID NO: 691731 - protein, 14 aa, Homo sapiens
  CDR3 for alpha chain variable domain of TCR clone 345866 (TRAV12-1, TRAJ9)
CVVTGYTGGFKTIF

SEQ ID NO: 691732 - protein, 16 aa, Homo sapiens
  CDR3 for beta chain variable domain of TCR clone 345866 (TRBV2, TRBJ2-7)
CASSEPWTGPSYEQYF

SEQ ID NO: 691733 - protein, 13 aa, Homo sapiens
  CDR3 for alpha chain variable domain of TCR clone 345867 (TRAV16, TRAJ26)
CITVLCLGQNFVF

SEQ ID NO: 691734 - protein, 12 aa, Homo sapiens
  CDR3 for beta chain variable domain of TCR clone 345867 (TRBV11-2, TRBJ2-1)
CASSPGINEQFF

SEQ ID NO: 691735 - protein, 14 aa, Homo sapiens
  CDR3 for alpha chain variable domain of TCR clone 345868 (TRAV8-2, TRAJ4)
CVVSPSGGYNKLIF

SEQ ID NO: 691736 - protein, 15 aa, Homo sapiens
  CDR3 for beta chain variable domain of TCR clone 345868 (TRBV4-1, TRAJ18)
CASSDTGGTNEKLFF

SEQ ID NO: 691737 - protein, 16 aa, Homo sapiens
  CDR3 for alpha chain variable domain of TCR clone 345869 (TRAV30, TRAJ24)
CGREIVDADGWGKFQF

SEQ ID NO: 691738 - protein, 16 aa, Homo sapiens
  CDR3 for beta chain variable domain of TCR clone 345869 (TRBV4-1, TRBJ2-7)
CASSQEGTASSYEQYF

SEQ ID NO: 691739 - protein, 13 aa, Homo sapiens
  CDR3 for alpha chain variable domain of TCR clone 345870 (TRAV8-3, TRAJ36)
CAVGATWPNNLFF

SEQ ID NO: 691740 - protein, 15 aa, Homo sapiens
  CDR3 for beta chain variable domain of TCR clone 345870 (TRBV7-2, TRBJ1-2)
CASSPRAGWNYGYTF

SEQ ID NO: 691741 - protein, 15 aa, Homo sapiens
  CDR3 for alpha chain variable domain of TCR clone 345871 (TRAV26-1, TRAJ22)
CIVRVSFWFCKATDL

SEQ ID NO: 691742 - protein, 13 aa, Homo sapiens
  CDR3 for beta chain variable domain of TCR clone 345871 (TRBV18, TRBJ1-1)
CASSGGRNTEAFF

SEQ ID NO: 691743 - protein, 13 aa, Homo sapiens
  CDR3 for alpha chain variable domain of TCR clone 345872 (TRAV3, TRAJ20)
CAVRDGGDYKLSF

SEQ ID NO: 691744 - protein, 16 aa, Homo sapiens
  CDR3 for beta chain variable domain of TCR clone 345872 (TRBV4-1, TRBJ2-5)
CASSQTRGGPLETQYF

SEQ ID NO: 691745 - protein, 12 aa, Homo sapiens
  CDR3 for alpha chain variable domain of TCR clone 345873 (TRAV13-1, TRAJ21)
CAAKEGFNKFYF

SEQ ID NO: 691746 - protein, 14 aa, Homo sapiens
  CDR3 for beta chain variable domain of TCR clone 345873 (TRBV5-1, TRBJ2-7)
CASSRGEALYEQYF

SEQ ID NO: 691747 - protein, 15 aa, Homo sapiens
  CDR3 for alpha chain variable domain of TCR clone 345874 (TRAV3, TRAJ22)
CAVRDRGGSARQLTF

SEQ ID NO: 691748 - protein, 13 aa, Homo sapiens
  CDR3 for beta chain variable domain of TCR clone 345874 (TRBV2, TRBJ2-2)
CASSEEVTGELFF

SEQ ID NO: 691749 - protein, 12 aa, Homo sapiens
  CDR3 for alpha chain variable domain of TCR clone 345875 (TRAV3, TRAJ7)
CADLLWEQQTRF

SEQ ID NO: 691750 - protein, 13 aa, Homo sapiens
  CDR3 for beta chain variable domain of TCR clone 345875 (TRBV7-3, TRBJ2-5)
CASSFRWGETQYF

SEQ ID NO: 691751 - protein, 13 aa, Homo sapiens
  CDR3 for alpha chain variable domain of TCR clone 345876 (TRAV36/DV7, TRAJ49)
CAVEANTGNQFYF

SEQ ID NO: 691752 - protein, 13 aa, Homo sapiens
  CDR3 for beta chain variable domain of TCR clone 345876 (TRBV10-3, TRBJ2-7)
CASTLAVNYEQYF

SEQ ID NO: 691753 - protein, 18 aa, Homo sapiens
  CDR3 for alpha chain variable domain of TCR clone 345877 (TRAV12-3, TRAJ52)
CAMSVGGAGGTSYGKLTF

SEQ ID NO: 691754 - protein, 13 aa, Homo sapiens
  CDR3 for beta chain variable domain of TCR clone 345877 (TRBV11-2, TRBJ2-5)
CASSRGPSETQYF

SEQ ID NO: 691755 - protein, 15 aa, Homo sapiens
  CDR3 for alpha chain variable domain of TCR clone 345878 (TRAV13-1, TRAJ15)
CAASIGRQAGTALIF

SEQ ID NO: 691756 - protein, 13 aa, Homo sapiens
  CDR3 for beta chain variable domain of TCR clone 345878 (TRBV5-1, TRBJ2-7)
CASSATGGNEQYF

SEQ ID NO: 691757 - protein, 14 aa, Homo sapiens
  CDR3 for alpha chain variable domain of TCR clone 345879 (TRAV2, TRAJ20)
CAVEDVVNDYKLSF

SEQ ID NO: 691758 - protein, 13 aa, Homo sapiens
  CDR3 for beta chain variable domain of TCR clone 345879 (TRBV10-3, TRBJ2-7)
CASKLAVNYEQYF

SEQ ID NO: 691759 - protein, 13 aa, Homo sapiens
  CDR3 for alpha chain variable domain of TCR clone 345880 (TRAV21, TRAJ27)
CAARRVNAGKSTF

SEQ ID NO: 691760 - protein, 14 aa, Homo sapiens
  CDR3 for beta chain variable domain of TCR clone 345880 (TRBV7-6, TRBJ2-3)
CASSLGTVTDTQYF

SEQ ID NO: 691761 - protein, 13 aa, Homo sapiens
  CDR3 for alpha chain variable domain of TCR clone 345881 (TRAV12-3, TRAJ7)
CAMTPYENNRLAF

SEQ ID NO: 691762 - protein, 11 aa, Homo sapiens
  CDR3 for beta chain variable domain of TCR clone 345881 (TRBV19, TRBJ1-1)
CASSIGSEAFF

SEQ ID NO: 691763 - protein, 13 aa, Homo sapiens
  CDR3 for alpha chain variable domain of TCR clone 345882 (TRAV8-4, TRAJ30)
CAVSVNRDDKIIV

SEQ ID NO: 691764 - protein, 15 aa, Homo sapiens
  CDR3 for beta chain variable domain of TCR clone 345882 (TRBV5-1, TRBJ2-7)
CASSLNGGPAREQYF

SEQ ID NO: 691765 - protein, 11 aa, Homo sapiens
  CDR3 for alpha chain variable domain of TCR clone 345883 (TRAV2, TRAJ13)
CASGGYQKVTF

SEQ ID NO: 691766 - protein, 20 aa, Homo sapiens
  CDR3 for beta chain variable domain of TCR clone 345883 (TRBV6-1, TRBJ2-5)
CASSETLTGERRPSTSGQAR

SEQ ID NO: 691767 - protein, 16 aa, Homo sapiens
  CDR3 for alpha chain variable domain of TCR clone 345884 (TRAV16, TRAJ52)
CALSAAGGTSYGKLTF

SEQ ID NO: 691768 - protein, 13 aa, Homo sapiens
  CDR3 for beta chain variable domain of TCR clone 345884 (TRBV3-1, TRBJ1-5)
CASSQFGDPPQHF

SEQ ID NO: 691769 - protein, 13 aa, Homo sapiens
  CDR3 for alpha chain variable domain of TCR clone 345885 (TRAV27, TRAJ45)
CRSSGGGADGLTF

SEQ ID NO: 691770 - protein, 14 aa, Homo sapiens
  CDR3 for beta chain variable domain of TCR clone 345885 (TRBV7-9, TRBJ2-1)
CAISSMVGFGEQFF

SEQ ID NO: 691771 - protein, 13 aa, Homo sapiens
  CDR3 for alpha chain variable domain of TCR clone 345886 (TRAV3, TRAJ27)
CAVRPLGAGKSTF

SEQ ID NO: 691772 - protein, 15 aa, Homo sapiens
  CDR3 for beta chain variable domain of TCR clone 345886 (TRBV12-4, TRBJ2-5)
CASSGTGQAQETQYF

SEQ ID NO: 691773 - protein, 14 aa, Homo sapiens
  CDR3 for alpha chain variable domain of TCR clone 345887 (TRAV12-2, TRAJ13)
CAVKKTGGDQKVTF

SEQ ID NO: 691774 - protein, 14 aa, Homo sapiens
  CDR3 for beta chain variable domain of TCR clone 345887 (TRBV12-5, TRBJ2-5)
CASGSRTHQETQYF

SEQ ID NO: 691775 - protein, 15 aa, Homo sapiens
  CDR3 for alpha chain variable domain of TCR clone 345888 (TRAV26-1, TRAJ29)
CIVRVEGSGNTALVF

SEQ ID NO: 691776 - protein, 15 aa, Homo sapiens
  CDR3 for beta chain variable domain of TCR clone 345888 (TRBV7-9, TRBJ1-5)
CASSQGHQPNQTQHF

SEQ ID NO: 691777 - protein, 14 aa, Homo sapiens
  CDR3 for alpha chain variable domain of TCR clone 345889 (TRAV12-1, TRAJ8)
CVVNSNTGFQKLVF

SEQ ID NO: 691778 - protein, 17 aa, Homo sapiens
  CDR3 for beta chain variable domain of TCR clone 345889 (TRBV7-8, TRBJ2-6)
CASSAGTGGVGANVLTF

SEQ ID NO: 691779 - protein, 12 aa, Homo sapiens
  CDR3 for alpha chain variable domain of TCR clone 345890 (TRAV21, TRAJ11)
CAATSGYSTLTF

SEQ ID NO: 691780 - protein, 14 aa, Homo sapiens
  CDR3 for beta chain variable domain of TCR clone 345890 (TRBV20-1, TRBJ2-7)
CSAPELAGIGEQYF

SEQ ID NO: 691781 - protein, 14 aa, Homo sapiens
  CDR3 for alpha chain variable domain of TCR clone 345891 (TRAV12-3, TRAJ10)
SHLPLTGGGNKLTF

SEQ ID NO: 691782 - protein, 13 aa, Homo sapiens
  CDR3 for beta chain variable domain of TCR clone 345891 (TRBV11-2, TRBJ2-2)
CASGRDREEELFF

SEQ ID NO: 691783 - protein, 13 aa, Homo sapiens
  CDR3 for alpha chain variable domain of TCR clone 345892 (TRAV27, TRAJ42)
CAGARGSQGNLIF

SEQ ID NO: 691784 - protein, 16 aa, Homo sapiens
  CDR3 for beta chain variable domain of TCR clone 345892 (TRBV29-1, TRBJ2-7)
CSVEVVGTSGSYEQYF

SEQ ID NO: 691785 - protein, 13 aa, Homo sapiens
  CDR3 for alpha chain variable domain of TCR clone 345893 (TRAV3, TRAJ21)
CAVREPDFNKFYF

SEQ ID NO: 691786 - protein, 15 aa, Homo sapiens
  CDR3 for beta chain variable domain of TCR clone 345893 (TRBV7-2, TRBJ2-7)
CASSSGLAGRREQYF

SEQ ID NO: 691787 - protein, 13 aa, Homo sapiens
  CDR3 for alpha chain variable domain of TCR clone 345894 (TRAV17, TRAJ5)
CAPMDTGRRALTF

SEQ ID NO: 691788 - protein, 16 aa, Homo sapiens
  CDR3 for beta chain variable domain of TCR clone 345894 (TRBV12-4, TRBJ2-3)
CDSSFPSNTNTDTQYF

SEQ ID NO: 691789 - protein, 13 aa, Homo sapiens
  CDR3 for alpha chain variable domain of TCR clone 345895 (TRAV13-1, TRAJ5)
CAASDTGRPALTF

SEQ ID NO: 691790 - protein, 12 aa, Homo sapiens
  CDR3 for beta chain variable domain of TCR clone 345895 (TRBV28, TRBJ2-3)
CASSLYRDTQYF

SEQ ID NO: 691791 - protein, 20 aa, Homo sapiens
  CDR3 for alpha chain variable domain of TCR clone 345896 (TRAV12-1, TRAJ42)
SSVIQPPTSVTGGSQGNLIF

SEQ ID NO: 691792 - protein, 17 aa, Homo sapiens
  CDR3 for beta chain variable domain of TCR clone 345896 (TRBV3-1, TRBJ2-2)
CASSQDSQGPNTGELFF

SEQ ID NO: 691793 - protein, 16 aa, Homo sapiens
  CDR3 for alpha chain variable domain of TCR clone 345897 (TRAV17, TRAJ22)
CATGPISSGSARQLTF

SEQ ID NO: 691794 - protein, 14 aa, Homo sapiens
  CDR3 for beta chain variable domain of TCR clone 345897 (TRBV11-3, TRBJ2-1)
CASSATTSGSIQFF

SEQ ID NO: 691795 - protein, 18 aa, Homo sapiens
  CDR3 for alpha chain variable domain of TCR clone 345898 (TRAV9-2, TRAJ52)
CALRVPAPGGTSYGKLTF

SEQ ID NO: 691796 - protein, 15 aa, Homo sapiens
  CDR3 for beta chain variable domain of TCR clone 345898 (TRBV6-3, TRBJ2-7)
CASSSPGTVFYEQYF

SEQ ID NO: 691797 - protein, 14 aa, Homo sapiens
  CDR3 for alpha chain variable domain of TCR clone 345899 (TRAV1-2, TRAJ16)
CAVNRFSDGQKLLF

SEQ ID NO: 691798 - protein, 14 aa, Homo sapiens
  CDR3 for beta chain variable domain of TCR clone 345899 (TRBV27, TRBJ2-1)
CAGSIAETYNEQFF

SEQ ID NO: 691799 - protein, 15 aa, Homo sapiens
  CDR3 for alpha chain variable domain of TCR clone 345900 (TRAV3, TRAJ20)
CAVRDIKLSDYNLSF

SEQ ID NO: 691800 - protein, 14 aa, Homo sapiens
  CDR3 for beta chain variable domain of TCR clone 345900 (TRBV11-2, TRBJ2-5)
CASSRTGGIETQYF

SEQ ID NO: 691801 - protein, 14 aa, Homo sapiens
  CDR3 for alpha chain variable domain of TCR clone 345901 (TRAV1-2, TRAJ33)
CAVRAPDSNYQLIW

SEQ ID NO: 691802 - protein, 15 aa, Homo sapiens
  CDR3 for beta chain variable domain of TCR clone 345901 (TRBV4-1, TRBJ2-1)
CASSQVLAGGDEQFF

SEQ ID NO: 691803 - protein, 12 aa, Homo sapiens
  CDR3 for alpha chain variable domain of TCR clone 345902 (TRAV27, TRAJ36)
CAGMTGANNIFF

SEQ ID NO: 691804 - protein, 14 aa, Homo sapiens
  CDR3 for beta chain variable domain of TCR clone 345902 (TRBV12-4, TRBJ2-3)
CASSLVPSTDTQYF

SEQ ID NO: 691805 - protein, 14 aa, Homo sapiens
  CDR3 for alpha chain variable domain of TCR clone 345903 (TRAV17, TRAJ57)
CATDPQGGSEKPVF

SEQ ID NO: 691806 - protein, 14 aa, Homo sapiens
  CDR3 for beta chain variable domain of TCR clone 345903 (TRBV20-1, TRBJ2-1)
CSAQIGGSANEQFF

SEQ ID NO: 691807 - protein, 14 aa, Homo sapiens
  CDR3 for alpha chain variable domain of TCR clone 345904 (TRAV12-2, TRAJ44)
CAVNPAGTASKLTF

SEQ ID NO: 691808 - protein, 16 aa, Homo sapiens
  CDR3 for beta chain variable domain of TCR clone 345904 (TRBV2, TRBJ2-6)
CASSAVGGAGANVLTF

SEQ ID NO: 691809 - protein, 10 aa, Homo sapiens
  CDR3 for alpha chain variable domain of TCR clone 345905 (TRAV36/DV7, TRAJ48)
CAVGNEKLTF

SEQ ID NO: 691810 - protein, 13 aa, Homo sapiens
  CDR3 for beta chain variable domain of TCR clone 345905 (TRBV27, TRBJ1-1)
CASSLSIGAEAFF

SEQ ID NO: 691811 - protein, 12 aa, Homo sapiens
  CDR3 for alpha chain variable domain of TCR clone 345906 (TRAV13-2, TRAJ23)
CAERHRGGKIIF

SEQ ID NO: 691812 - protein, 16 aa, Homo sapiens
  CDR3 for beta chain variable domain of TCR clone 345906 (TRBV27, TRBJ2-2)
CASSLSGFWVTGELFF

SEQ ID NO: 691813 - protein, 11 aa, Homo sapiens
  CDR3 for alpha chain variable domain of TCR clone 345907 (TRAV26-1, TRAJ37)
CIVRVGRKLIS

SEQ ID NO: 691814 - protein, 15 aa, Homo sapiens
  CDR3 for beta chain variable domain of TCR clone 345907 (TRBV19, TRBJ2-7)
CASSIGLAVSYEQYF

SEQ ID NO: 691815 - protein, 11 aa, Homo sapiens
  CDR3 for alpha chain variable domain of TCR clone 345908 (TRAV2, TRAJ21)
CAVFNFNKFYF

SEQ ID NO: 691816 - protein, 14 aa, Homo sapiens
  CDR3 for beta chain variable domain of TCR clone 345908 (TRBV15, TRBJ2-3)
CATRSGTSTDTPYF

SEQ ID NO: 691817 - protein, 16 aa, Homo sapiens
  CDR3 for alpha chain variable domain of TCR clone 345909 (TRAV27, TRAJ34)
CAGGGLGDYNTDKLIF

SEQ ID NO: 691818 - protein, 15 aa, Homo sapiens
  CDR3 for beta chain variable domain of TCR clone 345909 (TRBV9, TRBJ1-4)
CASSVGGSTNENLFF

SEQ ID NO: 691819 - protein, 17 aa, Homo sapiens
  CDR3 for alpha chain variable domain of TCR clone 345910 (TRAV29/DV5, TRAJ45)
CAADGPFSGGGADGLTF

SEQ ID NO: 691820 - protein, 18 aa, Homo sapiens
  CDR3 for beta chain variable domain of TCR clone 345910 (TRBV11-2, TRBJ2-3)
CASSLGGASRGAPNTQYF

SEQ ID NO: 691821 - protein, 14 aa, Homo sapiens
  CDR3 for alpha chain variable domain of TCR clone 345911 (TRAV17, TRAJ6)
CATNPAGGSYIPTF

SEQ ID NO: 691822 - protein, 13 aa, Homo sapiens
  CDR3 for beta chain variable domain of TCR clone 345911 (TRBV7-2, TRBJ2-2)
CASSSVRAGELFF

SEQ ID NO: 691823 - protein, 19 aa, Homo sapiens
  CDR3 for alpha chain variable domain of TCR clone 345912 (TRAV1-2, TRAJ18)
CLLPLCLGGRGSTLGRLYF

SEQ ID NO: 691824 - protein, 14 aa, Homo sapiens
  CDR3 for beta chain variable domain of TCR clone 345912 (TRBV4-3, TRBJ2-7)
CASSQDVAGGEQYF

SEQ ID NO: 691825 - protein, 18 aa, Homo sapiens
  CDR3 for alpha chain variable domain of TCR clone 345913 (TRAV8-3, TRAJ4)
WVRDPTSNDPGGYNKLIF

SEQ ID NO: 691826 - protein, 16 aa, Homo sapiens
  CDR3 for beta chain variable domain of TCR clone 345913 (TRBV12-5, TRBJ2-5)
CASGPRTSGNQETQYF

SEQ ID NO: 691827 - protein, 15 aa, Homo sapiens
  CDR3 for alpha chain variable domain of TCR clone 345914 (TRAV12-2, TRAJ53)
CAVNGEGGSNYKLAF

SEQ ID NO: 691828 - protein, 15 aa, Homo sapiens
  CDR3 for beta chain variable domain of TCR clone 345914 (TRBV20-1, TRBJ2-7)
CSARDRVSGTDEQYF

SEQ ID NO: 691829 - protein, 11 aa, Homo sapiens
  CDR3 for alpha chain variable domain of TCR clone 345915 (TRAV2, TRAJ13)
CASGGYQKVTF

SEQ ID NO: 691830 - protein, 13 aa, Homo sapiens
  CDR3 for beta chain variable domain of TCR clone 345915 (TRBV20-1, TRBJ1-1)
CSARVGGNTEAFF

SEQ ID NO: 691831 - protein, 16 aa, Homo sapiens
  CDR3 for alpha chain variable domain of TCR clone 345916 (TRAV3, TRAJ28)
CAVLPRSGAVSYQLTF

SEQ ID NO: 691832 - protein, 14 aa, Homo sapiens
  CDR3 for beta chain variable domain of TCR clone 345916 (TRBV19, TRBJ2-1)
CASPTFVLSGEQFF

SEQ ID NO: 691833 - protein, 15 aa, Homo sapiens
  CDR3 for alpha chain variable domain of TCR clone 345917 (TRAV12-1, TRAJ44)
CVVDTPQRTASKLTF

SEQ ID NO: 691834 - protein, 13 aa, Homo sapiens
  CDR3 for beta chain variable domain of TCR clone 345917 (TRBV27, TRBJ2-1)
CASSSGSYNEQFF

SEQ ID NO: 691835 - protein, 14 aa, Homo sapiens
  CDR3 for alpha chain variable domain of TCR clone 345918 (TRAV12-2, TRAJ45)
CAVNIVGGADGLTF

SEQ ID NO: 691836 - protein, 17 aa, Homo sapiens
  CDR3 for beta chain variable domain of TCR clone 345918 (TRBV20-1, TRBJ2-2)
CSASGSGQGGLTGELFF

SEQ ID NO: 691837 - protein, 11 aa, Homo sapiens
  CDR3 for alpha chain variable domain of TCR clone 345919 (TRAV23/DV6, TRAJ11)
CAVGGYSTLTF

SEQ ID NO: 691838 - protein, 15 aa, Homo sapiens
  CDR3 for beta chain variable domain of TCR clone 345919 (TRBV7-8, TRBJ2-5)
CASSFQSGGEETQYF

SEQ ID NO: 691839 - protein, 16 aa, Homo sapiens
  CDR3 for alpha chain variable domain of TCR clone 345920 (TRAV4, TRAJ22)
CLVGDLYSGSARQLTF

SEQ ID NO: 691840 - protein, 15 aa, Homo sapiens
  CDR3 for beta chain variable domain of TCR clone 345920 (TRBV7-6, TRBJ2-1)
CASSSLAGEGNEQFF

SEQ ID NO: 691841 - protein, 14 aa, Homo sapiens
  CDR3 for alpha chain variable domain of TCR clone 345921 (TRAV2, TRAJ9)
CAVEDRGGGFKTIF

SEQ ID NO: 691842 - protein, 17 aa, Homo sapiens
  CDR3 for beta chain variable domain of TCR clone 345921 (TRBV4-1, TRBJ2-5)
CASSSRSGSGGQETQYF

SEQ ID NO: 691843 - protein, 15 aa, Homo sapiens
  CDR3 for alpha chain variable domain of TCR clone 345922 (TRAV12-1, TRAJ36)
CVVNEHQTGANHLFF

SEQ ID NO: 691844 - protein, 12 aa, Homo sapiens
  CDR3 for beta chain variable domain of TCR clone 345922 (TRBV29-1, TRBJ2-3)
CSVTGGADTQYF

SEQ ID NO: 691845 - protein, 14 aa, Homo sapiens
  CDR3 for alpha chain variable domain of TCR clone 345923 (TRAV1-2, TRAJ8)
CAVREDTGFQKLVF

SEQ ID NO: 691846 - protein, 16 aa, Homo sapiens
  CDR3 for beta chain variable domain of TCR clone 345923 (TRBV4-2, TRBJ2-1)
CASSQETATPYNEQFF

SEQ ID NO: 691847 - protein, 12 aa, Homo sapiens
  CDR3 for alpha chain variable domain of TCR clone 345924 (TRAV4, TRAJ26)
CLVGDYGQNFVF

SEQ ID NO: 691848 - protein, 12 aa, Homo sapiens
  CDR3 for beta chain variable domain of TCR clone 345924 (TRBV7-9, TRBJ2-7)
CASSIKREEQYF

SEQ ID NO: 691849 - protein, 14 aa, Homo sapiens
  CDR3 for alpha chain variable domain of TCR clone 345925 (TRAV17, TRAJ22)
CATVLSGSARQLSF

SEQ ID NO: 691850 - protein, 14 aa, Homo sapiens
  CDR3 for beta chain variable domain of TCR clone 345925 (TRBV12-4, TRBJ2-5)
CASSFGDRGETQYF

SEQ ID NO: 691851 - protein, 13 aa, Homo sapiens
  CDR3 for alpha chain variable domain of TCR clone 345926 (TRAV12-1, TRAJ40)
CVVPTSGTYKYII

SEQ ID NO: 691852 - protein, 18 aa, Homo sapiens
  CDR3 for beta chain variable domain of TCR clone 345926 (TRBV7-6, TRBJ2-1)
CASSPRTSGMSSYNEQFF

SEQ ID NO: 691853 - protein, 13 aa, Homo sapiens
  CDR3 for alpha chain variable domain of TCR clone 345927 (TRAV1-1, TRAJ9)
CAAKNTGGFKTIF

SEQ ID NO: 691854 - protein, 15 aa, Homo sapiens
  CDR3 for beta chain variable domain of TCR clone 345927 (TRBV5-1, TRBJ2-1)
CASTVSGRTYNEQFF

SEQ ID NO: 691855 - protein, 16 aa, Homo sapiens
  CDR3 for alpha chain variable domain of TCR clone 345928 (TRAV13-1, TRAJ48)
CAASIFGNFGNEKLTF

SEQ ID NO: 691856 - protein, 15 aa, Homo sapiens
  CDR3 for beta chain variable domain of TCR clone 345928 (TRBV2, TRBJ2-1)
CATQARLVMIGEQFF

SEQ ID NO: 691857 - protein, 14 aa, Homo sapiens
  CDR3 for alpha chain variable domain of TCR clone 345929 (TRAV34, TRAJ44)
CGADGTGTARKLTF

SEQ ID NO: 691858 - protein, 17 aa, Homo sapiens
  CDR3 for beta chain variable domain of TCR clone 345929 (TRBV11-2, TRBJ2-1)
CASSLYPPGVEYNEQFF

SEQ ID NO: 691859 - protein, 22 aa, Homo sapiens
  CDR3 for alpha chain variable domain of TCR clone 345930 (TRAV13-2, )
CAEILSIPDIQNPDPAVYQLID

SEQ ID NO: 691860 - protein, 11 aa, Homo sapiens
  CDR3 for beta chain variable domain of TCR clone 345930 (TRBV20-1, TRBJ2-7)
CSARLSYEQYF

SEQ ID NO: 691861 - protein, 15 aa, Homo sapiens
  CDR3 for alpha chain variable domain of TCR clone 345931 (TRAV26-1, TRAJ29)
CIVRVEGSGNTPLVF

SEQ ID NO: 691862 - protein, 15 aa, Homo sapiens
  CDR3 for beta chain variable domain of TCR clone 345931 (TRBV18, TRBJ2-1)
CASLPDRGRDNEQFF

SEQ ID NO: 691863 - protein, 12 aa, Homo sapiens
  CDR3 for alpha chain variable domain of TCR clone 345932 (TRAV1-1, TRAJ9)
CAVDTGGFKTIF

SEQ ID NO: 691864 - protein, 15 aa, Homo sapiens
  CDR3 for beta chain variable domain of TCR clone 345932 (TRBV7-2, TRBJ2-7)
CASSLAVGQVYEQYF

SEQ ID NO: 691865 - protein, 14 aa, Homo sapiens
  CDR3 for alpha chain variable domain of TCR clone 345933 (TRAV35, TRAJ23)
CWQRGYNQGGKLIF

SEQ ID NO: 691866 - protein, 16 aa, Homo sapiens
  CDR3 for beta chain variable domain of TCR clone 345933 (TRBV27, TRBJ2-1)
CASSSRQAGNYNEQFF

SEQ ID NO: 691867 - protein, 12 aa, Homo sapiens
  CDR3 for alpha chain variable domain of TCR clone 345934 (TRAV12-3, TRAJ17)
CAMTLTGNKLTF

SEQ ID NO: 691868 - protein, 15 aa, Homo sapiens
  CDR3 for beta chain variable domain of TCR clone 345934 (TRBV20-1, TRBJ2-7)
CSARDRVAGMDGQYF

SEQ ID NO: 691869 - protein, 14 aa, Homo sapiens
  CDR3 for alpha chain variable domain of TCR clone 345935 (TRAV12-2, TRAJ17)
CAMLFKAAGNKLTF

SEQ ID NO: 691870 - protein, 12 aa, Homo sapiens
  CDR3 for beta chain variable domain of TCR clone 345935 (TRBV11-2, TRBJ2-2)
CASSLGGGELFF

SEQ ID NO: 691871 - protein, 13 aa, Homo sapiens
  CDR3 for alpha chain variable domain of TCR clone 345936 (TRAV12-1, TRAJ21)
CVVTLYNFNQFYF

SEQ ID NO: 691872 - protein, 20 aa, Homo sapiens
  CDR3 for beta chain variable domain of TCR clone 345936 (TRBV7-8, TRBJ2-1)
CASSLAHRLAGVRSYNEQFF

SEQ ID NO: 691873 - protein, 14 aa, Homo sapiens
  CDR3 for alpha chain variable domain of TCR clone 345937 (TRAV2, TRAJ9)
CAVEDRSGGFKTIF

SEQ ID NO: 691874 - protein, 14 aa, Homo sapiens
  CDR3 for beta chain variable domain of TCR clone 345937 (TRBV7-9, TRBJ2-7)
CASSPSWGQNEQYF

SEQ ID NO: 691875 - protein, 16 aa, Homo sapiens
  CDR3 for alpha chain variable domain of TCR clone 345938 (TRAV30, TRAJ24)
CGTEIVDADSWGKFPF

SEQ ID NO: 691876 - protein, 15 aa, Homo sapiens
  CDR3 for beta chain variable domain of TCR clone 345938 (TRBV12-4, TRBJ2-7)
CASSQRTSGNYEQYF

SEQ ID NO: 691877 - protein, 16 aa, Homo sapiens
  CDR3 for alpha chain variable domain of TCR clone 345939 (TRAV20, TRAJ10)
CAVLRGLTGGGNKLTF

SEQ ID NO: 691878 - protein, 15 aa, Homo sapiens
  CDR3 for beta chain variable domain of TCR clone 345939 (TRBV10-1, TRBJ2-3)
CASSATSGGFDTQYF

SEQ ID NO: 691879 - protein, 14 aa, Homo sapiens
  CDR3 for alpha chain variable domain of TCR clone 345940 (TRAV20, TRAJ42)
CSVQAGRSQGNLIF

SEQ ID NO: 691880 - protein, 14 aa, Homo sapiens
  CDR3 for beta chain variable domain of TCR clone 345940 (TRBV28, TRBJ1-2)
CASRIQGANYGYTF

SEQ ID NO: 691881 - protein, 16 aa, Homo sapiens
  CDR3 for alpha chain variable domain of TCR clone 345941 (TRAV16, TRAJ52)
CALCAAGGTSYGKLTF

SEQ ID NO: 691882 - protein, 17 aa, Homo sapiens
  CDR3 for beta chain variable domain of TCR clone 345941 (TRBV11-2, TRBJ2-1)
CASSLYPPGVEYNEQFF

SEQ ID NO: 691883 - protein, 15 aa, Homo sapiens
  CDR3 for alpha chain variable domain of TCR clone 345942 (TRAV23/DV6, TRAJ18)
CAARYRGSTLGRLYF

SEQ ID NO: 691884 - protein, 15 aa, Homo sapiens
  CDR3 for beta chain variable domain of TCR clone 345942 (TRBV5-1, TRBJ2-2)
CASSSQGGNTGELFF

SEQ ID NO: 691885 - protein, 10 aa, Homo sapiens
  CDR3 for alpha chain variable domain of TCR clone 345943 (TRAV12-1, TRAJ43)
CVVHNNDMRF

SEQ ID NO: 691886 - protein, 15 aa, Homo sapiens
  CDR3 for beta chain variable domain of TCR clone 345943 (TRBV18, TRBJ2-7)
CASSPLQGRTYEQYF

SEQ ID NO: 691887 - protein, 13 aa, Homo sapiens
  CDR3 for alpha chain variable domain of TCR clone 345944 (TRAV8-3, TRAJ43)
CAVGLDNNNDMRF

SEQ ID NO: 691888 - protein, 13 aa, Homo sapiens
  CDR3 for beta chain variable domain of TCR clone 345944 (TRBV29-1, TRBJ2-1)
CSVEGGGVNEQFF

SEQ ID NO: 691889 - protein, 13 aa, Homo sapiens
  CDR3 for alpha chain variable domain of TCR clone 345945 (TRAV27, TRAJ41)
CAGEGNSGNALNF

SEQ ID NO: 691890 - protein, 14 aa, Homo sapiens
  CDR3 for beta chain variable domain of TCR clone 345945 (TRBV7-2, TRBJ2-5)
CASSPRGSSETQYF

SEQ ID NO: 691891 - protein, 16 aa, Homo sapiens
  CDR3 for alpha chain variable domain of TCR clone 345946 (TRAV3, TRAJ37)
CAVRVRGSGNTGKLMF

SEQ ID NO: 691892 - protein, 13 aa, Homo sapiens
  CDR3 for beta chain variable domain of TCR clone 345946 (TRBV7-9, TRBJ1-2)
CASSLKQNYGYTF

SEQ ID NO: 691893 - protein, 12 aa, Homo sapiens
  CDR3 for alpha chain variable domain of TCR clone 345947 (TRAV12-2, TRAJ10)
WEVTGGGNKLTF

SEQ ID NO: 691894 - protein, 16 aa, Homo sapiens
  CDR3 for beta chain variable domain of TCR clone 345947 (TRBV6-4, TRBJ1-2)
CASSEAVGDPNYGYTF

SEQ ID NO: 691895 - protein, 13 aa, Homo sapiens
  CDR3 for alpha chain variable domain of TCR clone 345948 (TRAV21, TRAJ20)
CAVGLRVDYKLSF

SEQ ID NO: 691896 - protein, 15 aa, Homo sapiens
  CDR3 for beta chain variable domain of TCR clone 345948 (TRBV11-2, TRBJ1-6)
CASSLDPWAVSPLHF

SEQ ID NO: 691897 - protein, 16 aa, Homo sapiens
  CDR3 for alpha chain variable domain of TCR clone 345949 (TRAV8-3, TRAJ10)
CAVGPILTGGGNKRTL

SEQ ID NO: 691898 - protein, 16 aa, Homo sapiens
  CDR3 for beta chain variable domain of TCR clone 345949 (TRBV7-2, TRBJ2-5)
CASSSKWLSGQETQYF

SEQ ID NO: 691899 - protein, 14 aa, Homo sapiens
  CDR3 for alpha chain variable domain of TCR clone 345950 (TRAV12-1, TRAJ9)
CVVNRGTGGFKTIF

SEQ ID NO: 691900 - protein, 16 aa, Homo sapiens
  CDR3 for beta chain variable domain of TCR clone 345950 (TRBV13, TRBJ2-2)
CASSPRTGEHTGELFF

SEQ ID NO: 691901 - protein, 14 aa, Homo sapiens
  CDR3 for alpha chain variable domain of TCR clone 345951 (TRAV1-2, TRAJ16)
CAVNRFSDGQKLVF

SEQ ID NO: 691902 - protein, 16 aa, Homo sapiens
  CDR3 for beta chain variable domain of TCR clone 345951 (TRBV9, TRBJ2-1)
CASSVGGGGNYNEQFS

SEQ ID NO: 691903 - protein, 13 aa, Homo sapiens
  CDR3 for alpha chain variable domain of TCR clone 345952 (TRAV12-2, TRAJ18)
CAVRGSNLGRLYF

SEQ ID NO: 691904 - protein, 20 aa, Homo sapiens
  CDR3 for beta chain variable domain of TCR clone 345952 (TRBV7-8, TRBJ2-2)
CASSHLFPGPTIHITGELFF

SEQ ID NO: 691905 - protein, 14 aa, Homo sapiens
  CDR3 for alpha chain variable domain of TCR clone 345953 (TRAV8-3, TRAJ16)
CAVDRFSDGQKLLF

SEQ ID NO: 691906 - protein, 13 aa, Homo sapiens
  CDR3 for beta chain variable domain of TCR clone 345953 (TRBV7-9, TRBJ1-2)
CASSLKQNYGYTF

SEQ ID NO: 691907 - protein, 15 aa, Homo sapiens
  CDR3 for alpha chain variable domain of TCR clone 345954 (TRAV21, TRAJ22)
CAVRLFFWFCKATYL

SEQ ID NO: 691908 - protein, 14 aa, Homo sapiens
  CDR3 for beta chain variable domain of TCR clone 345954 (TRBV19, TRBJ1-5)
CASRAPDSFLSQHF

SEQ ID NO: 691909 - protein, 13 aa, Homo sapiens
  CDR3 for alpha chain variable domain of TCR clone 345955 (TRAV12-2, TRAJ18)
CAVRGSTLGRLYF

SEQ ID NO: 691910 - protein, 17 aa, Homo sapiens
  CDR3 for beta chain variable domain of TCR clone 345955 (TRBV25-1, TRBJ2-7)
CASSDARVVFSSYEQYF

SEQ ID NO: 691911 - protein, 14 aa, Homo sapiens
  CDR3 for alpha chain variable domain of TCR clone 345956 (TRAV2, TRAJ37)
CAVDFTSNTGKLIF

SEQ ID NO: 691912 - protein, 13 aa, Homo sapiens
  CDR3 for beta chain variable domain of TCR clone 345956 (TRBV20-1, TRBJ1-1)
CSAPLGGGTEVFF

SEQ ID NO: 691913 - protein, 14 aa, Homo sapiens
  CDR3 for alpha chain variable domain of TCR clone 345957 (TRAV38-1, TRAJ11)
CAFMKHEGYSTLTF

SEQ ID NO: 691914 - protein, 15 aa, Homo sapiens
  CDR3 for beta chain variable domain of TCR clone 345957 (TRBV7-9, TRBJ2-7)
CASSPGGGLTYEQYF

SEQ ID NO: 691915 - protein, 18 aa, Homo sapiens
  CDR3 for alpha chain variable domain of TCR clone 345958 (TRAV26-2, TRAJ54)
CILRDVEVGIQEAQKLGF

SEQ ID NO: 691916 - protein, 16 aa, Homo sapiens
  CDR3 for beta chain variable domain of TCR clone 345958 (TRBV6-1, TRBJ2-5)
CASSETLDRGAETQYF

SEQ ID NO: 691917 - protein, 13 aa, Homo sapiens
  CDR3 for alpha chain variable domain of TCR clone 345959 (TRAV13-1, TRAJ5)
CAASDTGRRALTF

SEQ ID NO: 691918 - protein, 16 aa, Homo sapiens
  CDR3 for beta chain variable domain of TCR clone 345959 (TRBV12-5, TRBJ2-5)
CASGPRTSGNQETQFF

SEQ ID NO: 691919 - protein, 13 aa, Homo sapiens
  CDR3 for alpha chain variable domain of TCR clone 345960 (TRAV30, TRAJ24)
CGTVNDSWGKLQF

SEQ ID NO: 691920 - protein, 14 aa, Homo sapiens
  CDR3 for beta chain variable domain of TCR clone 345960 (TRBV6-3, TRBJ2-2)
CASTYTPDTGELFF

SEQ ID NO: 691921 - protein, 13 aa, Homo sapiens
  CDR3 for alpha chain variable domain of TCR clone 345961 (TRAV2, TRAJ15)
CAVASQAGTALIF

SEQ ID NO: 691922 - protein, 15 aa, Homo sapiens
  CDR3 for beta chain variable domain of TCR clone 345961 (TRBV11-2, TRBJ2-1)
CASSPAGQSLNEQFF

SEQ ID NO: 691923 - protein, 15 aa, Homo sapiens
  CDR3 for alpha chain variable domain of TCR clone 345962 (TRAV29/DV5, TRAJ42)
CAAKTDGGSKGNLIF

SEQ ID NO: 691924 - protein, 12 aa, Homo sapiens
  CDR3 for beta chain variable domain of TCR clone 345962 (TRBV11-2, TRBJ2-2)
CASSLGGGELFF

SEQ ID NO: 691925 - protein, 15 aa, Homo sapiens
  CDR3 for alpha chain variable domain of TCR clone 345963 (TRAV3, TRAJ22)
CAVRDRGGSARQLTF

SEQ ID NO: 691926 - protein, 14 aa, Homo sapiens
  CDR3 for beta chain variable domain of TCR clone 345963 (TRBV18, TRBJ2-7)
CASSPRGGAYEQYF

SEQ ID NO: 691927 - protein, 14 aa, Homo sapiens
  CDR3 for alpha chain variable domain of TCR clone 345964 (TRAV35, TRAJ33)
CWPRGRDSNYQLIW

SEQ ID NO: 691928 - protein, 14 aa, Homo sapiens
  CDR3 for beta chain variable domain of TCR clone 345964 (TRBV7-2, TRBJ2-7)
CASSLYPGRYEQYF

SEQ ID NO: 691929 - protein, 15 aa, Homo sapiens
  CDR3 for alpha chain variable domain of TCR clone 345965 (TRAV1-2, TRAJ15)
CAVDVMGSAGTALTF

SEQ ID NO: 691930 - protein, 13 aa, Homo sapiens
  CDR3 for beta chain variable domain of TCR clone 345965 (TRBV7-2, TRBJ2-5)
CASSQTSVETQYF

SEQ ID NO: 691931 - protein, 12 aa, Homo sapiens
  CDR3 for alpha chain variable domain of TCR clone 345966 (TRAV8-4, TRAJ43)
CAVSVNNNDMRF

SEQ ID NO: 691932 - protein, 14 aa, Homo sapiens
  CDR3 for beta chain variable domain of TCR clone 345966 (TRBV11-2, TRBJ1-2)
CASSLGTANYGETF

SEQ ID NO: 691933 - protein, 13 aa, Homo sapiens
  CDR3 for alpha chain variable domain of TCR clone 345967 (TRAV12-2, TRAJ9)
CAGGNTGCFKTIF

SEQ ID NO: 691934 - protein, 17 aa, Homo sapiens
  CDR3 for beta chain variable domain of TCR clone 345967 (TRBV4-1, TRBJ2-1)
CASSQGRGGGLYNEQFF

SEQ ID NO: 691935 - protein, 17 aa, Homo sapiens
  CDR3 for alpha chain variable domain of TCR clone 345968 (TRAV26-1, TRAJ37)
CIVRVITVSSNTGKLIF

SEQ ID NO: 691936 - protein, 16 aa, Homo sapiens
  CDR3 for beta chain variable domain of TCR clone 345968 (TRBV9, TRBJ2-1)
CASSVGGGGNYNEQFF

SEQ ID NO: 691937 - protein, 14 aa, Homo sapiens
  CDR3 for alpha chain variable domain of TCR clone 345969 (TRAV8-1, TRAJ49)
CASSIANTGNQFYF

SEQ ID NO: 691938 - protein, 14 aa, Homo sapiens
  CDR3 for beta chain variable domain of TCR clone 345969 (TRBV2, TRBJ2-1)
CASRTGSSYNEQFF

SEQ ID NO: 691939 - protein, 15 aa, Homo sapiens
  CDR3 for alpha chain variable domain of TCR clone 345970 (TRAV3, TRAJ27)
CAVRAGGHQCRQINL

SEQ ID NO: 691940 - protein, 15 aa, Homo sapiens
  CDR3 for beta chain variable domain of TCR clone 345970 (TRBV10-3, TRBJ2-3)
CAISLTSGGTDTQYF

SEQ ID NO: 691941 - protein, 12 aa, Homo sapiens
  CDR3 for alpha chain variable domain of TCR clone 345971 (TRAV3, TRAJ43)
GAVRDPNNDMRF

SEQ ID NO: 691942 - protein, 15 aa, Homo sapiens
  CDR3 for beta chain variable domain of TCR clone 345971 (TRBV27, TRBJ1-5)
CASSLGTGFDQPQHF

SEQ ID NO: 691943 - protein, 17 aa, Homo sapiens
  CDR3 for alpha chain variable domain of TCR clone 345972 (TRAV13-1, TRAJ31)
CAPRDKLMFGDGTQLVV

SEQ ID NO: 691944 - protein, 14 aa, Homo sapiens
  CDR3 for beta chain variable domain of TCR clone 345972 (TRBV7-9, TRBJ1-1)
CASSLGGANTEAFF

SEQ ID NO: 691945 - protein, 13 aa, Homo sapiens
  CDR3 for alpha chain variable domain of TCR clone 345973 (TRAV12-1, TRAJ6)
WVVFPGGSYIPTF

SEQ ID NO: 691946 - protein, 12 aa, Homo sapiens
  CDR3 for beta chain variable domain of TCR clone 345973 (TRBV11-2, TRBJ2-2)
CASSLGGGELFF

SEQ ID NO: 691947 - protein, 13 aa, Homo sapiens
  CDR3 for alpha chain variable domain of TCR clone 345974 (TRAV12-2, TRAJ10)
CSVPTGGGNKLTF

SEQ ID NO: 691948 - protein, 11 aa, Homo sapiens
  CDR3 for beta chain variable domain of TCR clone 345974 (TRBV6-1, TRBJ2-1)
CASISSNEQFF

SEQ ID NO: 691949 - protein, 15 aa, Homo sapiens
  CDR3 for alpha chain variable domain of TCR clone 345975 (TRAV12-2, TRAJ53)
CALNTGGGSNYKLTF

SEQ ID NO: 691950 - protein, 15 aa, Homo sapiens
  CDR3 for beta chain variable domain of TCR clone 345975 (TRBV5-1, TRBJ2-5)
CASSLGLGEIKTQYF

SEQ ID NO: 691951 - protein, 12 aa, Homo sapiens
  CDR3 for alpha chain variable domain of TCR clone 345976 (TRAV1-2, TRAJ33)
CAALDSNYQLIW

SEQ ID NO: 691952 - protein, 14 aa, Homo sapiens
  CDR3 for beta chain variable domain of TCR clone 345976 (TRBV7-9, TRBJ1-2)
CASSSNRGGDGYTF

SEQ ID NO: 691953 - protein, 16 aa, Homo sapiens
  CDR3 for alpha chain variable domain of TCR clone 345977 (TRAV12-2, TRAJ32)
CAVNLGQAGATNKLIF

SEQ ID NO: 691954 - protein, 15 aa, Homo sapiens
  CDR3 for beta chain variable domain of TCR clone 345977 (TRBV20-1, TRBJ2-7)
CSARGPLAGGREQYF

SEQ ID NO: 691955 - protein, 10 aa, Homo sapiens
  CDR3 for alpha chain variable domain of TCR clone 345978 (TRAV38-2/DV8, TRAJ40)
CASGTYKYIF

SEQ ID NO: 691956 - protein, 14 aa, Homo sapiens
  CDR3 for beta chain variable domain of TCR clone 345978 (TRBV7-9, TRBJ2-1)
CASSPRDSLYERFF

SEQ ID NO: 691957 - protein, 14 aa, Homo sapiens
  CDR3 for alpha chain variable domain of TCR clone 345979 (TRAV17, TRAJ31)
CATVLRNNNARLMF

SEQ ID NO: 691958 - protein, 14 aa, Homo sapiens
  CDR3 for beta chain variable domain of TCR clone 345979 (TRBV12-4, TRBJ2-5)
CASSLWQKQETQYI

SEQ ID NO: 691959 - protein, 14 aa, Homo sapiens
  CDR3 for alpha chain variable domain of TCR clone 345980 (TRAV17, TRAJ15)
CATDRGQAGTALIF

SEQ ID NO: 691960 - protein, 15 aa, Homo sapiens
  CDR3 for beta chain variable domain of TCR clone 345980 (TRBV7-2, TRBJ2-3)
CASSLAGAFIDTQYF

SEQ ID NO: 691961 - protein, 18 aa, Homo sapiens
  CDR3 for alpha chain variable domain of TCR clone 345981 (TRAV26-2, TRAJ45)
CIRRVDKYSGGGADGLTF

SEQ ID NO: 691962 - protein, 16 aa, Homo sapiens
  CDR3 for beta chain variable domain of TCR clone 345981 (TRBV2, TRBJ1-4)
CASNLLQGATNEKLFF

SEQ ID NO: 691963 - protein, 13 aa, Homo sapiens
  CDR3 for alpha chain variable domain of TCR clone 345982 (TRAV39, TRAJ33)
YAANPDSNYQLIW

SEQ ID NO: 691964 - protein, 13 aa, Homo sapiens
  CDR3 for beta chain variable domain of TCR clone 345982 (TRBV18, TRBJ1-1)
CASSGGRNTEAFF

SEQ ID NO: 691965 - protein, 13 aa, Homo sapiens
  CDR3 for alpha chain variable domain of TCR clone 345983 (TRAV12-2, TRAJ15)
CAVFNQAGTDLIF

SEQ ID NO: 691966 - protein, 15 aa, Homo sapiens
  CDR3 for beta chain variable domain of TCR clone 345983 (TRBV7-8, TRBJ1-5)
CASSRGGGADQPQHF

SEQ ID NO: 691967 - protein, 16 aa, Homo sapiens
  CDR3 for alpha chain variable domain of TCR clone 345984 (TRAV30, TRAJ24)
CGTEIVDADSWGKFQF

SEQ ID NO: 691968 - protein, 15 aa, Homo sapiens
  CDR3 for beta chain variable domain of TCR clone 345984 (TRBV25-1, TRBJ2-5)
CASSDTRGYQETQYF

SEQ ID NO: 691969 - protein, 13 aa, Homo sapiens
  CDR3 for alpha chain variable domain of TCR clone 345985 (TRAV12-3, TRAJ41)
CAIAPNSGYALNF

SEQ ID NO: 691970 - protein, 14 aa, Homo sapiens
  CDR3 for beta chain variable domain of TCR clone 345985 (TRBV7-2, TRBJ1-3)
CSSSLGTAGNTIYF

SEQ ID NO: 691971 - protein, 12 aa, Homo sapiens
  CDR3 for alpha chain variable domain of TCR clone 345986 (TRAV17, TRAJ57)
CSTDGGSEKPVF

SEQ ID NO: 691972 - protein, 13 aa, Homo sapiens
  CDR3 for beta chain variable domain of TCR clone 345986 (TRBV7-9, TRBJ2-7)
CASSFAGAYEQYF

SEQ ID NO: 691973 - protein, 14 aa, Homo sapiens
  CDR3 for alpha chain variable domain of TCR clone 345987 (TRAV12-2, TRAJ9)
CAVNALEGGFKTIF

SEQ ID NO: 691974 - protein, 15 aa, Homo sapiens
  CDR3 for beta chain variable domain of TCR clone 345987 (TRBV28, TRBJ2-4)
CAAGSGTLLMGIQYF

SEQ ID NO: 691975 - protein, 15 aa, Homo sapiens
  CDR3 for alpha chain variable domain of TCR clone 345988 (TRAV1-1, TRAJ24)
CALSGGTDSRGKFQF

SEQ ID NO: 691976 - protein, 16 aa, Homo sapiens
  CDR3 for beta chain variable domain of TCR clone 345988 (TRBV2, TRBJ2-7)
CASSEPWTGPSYEQYF

SEQ ID NO: 691977 - protein, 14 aa, Homo sapiens
  CDR3 for alpha chain variable domain of TCR clone 345989 (TRAV2, TRAJ9)
CAVEDRSGGFKTNF

SEQ ID NO: 691978 - protein, 15 aa, Homo sapiens
  CDR3 for beta chain variable domain of TCR clone 345989 (TRBV18, TRBJ1-1)
CASSPSSWVNTEAFF

SEQ ID NO: 691979 - protein, 16 aa, Homo sapiens
  CDR3 for alpha chain variable domain of TCR clone 345990 (TRAV12-2, TRAJ40)
CAVIRGGTSGTYKYIF

SEQ ID NO: 691980 - protein, 14 aa, Homo sapiens
  CDR3 for beta chain variable domain of TCR clone 345990 (TRBV20-1, TRBJ2-5)
CSARDGRAWETQYF

SEQ ID NO: 691981 - protein, 11 aa, Homo sapiens
  CDR3 for alpha chain variable domain of TCR clone 345991 (TRAV1-1, TRAJ23)
CAVRRGGKLIF

SEQ ID NO: 691982 - protein, 15 aa, Homo sapiens
  CDR3 for beta chain variable domain of TCR clone 345991 (TRBV20-1, TRBJ1-1)
CSASRGVTGNTEAFF

SEQ ID NO: 691983 - protein, 15 aa, Homo sapiens
  CDR3 for alpha chain variable domain of TCR clone 345992 (TRAV3, TRAJ32)
CAVSSYGGATNKLIF

SEQ ID NO: 691984 - protein, 16 aa, Homo sapiens
  CDR3 for beta chain variable domain of TCR clone 345992 (TRBV5-1, TRBJ2-5)
CASSLSLAGAQETQYC

SEQ ID NO: 691985 - protein, 15 aa, Homo sapiens
  CDR3 for alpha chain variable domain of TCR clone 345993 (TRAV8-3, TRAJ27)
CAVGPSKTNAGKSTF

SEQ ID NO: 691986 - protein, 15 aa, Homo sapiens
  CDR3 for beta chain variable domain of TCR clone 345993 (TRBV9, TRBJ1-6)
CASSVAGTGDSPLHF

SEQ ID NO: 691987 - protein, 18 aa, Homo sapiens
  CDR3 for alpha chain variable domain of TCR clone 345994 (TRAV12-3, TRAJ52)
CAMSVGGAGGTSYGKLTF

SEQ ID NO: 691988 - protein, 15 aa, Homo sapiens
  CDR3 for beta chain variable domain of TCR clone 345994 (TRBV10-2, TRBJ2-6)
CASSEQGTGANVLTF

SEQ ID NO: 691989 - protein, 16 aa, Homo sapiens
  CDR3 for alpha chain variable domain of TCR clone 345995 (TRAV3, TRAJ40)
CAVRDRIASGTYKYIF

SEQ ID NO: 691990 - protein, 16 aa, Homo sapiens
  CDR3 for beta chain variable domain of TCR clone 345995 (TRBV6-1, TRBJ1-2)
CSSSEANSIINYGYTF

SEQ ID NO: 691991 - protein, 15 aa, Homo sapiens
  CDR3 for alpha chain variable domain of TCR clone 345996 (TRAV29/DV5, TRAJ29)
CAASERSSGNTPLVF

SEQ ID NO: 691992 - protein, 17 aa, Homo sapiens
  CDR3 for beta chain variable domain of TCR clone 345996 (TRBV4-1, TRBJ1-4)
CASSQEGPRGVEEQLFF

SEQ ID NO: 691993 - protein, 17 aa, Homo sapiens
  CDR3 for alpha chain variable domain of TCR clone 345997 (TRAV13-1, TRAJ31)
CAPRDRLMFGDGTQLAA

SEQ ID NO: 691994 - protein, 12 aa, Homo sapiens
  CDR3 for beta chain variable domain of TCR clone 345997 (TRBV7-9, TRBJ2-7)
CASSLEGYEQYF

SEQ ID NO: 691995 - protein, 14 aa, Homo sapiens
  CDR3 for alpha chain variable domain of TCR clone 345998 (TRAV26-1, TRAJ45)
CTVREGGGADGLTF

SEQ ID NO: 691996 - protein, 14 aa, Homo sapiens
  CDR3 for beta chain variable domain of TCR clone 345998 (TRBV2, TRBJ1-2)
CASNEGTGPYGYTF

SEQ ID NO: 691997 - protein, 16 aa, Homo sapiens
  CDR3 for alpha chain variable domain of TCR clone 345999 (TRAV3, TRAJ21)
CAVRDIERGNFNKFYF

SEQ ID NO: 691998 - protein, 14 aa, Homo sapiens
  CDR3 for beta chain variable domain of TCR clone 345999 (TRBV11-2, TRBJ2-7)
CASSLGAGAYEQYF

SEQ ID NO: 691999 - protein, 16 aa, Homo sapiens
  CDR3 for alpha chain variable domain of TCR clone 346000 (TRAV1-2, TRAJ10)
CAVRGVLTGGGNKLTF

SEQ ID NO: 692000 - protein, 13 aa, Homo sapiens
  CDR3 for beta chain variable domain of TCR clone 346000 (TRBV7-9, TRBJ1-2)
CASRLKQNYGYTF

SEQ ID NO: 692001 - protein, 14 aa, Homo sapiens
  CDR3 for alpha chain variable domain of TCR clone 346001 (TRAV12-3, TRAJ5)
CAMSTYTGRRALTF

SEQ ID NO: 692002 - protein, 14 aa, Homo sapiens
  CDR3 for beta chain variable domain of TCR clone 346001 (TRBV4-1, TRBJ2-2)
CASSQAVNTGELFF

SEQ ID NO: 692003 - protein, 17 aa, Homo sapiens
  CDR3 for alpha chain variable domain of TCR clone 346002 (TRAV3, TRAJ6)
CAVRDGPRAGGSDIPTF

SEQ ID NO: 692004 - protein, 14 aa, Homo sapiens
  CDR3 for beta chain variable domain of TCR clone 346002 (TRBV7-2, TRBJ2-7)
CASSPKTIFYEQYF

SEQ ID NO: 692005 - protein, 14 aa, Homo sapiens
  CDR3 for alpha chain variable domain of TCR clone 346003 (TRAV12-1, TRAJ30)
CVVNTGGRDDKIIF

SEQ ID NO: 692006 - protein, 14 aa, Homo sapiens
  CDR3 for beta chain variable domain of TCR clone 346003 (TRBV7-6, TRBJ2-3)
CASSLGTVTDTQYF

SEQ ID NO: 692007 - protein, 14 aa, Homo sapiens
  CDR3 for alpha chain variable domain of TCR clone 346004 (TRAV3, TRAJ36)
CAVRDRTGANNPFF

SEQ ID NO: 692008 - protein, 16 aa, Homo sapiens
  CDR3 for beta chain variable domain of TCR clone 346004 (TRBV20-1, TRBJ2-6)
CSAREGPGVGANVLAF

SEQ ID NO: 692009 - protein, 13 aa, Homo sapiens
  CDR3 for alpha chain variable domain of TCR clone 346005 (TRAV27, TRAJ41)
CAGEGNSGYALNF

SEQ ID NO: 692010 - protein, 16 aa, Homo sapiens
  CDR3 for beta chain variable domain of TCR clone 346005 (TRBV12-5, TRBJ2-5)
CASGPRTSGNKETQYF

SEQ ID NO: 692011 - protein, 15 aa, Homo sapiens
  CDR3 for alpha chain variable domain of TCR clone 346006 (TRAV3, TRAJ9)
CAVRDSNTGGFKTIF

SEQ ID NO: 692012 - protein, 16 aa, Homo sapiens
  CDR3 for beta chain variable domain of TCR clone 346006 (TRBV15, TRBJ2-5)
CATSPATGQGMETQYF

SEQ ID NO: 692013 - protein, 15 aa, Homo sapiens
  CDR3 for alpha chain variable domain of TCR clone 346007 (TRAV2, TRAJ9)
CSVAALNTGGFKTIF

SEQ ID NO: 692014 - protein, 14 aa, Homo sapiens
  CDR3 for beta chain variable domain of TCR clone 346007 (TRBV7-8, TRBJ2-5)
CASSATGGQETQYF

SEQ ID NO: 692015 - protein, 13 aa, Homo sapiens
  CDR3 for alpha chain variable domain of TCR clone 346008 (TRAV8-3, TRAJ28)
CAVGAVGSYQLTF

SEQ ID NO: 692016 - protein, 16 aa, Homo sapiens
  CDR3 for beta chain variable domain of TCR clone 346008 (TRBV19, TRBJ2-1)
CASSKEGPSSYNEQFF

SEQ ID NO: 692017 - protein, 14 aa, Homo sapiens
  CDR3 for alpha chain variable domain of TCR clone 346009 (TRAV12-3, TRAJ54)
CAMRIIRGAQKLVF

SEQ ID NO: 692018 - protein, 16 aa, Homo sapiens
  CDR3 for beta chain variable domain of TCR clone 346009 (TRBV28, TRBJ2-1)
CASRVPASGRIGEQFF

SEQ ID NO: 692019 - protein, 16 aa, Homo sapiens
  CDR3 for alpha chain variable domain of TCR clone 346010 (TRAV12-1, TRAJ28)
CVVIAYSGAGSYQLTF

SEQ ID NO: 692020 - protein, 18 aa, Homo sapiens
  CDR3 for beta chain variable domain of TCR clone 346010 (TRBV20-1, TRBJ2-6)
CSAETTPTHGSGANVLTF

SEQ ID NO: 692021 - protein, 11 aa, Homo sapiens
  CDR3 for alpha chain variable domain of TCR clone 346011 (TRAV1-1, TRAJ23)
CAVRQGGKLIF

SEQ ID NO: 692022 - protein, 17 aa, Homo sapiens
  CDR3 for beta chain variable domain of TCR clone 346011 (TRBV25-1, TRBJ2-1)
CASSAYGQGRGVYEQFF

SEQ ID NO: 692023 - protein, 15 aa, Homo sapiens
  CDR3 for alpha chain variable domain of TCR clone 346012 (TRAV8-4, TRAJ40)
CAVSSITSGTYKDIF

SEQ ID NO: 692024 - protein, 13 aa, Homo sapiens
  CDR3 for beta chain variable domain of TCR clone 346012 (TRBV2, TRBJ2-1)
CATSRGTDNEQFF

SEQ ID NO: 692025 - protein, 14 aa, Homo sapiens
  CDR3 for alpha chain variable domain of TCR clone 346013 (TRAV4, TRAJ22)
CLVVIPGSARQLTF

SEQ ID NO: 692026 - protein, 19 aa, Homo sapiens
  CDR3 for beta chain variable domain of TCR clone 346013 (TRBV5-7, TRBJ2-6)
CASSPRARGTFSGANVLTF

SEQ ID NO: 692027 - protein, 17 aa, Homo sapiens
  CDR3 for alpha chain variable domain of TCR clone 346014 (TRAV12-1, TRAJ42)
CVVMRMNYEGSQGNLIF

SEQ ID NO: 692028 - protein, 13 aa, Homo sapiens
  CDR3 for beta chain variable domain of TCR clone 346014 (TRBV7-2, TRBJ1-1)
CASSLARPAEAFF

SEQ ID NO: 692029 - protein, 14 aa, Homo sapiens
  CDR3 for alpha chain variable domain of TCR clone 346015 (TRAV12-2, TRAJ53)
CAVKGGGSNYKLTF

SEQ ID NO: 692030 - protein, 15 aa, Homo sapiens
  CDR3 for beta chain variable domain of TCR clone 346015 (TRBV13, TRBJ2-1)
CASSLLSGLNNEQFF

SEQ ID NO: 692031 - protein, 12 aa, Homo sapiens
  CDR3 for alpha chain variable domain of TCR clone 346016 (TRAV13-2, TRAJ23)
CAERHRGGKLIF

SEQ ID NO: 692032 - protein, 14 aa, Homo sapiens
  CDR3 for beta chain variable domain of TCR clone 346016 (TRBV19, TRBJ2-1)
SASPTFVLSGEQFF

SEQ ID NO: 692033 - protein, 13 aa, Homo sapiens
  CDR3 for alpha chain variable domain of TCR clone 346017 (TRAV8-3, TRAJ37)
CAVPSSNTGILIF

SEQ ID NO: 692034 - protein, 12 aa, Homo sapiens
  CDR3 for beta chain variable domain of TCR clone 346017 (TRBV11-2, TRBJ2-1)
CASSPGNNEQFF

SEQ ID NO: 692035 - protein, 18 aa, Homo sapiens
  CDR3 for alpha chain variable domain of TCR clone 346018 (TRAV13-1, TRAJ10)
CAASKGRAVTGGGNKLTF

SEQ ID NO: 692036 - protein, 14 aa, Homo sapiens
  CDR3 for beta chain variable domain of TCR clone 346018 (TRBV18, TRBJ2-7)
CASSPRVGAYEQYF

SEQ ID NO: 692037 - protein, 19 aa, Homo sapiens
  CDR3 for alpha chain variable domain of TCR clone 346019 (TRAV3, TRAJ6)
FAVRDRNPSRSGGGYIPTF

SEQ ID NO: 692038 - protein, 15 aa, Homo sapiens
  CDR3 for beta chain variable domain of TCR clone 346019 (TRBV18, TRBJ2-7)
CASSPTFMDSYEQYF

SEQ ID NO: 692039 - protein, 14 aa, Homo sapiens
  CDR3 for alpha chain variable domain of TCR clone 346020 (TRAV12-1, TRAJ39)
CVVSLNNAGNMLTF

SEQ ID NO: 692040 - protein, 14 aa, Homo sapiens
  CDR3 for beta chain variable domain of TCR clone 346020 (TRBV7-9, TRBJ2-3)
CASSLEDGTDTQYF

SEQ ID NO: 692041 - protein, 14 aa, Homo sapiens
  CDR3 for alpha chain variable domain of TCR clone 346021 (TRAV26-1, TRAJ38)
CVADNAGNNRKLIW

SEQ ID NO: 692042 - protein, 13 aa, Homo sapiens
  CDR3 for beta chain variable domain of TCR clone 346021 (TRBV4-1, TRBJ2-7)
CASSQGQAYEQYF

SEQ ID NO: 692043 - protein, 11 aa, Homo sapiens
  CDR3 for alpha chain variable domain of TCR clone 346022 (TRAV23/DV6, TRAJ9)
CAASLSPPNTG

SEQ ID NO: 692044 - protein, 14 aa, Homo sapiens
  CDR3 for beta chain variable domain of TCR clone 346022 (TRBV19, TRBJ2-1)
CASPTFVLSGEQFF

SEQ ID NO: 692045 - protein, 15 aa, Homo sapiens
  CDR3 for alpha chain variable domain of TCR clone 346023 (TRAV21, TRAJ24)
CAARSSTDSWGKLQF

SEQ ID NO: 692046 - protein, 13 aa, Homo sapiens
  CDR3 for beta chain variable domain of TCR clone 346023 (TRBV11-3, TRBJ2-5)
YASSSTGEETQYF

SEQ ID NO: 692047 - protein, 16 aa, Homo sapiens
  CDR3 for alpha chain variable domain of TCR clone 346024 (TRAV3, TRAJ37)
CAVRGKGSGNTGKLIF

SEQ ID NO: 692048 - protein, 12 aa, Homo sapiens
  CDR3 for beta chain variable domain of TCR clone 346024 (TRBV7-2, TRBJ1-2)
CASRDSIYGYTF

SEQ ID NO: 692049 - protein, 13 aa, Homo sapiens
  CDR3 for alpha chain variable domain of TCR clone 346025 (TRAV35, TRAJ43)
CAGYPYNNNDMRF

SEQ ID NO: 692050 - protein, 15 aa, Homo sapiens
  CDR3 for beta chain variable domain of TCR clone 346025 (TRBV25-1, TRBJ1-4)
CASIKRIATNERLFF

SEQ ID NO: 692051 - protein, 13 aa, Homo sapiens
  CDR3 for alpha chain variable domain of TCR clone 346026 (TRAV3, TRAJ15)
CAVRDQAGTALIF

SEQ ID NO: 692052 - protein, 15 aa, Homo sapiens
  CDR3 for beta chain variable domain of TCR clone 346026 (TRBV20-1, TRBJ1-1)
CSASRGVTGNTEAFF

SEQ ID NO: 692053 - protein, 16 aa, Homo sapiens
  CDR3 for alpha chain variable domain of TCR clone 346027 (TRAV3, TRAJ32)
CAVRDTGGGATNKLIF

SEQ ID NO: 692054 - protein, 11 aa, Homo sapiens
  CDR3 for beta chain variable domain of TCR clone 346027 (TRBV12-4, TRBJ2-1)
CASSRLNEQFF

SEQ ID NO: 692055 - protein, 12 aa, Homo sapiens
  CDR3 for alpha chain variable domain of TCR clone 346028 (TRAV8-3, TRAJ26)
CAGDNYGQNFVF

SEQ ID NO: 692056 - protein, 12 aa, Homo sapiens
  CDR3 for beta chain variable domain of TCR clone 346028 (TRBV2, TRBJ2-1)
CAYGPPGNEQFF

SEQ ID NO: 692057 - protein, 13 aa, Homo sapiens
  CDR3 for alpha chain variable domain of TCR clone 346029 (TRAV8-6, TRAJ49)
CAVITNTGNQFYF

SEQ ID NO: 692058 - protein, 14 aa, Homo sapiens
  CDR3 for beta chain variable domain of TCR clone 346029 (TRBV5-1, TRBJ2-7)
FASSRGESLYEQYF

SEQ ID NO: 692059 - protein, 14 aa, Homo sapiens
  CDR3 for alpha chain variable domain of TCR clone 346030 (TRAV26-1, TRAJ38)
CIAYNAGNNRKLIW

SEQ ID NO: 692060 - protein, 17 aa, Homo sapiens
  CDR3 for beta chain variable domain of TCR clone 346030 (TRBV15, TRBJ1-1)
CATSRVGGADGDTEAFF

SEQ ID NO: 692061 - protein, 15 aa, Homo sapiens
  CDR3 for alpha chain variable domain of TCR clone 346031 (TRAV38-2/DV8, TRAJ47)
CAYRSAKGYGNKLVF

SEQ ID NO: 692062 - protein, 15 aa, Homo sapiens
  CDR3 for beta chain variable domain of TCR clone 346031 (TRBV6-6, TRBJ2-7)
CASSYSSGGSYEQYF

SEQ ID NO: 692063 - protein, 12 aa, Homo sapiens
  CDR3 for alpha chain variable domain of TCR clone 346032 (TRAV12-3, TRAJ17)
CAMTLTGNELTF

SEQ ID NO: 692064 - protein, 15 aa, Homo sapiens
  CDR3 for beta chain variable domain of TCR clone 346032 (TRBV7-9, TRBJ1-5)
CASSQGHQPNQPQHF

SEQ ID NO: 692065 - protein, 12 aa, Homo sapiens
  CDR3 for alpha chain variable domain of TCR clone 346033 (TRAV13-1, TRAJ53)
AASGGSNYKLTF

SEQ ID NO: 692066 - protein, 12 aa, Homo sapiens
  CDR3 for beta chain variable domain of TCR clone 346033 (TRBV18, TRBJ1-4)
CAISPSREKLFF

SEQ ID NO: 692067 - protein, 13 aa, Homo sapiens
  CDR3 for alpha chain variable domain of TCR clone 346034 (TRAV27, TRAJ8)
CAGGPTGFQKLVF

SEQ ID NO: 692068 - protein, 12 aa, Homo sapiens
  CDR3 for beta chain variable domain of TCR clone 346034 (TRBV5-5, TRBJ2-5)
CASSYFGETQYF

SEQ ID NO: 692069 - protein, 11 aa, Homo sapiens
  CDR3 for alpha chain variable domain of TCR clone 346035 (TRAV8-3, TRAJ49)
CAVNTGNQFYF

SEQ ID NO: 692070 - protein, 12 aa, Homo sapiens
  CDR3 for beta chain variable domain of TCR clone 346035 (TRBV11-2, TRBJ2-7)
CASSPAADEQYF

SEQ ID NO: 692071 - protein, 11 aa, Homo sapiens
  CDR3 for alpha chain variable domain of TCR clone 346036 (TRAV12-3, TRAJ49)
CAANTGNQFSF

SEQ ID NO: 692072 - protein, 15 aa, Homo sapiens
  CDR3 for beta chain variable domain of TCR clone 346036 (TRBV20-1, TRBJ2-7)
CSARVPAAYFYEQYF

SEQ ID NO: 692073 - protein, 17 aa, Homo sapiens
  CDR3 for alpha chain variable domain of TCR clone 346037 (TRAV3, TRAJ42)
CAVRDRDYGGSQGNLIF

SEQ ID NO: 692074 - protein, 13 aa, Homo sapiens
  CDR3 for beta chain variable domain of TCR clone 346037 (TRBV3-1, TRBJ1-5)
CAITRRDGQPQHF

SEQ ID NO: 692075 - protein, 12 aa, Homo sapiens
  CDR3 for alpha chain variable domain of TCR clone 346038 (TRAV1-2, TRAJ9)
CAGYTGGFKTIF

SEQ ID NO: 692076 - protein, 15 aa, Homo sapiens
  CDR3 for beta chain variable domain of TCR clone 346038 (TRBV11-2, TRBJ2-1)
CASSPVGQSLNEQFF

SEQ ID NO: 692077 - protein, 13 aa, Homo sapiens
  CDR3 for alpha chain variable domain of TCR clone 346039 (TRAV12-3, TRAJ33)
CAMSVNSNYQLIW

SEQ ID NO: 692078 - protein, 17 aa, Homo sapiens
  CDR3 for beta chain variable domain of TCR clone 346039 (TRBV4-1, TRBJ2-5)
CASSSRSGSGGQETQYF

SEQ ID NO: 692079 - protein, 13 aa, Homo sapiens
  CDR3 for alpha chain variable domain of TCR clone 346040 (TRAV8-4, TRAJ30)
CAVSVNRNDKIIF

SEQ ID NO: 692080 - protein, 13 aa, Homo sapiens
  CDR3 for beta chain variable domain of TCR clone 346040 (TRBV3-1, TRBJ2-2)
CASLARGSGELFF

SEQ ID NO: 692081 - protein, 18 aa, Homo sapiens
  CDR3 for alpha chain variable domain of TCR clone 346041 (TRAV21, TRAJ52)
CAVRPSPSGGTSYGKLTF

SEQ ID NO: 692082 - protein, 17 aa, Homo sapiens
  CDR3 for beta chain variable domain of TCR clone 346041 (TRBV13, TRBJ2-3)
CASSISRVAGGRNTQYF

SEQ ID NO: 692083 - protein, 16 aa, Homo sapiens
  CDR3 for alpha chain variable domain of TCR clone 346042 (TRAV13-2, TRAJ37)
CAENIRGSSNTGKLIF

SEQ ID NO: 692084 - protein, 15 aa, Homo sapiens
  CDR3 for beta chain variable domain of TCR clone 346042 (TRBV5-1, TRBJ2-7)
CASSPQGRPLDEQYV

SEQ ID NO: 692085 - protein, 15 aa, Homo sapiens
  CDR3 for alpha chain variable domain of TCR clone 346043 (TRAV20, TRAJ43)
CAVQAGKSSNNEMRF

SEQ ID NO: 692086 - protein, 14 aa, Homo sapiens
  CDR3 for beta chain variable domain of TCR clone 346043 (TRBV12-4, TRBJ1-1)
CASSSARGYTEAFF

SEQ ID NO: 692087 - protein, 15 aa, Homo sapiens
  CDR3 for alpha chain variable domain of TCR clone 346044 (TRAV12-3, TRAJ8)
CAMSLLNTCFQKLVF

SEQ ID NO: 692088 - protein, 15 aa, Homo sapiens
  CDR3 for beta chain variable domain of TCR clone 346044 (TRBV20-1, TRBJ2-7)
CSARDRVSGMDEQYF

SEQ ID NO: 692089 - protein, 15 aa, Homo sapiens
  CDR3 for alpha chain variable domain of TCR clone 346045 (TRAV3, TRAJ9)
CAVRARNTGGFKTIF

SEQ ID NO: 692090 - protein, 11 aa, Homo sapiens
  CDR3 for beta chain variable domain of TCR clone 346045 (TRBV13, TRBJ2-2)
CASSPRTGEHT

SEQ ID NO: 692091 - protein, 15 aa, Homo sapiens
  CDR3 for alpha chain variable domain of TCR clone 346046 (TRAV8-4, TRAJ48)
CALSAAYFGNEKLTF

SEQ ID NO: 692092 - protein, 14 aa, Homo sapiens
  CDR3 for beta chain variable domain of TCR clone 346046 (TRBV25-1, TRBJ1-1)
CASTHLGGNTEAFF

SEQ ID NO: 692093 - protein, 17 aa, Homo sapiens
  CDR3 for alpha chain variable domain of TCR clone 346047 (TRAV36/DV7, TRAJ52)
CAVAQRAGGTSYGKLPF

SEQ ID NO: 692094 - protein, 15 aa, Homo sapiens
  CDR3 for beta chain variable domain of TCR clone 346047 (TRBV28, TRBJ2-1)
CASSIIAGGRSEQFF

SEQ ID NO: 692095 - protein, 11 aa, Homo sapiens
  CDR3 for alpha chain variable domain of TCR clone 346048 (TRAV21, TRAJ11)
CAVNGYSTLTF

SEQ ID NO: 692096 - protein, 17 aa, Homo sapiens
  CDR3 for beta chain variable domain of TCR clone 346048 (TRBV7-3, TRBJ2-3)
CASSLMKRMRGADTQYF

SEQ ID NO: 692097 - protein, 13 aa, Homo sapiens
  CDR3 for alpha chain variable domain of TCR clone 346049 (TRAV13-2, TRAJ40)
CAELISGNYKYIF

SEQ ID NO: 692098 - protein, 14 aa, Homo sapiens
  CDR3 for beta chain variable domain of TCR clone 346049 (TRBV19, TRBJ1-5)
CASGTEVYNQPQHF

SEQ ID NO: 692099 - protein, 16 aa, Homo sapiens
  CDR3 for alpha chain variable domain of TCR clone 346050 (TRAV3, TRAJ10)
CAVRDMNAGGGTKRTF

SEQ ID NO: 692100 - protein, 15 aa, Homo sapiens
  CDR3 for beta chain variable domain of TCR clone 346050 (TRBV20-1, TRBJ2-7)
CSARDRVSGMDEQYF

SEQ ID NO: 692101 - protein, 14 aa, Homo sapiens
  CDR3 for alpha chain variable domain of TCR clone 346051 (TRAV16, TRAJ42)
CALLAGGSHGNLIF

SEQ ID NO: 692102 - protein, 15 aa, Homo sapiens
  CDR3 for beta chain variable domain of TCR clone 346051 (TRBV11-2, TRBJ2-1)
CASSSPSTRYNEQFF

SEQ ID NO: 692103 - protein, 15 aa, Homo sapiens
  CDR3 for alpha chain variable domain of TCR clone 346052 (TRAV4, TRAJ8)
CLVGEQHTGFQKLVF

SEQ ID NO: 692104 - protein, 14 aa, Homo sapiens
  CDR3 for beta chain variable domain of TCR clone 346052 (TRBV7-8, TRBJ1-2)
CASSPDSLSYGYTF

SEQ ID NO: 692105 - protein, 13 aa, Homo sapiens
  CDR3 for alpha chain variable domain of TCR clone 346053 (TRAV39, TRAJ58)
CAGEETSGSRLTF

SEQ ID NO: 692106 - protein, 14 aa, Homo sapiens
  CDR3 for beta chain variable domain of TCR clone 346053 (TRBV7-2, TRBJ2-7)
CASRSQGAAYEQYF

SEQ ID NO: 692107 - protein, 15 aa, Homo sapiens
  CDR3 for alpha chain variable domain of TCR clone 346054 (TRAV26-1, TRAJ29)
CIVRVEGSGNTPLVF

SEQ ID NO: 692108 - protein, 15 aa, Homo sapiens
  CDR3 for beta chain variable domain of TCR clone 346054 (TRBV7-9, TRBJ1-5)
CASSQCHQPNQAQHF

SEQ ID NO: 692109 - protein, 14 aa, Homo sapiens
  CDR3 for alpha chain variable domain of TCR clone 346055 (TRAV8-4, TRAJ13)
CAVTLSGGYQKVTF

SEQ ID NO: 692110 - protein, 14 aa, Homo sapiens
  CDR3 for beta chain variable domain of TCR clone 346055 (TRBV7-2, TRBJ1-2)
CASSQTGSTYGNTF

SEQ ID NO: 692111 - protein, 17 aa, Homo sapiens
  CDR3 for alpha chain variable domain of TCR clone 346056 (TRAV3, TRAJ6)
CAVSRRTDTGGSYIPTF

SEQ ID NO: 692112 - protein, 15 aa, Homo sapiens
  CDR3 for beta chain variable domain of TCR clone 346056 (TRBV12-4, TRBJ2-5)
CASSPPTGLQETQYF

SEQ ID NO: 692113 - protein, 12 aa, Homo sapiens
  CDR3 for alpha chain variable domain of TCR clone 346057 (TRAV2, TRAJ9)
CAVGAGGFKTIF

SEQ ID NO: 692114 - protein, 16 aa, Homo sapiens
  CDR3 for beta chain variable domain of TCR clone 346057 (TRBV13, TRBJ2-2)
YASSPRTGGHTGELFF

SEQ ID NO: 692115 - protein, 14 aa, Homo sapiens
  CDR3 for alpha chain variable domain of TCR clone 346058 (TRAV3, TRAJ9)
CAVRLNTGGFKTIF

SEQ ID NO: 692116 - protein, 13 aa, Homo sapiens
  CDR3 for beta chain variable domain of TCR clone 346058 (TRBV18, TRBJ1-1)
CASSPETKPEAFF

SEQ ID NO: 692117 - protein, 15 aa, Homo sapiens
  CDR3 for alpha chain variable domain of TCR clone 346059 (TRAV2, TRAJ9)
CAVEDRGTGGFKTIF

SEQ ID NO: 692118 - protein, 17 aa, Homo sapiens
  CDR3 for beta chain variable domain of TCR clone 346059 (TRBV4-3, TRBJ2-1)
CASSPFSSGRASGEQFF

SEQ ID NO: 692119 - protein, 12 aa, Homo sapiens
  CDR3 for alpha chain variable domain of TCR clone 346060 (TRAV2, TRAJ10)
CASTGGGNKLTF

SEQ ID NO: 692120 - protein, 14 aa, Homo sapiens
  CDR3 for beta chain variable domain of TCR clone 346060 (TRBV7-2, TRBJ2-2)
CASRGQGAAGQLFF

SEQ ID NO: 692121 - protein, 14 aa, Homo sapiens
  CDR3 for alpha chain variable domain of TCR clone 346061 (TRAV2, TRAJ9)
CAVEDRSGGFKTIF

SEQ ID NO: 692122 - protein, 16 aa, Homo sapiens
  CDR3 for beta chain variable domain of TCR clone 346061 (TRBV4-1, TRBJ2-5)
CASSQAIAASSATQYF

SEQ ID NO: 692123 - protein, 13 aa, Homo sapiens
  CDR3 for alpha chain variable domain of TCR clone 346062 (TRAV12-1, TRAJ26)
CVVRRNYGQNFVF

SEQ ID NO: 692124 - protein, 15 aa, Homo sapiens
  CDR3 for beta chain variable domain of TCR clone 346062 (TRBV28, TRBJ2-1)
CASSIIAGVRSEQFF

SEQ ID NO: 692125 - protein, 15 aa, Homo sapiens
  CDR3 for alpha chain variable domain of TCR clone 346063 (TRAV12-1, TRAJ45)
CVVLSGGGGTDGLTF

SEQ ID NO: 692126 - protein, 13 aa, Homo sapiens
  CDR3 for beta chain variable domain of TCR clone 346063 (TRBV7-3, TRBJ1-1)
CASSQDWGAEAFF

SEQ ID NO: 692127 - protein, 15 aa, Homo sapiens
  CDR3 for alpha chain variable domain of TCR clone 346064 (TRAV23/DV6, TRAJ18)
CAARYRGSTLGRLYF

SEQ ID NO: 692128 - protein, 11 aa, Homo sapiens
  CDR3 for beta chain variable domain of TCR clone 346064 (TRBV2, TRBJ2-2)
CASSPYGELFF

SEQ ID NO: 692129 - protein, 14 aa, Homo sapiens
  CDR3 for alpha chain variable domain of TCR clone 346065 (TRAV38-1, TRAJ40)
CALRPTSGTYKYTF

SEQ ID NO: 692130 - protein, 14 aa, Homo sapiens
  CDR3 for beta chain variable domain of TCR clone 346065 (TRBV25-1, TRBJ1-1)
CASTHLGGNTGAFF

SEQ ID NO: 692131 - protein, 12 aa, Homo sapiens
  CDR3 for alpha chain variable domain of TCR clone 346066 (TRAV12-3, TRAJ40)
CAMSSGTYKYIF

SEQ ID NO: 692132 - protein, 15 aa, Homo sapiens
  CDR3 for beta chain variable domain of TCR clone 346066 (TRBV7-3, TRBJ2-2)
CASSETGQGIGELFF

SEQ ID NO: 692133 - protein, 13 aa, Homo sapiens
  CDR3 for alpha chain variable domain of TCR clone 346067 (TRAV2, TRAJ15)
CAVASQAGTALIF

SEQ ID NO: 692134 - protein, 15 aa, Homo sapiens
  CDR3 for beta chain variable domain of TCR clone 346067 (TRBV6-5, TRBJ2-7)
CASSYSTSGNYEQYF

SEQ ID NO: 692135 - protein, 13 aa, Homo sapiens
  CDR3 for alpha chain variable domain of TCR clone 346068 (TRAV12-1, TRAJ53)
CVVNAESNYKLTF

SEQ ID NO: 692136 - protein, 13 aa, Homo sapiens
  CDR3 for beta chain variable domain of TCR clone 346068 (TRBV7-3, TRBJ1-2)
CASSLKRGYGYTF

SEQ ID NO: 692137 - protein, 10 aa, Homo sapiens
  CDR3 for alpha chain variable domain of TCR clone 346069 (TRAV20, TRAJ22)
CAAPGRQLTF

SEQ ID NO: 692138 - protein, 14 aa, Homo sapiens
  CDR3 for beta chain variable domain of TCR clone 346069 (TRBV19, TRBJ2-1)
CASSMGSGATEQFF

SEQ ID NO: 692139 - protein, 13 aa, Homo sapiens
  CDR3 for alpha chain variable domain of TCR clone 346070 (TRAV25, TRAJ26)
CAGMDNYGQNFVF

SEQ ID NO: 692140 - protein, 15 aa, Homo sapiens
  CDR3 for beta chain variable domain of TCR clone 346070 (TRBV10-3, TRBJ2-1)
CAIRTGTSGHNEQFF

SEQ ID NO: 692141 - protein, 14 aa, Homo sapiens
  CDR3 for alpha chain variable domain of TCR clone 346071 (TRAV13-2, TRAJ29)
CAEGTFETNTPLGF

SEQ ID NO: 692142 - protein, 13 aa, Homo sapiens
  CDR3 for beta chain variable domain of TCR clone 346071 (TRBV2, TRBJ1-1)
CASNLLRNTEAFF

SEQ ID NO: 692143 - protein, 15 aa, Homo sapiens
  CDR3 for alpha chain variable domain of TCR clone 346072 (TRAV2, TRAJ9)
CAVEDRGTGGFKTIF

SEQ ID NO: 692144 - protein, 15 aa, Homo sapiens
  CDR3 for beta chain variable domain of TCR clone 346072 (TRBV10-2, TRBJ2-6)
CASSEQGTGANVLTF

SEQ ID NO: 692145 - protein, 16 aa, Homo sapiens
  CDR3 for alpha chain variable domain of TCR clone 346073 (TRAV26-1, TRAJ32)
FIVRTNYGGATNKLIF

SEQ ID NO: 692146 - protein, 14 aa, Homo sapiens
  CDR3 for beta chain variable domain of TCR clone 346073 (TRBV27, TRBJ1-1)
CASSLLSGLSEAFF

SEQ ID NO: 692147 - protein, 15 aa, Homo sapiens
  CDR3 for alpha chain variable domain of TCR clone 346074 (TRAV13-1, TRAJ3)
CAASKLASSASKIIF

SEQ ID NO: 692148 - protein, 16 aa, Homo sapiens
  CDR3 for beta chain variable domain of TCR clone 346074 (TRBV25-1, TRBJ1-5)
CARGAPTVNSNQPQHF

SEQ ID NO: 692149 - protein, 14 aa, Homo sapiens
  CDR3 for alpha chain variable domain of TCR clone 346075 (TRAV26-1, TRAJ38)
CIADNAGNNRKLIW

SEQ ID NO: 692150 - protein, 12 aa, Homo sapiens
  CDR3 for beta chain variable domain of TCR clone 346075 (TRBV6-1, TRBJ2-7)
CASRTGRYEQYF

SEQ ID NO: 692151 - protein, 14 aa, Homo sapiens
  CDR3 for alpha chain variable domain of TCR clone 346076 (TRAV2, TRAJ9)
CALEDRSGGFKTIF

SEQ ID NO: 692152 - protein, 16 aa, Homo sapiens
  CDR3 for beta chain variable domain of TCR clone 346076 (TRBV7-3, TRBJ2-2)
CASSLKRGTLSGELFF

SEQ ID NO: 692153 - protein, 15 aa, Homo sapiens
  CDR3 for alpha chain variable domain of TCR clone 346077 (TRAV40, TRAJ45)
CLLGDLGGGADGLTF

SEQ ID NO: 692154 - protein, 13 aa, Homo sapiens
  CDR3 for beta chain variable domain of TCR clone 346077 (TRBV13, TRBJ2-1)
CASILGGRGEQFF

SEQ ID NO: 692155 - protein, 13 aa, Homo sapiens
  CDR3 for alpha chain variable domain of TCR clone 346078 (TRAV25, TRAJ10)
CAGLTGGGNKLTF

SEQ ID NO: 692156 - protein, 16 aa, Homo sapiens
  CDR3 for beta chain variable domain of TCR clone 346078 (TRBV5-1, TRBJ2-7)
CASSWGTGGRAWEQYF

SEQ ID NO: 692157 - protein, 16 aa, Homo sapiens
  CDR3 for alpha chain variable domain of TCR clone 346079 (TRAV3, TRAJ37)
CAVRGKGSGNTGKLIF

SEQ ID NO: 692158 - protein, 16 aa, Homo sapiens
  CDR3 for beta chain variable domain of TCR clone 346079 (TRBV4-3, TRBJ2-1)
CASSPALDRGVNEQFF

SEQ ID NO: 692159 - protein, 11 aa, Homo sapiens
  CDR3 for alpha chain variable domain of TCR clone 346080 (TRAV2, TRAJ23)
CAVETRGKLIF

SEQ ID NO: 692160 - protein, 12 aa, Homo sapiens
  CDR3 for beta chain variable domain of TCR clone 346080 (TRBV4-2, TRBJ2-2)
CASSHLPGELFF

SEQ ID NO: 692161 - protein, 13 aa, Homo sapiens
  CDR3 for alpha chain variable domain of TCR clone 346081 (TRAV8-3, TRAJ28)
CDVGAVGSDQLTF

SEQ ID NO: 692162 - protein, 14 aa, Homo sapiens
  CDR3 for beta chain variable domain of TCR clone 346081 (TRBV7-2, TRBJ2-7)
CASRSQGAAYEQHF

SEQ ID NO: 692163 - protein, 15 aa, Homo sapiens
  CDR3 for alpha chain variable domain of TCR clone 346082 (TRAV17, TRAJ57)
CATGPSQGGSEKLVF

SEQ ID NO: 692164 - protein, 13 aa, Homo sapiens
  CDR3 for beta chain variable domain of TCR clone 346082 (TRBV19, TRBJ2-5)
CASSGRAGETQYF

SEQ ID NO: 692165 - protein, 16 aa, Homo sapiens
  CDR3 for alpha chain variable domain of TCR clone 346083 (TRAV13-1, TRAJ52)
CAAIMRGGTSYGKLTF

SEQ ID NO: 692166 - protein, 12 aa, Homo sapiens
  CDR3 for beta chain variable domain of TCR clone 346083 (TRBV11-2, TRBJ2-5)
CASSPPAETQYF

SEQ ID NO: 692167 - protein, 11 aa, Homo sapiens
  CDR3 for alpha chain variable domain of TCR clone 346084 (TRAV2, TRAJ13)
CASGGYQKVTF

SEQ ID NO: 692168 - protein, 16 aa, Homo sapiens
  CDR3 for beta chain variable domain of TCR clone 346084 (TRBV3-1, TRBJ2-4)
CASSQVLRGAKNIQYF

SEQ ID NO: 692169 - protein, 14 aa, Homo sapiens
  CDR3 for alpha chain variable domain of TCR clone 346085 (TRAV20, TRAJ47)
CAVTFGEYGNKLVF

SEQ ID NO: 692170 - protein, 14 aa, Homo sapiens
  CDR3 for beta chain variable domain of TCR clone 346085 (TRBV4-1, TRBJ2-2)
CASSQAVNTGELFF

SEQ ID NO: 692171 - protein, 14 aa, Homo sapiens
  CDR3 for alpha chain variable domain of TCR clone 346086 (TRAV12-2, TRAJ9)
CAVNMEGGGFKTIF

SEQ ID NO: 692172 - protein, 11 aa, Homo sapiens
  CDR3 for beta chain variable domain of TCR clone 346086 (TRBV7-8, TRBJ2-7)
CASSLSLEQYF

SEQ ID NO: 692173 - protein, 11 aa, Homo sapiens
  CDR3 for alpha chain variable domain of TCR clone 346087 (TRAV1-1, TRAJ23)
CAVRQGGKLIF

SEQ ID NO: 692174 - protein, 20 aa, Homo sapiens
  CDR3 for beta chain variable domain of TCR clone 346087 (TRBV7-8, TRBJ2-2)
WASSHLFPGPTIQITGELFF

SEQ ID NO: 692175 - protein, 14 aa, Homo sapiens
  CDR3 for alpha chain variable domain of TCR clone 346088 (TRAV1-2, TRAJ8)
CAVREDTGFQKLVF

SEQ ID NO: 692176 - protein, 14 aa, Homo sapiens
  CDR3 for beta chain variable domain of TCR clone 346088 (TRBV29-1, TRBJ1-4)
CSVTGTGGNDKLFF

SEQ ID NO: 692177 - protein, 15 aa, Homo sapiens
  CDR3 for alpha chain variable domain of TCR clone 346089 (TRAV38-1, TRAJ37)
CAFIFGSGNTGKLIF

SEQ ID NO: 692178 - protein, 13 aa, Homo sapiens
  CDR3 for beta chain variable domain of TCR clone 346089 (TRBV19, TRBJ2-7)
CASSPRQSYEQYF

SEQ ID NO: 692179 - protein, 15 aa, Homo sapiens
  CDR3 for alpha chain variable domain of TCR clone 346090 (TRAV3, TRAJ9)
CAVRDSNTGGFKPIF

SEQ ID NO: 692180 - protein, 16 aa, Homo sapiens
  CDR3 for beta chain variable domain of TCR clone 346090 (TRBV15, TRBJ2-5)
CATSPTTGQGMETQYF

SEQ ID NO: 692181 - protein, 12 aa, Homo sapiens
  CDR3 for alpha chain variable domain of TCR clone 346091 (TRAV12-3, TRAJ17)
CAMTLTGNKLTF

SEQ ID NO: 692182 - protein, 15 aa, Homo sapiens
  CDR3 for beta chain variable domain of TCR clone 346091 (TRBV10-2, TRBJ2-6)
CASGEQGTGANVLTF

SEQ ID NO: 692183 - protein, 16 aa, Homo sapiens
  CDR3 for alpha chain variable domain of TCR clone 346092 (TRAV35, TRAJ37)
CWGFLRGSSNTGKLIF

SEQ ID NO: 692184 - protein, 13 aa, Homo sapiens
  CDR3 for beta chain variable domain of TCR clone 346092 (TRBV2, TRBJ1-2)
CASSVRGNYGYTF

SEQ ID NO: 692185 - protein, 13 aa, Homo sapiens
  CDR3 for alpha chain variable domain of TCR clone 346093 (TRAV27, TRAJ45)
CRSSGGGADGLTF

SEQ ID NO: 692186 - protein, 14 aa, Homo sapiens
  CDR3 for beta chain variable domain of TCR clone 346093 (TRBV2, TRBJ2-1)
CASSDRAYYNEQFF

SEQ ID NO: 692187 - protein, 18 aa, Homo sapiens
  CDR3 for alpha chain variable domain of TCR clone 346094 (TRAV21, TRAJ52)
CAVRPSPAGGTSYGKLTF

SEQ ID NO: 692188 - protein, 16 aa, Homo sapiens
  CDR3 for beta chain variable domain of TCR clone 346094 (TRBV5-1, TRBJ2-5)
CASSSSGLGGAETQYF

SEQ ID NO: 692189 - protein, 13 aa, Homo sapiens
  CDR3 for alpha chain variable domain of TCR clone 346095 (TRAV12-2, TRAJ10)
CAVPTGGGNKRTF

SEQ ID NO: 692190 - protein, 11 aa, Homo sapiens
  CDR3 for beta chain variable domain of TCR clone 346095 (TRBV6-1, TRBJ2-1)
CASISSNEQFF

SEQ ID NO: 692191 - protein, 14 aa, Homo sapiens
  CDR3 for alpha chain variable domain of TCR clone 346096 (TRAV1-2, TRAJ16)
CAVNRFSDGQKLLL

SEQ ID NO: 692192 - protein, 14 aa, Homo sapiens
  CDR3 for beta chain variable domain of TCR clone 346096 (TRBV18, TRBJ2-7)
CASSPRGGAYEQYF

SEQ ID NO: 692193 - protein, 11 aa, Homo sapiens
  CDR3 for alpha chain variable domain of TCR clone 346097 (TRAV3, TRAJ32)
CAVREGIMVVL

SEQ ID NO: 692194 - protein, 13 aa, Homo sapiens
  CDR3 for beta chain variable domain of TCR clone 346097 (TRBV12-4, TRBJ1-2)
CASSLRQGKGYTF

SEQ ID NO: 692195 - protein, 12 aa, Homo sapiens
  CDR3 for alpha chain variable domain of TCR clone 346098 (TRAV8-3, TRAJ7)
CAVEGGNNRLAC

SEQ ID NO: 692196 - protein, 15 aa, Homo sapiens
  CDR3 for beta chain variable domain of TCR clone 346098 (TRBV10-3, TRBJ2-1)
CAISDVQDRAYEQFF

SEQ ID NO: 692197 - protein, 13 aa, Homo sapiens
  CDR3 for alpha chain variable domain of TCR clone 346099 (TRAV17, TRAJ5)
CALRGTGRRALTF

SEQ ID NO: 692198 - protein, 13 aa, Homo sapiens
  CDR3 for beta chain variable domain of TCR clone 346099 (TRBV20-1, TRBJ1-5)
CSASWGRSQPQHF

SEQ ID NO: 692199 - protein, 14 aa, Homo sapiens
  CDR3 for alpha chain variable domain of TCR clone 346100 (TRAV8-4, TRAJ34)
CAVSDPGDTDKLIF

SEQ ID NO: 692200 - protein, 13 aa, Homo sapiens
  CDR3 for beta chain variable domain of TCR clone 346100 (TRBV19, TRBJ1-2)
CASSVPGQDGYTF

SEQ ID NO: 692201 - protein, 15 aa, Homo sapiens
  CDR3 for alpha chain variable domain of TCR clone 346101 (TRAV23/DV6, TRAJ18)
CATRYRGSTLGRLYF

SEQ ID NO: 692202 - protein, 13 aa, Homo sapiens
  CDR3 for beta chain variable domain of TCR clone 346101 (TRBV7-2, TRBJ2-7)
CASSSPSGSEQYF

SEQ ID NO: 692203 - protein, 14 aa, Homo sapiens
  CDR3 for alpha chain variable domain of TCR clone 346102 (TRAV1-2, TRAJ16)
CAVNRFSDGQKLLF

SEQ ID NO: 692204 - protein, 15 aa, Homo sapiens
  CDR3 for beta chain variable domain of TCR clone 346102 (TRBV25-1, TRBJ1-4)
CTSSPGDSTNEKLFF

SEQ ID NO: 692205 - protein, 13 aa, Homo sapiens
  CDR3 for alpha chain variable domain of TCR clone 346103 (TRAV21, TRAJ27)
CAARPGNAGKSTF

SEQ ID NO: 692206 - protein, 16 aa, Homo sapiens
  CDR3 for beta chain variable domain of TCR clone 346103 (TRBV20-1, TRBJ1-2)
CSASMGQGFANYGYTF

SEQ ID NO: 692207 - protein, 17 aa, Homo sapiens
  CDR3 for alpha chain variable domain of TCR clone 346104 (TRAV3, TRAJ6)
CAVRDGPRAGGSYIPTF

SEQ ID NO: 692208 - protein, 14 aa, Homo sapiens
  CDR3 for beta chain variable domain of TCR clone 346104 (TRBV5-7, TRBJ1-1)
CASSLAGDWTEAFF

SEQ ID NO: 692209 - protein, 14 aa, Homo sapiens
  CDR3 for alpha chain variable domain of TCR clone 346105 (TRAV35, TRAJ13)
CAGSPSGGYQKVTF

SEQ ID NO: 692210 - protein, 13 aa, Homo sapiens
  CDR3 for beta chain variable domain of TCR clone 346105 (TRBV29-1, TRBJ1-1)
CSVGDSRKTEAFF

SEQ ID NO: 692211 - protein, 16 aa, Homo sapiens
  CDR3 for alpha chain variable domain of TCR clone 346106 (TRAV26-1, TRAJ31)
CIVRPPVLNNNARLMF

SEQ ID NO: 692212 - protein, 11 aa, Homo sapiens
  CDR3 for beta chain variable domain of TCR clone 346106 (TRBV7-8, TRBJ2-7)
CASRLSLEQYF

SEQ ID NO: 692213 - protein, 10 aa, Homo sapiens
  CDR3 for alpha chain variable domain of TCR clone 346107 (TRAV1-1, TRAJ26)
CAVNGQNFVF

SEQ ID NO: 692214 - protein, 15 aa, Homo sapiens
  CDR3 for beta chain variable domain of TCR clone 346107 (TRBV9, TRBJ1-6)
CASSVAGTGDSTLHF

SEQ ID NO: 692215 - protein, 14 aa, Homo sapiens
  CDR3 for alpha chain variable domain of TCR clone 346108 (TRAV2, TRAJ23)
CAVGLRNQGGKLIV

SEQ ID NO: 692216 - protein, 14 aa, Homo sapiens
  CDR3 for beta chain variable domain of TCR clone 346108 (TRBV25-1, TRBJ1-1)
CASTNLGGNTEAFF

SEQ ID NO: 692217 - protein, 16 aa, Homo sapiens
  CDR3 for alpha chain variable domain of TCR clone 346109 (TRAV12-3, TRAJ53)
CAMSPGCGGSNYKLTF

SEQ ID NO: 692218 - protein, 12 aa, Homo sapiens
  CDR3 for beta chain variable domain of TCR clone 346109 (TRBV11-2, TRBJ2-2)
CASSLGGGELFF

SEQ ID NO: 692219 - protein, 14 aa, Homo sapiens
  CDR3 for alpha chain variable domain of TCR clone 346110 (TRAV12-3, TRAJ42)
CSMNYGGSQGNLIF

SEQ ID NO: 692220 - protein, 15 aa, Homo sapiens
  CDR3 for beta chain variable domain of TCR clone 346110 (TRBV9, TRBJ2-1)
CASSLAGSSYNEQFF

SEQ ID NO: 692221 - protein, 16 aa, Homo sapiens
  CDR3 for alpha chain variable domain of TCR clone 346111 (TRAV21, TRAJ37)
RAVRTAGSSNTGKLIL

SEQ ID NO: 692222 - protein, 13 aa, Homo sapiens
  CDR3 for beta chain variable domain of TCR clone 346111 (TRBV7-9, TRBJ2-5)
CASLPSGRETQYF

SEQ ID NO: 692223 - protein, 11 aa, Homo sapiens
  CDR3 for alpha chain variable domain of TCR clone 346112 (TRAV1-2, TRAJ8)
CAVSSFQKIVF

SEQ ID NO: 692224 - protein, 16 aa, Homo sapiens
  CDR3 for beta chain variable domain of TCR clone 346112 (TRBV7-3, TRBJ2-2)
CASSLKRGTLSGELFF

SEQ ID NO: 692225 - protein, 12 aa, Homo sapiens
  CDR3 for alpha chain variable domain of TCR clone 346113 (TRAV12-3, TRAJ20)
CAMVRGDYNLSF

SEQ ID NO: 692226 - protein, 13 aa, Homo sapiens
  CDR3 for beta chain variable domain of TCR clone 346113 (TRBV23-1, TRBJ1-4)
CASRGKFNEKLFF

SEQ ID NO: 692227 - protein, 12 aa, Homo sapiens
  CDR3 for alpha chain variable domain of TCR clone 346114 (TRAV12-2, TRAJ10)
WGVTGGGNKLTF

SEQ ID NO: 692228 - protein, 14 aa, Homo sapiens
  CDR3 for beta chain variable domain of TCR clone 346114 (TRBV7-9, TRBJ2-1)
CASSPIEGLATKFF

SEQ ID NO: 692229 - protein, 12 aa, Homo sapiens
  CDR3 for alpha chain variable domain of TCR clone 346115 (TRAV17, TRAJ20)
CATDGDDYKLSF

SEQ ID NO: 692230 - protein, 14 aa, Homo sapiens
  CDR3 for beta chain variable domain of TCR clone 346115 (TRBV6-1, TRBJ1-3)
CASVQGGGGNTIYF

SEQ ID NO: 692231 - protein, 11 aa, Homo sapiens
  CDR3 for alpha chain variable domain of TCR clone 346116 (TRAV12-1, TRAJ21)
CVVNNFNKFYF

SEQ ID NO: 692232 - protein, 14 aa, Homo sapiens
  CDR3 for beta chain variable domain of TCR clone 346116 (TRBV11-2, TRBJ2-5)
CASRPLAGRETQYF

SEQ ID NO: 692233 - protein, 14 aa, Homo sapiens
  CDR3 for alpha chain variable domain of TCR clone 346117 (TRAV1-2, TRAJ16)
CAVNRFSDGQKLLF

SEQ ID NO: 692234 - protein, 18 aa, Homo sapiens
  CDR3 for beta chain variable domain of TCR clone 346117 (TRBV12-4, TRBJ2-4)
CASSRTGAVDVAKNIQYF

SEQ ID NO: 692235 - protein, 13 aa, Homo sapiens
  CDR3 for alpha chain variable domain of TCR clone 346118 (TRAV3, TRAJ21)
CAVREPDFNKFYF

SEQ ID NO: 692236 - protein, 18 aa, Homo sapiens
  CDR3 for beta chain variable domain of TCR clone 346118 (TRBV11-2, TRBJ2-3)
CASSLGGASRGAPNTQYL

SEQ ID NO: 692237 - protein, 10 aa, Homo sapiens
  CDR3 for alpha chain variable domain of TCR clone 346119 (TRAV30, TRAJ48)
CGIGNEKLTF

SEQ ID NO: 692238 - protein, 16 aa, Homo sapiens
  CDR3 for beta chain variable domain of TCR clone 346119 (TRBV27, TRBJ2-1)
SMNVEPGTSGDNEQFF

SEQ ID NO: 692239 - protein, 15 aa, Homo sapiens
  CDR3 for alpha chain variable domain of TCR clone 346120 (TRAV38-2/DV8, TRAJ43)
CAYRSWGAMPNDIRF

SEQ ID NO: 692240 - protein, 12 aa, Homo sapiens
  CDR3 for beta chain variable domain of TCR clone 346120 (TRBV28, TRBJ1-1)
CAGNSGDTEAFF

SEQ ID NO: 692241 - protein, 14 aa, Homo sapiens
  CDR3 for alpha chain variable domain of TCR clone 346121 (TRAV8-4, TRAJ17)
CAVSSPAAGNKLTF

SEQ ID NO: 692242 - protein, 16 aa, Homo sapiens
  CDR3 for beta chain variable domain of TCR clone 346121 (TRBV19, TRBJ2-1)
CASSKAGPSSYNEQFF

SEQ ID NO: 692243 - protein, 15 aa, Homo sapiens
  CDR3 for alpha chain variable domain of TCR clone 346122 (TRAV17, TRAJ22)
CATVAPSGSARQLTF

SEQ ID NO: 692244 - protein, 13 aa, Homo sapiens
  CDR3 for beta chain variable domain of TCR clone 346122 (TRBV11-2, TRBJ2-2)
CASGRDREEELFF

SEQ ID NO: 692245 - protein, 11 aa, Homo sapiens
  CDR3 for alpha chain variable domain of TCR clone 346123 (TRAV8-3, TRAJ49)
CAVGGGNQLYF

SEQ ID NO: 692246 - protein, 15 aa, Homo sapiens
  CDR3 for beta chain variable domain of TCR clone 346123 (TRBV7-9, TRBJ1-6)
CASSSPGRGNSPLHF

SEQ ID NO: 692247 - protein, 14 aa, Homo sapiens
  CDR3 for alpha chain variable domain of TCR clone 346124 (TRAV36/DV7, TRAJ32)
CAVGHVGATNKLIF

SEQ ID NO: 692248 - protein, 14 aa, Homo sapiens
  CDR3 for beta chain variable domain of TCR clone 346124 (TRBV7-8, TRBJ2-3)
CASSLEAGTDTQYF

SEQ ID NO: 692249 - protein, 13 aa, Homo sapiens
  CDR3 for alpha chain variable domain of TCR clone 346125 (TRAV12-3, TRAJ13)
CAMSSGGYQKVTF

SEQ ID NO: 692250 - protein, 12 aa, Homo sapiens
  CDR3 for beta chain variable domain of TCR clone 346125 (TRBV11-2, TRBJ2-1)
CASSPGNNEQFF

SEQ ID NO: 692251 - protein, 15 aa, Homo sapiens
  CDR3 for alpha chain variable domain of TCR clone 346126 (TRAV26-1, TRAJ29)
CIVRVEGSGNTPLVF

SEQ ID NO: 692252 - protein, 12 aa, Homo sapiens
  CDR3 for beta chain variable domain of TCR clone 346126 (TRBV7-2, TRBJ2-1)
CASSPQDIEQFF

SEQ ID NO: 692253 - protein, 12 aa, Homo sapiens
  CDR3 for alpha chain variable domain of TCR clone 346127 (TRAV8-3, TRAJ26)
CAGDNYGQNFVF

SEQ ID NO: 692254 - protein, 14 aa, Homo sapiens
  CDR3 for beta chain variable domain of TCR clone 346127 (TRBV4-1, TRBJ2-5)
CASSQYRDQETQYF

SEQ ID NO: 692255 - protein, 15 aa, Homo sapiens
  CDR3 for alpha chain variable domain of TCR clone 346128 (TRAV29/DV5, TRAJ8)
CAASGRNTDFQKLVF

SEQ ID NO: 692256 - protein, 15 aa, Homo sapiens
  CDR3 for beta chain variable domain of TCR clone 346128 (TRBV5-1, TRBJ2-1)
CASTGSGRTYNEQFF

SEQ ID NO: 692257 - protein, 16 aa, Homo sapiens
  CDR3 for alpha chain variable domain of TCR clone 346129 (TRAV30, TRAJ24)
CGTEIVDANSWGKFQF

SEQ ID NO: 692258 - protein, 15 aa, Homo sapiens
  CDR3 for beta chain variable domain of TCR clone 346129 (TRBV12-4, TRBJ2-2)
CASSPNDSGTGELFL

SEQ ID NO: 692259 - protein, 15 aa, Homo sapiens
  CDR3 for alpha chain variable domain of TCR clone 346130 (TRAV21, TRAJ24)
CAARSSTNSWGKLQF

SEQ ID NO: 692260 - protein, 19 aa, Homo sapiens
  CDR3 for beta chain variable domain of TCR clone 346130 (TRBV14, TRBJ2-1)
CASSQDQLWEAPEYNEQFF

SEQ ID NO: 692261 - protein, 11 aa, Homo sapiens
  CDR3 for alpha chain variable domain of TCR clone 346131 (TRAV27, TRAJ20)
CAGLNDYNISF

SEQ ID NO: 692262 - protein, 16 aa, Homo sapiens
  CDR3 for beta chain variable domain of TCR clone 346131 (TRBV27, TRBJ2-2)
CASSFRGLVRTGELFF

SEQ ID NO: 692263 - protein, 16 aa, Homo sapiens
  CDR3 for alpha chain variable domain of TCR clone 346132 (TRAV3, TRAJ10)
CAVRDMRAGGGNKLTF

SEQ ID NO: 692264 - protein, 13 aa, Homo sapiens
  CDR3 for beta chain variable domain of TCR clone 346132 (TRBV12-4, TRBJ2-5)
CASSPGTEETQYF

SEQ ID NO: 692265 - protein, 16 aa, Homo sapiens
  CDR3 for alpha chain variable domain of TCR clone 346133 (TRAV30, TRAJ24)
CGTEIVDADSCGKFQF

SEQ ID NO: 692266 - protein, 14 aa, Homo sapiens
  CDR3 for beta chain variable domain of TCR clone 346133 (TRBV12-5, TRBJ2-5)
CAIGSRTHQETQYF

SEQ ID NO: 692267 - protein, 14 aa, Homo sapiens
  CDR3 for alpha chain variable domain of TCR clone 346134 (TRAV14/DV4, TRAJ49)
CAFNRYLTGNPFYF

SEQ ID NO: 692268 - protein, 15 aa, Homo sapiens
  CDR3 for beta chain variable domain of TCR clone 346134 (TRBV5-1, TRBJ1-1)
CASSSTTGTNTEAFF

SEQ ID NO: 692269 - protein, 12 aa, Homo sapiens
  CDR3 for alpha chain variable domain of TCR clone 346135 (TRAV12-2, TRAJ20)
CAVRPSDYKLSF

SEQ ID NO: 692270 - protein, 18 aa, Homo sapiens
  CDR3 for beta chain variable domain of TCR clone 346135 (TRBV11-2, TRBJ2-3)
CASSLGGASRGAPNTQYF

SEQ ID NO: 692271 - protein, 14 aa, Homo sapiens
  CDR3 for alpha chain variable domain of TCR clone 346136 (TRAV2, TRAJ37)
CAVDFTSNTGRLIF

SEQ ID NO: 692272 - protein, 15 aa, Homo sapiens
  CDR3 for beta chain variable domain of TCR clone 346136 (TRBV2, TRBJ2-1)
CASSELAGSYNEQFF

SEQ ID NO: 692273 - protein, 18 aa, Homo sapiens
  CDR3 for alpha chain variable domain of TCR clone 346137 (TRAV26-1, TRAJ44)
CIVRVAGGGISTASKLTF

SEQ ID NO: 692274 - protein, 15 aa, Homo sapiens
  CDR3 for beta chain variable domain of TCR clone 346137 (TRBV7-2, TRBJ2-3)
CASSSTGLETDTQYF

SEQ ID NO: 692275 - protein, 13 aa, Homo sapiens
  CDR3 for alpha chain variable domain of TCR clone 346138 (TRAV2, TRAJ40)
CAVVTSGTYIYIF

SEQ ID NO: 692276 - protein, 14 aa, Homo sapiens
  CDR3 for beta chain variable domain of TCR clone 346138 (TRBV19, TRBJ2-3)
CASSAPRGTDTQYF

SEQ ID NO: 692277 - protein, 14 aa, Homo sapiens
  CDR3 for alpha chain variable domain of TCR clone 346139 (TRAV17, TRAJ37)
CATDGSSNTGKLIF

SEQ ID NO: 692278 - protein, 14 aa, Homo sapiens
  CDR3 for beta chain variable domain of TCR clone 346139 (TRBV19, TRBJ2-1)
CASPTFVLSGEQFF

SEQ ID NO: 692279 - protein, 15 aa, Homo sapiens
  CDR3 for alpha chain variable domain of TCR clone 346140 (TRAV17, TRAJ57)
CATGPSPGGSEKLVF

SEQ ID NO: 692280 - protein, 15 aa, Homo sapiens
  CDR3 for beta chain variable domain of TCR clone 346140 (TRBV18, TRBJ1-1)
CASSPRQGENTEAFF

SEQ ID NO: 692281 - protein, 10 aa, Homo sapiens
  CDR3 for alpha chain variable domain of TCR clone 346141 (TRAV5, TRAJ34)
CAEDTDKLIF

SEQ ID NO: 692282 - protein, 14 aa, Homo sapiens
  CDR3 for beta chain variable domain of TCR clone 346141 (TRBV7-9, TRBJ2-1)
CASSPRDALYEQFF

SEQ ID NO: 692283 - protein, 13 aa, Homo sapiens
  CDR3 for alpha chain variable domain of TCR clone 346142 (TRAV27, TRAJ29)
CAGAHSGNTPLVF

SEQ ID NO: 692284 - protein, 15 aa, Homo sapiens
  CDR3 for beta chain variable domain of TCR clone 346142 (TRBV15, TRBJ1-4)
CATSRDMVSYEKLFF

SEQ ID NO: 692285 - protein, 16 aa, Homo sapiens
  CDR3 for alpha chain variable domain of TCR clone 346143 (TRAV9-2, TRAJ5)
CALSFSMDTGRRAPTF

SEQ ID NO: 692286 - protein, 13 aa, Homo sapiens
  CDR3 for beta chain variable domain of TCR clone 346143 (TRBV4-2, TRBJ1-1)
CASSQAGNTEAFF

SEQ ID NO: 692287 - protein, 14 aa, Homo sapiens
  CDR3 for alpha chain variable domain of TCR clone 346144 (TRAV12-2, TRAJ17)
CAVLFKAAGNKLTF

SEQ ID NO: 692288 - protein, 15 aa, Homo sapiens
  CDR3 for beta chain variable domain of TCR clone 346144 (TRBV5-1, TRBJ2-7)
CASSLYPDGGYEQYF

SEQ ID NO: 692289 - protein, 14 aa, Homo sapiens
  CDR3 for alpha chain variable domain of TCR clone 346145 (TRAV23/DV6, TRAJ37)
CSREGSSNTGKLIF

SEQ ID NO: 692290 - protein, 17 aa, Homo sapiens
  CDR3 for beta chain variable domain of TCR clone 346145 (TRBV20-1, TRBJ2-7)
CSATRAGGVAGVEEQYF

SEQ ID NO: 692291 - protein, 16 aa, Homo sapiens
  CDR3 for alpha chain variable domain of TCR clone 346146 (TRAV13-1, TRAJ22)
CAAKGCRTGSARQLTF

SEQ ID NO: 692292 - protein, 15 aa, Homo sapiens
  CDR3 for beta chain variable domain of TCR clone 346146 (TRBV9, TRBJ1-6)
CASSVAGTGDSPLHF

SEQ ID NO: 692293 - protein, 16 aa, Homo sapiens
  CDR3 for alpha chain variable domain of TCR clone 346147 (TRAV14/DV4, TRAJ53)
CAMREGGGGSNYKLTF

SEQ ID NO: 692294 - protein, 18 aa, Homo sapiens
  CDR3 for beta chain variable domain of TCR clone 346147 (TRBV18, TRBJ1-3)
CASSTRGGAGPSGNTIYF

SEQ ID NO: 692295 - protein, 13 aa, Homo sapiens
  CDR3 for alpha chain variable domain of TCR clone 346148 (TRAV12-3, TRAJ29)
CAITLSGNTPLVF

SEQ ID NO: 692296 - protein, 15 aa, Homo sapiens
  CDR3 for beta chain variable domain of TCR clone 346148 (TRBV5-1, TRBJ2-6)
CASSLDPSGANVLTF

SEQ ID NO: 692297 - protein, 11 aa, Homo sapiens
  CDR3 for alpha chain variable domain of TCR clone 346149 (TRAV1-2, TRAJ31)
CASHNNARLMF

SEQ ID NO: 692298 - protein, 12 aa, Homo sapiens
  CDR3 for beta chain variable domain of TCR clone 346149 (TRBV11-2, TRBJ2-2)
CASSLGGGELFF

SEQ ID NO: 692299 - protein, 17 aa, Homo sapiens
  CDR3 for alpha chain variable domain of TCR clone 346150 (TRAV38-2/DV8, TRAJ28)
CAFLTLYSGAGSYQLTL

SEQ ID NO: 692300 - protein, 14 aa, Homo sapiens
  CDR3 for beta chain variable domain of TCR clone 346150 (TRBV7-2, TRBJ2-5)
CASSLSGGGETQYF

SEQ ID NO: 692301 - protein, 18 aa, Homo sapiens
  CDR3 for alpha chain variable domain of TCR clone 346151 (TRAV13-1, TRAJ52)
CAAKNPNAGGTNYGKMTF

SEQ ID NO: 692302 - protein, 14 aa, Homo sapiens
  CDR3 for beta chain variable domain of TCR clone 346151 (TRBV7-3, TRBJ2-1)
CASSLAGGTNEQFF

SEQ ID NO: 692303 - protein, 16 aa, Homo sapiens
  CDR3 for alpha chain variable domain of TCR clone 346152 (TRAV30, TRAJ24)
CGTEIVDADSWGKSRF

SEQ ID NO: 692304 - protein, 14 aa, Homo sapiens
  CDR3 for beta chain variable domain of TCR clone 346152 (TRBV12-5, TRBJ2-5)
CASGSRTHQETQYF

SEQ ID NO: 692305 - protein, 19 aa, Homo sapiens
  CDR3 for alpha chain variable domain of TCR clone 346153 (TRAV2, TRAJ20)
ILQVREADAAVYRDRKLSF

SEQ ID NO: 692306 - protein, 15 aa, Homo sapiens
  CDR3 for beta chain variable domain of TCR clone 346153 (TRBV15, TRBJ1-6)
CATSGALIHPSTLGT

SEQ ID NO: 692307 - protein, 16 aa, Homo sapiens
  CDR3 for alpha chain variable domain of TCR clone 346154 (TRAV12-2, TRAJ32)
CAVNLGQGGATNKLIF

SEQ ID NO: 692308 - protein, 16 aa, Homo sapiens
  CDR3 for beta chain variable domain of TCR clone 346154 (TRBV19, TRBJ2-1)
CASSIQAGGSYNEQFF

SEQ ID NO: 692309 - protein, 14 aa, Homo sapiens
  CDR3 for alpha chain variable domain of TCR clone 346155 (TRAV13-1, TRAJ44)
CAAKATGTASKLTF

SEQ ID NO: 692310 - protein, 17 aa, Homo sapiens
  CDR3 for beta chain variable domain of TCR clone 346155 (TRBV7-3, TRBJ2-3)
CASSLMKMMRGADTQYF

SEQ ID NO: 692311 - protein, 18 aa, Homo sapiens
  CDR3 for alpha chain variable domain of TCR clone 346156 (TRAV13-1, TRAJ52)
CAAKNPNAGGTSYGKLTF

SEQ ID NO: 692312 - protein, 15 aa, Homo sapiens
  CDR3 for beta chain variable domain of TCR clone 346156 (TRBV7-8, TRBJ2-3)
CASSPRTGSTDTQYF

SEQ ID NO: 692313 - protein, 15 aa, Homo sapiens
  CDR3 for alpha chain variable domain of TCR clone 346157 (TRAV12-3, TRAJ53)
CASNASGGSNYKLTF

SEQ ID NO: 692314 - protein, 15 aa, Homo sapiens
  CDR3 for beta chain variable domain of TCR clone 346157 (TRBV11-2, TRBJ2-2)
CASSSDRVNAGELFF

SEQ ID NO: 692315 - protein, 12 aa, Homo sapiens
  CDR3 for alpha chain variable domain of TCR clone 346158 (TRAV21, TRAJ37)
CAVRGNTGKLIF

SEQ ID NO: 692316 - protein, 16 aa, Homo sapiens
  CDR3 for beta chain variable domain of TCR clone 346158 (TRBV2, TRBJ2-3)
CASSPRDSTYTDTQYF

SEQ ID NO: 692317 - protein, 13 aa, Homo sapiens
  CDR3 for alpha chain variable domain of TCR clone 346159 (TRAV27, TRAJ45)
CRSSGGGADGLTF

SEQ ID NO: 692318 - protein, 14 aa, Homo sapiens
  CDR3 for beta chain variable domain of TCR clone 346159 (TRBV4-1, TRBJ2-3)
CASSQEGSTDTQYF

SEQ ID NO: 692319 - protein, 14 aa, Homo sapiens
  CDR3 for alpha chain variable domain of TCR clone 346160 (TRAV14/DV4, TRAJ57)
CAMREEGVSEKLVF

SEQ ID NO: 692320 - protein, 17 aa, Homo sapiens
  CDR3 for beta chain variable domain of TCR clone 346160 (TRBV10-3, TRBJ1-2)
CAISETRDRGLEYGYTF

SEQ ID NO: 692321 - protein, 13 aa, Homo sapiens
  CDR3 for alpha chain variable domain of TCR clone 346161 (TRAV13-1, TRAJ21)
CAASIYNFNKFYF

SEQ ID NO: 692322 - protein, 13 aa, Homo sapiens
  CDR3 for beta chain variable domain of TCR clone 346161 (TRBV10-3, TRBJ1-2)
CAISERDSYGYTF

SEQ ID NO: 692323 - protein, 14 aa, Homo sapiens
  CDR3 for alpha chain variable domain of TCR clone 346162 (TRAV13-1, TRAJ9)
CAASALTGGFKTIF

SEQ ID NO: 692324 - protein, 14 aa, Homo sapiens
  CDR3 for beta chain variable domain of TCR clone 346162 (TRBV5-1, TRBJ1-2)
CASSLEPVNYGYTF

SEQ ID NO: 692325 - protein, 13 aa, Homo sapiens
  CDR3 for alpha chain variable domain of TCR clone 346163 (TRAV26-2, TRAJ43)
CILRAGNNNDMRF

SEQ ID NO: 692326 - protein, 12 aa, Homo sapiens
  CDR3 for beta chain variable domain of TCR clone 346163 (TRBV7-8, TRBJ2-7)
CASSLGDREQYF

SEQ ID NO: 692327 - protein, 16 aa, Homo sapiens
  CDR3 for alpha chain variable domain of TCR clone 346164 (TRAV3, TRAJ37)
CAVRPHGSGNTGKLIF

SEQ ID NO: 692328 - protein, 16 aa, Homo sapiens
  CDR3 for beta chain variable domain of TCR clone 346164 (TRBV9, TRBJ1-2)
CASSVEDKVSPYGYTF

SEQ ID NO: 692329 - protein, 13 aa, Homo sapiens
  CDR3 for alpha chain variable domain of TCR clone 346165 (TRAV13-2, TRAJ13)
CAERPGGYQKVTF

SEQ ID NO: 692330 - protein, 13 aa, Homo sapiens
  CDR3 for beta chain variable domain of TCR clone 346165 (TRBV6-1, TRBJ1-1)
CASSRQGNTGDFF

SEQ ID NO: 692331 - protein, 12 aa, Homo sapiens
  CDR3 for alpha chain variable domain of TCR clone 346166 (TRAV8-4, TRAJ22)
CAATGSARQLTF

SEQ ID NO: 692332 - protein, 14 aa, Homo sapiens
  CDR3 for beta chain variable domain of TCR clone 346166 (TRBV7-9, TRBJ1-2)
CASRRQGANYGYTF

SEQ ID NO: 692333 - protein, 10 aa, Homo sapiens
  CDR3 for alpha chain variable domain of TCR clone 346167 (TRAV23/DV6, TRAJ31)
CTRGCASLMF

SEQ ID NO: 692334 - protein, 14 aa, Homo sapiens
  CDR3 for beta chain variable domain of TCR clone 346167 (TRBV7-8, TRBJ1-2)
CASSPDSLSYGYTF

SEQ ID NO: 692335 - protein, 13 aa, Homo sapiens
  CDR3 for alpha chain variable domain of TCR clone 346168 (TRAV21, TRAJ34)
CTVSEGDTDKLIF

SEQ ID NO: 692336 - protein, 17 aa, Homo sapiens
  CDR3 for beta chain variable domain of TCR clone 346168 (TRBV20-1, TRBJ1-5)
CSARDPSAQGFNQPQHF

SEQ ID NO: 692337 - protein, 14 aa, Homo sapiens
  CDR3 for alpha chain variable domain of TCR clone 346169 (TRAV12-2, TRAJ40)
CAVKIRSGTYKYIF

SEQ ID NO: 692338 - protein, 12 aa, Homo sapiens
  CDR3 for beta chain variable domain of TCR clone 346169 (TRBV11-2, TRBJ2-2)
CASSLGGGELFF

SEQ ID NO: 692339 - protein, 17 aa, Homo sapiens
  CDR3 for alpha chain variable domain of TCR clone 346170 (TRAV26-1, TRAJ46)
IASSESEKKSSGDKLTF

SEQ ID NO: 692340 - protein, 16 aa, Homo sapiens
  CDR3 for beta chain variable domain of TCR clone 346170 (TRBV12-5, TRBJ2-5)
CASGPRTSGNQETQYF

SEQ ID NO: 692341 - protein, 12 aa, Homo sapiens
  CDR3 for alpha chain variable domain of TCR clone 346171 (TRAV3, TRAJ20)
CAGRDHDYKLSF

SEQ ID NO: 692342 - protein, 15 aa, Homo sapiens
  CDR3 for beta chain variable domain of TCR clone 346171 (TRBV9, TRBJ1-6)
CASSVAGTGDSPLHF

SEQ ID NO: 692343 - protein, 16 aa, Homo sapiens
  CDR3 for alpha chain variable domain of TCR clone 346172 (TRAV16, TRAJ52)
CALSAAGGTSYGKLTF

SEQ ID NO: 692344 - protein, 18 aa, Homo sapiens
  CDR3 for beta chain variable domain of TCR clone 346172 (TRBV11-2, TRBJ2-3)
CASSLGGASRGAPNTQYF

SEQ ID NO: 692345 - protein, 14 aa, Homo sapiens
  CDR3 for alpha chain variable domain of TCR clone 346173 (TRAV12-2, TRAJ13)
CAVKKTGGYQKVTF

SEQ ID NO: 692346 - protein, 16 aa, Homo sapiens
  CDR3 for beta chain variable domain of TCR clone 346173 (TRBV2, TRBJ2-3)
CASSTSAEGVTDTQYF

SEQ ID NO: 692347 - protein, 13 aa, Homo sapiens
  CDR3 for alpha chain variable domain of TCR clone 346174 (TRAV13-1, TRAJ6)
CAASKGGSYIPTF

SEQ ID NO: 692348 - protein, 13 aa, Homo sapiens
  CDR3 for beta chain variable domain of TCR clone 346174 (TRBV7-3, TRBJ1-1)
CASSQDWGAEAFF

SEQ ID NO: 692349 - protein, 16 aa, Homo sapiens
  CDR3 for alpha chain variable domain of TCR clone 346175 (TRAV8-1, TRAJ39)
CAVNVPSYNAGNMLTF

SEQ ID NO: 692350 - protein, 15 aa, Homo sapiens
  CDR3 for beta chain variable domain of TCR clone 346175 (TRBV4-1, TRBJ2-3)
CASRSTRAGTDTQYS

SEQ ID NO: 692351 - protein, 14 aa, Homo sapiens
  CDR3 for alpha chain variable domain of TCR clone 346176 (TRAV1-2, TRAJ8)
CAVREDTGFQKLVF

SEQ ID NO: 692352 - protein, 15 aa, Homo sapiens
  CDR3 for beta chain variable domain of TCR clone 346176 (TRBV6-3, TRBJ2-7)
CASTSPGTVFYEQYF

SEQ ID NO: 692353 - protein, 15 aa, Homo sapiens
  CDR3 for alpha chain variable domain of TCR clone 346177 (TRAV21, TRAJ53)
CATLNSGGSNYKLTS

SEQ ID NO: 692354 - protein, 17 aa, Homo sapiens
  CDR3 for beta chain variable domain of TCR clone 346177 (TRBV20-1, TRBJ2-2)
CSASGSGQGGVTGELFF

SEQ ID NO: 692355 - protein, 16 aa, Homo sapiens
  CDR3 for alpha chain variable domain of TCR clone 346178 (TRAV1-1, TRAJ37)
CAVRDKALATQANYSL

SEQ ID NO: 692356 - protein, 14 aa, Homo sapiens
  CDR3 for beta chain variable domain of TCR clone 346178 (TRBV7-2, TRBJ2-7)
CASSPKTSFYEQHF

SEQ ID NO: 692357 - protein, 14 aa, Homo sapiens
  CDR3 for alpha chain variable domain of TCR clone 346179 (TRAV13-1, TRAJ35)
CAASKGGFGNVLHC

SEQ ID NO: 692358 - protein, 17 aa, Homo sapiens
  CDR3 for beta chain variable domain of TCR clone 346179 (TRBV7-2, TRBJ2-3)
CASSLAGGLAGTAGQYF

SEQ ID NO: 692359 - protein, 15 aa, Homo sapiens
  CDR3 for alpha chain variable domain of TCR clone 346180 (TRAV14/DV4, TRAJ26)
CAMREGQNYGQNFVF

SEQ ID NO: 692360 - protein, 13 aa, Homo sapiens
  CDR3 for beta chain variable domain of TCR clone 346180 (TRBV24-1, TRBJ2-2)
CATSDWATGELFF

SEQ ID NO: 692361 - protein, 20 aa, Homo sapiens
  CDR3 for alpha chain variable domain of TCR clone 346181 (TRAV12-1, TRAJ42)
SSVIQPPTSVNGGSQGNLIL

SEQ ID NO: 692362 - protein, 18 aa, Homo sapiens
  CDR3 for beta chain variable domain of TCR clone 346181 (TRBV11-2, TRBJ2-3)
CASSLGGASRGAPNTQYF

SEQ ID NO: 692363 - protein, 14 aa, Homo sapiens
  CDR3 for alpha chain variable domain of TCR clone 346182 (TRAV26-2, TRAJ32)
CCVGYGGATSKLIF

SEQ ID NO: 692364 - protein, 13 aa, Homo sapiens
  CDR3 for beta chain variable domain of TCR clone 346182 (TRBV12-5, TRBJ2-3)
CASGDRQSDTQYF

SEQ ID NO: 692365 - protein, 15 aa, Homo sapiens
  CDR3 for alpha chain variable domain of TCR clone 346183 (TRAV8-3, TRAJ27)
CAVGPSTTNAGKSTF

SEQ ID NO: 692366 - protein, 15 aa, Homo sapiens
  CDR3 for beta chain variable domain of TCR clone 346183 (TRBV7-2, TRBJ2-1)
CASSCGLAGGNEQFF

SEQ ID NO: 692367 - protein, 15 aa, Homo sapiens
  CDR3 for alpha chain variable domain of TCR clone 346184 (TRAV21, TRAJ53)
CAVRQSGGSNYKLTF

SEQ ID NO: 692368 - protein, 13 aa, Homo sapiens
  CDR3 for beta chain variable domain of TCR clone 346184 (TRBV7-3, TRBJ2-5)
CASSFRGGETQYF

SEQ ID NO: 692369 - protein, 15 aa, Homo sapiens
  CDR3 for alpha chain variable domain of TCR clone 346185 (TRAV17, TRAJ57)
CATGPSQGGSEKLGF

SEQ ID NO: 692370 - protein, 14 aa, Homo sapiens
  CDR3 for beta chain variable domain of TCR clone 346185 (TRBV12-5, TRBJ2-5)
CASGSRTHQETQYV

SEQ ID NO: 692371 - protein, 15 aa, Homo sapiens
  CDR3 for alpha chain variable domain of TCR clone 346186 (TRAV12-1, TRAJ9)
RVVSFGDTGGFKTIF

SEQ ID NO: 692372 - protein, 12 aa, Homo sapiens
  CDR3 for beta chain variable domain of TCR clone 346186 (TRBV12-4, TRBJ2-7)
CASSLGGYEQYF

SEQ ID NO: 692373 - protein, 12 aa, Homo sapiens
  CDR3 for alpha chain variable domain of TCR clone 346187 (TRAV24, TRAJ6)
CAPAGGSYIPTF

SEQ ID NO: 692374 - protein, 13 aa, Homo sapiens
  CDR3 for beta chain variable domain of TCR clone 346187 (TRBV7-2, TRBJ1-4)
CASSLAGLEKLFF

SEQ ID NO: 692375 - protein, 14 aa, Homo sapiens
  CDR3 for alpha chain variable domain of TCR clone 346188 (TRAV13-1, TRAJ40)
CAASMTSGTYKYSF

SEQ ID NO: 692376 - protein, 15 aa, Homo sapiens
  CDR3 for beta chain variable domain of TCR clone 346188 (TRBV7-3, TRBJ2-1)
CASSPTGGGEVEQFF

SEQ ID NO: 692377 - protein, 12 aa, Homo sapiens
  CDR3 for alpha chain variable domain of TCR clone 346189 (TRAV21, TRAJ33)
CAKMDSNYQLIW

SEQ ID NO: 692378 - protein, 16 aa, Homo sapiens
  CDR3 for beta chain variable domain of TCR clone 346189 (TRBV15, TRBJ2-3)
CATSRDLGIVTDTQYF

SEQ ID NO: 692379 - protein, 14 aa, Homo sapiens
  CDR3 for alpha chain variable domain of TCR clone 346190 (TRAV29/DV5, TRAJ45)
CAASFRGGADGLTF

SEQ ID NO: 692380 - protein, 11 aa, Homo sapiens
  CDR3 for beta chain variable domain of TCR clone 346190 (TRBV11-2, TRBJ2-2)
CASSLPWELFF

SEQ ID NO: 692381 - protein, 11 aa, Homo sapiens
  CDR3 for alpha chain variable domain of TCR clone 346191 (TRAV12-1, TRAJ21)
CVVYNFNKFYF

SEQ ID NO: 692382 - protein, 14 aa, Homo sapiens
  CDR3 for beta chain variable domain of TCR clone 346191 (TRBV19, TRBJ2-7)
CARSMGQGAIEQYF

SEQ ID NO: 692383 - protein, 16 aa, Homo sapiens
  CDR3 for alpha chain variable domain of TCR clone 346192 (TRAV12-2, TRAJ18)
CAVTTDRGSTLGRLYF

SEQ ID NO: 692384 - protein, 13 aa, Homo sapiens
  CDR3 for beta chain variable domain of TCR clone 346192 (TRBV7-9, TRBJ2-3)
CASSPGSTDTQYF

SEQ ID NO: 692385 - protein, 13 aa, Homo sapiens
  CDR3 for alpha chain variable domain of TCR clone 346193 (TRAV12-3, TRAJ53)
CAMRGGSNYKLTV

SEQ ID NO: 692386 - protein, 15 aa, Homo sapiens
  CDR3 for beta chain variable domain of TCR clone 346193 (TRBV2, TRBJ2-1)
CATQARLVMIGEQFF

SEQ ID NO: 692387 - protein, 17 aa, Homo sapiens
  CDR3 for alpha chain variable domain of TCR clone 346194 (TRAV14/DV4, TRAJ42)
CAMRGKFYGGSQGNLIF

SEQ ID NO: 692388 - protein, 13 aa, Homo sapiens
  CDR3 for beta chain variable domain of TCR clone 346194 (TRBV19, TRBJ2-7)
CASSPRQSYEQYF

SEQ ID NO: 692389 - protein, 14 aa, Homo sapiens
  CDR3 for alpha chain variable domain of TCR clone 346195 (TRAV26-2, TRAJ32)
CCVGYGGATNKLIF

SEQ ID NO: 692390 - protein, 15 aa, Homo sapiens
  CDR3 for beta chain variable domain of TCR clone 346195 (TRBV6-5, TRBJ2-1)
CASRGDFDSYNEQFF

SEQ ID NO: 692391 - protein, 14 aa, Homo sapiens
  CDR3 for alpha chain variable domain of TCR clone 346196 (TRAV21, TRAJ45)
CAVSSGGGADGLTF

SEQ ID NO: 692392 - protein, 15 aa, Homo sapiens
  CDR3 for beta chain variable domain of TCR clone 346196 (TRBV6-1, TRBJ2-4)
CASSEAVWTINNQYF

SEQ ID NO: 692393 - protein, 15 aa, Homo sapiens
  CDR3 for alpha chain variable domain of TCR clone 346197 (TRAV41, TRAJ45)
CAASYSGGGADGITF

SEQ ID NO: 692394 - protein, 14 aa, Homo sapiens
  CDR3 for beta chain variable domain of TCR clone 346197 (TRBV12-5, TRBJ2-5)
CASGSRTHQETQYF

SEQ ID NO: 692395 - protein, 17 aa, Homo sapiens
  CDR3 for alpha chain variable domain of TCR clone 346198 (TRAV26-2, TRAJ52)
CILSSSSGGTSSGKLTF

SEQ ID NO: 692396 - protein, 11 aa, Homo sapiens
  CDR3 for beta chain variable domain of TCR clone 346198 (TRBV19, TRBJ1-1)
CATLRNTEAFF

SEQ ID NO: 692397 - protein, 14 aa, Homo sapiens
  CDR3 for alpha chain variable domain of TCR clone 346199 (TRAV12-2, TRAJ13)
CAVKKTGGYQKVTF

SEQ ID NO: 692398 - protein, 14 aa, Homo sapiens
  CDR3 for beta chain variable domain of TCR clone 346199 (TRBV13, TRBJ2-7)
CASSGLAGLYEQYF

SEQ ID NO: 692399 - protein, 15 aa, Homo sapiens
  CDR3 for alpha chain variable domain of TCR clone 346200 (TRAV8-3, TRAJ37)
YAVGARASNTGKLIF

SEQ ID NO: 692400 - protein, 13 aa, Homo sapiens
  CDR3 for beta chain variable domain of TCR clone 346200 (TRBV12-5, TRBJ2-3)
CASGDRQSDTQYF

SEQ ID NO: 692401 - protein, 14 aa, Homo sapiens
  CDR3 for alpha chain variable domain of TCR clone 346201 (TRAV2, TRAJ39)
FTTIHNNAGNMLTF

SEQ ID NO: 692402 - protein, 16 aa, Homo sapiens
  CDR3 for beta chain variable domain of TCR clone 346201 (TRBV24-1, TRBJ2-3)
CATSGYRDRDTDTQYF

SEQ ID NO: 692403 - protein, 14 aa, Homo sapiens
  CDR3 for alpha chain variable domain of TCR clone 346202 (TRAV38-1, TRAJ40)
CALRPTSGTYEYIF

SEQ ID NO: 692404 - protein, 11 aa, Homo sapiens
  CDR3 for beta chain variable domain of TCR clone 346202 (TRBV29-1, TRBJ2-5)
CSEDRTGTQYF

SEQ ID NO: 692405 - protein, 17 aa, Homo sapiens
  CDR3 for alpha chain variable domain of TCR clone 346203 (TRAV12-1, TRAJ32)
CVVNMQGYGGATNKLIF

SEQ ID NO: 692406 - protein, 13 aa, Homo sapiens
  CDR3 for beta chain variable domain of TCR clone 346203 (TRBV15, TRBJ1-6)
CATSGGLNSPLHF

SEQ ID NO: 692407 - protein, 18 aa, Homo sapiens
  CDR3 for alpha chain variable domain of TCR clone 346204 (TRAV8-4, TRAJ52)
CAVTRANAGCTSYGKMTF

SEQ ID NO: 692408 - protein, 12 aa, Homo sapiens
  CDR3 for beta chain variable domain of TCR clone 346204 (TRBV12-4, TRBJ2-7)
CASSLGGYEQYF

SEQ ID NO: 692409 - protein, 14 aa, Homo sapiens
  CDR3 for alpha chain variable domain of TCR clone 346205 (TRAV8-3, TRAJ4)
CAVGSAGGYNKLLF

SEQ ID NO: 692410 - protein, 15 aa, Homo sapiens
  CDR3 for beta chain variable domain of TCR clone 346205 (TRBV6-5, TRBJ2-1)
CASSYDAGAGNEQFF

SEQ ID NO: 692411 - protein, 18 aa, Homo sapiens
  CDR3 for alpha chain variable domain of TCR clone 346206 (TRAV35, TRAJ28)
CAGHNYPLSGAGRYQFPF

SEQ ID NO: 692412 - protein, 12 aa, Homo sapiens
  CDR3 for beta chain variable domain of TCR clone 346206 (TRBV7-9, TRBJ1-1)
CASSLEGTEAFF

SEQ ID NO: 692413 - protein, 19 aa, Homo sapiens
  CDR3 for alpha chain variable domain of TCR clone 346207 (TRAV2, TRAJ20)
ILQVREADAAVYRDCELSF

SEQ ID NO: 692414 - protein, 12 aa, Homo sapiens
  CDR3 for beta chain variable domain of TCR clone 346207 (TRBV11-2, TRBJ2-2)
CASSLGGGELFF

SEQ ID NO: 692415 - protein, 14 aa, Homo sapiens
  CDR3 for alpha chain variable domain of TCR clone 346208 (TRAV16, TRAJ15)
RALRPNQAGTALIF

SEQ ID NO: 692416 - protein, 16 aa, Homo sapiens
  CDR3 for beta chain variable domain of TCR clone 346208 (TRBV6-5, TRBJ2-2)
CASSYGRVHDTGELFF

SEQ ID NO: 692417 - protein, 11 aa, Homo sapiens
  CDR3 for alpha chain variable domain of TCR clone 346209 (TRAV35, TRAJ34)
CWARNTDKLIF

SEQ ID NO: 692418 - protein, 18 aa, Homo sapiens
  CDR3 for beta chain variable domain of TCR clone 346209 (TRBV25-1, TRBJ1-2)
CASSGLQNGQGLIFGYTF

SEQ ID NO: 692419 - protein, 12 aa, Homo sapiens
  CDR3 for alpha chain variable domain of TCR clone 346210 (TRAV26-1, TRAJ26)
CIVYNYGQTFVF

SEQ ID NO: 692420 - protein, 15 aa, Homo sapiens
  CDR3 for beta chain variable domain of TCR clone 346210 (TRBV7-2, TRBJ2-3)
CASSLRGESTDTQYF

SEQ ID NO: 692421 - protein, 11 aa, Homo sapiens
  CDR3 for alpha chain variable domain of TCR clone 346211 (TRAV2, TRAJ13)
CASGGYQKVTF

SEQ ID NO: 692422 - protein, 15 aa, Homo sapiens
  CDR3 for beta chain variable domain of TCR clone 346211 (TRBV6-1, TRBJ2-2)
CASSTLRGDTGELFF

SEQ ID NO: 692423 - protein, 16 aa, Homo sapiens
  CDR3 for alpha chain variable domain of TCR clone 346212 (TRAV35, TRAJ28)
WAGQRYSGAGSYQLTF

SEQ ID NO: 692424 - protein, 13 aa, Homo sapiens
  CDR3 for beta chain variable domain of TCR clone 346212 (TRBV19, TRBJ1-2)
CASSQGQVYGYTF

SEQ ID NO: 692425 - protein, 13 aa, Homo sapiens
  CDR3 for alpha chain variable domain of TCR clone 346213 (TRAV30, TRAJ6)
CGFIEGGSYIPTF

SEQ ID NO: 692426 - protein, 13 aa, Homo sapiens
  CDR3 for beta chain variable domain of TCR clone 346213 (TRBV5-4, TRBJ2-5)
CASSPASQETQYF

SEQ ID NO: 692427 - protein, 11 aa, Homo sapiens
  CDR3 for alpha chain variable domain of TCR clone 346214 (TRAV1-2, TRAJ40)
CAVPGTYKYIF

SEQ ID NO: 692428 - protein, 15 aa, Homo sapiens
  CDR3 for beta chain variable domain of TCR clone 346214 (TRBV28, TRBJ1-3)
CASSLAGASGNTIYF

SEQ ID NO: 692429 - protein, 17 aa, Homo sapiens
  CDR3 for alpha chain variable domain of TCR clone 346215 (TRAV26-2, TRAJ37)
CILRDRGGSSNTGKLIF

SEQ ID NO: 692430 - protein, 14 aa, Homo sapiens
  CDR3 for beta chain variable domain of TCR clone 346215 (TRBV4-1, TRBJ2-2)
CASSQAVNTGELFF

SEQ ID NO: 692431 - protein, 16 aa, Homo sapiens
  CDR3 for alpha chain variable domain of TCR clone 346216 (TRAV3, TRAJ37)
CAVRPHGSGHTGKLIF

SEQ ID NO: 692432 - protein, 14 aa, Homo sapiens
  CDR3 for beta chain variable domain of TCR clone 346216 (TRBV20-1, TRBJ2-1)
CSARGGSSYNEQFF

SEQ ID NO: 692433 - protein, 12 aa, Homo sapiens
  CDR3 for alpha chain variable domain of TCR clone 346217 (TRAV21, TRAJ23)
CAVGPQGGKLIF

SEQ ID NO: 692434 - protein, 13 aa, Homo sapiens
  CDR3 for beta chain variable domain of TCR clone 346217 (TRBV20-1, TRBJ2-7)
CSARTGAEYEQYF

SEQ ID NO: 692435 - protein, 12 aa, Homo sapiens
  CDR3 for alpha chain variable domain of TCR clone 346218 (TRAV4, TRAJ26)
CLVGDYGQNFVF

SEQ ID NO: 692436 - protein, 16 aa, Homo sapiens
  CDR3 for beta chain variable domain of TCR clone 346218 (TRBV7-2, TRBJ1-2)
CASSSYQDRRGHGYTF

SEQ ID NO: 692437 - protein, 17 aa, Homo sapiens
  CDR3 for alpha chain variable domain of TCR clone 346219 (TRAV23/DV6, TRAJ58)
CAARLLRGETSGSRLTF

SEQ ID NO: 692438 - protein, 15 aa, Homo sapiens
  CDR3 for beta chain variable domain of TCR clone 346219 (TRBV7-9, TRBJ1-6)
CASSSPGRGNSPLHF

SEQ ID NO: 692439 - protein, 14 aa, Homo sapiens
  CDR3 for alpha chain variable domain of TCR clone 346220 (TRAV27, TRAJ22)
CAGVSVLGKRQLTF

SEQ ID NO: 692440 - protein, 16 aa, Homo sapiens
  CDR3 for beta chain variable domain of TCR clone 346220 (TRBV4-3, TRBJ2-3)
CASSLGLAGEGDTQYF

SEQ ID NO: 692441 - protein, 14 aa, Homo sapiens
  CDR3 for alpha chain variable domain of TCR clone 346221 (TRAV2, TRAJ29)
CAVTPPSGNTPLVF

SEQ ID NO: 692442 - protein, 15 aa, Homo sapiens
  CDR3 for beta chain variable domain of TCR clone 346221 (TRBV27, TRBJ2-1)
CASSNGGGSSNEQFF

SEQ ID NO: 692443 - protein, 13 aa, Homo sapiens
  CDR3 for alpha chain variable domain of TCR clone 346222 (TRAV17, TRAJ54)
SAAGIQGAQKRVF

SEQ ID NO: 692444 - protein, 14 aa, Homo sapiens
  CDR3 for beta chain variable domain of TCR clone 346222 (TRBV11-2, TRBJ1-2)
CASSLGTANYGYTF

SEQ ID NO: 692445 - protein, 14 aa, Homo sapiens
  CDR3 for alpha chain variable domain of TCR clone 346223 (TRAV12-1, TRAJ17)
CVVNYKAAGTKLTF

SEQ ID NO: 692446 - protein, 15 aa, Homo sapiens
  CDR3 for beta chain variable domain of TCR clone 346223 (TRBV20-1, TRBJ2-7)
CSARDRVSGMDEQYF

SEQ ID NO: 692447 - protein, 16 aa, Homo sapiens
  CDR3 for alpha chain variable domain of TCR clone 346224 (TRAV17, TRAJ52)
CATGIIGGTSYGKLTF

SEQ ID NO: 692448 - protein, 14 aa, Homo sapiens
  CDR3 for beta chain variable domain of TCR clone 346224 (TRBV7-3, TRBJ2-3)
CASSPGASRDTQYF

SEQ ID NO: 692449 - protein, 14 aa, Homo sapiens
  CDR3 for alpha chain variable domain of TCR clone 346225 (TRAV17, TRAJ56)
CATVPAGANSKLTF

SEQ ID NO: 692450 - protein, 13 aa, Homo sapiens
  CDR3 for beta chain variable domain of TCR clone 346225 (TRBV12-4, TRBJ2-2)
CASSSTGTGELFL

SEQ ID NO: 692451 - protein, 10 aa, Homo sapiens
  CDR3 for alpha chain variable domain of TCR clone 346226 (TRAV8-4, TRAJ20)
CAVTNVLTTT

SEQ ID NO: 692452 - protein, 13 aa, Homo sapiens
  CDR3 for beta chain variable domain of TCR clone 346226 (TRBV19, TRBJ2-3)
CATWDKITDTQYL

SEQ ID NO: 692453 - protein, 14 aa, Homo sapiens
  CDR3 for alpha chain variable domain of TCR clone 346227 (TRAV12-3, TRAJ42)
CAMNYGGSQGNLIF

SEQ ID NO: 692454 - protein, 16 aa, Homo sapiens
  CDR3 for beta chain variable domain of TCR clone 346227 (TRBV5-4, TRBJ2-3)
CASQQPGAGGADTQYF

SEQ ID NO: 692455 - protein, 15 aa, Homo sapiens
  CDR3 for alpha chain variable domain of TCR clone 346228 (TRAV2, TRAJ24)
CAVEVLTDSWGKLQF

SEQ ID NO: 692456 - protein, 14 aa, Homo sapiens
  CDR3 for beta chain variable domain of TCR clone 346228 (TRBV19, TRBJ2-1)
CASSMGSGRRSSSS

SEQ ID NO: 692457 - protein, 14 aa, Homo sapiens
  CDR3 for alpha chain variable domain of TCR clone 346229 (TRAV13-1, TRAJ44)
CAAKATGTASKLTF

SEQ ID NO: 692458 - protein, 14 aa, Homo sapiens
  CDR3 for beta chain variable domain of TCR clone 346229 (TRBV19, TRBJ2-3)
CASSTLHRSGELFF

SEQ ID NO: 692459 - protein, 14 aa, Homo sapiens
  CDR3 for alpha chain variable domain of TCR clone 346230 (TRAV8-2, TRAJ4)
CVVIPSGGYTKLIF

SEQ ID NO: 692460 - protein, 15 aa, Homo sapiens
  CDR3 for beta chain variable domain of TCR clone 346230 (TRBV4-1, TRBJ1-4)
CASSDTGGTDEKLFF

SEQ ID NO: 692461 - protein, 16 aa, Homo sapiens
  CDR3 for alpha chain variable domain of TCR clone 346231 (TRAV8-3, TRAJ44)
CSVGTLMTGTASKLTF

SEQ ID NO: 692462 - protein, 15 aa, Homo sapiens
  CDR3 for beta chain variable domain of TCR clone 346231 (TRBV10-2, TRBJ2-6)
CASSEQGTGANVLTF

SEQ ID NO: 692463 - protein, 12 aa, Homo sapiens
  CDR3 for alpha chain variable domain of TCR clone 346232 (TRAV12-2, TRAJ10)
WGVTGGGNKLTF

SEQ ID NO: 692464 - protein, 13 aa, Homo sapiens
  CDR3 for beta chain variable domain of TCR clone 346232 (TRBV27, TRBJ2-7)
CQRNGTERREQYF

SEQ ID NO: 692465 - protein, 11 aa, Homo sapiens
  CDR3 for alpha chain variable domain of TCR clone 346233 (TRAV2, TRAJ37)
CAVDNTGKLIF

SEQ ID NO: 692466 - protein, 13 aa, Homo sapiens
  CDR3 for beta chain variable domain of TCR clone 346233 (TRBV7-6, TRBJ2-1)
CQQLGGGADEQFF

SEQ ID NO: 692467 - protein, 14 aa, Homo sapiens
  CDR3 for alpha chain variable domain of TCR clone 346234 (TRAV35, TRAJ42)
CAGRYGGSQGNLIF

SEQ ID NO: 692468 - protein, 16 aa, Homo sapiens
  CDR3 for beta chain variable domain of TCR clone 346234 (TRBV7-3, TRBJ2-1)
CASSLVSGSSNNEQFF

SEQ ID NO: 692469 - protein, 14 aa, Homo sapiens
  CDR3 for alpha chain variable domain of TCR clone 346235 (TRAV26-1, TRAJ21)
CIVRVVYNFNKFYF

SEQ ID NO: 692470 - protein, 17 aa, Homo sapiens
  CDR3 for beta chain variable domain of TCR clone 346235 (TRBV11-2, TRBJ2-1)
CASSLYPSGVEYNEQFF

SEQ ID NO: 692471 - protein, 13 aa, Homo sapiens
  CDR3 for alpha chain variable domain of TCR clone 346236 (TRAV21, TRAJ57)
CAVTHGGSEKLVF

SEQ ID NO: 692472 - protein, 11 aa, Homo sapiens
  CDR3 for beta chain variable domain of TCR clone 346236 (TRBV11-2, TRBJ2-2)
CASSLPGELFF

SEQ ID NO: 692473 - protein, 15 aa, Homo sapiens
  CDR3 for alpha chain variable domain of TCR clone 346237 (TRAV29/DV5, TRAJ42)
CAAKTDGGSQGNLIF

SEQ ID NO: 692474 - protein, 13 aa, Homo sapiens
  CDR3 for beta chain variable domain of TCR clone 346237 (TRBV28, TRBJ2-7)
CASSLPSRYEQYF

SEQ ID NO: 692475 - protein, 14 aa, Homo sapiens
  CDR3 for alpha chain variable domain of TCR clone 346238 (TRAV38-1, TRAJ40)
CALRPTSGTYKYIF

SEQ ID NO: 692476 - protein, 12 aa, Homo sapiens
  CDR3 for beta chain variable domain of TCR clone 346238 (TRBV7-9, TRBJ1-6)
CASSLMTSPLHF

SEQ ID NO: 692477 - protein, 17 aa, Homo sapiens
  CDR3 for alpha chain variable domain of TCR clone 346239 (TRAV13-1, TRAJ52)
CAASSGAGGTSYGKLTF

SEQ ID NO: 692478 - protein, 15 aa, Homo sapiens
  CDR3 for beta chain variable domain of TCR clone 346239 (TRBV2, TRBJ2-1)
CASSEIAGSYNEQFF

SEQ ID NO: 692479 - protein, 18 aa, Homo sapiens
  CDR3 for alpha chain variable domain of TCR clone 346240 (TRAV13-1, TRAJ52)
CAAKNPNAGGTIYGKLTF

SEQ ID NO: 692480 - protein, 13 aa, Homo sapiens
  CDR3 for beta chain variable domain of TCR clone 346240 (TRBV7-3, TRBJ1-1)
CASSQDWGAEAFF

SEQ ID NO: 692481 - protein, 10 aa, Homo sapiens
  CDR3 for alpha chain variable domain of TCR clone 346241 (TRAV12-1, TRAJ43)
CVVHNNDMRF

SEQ ID NO: 692482 - protein, 16 aa, Homo sapiens
  CDR3 for beta chain variable domain of TCR clone 346241 (TRBV2, TRBJ2-1)
CASSVGGSLSYNEQFF

SEQ ID NO: 692483 - protein, 10 aa, Homo sapiens
  CDR3 for alpha chain variable domain of TCR clone 346242 (TRAV21, TRAJ31)
CAVDNARLMF

SEQ ID NO: 692484 - protein, 15 aa, Homo sapiens
  CDR3 for beta chain variable domain of TCR clone 346242 (TRBV7-3, TRBJ2-3)
CQQLLRGGSRDTQYF

SEQ ID NO: 692485 - protein, 13 aa, Homo sapiens
  CDR3 for alpha chain variable domain of TCR clone 346243 (TRAV12-2, TRAJ52)
CAVSGTSYGKLTF

SEQ ID NO: 692486 - protein, 17 aa, Homo sapiens
  CDR3 for beta chain variable domain of TCR clone 346243 (TRBV11-2, TRBJ2-1)
CASSVYPPGVEYNEQFF

SEQ ID NO: 692487 - protein, 13 aa, Homo sapiens
  CDR3 for alpha chain variable domain of TCR clone 346244 (TRAV3, TRAJ3)
CAVADSSASKIIF

SEQ ID NO: 692488 - protein, 12 aa, Homo sapiens
  CDR3 for beta chain variable domain of TCR clone 346244 (TRBV7-8, TRBJ2-7)
CASEGVPHGQYF

SEQ ID NO: 692489 - protein, 12 aa, Homo sapiens
  CDR3 for alpha chain variable domain of TCR clone 346245 (TRAV12-3, TRAJ17)
CAMTLTGNKLTL

SEQ ID NO: 692490 - protein, 15 aa, Homo sapiens
  CDR3 for beta chain variable domain of TCR clone 346245 (TRBV20-1, TRBJ2-7)
CSASDRVSGMDEQYF

SEQ ID NO: 692491 - protein, 15 aa, Homo sapiens
  CDR3 for alpha chain variable domain of TCR clone 346246 (TRAV35, TRAJ20)
CAGQLVGSNDYKLGF

SEQ ID NO: 692492 - protein, 13 aa, Homo sapiens
  CDR3 for beta chain variable domain of TCR clone 346246 (TRBV19, TRBJ2-7)
CASSKTGTHKQYF

SEQ ID NO: 692493 - protein, 14 aa, Homo sapiens
  CDR3 for alpha chain variable domain of TCR clone 346247 (TRAV12-1, TRAJ9)
CVVTGDTGGFKTIF

SEQ ID NO: 692494 - protein, 16 aa, Homo sapiens
  CDR3 for beta chain variable domain of TCR clone 346247 (TRBV29-1, TRBJ1-2)
CSVEANRGIANYGYTF

SEQ ID NO: 692495 - protein, 13 aa, Homo sapiens
  CDR3 for alpha chain variable domain of TCR clone 346248 (TRAV35, TRAJ36)
CAEPRIGANNLFF

SEQ ID NO: 692496 - protein, 15 aa, Homo sapiens
  CDR3 for beta chain variable domain of TCR clone 346248 (TRBV28, TRBJ2-5)
CASSPPWSYQETQYF

SEQ ID NO: 692497 - protein, 16 aa, Homo sapiens
  CDR3 for alpha chain variable domain of TCR clone 346249 (TRAV17, TRAJ28)
CATASVSGAGSYQLTF

SEQ ID NO: 692498 - protein, 14 aa, Homo sapiens
  CDR3 for beta chain variable domain of TCR clone 346249 (TRBV27, TRBJ2-5)
CASSSLKGWETQYF

SEQ ID NO: 692499 - protein, 19 aa, Homo sapiens
  CDR3 for alpha chain variable domain of TCR clone 346250 (TRAV26-1, TRAJ52)
CIVRAHRNAGGTSYGKLTF

SEQ ID NO: 692500 - protein, 15 aa, Homo sapiens
  CDR3 for beta chain variable domain of TCR clone 346250 (TRBV29-1, TRBJ2-1)
CSGRARKSSYNEQFF

SEQ ID NO: 692501 - protein, 15 aa, Homo sapiens
  CDR3 for alpha chain variable domain of TCR clone 346251 (TRAV8-2, TRAJ40)
CVVSDRGSGTYKYIF

SEQ ID NO: 692502 - protein, 17 aa, Homo sapiens
  CDR3 for beta chain variable domain of TCR clone 346251 (TRBV11-2, TRBJ2-1)
CASSLYPPGVEYNEQFF

SEQ ID NO: 692503 - protein, 15 aa, Homo sapiens
  CDR3 for alpha chain variable domain of TCR clone 346252 (TRAV27, TRAJ53)
CAGVVGGGSNYKLTF

SEQ ID NO: 692504 - protein, 14 aa, Homo sapiens
  CDR3 for beta chain variable domain of TCR clone 346252 (TRBV13, TRBJ2-3)
CASSRPSSTYTQYF

SEQ ID NO: 692505 - protein, 15 aa, Homo sapiens
  CDR3 for alpha chain variable domain of TCR clone 346253 (TRAV6, TRAJ37)
CALDLPPSNTGKLIF

SEQ ID NO: 692506 - protein, 16 aa, Homo sapiens
  CDR3 for beta chain variable domain of TCR clone 346253 (TRBV5-1, TRBJ2-2)
CASSSRTGGRTGELFF

SEQ ID NO: 692507 - protein, 14 aa, Homo sapiens
  CDR3 for alpha chain variable domain of TCR clone 346254 (TRAV12-1, TRAJ23)
CVVMVYNQGGKLIF

SEQ ID NO: 692508 - protein, 13 aa, Homo sapiens
  CDR3 for beta chain variable domain of TCR clone 346254 (TRBV11-2, TRBJ2-5)
CASSFSSQETQYF

SEQ ID NO: 692509 - protein, 10 aa, Homo sapiens
  CDR3 for alpha chain variable domain of TCR clone 346255 (TRAV36/DV7, TRAJ48)
CAVGNEKLTF

SEQ ID NO: 692510 - protein, 11 aa, Homo sapiens
  CDR3 for beta chain variable domain of TCR clone 346255 (TRBV6-9, TRBJ2-7)
CARRVASEQYL

SEQ ID NO: 692511 - protein, 14 aa, Homo sapiens
  CDR3 for alpha chain variable domain of TCR clone 346256 (TRAV12-1, TRAJ23)
CVVNIPNQGGKLIF

SEQ ID NO: 692512 - protein, 15 aa, Homo sapiens
  CDR3 for beta chain variable domain of TCR clone 346256 (TRBV2, TRBJ2-7)
CASSEGLARSYEQYF

SEQ ID NO: 692513 - protein, 17 aa, Homo sapiens
  CDR3 for alpha chain variable domain of TCR clone 346257 (TRAV8-6, TRAJ8)
CAVKEGIENTGFQKLVF

SEQ ID NO: 692514 - protein, 15 aa, Homo sapiens
  CDR3 for beta chain variable domain of TCR clone 346257 (TRBV16, TRBJ1-5)
CASSQSGTADQPQHF

SEQ ID NO: 692515 - protein, 13 aa, Homo sapiens
  CDR3 for alpha chain variable domain of TCR clone 346258 (TRAV36/DV7, TRAJ38)
CVTNAGNNRKLIW

SEQ ID NO: 692516 - protein, 14 aa, Homo sapiens
  CDR3 for beta chain variable domain of TCR clone 346258 (TRBV7-2, TRBJ2-7)
CASSLRWEVNEQYF

SEQ ID NO: 692517 - protein, 12 aa, Homo sapiens
  CDR3 for alpha chain variable domain of TCR clone 346259 (TRAV12-3, TRAJ21)
CAMFNNFNKFYF

SEQ ID NO: 692518 - protein, 14 aa, Homo sapiens
  CDR3 for beta chain variable domain of TCR clone 346259 (TRBV7-9, TRBJ2-1)
CASSPRDSLYEQFF

SEQ ID NO: 692519 - protein, 14 aa, Homo sapiens
  CDR3 for alpha chain variable domain of TCR clone 346260 (TRAV38-1, TRAJ40)
CALRPTSGTYKYIF

SEQ ID NO: 692520 - protein, 16 aa, Homo sapiens
  CDR3 for beta chain variable domain of TCR clone 346260 (TRBV19, TRBJ2-2)
CASRSPGTGATGELFF

SEQ ID NO: 692521 - protein, 16 aa, Homo sapiens
  CDR3 for alpha chain variable domain of TCR clone 346261 (TRAV27, TRAJ13)
CAGAKSDSGGYQKVTF

SEQ ID NO: 692522 - protein, 12 aa, Homo sapiens
  CDR3 for beta chain variable domain of TCR clone 346261 (TRBV11-2, TRBJ2-1)
CASSPGNNEQFF

SEQ ID NO: 692523 - protein, 13 aa, Homo sapiens
  CDR3 for alpha chain variable domain of TCR clone 346262 (TRAV12-3, TRAJ33)
FAMSVNSNYRLIW

SEQ ID NO: 692524 - protein, 16 aa, Homo sapiens
  CDR3 for beta chain variable domain of TCR clone 346262 (TRBV13, TRBJ2-5)
CASSLRTGGSWETQYF

SEQ ID NO: 692525 - protein, 13 aa, Homo sapiens
  CDR3 for alpha chain variable domain of TCR clone 346263 (TRAV20, TRAJ37)
CAGCSSNTGKLIF

SEQ ID NO: 692526 - protein, 11 aa, Homo sapiens
  CDR3 for beta chain variable domain of TCR clone 346263 (TRBV12-4, TRBJ2-3)
GATTATDTQYF

SEQ ID NO: 692527 - protein, 14 aa, Homo sapiens
  CDR3 for alpha chain variable domain of TCR clone 346264 (TRAV29/DV5, TRAJ28)
CAARAGAGSYQLTF

SEQ ID NO: 692528 - protein, 13 aa, Homo sapiens
  CDR3 for beta chain variable domain of TCR clone 346264 (TRBV19, TRBJ1-2)
CASSVPGQDGYTF

SEQ ID NO: 692529 - protein, 15 aa, Homo sapiens
  CDR3 for alpha chain variable domain of TCR clone 346265 (TRAV2, TRAJ9)
CAVEDRGTGGFKTIL

SEQ ID NO: 692530 - protein, 16 aa, Homo sapiens
  CDR3 for beta chain variable domain of TCR clone 346265 (TRBV24-1, TRBJ2-3)
CATCDPGTGATDTQYF

SEQ ID NO: 692531 - protein, 14 aa, Homo sapiens
  CDR3 for alpha chain variable domain of TCR clone 346266 (TRAV16, TRAJ33)
YALSAMDSNYQLIW

SEQ ID NO: 692532 - protein, 12 aa, Homo sapiens
  CDR3 for beta chain variable domain of TCR clone 346266 (TRBV5-1, TRBJ1-2)
CASSQDTYGCTF

SEQ ID NO: 692533 - protein, 14 aa, Homo sapiens
  CDR3 for alpha chain variable domain of TCR clone 346267 (TRAV12-1, TRAJ42)
CVVIYGGSQGNHIF

SEQ ID NO: 692534 - protein, 13 aa, Homo sapiens
  CDR3 for beta chain variable domain of TCR clone 346267 (TRBV18, TRBJ2-5)
CASSPPGKETQYF

SEQ ID NO: 692535 - protein, 23 aa, Homo sapiens
  CDR3 for alpha chain variable domain of TCR clone 346268 (TRAV30, TRAJ29)
PAQLLRNLLLWHRAFSGNTPLVF

SEQ ID NO: 692536 - protein, 15 aa, Homo sapiens
  CDR3 for beta chain variable domain of TCR clone 346268 (TRBV5-1, TRBJ2-2)
CASSLFRQNTGELFF

SEQ ID NO: 692537 - protein, 14 aa, Homo sapiens
  CDR3 for alpha chain variable domain of TCR clone 346269 (TRAV12-2, TRAJ53)
CAVKGGGSNYKLTF

SEQ ID NO: 692538 - protein, 15 aa, Homo sapiens
  CDR3 for beta chain variable domain of TCR clone 346269 (TRBV6-1, TRBJ2-5)
GASPRWGTEGQTQYF

SEQ ID NO: 692539 - protein, 13 aa, Homo sapiens
  CDR3 for alpha chain variable domain of TCR clone 346270 (TRAV22, TRAJ37)
CAVPSSNTGKLIF

SEQ ID NO: 692540 - protein, 16 aa, Homo sapiens
  CDR3 for beta chain variable domain of TCR clone 346270 (TRBV25-1, TRBJ1-1)
CASSGDRDRGRIEAFF

SEQ ID NO: 692541 - protein, 12 aa, Homo sapiens
  CDR3 for alpha chain variable domain of TCR clone 346271 (TRAV12-3, TRAJ17)
CAMMLTGNKLTF

SEQ ID NO: 692542 - protein, 15 aa, Homo sapiens
  CDR3 for beta chain variable domain of TCR clone 346271 (TRBV11-2, TRBJ2-1)
CASSSPSTRYNEQFF

SEQ ID NO: 692543 - protein, 10 aa, Homo sapiens
  CDR3 for alpha chain variable domain of TCR clone 346272 (TRAV21, TRAJ31)
CAVDNARLMF

SEQ ID NO: 692544 - protein, 11 aa, Homo sapiens
  CDR3 for beta chain variable domain of TCR clone 346272 (TRBV19, TRBJ1-2)
CASSISSGYTF

SEQ ID NO: 692545 - protein, 14 aa, Homo sapiens
  CDR3 for alpha chain variable domain of TCR clone 346273 (TRAV12-2, TRAJ17)
CAVLFKAAGNKLTL

SEQ ID NO: 692546 - protein, 12 aa, Homo sapiens
  CDR3 for beta chain variable domain of TCR clone 346273 (TRBV11-2, TRBJ2-2)
CASSLGGGELFF

SEQ ID NO: 692547 - protein, 12 aa, Homo sapiens
  CDR3 for alpha chain variable domain of TCR clone 346274 (TRAV12-2, TRAJ34)
CAVSYNTDKLTF

SEQ ID NO: 692548 - protein, 16 aa, Homo sapiens
  CDR3 for beta chain variable domain of TCR clone 346274 (TRBV27, TRBJ2-5)
CASSYGPGGQKETQYF

SEQ ID NO: 692549 - protein, 16 aa, Homo sapiens
  CDR3 for alpha chain variable domain of TCR clone 346275 (TRAV3, TRAJ37)
CALRVRGSGNTGKLIF

SEQ ID NO: 692550 - protein, 13 aa, Homo sapiens
  CDR3 for beta chain variable domain of TCR clone 346275 (TRBV7-9, TRBJ1-2)
CASSLKQNYGYTF

SEQ ID NO: 692551 - protein, 12 aa, Homo sapiens
  CDR3 for alpha chain variable domain of TCR clone 346276 (TRAV12-2, TRAJ45)
CASGGGADGLTF

SEQ ID NO: 692552 - protein, 17 aa, Homo sapiens
  CDR3 for beta chain variable domain of TCR clone 346276 (TRBV19, TRBJ2-3)
ISVPVVRLLASTDTQYF

SEQ ID NO: 692553 - protein, 15 aa, Homo sapiens
  CDR3 for alpha chain variable domain of TCR clone 346277 (TRAV12-1, TRAJ44)
CVVFVNTGTASKLTF

SEQ ID NO: 692554 - protein, 13 aa, Homo sapiens
  CDR3 for beta chain variable domain of TCR clone 346277 (TRBV7-8, TRBJ2-7)
CASSFAGLYEQYF

SEQ ID NO: 692555 - protein, 16 aa, Homo sapiens
  CDR3 for alpha chain variable domain of TCR clone 346278 (TRAV21, TRAJ37)
CAVRTAGSSNTGKLIF

SEQ ID NO: 692556 - protein, 19 aa, Homo sapiens
  CDR3 for beta chain variable domain of TCR clone 346278 (TRBV25-1, TRBJ2-2)
CAILVYRVDRGRKTGELFF

SEQ ID NO: 692557 - protein, 13 aa, Homo sapiens
  CDR3 for alpha chain variable domain of TCR clone 346279 (TRAV35, TRAJ22)
CAGPSGSARQLTF

SEQ ID NO: 692558 - protein, 16 aa, Homo sapiens
  CDR3 for beta chain variable domain of TCR clone 346279 (TRBV7-9, TRBJ2-1)
CASSLVLTGQGNEQFF

SEQ ID NO: 692559 - protein, 11 aa, Homo sapiens
  CDR3 for alpha chain variable domain of TCR clone 346280 (TRAV26-1, TRAJ47)
CIFFHGTWKQT

SEQ ID NO: 692560 - protein, 13 aa, Homo sapiens
  CDR3 for beta chain variable domain of TCR clone 346280 (TRBV24-1, TRBJ2-7)
CATSDWGPYEQYF

SEQ ID NO: 692561 - protein, 13 aa, Homo sapiens
  CDR3 for alpha chain variable domain of TCR clone 346281 (TRAV12-3, TRAJ33)
CAMSLNSNYQLIW

SEQ ID NO: 692562 - protein, 13 aa, Homo sapiens
  CDR3 for beta chain variable domain of TCR clone 346281 (TRBV7-2, TRBJ2-2)
CASSLAVTGELSF

SEQ ID NO: 692563 - protein, 13 aa, Homo sapiens
  CDR3 for alpha chain variable domain of TCR clone 346282 (TRAV3, TRAJ20)
CAVRLSNDYKLSF

SEQ ID NO: 692564 - protein, 16 aa, Homo sapiens
  CDR3 for beta chain variable domain of TCR clone 346282 (TRBV19, TRBJ2-1)
CASSKAGPSSYNEQFF

SEQ ID NO: 692565 - protein, 11 aa, Homo sapiens
  CDR3 for alpha chain variable domain of TCR clone 346283 (TRAV35, TRAJ34)
CWARNTDKLIF

SEQ ID NO: 692566 - protein, 13 aa, Homo sapiens
  CDR3 for beta chain variable domain of TCR clone 346283 (TRBV10-2, TRBJ2-7)
CASGASGGYEQYF

SEQ ID NO: 692567 - protein, 14 aa, Homo sapiens
  CDR3 for alpha chain variable domain of TCR clone 346284 (TRAV1-2, TRAJ16)
CAVNRVSDGQKLLF

SEQ ID NO: 692568 - protein, 12 aa, Homo sapiens
  CDR3 for beta chain variable domain of TCR clone 346284 (TRBV5-1, TRBJ2-7)
CASSSTTYEQYF

SEQ ID NO: 692569 - protein, 12 aa, Homo sapiens
  CDR3 for alpha chain variable domain of TCR clone 346285 (TRAV21, TRAJ37)
CAVRGYTGKLIF

SEQ ID NO: 692570 - protein, 14 aa, Homo sapiens
  CDR3 for beta chain variable domain of TCR clone 346285 (TRBV19, TRBJ2-1)
CASEVTGARNEQFF

SEQ ID NO: 692571 - protein, 13 aa, Homo sapiens
  CDR3 for alpha chain variable domain of TCR clone 346286 (TRAV17, TRAJ5)
CATGDTGRRALTF

SEQ ID NO: 692572 - protein, 14 aa, Homo sapiens
  CDR3 for beta chain variable domain of TCR clone 346286 (TRBV11-1, TRBJ2-7)
CASTFAVPSYEQYF

SEQ ID NO: 692573 - protein, 15 aa, Homo sapiens
  CDR3 for alpha chain variable domain of TCR clone 346287 (TRAV38-2/DV8, TRAJ39)
CAYSTSNNAGNMLTF

SEQ ID NO: 692574 - protein, 15 aa, Homo sapiens
  CDR3 for beta chain variable domain of TCR clone 346287 (TRBV27, TRBJ1-6)
CASSFDRGLGSPLHF

SEQ ID NO: 692575 - protein, 13 aa, Homo sapiens
  CDR3 for alpha chain variable domain of TCR clone 346288 (TRAV29/DV5, TRAJ31)
CAASRNNNARLMF

SEQ ID NO: 692576 - protein, 14 aa, Homo sapiens
  CDR3 for beta chain variable domain of TCR clone 346288 (TRBV20-1, TRBJ2-3)
CSARVRGSTDTQYF

SEQ ID NO: 692577 - protein, 13 aa, Homo sapiens
  CDR3 for alpha chain variable domain of TCR clone 346289 (TRAV8-3, TRAJ48)
CAVVPFGIEKLTF

SEQ ID NO: 692578 - protein, 15 aa, Homo sapiens
  CDR3 for beta chain variable domain of TCR clone 346289 (TRBV11-2, TRBJ2-1)
CASSSPSTRYKEQFF

SEQ ID NO: 692579 - protein, 15 aa, Homo sapiens
  CDR3 for alpha chain variable domain of TCR clone 346290 (TRAV12-3, TRAJ6)
CAMSATTGGSYIPTF

SEQ ID NO: 692580 - protein, 15 aa, Homo sapiens
  CDR3 for beta chain variable domain of TCR clone 346290 (TRBV15, TRBJ1-4)
CATSRDMGSYEKLFF

SEQ ID NO: 692581 - protein, 12 aa, Homo sapiens
  CDR3 for alpha chain variable domain of TCR clone 346291 (TRAV13-1, TRAJ23)
CAERHRGGKLIF

SEQ ID NO: 692582 - protein, 16 aa, Homo sapiens
  CDR3 for beta chain variable domain of TCR clone 346291 (TRBV4-1, TRBJ2-5)
CASTHADRAGGETQYF

SEQ ID NO: 692583 - protein, 13 aa, Homo sapiens
  CDR3 for alpha chain variable domain of TCR clone 346292 (TRAV12-3, TRAJ9)
CAMRNTGGFKTIF

SEQ ID NO: 692584 - protein, 14 aa, Homo sapiens
  CDR3 for beta chain variable domain of TCR clone 346292 (TRBV11-2, TRBJ2-7)
CASSSTGDGYEQYF

SEQ ID NO: 692585 - protein, 12 aa, Homo sapiens
  CDR3 for alpha chain variable domain of TCR clone 346293 (TRAV12-1, TRAJ13)
CVVAGATDKLIF

SEQ ID NO: 692586 - protein, 18 aa, Homo sapiens
  CDR3 for beta chain variable domain of TCR clone 346293 (TRBV24-1, TRBJ2-2)
CATSDSGQGTANTGELFF

SEQ ID NO: 692587 - protein, 15 aa, Homo sapiens
  CDR3 for alpha chain variable domain of TCR clone 346294 (TRAV12-1, TRAJ44)
CVVFVNTGTASKLTF

SEQ ID NO: 692588 - protein, 16 aa, Homo sapiens
  CDR3 for beta chain variable domain of TCR clone 346294 (TRBV20-1, TRBJ2-5)
CSPGGTSGGYMETQYV

SEQ ID NO: 692589 - protein, 17 aa, Homo sapiens
  CDR3 for alpha chain variable domain of TCR clone 346295 (TRAV3, TRAJ42)
CAVRDRDYGGSQGNLIF

SEQ ID NO: 692590 - protein, 16 aa, Homo sapiens
  CDR3 for beta chain variable domain of TCR clone 346295 (TRBV18, TRBJ1-3)
CASSLGILNGENTIYF

SEQ ID NO: 692591 - protein, 13 aa, Homo sapiens
  CDR3 for alpha chain variable domain of TCR clone 346296 (TRAV20, TRAJ37)
CAGCSSNTGKLIF

SEQ ID NO: 692592 - protein, 15 aa, Homo sapiens
  CDR3 for beta chain variable domain of TCR clone 346296 (TRBV28, TRBJ2-1)
CASSGLAEVDNEQFF

SEQ ID NO: 692593 - protein, 12 aa, Homo sapiens
  CDR3 for alpha chain variable domain of TCR clone 346297 (TRAV8-3, TRAJ26)
CAGDNYGQNFFF

SEQ ID NO: 692594 - protein, 11 aa, Homo sapiens
  CDR3 for beta chain variable domain of TCR clone 346297 (TRBV29-1, TRBJ2-5)
CSEDRTGTQYF

SEQ ID NO: 692595 - protein, 15 aa, Homo sapiens
  CDR3 for alpha chain variable domain of TCR clone 346298 (TRAV26-1, TRAJ29)
CIVRVAGSGNTPLVF

SEQ ID NO: 692596 - protein, 15 aa, Homo sapiens
  CDR3 for beta chain variable domain of TCR clone 346298 (TRBV7-9, TRBJ1-5)
CASSQGHQPNQPQHL

SEQ ID NO: 692597 - protein, 14 aa, Homo sapiens
  CDR3 for alpha chain variable domain of TCR clone 346299 (TRAV35, TRAJ13)
GAGSPSGGYQKVTF

SEQ ID NO: 692598 - protein, 13 aa, Homo sapiens
  CDR3 for beta chain variable domain of TCR clone 346299 (TRBV29-1, TRBJ1-1)
CSVGDSRNTEAFF

SEQ ID NO: 692599 - protein, 16 aa, Homo sapiens
  CDR3 for alpha chain variable domain of TCR clone 346300 (TRAV1-2, TRAJ10)
CAVRGVLTGGGNKLTF

SEQ ID NO: 692600 - protein, 16 aa, Homo sapiens
  CDR3 for beta chain variable domain of TCR clone 346300 (TRBV2, TRBJ2-1)
CASRSPAGGKYNEQFF

SEQ ID NO: 692601 - protein, 17 aa, Homo sapiens
  CDR3 for alpha chain variable domain of TCR clone 346301 (TRAV3, TRAJ6)
CSVRDGPRAGGSFIPTF

SEQ ID NO: 692602 - protein, 20 aa, Homo sapiens
  CDR3 for beta chain variable domain of TCR clone 346301 (TRBV28, TRBJ2-1)
CASTPIGRSPGLAGGNEQFF

SEQ ID NO: 692603 - protein, 14 aa, Homo sapiens
  CDR3 for alpha chain variable domain of TCR clone 346302 (TRAV8-4, TRAJ9)
CAVRINTGGFKTIF

SEQ ID NO: 692604 - protein, 14 aa, Homo sapiens
  CDR3 for beta chain variable domain of TCR clone 346302 (TRBV6-3, TRBJ1-1)
CASSYGGQHTEAFF

SEQ ID NO: 692605 - protein, 14 aa, Homo sapiens
  CDR3 for alpha chain variable domain of TCR clone 346303 (TRAV1-2, TRAJ8)
CAVREDTGFQKLVH

SEQ ID NO: 692606 - protein, 13 aa, Homo sapiens
  CDR3 for beta chain variable domain of TCR clone 346303 (TRBV4-2, TRBJ2-2)
CASEDRGTGELFF

SEQ ID NO: 692607 - protein, 12 aa, Homo sapiens
  CDR3 for alpha chain variable domain of TCR clone 346304 (TRAV8-4, TRAJ31)
CAVSDSNARLMF

SEQ ID NO: 692608 - protein, 15 aa, Homo sapiens
  CDR3 for beta chain variable domain of TCR clone 346304 (TRBV27, TRBJ2-7)
CASRFWGQGADEQYF

SEQ ID NO: 692609 - protein, 17 aa, Homo sapiens
  CDR3 for alpha chain variable domain of TCR clone 346305 (TRAV4, TRAJ13)
CLVDVQGSSGGYQKVTF

SEQ ID NO: 692610 - protein, 18 aa, Homo sapiens
  CDR3 for beta chain variable domain of TCR clone 346305 (TRBV15, TRBJ2-3)
CATSRDGARSWDTDTQYF

SEQ ID NO: 692611 - protein, 14 aa, Homo sapiens
  CDR3 for alpha chain variable domain of TCR clone 346306 (TRAV29/DV5, TRAJ32)
CASAYGGATNKLIF

SEQ ID NO: 692612 - protein, 14 aa, Homo sapiens
  CDR3 for beta chain variable domain of TCR clone 346306 (TRBV20-1, TRBJ1-1)
CSAQTRIGGTEAFF

SEQ ID NO: 692613 - protein, 14 aa, Homo sapiens
  CDR3 for alpha chain variable domain of TCR clone 346307 (TRAV8-6, TRAJ34)
CAVSDQGNTDKLIF

SEQ ID NO: 692614 - protein, 13 aa, Homo sapiens
  CDR3 for beta chain variable domain of TCR clone 346307 (TRBV7-6, TRBJ1-2)
CASSLVADYGYTF

SEQ ID NO: 692615 - protein, 16 aa, Homo sapiens
  CDR3 for alpha chain variable domain of TCR clone 346308 (TRAV30, TRAJ24)
CGTEIVDADSWGKFQF

SEQ ID NO: 692616 - protein, 15 aa, Homo sapiens
  CDR3 for beta chain variable domain of TCR clone 346308 (TRBV5-1, TRBJ1-1)
CASSLAPRGNTDAFF

SEQ ID NO: 692617 - protein, 11 aa, Homo sapiens
  CDR3 for alpha chain variable domain of TCR clone 346309 (TRAV21, TRAJ34)
CAVTNTDKLIF

SEQ ID NO: 692618 - protein, 12 aa, Homo sapiens
  CDR3 for beta chain variable domain of TCR clone 346309 (TRBV11-2, TRBJ2-2)
CASSLGGGELFF

SEQ ID NO: 692619 - protein, 14 aa, Homo sapiens
  CDR3 for alpha chain variable domain of TCR clone 346310 (TRAV2, TRAJ9)
CAVDDRSGGFKTIF

SEQ ID NO: 692620 - protein, 17 aa, Homo sapiens
  CDR3 for beta chain variable domain of TCR clone 346310 (TRBV4-1, TRBJ2-7)
CASSRDPLGVRGGEQYF

SEQ ID NO: 692621 - protein, 14 aa, Homo sapiens
  CDR3 for alpha chain variable domain of TCR clone 346311 (TRAV2, TRAJ9)
CAVEDRGGGFKTIF

SEQ ID NO: 692622 - protein, 14 aa, Homo sapiens
  CDR3 for beta chain variable domain of TCR clone 346311 (TRBV28, TRBJ2-7)
CASTFYGRAHEQYF

SEQ ID NO: 692623 - protein, 15 aa, Homo sapiens
  CDR3 for alpha chain variable domain of TCR clone 346312 (TRAV2, TRAJ9)
CAVAALNTVGFKTIF

SEQ ID NO: 692624 - protein, 14 aa, Homo sapiens
  CDR3 for beta chain variable domain of TCR clone 346312 (TRBV7-8, TRBJ2-5)
CASSATGGQETQYF

SEQ ID NO: 692625 - protein, 10 aa, Homo sapiens
  CDR3 for alpha chain variable domain of TCR clone 346313 (TRAV23/DV6, TRAJ43)
CAAAVAALEQ

SEQ ID NO: 692626 - protein, 11 aa, Homo sapiens
  CDR3 for beta chain variable domain of TCR clone 346313 (TRBV11-2, TRBJ2-2)
CASSLPGELFF

SEQ ID NO: 692627 - protein, 13 aa, Homo sapiens
  CDR3 for alpha chain variable domain of TCR clone 346314 (TRAV12-1, TRAJ34)
CVVTCYNTDKLIF

SEQ ID NO: 692628 - protein, 13 aa, Homo sapiens
  CDR3 for beta chain variable domain of TCR clone 346314 (TRBV28, TRBJ2-7)
CASKAGGVYEQYF

SEQ ID NO: 692629 - protein, 16 aa, Homo sapiens
  CDR3 for alpha chain variable domain of TCR clone 346315 (TRAV16, TRAJ52)
CALSAAGGTSYGKLTF

SEQ ID NO: 692630 - protein, 12 aa, Homo sapiens
  CDR3 for beta chain variable domain of TCR clone 346315 (TRBV12-4, TRBJ1-3)
CASSFSGNTRYF

SEQ ID NO: 692631 - protein, 14 aa, Homo sapiens
  CDR3 for alpha chain variable domain of TCR clone 346316 (TRAV21, TRAJ37)
CAVKRSSNTGKLIF

SEQ ID NO: 692632 - protein, 12 aa, Homo sapiens
  CDR3 for beta chain variable domain of TCR clone 346316 (TRBV7-2, TRBJ2-1)
CASSLSGYEQFF

SEQ ID NO: 692633 - protein, 13 aa, Homo sapiens
  CDR3 for alpha chain variable domain of TCR clone 346317 (TRAV12-1, TRAJ26)
CVVRRNYGQNFAF

SEQ ID NO: 692634 - protein, 14 aa, Homo sapiens
  CDR3 for beta chain variable domain of TCR clone 346317 (TRBV6-3, TRBJ1-1)
RASRYTGESTEAFF

SEQ ID NO: 692635 - protein, 12 aa, Homo sapiens
  CDR3 for alpha chain variable domain of TCR clone 346318 (TRAV12-3, TRAJ17)
CAMTLTCSKLTF

SEQ ID NO: 692636 - protein, 15 aa, Homo sapiens
  CDR3 for beta chain variable domain of TCR clone 346318 (TRBV20-1, TRBJ2-7)
CSARDRVSGMDEQYF

SEQ ID NO: 692637 - protein, 14 aa, Homo sapiens
  CDR3 for alpha chain variable domain of TCR clone 346319 (TRAV29/DV5, TRAJ20)
CAASAPIEDYKLSF

SEQ ID NO: 692638 - protein, 13 aa, Homo sapiens
  CDR3 for beta chain variable domain of TCR clone 346319 (TRBV27, TRBJ2-7)
CASSFVSSYEQYF

SEQ ID NO: 692639 - protein, 14 aa, Homo sapiens
  CDR3 for alpha chain variable domain of TCR clone 346320 (TRAV8-2, TRAJ23)
CVVSDDNQGGKFIF

SEQ ID NO: 692640 - protein, 16 aa, Homo sapiens
  CDR3 for beta chain variable domain of TCR clone 346320 (TRBV4-2, TRBJ2-5)
CASSQELVGSQETQYF

SEQ ID NO: 692641 - protein, 15 aa, Homo sapiens
  CDR3 for alpha chain variable domain of TCR clone 346321 (TRAV25, TRAJ10)
CAGPLLTGGGNKLTF

SEQ ID NO: 692642 - protein, 15 aa, Homo sapiens
  CDR3 for beta chain variable domain of TCR clone 346321 (TRBV5-1, TRBJ2-1)
CASSPPRAPYNEQFF

SEQ ID NO: 692643 - protein, 13 aa, Homo sapiens
  CDR3 for alpha chain variable domain of TCR clone 346322 (TRAV21, TRAJ27)
CAARPGNAGKSTS

SEQ ID NO: 692644 - protein, 14 aa, Homo sapiens
  CDR3 for beta chain variable domain of TCR clone 346322 (TRBV7-6, TRBJ2-3)
CASSLGTVTHTQYF

SEQ ID NO: 692645 - protein, 16 aa, Homo sapiens
  CDR3 for alpha chain variable domain of TCR clone 346323 (TRAV3, TRAJ10)
CAVRDMRAGGGNKLTF

SEQ ID NO: 692646 - protein, 13 aa, Homo sapiens
  CDR3 for beta chain variable domain of TCR clone 346323 (TRBV3-1, TRBJ1-1)
CASSPGVITEAFV

SEQ ID NO: 692647 - protein, 12 aa, Homo sapiens
  CDR3 for alpha chain variable domain of TCR clone 346324 (TRAV13-2, TRAJ8)
CAPWLGFQKLVF

SEQ ID NO: 692648 - protein, 13 aa, Homo sapiens
  CDR3 for beta chain variable domain of TCR clone 346324 (TRBV24-1, TRBJ2-2)
CATSDWSTGELFF

SEQ ID NO: 692649 - protein, 11 aa, Homo sapiens
  CDR3 for alpha chain variable domain of TCR clone 346325 (TRAV17, TRAJ43)
CAAPRSNDMRF

SEQ ID NO: 692650 - protein, 14 aa, Homo sapiens
  CDR3 for beta chain variable domain of TCR clone 346325 (TRBV5-4, TRBJ2-1)
CASSLDQGLNEQFF

SEQ ID NO: 692651 - protein, 15 aa, Homo sapiens
  CDR3 for alpha chain variable domain of TCR clone 346326 (TRAV17, TRAJ56)
CATEPFTGVNSKLTF

SEQ ID NO: 692652 - protein, 15 aa, Homo sapiens
  CDR3 for beta chain variable domain of TCR clone 346326 (TRBV28, TRBJ1-5)
CASSRTGGYVQPQHF

SEQ ID NO: 692653 - protein, 13 aa, Homo sapiens
  CDR3 for alpha chain variable domain of TCR clone 346327 (TRAV13-1, TRAJ6)
CAASKGGSYIPTF

SEQ ID NO: 692654 - protein, 15 aa, Homo sapiens
  CDR3 for beta chain variable domain of TCR clone 346327 (TRBV7-9, TRBJ1-4)
CASSARTGGNEKLFF

SEQ ID NO: 692655 - protein, 12 aa, Homo sapiens
  CDR3 for alpha chain variable domain of TCR clone 346328 (TRAV3, TRAJ34)
CAVLGNTDKLIF

SEQ ID NO: 692656 - protein, 15 aa, Homo sapiens
  CDR3 for beta chain variable domain of TCR clone 346328 (TRBV7-6, TRBJ1-5)
CASSQSSGINQPQHF

SEQ ID NO: 692657 - protein, 13 aa, Homo sapiens
  CDR3 for alpha chain variable domain of TCR clone 346329 (TRAV27, TRAJ8)
CAGGPTGFPKLGF

SEQ ID NO: 692658 - protein, 15 aa, Homo sapiens
  CDR3 for beta chain variable domain of TCR clone 346329 (TRBV6-1, TRBJ2-7)
CASSESMGDFYEQYF

SEQ ID NO: 692659 - protein, 13 aa, Homo sapiens
  CDR3 for alpha chain variable domain of TCR clone 346330 (TRAV12-3, TRAJ13)
CAMRSGGYQKVTF

SEQ ID NO: 692660 - protein, 15 aa, Homo sapiens
  CDR3 for beta chain variable domain of TCR clone 346330 (TRBV7-2, TRBJ2-7)
CASSLALGSAYEQYF

SEQ ID NO: 692661 - protein, 13 aa, Homo sapiens
  CDR3 for alpha chain variable domain of TCR clone 346331 (TRAV9-2, TRAJ49)
CAMIQIGGNQFYF

SEQ ID NO: 692662 - protein, 16 aa, Homo sapiens
  CDR3 for beta chain variable domain of TCR clone 346331 (TRBV20-1, TRBJ1-4)
CSAPGQGLLTNEKLFF

SEQ ID NO: 692663 - protein, 14 aa, Homo sapiens
  CDR3 for alpha chain variable domain of TCR clone 346332 (TRAV2, TRAJ9)
CAVEDRSGGFKTIF

SEQ ID NO: 692664 - protein, 14 aa, Homo sapiens
  CDR3 for beta chain variable domain of TCR clone 346332 (TRBV7-9, TRBJ2-7)
CASSPTGGQNEQYF

SEQ ID NO: 692665 - protein, 16 aa, Homo sapiens
  CDR3 for alpha chain variable domain of TCR clone 346333 (TRAV2, TRAJ20)
TTVLWSFRSNDYKLSF

SEQ ID NO: 692666 - protein, 14 aa, Homo sapiens
  CDR3 for beta chain variable domain of TCR clone 346333 (TRBV7-3, TRBJ2-1)
CASSLAGGTNEQFF

SEQ ID NO: 692667 - protein, 12 aa, Homo sapiens
  CDR3 for alpha chain variable domain of TCR clone 346334 (TRAV26-1, TRAJ36)
CIVRVRADNLFF

SEQ ID NO: 692668 - protein, 15 aa, Homo sapiens
  CDR3 for beta chain variable domain of TCR clone 346334 (TRBV12-4, TRBJ1-2)
CASSLAHRDGQAYTF

SEQ ID NO: 692669 - protein, 14 aa, Homo sapiens
  CDR3 for alpha chain variable domain of TCR clone 346335 (TRAV13-1, TRAJ9)
CAASVLTGGFKTIF

SEQ ID NO: 692670 - protein, 15 aa, Homo sapiens
  CDR3 for beta chain variable domain of TCR clone 346335 (TRBV19, TRBJ1-2)
CASSVGQVLNYGYTF

SEQ ID NO: 692671 - protein, 14 aa, Homo sapiens
  CDR3 for alpha chain variable domain of TCR clone 346336 (TRAV1-2, TRAJ8)
CAVREDTGFQKLVF

SEQ ID NO: 692672 - protein, 15 aa, Homo sapiens
  CDR3 for beta chain variable domain of TCR clone 346336 (TRBV15, TRBJ1-1)
CATILQGGRNTEAFF

SEQ ID NO: 692673 - protein, 15 aa, Homo sapiens
  CDR3 for alpha chain variable domain of TCR clone 346337 (TRAV2, TRAJ22)
CAVPSRGGSARQPTF

SEQ ID NO: 692674 - protein, 16 aa, Homo sapiens
  CDR3 for beta chain variable domain of TCR clone 346337 (TRBV7-3, TRBJ2-2)
CASSLKRGTLSGELFF

SEQ ID NO: 692675 - protein, 11 aa, Homo sapiens
  CDR3 for alpha chain variable domain of TCR clone 346338 (TRAV12-3, TRAJ49)
CAANTGNQFYF

SEQ ID NO: 692676 - protein, 15 aa, Homo sapiens
  CDR3 for beta chain variable domain of TCR clone 346338 (TRBV11-2, TRBJ2-1)
CASSLGTNGLNEQFF

SEQ ID NO: 692677 - protein, 14 aa, Homo sapiens
  CDR3 for alpha chain variable domain of TCR clone 346339 (TRAV12-3, TRAJ10)
SHLPLTGGGTKLTF

SEQ ID NO: 692678 - protein, 13 aa, Homo sapiens
  CDR3 for beta chain variable domain of TCR clone 346339 (TRBV29-1, TRBJ2-5)
CSVEATAQGTQYF

SEQ ID NO: 692679 - protein, 12 aa, Homo sapiens
  CDR3 for alpha chain variable domain of TCR clone 346340 (TRAV4, TRAJ26)
CLVGDYGQNFVF

SEQ ID NO: 692680 - protein, 16 aa, Homo sapiens
  CDR3 for beta chain variable domain of TCR clone 346340 (TRBV7-2, TRBJ1-2)
WTSSSNQDRRGHGYTF

SEQ ID NO: 692681 - protein, 13 aa, Homo sapiens
  CDR3 for alpha chain variable domain of TCR clone 346341 (TRAV8-3, TRAJ28)
CAVGAVGSYQLTF

SEQ ID NO: 692682 - protein, 15 aa, Homo sapiens
  CDR3 for beta chain variable domain of TCR clone 346341 (TRBV5-7, TRBJ2-5)
CASSPQAGRRETQYF

SEQ ID NO: 692683 - protein, 11 aa, Homo sapiens
  CDR3 for alpha chain variable domain of TCR clone 346342 (TRAV17, TRAJ9)
CATTEGFKTIF

SEQ ID NO: 692684 - protein, 14 aa, Homo sapiens
  CDR3 for beta chain variable domain of TCR clone 346342 (TRBV7-9, TRBJ2-2)
CASSGLADTGELFF

SEQ ID NO: 692685 - protein, 17 aa, Homo sapiens
  CDR3 for alpha chain variable domain of TCR clone 346343 (TRAV12-2, TRAJ52)
CAVNPYAGGTSYGKLTF

SEQ ID NO: 692686 - protein, 13 aa, Homo sapiens
  CDR3 for beta chain variable domain of TCR clone 346343 (TRBV10-3, TRBJ1-2)
CAISERDSYGYTF

SEQ ID NO: 692687 - protein, 15 aa, Homo sapiens
  CDR3 for alpha chain variable domain of TCR clone 346344 (TRAV3, TRAJ5)
CAVRDLDTGRRALTF

SEQ ID NO: 692688 - protein, 15 aa, Homo sapiens
  CDR3 for beta chain variable domain of TCR clone 346344 (TRBV20-1, TRBJ2-1)
CSARSPGVPGNEQFF

SEQ ID NO: 692689 - protein, 14 aa, Homo sapiens
  CDR3 for alpha chain variable domain of TCR clone 346345 (TRAV2, TRAJ9)
CAVEDRRGGFKTIF

SEQ ID NO: 692690 - protein, 14 aa, Homo sapiens
  CDR3 for beta chain variable domain of TCR clone 346345 (TRBV3-1, TRBJ2-5)
CASSQGPDQETQYF

SEQ ID NO: 692691 - protein, 13 aa, Homo sapiens
  CDR3 for alpha chain variable domain of TCR clone 346346 (TRAV24, TRAJ15)
CAFKDQAVTALIF

SEQ ID NO: 692692 - protein, 14 aa, Homo sapiens
  CDR3 for beta chain variable domain of TCR clone 346346 (TRBV2, TRBJ2-1)
CASSLSGSQGEQFF

SEQ ID NO: 692693 - protein, 13 aa, Homo sapiens
  CDR3 for alpha chain variable domain of TCR clone 346347 (TRAV12-1, TRAJ11)
CVVNQAGYSTLTF

SEQ ID NO: 692694 - protein, 15 aa, Homo sapiens
  CDR3 for beta chain variable domain of TCR clone 346347 (TRBV7-3, TRBJ2-2)
CASSETGQGTGELFF

SEQ ID NO: 692695 - protein, 12 aa, Homo sapiens
  CDR3 for alpha chain variable domain of TCR clone 346348 (TRAV12-3, TRAJ17)
CAMTLTGNKLTF

SEQ ID NO: 692696 - protein, 14 aa, Homo sapiens
  CDR3 for beta chain variable domain of TCR clone 346348 (TRBV7-6, TRBJ1-6)
CASSQAGGGSPPHF

SEQ ID NO: 692697 - protein, 13 aa, Homo sapiens
  CDR3 for alpha chain variable domain of TCR clone 346349 (TRAV12-1, TRAJ35)
CVVRGGFGNVLHC

SEQ ID NO: 692698 - protein, 13 aa, Homo sapiens
  CDR3 for beta chain variable domain of TCR clone 346349 (TRBV19, TRBJ2-1)
CASTNSDVGEQLF

SEQ ID NO: 692699 - protein, 12 aa, Homo sapiens
  CDR3 for alpha chain variable domain of TCR clone 346350 (TRAV12-3, TRAJ17)
CAMTLTGNKLTF

SEQ ID NO: 692700 - protein, 15 aa, Homo sapiens
  CDR3 for beta chain variable domain of TCR clone 346350 (TRBV5-1, TRBJ2-5)
CASSLAQGVVATQYF

SEQ ID NO: 692701 - protein, 10 aa, Homo sapiens
  CDR3 for alpha chain variable domain of TCR clone 346351 (TRAV21, TRAJ11)
CCERIQDLTF

SEQ ID NO: 692702 - protein, 11 aa, Homo sapiens
  CDR3 for beta chain variable domain of TCR clone 346351 (TRBV19, TRBJ1-1)
CASSIGSEAFF

SEQ ID NO: 692703 - protein, 16 aa, Homo sapiens
  CDR3 for alpha chain variable domain of TCR clone 346352 (TRAV38-2/DV8, TRAJ45)
CAYRGNSGGGADGRTF

SEQ ID NO: 692704 - protein, 17 aa, Homo sapiens
  CDR3 for beta chain variable domain of TCR clone 346352 (TRBV11-3, TRBJ2-5)
CASSLPGVRGGKETQYF

SEQ ID NO: 692705 - protein, 13 aa, Homo sapiens
  CDR3 for alpha chain variable domain of TCR clone 346353 (TRAV2, TRAJ40)
CTVVTSGTYKYIF

SEQ ID NO: 692706 - protein, 14 aa, Homo sapiens
  CDR3 for beta chain variable domain of TCR clone 346353 (TRBV19, TRBJ2-1)
CASPNFVLSGEQFF

SEQ ID NO: 692707 - protein, 15 aa, Homo sapiens
  CDR3 for alpha chain variable domain of TCR clone 346354 (TRAV26-2, TRAJ39)
CSLRGNNNAGNMLTF

SEQ ID NO: 692708 - protein, 15 aa, Homo sapiens
  CDR3 for beta chain variable domain of TCR clone 346354 (TRBV5-4, TRBJ1-1)
CANSSLGWANTEAFF

SEQ ID NO: 692709 - protein, 14 aa, Homo sapiens
  CDR3 for alpha chain variable domain of TCR clone 346355 (TRAV12-2, TRAJ53)
CAVKGGGSNYKLTF

SEQ ID NO: 692710 - protein, 12 aa, Homo sapiens
  CDR3 for beta chain variable domain of TCR clone 346355 (TRBV19, TRBJ2-1)
CASSMQDTEQFF

SEQ ID NO: 692711 - protein, 11 aa, Homo sapiens
  CDR3 for alpha chain variable domain of TCR clone 346356 (TRAV35, TRAJ30)
CAGPGDAKIIF

SEQ ID NO: 692712 - protein, 18 aa, Homo sapiens
  CDR3 for beta chain variable domain of TCR clone 346356 (TRBV7-6, TRBJ2-1)
CASSPRTSGMSSYNEQFV

SEQ ID NO: 692713 - protein, 17 aa, Homo sapiens
  CDR3 for alpha chain variable domain of TCR clone 346357 (TRAV3, TRAJ6)
CAVRDGPRAGGSYIPPF

SEQ ID NO: 692714 - protein, 14 aa, Homo sapiens
  CDR3 for beta chain variable domain of TCR clone 346357 (TRBV7-2, TRBJ2-7)
CASGPKTSFYEQYF

SEQ ID NO: 692715 - protein, 16 aa, Homo sapiens
  CDR3 for alpha chain variable domain of TCR clone 346358 (TRAV3, TRAJ37)
CAVRGKGSGNTGKLIF

SEQ ID NO: 692716 - protein, 15 aa, Homo sapiens
  CDR3 for beta chain variable domain of TCR clone 346358 (TRBV7-9, TRBJ1-6)
WASSSPGRGNSPLHF

SEQ ID NO: 692717 - protein, 15 aa, Homo sapiens
  CDR3 for alpha chain variable domain of TCR clone 346359 (TRAV26-1, TRAJ23)
CIVRVLNNQGGKRIF

SEQ ID NO: 692718 - protein, 15 aa, Homo sapiens
  CDR3 for beta chain variable domain of TCR clone 346359 (TRBV7-3, TRBJ2-1)
CASSFGQSNYNEQFF

SEQ ID NO: 692719 - protein, 15 aa, Homo sapiens
  CDR3 for alpha chain variable domain of TCR clone 346360 (TRAV8-6, TRAJ49)
CAVSEGPDTGNQFYF

SEQ ID NO: 692720 - protein, 14 aa, Homo sapiens
  CDR3 for beta chain variable domain of TCR clone 346360 (TRBV7-2, TRBJ2-7)
CASSPKTSFYEQYF

SEQ ID NO: 692721 - protein, 15 aa, Homo sapiens
  CDR3 for alpha chain variable domain of TCR clone 346361 (TRAV26-1, TRAJ22)
CIVRVSFWFCKATDL

SEQ ID NO: 692722 - protein, 18 aa, Homo sapiens
  CDR3 for beta chain variable domain of TCR clone 346361 (TRBV12-4, TRBJ2-2)
CASSLVAGTRGRTGELFF

SEQ ID NO: 692723 - protein, 16 aa, Homo sapiens
  CDR3 for alpha chain variable domain of TCR clone 346362 (TRAV30, TRAJ24)
CGTEIVDADSWGKFQF

SEQ ID NO: 692724 - protein, 14 aa, Homo sapiens
  CDR3 for beta chain variable domain of TCR clone 346362 (TRBV7-3, TRBJ2-7)
CASSLKADSYEQYF

SEQ ID NO: 692725 - protein, 14 aa, Homo sapiens
  CDR3 for alpha chain variable domain of TCR clone 346363 (TRAV23/DV6, TRAJ3)
CAASMASSASEIIF

SEQ ID NO: 692726 - protein, 13 aa, Homo sapiens
  CDR3 for beta chain variable domain of TCR clone 346363 (TRBV27, TRBJ2-5)
CASFSRGLETQYF

SEQ ID NO: 692727 - protein, 11 aa, Homo sapiens
  CDR3 for alpha chain variable domain of TCR clone 346364 (TRAV12-3, TRAJ16)
CAIRDGQKLPF

SEQ ID NO: 692728 - protein, 14 aa, Homo sapiens
  CDR3 for beta chain variable domain of TCR clone 346364 (TRBV7-2, TRBJ2-7)
CASSPKTSFYEQYF

SEQ ID NO: 692729 - protein, 14 aa, Homo sapiens
  CDR3 for alpha chain variable domain of TCR clone 346365 (TRAV12-3, TRAJ12)
CAMSRRDSSYKLIF

SEQ ID NO: 692730 - protein, 14 aa, Homo sapiens
  CDR3 for beta chain variable domain of TCR clone 346365 (TRBV20-1, TRBJ1-4)
CSARSGQSNEKLFF

SEQ ID NO: 692731 - protein, 12 aa, Homo sapiens
  CDR3 for alpha chain variable domain of TCR clone 346366 (TRAV8-3, TRAJ20)
CAVDFNDYKISF

SEQ ID NO: 692732 - protein, 17 aa, Homo sapiens
  CDR3 for beta chain variable domain of TCR clone 346366 (TRBV7-8, TRBJ2-6)
CASSAGTGGAGANVLTF

SEQ ID NO: 692733 - protein, 13 aa, Homo sapiens
  CDR3 for alpha chain variable domain of TCR clone 346367 (TRAV12-2, TRAJ10)
CAVPTGGGDKLTF

SEQ ID NO: 692734 - protein, 15 aa, Homo sapiens
  CDR3 for beta chain variable domain of TCR clone 346367 (TRBV5-1, TRBJ2-1)
CASKGLAGVYNEQFF

SEQ ID NO: 692735 - protein, 14 aa, Homo sapiens
  CDR3 for alpha chain variable domain of TCR clone 346368 (TRAV12-2, TRAJ13)
CAVKKTGGYQKVIF

SEQ ID NO: 692736 - protein, 14 aa, Homo sapiens
  CDR3 for beta chain variable domain of TCR clone 346368 (TRBV7-2, TRBJ2-7)
CASSPKTSFYEQYF

SEQ ID NO: 692737 - protein, 14 aa, Homo sapiens
  CDR3 for alpha chain variable domain of TCR clone 346369 (TRAV8-3, TRAJ3)
CAVVPWSSASKIIF

SEQ ID NO: 692738 - protein, 18 aa, Homo sapiens
  CDR3 for beta chain variable domain of TCR clone 346369 (TRBV4-1, TRBJ2-3)
CASSQLTSGGGIRSILAQ

SEQ ID NO: 692739 - protein, 15 aa, Homo sapiens
  CDR3 for alpha chain variable domain of TCR clone 346370 (TRAV3, TRAJ45)
CSVRTPLGGADGLTF

SEQ ID NO: 692740 - protein, 16 aa, Homo sapiens
  CDR3 for beta chain variable domain of TCR clone 346370 (TRBV6-1, TRBJ2-2)
CASSFGQGANTGELFF

SEQ ID NO: 692741 - protein, 21 aa, Homo sapiens
  CDR3 for alpha chain variable domain of TCR clone 346371 (TRAV1-1, TRAJ6)
CLLLLRCERLERTGGSYIPTF

SEQ ID NO: 692742 - protein, 15 aa, Homo sapiens
  CDR3 for beta chain variable domain of TCR clone 346371 (TRBV20-1, TRBJ2-7)
CSARDRVSGMDEQYF

SEQ ID NO: 692743 - protein, 13 aa, Homo sapiens
  CDR3 for alpha chain variable domain of TCR clone 346372 (TRAV12-2, TRAJ50)
CAVIVTSYDKVIF

SEQ ID NO: 692744 - protein, 13 aa, Homo sapiens
  CDR3 for beta chain variable domain of TCR clone 346372 (TRBV7-7, TRBJ2-3)
CASSLSRADTQYF

SEQ ID NO: 692745 - protein, 13 aa, Homo sapiens
  CDR3 for alpha chain variable domain of TCR clone 346373 (TRAV36/DV7, TRAJ34)
CAVGDVNTDKLIF

SEQ ID NO: 692746 - protein, 13 aa, Homo sapiens
  CDR3 for beta chain variable domain of TCR clone 346373 (TRBV12-5, TRBJ2-3)
CASGDRQSDTQYF

SEQ ID NO: 692747 - protein, 14 aa, Homo sapiens
  CDR3 for alpha chain variable domain of TCR clone 346374 (TRAV8-4, TRAJ13)
CAVTLSGGYQKDTF

SEQ ID NO: 692748 - protein, 14 aa, Homo sapiens
  CDR3 for beta chain variable domain of TCR clone 346374 (TRBV7-2, TRBJ1-2)
CASSQTGSTYGYTF

SEQ ID NO: 692749 - protein, 11 aa, Homo sapiens
  CDR3 for alpha chain variable domain of TCR clone 346375 (TRAV1-2, TRAJ20)
CAVSNDYKLSV

SEQ ID NO: 692750 - protein, 16 aa, Homo sapiens
  CDR3 for beta chain variable domain of TCR clone 346375 (TRBV29-1, TRBJ2-6)
CSVEDITYSGANVLTF

SEQ ID NO: 692751 - protein, 15 aa, Homo sapiens
  CDR3 for alpha chain variable domain of TCR clone 346376 (TRAV8-3, TRAJ45)
CASSYSGGGADGLTF

SEQ ID NO: 692752 - protein, 13 aa, Homo sapiens
  CDR3 for beta chain variable domain of TCR clone 346376 (TRBV11-3, TRBJ1-1)
CASTGSLNTEAFF

SEQ ID NO: 692753 - protein, 16 aa, Homo sapiens
  CDR3 for alpha chain variable domain of TCR clone 346377 (TRAV17, TRAJ22)
CATGPISSGSARQLTF

SEQ ID NO: 692754 - protein, 15 aa, Homo sapiens
  CDR3 for beta chain variable domain of TCR clone 346377 (TRBV28, TRBJ2-1)
CASSIIAGGRSEQFF

SEQ ID NO: 692755 - protein, 18 aa, Homo sapiens
  CDR3 for alpha chain variable domain of TCR clone 346378 (TRAV21, TRAJ52)
CDVRPSLAGGTSYGKLTF

SEQ ID NO: 692756 - protein, 17 aa, Homo sapiens
  CDR3 for beta chain variable domain of TCR clone 346378 (TRBV13, TRBJ2-3)
CASSLSRVAGGRNTQYF

SEQ ID NO: 692757 - protein, 18 aa, Homo sapiens
  CDR3 for alpha chain variable domain of TCR clone 346379 (TRAV21, TRAJ52)
CAVRPYPAGGTSYGKLTF

SEQ ID NO: 692758 - protein, 15 aa, Homo sapiens
  CDR3 for beta chain variable domain of TCR clone 346379 (TRBV9, TRBJ1-6)
CASSVAGTGDSPLHF

SEQ ID NO: 692759 - protein, 12 aa, Homo sapiens
  CDR3 for alpha chain variable domain of TCR clone 346380 (TRAV1-2, TRAJ29)
CAVPSGNTPLVF

SEQ ID NO: 692760 - protein, 14 aa, Homo sapiens
  CDR3 for beta chain variable domain of TCR clone 346380 (TRBV27, TRBJ1-1)
CASSLLSGLSEAFF

SEQ ID NO: 692761 - protein, 16 aa, Homo sapiens
  CDR3 for alpha chain variable domain of TCR clone 346381 (TRAV3, TRAJ10)
CAVRDMRAGEGNKLTF

SEQ ID NO: 692762 - protein, 20 aa, Homo sapiens
  CDR3 for beta chain variable domain of TCR clone 346381 (TRBV11-3, TRBJ2-7)
CASSQRTSGSLRAVLRAGHQ

SEQ ID NO: 692763 - protein, 12 aa, Homo sapiens
  CDR3 for alpha chain variable domain of TCR clone 346382 (TRAV25, TRAJ20)
CAGRSNDYKLSF

SEQ ID NO: 692764 - protein, 15 aa, Homo sapiens
  CDR3 for beta chain variable domain of TCR clone 346382 (TRBV7-6, TRBJ2-7)
CASSGRRDTVGEQYF

SEQ ID NO: 692765 - protein, 14 aa, Homo sapiens
  CDR3 for alpha chain variable domain of TCR clone 346383 (TRAV13-2, TRAJ11)
CAETGSSGYSTLTF

SEQ ID NO: 692766 - protein, 11 aa, Homo sapiens
  CDR3 for beta chain variable domain of TCR clone 346383 (TRBV10-3, TRBJ2-7)
CAISEGLEQYF

SEQ ID NO: 692767 - protein, 16 aa, Homo sapiens
  CDR3 for alpha chain variable domain of TCR clone 346384 (TRAV16, TRAJ52)
CALSAAGGTSYGKLPF

SEQ ID NO: 692768 - protein, 16 aa, Homo sapiens
  CDR3 for beta chain variable domain of TCR clone 346384 (TRBV12-4, TRBJ1-5)
CASSRPVGGSNQPQHF

SEQ ID NO: 692769 - protein, 15 aa, Homo sapiens
  CDR3 for alpha chain variable domain of TCR clone 346385 (TRAV8-3, TRAJ45)
CASSYSGGGSEGLTF

SEQ ID NO: 692770 - protein, 13 aa, Homo sapiens
  CDR3 for beta chain variable domain of TCR clone 346385 (TRBV10-3, TRBJ2-7)
CASKLAVNYEQYF

SEQ ID NO: 692771 - protein, 14 aa, Homo sapiens
  CDR3 for alpha chain variable domain of TCR clone 346386 (TRAV29/DV5, TRAJ45)
CAASFRAGADGRTF

SEQ ID NO: 692772 - protein, 11 aa, Homo sapiens
  CDR3 for beta chain variable domain of TCR clone 346386 (TRBV11-2, TRBJ2-2)
CASSLPGELFF

SEQ ID NO: 692773 - protein, 17 aa, Homo sapiens
  CDR3 for alpha chain variable domain of TCR clone 346387 (TRAV3, TRAJ12)
CAVRDGGRMGSSYKLIF

SEQ ID NO: 692774 - protein, 13 aa, Homo sapiens
  CDR3 for beta chain variable domain of TCR clone 346387 (TRBV12-4, TRBJ1-2)
CASSLRQGKGYTF

SEQ ID NO: 692775 - protein, 14 aa, Homo sapiens
  CDR3 for alpha chain variable domain of TCR clone 346388 (TRAV13-1, TRAJ40)
CAANVTSGTYKYIF

SEQ ID NO: 692776 - protein, 15 aa, Homo sapiens
  CDR3 for beta chain variable domain of TCR clone 346388 (TRBV7-3, TRBJ2-1)
CASSPTGGGEVEQFF

SEQ ID NO: 692777 - protein, 17 aa, Homo sapiens
  CDR3 for alpha chain variable domain of TCR clone 346389 (TRAV3, TRAJ42)
CAVRDRDYGGSQGNLIF

SEQ ID NO: 692778 - protein, 14 aa, Homo sapiens
  CDR3 for beta chain variable domain of TCR clone 346389 (TRBV7-2, TRBJ2-5)
CASSFTQGQETQYF

SEQ ID NO: 692779 - protein, 19 aa, Homo sapiens
  CDR3 for alpha chain variable domain of TCR clone 346390 (TRAV1-1, TRAJ37)
CALPSSGRYGSGNTGKLIF

SEQ ID NO: 692780 - protein, 14 aa, Homo sapiens
  CDR3 for beta chain variable domain of TCR clone 346390 (TRBV7-6, TRBJ2-7)
CASSLGDRGYEQYF

SEQ ID NO: 692781 - protein, 14 aa, Homo sapiens
  CDR3 for alpha chain variable domain of TCR clone 346391 (TRAV12-1, TRAJ17)
CVVNYKAAGNKLTF

SEQ ID NO: 692782 - protein, 15 aa, Homo sapiens
  CDR3 for beta chain variable domain of TCR clone 346391 (TRBV2, TRBJ2-1)
CASRGTGANYNEQFF

SEQ ID NO: 692783 - protein, 14 aa, Homo sapiens
  CDR3 for alpha chain variable domain of TCR clone 346392 (TRAV16, TRAJ31)
CSTWRRGDNARLMF

SEQ ID NO: 692784 - protein, 16 aa, Homo sapiens
  CDR3 for beta chain variable domain of TCR clone 346392 (TRBV28, TRBJ2-7)
CASSLFFETGGPEQYF

SEQ ID NO: 692785 - protein, 13 aa, Homo sapiens
  CDR3 for alpha chain variable domain of TCR clone 346393 (TRAV1-2, TRAJ9)
CAALNTGGFKTIF

SEQ ID NO: 692786 - protein, 16 aa, Homo sapiens
  CDR3 for beta chain variable domain of TCR clone 346393 (TRBV5-7, TRBJ2-7)
CASSSPGGRTPYEQYF

SEQ ID NO: 692787 - protein, 14 aa, Homo sapiens
  CDR3 for alpha chain variable domain of TCR clone 346394 (TRAV1-2, TRAJ16)
CAVKRFSDGQKLLF

SEQ ID NO: 692788 - protein, 13 aa, Homo sapiens
  CDR3 for beta chain variable domain of TCR clone 346394 (TRBV19, TRBJ1-2)
CASSVPGQDGYTF

SEQ ID NO: 692789 - protein, 14 aa, Homo sapiens
  CDR3 for alpha chain variable domain of TCR clone 346395 (TRAV35, TRAJ50)
CAGHRKTSYDKVIS

SEQ ID NO: 692790 - protein, 13 aa, Homo sapiens
  CDR3 for beta chain variable domain of TCR clone 346395 (TRBV7-7, TRBJ2-3)
CASSLSRADTQDF

SEQ ID NO: 692791 - protein, 15 aa, Homo sapiens
  CDR3 for alpha chain variable domain of TCR clone 346396 (TRAV21, TRAJ53)
CATLNSGGSNYKLTF

SEQ ID NO: 692792 - protein, 13 aa, Homo sapiens
  CDR3 for beta chain variable domain of TCR clone 346396 (TRBV4-2, TRBJ2-7)
CASSQDRQGPQYF

SEQ ID NO: 692793 - protein, 13 aa, Homo sapiens
  CDR3 for alpha chain variable domain of TCR clone 346397 (TRAV13-1, TRAJ43)
CAASLSNNNDMRF

SEQ ID NO: 692794 - protein, 14 aa, Homo sapiens
  CDR3 for beta chain variable domain of TCR clone 346397 (TRBV5-1, TRBJ2-5)
CASSLAGKQETLYF

SEQ ID NO: 692795 - protein, 13 aa, Homo sapiens
  CDR3 for alpha chain variable domain of TCR clone 346398 (TRAV21, TRAJ20)
CSVGLRVDYKLSF

SEQ ID NO: 692796 - protein, 11 aa, Homo sapiens
  CDR3 for beta chain variable domain of TCR clone 346398 (TRBV25-1, TRBJ2-1)
CATTRISEQFF

SEQ ID NO: 692797 - protein, 12 aa, Homo sapiens
  CDR3 for alpha chain variable domain of TCR clone 346399 (TRAV12-3, TRAJ17)
CAMTLTGNKLTF

SEQ ID NO: 692798 - protein, 18 aa, Homo sapiens
  CDR3 for beta chain variable domain of TCR clone 346399 (TRBV5-1, TRBJ1-4)
CASSIRRGTRGGVEKLVF

SEQ ID NO: 692799 - protein, 12 aa, Homo sapiens
  CDR3 for alpha chain variable domain of TCR clone 346400 (TRAV3, TRAJ39)
CAVIEWSNMLTF

SEQ ID NO: 692800 - protein, 15 aa, Homo sapiens
  CDR3 for beta chain variable domain of TCR clone 346400 (TRBV10-3, TRBJ2-1)
CAISDVQDRAYEQFF

SEQ ID NO: 692801 - protein, 13 aa, Homo sapiens
  CDR3 for alpha chain variable domain of TCR clone 346401 (TRAV12-2, TRAJ12)
FAVNGDSSYKLIF

SEQ ID NO: 692802 - protein, 15 aa, Homo sapiens
  CDR3 for beta chain variable domain of TCR clone 346401 (TRBV7-8, TRBJ2-1)
CASSPSGTIYNEQFF

SEQ ID NO: 692803 - protein, 14 aa, Homo sapiens
  CDR3 for alpha chain variable domain of TCR clone 346402 (TRAV12-3, TRAJ37)
CVSEGSSNTGKLIF

SEQ ID NO: 692804 - protein, 14 aa, Homo sapiens
  CDR3 for beta chain variable domain of TCR clone 346402 (TRBV20-1, TRBJ1-1)
CSAQTRIGGTEAFF

SEQ ID NO: 692805 - protein, 14 aa, Homo sapiens
  CDR3 for alpha chain variable domain of TCR clone 346403 (TRAV8-4, TRAJ37)
CAVSKPSNTGKLIF

SEQ ID NO: 692806 - protein, 14 aa, Homo sapiens
  CDR3 for beta chain variable domain of TCR clone 346403 (TRBV28, TRBJ2-1)
CAIHRTGARTEQFF

SEQ ID NO: 692807 - protein, 14 aa, Homo sapiens
  CDR3 for alpha chain variable domain of TCR clone 346404 (TRAV3, TRAJ5)
CAVRSDTGRRALTF

SEQ ID NO: 692808 - protein, 15 aa, Homo sapiens
  CDR3 for beta chain variable domain of TCR clone 346404 (TRBV7-9, TRBJ1-2)
CASSLDREPNYGYTF

SEQ ID NO: 692809 - protein, 14 aa, Homo sapiens
  CDR3 for alpha chain variable domain of TCR clone 346405 (TRAV16, TRAJ57)
CSLSGQGGSEKLVF

SEQ ID NO: 692810 - protein, 13 aa, Homo sapiens
  CDR3 for beta chain variable domain of TCR clone 346405 (TRBV5-4, TRBJ2-1)
CASSLQGPREQFF

SEQ ID NO: 692811 - protein, 14 aa, Homo sapiens
  CDR3 for alpha chain variable domain of TCR clone 346406 (TRAV13-1, TRAJ44)
CAAKATGTASKLTF

SEQ ID NO: 692812 - protein, 12 aa, Homo sapiens
  CDR3 for beta chain variable domain of TCR clone 346406 (TRBV11-2, TRBJ2-7)
CASSPPADEQYF

SEQ ID NO: 692813 - protein, 16 aa, Homo sapiens
  CDR3 for alpha chain variable domain of TCR clone 346407 (TRAV13-1, TRAJ45)
CAAPKESGGGADGLTC

SEQ ID NO: 692814 - protein, 15 aa, Homo sapiens
  CDR3 for beta chain variable domain of TCR clone 346407 (TRBV20-1, TRBJ2-7)
CSARGRVSGMDEQYF

SEQ ID NO: 692815 - protein, 19 aa, Homo sapiens
  CDR3 for alpha chain variable domain of TCR clone 346408 (TRAV8-3, TRAJ34)
LSTSVLWVWGLRNTDKLIF

SEQ ID NO: 692816 - protein, 15 aa, Homo sapiens
  CDR3 for beta chain variable domain of TCR clone 346408 (TRBV20-1, TRBJ2-7)
CSARDRVSGMDEQYF

SEQ ID NO: 692817 - protein, 14 aa, Homo sapiens
  CDR3 for alpha chain variable domain of TCR clone 346409 (TRAV26-1, TRAJ38)
CIADNAGNNRKLIW

SEQ ID NO: 692818 - protein, 13 aa, Homo sapiens
  CDR3 for beta chain variable domain of TCR clone 346409 (TRBV4-1, TRBJ2-7)
CASSQGQAYEHYF

SEQ ID NO: 692819 - protein, 15 aa, Homo sapiens
  CDR3 for alpha chain variable domain of TCR clone 346410 (TRAV3, TRAJ3)
CAVRDRDSSASKIIF

SEQ ID NO: 692820 - protein, 12 aa, Homo sapiens
  CDR3 for beta chain variable domain of TCR clone 346410 (TRBV5-1, TRBJ2-1)
CASIGGYNEQFF

SEQ ID NO: 692821 - protein, 16 aa, Homo sapiens
  CDR3 for alpha chain variable domain of TCR clone 346411 (TRAV17, TRAJ22)
CATGPISPGSARQLTF

SEQ ID NO: 692822 - protein, 13 aa, Homo sapiens
  CDR3 for beta chain variable domain of TCR clone 346411 (TRBV11-2, TRBJ2-1)
CASSLGLAGGRFF

SEQ ID NO: 692823 - protein, 18 aa, Homo sapiens
  CDR3 for alpha chain variable domain of TCR clone 346412 (TRAV4, TRAJ10)
CLVGDIPLLTGGGNKLTF

SEQ ID NO: 692824 - protein, 15 aa, Homo sapiens
  CDR3 for beta chain variable domain of TCR clone 346412 (TRBV18, TRBJ2-1)
CASSPPSASYNEQFF

SEQ ID NO: 692825 - protein, 12 aa, Homo sapiens
  CDR3 for alpha chain variable domain of TCR clone 346413 (TRAV3, TRAJ9)
CAVLPAGFKTIF

SEQ ID NO: 692826 - protein, 13 aa, Homo sapiens
  CDR3 for beta chain variable domain of TCR clone 346413 (TRBV19, TRBJ2-1)
CASTNSDVGEQFF

SEQ ID NO: 692827 - protein, 14 aa, Homo sapiens
  CDR3 for alpha chain variable domain of TCR clone 346414 (TRAV35, TRAJ33)
CWPRGRDSNYQLIW

SEQ ID NO: 692828 - protein, 11 aa, Homo sapiens
  CDR3 for beta chain variable domain of TCR clone 346414 (TRBV10-3, TRBJ2-7)
YAISEGLEQYF

SEQ ID NO: 692829 - protein, 10 aa, Homo sapiens
  CDR3 for alpha chain variable domain of TCR clone 346415 (TRAV12-2, TRAJ22)
CAVNETKLTF

SEQ ID NO: 692830 - protein, 13 aa, Homo sapiens
  CDR3 for beta chain variable domain of TCR clone 346415 (TRBV6-5, TRBJ2-6)
CASSTSGPLRLDF

SEQ ID NO: 692831 - protein, 23 aa, Homo sapiens
  CDR3 for alpha chain variable domain of TCR clone 346416 (TRAV26-1, TRAJ38)
CIVRPLNAGNNHIQNPDPAVYQL

SEQ ID NO: 692832 - protein, 13 aa, Homo sapiens
  CDR3 for beta chain variable domain of TCR clone 346416 (TRBV18, TRBJ1-1)
CASSPNGDTEAFS

SEQ ID NO: 692833 - protein, 13 aa, Homo sapiens
  CDR3 for alpha chain variable domain of TCR clone 346417 (TRAV12-2, TRAJ42)
CAEKRGSQGNLIF

SEQ ID NO: 692834 - protein, 12 aa, Homo sapiens
  CDR3 for beta chain variable domain of TCR clone 346417 (TRBV5-7, TRBJ1-2)
CASSLVQNGYTF

SEQ ID NO: 692835 - protein, 16 aa, Homo sapiens
  CDR3 for alpha chain variable domain of TCR clone 346418 (TRAV16, TRAJ4)
CALSRMFSGGYNKLIF

SEQ ID NO: 692836 - protein, 15 aa, Homo sapiens
  CDR3 for beta chain variable domain of TCR clone 346418 (TRBV25-1, TRBJ1-4)
CASSPGDSTNEKLFF

SEQ ID NO: 692837 - protein, 14 aa, Homo sapiens
  CDR3 for alpha chain variable domain of TCR clone 346419 (TRAV1-2, TRAJ16)
CAVNRFSDGQKLLF

SEQ ID NO: 692838 - protein, 16 aa, Homo sapiens
  CDR3 for beta chain variable domain of TCR clone 346419 (TRBV11-2, TRBJ1-2)
CASSVDTGGADYGYTF

SEQ ID NO: 692839 - protein, 11 aa, Homo sapiens
  CDR3 for alpha chain variable domain of TCR clone 346420 (TRAV13-1, TRAJ43)
CAASMRNDMRV

SEQ ID NO: 692840 - protein, 15 aa, Homo sapiens
  CDR3 for beta chain variable domain of TCR clone 346420 (TRBV7-2, TRBJ2-2)
CASSPTGANTGELFF

SEQ ID NO: 692841 - protein, 12 aa, Homo sapiens
  CDR3 for alpha chain variable domain of TCR clone 346421 (TRAV12-3, TRAJ34)
CAMGYNTDKLIF

SEQ ID NO: 692842 - protein, 15 aa, Homo sapiens
  CDR3 for beta chain variable domain of TCR clone 346421 (TRBV28, TRBJ2-1)
CASSIIAGGRGEQFF

SEQ ID NO: 692843 - protein, 12 aa, Homo sapiens
  CDR3 for alpha chain variable domain of TCR clone 346422 (TRAV21, TRAJ8)
CALNTVFQKLVF

SEQ ID NO: 692844 - protein, 15 aa, Homo sapiens
  CDR3 for beta chain variable domain of TCR clone 346422 (TRBV7-2, TRBJ2-5)
CASSLRGASGETQYF

SEQ ID NO: 692845 - protein, 14 aa, Homo sapiens
  CDR3 for alpha chain variable domain of TCR clone 346423 (TRAV17, TRAJ45)
CATDARGGAEGLTF

SEQ ID NO: 692846 - protein, 11 aa, Homo sapiens
  CDR3 for beta chain variable domain of TCR clone 346423 (TRBV28, TRBJ2-5)
CATGNQETQYF

SEQ ID NO: 692847 - protein, 12 aa, Homo sapiens
  CDR3 for alpha chain variable domain of TCR clone 346424 (TRAV29/DV5, TRAJ49)
CAATDTGNQFYF

SEQ ID NO: 692848 - protein, 14 aa, Homo sapiens
  CDR3 for beta chain variable domain of TCR clone 346424 (TRBV7-9, TRBJ2-5)
CASSLVGGEETQYF

SEQ ID NO: 692849 - protein, 16 aa, Homo sapiens
  CDR3 for alpha chain variable domain of TCR clone 346425 (TRAV12-2, TRAJ10)
CAVNRVLTGGGNKLTF

SEQ ID NO: 692850 - protein, 20 aa, Homo sapiens
  CDR3 for beta chain variable domain of TCR clone 346425 (TRBV4-2, TRBJ2-7)
CASSQASGGNLRAVLRAGHQ

SEQ ID NO: 692851 - protein, 15 aa, Homo sapiens
  CDR3 for alpha chain variable domain of TCR clone 346426 (TRAV30, TRAJ57)
CGTAIPQGGSDKLVF

SEQ ID NO: 692852 - protein, 17 aa, Homo sapiens
  CDR3 for beta chain variable domain of TCR clone 346426 (TRBV11-2, TRBJ2-1)
CASSLYPPGVEYNEQFF

SEQ ID NO: 692853 - protein, 21 aa, Homo sapiens
  CDR3 for alpha chain variable domain of TCR clone 346427 (TRAV8-4, TRAJ38)
CAVRNAGNNHIQNPDPAVYQL

SEQ ID NO: 692854 - protein, 16 aa, Homo sapiens
  CDR3 for beta chain variable domain of TCR clone 346427 (TRBV18, TRBJ1-4)
CASSLQTVATNEKLFF

SEQ ID NO: 692855 - protein, 16 aa, Homo sapiens
  CDR3 for alpha chain variable domain of TCR clone 346428 (TRAV3, TRAJ5)
CAVRNLMDTGRRALTF

SEQ ID NO: 692856 - protein, 15 aa, Homo sapiens
  CDR3 for beta chain variable domain of TCR clone 346428 (TRBV27, TRBJ2-3)
CASSSLAGVIDTQYF

SEQ ID NO: 692857 - protein, 13 aa, Homo sapiens
  CDR3 for alpha chain variable domain of TCR clone 346429 (TRAV12-1, TRAJ38)
CVVPAGNNRKLIW

SEQ ID NO: 692858 - protein, 15 aa, Homo sapiens
  CDR3 for beta chain variable domain of TCR clone 346429 (TRBV2, TRBJ2-3)
CASSDSEKATDTQYF

SEQ ID NO: 692859 - protein, 14 aa, Homo sapiens
  CDR3 for alpha chain variable domain of TCR clone 346430 (TRAV21, TRAJ58)
CAVRRGMSGPRLTF

SEQ ID NO: 692860 - protein, 13 aa, Homo sapiens
  CDR3 for beta chain variable domain of TCR clone 346430 (TRBV7-2, TRBJ1-6)
CASSLKFDSPLHF

SEQ ID NO: 692861 - protein, 14 aa, Homo sapiens
  CDR3 for alpha chain variable domain of TCR clone 346431 (TRAV38-1, TRAJ45)
CASHSGGGADGLTF

SEQ ID NO: 692862 - protein, 13 aa, Homo sapiens
  CDR3 for beta chain variable domain of TCR clone 346431 (TRBV10-3, TRBJ1-2)
CAFSERDSYGYTF

SEQ ID NO: 692863 - protein, 14 aa, Homo sapiens
  CDR3 for alpha chain variable domain of TCR clone 346432 (TRAV8-3, TRAJ39)
CAVCANNAGNMLTF

SEQ ID NO: 692864 - protein, 15 aa, Homo sapiens
  CDR3 for beta chain variable domain of TCR clone 346432 (TRBV4-3, TRBJ1-1)
CASSQELGRGTEAFF

SEQ ID NO: 692865 - protein, 14 aa, Homo sapiens
  CDR3 for alpha chain variable domain of TCR clone 346433 (TRAV12-3, TRAJ42)
CAMNYGGSQGNLIS

SEQ ID NO: 692866 - protein, 15 aa, Homo sapiens
  CDR3 for beta chain variable domain of TCR clone 346433 (TRBV5-7, TRBJ1-5)
CASSYGKVWDKPQHF

SEQ ID NO: 692867 - protein, 17 aa, Homo sapiens
  CDR3 for alpha chain variable domain of TCR clone 346434 (TRAV13-1, TRAJ52)
CAASSGAGGTSFGKLTF

SEQ ID NO: 692868 - protein, 12 aa, Homo sapiens
  CDR3 for beta chain variable domain of TCR clone 346434 (TRBV11-2, TRBJ2-2)
CASSLGGGELFF

SEQ ID NO: 692869 - protein, 15 aa, Homo sapiens
  CDR3 for alpha chain variable domain of TCR clone 346435 (TRAV2, TRAJ13)
CCLLLCFRGYQKVTF

SEQ ID NO: 692870 - protein, 15 aa, Homo sapiens
  CDR3 for beta chain variable domain of TCR clone 346435 (TRBV20-1, TRBJ2-7)
CSARDRVSGMDEQYV

SEQ ID NO: 692871 - protein, 10 aa, Homo sapiens
  CDR3 for alpha chain variable domain of TCR clone 346436 (TRAV23/DV6, TRAJ57)
CAASSTLSQG

SEQ ID NO: 692872 - protein, 11 aa, Homo sapiens
  CDR3 for beta chain variable domain of TCR clone 346436 (TRBV11-2, TRBJ2-2)
CASSLPGELFF

SEQ ID NO: 692873 - protein, 14 aa, Homo sapiens
  CDR3 for alpha chain variable domain of TCR clone 346437 (TRAV35, TRAJ22)
CAGLRPGSARQLTF

SEQ ID NO: 692874 - protein, 13 aa, Homo sapiens
  CDR3 for beta chain variable domain of TCR clone 346437 (TRBV20-1, TRBJ2-7)
CSATHTSRYEQYF

SEQ ID NO: 692875 - protein, 14 aa, Homo sapiens
  CDR3 for alpha chain variable domain of TCR clone 346438 (TRAV26-1, TRAJ34)
CIVRVASNTDKLTF

SEQ ID NO: 692876 - protein, 15 aa, Homo sapiens
  CDR3 for beta chain variable domain of TCR clone 346438 (TRBV20-1, TRBJ2-7)
CSARVPAAYFYEQYF

SEQ ID NO: 692877 - protein, 14 aa, Homo sapiens
  CDR3 for alpha chain variable domain of TCR clone 346439 (TRAV1-2, TRAJ8)
CAVREDTGFQKLVF

SEQ ID NO: 692878 - protein, 13 aa, Homo sapiens
  CDR3 for beta chain variable domain of TCR clone 346439 (TRBV27, IGLJ4)
CASSLMGDENLFF

SEQ ID NO: 692879 - protein, 12 aa, Homo sapiens
  CDR3 for alpha chain variable domain of TCR clone 346440 (TRAV8-3, TRAJ26)
CAGDNYGLNFVF

SEQ ID NO: 692880 - protein, 13 aa, Homo sapiens
  CDR3 for beta chain variable domain of TCR clone 346440 (TRBV20-1, TRBJ1-1)
CSAPLGGGTEAFF

SEQ ID NO: 692881 - protein, 12 aa, Homo sapiens
  CDR3 for alpha chain variable domain of TCR clone 346441 (TRAV26-1, TRAJ26)
CIVFIYGQNFVF

SEQ ID NO: 692882 - protein, 14 aa, Homo sapiens
  CDR3 for beta chain variable domain of TCR clone 346441 (TRBV5-1, TRBJ2-3)
CASSLFGPTDTQYF

SEQ ID NO: 692883 - protein, 17 aa, Homo sapiens
  CDR3 for alpha chain variable domain of TCR clone 346442 (TRAV30, TRAJ24)
SVAQRWWMLTAGGKFQF

SEQ ID NO: 692884 - protein, 14 aa, Homo sapiens
  CDR3 for beta chain variable domain of TCR clone 346442 (TRBV12-5, TRBJ2-5)
CASGSRTHQETQYF

SEQ ID NO: 692885 - protein, 14 aa, Homo sapiens
  CDR3 for alpha chain variable domain of TCR clone 346443 (TRAV8-6, TRAJ54)
CAVSDFQGAQKLVF

SEQ ID NO: 692886 - protein, 15 aa, Homo sapiens
  CDR3 for beta chain variable domain of TCR clone 346443 (TRBV29-1, TRBJ2-7)
CSVEFFDRGSYEQYF

SEQ ID NO: 692887 - protein, 12 aa, Homo sapiens
  CDR3 for alpha chain variable domain of TCR clone 346444 (TRAV12-2, TRAJ21)
CAVNRNFNKFYF

SEQ ID NO: 692888 - protein, 15 aa, Homo sapiens
  CDR3 for beta chain variable domain of TCR clone 346444 (TRBV11-3, TRBJ2-3)
CASLKDGREGDTQYF

SEQ ID NO: 692889 - protein, 14 aa, Homo sapiens
  CDR3 for alpha chain variable domain of TCR clone 346445 (TRAV26-1, TRAJ45)
CIVREGGGADGLTF

SEQ ID NO: 692890 - protein, 14 aa, Homo sapiens
  CDR3 for beta chain variable domain of TCR clone 346445 (TRBV7-3, TRBJ2-1)
CASSLAGGTNEQFF

SEQ ID NO: 692891 - protein, 15 aa, Homo sapiens
  CDR3 for alpha chain variable domain of TCR clone 346446 (TRAV3, TRAJ4)
CAVSDGTGGYNKLIF

SEQ ID NO: 692892 - protein, 13 aa, Homo sapiens
  CDR3 for beta chain variable domain of TCR clone 346446 (TRBV12-5, TRBJ1-2)
CASGVRTGNGYTF

SEQ ID NO: 692893 - protein, 13 aa, Homo sapiens
  CDR3 for alpha chain variable domain of TCR clone 346447 (TRAV8-1, TRAJ36)
CAVNSPTGAKNLF

SEQ ID NO: 692894 - protein, 15 aa, Homo sapiens
  CDR3 for beta chain variable domain of TCR clone 346447 (TRBV7-2, TRBJ2-3)
CASSLEQGGTDTQYF

SEQ ID NO: 692895 - protein, 17 aa, Homo sapiens
  CDR3 for alpha chain variable domain of TCR clone 346448 (TRAV13-1, TRAJ28)
CSASPPYSVAGSYQLTF

SEQ ID NO: 692896 - protein, 12 aa, Homo sapiens
  CDR3 for beta chain variable domain of TCR clone 346448 (TRBV11-2, TRBJ2-2)
CASSLPTGELFF

SEQ ID NO: 692897 - protein, 15 aa, Homo sapiens
  CDR3 for alpha chain variable domain of TCR clone 346449 (TRAV12-1, TRAJ10)
CVVNKLTGGGNKLTF

SEQ ID NO: 692898 - protein, 14 aa, Homo sapiens
  CDR3 for beta chain variable domain of TCR clone 346449 (TRBV2, TRBJ2-5)
CASTWGRAQETQYF

SEQ ID NO: 692899 - protein, 11 aa, Homo sapiens
  CDR3 for alpha chain variable domain of TCR clone 346450 (TRAV27, TRAJ49)
CAGEAGNQFYF

SEQ ID NO: 692900 - protein, 16 aa, Homo sapiens
  CDR3 for beta chain variable domain of TCR clone 346450 (TRBV19, TRBJ2-1)
CASSKAGPSSYNEQFF

SEQ ID NO: 692901 - protein, 12 aa, Homo sapiens
  CDR3 for alpha chain variable domain of TCR clone 346451 (TRAV2, TRAJ31)
CAVADNNARLMF

SEQ ID NO: 692902 - protein, 15 aa, Homo sapiens
  CDR3 for beta chain variable domain of TCR clone 346451 (TRBV5-1, TRBJ2-3)
CASSVTSGSTDTQYF

SEQ ID NO: 692903 - protein, 16 aa, Homo sapiens
  CDR3 for alpha chain variable domain of TCR clone 346452 (TRAV14/DV4, TRAJ54)
CAMREGRIQGAQKLVF

SEQ ID NO: 692904 - protein, 16 aa, Homo sapiens
  CDR3 for beta chain variable domain of TCR clone 346452 (TRBV7-2, TRBJ2-1)
CASSLVGGPELNEQFF

SEQ ID NO: 692905 - protein, 18 aa, Homo sapiens
  CDR3 for alpha chain variable domain of TCR clone 346453 (TRAV13-1, TRAJ52)
CAAKNPNAGGTSYGKLTF

SEQ ID NO: 692906 - protein, 14 aa, Homo sapiens
  CDR3 for beta chain variable domain of TCR clone 346453 (TRBV7-9, TRBJ2-7)
CASSPSGGQNEQYF

SEQ ID NO: 692907 - protein, 13 aa, Homo sapiens
  CDR3 for alpha chain variable domain of TCR clone 346454 (TRAV20, TRAJ37)
CAGCSSNTGKLIF

SEQ ID NO: 692908 - protein, 14 aa, Homo sapiens
  CDR3 for beta chain variable domain of TCR clone 346454 (TRBV20-1, TRBJ2-5)
CSARDRRAGETQYF

SEQ ID NO: 692909 - protein, 19 aa, Homo sapiens
  CDR3 for alpha chain variable domain of TCR clone 346455 (TRAV1-1, TRAJ30)
CAGSEMTRSSLEKGHDFIF

SEQ ID NO: 692910 - protein, 14 aa, Homo sapiens
  CDR3 for beta chain variable domain of TCR clone 346455 (TRBV11-3, TRBJ1-6)
CASSFSGGDPPLHF

SEQ ID NO: 692911 - protein, 14 aa, Homo sapiens
  CDR3 for alpha chain variable domain of TCR clone 346456 (TRAV13-1, TRAJ35)
CAASKVGFGNVLHF

SEQ ID NO: 692912 - protein, 13 aa, Homo sapiens
  CDR3 for beta chain variable domain of TCR clone 346456 (TRBV7-3, TRBJ1-1)
CASSQDWGAEAFF

SEQ ID NO: 692913 - protein, 11 aa, Homo sapiens
  CDR3 for alpha chain variable domain of TCR clone 346457 (TRAV6, TRAJ41)
CALNSGYALNF

SEQ ID NO: 692914 - protein, 13 aa, Homo sapiens
  CDR3 for beta chain variable domain of TCR clone 346457 (TRBV12-4, TRBJ2-7)
CASSPTETYEQYF

SEQ ID NO: 692915 - protein, 18 aa, Homo sapiens
  CDR3 for alpha chain variable domain of TCR clone 346458 (TRAV26-2, TRAJ54)
CTLRDVEVGIQGAQKLVF

SEQ ID NO: 692916 - protein, 17 aa, Homo sapiens
  CDR3 for beta chain variable domain of TCR clone 346458 (TRBV20-1, TRBJ1-5)
CSASLSPGQGGNQPQHF

SEQ ID NO: 692917 - protein, 16 aa, Homo sapiens
  CDR3 for alpha chain variable domain of TCR clone 346459 (TRAV3, TRAJ18)
FAVRDGSGSTLGRLYF

SEQ ID NO: 692918 - protein, 17 aa, Homo sapiens
  CDR3 for beta chain variable domain of TCR clone 346459 (TRBV5-1, TRBJ2-3)
CASSKIGLADRTDTQYF

SEQ ID NO: 692919 - protein, 14 aa, Homo sapiens
  CDR3 for alpha chain variable domain of TCR clone 346460 (TRAV12-1, TRAJ10)
CVAILTGGGNKLTF

SEQ ID NO: 692920 - protein, 15 aa, Homo sapiens
  CDR3 for beta chain variable domain of TCR clone 346460 (TRBV20-1, TRBJ2-7)
CSARGFRPQTYEQYV

SEQ ID NO: 692921 - protein, 13 aa, Homo sapiens
  CDR3 for alpha chain variable domain of TCR clone 346461 (TRAV3, TRAJ36)
CAVRDPGANNLFF

SEQ ID NO: 692922 - protein, 15 aa, Homo sapiens
  CDR3 for beta chain variable domain of TCR clone 346461 (TRBV24-1, TRBJ2-1)
CATSGSGGFYNEQFF

SEQ ID NO: 692923 - protein, 12 aa, Homo sapiens
  CDR3 for alpha chain variable domain of TCR clone 346462 (TRAV23/DV6, TRAJ17)
CARGSCRQQANF

SEQ ID NO: 692924 - protein, 14 aa, Homo sapiens
  CDR3 for beta chain variable domain of TCR clone 346462 (TRBV7-2, TRBJ1-2)
CASSQTGSTYGYTC

SEQ ID NO: 692925 - protein, 11 aa, Homo sapiens
  CDR3 for alpha chain variable domain of TCR clone 346463 (TRAV1-1, TRAJ23)
CAVRQGRKLIF

SEQ ID NO: 692926 - protein, 15 aa, Homo sapiens
  CDR3 for beta chain variable domain of TCR clone 346463 (TRBV7-2, TRBJ2-1)
CASSLASGRVNEQFF

SEQ ID NO: 692927 - protein, 12 aa, Homo sapiens
  CDR3 for alpha chain variable domain of TCR clone 346464 (TRAV21, TRAJ30)
CAVMNRDDKIIF

SEQ ID NO: 692928 - protein, 15 aa, Homo sapiens
  CDR3 for beta chain variable domain of TCR clone 346464 (TRBV28, TRBJ2-5)
CASSPPWSYQETQYF

SEQ ID NO: 692929 - protein, 13 aa, Homo sapiens
  CDR3 for alpha chain variable domain of TCR clone 346465 (TRAV12-3, TRAJ9)
CAMRNTGGFKTIF

SEQ ID NO: 692930 - protein, 13 aa, Homo sapiens
  CDR3 for beta chain variable domain of TCR clone 346465 (TRBV7-2, TRBJ2-7)
CASSSPSGSEQYF

SEQ ID NO: 692931 - protein, 13 aa, Homo sapiens
  CDR3 for alpha chain variable domain of TCR clone 346466 (TRAV12-3, TRAJ13)
CAMTSGGYQKVTF

SEQ ID NO: 692932 - protein, 16 aa, Homo sapiens
  CDR3 for beta chain variable domain of TCR clone 346466 (TRBV19, TRBJ2-1)
CASSKAGPSSYNEQFF

SEQ ID NO: 692933 - protein, 12 aa, Homo sapiens
  CDR3 for alpha chain variable domain of TCR clone 346467 (TRAV16, TRAJ27)
CALDHQCRQINL

SEQ ID NO: 692934 - protein, 14 aa, Homo sapiens
  CDR3 for beta chain variable domain of TCR clone 346467 (TRBV11-2, TRBJ1-5)
CASSLDRGRQPQHF

SEQ ID NO: 692935 - protein, 14 aa, Homo sapiens
  CDR3 for alpha chain variable domain of TCR clone 346468 (TRAV3, TRAJ17)
CAVRDAAAGNKLTF

SEQ ID NO: 692936 - protein, 14 aa, Homo sapiens
  CDR3 for beta chain variable domain of TCR clone 346468 (TRBV7-2, TRBJ2-5)
CASSIRLTQETQYF

SEQ ID NO: 692937 - protein, 15 aa, Homo sapiens
  CDR3 for alpha chain variable domain of TCR clone 346469 (TRAV3, TRAJ5)
CAVRDLDTGRRALTF

SEQ ID NO: 692938 - protein, 13 aa, Homo sapiens
  CDR3 for beta chain variable domain of TCR clone 346469 (TRBV2, TRBJ1-4)
CASSERAGEKLFF

SEQ ID NO: 692939 - protein, 13 aa, Homo sapiens
  CDR3 for alpha chain variable domain of TCR clone 346470 (TRAV10, TRAJ45)
CVGSGGGADGLTF

SEQ ID NO: 692940 - protein, 13 aa, Homo sapiens
  CDR3 for beta chain variable domain of TCR clone 346470 (TRBV19, TRBJ2-2)
CASSIWSTGELFF

SEQ ID NO: 692941 - protein, 19 aa, Homo sapiens
  CDR3 for alpha chain variable domain of TCR clone 346471 (TRAV26-1, TRAJ52)
CIVRAHRNACGTSYGKLTF

SEQ ID NO: 692942 - protein, 13 aa, Homo sapiens
  CDR3 for beta chain variable domain of TCR clone 346471 (TRBV19, TRBJ2-7)
CASRKAGGSEQYF

SEQ ID NO: 692943 - protein, 17 aa, Homo sapiens
  CDR3 for alpha chain variable domain of TCR clone 346472 (TRAV3, TRAJ6)
CAVRDGPRAGGSYIPTF

SEQ ID NO: 692944 - protein, 12 aa, Homo sapiens
  CDR3 for beta chain variable domain of TCR clone 346472 (TRBV5-4, TRBJ2-5)
CASSPTRETQYF

SEQ ID NO: 692945 - protein, 11 aa, Homo sapiens
  CDR3 for alpha chain variable domain of TCR clone 346473 (TRAV4, TRAJ23)
CLVAPGGKLIF

SEQ ID NO: 692946 - protein, 12 aa, Homo sapiens
  CDR3 for beta chain variable domain of TCR clone 346473 (TRBV7-9, TRBJ2-3)
CASSFITDTQYF

SEQ ID NO: 692947 - protein, 15 aa, Homo sapiens
  CDR3 for alpha chain variable domain of TCR clone 346474 (TRAV27, TRAJ38)
CAARRNAGNNRKLIW

SEQ ID NO: 692948 - protein, 15 aa, Homo sapiens
  CDR3 for beta chain variable domain of TCR clone 346474 (TRBV28, TRBJ2-4)
CASRGLAGVKNIQYF

SEQ ID NO: 692949 - protein, 15 aa, Homo sapiens
  CDR3 for alpha chain variable domain of TCR clone 346475 (TRAV21, TRAJ53)
CATLNSGGSNYKLTF

SEQ ID NO: 692950 - protein, 15 aa, Homo sapiens
  CDR3 for beta chain variable domain of TCR clone 346475 (TRBV5-1, TRBJ2-3)
CASSYTRGSTDTQYF

SEQ ID NO: 692951 - protein, 13 aa, Homo sapiens
  CDR3 for alpha chain variable domain of TCR clone 346476 (TRAV12-3, TRAJ13)
CAMSSGGYQKVTF

SEQ ID NO: 692952 - protein, 11 aa, Homo sapiens
  CDR3 for beta chain variable domain of TCR clone 346476 (TRBV7-8, TRBJ2-7)
CASSLSLEQYF

SEQ ID NO: 692953 - protein, 15 aa, Homo sapiens
  CDR3 for alpha chain variable domain of TCR clone 346477 (TRAV4, TRAJ39)
CLVGPNNNAGNMLTF

SEQ ID NO: 692954 - protein, 17 aa, Homo sapiens
  CDR3 for beta chain variable domain of TCR clone 346477 (TRBV20-1, TRBJ2-2)
CSASGSGQGGLTGELFF

SEQ ID NO: 692955 - protein, 14 aa, Homo sapiens
  CDR3 for alpha chain variable domain of TCR clone 346478 (TRAV16, TRAJ32)
CALKSGGDTNRLIF

SEQ ID NO: 692956 - protein, 13 aa, Homo sapiens
  CDR3 for beta chain variable domain of TCR clone 346478 (TRBV15, TRBJ1-6)
CATSGGLNSPLHF

SEQ ID NO: 692957 - protein, 16 aa, Homo sapiens
  CDR3 for alpha chain variable domain of TCR clone 346479 (TRAV21, TRAJ17)
CAVRPGEEAAGNKLTF

SEQ ID NO: 692958 - protein, 14 aa, Homo sapiens
  CDR3 for beta chain variable domain of TCR clone 346479 (TRBV3-1, TRBJ2-5)
GASSQGPDQETQYF

SEQ ID NO: 692959 - protein, 15 aa, Homo sapiens
  CDR3 for alpha chain variable domain of TCR clone 346480 (TRAV3, TRAJ22)
CAVRYRGGSARQLTF

SEQ ID NO: 692960 - protein, 15 aa, Homo sapiens
  CDR3 for beta chain variable domain of TCR clone 346480 (TRBV7-3, TRBJ2-2)
CASSETGQGTGELFF

SEQ ID NO: 692961 - protein, 17 aa, Homo sapiens
  CDR3 for alpha chain variable domain of TCR clone 346481 (TRAV3, TRAJ42)
CAVRDRDYGGSQGNLIF

SEQ ID NO: 692962 - protein, 15 aa, Homo sapiens
  CDR3 for beta chain variable domain of TCR clone 346481 (TRBV27, TRBJ2-1)
RASSNGGGSSNEQFF

SEQ ID NO: 692963 - protein, 11 aa, Homo sapiens
  CDR3 for alpha chain variable domain of TCR clone 346482 (TRAV1-1, TRAJ23)
CAVRQGGKLIF

SEQ ID NO: 692964 - protein, 11 aa, Homo sapiens
  CDR3 for beta chain variable domain of TCR clone 346482 (TRBV7-8, TRBJ2-7)
CASSLSLEQYF

SEQ ID NO: 692965 - protein, 17 aa, Homo sapiens
  CDR3 for alpha chain variable domain of TCR clone 346483 (TRAV1-2, TRAJ26)
CAVSDLITMVRILSLVP

SEQ ID NO: 692966 - protein, 15 aa, Homo sapiens
  CDR3 for beta chain variable domain of TCR clone 346483 (TRBV9, TRBJ1-6)
CAGSVAGTGDSPLHF

SEQ ID NO: 692967 - protein, 15 aa, Homo sapiens
  CDR3 for alpha chain variable domain of TCR clone 346484 (TRAV38-2/DV8, TRAJ45)
CAYWDSGGGADGLTF

SEQ ID NO: 692968 - protein, 16 aa, Homo sapiens
  CDR3 for beta chain variable domain of TCR clone 346484 (TRBV19, TRBJ1-1)
CGSSPTRFWPGTEAFF

SEQ ID NO: 692969 - protein, 15 aa, Homo sapiens
  CDR3 for alpha chain variable domain of TCR clone 346485 (TRAV17, TRAJ57)
CATGPSQGGSEKLVF

SEQ ID NO: 692970 - protein, 14 aa, Homo sapiens
  CDR3 for beta chain variable domain of TCR clone 346485 (TRBV20-1, TRBJ1-3)
GSASPTGAGNTIYF

SEQ ID NO: 692971 - protein, 13 aa, Homo sapiens
  CDR3 for alpha chain variable domain of TCR clone 346486 (TRAV25, TRAJ40)
CAGSASGTYKYIL

SEQ ID NO: 692972 - protein, 14 aa, Homo sapiens
  CDR3 for beta chain variable domain of TCR clone 346486 (TRBV7-2, TRBJ2-7)
GASRSQGAAYEQYF

SEQ ID NO: 692973 - protein, 13 aa, Homo sapiens
  CDR3 for alpha chain variable domain of TCR clone 346487 (TRAV2, TRAJ40)
CAVVTPGTYKYIF

SEQ ID NO: 692974 - protein, 12 aa, Homo sapiens
  CDR3 for beta chain variable domain of TCR clone 346487 (TRBV14, TRBJ2-7)
CASSRLKGEQYF

SEQ ID NO: 692975 - protein, 14 aa, Homo sapiens
  CDR3 for alpha chain variable domain of TCR clone 346488 (TRAV29/DV5, TRAJ20)
CAATIRSNDYKLSF

SEQ ID NO: 692976 - protein, 15 aa, Homo sapiens
  CDR3 for beta chain variable domain of TCR clone 346488 (TRBV15, TRBJ2-3)
CATSRDPRGTDTQYF

SEQ ID NO: 692977 - protein, 14 aa, Homo sapiens
  CDR3 for alpha chain variable domain of TCR clone 346489 (TRAV2, TRAJ9)
CAVEDRSGGFKTII

SEQ ID NO: 692978 - protein, 15 aa, Homo sapiens
  CDR3 for beta chain variable domain of TCR clone 346489 (TRBV12-4, TRBJ2-5)
CASSLSGAFQETQYF

SEQ ID NO: 692979 - protein, 15 aa, Homo sapiens
  CDR3 for alpha chain variable domain of TCR clone 346490 (TRAV6, TRAJ4)
CALGGFFGGYNKLIF

SEQ ID NO: 692980 - protein, 13 aa, Homo sapiens
  CDR3 for beta chain variable domain of TCR clone 346490 (TRBV19, TRBJ1-2)
CASSVPGQDGYTF

SEQ ID NO: 692981 - protein, 11 aa, Homo sapiens
  CDR3 for alpha chain variable domain of TCR clone 346491 (TRAV17, TRAJ31)
CATSNNARLTF

SEQ ID NO: 692982 - protein, 17 aa, Homo sapiens
  CDR3 for beta chain variable domain of TCR clone 346491 (TRBV13, TRBJ2-3)
CASSLSRVAGGRNTQYF

SEQ ID NO: 692983 - protein, 15 aa, Homo sapiens
  CDR3 for alpha chain variable domain of TCR clone 346492 (TRAV3, TRAJ36)
CAARASQTGANNLFF

SEQ ID NO: 692984 - protein, 15 aa, Homo sapiens
  CDR3 for beta chain variable domain of TCR clone 346492 (TRBV3-1, TRBJ2-1)
CASSQDYTPRGEQFF

SEQ ID NO: 692985 - protein, 14 aa, Homo sapiens
  CDR3 for alpha chain variable domain of TCR clone 346493 (TRAV23/DV6, TRAJ17)
CAASIGATGNKPTF

SEQ ID NO: 692986 - protein, 12 aa, Homo sapiens
  CDR3 for beta chain variable domain of TCR clone 346493 (TRBV20-1, TRBJ2-5)
CSAGGAGETQYF

SEQ ID NO: 692987 - protein, 13 aa, Homo sapiens
  CDR3 for alpha chain variable domain of TCR clone 346494 (TRAV13-2, TRAJ13)
CAERPGGYQKVTF

SEQ ID NO: 692988 - protein, 15 aa, Homo sapiens
  CDR3 for beta chain variable domain of TCR clone 346494 (TRBV7-2, TRBJ2-5)
CASSPLGLDKETQYF

SEQ ID NO: 692989 - protein, 21 aa, Homo sapiens
  CDR3 for alpha chain variable domain of TCR clone 346495 (TRAV1-1, TRAJ6)
CLLLLRCERLERTGGSYIPTF

SEQ ID NO: 692990 - protein, 13 aa, Homo sapiens
  CDR3 for beta chain variable domain of TCR clone 346495 (TRBV10-2, TRBJ2-7)
CASGASGGYEHYL

SEQ ID NO: 692991 - protein, 14 aa, Homo sapiens
  CDR3 for alpha chain variable domain of TCR clone 346496 (TRAV8-1, TRAJ15)
CAVNGQQAGTALIF

SEQ ID NO: 692992 - protein, 14 aa, Homo sapiens
  CDR3 for beta chain variable domain of TCR clone 346496 (TRBV28, TRBJ2-7)
CASTTDRDGFVQYF

SEQ ID NO: 692993 - protein, 14 aa, Homo sapiens
  CDR3 for alpha chain variable domain of TCR clone 346497 (TRAV8-3, TRAJ44)
CAVGNTGTASKRTF

SEQ ID NO: 692994 - protein, 15 aa, Homo sapiens
  CDR3 for beta chain variable domain of TCR clone 346497 (TRBV28, TRBJ2-7)
CASSFRGQGRYEQYF

SEQ ID NO: 692995 - protein, 15 aa, Homo sapiens
  CDR3 for alpha chain variable domain of TCR clone 346498 (TRAV21, TRAJ24)
CAARSSTDSWGKLQF

SEQ ID NO: 692996 - protein, 14 aa, Homo sapiens
  CDR3 for beta chain variable domain of TCR clone 346498 (TRBV14, TRBJ2-5)
CASSPQRHYETQYF

SEQ ID NO: 692997 - protein, 13 aa, Homo sapiens
  CDR3 for alpha chain variable domain of TCR clone 346499 (TRAV1-2, TRAJ9)
CAALNTGGFTTIF

SEQ ID NO: 692998 - protein, 20 aa, Homo sapiens
  CDR3 for beta chain variable domain of TCR clone 346499 (TRBV28, TRBJ2-1)
CASTPIGRSPGLAGGNEQFF

SEQ ID NO: 692999 - protein, 18 aa, Homo sapiens
  CDR3 for alpha chain variable domain of TCR clone 346500 (TRAV13-1, TRAJ52)
CAAEFPNAGGTSYGKLTF

SEQ ID NO: 693000 - protein, 14 aa, Homo sapiens
  CDR3 for beta chain variable domain of TCR clone 346500 (TRBV19, TRBJ2-1)
CASPTFVLSGEQFF

SEQ ID NO: 693001 - protein, 12 aa, Homo sapiens
  CDR3 for alpha chain variable domain of TCR clone 346501 (TRAV3, TRAJ31)
CAAQRANARLMF

SEQ ID NO: 693002 - protein, 16 aa, Homo sapiens
  CDR3 for beta chain variable domain of TCR clone 346501 (TRBV4-2, TRBJ1-1)
CASSPSPGRAAPEALF

SEQ ID NO: 693003 - protein, 12 aa, Homo sapiens
  CDR3 for alpha chain variable domain of TCR clone 346502 (TRAV12-3, TRAJ29)
CAAREGNTPLVF

SEQ ID NO: 693004 - protein, 17 aa, Homo sapiens
  CDR3 for beta chain variable domain of TCR clone 346502 (TRBV18, TRBJ2-1)
CASSPLAAGAGDDEQFF

SEQ ID NO: 693005 - protein, 17 aa, Homo sapiens
  CDR3 for alpha chain variable domain of TCR clone 346503 (TRAV3, TRAJ6)
CAVRDGPRAGGSYIPTC

SEQ ID NO: 693006 - protein, 18 aa, Homo sapiens
  CDR3 for beta chain variable domain of TCR clone 346503 (TRBV7-9, TRBJ2-7)
CASSLTTSGSRTWYEQYF

SEQ ID NO: 693007 - protein, 14 aa, Homo sapiens
  CDR3 for alpha chain variable domain of TCR clone 346504 (TRAV20, TRAJ16)
CAVNRFSDGQKLLF

SEQ ID NO: 693008 - protein, 15 aa, Homo sapiens
  CDR3 for beta chain variable domain of TCR clone 346504 (TRBV10-1, TRBJ2-1)
CASSEWRGTYNEQFF

SEQ ID NO: 693009 - protein, 14 aa, Homo sapiens
  CDR3 for alpha chain variable domain of TCR clone 346505 (TRAV13-1, TRAJ35)
CAASKGGFGNVLHC

SEQ ID NO: 693010 - protein, 14 aa, Homo sapiens
  CDR3 for beta chain variable domain of TCR clone 346505 (TRBV7-9, TRBJ2-1)
CASSPRDSIYEQFF

SEQ ID NO: 693011 - protein, 16 aa, Homo sapiens
  CDR3 for alpha chain variable domain of TCR clone 346506 (TRAV17, TRAJ52)
CATSNAGGTSYGKLKF

SEQ ID NO: 693012 - protein, 13 aa, Homo sapiens
  CDR3 for beta chain variable domain of TCR clone 346506 (TRBV27, TRBJ1-6)
CASSLVLVSPLHF

SEQ ID NO: 693013 - protein, 14 aa, Homo sapiens
  CDR3 for alpha chain variable domain of TCR clone 346507 (TRAV17, TRAJ35)
CATDRPGFGNVLHC

SEQ ID NO: 693014 - protein, 15 aa, Homo sapiens
  CDR3 for beta chain variable domain of TCR clone 346507 (TRBV28, TRBJ2-5)
CASSSGRVIQETQYL

SEQ ID NO: 693015 - protein, 14 aa, Homo sapiens
  CDR3 for alpha chain variable domain of TCR clone 346508 (TRAV8-1, TRAJ5)
CAVRTDTGRRAITF

SEQ ID NO: 693016 - protein, 14 aa, Homo sapiens
  CDR3 for beta chain variable domain of TCR clone 346508 (TRBV11-2, TRBJ2-1)
CASSLSGPYNEQFF

SEQ ID NO: 693017 - protein, 13 aa, Homo sapiens
  CDR3 for alpha chain variable domain of TCR clone 346509 (TRAV29/DV5, TRAJ49)
CAASTNTGNQFYF

SEQ ID NO: 693018 - protein, 13 aa, Homo sapiens
  CDR3 for beta chain variable domain of TCR clone 346509 (TRBV24-1, TRBJ2-2)
CATSDWSTGELFF

SEQ ID NO: 693019 - protein, 13 aa, Homo sapiens
  CDR3 for alpha chain variable domain of TCR clone 346510 (TRAV27, TRAJ10)
CAGLTGGGNKLTF

SEQ ID NO: 693020 - protein, 15 aa, Homo sapiens
  CDR3 for beta chain variable domain of TCR clone 346510 (TRBV9, TRBJ1-6)
CASSVAGTGDSPLHF

SEQ ID NO: 693021 - protein, 12 aa, Homo sapiens
  CDR3 for alpha chain variable domain of TCR clone 346511 (TRAV12-3, TRAJ17)
CAMPLTGNKLTF

SEQ ID NO: 693022 - protein, 12 aa, Homo sapiens
  CDR3 for beta chain variable domain of TCR clone 346511 (TRBV11-2, TRBJ2-2)
CASSLPTGELFF

SEQ ID NO: 693023 - protein, 14 aa, Homo sapiens
  CDR3 for alpha chain variable domain of TCR clone 346512 (TRAV12-3, TRAJ47)
CAMSVREYGNKLVF

SEQ ID NO: 693024 - protein, 14 aa, Homo sapiens
  CDR3 for beta chain variable domain of TCR clone 346512 (TRBV7-9, TRBJ2-3)
CASSLEDGTDTQYF

SEQ ID NO: 693025 - protein, 13 aa, Homo sapiens
  CDR3 for alpha chain variable domain of TCR clone 346513 (TRAV13-1, TRAJ8)
CAARNTGFQKLVF

SEQ ID NO: 693026 - protein, 15 aa, Homo sapiens
  CDR3 for beta chain variable domain of TCR clone 346513 (TRBV7-2, TRBJ2-7)
CASSLVSSGSYEQYF

SEQ ID NO: 693027 - protein, 14 aa, Homo sapiens
  CDR3 for alpha chain variable domain of TCR clone 346514 (TRAV8-4, TRAJ8)
CAVSLNTGFKKLVF

SEQ ID NO: 693028 - protein, 13 aa, Homo sapiens
  CDR3 for beta chain variable domain of TCR clone 346514 (TRBV7-9, TRBJ2-3)
CASSPGSTDTQYF

SEQ ID NO: 693029 - protein, 23 aa, Homo sapiens
  CDR3 for alpha chain variable domain of TCR clone 346515 (TRAV21, TRAJ32)
SLVTQPPTSVLWSYGGATNKLIF

SEQ ID NO: 693030 - protein, 13 aa, Homo sapiens
  CDR3 for beta chain variable domain of TCR clone 346515 (TRBV2, TRBJ1-6)
CASGRGGISPLHF

SEQ ID NO: 693031 - protein, 14 aa, Homo sapiens
  CDR3 for alpha chain variable domain of TCR clone 346516 (TRAV1-2, TRAJ8)
CAVREDTGFQKLVF

SEQ ID NO: 693032 - protein, 16 aa, Homo sapiens
  CDR3 for beta chain variable domain of TCR clone 346516 (TRBV28, TRBJ1-4)
CASSPPYRGRGEKLFF

SEQ ID NO: 693033 - protein, 16 aa, Homo sapiens
  CDR3 for alpha chain variable domain of TCR clone 346517 (TRAV3, TRAJ3)
CAVRDRAKSSASKIIF

SEQ ID NO: 693034 - protein, 16 aa, Homo sapiens
  CDR3 for beta chain variable domain of TCR clone 346517 (TRBV20-1, TRBJ2-4)
CSATSLAELAINIQYF

SEQ ID NO: 693035 - protein, 12 aa, Homo sapiens
  CDR3 for alpha chain variable domain of TCR clone 346518 (TRAV13-1, TRAJ49)
CAASPMGNQFYF

SEQ ID NO: 693036 - protein, 17 aa, Homo sapiens
  CDR3 for beta chain variable domain of TCR clone 346518 (TRBV11-2, TRBJ2-1)
CASSLYPPGVDYNEQFF

SEQ ID NO: 693037 - protein, 11 aa, Homo sapiens
  CDR3 for alpha chain variable domain of TCR clone 346519 (TRAV12-2, TRAJ29)
CAVTLRSPLVF

SEQ ID NO: 693038 - protein, 16 aa, Homo sapiens
  CDR3 for beta chain variable domain of TCR clone 346519 (TRBV19, TRBJ1-5)
CTSSIDRGGPRQPQHF

SEQ ID NO: 693039 - protein, 13 aa, Homo sapiens
  CDR3 for alpha chain variable domain of TCR clone 346520 (TRAV21, TRAJ20)
WAVGLRVDYKLSF

SEQ ID NO: 693040 - protein, 13 aa, Homo sapiens
  CDR3 for beta chain variable domain of TCR clone 346520 (TRBV3-1, TRBJ2-2)
CASLARGSGELFF

SEQ ID NO: 693041 - protein, 12 aa, Homo sapiens
  CDR3 for alpha chain variable domain of TCR clone 346521 (TRAV20, TRAJ36)
CAVLTGANNLFF

SEQ ID NO: 693042 - protein, 16 aa, Homo sapiens
  CDR3 for beta chain variable domain of TCR clone 346521 (TRBV5-5, TRBJ1-6)
CASSYLSTGFNSPLHV

SEQ ID NO: 693043 - protein, 12 aa, Homo sapiens
  CDR3 for alpha chain variable domain of TCR clone 346522 (TRAV36/DV7, TRAJ26)
CAVDNYGQNFVF

SEQ ID NO: 693044 - protein, 16 aa, Homo sapiens
  CDR3 for beta chain variable domain of TCR clone 346522 (TRBV7-3, TRBJ2-2)
CASSLTGTGATGELFF

SEQ ID NO: 693045 - protein, 18 aa, Homo sapiens
  CDR3 for alpha chain variable domain of TCR clone 346523 (TRAV26-1, TRAJ52)
CIVRVEGAGGTSYGKLTF

SEQ ID NO: 693046 - protein, 13 aa, Homo sapiens
  CDR3 for beta chain variable domain of TCR clone 346523 (TRBV7-3, TRBJ1-2)
CASSLKRSYGYTF

SEQ ID NO: 693047 - protein, 19 aa, Homo sapiens
  CDR3 for alpha chain variable domain of TCR clone 346524 (TRAV26-1, TRAJ28)
CIVRVAHAYSGAGSYQLTF

SEQ ID NO: 693048 - protein, 15 aa, Homo sapiens
  CDR3 for beta chain variable domain of TCR clone 346524 (TRBV5-1, TRBJ1-3)
CASSSRTGAGNTIYF

SEQ ID NO: 693049 - protein, 12 aa, Homo sapiens
  CDR3 for alpha chain variable domain of TCR clone 346525 (TRAV3, TRAJ20)
CAVRDPDYKLSF

SEQ ID NO: 693050 - protein, 15 aa, Homo sapiens
  CDR3 for beta chain variable domain of TCR clone 346525 (TRBV11-2, TRBJ2-5)
CASSPRSGGLETQYF

SEQ ID NO: 693051 - protein, 15 aa, Homo sapiens
  CDR3 for alpha chain variable domain of TCR clone 346526 (TRAV12-1, TRAJ37)
CVVNGGLWQHWQTNL

SEQ ID NO: 693052 - protein, 12 aa, Homo sapiens
  CDR3 for beta chain variable domain of TCR clone 346526 (TRBV20-1, TRBJ1-2)
CSAPGFNYGYTF

SEQ ID NO: 693053 - protein, 15 aa, Homo sapiens
  CDR3 for alpha chain variable domain of TCR clone 346527 (TRAV12-2, TRAJ23)
CAVNTLYNQGGKLIF

SEQ ID NO: 693054 - protein, 13 aa, Homo sapiens
  CDR3 for beta chain variable domain of TCR clone 346527 (TRBV7-2, TRBJ2-2)
CASSLAVTGELFF

SEQ ID NO: 693055 - protein, 12 aa, Homo sapiens
  CDR3 for alpha chain variable domain of TCR clone 346528 (TRAV12-1, TRAJ31)
CVVNDNNARLMF

SEQ ID NO: 693056 - protein, 12 aa, Homo sapiens
  CDR3 for beta chain variable domain of TCR clone 346528 (TRBV6-5, TRBJ1-2)
CASTDPGYGYTF

SEQ ID NO: 693057 - protein, 13 aa, Homo sapiens
  CDR3 for alpha chain variable domain of TCR clone 346529 (TRAV8-6, TRAJ16)
CAVSSPDGQKLLF

SEQ ID NO: 693058 - protein, 14 aa, Homo sapiens
  CDR3 for beta chain variable domain of TCR clone 346529 (TRBV7-2, TRBJ2-7)
CASRSQGAAYEQYF

SEQ ID NO: 693059 - protein, 18 aa, Homo sapiens
  CDR3 for alpha chain variable domain of TCR clone 346530 (TRAV13-1, TRAJ52)
CAASKRSAGGTSYGKLTF

SEQ ID NO: 693060 - protein, 13 aa, Homo sapiens
  CDR3 for beta chain variable domain of TCR clone 346530 (TRBV12-4, TRBJ1-2)
CASSLRQEKGYAF

SEQ ID NO: 693061 - protein, 17 aa, Homo sapiens
  CDR3 for alpha chain variable domain of TCR clone 346531 (TRAV3, TRAJ42)
CAVRDRDYGGSQGNLIF

SEQ ID NO: 693062 - protein, 14 aa, Homo sapiens
  CDR3 for beta chain variable domain of TCR clone 346531 (TRBV25-1, TRBJ1-1)
CASTHMGGNTEAFF

SEQ ID NO: 693063 - protein, 14 aa, Homo sapiens
  CDR3 for alpha chain variable domain of TCR clone 346532 (TRAV27, TRAJ49)
CAGRPEGTGNQVYF

SEQ ID NO: 693064 - protein, 14 aa, Homo sapiens
  CDR3 for beta chain variable domain of TCR clone 346532 (TRBV18, TRBJ2-5)
CASSPGVSQETQYC

SEQ ID NO: 693065 - protein, 15 aa, Homo sapiens
  CDR3 for alpha chain variable domain of TCR clone 346533 (TRAV34, TRAJ38)
CGADFTPGHNSKLIW

SEQ ID NO: 693066 - protein, 16 aa, Homo sapiens
  CDR3 for beta chain variable domain of TCR clone 346533 (TRBV6-1, TRBJ2-3)
CASSEVIGQGSDTQYF

SEQ ID NO: 693067 - protein, 14 aa, Homo sapiens
  CDR3 for alpha chain variable domain of TCR clone 346534 (TRAV1-2, TRAJ8)
CAVREETGFQKLVF

SEQ ID NO: 693068 - protein, 14 aa, Homo sapiens
  CDR3 for beta chain variable domain of TCR clone 346534 (TRBV20-1, TRBJ1-1)
CSAQTRIGGTEAFF

SEQ ID NO: 693069 - protein, 18 aa, Homo sapiens
  CDR3 for alpha chain variable domain of TCR clone 346535 (TRAV21, TRAJ52)
CAVRPSPDGGTSYGKLTF

SEQ ID NO: 693070 - protein, 17 aa, Homo sapiens
  CDR3 for beta chain variable domain of TCR clone 346535 (TRBV13, TRBJ2-3)
CASSLSRVAGGRNTQYF

SEQ ID NO: 693071 - protein, 15 aa, Homo sapiens
  CDR3 for alpha chain variable domain of TCR clone 346536 (TRAV12-1, TRAJ44)
CVVFVNTGTASKLTF

SEQ ID NO: 693072 - protein, 16 aa, Homo sapiens
  CDR3 for beta chain variable domain of TCR clone 346536 (TRBV7-8, TRBJ2-6)
CQQRRDRGRWANVLTF

SEQ ID NO: 693073 - protein, 14 aa, Homo sapiens
  CDR3 for alpha chain variable domain of TCR clone 346537 (TRAV12-2, TRAJ13)
CAVKKTGGYQKVTF

SEQ ID NO: 693074 - protein, 16 aa, Homo sapiens
  CDR3 for beta chain variable domain of TCR clone 346537 (TRBV4-3, TRBJ2-1)
CASSPALDRGVNEQFF

SEQ ID NO: 693075 - protein, 15 aa, Homo sapiens
  CDR3 for alpha chain variable domain of TCR clone 346538 (TRAV23/DV6, TRAJ37)
CAAGEGSSNTGKLIF

SEQ ID NO: 693076 - protein, 17 aa, Homo sapiens
  CDR3 for beta chain variable domain of TCR clone 346538 (TRBV20-1, TRBJ2-7)
CSATRAGGGAGVEEQYF

SEQ ID NO: 693077 - protein, 16 aa, Homo sapiens
  CDR3 for alpha chain variable domain of TCR clone 346539 (TRAV35, TRAJ20)
CWADPSSGFNDYKLSF

SEQ ID NO: 693078 - protein, 16 aa, Homo sapiens
  CDR3 for beta chain variable domain of TCR clone 346539 (TRBV4-3, TRBJ1-6)
CASSAQPRGEGSPLHV

SEQ ID NO: 693079 - protein, 18 aa, Homo sapiens
  CDR3 for alpha chain variable domain of TCR clone 346540 (TRAV14/DV4, TRAJ26)
CAMRGPSEFCLCSRNQIV

SEQ ID NO: 693080 - protein, 14 aa, Homo sapiens
  CDR3 for beta chain variable domain of TCR clone 346540 (TRBV12-4, TRBJ1-3)
CASTLTGAGNTIYF

SEQ ID NO: 693081 - protein, 12 aa, Homo sapiens
  CDR3 for alpha chain variable domain of TCR clone 346541 (TRAV12-1, TRAJ40)
CVVYSGTYKYIF

SEQ ID NO: 693082 - protein, 18 aa, Homo sapiens
  CDR3 for beta chain variable domain of TCR clone 346541 (TRBV20-1, TRBJ2-3)
CSASGLAGGPGTTDTQYF

SEQ ID NO: 693083 - protein, 14 aa, Homo sapiens
  CDR3 for alpha chain variable domain of TCR clone 346542 (TRAV8-6, TRAJ54)
CAVTEGRGAQKLVF

SEQ ID NO: 693084 - protein, 14 aa, Homo sapiens
  CDR3 for beta chain variable domain of TCR clone 346542 (TRBV27, TRBJ2-7)
CASSIGQGEQKQYF

SEQ ID NO: 693085 - protein, 14 aa, Homo sapiens
  CDR3 for alpha chain variable domain of TCR clone 346543 (TRAV26-1, TRAJ39)
CIVRGSRAGNMPTF

SEQ ID NO: 693086 - protein, 15 aa, Homo sapiens
  CDR3 for beta chain variable domain of TCR clone 346543 (TRBV7-9, TRBJ1-5)
CASSQGHQPNQTQHF

SEQ ID NO: 693087 - protein, 14 aa, Homo sapiens
  CDR3 for alpha chain variable domain of TCR clone 346544 (TRAV1-2, TRAJ8)
CAVRDDTGFQKLVF

SEQ ID NO: 693088 - protein, 13 aa, Homo sapiens
  CDR3 for beta chain variable domain of TCR clone 346544 (TRBV27, TRBJ2-7)
CASSLTTGYEQYF

SEQ ID NO: 693089 - protein, 15 aa, Homo sapiens
  CDR3 for alpha chain variable domain of TCR clone 346545 (TRAV26-1, TRAJ22)
CIVRVSFWFCESTDL

SEQ ID NO: 693090 - protein, 13 aa, Homo sapiens
  CDR3 for beta chain variable domain of TCR clone 346545 (TRBV7-9, TRBJ1-2)
CASSLKQNYGYTF

SEQ ID NO: 693091 - protein, 16 aa, Homo sapiens
  CDR3 for alpha chain variable domain of TCR clone 346546 (TRAV9-2, TRAJ6)
CALRGPASGGSYIPKF

SEQ ID NO: 693092 - protein, 13 aa, Homo sapiens
  CDR3 for beta chain variable domain of TCR clone 346546 (TRBV7-9, TRBJ1-2)
CASSLKQNYGYTF

SEQ ID NO: 693093 - protein, 12 aa, Homo sapiens
  CDR3 for alpha chain variable domain of TCR clone 346547 (TRAV4, TRAJ26)
CFVGDYGQNFVF

SEQ ID NO: 693094 - protein, 16 aa, Homo sapiens
  CDR3 for beta chain variable domain of TCR clone 346547 (TRBV7-2, TRBJ1-2)
CASSSNQDRRGHGYTV

SEQ ID NO: 693095 - protein, 13 aa, Homo sapiens
  CDR3 for alpha chain variable domain of TCR clone 346548 (TRAV8-1, TRAJ13)
CAVSKGGYQKVTF

SEQ ID NO: 693096 - protein, 18 aa, Homo sapiens
  CDR3 for beta chain variable domain of TCR clone 346548 (TRBV11-2, TRBJ2-7)
CASSWRTVQTGQAYEQYF

SEQ ID NO: 693097 - protein, 14 aa, Homo sapiens
  CDR3 for alpha chain variable domain of TCR clone 346549 (TRAV38-1, TRAJ45)
CAYYSGGGADGLTF

SEQ ID NO: 693098 - protein, 14 aa, Homo sapiens
  CDR3 for beta chain variable domain of TCR clone 346549 (TRBV19, TRBJ2-1)
CASPTFVLSGEQSF

SEQ ID NO: 693099 - protein, 12 aa, Homo sapiens
  CDR3 for alpha chain variable domain of TCR clone 346550 (TRAV12-1, TRAJ34)
CVVTFYTDKLIF

SEQ ID NO: 693100 - protein, 14 aa, Homo sapiens
  CDR3 for beta chain variable domain of TCR clone 346550 (TRBV19, TRBJ1-1)
CASLRTGLNTEAFF

SEQ ID NO: 693101 - protein, 14 aa, Homo sapiens
  CDR3 for alpha chain variable domain of TCR clone 346551 (TRAV2, TRAJ12)
TTVLWAHSSYKLIF

SEQ ID NO: 693102 - protein, 13 aa, Homo sapiens
  CDR3 for beta chain variable domain of TCR clone 346551 (TRBV20-1, TRBJ2-1)
CSARSSPRDEQFF

SEQ ID NO: 693103 - protein, 16 aa, Homo sapiens
  CDR3 for alpha chain variable domain of TCR clone 346552 (TRAV12-3, TRAJ53)
CATSPGSGGSNYKLTF

SEQ ID NO: 693104 - protein, 11 aa, Homo sapiens
  CDR3 for beta chain variable domain of TCR clone 346552 (TRBV29-1, TRBJ2-5)
CSEDRAGTQYF

SEQ ID NO: 693105 - protein, 13 aa, Homo sapiens
  CDR3 for alpha chain variable domain of TCR clone 346553 (TRAV12-1, TRAJ12)
CVVNIESSYKLIF

SEQ ID NO: 693106 - protein, 17 aa, Homo sapiens
  CDR3 for beta chain variable domain of TCR clone 346553 (TRBV20-1, TRBJ2-2)
CSASGSGQGGLTGELFF

SEQ ID NO: 693107 - protein, 15 aa, Homo sapiens
  CDR3 for alpha chain variable domain of TCR clone 346554 (TRAV12-3, TRAJ6)
CAMSATTGGSYIPTF

SEQ ID NO: 693108 - protein, 13 aa, Homo sapiens
  CDR3 for beta chain variable domain of TCR clone 346554 (TRBV12-4, TRBJ2-7)
CASSLSGVYEQYF

SEQ ID NO: 693109 - protein, 14 aa, Homo sapiens
  CDR3 for alpha chain variable domain of TCR clone 346555 (TRAV16, TRAJ17)
CALSGRAAGNKLTF

SEQ ID NO: 693110 - protein, 15 aa, Homo sapiens
  CDR3 for beta chain variable domain of TCR clone 346555 (TRBV12-4, TRBJ2-5)
CASSPPTGLQETQYF

SEQ ID NO: 693111 - protein, 16 aa, Homo sapiens
  CDR3 for alpha chain variable domain of TCR clone 346556 (TRAV12-2, TRAJ18)
CAVTTDRGSTLGRLYF

SEQ ID NO: 693112 - protein, 13 aa, Homo sapiens
  CDR3 for beta chain variable domain of TCR clone 346556 (TRBV19, TRBJ2-3)
CATWDKITDTQYF

SEQ ID NO: 693113 - protein, 12 aa, Homo sapiens
  CDR3 for alpha chain variable domain of TCR clone 346557 (TRAV13-2, TRAJ23)
CAERHRGGKLIF

SEQ ID NO: 693114 - protein, 16 aa, Homo sapiens
  CDR3 for beta chain variable domain of TCR clone 346557 (TRBV7-6, TRBJ2-3)
CASSPRRGGLGDTQYF

SEQ ID NO: 693115 - protein, 18 aa, Homo sapiens
  CDR3 for alpha chain variable domain of TCR clone 346558 (TRAV16, TRAJ42)
CALTPPLNYGGSQGNLIF

SEQ ID NO: 693116 - protein, 13 aa, Homo sapiens
  CDR3 for beta chain variable domain of TCR clone 346558 (TRBV20-1, TRBJ1-1)
CSARETENTEAFF

SEQ ID NO: 693117 - protein, 12 aa, Homo sapiens
  CDR3 for alpha chain variable domain of TCR clone 346559 (TRAV13-1, TRAJ39)
CAANNAGNMLTF

SEQ ID NO: 693118 - protein, 11 aa, Homo sapiens
  CDR3 for beta chain variable domain of TCR clone 346559 (TRBV24-1, TRBJ2-5)
CATSIGETQYF

SEQ ID NO: 693119 - protein, 15 aa, Homo sapiens
  CDR3 for alpha chain variable domain of TCR clone 346560 (TRAV27, TRAJ38)
CAARRNAGNNRKLIW

SEQ ID NO: 693120 - protein, 13 aa, Homo sapiens
  CDR3 for beta chain variable domain of TCR clone 346560 (TRBV12-5, TRBJ2-3)
CASGDRQLDTQYL

SEQ ID NO: 693121 - protein, 14 aa, Homo sapiens
  CDR3 for alpha chain variable domain of TCR clone 346561 (TRAV12-3, TRAJ15)
CAMIPPQAGTALIF

SEQ ID NO: 693122 - protein, 14 aa, Homo sapiens
  CDR3 for beta chain variable domain of TCR clone 346561 (TRBV10-3, TRBJ2-1)
CAISDRGGVTEQFF

SEQ ID NO: 693123 - protein, 14 aa, Homo sapiens
  CDR3 for alpha chain variable domain of TCR clone 346562 (TRAV3, TRAJ21)
CAVRDAYNFNKFYF

SEQ ID NO: 693124 - protein, 15 aa, Homo sapiens
  CDR3 for beta chain variable domain of TCR clone 346562 (TRBV6-5, TRBJ1-5)
FASSYSWDSNQPQHF

SEQ ID NO: 693125 - protein, 11 aa, Homo sapiens
  CDR3 for alpha chain variable domain of TCR clone 346563 (TRAV12-1, TRAJ31)
CVWNNNARLMF

SEQ ID NO: 693126 - protein, 15 aa, Homo sapiens
  CDR3 for beta chain variable domain of TCR clone 346563 (TRBV7-2, TRBJ1-5)
CASSLDRGQDQPQHF

SEQ ID NO: 693127 - protein, 13 aa, Homo sapiens
  CDR3 for alpha chain variable domain of TCR clone 346564 (TRAV13-2, TRAJ48)
CAEMDFGNEKLTF

SEQ ID NO: 693128 - protein, 15 aa, Homo sapiens
  CDR3 for beta chain variable domain of TCR clone 346564 (TRBV19, TRBJ2-7)
CASSPAGSGEDLRYF

SEQ ID NO: 693129 - protein, 14 aa, Homo sapiens
  CDR3 for alpha chain variable domain of TCR clone 346565 (TRAV2, TRAJ9)
CAVEDRSGGFKTIF

SEQ ID NO: 693130 - protein, 16 aa, Homo sapiens
  CDR3 for beta chain variable domain of TCR clone 346565 (TRBV20-1, TRBJ2-3)
CSALRDRGPIADTQYF

SEQ ID NO: 693131 - protein, 13 aa, Homo sapiens
  CDR3 for alpha chain variable domain of TCR clone 346566 (TRAV13-1, TRAJ21)
CAAIIYHFNKFYF

SEQ ID NO: 693132 - protein, 13 aa, Homo sapiens
  CDR3 for beta chain variable domain of TCR clone 346566 (TRBV27, TRBJ1-4)
CASSLMGDEKLFF

SEQ ID NO: 693133 - protein, 15 aa, Homo sapiens
  CDR3 for alpha chain variable domain of TCR clone 346567 (TRAV8-3, TRAJ7)
CAVGSSSYGNNRLAF

SEQ ID NO: 693134 - protein, 18 aa, Homo sapiens
  CDR3 for beta chain variable domain of TCR clone 346567 (TRBV11-2, TRBJ2-3)
CASSLGGASRGAPNTQYF

SEQ ID NO: 693135 - protein, 14 aa, Homo sapiens
  CDR3 for alpha chain variable domain of TCR clone 346568 (TRAV36/DV7, TRAJ57)
CAVGFPGGSEKLVF

SEQ ID NO: 693136 - protein, 13 aa, Homo sapiens
  CDR3 for beta chain variable domain of TCR clone 346568 (TRBV20-1, TRBJ1-1)
CSARGGGNTEAFF

SEQ ID NO: 693137 - protein, 12 aa, Homo sapiens
  CDR3 for alpha chain variable domain of TCR clone 346569 (TRAV8-3, TRAJ26)
CAGDNYGQNFVF

SEQ ID NO: 693138 - protein, 15 aa, Homo sapiens
  CDR3 for beta chain variable domain of TCR clone 346569 (TRBV11-2, TRBJ2-1)
CASSLGTSELNEQFF

SEQ ID NO: 693139 - protein, 13 aa, Homo sapiens
  CDR3 for alpha chain variable domain of TCR clone 346570 (TRAV20, TRAJ37)
CAWCSSNTGKLIF

SEQ ID NO: 693140 - protein, 21 aa, Homo sapiens
  CDR3 for beta chain variable domain of TCR clone 346570 (TRBV4-2, TRBJ2-3)
PCSQKTRPCISVPAAPDTQYF

SEQ ID NO: 693141 - protein, 11 aa, Homo sapiens
  CDR3 for alpha chain variable domain of TCR clone 346571 (TRAV2, TRAJ13)
CASGGYQKVTF

SEQ ID NO: 693142 - protein, 15 aa, Homo sapiens
  CDR3 for beta chain variable domain of TCR clone 346571 (TRBV11-1, TRBJ2-7)
CASSLNYGASYEQFF

SEQ ID NO: 693143 - protein, 15 aa, Homo sapiens
  CDR3 for alpha chain variable domain of TCR clone 346572 (TRAV2, TRAJ9)
CAVEDRGTGGFKTIF

SEQ ID NO: 693144 - protein, 16 aa, Homo sapiens
  CDR3 for beta chain variable domain of TCR clone 346572 (TRBV4-1, TRBJ2-5)
CASSQAIAASSATQYF

SEQ ID NO: 693145 - protein, 17 aa, Homo sapiens
  CDR3 for alpha chain variable domain of TCR clone 346573 (TRAV12-1, TRAJ27)
CVVDMSAAGTNAGKSTF

SEQ ID NO: 693146 - protein, 15 aa, Homo sapiens
  CDR3 for beta chain variable domain of TCR clone 346573 (TRBV4-3, TRBJ1-2)
CASSQNYGVMDGYTF

SEQ ID NO: 693147 - protein, 16 aa, Homo sapiens
  CDR3 for alpha chain variable domain of TCR clone 346574 (TRAV30, TRAJ24)
CGTEIVDADSWGKFQF

SEQ ID NO: 693148 - protein, 16 aa, Homo sapiens
  CDR3 for beta chain variable domain of TCR clone 346574 (TRBV7-3, TRBJ2-1)
CASSLVSGSSNNEQFS

SEQ ID NO: 693149 - protein, 13 aa, Homo sapiens
  CDR3 for alpha chain variable domain of TCR clone 346575 (TRAV21, TRAJ15)
CAVRNQAGTALIF

SEQ ID NO: 693150 - protein, 16 aa, Homo sapiens
  CDR3 for beta chain variable domain of TCR clone 346575 (TRBV20-1, TRBJ2-5)
CRPGGTSGGYMETQYF

SEQ ID NO: 693151 - protein, 13 aa, Homo sapiens
  CDR3 for alpha chain variable domain of TCR clone 346576 (TRAV8-3, TRAJ43)
CAVVPYNNNDMRF

SEQ ID NO: 693152 - protein, 17 aa, Homo sapiens
  CDR3 for beta chain variable domain of TCR clone 346576 (TRBV11-1, TRBJ1-1)
CASIAYSPNLAVTEAFF

SEQ ID NO: 693153 - protein, 15 aa, Homo sapiens
  CDR3 for alpha chain variable domain of TCR clone 346577 (TRAV3, TRAJ22)
CAVRDRGGSARQLTF

SEQ ID NO: 693154 - protein, 18 aa, Homo sapiens
  CDR3 for beta chain variable domain of TCR clone 346577 (TRBV28, TRBJ2-1)
CASSSTSGRANSYNGQFF

SEQ ID NO: 693155 - protein, 13 aa, Homo sapiens
  CDR3 for alpha chain variable domain of TCR clone 346578 (TRAV21, TRAJ20)
CAVGLRVDYKLSF

SEQ ID NO: 693156 - protein, 13 aa, Homo sapiens
  CDR3 for beta chain variable domain of TCR clone 346578 (TRBV5-1, TRBJ1-1)
CASSLGSDTEAFF

SEQ ID NO: 693157 - protein, 14 aa, Homo sapiens
  CDR3 for alpha chain variable domain of TCR clone 346579 (TRAV8-2, TRAJ4)
CVVSPSGGYNKLIF

SEQ ID NO: 693158 - protein, 16 aa, Homo sapiens
  CDR3 for beta chain variable domain of TCR clone 346579 (TRBV7-3, TRBJ2-1)
CASSLEGYRSYNEQYF

SEQ ID NO: 693159 - protein, 11 aa, Homo sapiens
  CDR3 for alpha chain variable domain of TCR clone 346580 (TRAV13-2, TRAJ36)
CAETGANNLFF

SEQ ID NO: 693160 - protein, 13 aa, Homo sapiens
  CDR3 for beta chain variable domain of TCR clone 346580 (TRBV7-9, TRBJ2-4)
CATEVLAGNIQYF

SEQ ID NO: 693161 - protein, 15 aa, Homo sapiens
  CDR3 for alpha chain variable domain of TCR clone 346581 (TRAV3, TRAJ22)
CAVRDRGGSARQLTL

SEQ ID NO: 693162 - protein, 13 aa, Homo sapiens
  CDR3 for beta chain variable domain of TCR clone 346581 (TRBV7-9, TRBJ1-2)
CASSLKQNYGYTF

SEQ ID NO: 693163 - protein, 14 aa, Homo sapiens
  CDR3 for alpha chain variable domain of TCR clone 346582 (TRAV12-2, TRAJ17)
CAVLFKAAGNKLTF

SEQ ID NO: 693164 - protein, 14 aa, Homo sapiens
  CDR3 for beta chain variable domain of TCR clone 346582 (TRBV19, TRBJ2-1)
CANPTFVLSGEQFF

SEQ ID NO: 693165 - protein, 14 aa, Homo sapiens
  CDR3 for alpha chain variable domain of TCR clone 346583 (TRAV1-2, TRAJ16)
CAVNRFSDGQKLLF

SEQ ID NO: 693166 - protein, 15 aa, Homo sapiens
  CDR3 for beta chain variable domain of TCR clone 346583 (TRBV28, TRBJ2-5)
CASSAPRQVQETQYS

SEQ ID NO: 693167 - protein, 14 aa, Homo sapiens
  CDR3 for alpha chain variable domain of TCR clone 346584 (TRAV12-2, TRAJ13)
CAVKKTGGYQKFTF

SEQ ID NO: 693168 - protein, 12 aa, Homo sapiens
  CDR3 for beta chain variable domain of TCR clone 346584 (TRBV12-4, TRBJ1-2)
CASSFIWLHLRF

SEQ ID NO: 693169 - protein, 17 aa, Homo sapiens
  CDR3 for alpha chain variable domain of TCR clone 346585 (TRAV26-2, TRAJ42)
CILRDVGYGGSQGNLIF

SEQ ID NO: 693170 - protein, 13 aa, Homo sapiens
  CDR3 for beta chain variable domain of TCR clone 346585 (TRBV9, TRBJ2-7)
CASSASDSYEQYF

SEQ ID NO: 693171 - protein, 14 aa, Homo sapiens
  CDR3 for alpha chain variable domain of TCR clone 346586 (TRAV13-1, TRAJ6)
CAASITGGSYIPTF

SEQ ID NO: 693172 - protein, 17 aa, Homo sapiens
  CDR3 for beta chain variable domain of TCR clone 346586 (TRBV7-8, TRBJ2-6)
CASSAGTGDAGANVLTF

SEQ ID NO: 693173 - protein, 13 aa, Homo sapiens
  CDR3 for alpha chain variable domain of TCR clone 346587 (TRAV35, TRAJ57)
CAGSQGGSEKLVF

SEQ ID NO: 693174 - protein, 16 aa, Homo sapiens
  CDR3 for beta chain variable domain of TCR clone 346587 (TRBV20-1, TRBJ1-4)
CSAPGQGLLTNEKLFF

SEQ ID NO: 693175 - protein, 14 aa, Homo sapiens
  CDR3 for alpha chain variable domain of TCR clone 346588 (TRAV1-2, TRAJ16)
CAVNRFSDGPKLLF

SEQ ID NO: 693176 - protein, 14 aa, Homo sapiens
  CDR3 for beta chain variable domain of TCR clone 346588 (TRBV20-1, TRBJ2-7)
CSARRSGSSYEQYF

SEQ ID NO: 693177 - protein, 19 aa, Homo sapiens
  CDR3 for alpha chain variable domain of TCR clone 346589 (TRAV26-1, TRAJ22)
CCVLLHLWVFSGSARQLTF

SEQ ID NO: 693178 - protein, 19 aa, Homo sapiens
  CDR3 for beta chain variable domain of TCR clone 346589 (TRBV19, TRBJ2-5)
CASSIGQVTDFFLGETQYF

SEQ ID NO: 693179 - protein, 15 aa, Homo sapiens
  CDR3 for alpha chain variable domain of TCR clone 346590 (TRAV4, TRAJ39)
CLVGPNNNAGNMLTF

SEQ ID NO: 693180 - protein, 16 aa, Homo sapiens
  CDR3 for beta chain variable domain of TCR clone 346590 (TRBV10-3, TRBJ1-6)
CAISERRGQGNSPLHF

SEQ ID NO: 693181 - protein, 13 aa, Homo sapiens
  CDR3 for alpha chain variable domain of TCR clone 346591 (TRAV35, TRAJ10)
CWYTHGGGNKLTF

SEQ ID NO: 693182 - protein, 16 aa, Homo sapiens
  CDR3 for beta chain variable domain of TCR clone 346591 (TRBV12-5, TRBJ2-5)
CASGPRTSGNQETQYF

SEQ ID NO: 693183 - protein, 17 aa, Homo sapiens
  CDR3 for alpha chain variable domain of TCR clone 346592 (TRAV4, TRAJ13)
CLVGVQGSSGGYQKVTF

SEQ ID NO: 693184 - protein, 18 aa, Homo sapiens
  CDR3 for beta chain variable domain of TCR clone 346592 (TRBV15, TRBJ2-3)
CATSRDGARSWDTNTQYF

SEQ ID NO: 693185 - protein, 14 aa, Homo sapiens
  CDR3 for alpha chain variable domain of TCR clone 346593 (TRAV12-2, TRAJ6)
CAGNIKGGSYIPTF

SEQ ID NO: 693186 - protein, 14 aa, Homo sapiens
  CDR3 for beta chain variable domain of TCR clone 346593 (TRBV20-1, TRBJ2-7)
CSARDPTGLDEQYF

SEQ ID NO: 693187 - protein, 14 aa, Homo sapiens
  CDR3 for alpha chain variable domain of TCR clone 346594 (TRAV25, TRAJ12)
CAGCDMDSSYKLIF

SEQ ID NO: 693188 - protein, 14 aa, Homo sapiens
  CDR3 for beta chain variable domain of TCR clone 346594 (TRBV12-5, TRBJ2-5)
CASGSRTHQETQYF

SEQ ID NO: 693189 - protein, 15 aa, Homo sapiens
  CDR3 for alpha chain variable domain of TCR clone 346595 (TRAV26-1, TRAJ29)
CIVRVEGAGNTPLVF

SEQ ID NO: 693190 - protein, 14 aa, Homo sapiens
  CDR3 for beta chain variable domain of TCR clone 346595 (TRBV19, TRBJ2-1)
CASPTFVLSGEQFF

SEQ ID NO: 693191 - protein, 14 aa, Homo sapiens
  CDR3 for alpha chain variable domain of TCR clone 346596 (TRAV14/DV4, TRAJ42)
CPRGSLRSQGNIIF

SEQ ID NO: 693192 - protein, 18 aa, Homo sapiens
  CDR3 for beta chain variable domain of TCR clone 346596 (TRBV20-1, TRBJ2-3)
CSASGLAGGPGTTDTQYF

SEQ ID NO: 693193 - protein, 17 aa, Homo sapiens
  CDR3 for alpha chain variable domain of TCR clone 346597 (TRAV3, TRAJ42)
CAVRDRDYGGSQGNLIF

SEQ ID NO: 693194 - protein, 14 aa, Homo sapiens
  CDR3 for beta chain variable domain of TCR clone 346597 (TRBV5-1, TRBJ2-3)
CASSASGGQDTQYF

SEQ ID NO: 693195 - protein, 14 aa, Homo sapiens
  CDR3 for alpha chain variable domain of TCR clone 346598 (TRAV8-3, TRAJ39)
CAVGANNAGNMLTF

SEQ ID NO: 693196 - protein, 14 aa, Homo sapiens
  CDR3 for beta chain variable domain of TCR clone 346598 (TRBV2, TRBJ1-5)
CASGGVLSNQPQHF

SEQ ID NO: 693197 - protein, 17 aa, Homo sapiens
  CDR3 for alpha chain variable domain of TCR clone 346599 (TRAV13-1, TRAJ45)
CAASIRTRRRRCGRTHL

SEQ ID NO: 693198 - protein, 14 aa, Homo sapiens
  CDR3 for beta chain variable domain of TCR clone 346599 (TRBV27, TRBJ1-1)
CASSPQGKRAEAFF

SEQ ID NO: 693199 - protein, 16 aa, Homo sapiens
  CDR3 for alpha chain variable domain of TCR clone 346600 (TRAV13-2, TRAJ54)
CAESGSGSPEAGILPR

SEQ ID NO: 693200 - protein, 15 aa, Homo sapiens
  CDR3 for beta chain variable domain of TCR clone 346600 (TRBV20-1, TRBJ2-7)
CSAESGTSGAYEQYF

SEQ ID NO: 693201 - protein, 11 aa, Homo sapiens
  CDR3 for alpha chain variable domain of TCR clone 346601 (TRAV13-2, TRAJ54)
RAVQGAQKLVF

SEQ ID NO: 693202 - protein, 15 aa, Homo sapiens
  CDR3 for beta chain variable domain of TCR clone 346601 (TRBV6-1, TRBJ2-1)
CASSELRGQYNEQFF

SEQ ID NO: 693203 - protein, 11 aa, Homo sapiens
  CDR3 for alpha chain variable domain of TCR clone 346602 (TRAV12-1, TRAJ34)
CVVNKGRELIF

SEQ ID NO: 693204 - protein, 15 aa, Homo sapiens
  CDR3 for beta chain variable domain of TCR clone 346602 (TRBV20-1, TRBJ2-7)
CSARDRVSGMDEQYF

SEQ ID NO: 693205 - protein, 12 aa, Homo sapiens
  CDR3 for alpha chain variable domain of TCR clone 346603 (TRAV13-2, TRAJ23)
CAERHMGGKLIF

SEQ ID NO: 693206 - protein, 16 aa, Homo sapiens
  CDR3 for beta chain variable domain of TCR clone 346603 (TRBV20-1, TRBJ1-4)
CSAPGQGLLTNENLFF

SEQ ID NO: 693207 - protein, 14 aa, Homo sapiens
  CDR3 for alpha chain variable domain of TCR clone 346604 (TRAV1-2, TRAJ16)
CAVNRFSDGQKLLF

SEQ ID NO: 693208 - protein, 14 aa, Homo sapiens
  CDR3 for beta chain variable domain of TCR clone 346604 (TRBV6-1, TRBJ1-3)
CASVQGGGGNTIYV

SEQ ID NO: 693209 - protein, 23 aa, Homo sapiens
  CDR3 for alpha chain variable domain of TCR clone 346605 (TRAV12-2, TRAJ36)
SLLIRDSQPSDSATLERANNLFF

SEQ ID NO: 693210 - protein, 16 aa, Homo sapiens
  CDR3 for beta chain variable domain of TCR clone 346605 (TRBV12-5, TRBJ2-5)
CASGPRTSGNQETQYF

SEQ ID NO: 693211 - protein, 13 aa, Homo sapiens
  CDR3 for alpha chain variable domain of TCR clone 346606 (TRAV27, TRAJ41)
CAGEGNSGYALNF

SEQ ID NO: 693212 - protein, 18 aa, Homo sapiens
  CDR3 for beta chain variable domain of TCR clone 346606 (TRBV2, TRBJ2-2)
CQQSTGTSGGGNTGELFF

SEQ ID NO: 693213 - protein, 15 aa, Homo sapiens
  CDR3 for alpha chain variable domain of TCR clone 346607 (TRAV4, TRAJ42)
CLVGGYGGSHGNLIF

SEQ ID NO: 693214 - protein, 16 aa, Homo sapiens
  CDR3 for beta chain variable domain of TCR clone 346607 (TRBV27, TRBJ1-1)
CASSTRTGGVGTEAFF

SEQ ID NO: 693215 - protein, 17 aa, Homo sapiens
  CDR3 for alpha chain variable domain of TCR clone 346608 (TRAV4, TRAJ18)
CLVGERSVGSTLGRLYF

SEQ ID NO: 693216 - protein, 14 aa, Homo sapiens
  CDR3 for beta chain variable domain of TCR clone 346608 (TRBV6-5, TRBJ1-2)
CASSYDGTGGGCTF

SEQ ID NO: 693217 - protein, 14 aa, Homo sapiens
  CDR3 for alpha chain variable domain of TCR clone 346609 (TRAV3, TRAJ6)
CAVRDWGGSYIHTF

SEQ ID NO: 693218 - protein, 17 aa, Homo sapiens
  CDR3 for beta chain variable domain of TCR clone 346609 (TRBV6-5, TRBJ2-1)
CASRLSGRFESYNEQFF

SEQ ID NO: 693219 - protein, 14 aa, Homo sapiens
  CDR3 for alpha chain variable domain of TCR clone 346610 (TRAV8-2, TRAJ4)
CVVSPSGGYTKLIF

SEQ ID NO: 693220 - protein, 14 aa, Homo sapiens
  CDR3 for beta chain variable domain of TCR clone 346610 (TRBV19, TRBJ2-5)
CASSSSGIQETQYF

SEQ ID NO: 693221 - protein, 16 aa, Homo sapiens
  CDR3 for alpha chain variable domain of TCR clone 346611 (TRAV3, TRAJ22)
CAVRDMGSGSARQLTF

SEQ ID NO: 693222 - protein, 13 aa, Homo sapiens
  CDR3 for beta chain variable domain of TCR clone 346611 (TRBV5-7, TRBJ2-6)
CASTSSGANVLTF

SEQ ID NO: 693223 - protein, 15 aa, Homo sapiens
  CDR3 for alpha chain variable domain of TCR clone 346612 (TRAV21, TRAJ32)
CAVNSYGGATNKLNF

SEQ ID NO: 693224 - protein, 18 aa, Homo sapiens
  CDR3 for beta chain variable domain of TCR clone 346612 (TRBV7-9, TRBJ2-1)
CASSTGLAEGTSYNEQFF

SEQ ID NO: 693225 - protein, 12 aa, Homo sapiens
  CDR3 for alpha chain variable domain of TCR clone 346613 (TRAV29/DV5, TRAJ26)
CAAIPSGQHFVF

SEQ ID NO: 693226 - protein, 15 aa, Homo sapiens
  CDR3 for beta chain variable domain of TCR clone 346613 (TRBV19, TRBJ1-5)
CASSDSGPRNQPQHF

SEQ ID NO: 693227 - protein, 14 aa, Homo sapiens
  CDR3 for alpha chain variable domain of TCR clone 346614 (TRAV12-2, TRAJ13)
CAVKQTGGYQKVTF

SEQ ID NO: 693228 - protein, 15 aa, Homo sapiens
  CDR3 for beta chain variable domain of TCR clone 346614 (TRBV27, TRBJ2-1)
CASSNWGGSSNEQFF

SEQ ID NO: 693229 - protein, 14 aa, Homo sapiens
  CDR3 for alpha chain variable domain of TCR clone 346615 (TRAV27, TRAJ12)
CAGARMDSSYKLIF

SEQ ID NO: 693230 - protein, 20 aa, Homo sapiens
  CDR3 for beta chain variable domain of TCR clone 346615 (TRBV10-3, TRBJ2-7)
CAISESGRPSGDGSSSTSGR

SEQ ID NO: 693231 - protein, 14 aa, Homo sapiens
  CDR3 for alpha chain variable domain of TCR clone 346616 (TRAV12-3, TRAJ10)
SHLPLTGGGNKLTF

SEQ ID NO: 693232 - protein, 13 aa, Homo sapiens
  CDR3 for beta chain variable domain of TCR clone 346616 (TRBV7-7, TRBJ2-5)
CASSRSGQEAQYF

SEQ ID NO: 693233 - protein, 16 aa, Homo sapiens
  CDR3 for alpha chain variable domain of TCR clone 346617 (TRAV30, TRAJ24)
CGTEIVDADSWGKFQF

SEQ ID NO: 693234 - protein, 15 aa, Homo sapiens
  CDR3 for beta chain variable domain of TCR clone 346617 (TRBV7-2, TRBJ2-3)
CASSFEGPPGDTQYF

SEQ ID NO: 693235 - protein, 12 aa, Homo sapiens
  CDR3 for alpha chain variable domain of TCR clone 346618 (TRAV36/DV7, TRAJ40)
CAVGTGTYKYIF

SEQ ID NO: 693236 - protein, 17 aa, Homo sapiens
  CDR3 for beta chain variable domain of TCR clone 346618 (TRBV13, TRBJ2-3)
CASSLSRVAGGRNTQYF

SEQ ID NO: 693237 - protein, 14 aa, Homo sapiens
  CDR3 for alpha chain variable domain of TCR clone 346619 (TRAV38-2/DV8, TRAJ49)
CAYRSPNTGTQFYF

SEQ ID NO: 693238 - protein, 14 aa, Homo sapiens
  CDR3 for beta chain variable domain of TCR clone 346619 (TRBV28, TRBJ1-1)
CAGSSEQGYTEAFF

SEQ ID NO: 693239 - protein, 11 aa, Homo sapiens
  CDR3 for alpha chain variable domain of TCR clone 346620 (TRAV2, TRAJ13)
CASGGYQKVTF

SEQ ID NO: 693240 - protein, 12 aa, Homo sapiens
  CDR3 for beta chain variable domain of TCR clone 346620 (TRBV11-2, TRBJ2-2)
CASRLGGGELFF

SEQ ID NO: 693241 - protein, 15 aa, Homo sapiens
  CDR3 for alpha chain variable domain of TCR clone 346621 (TRAV3, TRAJ38)
CAVRDCLNAGNNHIQ

SEQ ID NO: 693242 - protein, 15 aa, Homo sapiens
  CDR3 for beta chain variable domain of TCR clone 346621 (TRBV6-5, TRBJ2-1)
CASSYDAGAGNEQFF

SEQ ID NO: 693243 - protein, 13 aa, Homo sapiens
  CDR3 for alpha chain variable domain of TCR clone 346622 (TRAV29/DV5, TRAJ31)
CAASRNNNARLMF

SEQ ID NO: 693244 - protein, 13 aa, Homo sapiens
  CDR3 for beta chain variable domain of TCR clone 346622 (TRBV27, TRBJ2-3)
CASSLSQGDTQYF

SEQ ID NO: 693245 - protein, 15 aa, Homo sapiens
  CDR3 for alpha chain variable domain of TCR clone 346623 (TRAV12-1, TRAJ44)
CVAHLPTGTASKLTF

SEQ ID NO: 693246 - protein, 13 aa, Homo sapiens
  CDR3 for beta chain variable domain of TCR clone 346623 (TRBV6-5, TRBJ2-5)
CASSPQGGETQYF

SEQ ID NO: 693247 - protein, 16 aa, Homo sapiens
  CDR3 for alpha chain variable domain of TCR clone 346624 (TRAV12-1, TRAJ45)
CVVIRYSGGGADGLTF

SEQ ID NO: 693248 - protein, 12 aa, Homo sapiens
  CDR3 for beta chain variable domain of TCR clone 346624 (TRBV6-5, TRBJ2-2)
CASRQITVELFF

SEQ ID NO: 693249 - protein, 12 aa, Homo sapiens
  CDR3 for alpha chain variable domain of TCR clone 346625 (TRAV12-3, TRAJ17)
CAMTLTGNKLTF

SEQ ID NO: 693250 - protein, 16 aa, Homo sapiens
  CDR3 for beta chain variable domain of TCR clone 346625 (TRBV13, TRBJ2-2)
CASSPRTGEHTGELVF

SEQ ID NO: 693251 - protein, 16 aa, Homo sapiens
  CDR3 for alpha chain variable domain of TCR clone 346626 (TRAV30, TRAJ24)
CGAEIVDADSWGKFQF

SEQ ID NO: 693252 - protein, 16 aa, Homo sapiens
  CDR3 for beta chain variable domain of TCR clone 346626 (TRBV2, TRBJ1-3)
CASSGGAGRSGNTIYF

SEQ ID NO: 693253 - protein, 11 aa, Homo sapiens
  CDR3 for alpha chain variable domain of TCR clone 346627 (TRAV12-1, TRAJ8)
CVVTGFQKLVF

SEQ ID NO: 693254 - protein, 15 aa, Homo sapiens
  CDR3 for beta chain variable domain of TCR clone 346627 (TRBV25-1, TRBJ2-3)
CASSEYMGGGDTQYF

SEQ ID NO: 693255 - protein, 13 aa, Homo sapiens
  CDR3 for alpha chain variable domain of TCR clone 346628 (TRAV27, TRAJ41)
CAGEGNSGYALNF

SEQ ID NO: 693256 - protein, 13 aa, Homo sapiens
  CDR3 for beta chain variable domain of TCR clone 346628 (TRBV19, TRBJ1-5)
CASSMRGYQPQHF

SEQ ID NO: 693257 - protein, 15 aa, Homo sapiens
  CDR3 for alpha chain variable domain of TCR clone 346629 (TRAV12-2, TRAJ53)
CAVNGGGGSNYKLTF

SEQ ID NO: 693258 - protein, 17 aa, Homo sapiens
  CDR3 for beta chain variable domain of TCR clone 346629 (TRBV7-3, TRBJ2-3)
SASSLMKRMRGADTQYF

SEQ ID NO: 693259 - protein, 13 aa, Homo sapiens
  CDR3 for alpha chain variable domain of TCR clone 346630 (TRAV12-1, TRAJ3)
CVVNHRGASKIIF

SEQ ID NO: 693260 - protein, 13 aa, Homo sapiens
  CDR3 for beta chain variable domain of TCR clone 346630 (TRBV28, TRBJ1-5)
CASSDRGNQPQHF

SEQ ID NO: 693261 - protein, 12 aa, Homo sapiens
  CDR3 for alpha chain variable domain of TCR clone 346631 (TRAV13-1, TRAJ21)
WAAFFNFNKFYF

SEQ ID NO: 693262 - protein, 14 aa, Homo sapiens
  CDR3 for beta chain variable domain of TCR clone 346631 (TRBV4-1, TRBJ2-7)
CASRLTSGSYEQYF

SEQ ID NO: 693263 - protein, 15 aa, Homo sapiens
  CDR3 for alpha chain variable domain of TCR clone 346632 (TRAV12-1, TRAJ44)
CVVDEYTGTASKLTF

SEQ ID NO: 693264 - protein, 15 aa, Homo sapiens
  CDR3 for beta chain variable domain of TCR clone 346632 (TRBV7-9, TRBJ1-6)
CASSSPGRGNSPLHF

SEQ ID NO: 693265 - protein, 17 aa, Homo sapiens
  CDR3 for alpha chain variable domain of TCR clone 346633 (TRAV3, TRAJ12)
CAVRDGGRMDGSYKLIF

SEQ ID NO: 693266 - protein, 13 aa, Homo sapiens
  CDR3 for beta chain variable domain of TCR clone 346633 (TRBV4-2, TRBJ1-1)
CASSQAGNTEAFF

SEQ ID NO: 693267 - protein, 14 aa, Homo sapiens
  CDR3 for alpha chain variable domain of TCR clone 346634 (TRAV9-2, TRAJ39)
CALYIYNAGNMLTF

SEQ ID NO: 693268 - protein, 12 aa, Homo sapiens
  CDR3 for beta chain variable domain of TCR clone 346634 (TRBV7-3, TRBJ2-1)
CASSFINNEQFF

SEQ ID NO: 693269 - protein, 20 aa, Homo sapiens
  CDR3 for alpha chain variable domain of TCR clone 346635 (TRAV26-1, TRAJ42)
CCVLLHRQTYYGRSQGNLIF

SEQ ID NO: 693270 - protein, 16 aa, Homo sapiens
  CDR3 for beta chain variable domain of TCR clone 346635 (TRBV7-3, TRBJ2-2)
CASSLKRGTLSGELFF

SEQ ID NO: 693271 - protein, 13 aa, Homo sapiens
  CDR3 for alpha chain variable domain of TCR clone 346636 (TRAV13-1, TRAJ6)
CARGSGGSYIPTF

SEQ ID NO: 693272 - protein, 13 aa, Homo sapiens
  CDR3 for beta chain variable domain of TCR clone 346636 (TRBV10-2, TRBJ2-7)
CASGASGGYEQYF

SEQ ID NO: 693273 - protein, 15 aa, Homo sapiens
  CDR3 for alpha chain variable domain of TCR clone 346637 (TRAV2, TRAJ15)
CAVEDRGQAGTALIF

SEQ ID NO: 693274 - protein, 13 aa, Homo sapiens
  CDR3 for beta chain variable domain of TCR clone 346637 (TRBV10-2, TRBJ2-7)
CASGTSGGYEQYF

SEQ ID NO: 693275 - protein, 14 aa, Homo sapiens
  CDR3 for alpha chain variable domain of TCR clone 346638 (TRAV1-2, TRAJ8)
CPVREDTGFQKLVF

SEQ ID NO: 693276 - protein, 13 aa, Homo sapiens
  CDR3 for beta chain variable domain of TCR clone 346638 (TRBV14, TRBJ1-2)
CASSEDRRYGYTF

SEQ ID NO: 693277 - protein, 17 aa, Homo sapiens
  CDR3 for alpha chain variable domain of TCR clone 346639 (TRAV13-1, TRAJ28)
CAASPPYSGAGSYQLTF

SEQ ID NO: 693278 - protein, 12 aa, Homo sapiens
  CDR3 for beta chain variable domain of TCR clone 346639 (TRBV14, TRBJ2-7)
CASSSLKGEQYF

SEQ ID NO: 693279 - protein, 11 aa, Homo sapiens
  CDR3 for alpha chain variable domain of TCR clone 346640 (TRAV2, TRAJ33)
CAVESNYQLIW

SEQ ID NO: 693280 - protein, 13 aa, Homo sapiens
  CDR3 for beta chain variable domain of TCR clone 346640 (TRBV2, TRBJ2-7)
CASSGAAAYEQYF

SEQ ID NO: 693281 - protein, 17 aa, Homo sapiens
  CDR3 for alpha chain variable domain of TCR clone 346641 (TRAV13-1, TRAJ52)
CAAGRNVGGTSYGKLTF

SEQ ID NO: 693282 - protein, 13 aa, Homo sapiens
  CDR3 for beta chain variable domain of TCR clone 346641 (TRBV7-2, TRBJ1-1)
CASNLKGAKVAFF

SEQ ID NO: 693283 - protein, 12 aa, Homo sapiens
  CDR3 for alpha chain variable domain of TCR clone 346642 (TRAV8-3, TRAJ20)
CAVGANDYRLSF

SEQ ID NO: 693284 - protein, 14 aa, Homo sapiens
  CDR3 for beta chain variable domain of TCR clone 346642 (TRBV19, TRBJ2-3)
CASSVGRGSDTQYF

SEQ ID NO: 693285 - protein, 15 aa, Homo sapiens
  CDR3 for alpha chain variable domain of TCR clone 346643 (TRAV21, TRAJ38)
CAVRQDAGNNRKLIW

SEQ ID NO: 693286 - protein, 12 aa, Homo sapiens
  CDR3 for beta chain variable domain of TCR clone 346643 (TRBV4-1, TRBJ1-2)
CASRQRNHGYTF

SEQ ID NO: 693287 - protein, 14 aa, Homo sapiens
  CDR3 for alpha chain variable domain of TCR clone 346644 (TRAV17, TRAJ23)
CATDEDNQGGKLIF

SEQ ID NO: 693288 - protein, 15 aa, Homo sapiens
  CDR3 for beta chain variable domain of TCR clone 346644 (TRBV29-1, TRBJ2-1)
CSVENIAVRSGEQFF

SEQ ID NO: 693289 - protein, 11 aa, Homo sapiens
  CDR3 for alpha chain variable domain of TCR clone 346645 (TRAV12-1, TRAJ21)
CVVNNFNKFYF

SEQ ID NO: 693290 - protein, 13 aa, Homo sapiens
  CDR3 for beta chain variable domain of TCR clone 346645 (TRBV10-3, TRBJ2-7)
CASKLAVNYEQYF

SEQ ID NO: 693291 - protein, 14 aa, Homo sapiens
  CDR3 for alpha chain variable domain of TCR clone 346646 (TRAV13-1, TRAJ35)
CAASKGGFGNVLHC

SEQ ID NO: 693292 - protein, 17 aa, Homo sapiens
  CDR3 for beta chain variable domain of TCR clone 346646 (TRBV28, TRBJ2-7)
CASSPLHRASGVYEQYF

SEQ ID NO: 693293 - protein, 16 aa, Homo sapiens
  CDR3 for alpha chain variable domain of TCR clone 346647 (TRAV30, TRAJ24)
CCTEIVDADSWGKFQF

SEQ ID NO: 693294 - protein, 15 aa, Homo sapiens
  CDR3 for beta chain variable domain of TCR clone 346647 (TRBV4-1, TRBJ2-7)
CASSQNTGRLYEQYF

SEQ ID NO: 693295 - protein, 14 aa, Homo sapiens
  CDR3 for alpha chain variable domain of TCR clone 346648 (TRAV1-2, TRAJ16)
CAVNRFSDGQKLLF

SEQ ID NO: 693296 - protein, 14 aa, Homo sapiens
  CDR3 for beta chain variable domain of TCR clone 346648 (TRBV7-3, TRBJ1-1)
CDSSLKGGNTEAFF

SEQ ID NO: 693297 - protein, 14 aa, Homo sapiens
  CDR3 for alpha chain variable domain of TCR clone 346649 (TRAV13-1, TRAJ10)
CAAKEPGGGNKLTF

SEQ ID NO: 693298 - protein, 14 aa, Homo sapiens
  CDR3 for beta chain variable domain of TCR clone 346649 (TRBV18, TRBJ2-7)
CASSPRGGAYEQYF

SEQ ID NO: 693299 - protein, 13 aa, Homo sapiens
  CDR3 for alpha chain variable domain of TCR clone 346650 (TRAV2, TRAJ40)
CAVVTSGTYKYIF

SEQ ID NO: 693300 - protein, 15 aa, Homo sapiens
  CDR3 for beta chain variable domain of TCR clone 346650 (TRBV20-1, TRBJ1-1)
CSASRGVTGNTGAFF

SEQ ID NO: 693301 - protein, 14 aa, Homo sapiens
  CDR3 for alpha chain variable domain of TCR clone 346651 (TRAV26-1, TRAJ30)
CIFRPRNRDDKIIF

SEQ ID NO: 693302 - protein, 13 aa, Homo sapiens
  CDR3 for beta chain variable domain of TCR clone 346651 (TRBV6-1, TRBJ1-1)
CASSVDRNTEAFF

SEQ ID NO: 693303 - protein, 16 aa, Homo sapiens
  CDR3 for alpha chain variable domain of TCR clone 346652 (TRAV38-1, TRAJ34)
CAFMKHDETYTDKLIF

SEQ ID NO: 693304 - protein, 16 aa, Homo sapiens
  CDR3 for beta chain variable domain of TCR clone 346652 (TRBV13, TRBJ2-2)
CASSPRTGEHTGELFF

SEQ ID NO: 693305 - protein, 12 aa, Homo sapiens
  CDR3 for alpha chain variable domain of TCR clone 346653 (TRAV38-1, TRAJ20)
CTFIWNDYKLSF

SEQ ID NO: 693306 - protein, 14 aa, Homo sapiens
  CDR3 for beta chain variable domain of TCR clone 346653 (TRBV19, TRBJ2-1)
CASSMGSGATEQFF

SEQ ID NO: 693307 - protein, 14 aa, Homo sapiens
  CDR3 for alpha chain variable domain of TCR clone 346654 (TRAV2, TRAJ9)
CAVDPKTGGFKTIF

SEQ ID NO: 693308 - protein, 13 aa, Homo sapiens
  CDR3 for beta chain variable domain of TCR clone 346654 (TRBV20-1, TRBJ2-1)
CSASTGTSNEQFF

SEQ ID NO: 693309 - protein, 13 aa, Homo sapiens
  CDR3 for alpha chain variable domain of TCR clone 346655 (TRAV20, TRAJ48)
CAVQGVGNEKLTF

SEQ ID NO: 693310 - protein, 18 aa, Homo sapiens
  CDR3 for beta chain variable domain of TCR clone 346655 (TRBV2, TRBJ2-2)
GQQSTGTSGGGNTGELFF

SEQ ID NO: 693311 - protein, 21 aa, Homo sapiens
  CDR3 for alpha chain variable domain of TCR clone 346656 (TRAV8-3, TRAJ6)
CAVGGEEATYLHLEELPALLF

SEQ ID NO: 693312 - protein, 17 aa, Homo sapiens
  CDR3 for beta chain variable domain of TCR clone 346656 (TRBV7-2, TRBJ2-3)
CASSLAGGLAGTAGQYF

SEQ ID NO: 693313 - protein, 16 aa, Homo sapiens
  CDR3 for alpha chain variable domain of TCR clone 346657 (TRAV3, TRAJ10)
CAVRDMRAGGGNKLTF

SEQ ID NO: 693314 - protein, 16 aa, Homo sapiens
  CDR3 for beta chain variable domain of TCR clone 346657 (TRBV12-4, TRBJ1-5)
CASSLPVGGSNQPQHF

SEQ ID NO: 693315 - protein, 14 aa, Homo sapiens
  CDR3 for alpha chain variable domain of TCR clone 346658 (TRAV8-3, TRAJ4)
LWVFYSGGYNKLIF

SEQ ID NO: 693316 - protein, 14 aa, Homo sapiens
  CDR3 for beta chain variable domain of TCR clone 346658 (TRBV7-9, TRBJ2-3)
CASSLEDGTDTQYF

SEQ ID NO: 693317 - protein, 16 aa, Homo sapiens
  CDR3 for alpha chain variable domain of TCR clone 346659 (TRAV3, TRAJ37)
CAVRPHGSGNTGKLIF

SEQ ID NO: 693318 - protein, 14 aa, Homo sapiens
  CDR3 for beta chain variable domain of TCR clone 346659 (TRBV7-3, TRBJ1-1)
CASSLGTGYTEAFF

SEQ ID NO: 693319 - protein, 15 aa, Homo sapiens
  CDR3 for alpha chain variable domain of TCR clone 346660 (TRAV2, TRAJ15)
CAVEDRGQAGTALIF

SEQ ID NO: 693320 - protein, 15 aa, Homo sapiens
  CDR3 for beta chain variable domain of TCR clone 346660 (TRBV20-1, TRBJ1-5)
CSATSDRGLGQPQHF

SEQ ID NO: 693321 - protein, 14 aa, Homo sapiens
  CDR3 for alpha chain variable domain of TCR clone 346661 (TRAV12-1, TRAJ38)
CGELKASNNRKLIW

SEQ ID NO: 693322 - protein, 13 aa, Homo sapiens
  CDR3 for beta chain variable domain of TCR clone 346661 (TRBV4-2, TRBJ1-1)
CASSQAGNTEAFF

SEQ ID NO: 693323 - protein, 15 aa, Homo sapiens
  CDR3 for alpha chain variable domain of TCR clone 346662 (TRAV8-2, TRAJ40)
CVVLGTTSGTYKYIF

SEQ ID NO: 693324 - protein, 16 aa, Homo sapiens
  CDR3 for beta chain variable domain of TCR clone 346662 (TRBV7-3, TRBJ2-1)
CASSLEGERSYNEQFF

SEQ ID NO: 693325 - protein, 12 aa, Homo sapiens
  CDR3 for alpha chain variable domain of TCR clone 346663 (TRAV13-1, TRAJ49)
CAASIRSNQFYF

SEQ ID NO: 693326 - protein, 14 aa, Homo sapiens
  CDR3 for beta chain variable domain of TCR clone 346663 (TRBV7-8, TRBJ2-1)
CASSPGLAGNEQFF

SEQ ID NO: 693327 - protein, 14 aa, Homo sapiens
  CDR3 for alpha chain variable domain of TCR clone 346664 (TRAV13-1, TRAJ9)
CAAGSLTGGFKTIF

SEQ ID NO: 693328 - protein, 16 aa, Homo sapiens
  CDR3 for beta chain variable domain of TCR clone 346664 (TRBV7-8, TRBJ2-4)
CASSAERTLAKNIQYF

SEQ ID NO: 693329 - protein, 13 aa, Homo sapiens
  CDR3 for alpha chain variable domain of TCR clone 346665 (TRAV2, TRAJ26)
CAVEENYGQNFVF

SEQ ID NO: 693330 - protein, 16 aa, Homo sapiens
  CDR3 for beta chain variable domain of TCR clone 346665 (TRBV4-3, TRBJ2-1)
CASSPALDRGVNEQFF

SEQ ID NO: 693331 - protein, 13 aa, Homo sapiens
  CDR3 for alpha chain variable domain of TCR clone 346666 (TRAV13-1, TRAJ39)
CAASIWVGDMLTF

SEQ ID NO: 693332 - protein, 15 aa, Homo sapiens
  CDR3 for beta chain variable domain of TCR clone 346666 (TRBV7-9, TRBJ1-1)
CASSLLEQGGTEAFF

SEQ ID NO: 693333 - protein, 13 aa, Homo sapiens
  CDR3 for alpha chain variable domain of TCR clone 346667 (TRAV22, TRAJ26)
CAVEHNYGQNFVF

SEQ ID NO: 693334 - protein, 16 aa, Homo sapiens
  CDR3 for beta chain variable domain of TCR clone 346667 (TRBV7-2, TRBJ2-6)
CASRERRASGANVLTF

SEQ ID NO: 693335 - protein, 12 aa, Homo sapiens
  CDR3 for alpha chain variable domain of TCR clone 346668 (TRAV23/DV6, TRAJ17)
CARGSCRQKANF

SEQ ID NO: 693336 - protein, 14 aa, Homo sapiens
  CDR3 for beta chain variable domain of TCR clone 346668 (TRBV7-2, TRBJ1-2)
CASSQTGSTYGYTF

SEQ ID NO: 693337 - protein, 14 aa, Homo sapiens
  CDR3 for alpha chain variable domain of TCR clone 346669 (TRAV4, TRAJ26)
CLVGPHNSGQNFVF

SEQ ID NO: 693338 - protein, 17 aa, Homo sapiens
  CDR3 for beta chain variable domain of TCR clone 346669 (TRBV24-1, TRBJ2-1)
CATSDVSTSGTYNEQFF

SEQ ID NO: 693339 - protein, 14 aa, Homo sapiens
  CDR3 for alpha chain variable domain of TCR clone 346670 (TRAV12-2, TRAJ40)
CAVKIPSGTYKYIF

SEQ ID NO: 693340 - protein, 15 aa, Homo sapiens
  CDR3 for beta chain variable domain of TCR clone 346670 (TRBV5-5, TRBJ1-1)
CASSLVGKDNTEAFF

SEQ ID NO: 693341 - protein, 15 aa, Homo sapiens
  CDR3 for alpha chain variable domain of TCR clone 346671 (TRAV4, TRAJ10)
CLVGDGSGGGNKLTL

SEQ ID NO: 693342 - protein, 16 aa, Homo sapiens
  CDR3 for beta chain variable domain of TCR clone 346671 (TRBV13, TRBJ2-2)
CASSPRTGEHTGELFF

SEQ ID NO: 693343 - protein, 12 aa, Homo sapiens
  CDR3 for alpha chain variable domain of TCR clone 346672 (TRAV21, TRAJ33)
CAKMDSNYQLIW

SEQ ID NO: 693344 - protein, 15 aa, Homo sapiens
  CDR3 for beta chain variable domain of TCR clone 346672 (TRBV9, TRBJ1-6)
CASSVAGTGDSPLHF

SEQ ID NO: 693345 - protein, 13 aa, Homo sapiens
  CDR3 for alpha chain variable domain of TCR clone 346673 (TRAV8-3, TRAJ6)
CAVGSGRSYIPTF

SEQ ID NO: 693346 - protein, 14 aa, Homo sapiens
  CDR3 for beta chain variable domain of TCR clone 346673 (TRBV11-2, TRBJ1-1)
CASSTQRGRTEAFF

SEQ ID NO: 693347 - protein, 10 aa, Homo sapiens
  CDR3 for alpha chain variable domain of TCR clone 346674 (TRAV13-1, TRAJ21)
CAVSLNKFYF

SEQ ID NO: 693348 - protein, 13 aa, Homo sapiens
  CDR3 for beta chain variable domain of TCR clone 346674 (TRBV7-9, TRBJ2-7)
CASSVYGSYEQYF

SEQ ID NO: 693349 - protein, 12 aa, Homo sapiens
  CDR3 for alpha chain variable domain of TCR clone 346675 (TRAV35, TRAJ31)
CAAASNNARLMF

SEQ ID NO: 693350 - protein, 15 aa, Homo sapiens
  CDR3 for beta chain variable domain of TCR clone 346675 (TRBV6-3, TRBJ2-7)
FASSSPGTVFYEQYF

SEQ ID NO: 693351 - protein, 15 aa, Homo sapiens
  CDR3 for alpha chain variable domain of TCR clone 346676 (TRAV14/DV4, TRAJ12)
CAMREGWDSSYKVIF

SEQ ID NO: 693352 - protein, 16 aa, Homo sapiens
  CDR3 for beta chain variable domain of TCR clone 346676 (TRBV2, TRBJ2-5)
CASSETQGVGEETQYF

SEQ ID NO: 693353 - protein, 23 aa, Homo sapiens
  CDR3 for alpha chain variable domain of TCR clone 346677 (TRAV26-1, TRAJ38)
CIVRPLNAGNNHTQNPDPAVYQL

SEQ ID NO: 693354 - protein, 13 aa, Homo sapiens
  CDR3 for beta chain variable domain of TCR clone 346677 (TRBV18, TRBJ1-1)
CASSPNGDTEAFF

SEQ ID NO: 693355 - protein, 15 aa, Homo sapiens
  CDR3 for alpha chain variable domain of TCR clone 346678 (TRAV26-1, TRAJ44)
CIVRANTGTASKLTF

SEQ ID NO: 693356 - protein, 19 aa, Homo sapiens
  CDR3 for beta chain variable domain of TCR clone 346678 (TRBV6-3, TRBJ1-2)
CASSYSKGRTGPPNYGYTF

SEQ ID NO: 693357 - protein, 17 aa, Homo sapiens
  CDR3 for alpha chain variable domain of TCR clone 346679 (TRAV12-1, TRAJ42)
CVVMRMNYGGSQGNLIF

SEQ ID NO: 693358 - protein, 16 aa, Homo sapiens
  CDR3 for beta chain variable domain of TCR clone 346679 (TRBV12-4, TRBJ2-7)
CASSLIGGTGTDEQYF

SEQ ID NO: 693359 - protein, 14 aa, Homo sapiens
  CDR3 for alpha chain variable domain of TCR clone 346680 (TRAV13-1, TRAJ10)
CAALFTGGGNKLTF

SEQ ID NO: 693360 - protein, 15 aa, Homo sapiens
  CDR3 for beta chain variable domain of TCR clone 346680 (TRBV10-3, TRBJ2-2)
CASSEGDRAAGELFF

SEQ ID NO: 693361 - protein, 13 aa, Homo sapiens
  CDR3 for alpha chain variable domain of TCR clone 346681 (TRAV21, TRAJ27)
CAARPGNAGKATF

SEQ ID NO: 693362 - protein, 14 aa, Homo sapiens
  CDR3 for beta chain variable domain of TCR clone 346681 (TRBV5-4, TRBJ1-1)
CASSLDSRRDEAFF

SEQ ID NO: 693363 - protein, 12 aa, Homo sapiens
  CDR3 for alpha chain variable domain of TCR clone 346682 (TRAV3, TRAJ20)
CAVRDPDYTLSF

SEQ ID NO: 693364 - protein, 14 aa, Homo sapiens
  CDR3 for beta chain variable domain of TCR clone 346682 (TRBV19, TRBJ2-1)
CASPTFVLSGEQFF

SEQ ID NO: 693365 - protein, 16 aa, Homo sapiens
  CDR3 for alpha chain variable domain of TCR clone 346683 (TRAV20, TRAJ10)
CAVLRGLTGGGNKLTF

SEQ ID NO: 693366 - protein, 12 aa, Homo sapiens
  CDR3 for beta chain variable domain of TCR clone 346683 (TRBV18, TRBJ1-4)
CASSPSREKLFF

SEQ ID NO: 693367 - protein, 14 aa, Homo sapiens
  CDR3 for alpha chain variable domain of TCR clone 346684 (TRAV17, TRAJ57)
CATDPQGGSEKLVF

SEQ ID NO: 693368 - protein, 13 aa, Homo sapiens
  CDR3 for beta chain variable domain of TCR clone 346684 (TRBV19, TRBJ2-7)
RASSPRQSYEQYF

SEQ ID NO: 693369 - protein, 14 aa, Homo sapiens
  CDR3 for alpha chain variable domain of TCR clone 346685 (TRAV1-2, TRAJ16)
CAVNRFSDGQKLLF

SEQ ID NO: 693370 - protein, 14 aa, Homo sapiens
  CDR3 for beta chain variable domain of TCR clone 346685 (TRBV7-8, TRBJ2-7)
CARSQTQGADEQYF

SEQ ID NO: 693371 - protein, 15 aa, Homo sapiens
  CDR3 for alpha chain variable domain of TCR clone 346686 (TRAV12-1, TRAJ45)
CVVLSGGGGADGLTF

SEQ ID NO: 693372 - protein, 15 aa, Homo sapiens
  CDR3 for beta chain variable domain of TCR clone 346686 (TRBV7-2, TRBJ2-1)
CASTHGTGSYNEQFF

SEQ ID NO: 693373 - protein, 13 aa, Homo sapiens
  CDR3 for alpha chain variable domain of TCR clone 346687 (TRAV13-1, TRAJ11)
CAAVLAGYSTLTF

SEQ ID NO: 693374 - protein, 16 aa, Homo sapiens
  CDR3 for beta chain variable domain of TCR clone 346687 (TRBV11-2, TRBJ2-7)
CASSPTTGGVSYEQYF

SEQ ID NO: 693375 - protein, 14 aa, Homo sapiens
  CDR3 for alpha chain variable domain of TCR clone 346688 (TRAV13-1, TRAJ44)
CAAKATGTASKLTF

SEQ ID NO: 693376 - protein, 13 aa, Homo sapiens
  CDR3 for beta chain variable domain of TCR clone 346688 (TRBV19, TRBJ2-1)
CASSMYRVNEQFF

SEQ ID NO: 693377 - protein, 16 aa, Homo sapiens
  CDR3 for alpha chain variable domain of TCR clone 346689 (TRAV30, TRAJ24)
CGTEIVDANSWGKFPF

SEQ ID NO: 693378 - protein, 14 aa, Homo sapiens
  CDR3 for beta chain variable domain of TCR clone 346689 (TRBV12-5, TRBJ2-5)
CASGSRTHQETQYF

SEQ ID NO: 693379 - protein, 14 aa, Homo sapiens
  CDR3 for alpha chain variable domain of TCR clone 346690 (TRAV12-1, TRAJ45)
CVSYSGGGADGFTF

SEQ ID NO: 693380 - protein, 16 aa, Homo sapiens
  CDR3 for beta chain variable domain of TCR clone 346690 (TRBV12-5, TRBJ2-5)
CASGPRTSGNQETQYF

SEQ ID NO: 693381 - protein, 16 aa, Homo sapiens
  CDR3 for alpha chain variable domain of TCR clone 346691 (TRAV27, TRAJ13)
CAGAKSDSEGYQKVTF

SEQ ID NO: 693382 - protein, 15 aa, Homo sapiens
  CDR3 for beta chain variable domain of TCR clone 346691 (TRBV3-1, TRBJ1-2)
CASSPTRLPEGGYTF

SEQ ID NO: 693383 - protein, 13 aa, Homo sapiens
  CDR3 for alpha chain variable domain of TCR clone 346692 (TRAV8-3, TRAJ40)
CAVITSGTYKYIF

SEQ ID NO: 693384 - protein, 12 aa, Homo sapiens
  CDR3 for beta chain variable domain of TCR clone 346692 (TRBV12-4, TRBJ2-7)
CASSLGGYEQYF

SEQ ID NO: 693385 - protein, 13 aa, Homo sapiens
  CDR3 for alpha chain variable domain of TCR clone 346693 (TRAV12-1, TRAJ33)
CGDAPDSNYQLIW

SEQ ID NO: 693386 - protein, 16 aa, Homo sapiens
  CDR3 for beta chain variable domain of TCR clone 346693 (TRBV4-2, TRBJ1-1)
CASSQFWGTDMPEAFF

SEQ ID NO: 693387 - protein, 17 aa, Homo sapiens
  CDR3 for alpha chain variable domain of TCR clone 346694 (TRAV3, TRAJ6)
CSVRDGPRAGGSYIPTF

SEQ ID NO: 693388 - protein, 13 aa, Homo sapiens
  CDR3 for beta chain variable domain of TCR clone 346694 (TRBV24-1, TRBJ2-2)
CATSDWSTGELFF

SEQ ID NO: 693389 - protein, 14 aa, Homo sapiens
  CDR3 for alpha chain variable domain of TCR clone 346695 (TRAV12-2, TRAJ13)
CAVKKTGGYQKFTF

SEQ ID NO: 693390 - protein, 15 aa, Homo sapiens
  CDR3 for beta chain variable domain of TCR clone 346695 (TRBV19, TRBJ1-6)
CASSTQGAVGPPLHF

SEQ ID NO: 693391 - protein, 16 aa, Homo sapiens
  CDR3 for alpha chain variable domain of TCR clone 346696 (TRAV8-3, TRAJ8)
CAVPRDGNTGFQTLVF

SEQ ID NO: 693392 - protein, 14 aa, Homo sapiens
  CDR3 for beta chain variable domain of TCR clone 346696 (TRBV28, TRBJ1-1)
CASSESGRGTEAFF

SEQ ID NO: 693393 - protein, 14 aa, Homo sapiens
  CDR3 for alpha chain variable domain of TCR clone 346697 (TRAV8-2, TRAJ4)
CVVSPSGGYNKLMF

SEQ ID NO: 693394 - protein, 15 aa, Homo sapiens
  CDR3 for beta chain variable domain of TCR clone 346697 (TRBV4-1, TRBJ1-4)
CASSDTGGTNENLFF

SEQ ID NO: 693395 - protein, 13 aa, Homo sapiens
  CDR3 for alpha chain variable domain of TCR clone 346698 (TRAV17, TRAJ26)
CATVDNYGQNFVF

SEQ ID NO: 693396 - protein, 14 aa, Homo sapiens
  CDR3 for beta chain variable domain of TCR clone 346698 (TRBV7-2, TRBJ1-1)
CASSFLTGTTEAFL

SEQ ID NO: 693397 - protein, 14 aa, Homo sapiens
  CDR3 for alpha chain variable domain of TCR clone 346699 (TRAV23/DV6, TRAJ13)
CAASETGGYQKVTL

SEQ ID NO: 693398 - protein, 13 aa, Homo sapiens
  CDR3 for beta chain variable domain of TCR clone 346699 (TRBV29-1, TRBJ2-1)
CSVEGGRVNEQFF

SEQ ID NO: 693399 - protein, 17 aa, Homo sapiens
  CDR3 for alpha chain variable domain of TCR clone 346700 (TRAV3, TRAJ6)
CAVRDGPRAGGSYIPAF

SEQ ID NO: 693400 - protein, 12 aa, Homo sapiens
  CDR3 for beta chain variable domain of TCR clone 346700 (TRBV6-5, TRBJ2-7)
CASSDRQNEQYF

SEQ ID NO: 693401 - protein, 15 aa, Homo sapiens
  CDR3 for alpha chain variable domain of TCR clone 346701 (TRAV12-1, TRAJ45)
CVVLSGGGGAHGLTF

SEQ ID NO: 693402 - protein, 15 aa, Homo sapiens
  CDR3 for beta chain variable domain of TCR clone 346701 (TRBV20-1, TRBJ2-7)
CSARDRVSGMDEQYF

SEQ ID NO: 693403 - protein, 12 aa, Homo sapiens
  CDR3 for alpha chain variable domain of TCR clone 346702 (TRAV8-3, TRAJ20)
CAVGANDYKLSF

SEQ ID NO: 693404 - protein, 13 aa, Homo sapiens
  CDR3 for beta chain variable domain of TCR clone 346702 (TRBV12-4, TRBJ1-2)
CASSLDSNYGYTF

SEQ ID NO: 693405 - protein, 13 aa, Homo sapiens
  CDR3 for alpha chain variable domain of TCR clone 346703 (TRAV1-1, TRAJ9)
CAAKNTGGFKTIF

SEQ ID NO: 693406 - protein, 13 aa, Homo sapiens
  CDR3 for beta chain variable domain of TCR clone 346703 (TRBV4-2, TRBJ2-3)
CASSQDWQHTQYF

SEQ ID NO: 693407 - protein, 13 aa, Homo sapiens
  CDR3 for alpha chain variable domain of TCR clone 346704 (TRAV8-1, TRAJ23)
CAVTGGQGGKLIF

SEQ ID NO: 693408 - protein, 14 aa, Homo sapiens
  CDR3 for beta chain variable domain of TCR clone 346704 (TRBV20-1, TRBJ1-1)
CSAQRRIGGTEAFF

SEQ ID NO: 693409 - protein, 13 aa, Homo sapiens
  CDR3 for alpha chain variable domain of TCR clone 346705 (TRAV12-3, TRAJ13)
CAMGTGGYQKVTS

SEQ ID NO: 693410 - protein, 16 aa, Homo sapiens
  CDR3 for beta chain variable domain of TCR clone 346705 (TRBV9, TRBJ2-1)
CASSVGGGGNYNEQFF

SEQ ID NO: 693411 - protein, 12 aa, Homo sapiens
  CDR3 for alpha chain variable domain of TCR clone 346706 (TRAV17, TRAJ20)
SATDSNDYKLSF

SEQ ID NO: 693412 - protein, 16 aa, Homo sapiens
  CDR3 for beta chain variable domain of TCR clone 346706 (TRBV7-2, TRBJ1-2)
CASSSNQDRRGHGYTF

SEQ ID NO: 693413 - protein, 14 aa, Homo sapiens
  CDR3 for alpha chain variable domain of TCR clone 346707 (TRAV12-2, TRAJ17)
CAALFKAAGNKLTF

SEQ ID NO: 693414 - protein, 16 aa, Homo sapiens
  CDR3 for beta chain variable domain of TCR clone 346707 (TRBV27, TRBJ2-2)
CASSFRGLIRTGELFF

SEQ ID NO: 693415 - protein, 14 aa, Homo sapiens
  CDR3 for alpha chain variable domain of TCR clone 346708 (TRAV16, TRAJ33)
CALSAMDSNYQLIW

SEQ ID NO: 693416 - protein, 18 aa, Homo sapiens
  CDR3 for beta chain variable domain of TCR clone 346708 (TRBV7-9, TRBJ2-1)
CASSTGLAEGSFYNEQFF

SEQ ID NO: 693417 - protein, 14 aa, Homo sapiens
  CDR3 for alpha chain variable domain of TCR clone 346709 (TRAV17, TRAJ12)
CAILPMDSSYKLIF

SEQ ID NO: 693418 - protein, 15 aa, Homo sapiens
  CDR3 for beta chain variable domain of TCR clone 346709 (TRBV5-1, TRBJ1-1)
CTSSLGEGENTEAFF

SEQ ID NO: 693419 - protein, 13 aa, Homo sapiens
  CDR3 for alpha chain variable domain of TCR clone 346710 (TRAV12-2, TRAJ4)
CAVFFGGYNKLIF

SEQ ID NO: 693420 - protein, 16 aa, Homo sapiens
  CDR3 for beta chain variable domain of TCR clone 346710 (TRBV6-1, TRBJ1-2)
CASSGAWQGRSHGYTF

SEQ ID NO: 693421 - protein, 14 aa, Homo sapiens
  CDR3 for alpha chain variable domain of TCR clone 346711 (TRAV26-1, TRAJ38)
CIADNAGNDRKLIL

SEQ ID NO: 693422 - protein, 17 aa, Homo sapiens
  CDR3 for beta chain variable domain of TCR clone 346711 (TRBV7-9, TRBJ2-3)
CASSPTVAGDLTDTQYF

SEQ ID NO: 693423 - protein, 17 aa, Homo sapiens
  CDR3 for alpha chain variable domain of TCR clone 346712 (TRAV38-2/DV8, TRAJ28)
CAFLTLYSGAGSYQLTF

SEQ ID NO: 693424 - protein, 14 aa, Homo sapiens
  CDR3 for beta chain variable domain of TCR clone 346712 (TRBV7-2, TRBJ2-5)
FASSLSGGGETQYF

SEQ ID NO: 693425 - protein, 17 aa, Homo sapiens
  CDR3 for alpha chain variable domain of TCR clone 346713 (TRAV8-2, TRAJ17)
CVVSDRRFKAAGNKLTF

SEQ ID NO: 693426 - protein, 18 aa, Homo sapiens
  CDR3 for beta chain variable domain of TCR clone 346713 (TRBV7-9, TRBJ2-7)
CASSLTTSGSRTLYEQYF

SEQ ID NO: 693427 - protein, 16 aa, Homo sapiens
  CDR3 for alpha chain variable domain of TCR clone 346714 (TRAV13-2, TRAJ53)
CAENANSGGSNYKLTF

SEQ ID NO: 693428 - protein, 19 aa, Homo sapiens
  CDR3 for beta chain variable domain of TCR clone 346714 (TRBV28, TRBJ2-7)
CASSYSGTSSLGWVYEQYF

SEQ ID NO: 693429 - protein, 12 aa, Homo sapiens
  CDR3 for alpha chain variable domain of TCR clone 346715 (TRAV12-3, TRAJ17)
CPMTLTGDKLTF

SEQ ID NO: 693430 - protein, 15 aa, Homo sapiens
  CDR3 for beta chain variable domain of TCR clone 346715 (TRBV20-1, TRBJ2-7)
CSARDRVSGMDEQYF

SEQ ID NO: 693431 - protein, 16 aa, Homo sapiens
  CDR3 for alpha chain variable domain of TCR clone 346716 (TRAV30, TRAJ24)
CGTEIVDADSWGKFQF

SEQ ID NO: 693432 - protein, 23 aa, Homo sapiens
  CDR3 for beta chain variable domain of TCR clone 346716 (TRBV7-9, TRBJ1-4)
CASSPDRGQRKTVFWQWNPALCL

SEQ ID NO: 693433 - protein, 14 aa, Homo sapiens
  CDR3 for alpha chain variable domain of TCR clone 346717 (TRAV1-2, TRAJ16)
CAVNRFSDGQKLLF

SEQ ID NO: 693434 - protein, 13 aa, Homo sapiens
  CDR3 for beta chain variable domain of TCR clone 346717 (TRBV20-1, TRBJ1-1)
CSVRAGGNTEAFF

SEQ ID NO: 693435 - protein, 16 aa, Homo sapiens
  CDR3 for alpha chain variable domain of TCR clone 346718 (TRAV30, TRAJ24)
CGTEIVDADSWGKFQF

SEQ ID NO: 693436 - protein, 16 aa, Homo sapiens
  CDR3 for beta chain variable domain of TCR clone 346718 (TRBV7-8, TRBJ2-1)
CASSLQGTGRYNEQFF

SEQ ID NO: 693437 - protein, 11 aa, Homo sapiens
  CDR3 for alpha chain variable domain of TCR clone 346719 (TRAV3, TRAJ21)
CAVGNFNKFYF

SEQ ID NO: 693438 - protein, 12 aa, Homo sapiens
  CDR3 for beta chain variable domain of TCR clone 346719 (TRBV6-3, TRBJ2-7)
CASSYNPLEQYF

SEQ ID NO: 693439 - protein, 13 aa, Homo sapiens
  CDR3 for alpha chain variable domain of TCR clone 346720 (TRAV16, TRAJ58)
CALSIPSGSRLTF

SEQ ID NO: 693440 - protein, 15 aa, Homo sapiens
  CDR3 for beta chain variable domain of TCR clone 346720 (TRBV5-1, TRBJ2-3)
CASSVTSGSTDTQYF

SEQ ID NO: 693441 - protein, 16 aa, Homo sapiens
  CDR3 for alpha chain variable domain of TCR clone 346721 (TRAV30, TRAJ24)
CGTEIVDADSWGRFKF

SEQ ID NO: 693442 - protein, 14 aa, Homo sapiens
  CDR3 for beta chain variable domain of TCR clone 346721 (TRBV12-5, TRBJ2-5)
CASGSRTHQETQYF

SEQ ID NO: 693443 - protein, 16 aa, Homo sapiens
  CDR3 for alpha chain variable domain of TCR clone 346722 (TRAV16, TRAJ52)
CALSGVGGTSYGKLTF

SEQ ID NO: 693444 - protein, 15 aa, Homo sapiens
  CDR3 for beta chain variable domain of TCR clone 346722 (TRBV7-3, TRBJ2-1)
CASSPTGGGEVEQFF

SEQ ID NO: 693445 - protein, 14 aa, Homo sapiens
  CDR3 for alpha chain variable domain of TCR clone 346723 (TRAV26-1, TRAJ39)
CIVRGSRAGNMLTF

SEQ ID NO: 693446 - protein, 16 aa, Homo sapiens
  CDR3 for beta chain variable domain of TCR clone 346723 (TRBV7-3, TRBJ2-1)
CASSLEGYRSYNEQFF

SEQ ID NO: 693447 - protein, 16 aa, Homo sapiens
  CDR3 for alpha chain variable domain of TCR clone 346724 (TRAV3, TRAJ37)
CAVRPHGSDNTGRLIF

SEQ ID NO: 693448 - protein, 15 aa, Homo sapiens
  CDR3 for beta chain variable domain of TCR clone 346724 (TRBV5-5, TRBJ2-7)
CASSLAAPLSYEQYF

SEQ ID NO: 693449 - protein, 11 aa, Homo sapiens
  CDR3 for alpha chain variable domain of TCR clone 346725 (TRAV13-1, TRAJ6)
CAILGSYIPTF

SEQ ID NO: 693450 - protein, 12 aa, Homo sapiens
  CDR3 for beta chain variable domain of TCR clone 346725 (TRBV11-2, TRBJ2-1)
CASSPGNNEQFF

SEQ ID NO: 693451 - protein, 13 aa, Homo sapiens
  CDR3 for alpha chain variable domain of TCR clone 346726 (TRAV3, TRAJ15)
CAVRDQAGTALIF

SEQ ID NO: 693452 - protein, 15 aa, Homo sapiens
  CDR3 for beta chain variable domain of TCR clone 346726 (TRBV11-1, TRBJ2-7)
CARSLNYGASYEQYF

SEQ ID NO: 693453 - protein, 12 aa, Homo sapiens
  CDR3 for alpha chain variable domain of TCR clone 346727 (TRAV12-3, TRAJ17)
CAMTLTGNKLTF

SEQ ID NO: 693454 - protein, 13 aa, Homo sapiens
  CDR3 for beta chain variable domain of TCR clone 346727 (TRBV11-2, TRBJ2-1)
CASSLRLTHEQFF

SEQ ID NO: 693455 - protein, 15 aa, Homo sapiens
  CDR3 for alpha chain variable domain of TCR clone 346728 (TRAV21, TRAJ53)
CATLNSGGSNYKLTF

SEQ ID NO: 693456 - protein, 16 aa, Homo sapiens
  CDR3 for beta chain variable domain of TCR clone 346728 (TRBV29-1, TRBJ1-2)
CSVEANRDIPNYGYTF

SEQ ID NO: 693457 - protein, 10 aa, Homo sapiens
  CDR3 for alpha chain variable domain of TCR clone 346729 (TRAV16, TRAJ22)
SAMYLRQLTF

SEQ ID NO: 693458 - protein, 15 aa, Homo sapiens
  CDR3 for beta chain variable domain of TCR clone 346729 (TRBV7-9, TRBJ1-6)
GASSSPGRGNSPLHF

SEQ ID NO: 693459 - protein, 11 aa, Homo sapiens
  CDR3 for alpha chain variable domain of TCR clone 346730 (TRAV16, TRAJ33)
CALHSNYQLIW

SEQ ID NO: 693460 - protein, 15 aa, Homo sapiens
  CDR3 for beta chain variable domain of TCR clone 346730 (TRBV4-1, TRBJ2-7)
CVSSQQGQGFDEQYF

SEQ ID NO: 693461 - protein, 14 aa, Homo sapiens
  CDR3 for alpha chain variable domain of TCR clone 346731 (TRAV12-2, TRAJ13)
CAVMKTGGYQKVTF

SEQ ID NO: 693462 - protein, 12 aa, Homo sapiens
  CDR3 for beta chain variable domain of TCR clone 346731 (TRBV29-1, TRBJ1-1)
CSESDGNTEAFF

SEQ ID NO: 693463 - protein, 15 aa, Homo sapiens
  CDR3 for alpha chain variable domain of TCR clone 346732 (TRAV13-1, TRAJ17)
CAASIERAAGNKLNF

SEQ ID NO: 693464 - protein, 12 aa, Homo sapiens
  CDR3 for beta chain variable domain of TCR clone 346732 (TRBV5-6, TRBJ1-1)
CASSLGRGKAFF

SEQ ID NO: 693465 - protein, 14 aa, Homo sapiens
  CDR3 for alpha chain variable domain of TCR clone 346733 (TRAV9-2, TRAJ15)
CALSESQAGTALIV

SEQ ID NO: 693466 - protein, 15 aa, Homo sapiens
  CDR3 for beta chain variable domain of TCR clone 346733 (TRBV10-1, TRBJ2-3)
CASSATSGGFDTQYF

SEQ ID NO: 693467 - protein, 14 aa, Homo sapiens
  CDR3 for alpha chain variable domain of TCR clone 346734 (TRAV12-2, TRAJ13)
CAVKKTGGYQKVTF

SEQ ID NO: 693468 - protein, 16 aa, Homo sapiens
  CDR3 for beta chain variable domain of TCR clone 346734 (TRBV20-1, TRBJ1-2)
GSASMGQGVANYGYTF

SEQ ID NO: 693469 - protein, 14 aa, Homo sapiens
  CDR3 for alpha chain variable domain of TCR clone 346735 (TRAV12-1, TRAJ30)
CVPTGTHRDDKIIF

SEQ ID NO: 693470 - protein, 11 aa, Homo sapiens
  CDR3 for beta chain variable domain of TCR clone 346735 (TRBV4-1, TRBJ2-2)
CASEHTGELFF

SEQ ID NO: 693471 - protein, 14 aa, Homo sapiens
  CDR3 for alpha chain variable domain of TCR clone 346736 (TRAV12-2, TRAJ45)
CAVYSGGGADGLTF

SEQ ID NO: 693472 - protein, 11 aa, Homo sapiens
  CDR3 for beta chain variable domain of TCR clone 346736 (TRBV6-5, TRBJ1-2)
CASTHGVAPMA

SEQ ID NO: 693473 - protein, 14 aa, Homo sapiens
  CDR3 for alpha chain variable domain of TCR clone 346737 (TRAV16, TRAJ32)
CALKSGGATNKLIF

SEQ ID NO: 693474 - protein, 13 aa, Homo sapiens
  CDR3 for beta chain variable domain of TCR clone 346737 (TRBV15, TRBJ1-6)
CATSGGINSPLHF

SEQ ID NO: 693475 - protein, 14 aa, Homo sapiens
  CDR3 for alpha chain variable domain of TCR clone 346738 (TRAV29/DV5, TRAJ36)
CAARRKTGANNLFF

SEQ ID NO: 693476 - protein, 15 aa, Homo sapiens
  CDR3 for beta chain variable domain of TCR clone 346738 (TRBV18, TRBJ1-1)
CASSPRQGENTEAFF

SEQ ID NO: 693477 - protein, 13 aa, Homo sapiens
  CDR3 for alpha chain variable domain of TCR clone 346739 (TRAV21, TRAJ57)
CAVTQGGSEKLVF

SEQ ID NO: 693478 - protein, 16 aa, Homo sapiens
  CDR3 for beta chain variable domain of TCR clone 346739 (TRBV13, TRBJ2-2)
CASSPRTGEHTGELFF

SEQ ID NO: 693479 - protein, 16 aa, Homo sapiens
  CDR3 for alpha chain variable domain of TCR clone 346740 (TRAV30, TRAJ24)
CGTELVDADSWGKFPF

SEQ ID NO: 693480 - protein, 15 aa, Homo sapiens
  CDR3 for beta chain variable domain of TCR clone 346740 (TRBV12-4, TRBJ2-2)
CASSPNDSGTGEQFF

SEQ ID NO: 693481 - protein, 12 aa, Homo sapiens
  CDR3 for alpha chain variable domain of TCR clone 346741 (TRAV1-2, TRAJ24)
CAVGGSWGKSQF

SEQ ID NO: 693482 - protein, 15 aa, Homo sapiens
  CDR3 for beta chain variable domain of TCR clone 346741 (TRBV6-1, TRBJ2-7)
CASSEGVGNPYEQYF

SEQ ID NO: 693483 - protein, 11 aa, Homo sapiens
  CDR3 for alpha chain variable domain of TCR clone 346742 (TRAV21, TRAJ39)
LLVNAGNMLTF

SEQ ID NO: 693484 - protein, 15 aa, Homo sapiens
  CDR3 for beta chain variable domain of TCR clone 346742 (TRBV4-2, TRBJ1-1)
CASSQEDLPRTEAFF

SEQ ID NO: 693485 - protein, 14 aa, Homo sapiens
  CDR3 for alpha chain variable domain of TCR clone 346743 (TRAV12-2, TRAJ13)
CAVKKTGGDQKVTF

SEQ ID NO: 693486 - protein, 14 aa, Homo sapiens
  CDR3 for beta chain variable domain of TCR clone 346743 (TRBV10-3, TRBJ2-1)
CAISSDLAYNEQFF

SEQ ID NO: 693487 - protein, 21 aa, Homo sapiens
  CDR3 for alpha chain variable domain of TCR clone 346744 (TRAV8-3, TRAJ38)
CAVCASNAGNNHIQNPDPAVY

SEQ ID NO: 693488 - protein, 15 aa, Homo sapiens
  CDR3 for beta chain variable domain of TCR clone 346744 (TRBV11-3, TRBJ1-3)
CASSLFGPSGNTIYF

SEQ ID NO: 693489 - protein, 10 aa, Homo sapiens
  CDR3 for alpha chain variable domain of TCR clone 346745 (TRAV36/DV7, TRAJ31)
CAVGEARLTF

SEQ ID NO: 693490 - protein, 16 aa, Homo sapiens
  CDR3 for beta chain variable domain of TCR clone 346745 (TRBV7-2, TRBJ2-1)
CASSLVGGPELNEQFF

SEQ ID NO: 693491 - protein, 11 aa, Homo sapiens
  CDR3 for alpha chain variable domain of TCR clone 346746 (TRAV23/DV6, TRAJ48)
CAPRWGEKLTF

SEQ ID NO: 693492 - protein, 13 aa, Homo sapiens
  CDR3 for beta chain variable domain of TCR clone 346746 (TRBV12-4, TRBJ2-5)
CASSPGTEENQYF

SEQ ID NO: 693493 - protein, 18 aa, Homo sapiens
  CDR3 for alpha chain variable domain of TCR clone 346747 (TRAV1-2, TRAJ18)
CAVRDMGDRGSTLGRLYF

SEQ ID NO: 693494 - protein, 16 aa, Homo sapiens
  CDR3 for beta chain variable domain of TCR clone 346747 (TRBV29-1, TRBJ1-2)
CSVEAKRDIANYGYTF

SEQ ID NO: 693495 - protein, 14 aa, Homo sapiens
  CDR3 for alpha chain variable domain of TCR clone 346748 (TRAV12-1, TRAJ17)
CVVNYKAAGNKLTF

SEQ ID NO: 693496 - protein, 16 aa, Homo sapiens
  CDR3 for beta chain variable domain of TCR clone 346748 (TRBV12-4, TRBJ1-5)
CASSRPDGGSNQPQHF

SEQ ID NO: 693497 - protein, 15 aa, Homo sapiens
  CDR3 for alpha chain variable domain of TCR clone 346749 (TRAV8-3, TRAJ45)
CASSYSGGGADGLTF

SEQ ID NO: 693498 - protein, 12 aa, Homo sapiens
  CDR3 for beta chain variable domain of TCR clone 346749 (TRBV12-4, TRBJ2-7)
CASRLGGYGQYF

SEQ ID NO: 693499 - protein, 14 aa, Homo sapiens
  CDR3 for alpha chain variable domain of TCR clone 346750 (TRAV12-1, TRAJ10)
CVAILTGGGNKLTF

SEQ ID NO: 693500 - protein, 13 aa, Homo sapiens
  CDR3 for beta chain variable domain of TCR clone 346750 (TRBV4-1, TRBJ2-2)
CASSQENTGELFF

SEQ ID NO: 693501 - protein, 13 aa, Homo sapiens
  CDR3 for alpha chain variable domain of TCR clone 346751 (TRAV8-6, TRAJ49)
CAVITNTGTQFYF

SEQ ID NO: 693502 - protein, 14 aa, Homo sapiens
  CDR3 for beta chain variable domain of TCR clone 346751 (TRBV19, TRBJ2-1)
CASPTFVSSGEQFF

SEQ ID NO: 693503 - protein, 17 aa, Homo sapiens
  CDR3 for alpha chain variable domain of TCR clone 346752 (TRAV4, TRAJ42)
CLVRVLNYGGSQGNLIF

SEQ ID NO: 693504 - protein, 12 aa, Homo sapiens
  CDR3 for beta chain variable domain of TCR clone 346752 (TRBV20-1, TRBJ2-1)
CSAQYTYNEQFF

SEQ ID NO: 693505 - protein, 17 aa, Homo sapiens
  CDR3 for alpha chain variable domain of TCR clone 346753 (TRAV3, TRAJ6)
CAVRAGARAGGSYIPTF

SEQ ID NO: 693506 - protein, 14 aa, Homo sapiens
  CDR3 for beta chain variable domain of TCR clone 346753 (TRBV7-2, TRBJ2-7)
CASSPKTSFYEQYF

SEQ ID NO: 693507 - protein, 17 aa, Homo sapiens
  CDR3 for alpha chain variable domain of TCR clone 346754 (TRAV3, TRAJ6)
CAARDGPRAGGSYIPTL

SEQ ID NO: 693508 - protein, 14 aa, Homo sapiens
  CDR3 for beta chain variable domain of TCR clone 346754 (TRBV7-2, TRBJ2-7)
CASSPKTSFYEQYF

SEQ ID NO: 693509 - protein, 14 aa, Homo sapiens
  CDR3 for alpha chain variable domain of TCR clone 346755 (TRAV12-2, TRAJ41)
CAVNRANSGYALNF

SEQ ID NO: 693510 - protein, 13 aa, Homo sapiens
  CDR3 for beta chain variable domain of TCR clone 346755 (TRBV7-9, TRBJ1-2)
CASSLKQNYGETF

SEQ ID NO: 693511 - protein, 14 aa, Homo sapiens
  CDR3 for alpha chain variable domain of TCR clone 346756 (TRAV14/DV4, TRAJ42)
CPRGSLRSQGKLIF

SEQ ID NO: 693512 - protein, 16 aa, Homo sapiens
  CDR3 for beta chain variable domain of TCR clone 346756 (TRBV19, TRBJ2-1)
CASSKAGPSSYNEQFF

SEQ ID NO: 693513 - protein, 16 aa, Homo sapiens
  CDR3 for alpha chain variable domain of TCR clone 346757 (TRAV13-1, TRAJ8)
CSAFYLLNTGFQKLVF

SEQ ID NO: 693514 - protein, 14 aa, Homo sapiens
  CDR3 for beta chain variable domain of TCR clone 346757 (TRBV29-1, TRBJ2-5)
CSVGPAGGQETQYF

SEQ ID NO: 693515 - protein, 10 aa, Homo sapiens
  CDR3 for alpha chain variable domain of TCR clone 346758 (TRAV27, TRAJ43)
CAGANNDMRF

SEQ ID NO: 693516 - protein, 12 aa, Homo sapiens
  CDR3 for beta chain variable domain of TCR clone 346758 (TRBV11-2, TRBJ2-1)
CASSPGNNEQFF

SEQ ID NO: 693517 - protein, 16 aa, Homo sapiens
  CDR3 for alpha chain variable domain of TCR clone 346759 (TRAV26-1, TRAJ38)
CIVRVELGGNNRKLIW

SEQ ID NO: 693518 - protein, 14 aa, Homo sapiens
  CDR3 for beta chain variable domain of TCR clone 346759 (TRBV5-1, TRBJ2-3)
CASSLGLAADTQYF

SEQ ID NO: 693519 - protein, 15 aa, Homo sapiens
  CDR3 for alpha chain variable domain of TCR clone 346760 (TRAV26-1, TRAJ29)
CNVRVEGSGNTPLVL

SEQ ID NO: 693520 - protein, 15 aa, Homo sapiens
  CDR3 for beta chain variable domain of TCR clone 346760 (TRBV7-9, TRBJ1-5)
CASSQGHQPNQPQHF

SEQ ID NO: 693521 - protein, 16 aa, Homo sapiens
  CDR3 for alpha chain variable domain of TCR clone 346761 (TRAV27, TRAJ13)
CAGAKSDSGGYQKVTF

SEQ ID NO: 693522 - protein, 15 aa, Homo sapiens
  CDR3 for beta chain variable domain of TCR clone 346761 (TRBV13, TRBJ1-5)
CASSFGQGGVQPQHF

SEQ ID NO: 693523 - protein, 14 aa, Homo sapiens
  CDR3 for alpha chain variable domain of TCR clone 346762 (TRAV12-2, TRAJ15)
CAPHTGQAGTALIF

SEQ ID NO: 693524 - protein, 15 aa, Homo sapiens
  CDR3 for beta chain variable domain of TCR clone 346762 (TRBV7-9, TRBJ2-7)
CASSPGGGLTYEQYF

SEQ ID NO: 693525 - protein, 13 aa, Homo sapiens
  CDR3 for alpha chain variable domain of TCR clone 346763 (TRAV12-1, TRAJ29)
CVVVVSGNTPLVF

SEQ ID NO: 693526 - protein, 15 aa, Homo sapiens
  CDR3 for beta chain variable domain of TCR clone 346763 (TRBV7-2, TRBJ2-1)
CASSSGLAGGNEQFF

SEQ ID NO: 693527 - protein, 12 aa, Homo sapiens
  CDR3 for alpha chain variable domain of TCR clone 346764 (TRAV12-1, TRAJ34)
CVVAGATDKLMF

SEQ ID NO: 693528 - protein, 12 aa, Homo sapiens
  CDR3 for beta chain variable domain of TCR clone 346764 (TRBV7-9, TRBJ1-1)
CASSLVRGEAFF

SEQ ID NO: 693529 - protein, 11 aa, Homo sapiens
  CDR3 for alpha chain variable domain of TCR clone 346765 (TRAV2, TRAJ13)
CASGGYQKVTF

SEQ ID NO: 693530 - protein, 15 aa, Homo sapiens
  CDR3 for beta chain variable domain of TCR clone 346765 (TRBV7-2, TRBJ2-5)
CASSAARSLTETQYF

SEQ ID NO: 693531 - protein, 15 aa, Homo sapiens
  CDR3 for alpha chain variable domain of TCR clone 346766 (TRAV1-2, TRAJ50)
TSVQGVKTSYDKVIF

SEQ ID NO: 693532 - protein, 15 aa, Homo sapiens
  CDR3 for beta chain variable domain of TCR clone 346766 (TRBV11-2, TRBJ2-1)
CASSLDRVTFNEQFF

SEQ ID NO: 693533 - protein, 12 aa, Homo sapiens
  CDR3 for alpha chain variable domain of TCR clone 346767 (TRAV26-1, TRAJ36)
CIVRVRADNLFF

SEQ ID NO: 693534 - protein, 16 aa, Homo sapiens
  CDR3 for beta chain variable domain of TCR clone 346767 (TRBV12-4, TRBJ1-5)
CASSSGPRGSNQPQHF

SEQ ID NO: 693535 - protein, 12 aa, Homo sapiens
  CDR3 for alpha chain variable domain of TCR clone 346768 (TRAV12-2, TRAJ43)
YAVNVNNNDMRF

SEQ ID NO: 693536 - protein, 14 aa, Homo sapiens
  CDR3 for beta chain variable domain of TCR clone 346768 (TRBV7-2, TRBJ2-7)
CASSFLGRVYEQYF

SEQ ID NO: 693537 - protein, 14 aa, Homo sapiens
  CDR3 for alpha chain variable domain of TCR clone 346769 (TRAV39, TRAJ54)
CAVVVIQGAQKLVF

SEQ ID NO: 693538 - protein, 16 aa, Homo sapiens
  CDR3 for beta chain variable domain of TCR clone 346769 (TRBV3-1, TRBJ2-7)
CASSQGATGVAYEQYF

SEQ ID NO: 693539 - protein, 13 aa, Homo sapiens
  CDR3 for alpha chain variable domain of TCR clone 346770 (TRAV3, TRAJ20)
CAVRSLNDDKRSF

SEQ ID NO: 693540 - protein, 13 aa, Homo sapiens
  CDR3 for beta chain variable domain of TCR clone 346770 (TRBV6-1, TRBJ2-1)
CAGMGPTNNEQFF

SEQ ID NO: 693541 - protein, 10 aa, Homo sapiens
  CDR3 for alpha chain variable domain of TCR clone 346771 (TRAV12-2, TRAJ43)
CAVKVLSMRF

SEQ ID NO: 693542 - protein, 16 aa, Homo sapiens
  CDR3 for beta chain variable domain of TCR clone 346771 (TRBV19, TRBJ2-2)
CASRSPGTGATGELFF

SEQ ID NO: 693543 - protein, 11 aa, Homo sapiens
  CDR3 for alpha chain variable domain of TCR clone 346772 (TRAV23/DV6, TRAJ58)
CSARLLRGETS

SEQ ID NO: 693544 - protein, 14 aa, Homo sapiens
  CDR3 for beta chain variable domain of TCR clone 346772 (TRBV13, TRBJ2-5)
CASSLERVGETQYF

SEQ ID NO: 693545 - protein, 16 aa, Homo sapiens
  CDR3 for alpha chain variable domain of TCR clone 346773 (TRAV21, TRAJ17)
CAVRPGEEVAGNKLTF

SEQ ID NO: 693546 - protein, 16 aa, Homo sapiens
  CDR3 for beta chain variable domain of TCR clone 346773 (TRBV2, TRBJ2-7)
CASSEPWTGPSYEQYF

SEQ ID NO: 693547 - protein, 14 aa, Homo sapiens
  CDR3 for alpha chain variable domain of TCR clone 346774 (TRAV12-2, TRAJ13)
CSVKKTGGYQKVTF

SEQ ID NO: 693548 - protein, 11 aa, Homo sapiens
  CDR3 for beta chain variable domain of TCR clone 346774 (TRBV29-1, TRBJ2-5)
CSEDRTGTQYF

SEQ ID NO: 693549 - protein, 18 aa, Homo sapiens
  CDR3 for alpha chain variable domain of TCR clone 346775 (TRAV12-3, TRAJ52)
CAMSVGGAGGTSYGKLTF

SEQ ID NO: 693550 - protein, 15 aa, Homo sapiens
  CDR3 for beta chain variable domain of TCR clone 346775 (TRBV15, TRBJ1-1)
CATSLQGGRNTEAFF

SEQ ID NO: 693551 - protein, 15 aa, Homo sapiens
  CDR3 for alpha chain variable domain of TCR clone 346776 (TRAV3, TRAJ5)
CAVRELDTGRRALTF

SEQ ID NO: 693552 - protein, 15 aa, Homo sapiens
  CDR3 for beta chain variable domain of TCR clone 346776 (TRBV28, TRBJ2-5)
CASSPPWSYQETQYF

SEQ ID NO: 693553 - protein, 14 aa, Homo sapiens
  CDR3 for alpha chain variable domain of TCR clone 346777 (TRAV12-3, TRAJ29)
CAMILLSGTTPLVF

SEQ ID NO: 693554 - protein, 16 aa, Homo sapiens
  CDR3 for beta chain variable domain of TCR clone 346777 (TRBV28, TRBJ2-7)
CASSSGTSGGGYEQYF

SEQ ID NO: 693555 - protein, 15 aa, Homo sapiens
  CDR3 for alpha chain variable domain of TCR clone 346778 (TRAV26-1, TRAJ56)
CIVRADNGANSKMTF

SEQ ID NO: 693556 - protein, 15 aa, Homo sapiens
  CDR3 for beta chain variable domain of TCR clone 346778 (TRBV20-1, TRBJ2-7)
CSARDPTEVGHEQYF

SEQ ID NO: 693557 - protein, 12 aa, Homo sapiens
  CDR3 for alpha chain variable domain of TCR clone 346779 (TRAV27, TRAJ42)
CAGGGSQGNLIF

SEQ ID NO: 693558 - protein, 13 aa, Homo sapiens
  CDR3 for beta chain variable domain of TCR clone 346779 (TRBV19, TRBJ2-7)
FASSIRSSYEQYF

SEQ ID NO: 693559 - protein, 14 aa, Homo sapiens
  CDR3 for alpha chain variable domain of TCR clone 346780 (TRAV1-2, TRAJ16)
CAVNRFSDGQKLLF

SEQ ID NO: 693560 - protein, 15 aa, Homo sapiens
  CDR3 for beta chain variable domain of TCR clone 346780 (TRBV2, TRBJ1-2)
CASSEIGGANYGYTF

SEQ ID NO: 693561 - protein, 14 aa, Homo sapiens
  CDR3 for alpha chain variable domain of TCR clone 346781 (TRAV8-4, TRAJ38)
CAVSYAGNNRKLIW

SEQ ID NO: 693562 - protein, 14 aa, Homo sapiens
  CDR3 for beta chain variable domain of TCR clone 346781 (TRBV12-4, TRBJ1-1)
CASSLGTGGTEAFF

SEQ ID NO: 693563 - protein, 13 aa, Homo sapiens
  CDR3 for alpha chain variable domain of TCR clone 346782 (TRAV8-6, TRAJ49)
CAVITNTGNQFYF

SEQ ID NO: 693564 - protein, 14 aa, Homo sapiens
  CDR3 for beta chain variable domain of TCR clone 346782 (TRBV5-1, TRBJ2-7)
CASSRGEPLYEQYF

SEQ ID NO: 693565 - protein, 17 aa, Homo sapiens
  CDR3 for alpha chain variable domain of TCR clone 346783 (TRAV13-1, TRAJ52)
CAASSGAVGTSYGKLTF

SEQ ID NO: 693566 - protein, 14 aa, Homo sapiens
  CDR3 for beta chain variable domain of TCR clone 346783 (TRBV12-4, TRBJ2-3)
CASTIAGWGDTQYF

SEQ ID NO: 693567 - protein, 13 aa, Homo sapiens
  CDR3 for alpha chain variable domain of TCR clone 346784 (TRAV13-1, TRAJ21)
CAASKGNFNKFYF

SEQ ID NO: 693568 - protein, 16 aa, Homo sapiens
  CDR3 for beta chain variable domain of TCR clone 346784 (TRBV5-4, TRBJ2-3)
CASSWGNSGGTDTQYF

SEQ ID NO: 693569 - protein, 13 aa, Homo sapiens
  CDR3 for alpha chain variable domain of TCR clone 346785 (TRAV38-2/DV8, TRAJ34)
CAYRNYNTDKLIF

SEQ ID NO: 693570 - protein, 12 aa, Homo sapiens
  CDR3 for beta chain variable domain of TCR clone 346785 (TRBV11-2, TRBJ2-2)
CASSLGGGELFF

SEQ ID NO: 693571 - protein, 15 aa, Homo sapiens
  CDR3 for alpha chain variable domain of TCR clone 346786 (TRAV12-2, TRAJ53)
CAVNGGGGSNYKLTF

SEQ ID NO: 693572 - protein, 13 aa, Homo sapiens
  CDR3 for beta chain variable domain of TCR clone 346786 (TRBV7-3, TRBJ1-1)
CASSLTQGTEAFF

SEQ ID NO: 693573 - protein, 12 aa, Homo sapiens
  CDR3 for alpha chain variable domain of TCR clone 346787 (TRAV21, TRAJ11)
CAATSGYSTLTF

SEQ ID NO: 693574 - protein, 16 aa, Homo sapiens
  CDR3 for beta chain variable domain of TCR clone 346787 (TRBV11-2, TRBJ2-7)
CASSPLAGGPRYEQYF

SEQ ID NO: 693575 - protein, 13 aa, Homo sapiens
  CDR3 for alpha chain variable domain of TCR clone 346788 (TRAV21, TRAJ27)
CAARPGNSGKSTF

SEQ ID NO: 693576 - protein, 14 aa, Homo sapiens
  CDR3 for beta chain variable domain of TCR clone 346788 (TRBV20-1, TRBJ2-1)
CSAAGSGEYNEQFF

SEQ ID NO: 693577 - protein, 14 aa, Homo sapiens
  CDR3 for alpha chain variable domain of TCR clone 346789 (TRAV20, TRAJ17)
CAVQARAAGNRLTF

SEQ ID NO: 693578 - protein, 13 aa, Homo sapiens
  CDR3 for beta chain variable domain of TCR clone 346789 (TRBV19, TRBJ1-2)
CASSPTLNYGYTL

SEQ ID NO: 693579 - protein, 15 aa, Homo sapiens
  CDR3 for alpha chain variable domain of TCR clone 346790 (TRAV26-1, TRAJ12)
IASSELMNSSYKLIF

SEQ ID NO: 693580 - protein, 11 aa, Homo sapiens
  CDR3 for beta chain variable domain of TCR clone 346790 (TRBV7-9, TRBJ2-3)
CASSPPDTQYF

SEQ ID NO: 693581 - protein, 13 aa, Homo sapiens
  CDR3 for alpha chain variable domain of TCR clone 346791 (TRAV36/DV7, TRAJ33)
CAVDMDSNYQLIW

SEQ ID NO: 693582 - protein, 15 aa, Homo sapiens
  CDR3 for beta chain variable domain of TCR clone 346791 (TRBV7-9, TRBJ2-1)
CASSGTGGDYNEQFF

SEQ ID NO: 693583 - protein, 12 aa, Homo sapiens
  CDR3 for alpha chain variable domain of TCR clone 346792 (TRAV1-1, TRAJ9)
CAANTGGFKTIF

SEQ ID NO: 693584 - protein, 15 aa, Homo sapiens
  CDR3 for beta chain variable domain of TCR clone 346792 (TRBV29-1, TRBJ2-7)
CSVEFFDRGSYEQYF

SEQ ID NO: 693585 - protein, 15 aa, Homo sapiens
  CDR3 for alpha chain variable domain of TCR clone 346793 (TRAV8-3, TRAJ27)
CAVGPSKTNSGQSTF

SEQ ID NO: 693586 - protein, 15 aa, Homo sapiens
  CDR3 for beta chain variable domain of TCR clone 346793 (TRBV7-2, TRBJ2-1)
CASSSGLAGGNEQFF

SEQ ID NO: 693587 - protein, 11 aa, Homo sapiens
  CDR3 for alpha chain variable domain of TCR clone 346794 (TRAV8-3, TRAJ42)
NYGGSQGNLIF

SEQ ID NO: 693588 - protein, 20 aa, Homo sapiens
  CDR3 for beta chain variable domain of TCR clone 346794 (TRBV7-8, TRBJ2-2)
CASSHLFPGPTIHITGELFF

SEQ ID NO: 693589 - protein, 19 aa, Homo sapiens
  CDR3 for alpha chain variable domain of TCR clone 346795 (TRAV3, TRAJ6)
CAVRDTNPSRSGGSYIPTF

SEQ ID NO: 693590 - protein, 15 aa, Homo sapiens
  CDR3 for beta chain variable domain of TCR clone 346795 (TRBV18, TRBJ2-7)
CASSPTFMGSYEQYF

SEQ ID NO: 693591 - protein, 14 aa, Homo sapiens
  CDR3 for alpha chain variable domain of TCR clone 346796 (TRAV12-1, TRAJ24)
CVVRSTDSWGKFQF

SEQ ID NO: 693592 - protein, 13 aa, Homo sapiens
  CDR3 for beta chain variable domain of TCR clone 346796 (TRBV2, TRBJ2-3)
CASILAVGQGQYF

SEQ ID NO: 693593 - protein, 14 aa, Homo sapiens
  CDR3 for alpha chain variable domain of TCR clone 346797 (TRAV12-3, TRAJ9)
CAMSPNTGGFKTIF

SEQ ID NO: 693594 - protein, 14 aa, Homo sapiens
  CDR3 for beta chain variable domain of TCR clone 346797 (TRBV19, TRBJ2-1)
CASPTFVLSGEQLF

SEQ ID NO: 693595 - protein, 15 aa, Homo sapiens
  CDR3 for alpha chain variable domain of TCR clone 346798 (TRAV30, TRAJ32)
CGTEILGGATNKLIF

SEQ ID NO: 693596 - protein, 11 aa, Homo sapiens
  CDR3 for beta chain variable domain of TCR clone 346798 (TRBV7-8, TRBJ2-7)
CASSLSLEQYF

SEQ ID NO: 693597 - protein, 13 aa, Homo sapiens
  CDR3 for alpha chain variable domain of TCR clone 346799 (TRAV8-3, TRAJ48)
CAVVPSGNEKLTF

SEQ ID NO: 693598 - protein, 12 aa, Homo sapiens
  CDR3 for beta chain variable domain of TCR clone 346799 (TRBV11-2, TRBJ2-2)
CASSLGGGELFF

SEQ ID NO: 693599 - protein, 16 aa, Homo sapiens
  CDR3 for alpha chain variable domain of TCR clone 346800 (TRAV14/DV4, TRAJ53)
CAMREGGGGSNYKLTF

SEQ ID NO: 693600 - protein, 15 aa, Homo sapiens
  CDR3 for beta chain variable domain of TCR clone 346800 (TRBV20-1, TRBJ1-2)
CSAIRTGAFNYGYTF

SEQ ID NO: 693601 - protein, 16 aa, Homo sapiens
  CDR3 for alpha chain variable domain of TCR clone 346801 (TRAV17, TRAJ52)
CATGIIGGTSYGKLSF

SEQ ID NO: 693602 - protein, 12 aa, Homo sapiens
  CDR3 for beta chain variable domain of TCR clone 346801 (TRBV7-3, TRBJ2-1)
CASSFINNEQFF

SEQ ID NO: 693603 - protein, 15 aa, Homo sapiens
  CDR3 for alpha chain variable domain of TCR clone 346802 (TRAV1-2, TRAJ30)
CAVRPHGNRDDKIIF

SEQ ID NO: 693604 - protein, 15 aa, Homo sapiens
  CDR3 for beta chain variable domain of TCR clone 346802 (TRBV5-1, TRBJ2-3)
CASSVTSGSTDTQYF

SEQ ID NO: 693605 - protein, 14 aa, Homo sapiens
  CDR3 for alpha chain variable domain of TCR clone 346803 (TRAV17, TRAJ31)
CATVLRNNTARLMF

SEQ ID NO: 693606 - protein, 14 aa, Homo sapiens
  CDR3 for beta chain variable domain of TCR clone 346803 (TRBV12-4, TRBJ2-5)
CASSLWQKQETQYF

SEQ ID NO: 693607 - protein, 15 aa, Homo sapiens
  CDR3 for alpha chain variable domain of TCR clone 346804 (TRAV12-3, TRAJ11)
CAMSEENSGYSTLTF

SEQ ID NO: 693608 - protein, 11 aa, Homo sapiens
  CDR3 for beta chain variable domain of TCR clone 346804 (TRBV11-2, TRBJ1-1)
CASSINTEAFF

SEQ ID NO: 693609 - protein, 13 aa, Homo sapiens
  CDR3 for alpha chain variable domain of TCR clone 346805 (TRAV39, TRAJ33)
CAANPDSNYQLIW

SEQ ID NO: 693610 - protein, 14 aa, Homo sapiens
  CDR3 for beta chain variable domain of TCR clone 346805 (TRBV25-1, TRBJ1-1)
CASTHLGGNTEAVF

SEQ ID NO: 693611 - protein, 12 aa, Homo sapiens
  CDR3 for alpha chain variable domain of TCR clone 346806 (TRAV13-2, TRAJ23)
CAERHRGVKLIF

SEQ ID NO: 693612 - protein, 15 aa, Homo sapiens
  CDR3 for beta chain variable domain of TCR clone 346806 (TRBV7-9, TRBJ1-6)
CASSSPGRGNSPLHF

SEQ ID NO: 693613 - protein, 12 aa, Homo sapiens
  CDR3 for alpha chain variable domain of TCR clone 346807 (TRAV21, TRAJ13)
PGPSGGYQKVTF

SEQ ID NO: 693614 - protein, 13 aa, Homo sapiens
  CDR3 for beta chain variable domain of TCR clone 346807 (TRBV7-2, TRBJ2-2)
CASSSVRAGELVF

SEQ ID NO: 693615 - protein, 16 aa, Homo sapiens
  CDR3 for alpha chain variable domain of TCR clone 346808 (TRAV3, TRAJ10)
CAVRDMRAGGGNKLTF

SEQ ID NO: 693616 - protein, 15 aa, Homo sapiens
  CDR3 for beta chain variable domain of TCR clone 346808 (TRBV7-2, TRBJ2-3)
CASSLEQGGTDTQYF

SEQ ID NO: 693617 - protein, 16 aa, Homo sapiens
  CDR3 for alpha chain variable domain of TCR clone 346809 (TRAV3, TRAJ3)
CAVRDRAKSSASKIIF

SEQ ID NO: 693618 - protein, 17 aa, Homo sapiens
  CDR3 for beta chain variable domain of TCR clone 346809 (TRBV13, TRBJ2-3)
CASSLSRVAGGRNTQYF

SEQ ID NO: 693619 - protein, 14 aa, Homo sapiens
  CDR3 for alpha chain variable domain of TCR clone 346810 (TRAV13-1, TRAJ40)
CAASMTSGTHKYIF

SEQ ID NO: 693620 - protein, 15 aa, Homo sapiens
  CDR3 for beta chain variable domain of TCR clone 346810 (TRBV7-3, TRBJ2-1)
CASSPTGGGEVEQFF

SEQ ID NO: 693621 - protein, 18 aa, Homo sapiens
  CDR3 for alpha chain variable domain of TCR clone 346811 (TRAV26-1, TRAJ22)
CIVRVSFWFCKATDLLIW

SEQ ID NO: 693622 - protein, 14 aa, Homo sapiens
  CDR3 for beta chain variable domain of TCR clone 346811 (TRBV18, TRBJ2-7)
CASSPRGGAYEQYF

SEQ ID NO: 693623 - protein, 14 aa, Homo sapiens
  CDR3 for alpha chain variable domain of TCR clone 346812 (TRAV17, TRAJ57)
CATDASGGSEKLVF

SEQ ID NO: 693624 - protein, 14 aa, Homo sapiens
  CDR3 for beta chain variable domain of TCR clone 346812 (TRBV4-2, TRBJ2-1)
CASGLDRAYNEHFF

SEQ ID NO: 693625 - protein, 15 aa, Homo sapiens
  CDR3 for alpha chain variable domain of TCR clone 346813 (TRAV14/DV4, TRAJ10)
CAMRELTGRGNKLTF

SEQ ID NO: 693626 - protein, 18 aa, Homo sapiens
  CDR3 for beta chain variable domain of TCR clone 346813 (TRBV7-9, TRBJ2-7)
CASSLTTSGSRTWYEQYF

SEQ ID NO: 693627 - protein, 12 aa, Homo sapiens
  CDR3 for alpha chain variable domain of TCR clone 346814 (TRAV3, TRAJ20)
CAVRDGDYKLSF

SEQ ID NO: 693628 - protein, 13 aa, Homo sapiens
  CDR3 for beta chain variable domain of TCR clone 346814 (TRBV20-1, TRBJ1-1)
CSARGGGNTEAFF

SEQ ID NO: 693629 - protein, 16 aa, Homo sapiens
  CDR3 for alpha chain variable domain of TCR clone 346815 (TRAV3, TRAJ6)
CAVRRTPSGGSYIPTF

SEQ ID NO: 693630 - protein, 15 aa, Homo sapiens
  CDR3 for beta chain variable domain of TCR clone 346815 (TRBV7-2, TRBJ2-1)
CASSSGLAGGNEQFF

SEQ ID NO: 693631 - protein, 12 aa, Homo sapiens
  CDR3 for alpha chain variable domain of TCR clone 346816 (TRAV17, TRAJ53)
CATEGSNYKLTF

SEQ ID NO: 693632 - protein, 11 aa, Homo sapiens
  CDR3 for beta chain variable domain of TCR clone 346816 (TRBV5-1, TRBJ2-3)
CASSLWTSGGS

SEQ ID NO: 693633 - protein, 15 aa, Homo sapiens
  CDR3 for alpha chain variable domain of TCR clone 346817 (TRAV34, TRAJ36)
CGAPSRPGGANNPFF

SEQ ID NO: 693634 - protein, 16 aa, Homo sapiens
  CDR3 for beta chain variable domain of TCR clone 346817 (TRBV4-3, TRBJ2-1)
CASSYRRLGSWDEQFF

SEQ ID NO: 693635 - protein, 13 aa, Homo sapiens
  CDR3 for alpha chain variable domain of TCR clone 346818 (TRAV21, TRAJ57)
CAVTQGGSEKLVF

SEQ ID NO: 693636 - protein, 15 aa, Homo sapiens
  CDR3 for beta chain variable domain of TCR clone 346818 (TRBV5-1, TRBJ1-1)
CASSSTTGTNTEPFF

SEQ ID NO: 693637 - protein, 17 aa, Homo sapiens
  CDR3 for alpha chain variable domain of TCR clone 346819 (TRAV3, TRAJ6)
CAVREGPRAGGSYVPTF

SEQ ID NO: 693638 - protein, 14 aa, Homo sapiens
  CDR3 for beta chain variable domain of TCR clone 346819 (TRBV7-2, TRBJ2-7)
CASSPKTSFYEQYF

SEQ ID NO: 693639 - protein, 10 aa, Homo sapiens
  CDR3 for alpha chain variable domain of TCR clone 346820 (TRAV30, TRAJ48)
CGIGNEKLTF

SEQ ID NO: 693640 - protein, 13 aa, Homo sapiens
  CDR3 for beta chain variable domain of TCR clone 346820 (TRBV12-4, TRBJ1-2)
CASSLRQGKGYTF

SEQ ID NO: 693641 - protein, 15 aa, Homo sapiens
  CDR3 for alpha chain variable domain of TCR clone 346821 (TRAV27, TRAJ38)
CAARRNAGNNRKLIW

SEQ ID NO: 693642 - protein, 13 aa, Homo sapiens
  CDR3 for beta chain variable domain of TCR clone 346821 (TRBV10-3, TRBJ2-5)
CAMTSGAGETQYF

SEQ ID NO: 693643 - protein, 11 aa, Homo sapiens
  CDR3 for alpha chain variable domain of TCR clone 346822 (TRAV3, TRAJ21)
CAVGNFNKFYF

SEQ ID NO: 693644 - protein, 13 aa, Homo sapiens
  CDR3 for beta chain variable domain of TCR clone 346822 (TRBV20-1, TRBJ2-2)
FSASAAGTGELLF

SEQ ID NO: 693645 - protein, 12 aa, Homo sapiens
  CDR3 for alpha chain variable domain of TCR clone 346823 (TRAV13-1, TRAJ53)
RAAGGSNYKLTF

SEQ ID NO: 693646 - protein, 15 aa, Homo sapiens
  CDR3 for beta chain variable domain of TCR clone 346823 (TRBV7-2, TRBJ2-1)
CASSSGLAGGNEQFF

SEQ ID NO: 693647 - protein, 14 aa, Homo sapiens
  CDR3 for alpha chain variable domain of TCR clone 346824 (TRAV3, TRAJ21)
CALGRGSTNFTLDL

SEQ ID NO: 693648 - protein, 14 aa, Homo sapiens
  CDR3 for beta chain variable domain of TCR clone 346824 (TRBV7-9, TRBJ1-4)
CASSRAGFGEKLFF

SEQ ID NO: 693649 - protein, 14 aa, Homo sapiens
  CDR3 for alpha chain variable domain of TCR clone 346825 (TRAV12-2, TRAJ9)
CAVNALEGGFKTIF

SEQ ID NO: 693650 - protein, 12 aa, Homo sapiens
  CDR3 for beta chain variable domain of TCR clone 346825 (TRBV7-9, TRBJ1-5)
CASSPQGQPQHF

SEQ ID NO: 693651 - protein, 11 aa, Homo sapiens
  CDR3 for alpha chain variable domain of TCR clone 346826 (TRAV17, TRAJ9)
CGFTGGFKTIF

SEQ ID NO: 693652 - protein, 15 aa, Homo sapiens
  CDR3 for beta chain variable domain of TCR clone 346826 (TRBV7-9, TRBJ1-4)
CTSSARTGGNEKLFF

SEQ ID NO: 693653 - protein, 13 aa, Homo sapiens
  CDR3 for alpha chain variable domain of TCR clone 346827 (TRAV27, TRAJ45)
CRSSGGGADGLTF

SEQ ID NO: 693654 - protein, 15 aa, Homo sapiens
  CDR3 for beta chain variable domain of TCR clone 346827 (TRBV5-1, TRBJ1-2)
CASSYPGTGSSGYTF

SEQ ID NO: 693655 - protein, 12 aa, Homo sapiens
  CDR3 for alpha chain variable domain of TCR clone 346828 (TRAV21, TRAJ49)
CAVRNTGNQFYF

SEQ ID NO: 693656 - protein, 14 aa, Homo sapiens
  CDR3 for beta chain variable domain of TCR clone 346828 (TRBV7-6, TRBJ2-3)
CASSLGTVTDTQYF

SEQ ID NO: 693657 - protein, 15 aa, Homo sapiens
  CDR3 for alpha chain variable domain of TCR clone 346829 (TRAV23/DV6, TRAJ18)
CAARYRGSTLGRLYF

SEQ ID NO: 693658 - protein, 14 aa, Homo sapiens
  CDR3 for beta chain variable domain of TCR clone 346829 (TRBV7-6, TRBJ2-1)
CASSPRGKGNEQFF

SEQ ID NO: 693659 - protein, 13 aa, Homo sapiens
  CDR3 for alpha chain variable domain of TCR clone 346830 (TRAV13-2, TRAJ45)
FAERRGGADGLTF

SEQ ID NO: 693660 - protein, 15 aa, Homo sapiens
  CDR3 for beta chain variable domain of TCR clone 346830 (TRBV7-2, TRBJ2-3)
CASSLAGAFIDTQYF

SEQ ID NO: 693661 - protein, 12 aa, Homo sapiens
  CDR3 for alpha chain variable domain of TCR clone 346831 (TRAV21, TRAJ23)
CAVMLQGGKLIF

SEQ ID NO: 693662 - protein, 14 aa, Homo sapiens
  CDR3 for beta chain variable domain of TCR clone 346831 (TRBV7-9, TRBJ1-4)
CAMTGGEANEKLFF

SEQ ID NO: 693663 - protein, 10 aa, Homo sapiens
  CDR3 for alpha chain variable domain of TCR clone 346832 (TRAV8-3, TRAJ33)
CAVGAIATIS

SEQ ID NO: 693664 - protein, 13 aa, Homo sapiens
  CDR3 for beta chain variable domain of TCR clone 346832 (TRBV27, TRBJ2-7)
CASRLTTGYEQYF

SEQ ID NO: 693665 - protein, 14 aa, Homo sapiens
  CDR3 for alpha chain variable domain of TCR clone 346833 (TRAV13-1, TRAJ39)
CAASKNNAGNMLTF

SEQ ID NO: 693666 - protein, 15 aa, Homo sapiens
  CDR3 for beta chain variable domain of TCR clone 346833 (TRBV7-9, TRBJ1-6)
CASSSPGRGNSPLLF

SEQ ID NO: 693667 - protein, 14 aa, Homo sapiens
  CDR3 for alpha chain variable domain of TCR clone 346834 (TRAV1-2, TRAJ16)
CAVNRFSDGQKLLV

SEQ ID NO: 693668 - protein, 15 aa, Homo sapiens
  CDR3 for beta chain variable domain of TCR clone 346834 (TRBV7-2, TRBJ2-1)
CASSSGLAGGNEQFF

SEQ ID NO: 693669 - protein, 15 aa, Homo sapiens
  CDR3 for alpha chain variable domain of TCR clone 346835 (TRAV17, TRAJ10)
CATVLLTGGGNNLTF

SEQ ID NO: 693670 - protein, 14 aa, Homo sapiens
  CDR3 for beta chain variable domain of TCR clone 346835 (TRBV12-5, TRBJ2-7)
CASGQTGNSYEQYF

SEQ ID NO: 693671 - protein, 15 aa, Homo sapiens
  CDR3 for alpha chain variable domain of TCR clone 346836 (TRAV1-2, TRAJ18)
CAWEGRGSTLGRLYF

SEQ ID NO: 693672 - protein, 17 aa, Homo sapiens
  CDR3 for beta chain variable domain of TCR clone 346836 (TRBV13, TRBJ2-3)
CASSLSRVAGGRNTQYF

SEQ ID NO: 693673 - protein, 14 aa, Homo sapiens
  CDR3 for alpha chain variable domain of TCR clone 346837 (TRAV1-2, TRAJ6)
CAVSLSGGSYIPTF

SEQ ID NO: 693674 - protein, 15 aa, Homo sapiens
  CDR3 for beta chain variable domain of TCR clone 346837 (TRBV6-5, TRBJ2-1)
CASSYDAGAGNEQFF

SEQ ID NO: 693675 - protein, 11 aa, Homo sapiens
  CDR3 for alpha chain variable domain of TCR clone 346838 (TRAV3, TRAJ21)
CAVGNFNKFYF

SEQ ID NO: 693676 - protein, 14 aa, Homo sapiens
  CDR3 for beta chain variable domain of TCR clone 346838 (TRBV3-1, TRBJ2-7)
CASSPSSGTYEQYF

SEQ ID NO: 693677 - protein, 10 aa, Homo sapiens
  CDR3 for alpha chain variable domain of TCR clone 346839 (TRAV27, TRAJ43)
CARNNNDMRF

SEQ ID NO: 693678 - protein, 16 aa, Homo sapiens
  CDR3 for beta chain variable domain of TCR clone 346839 (TRBV5-1, TRBJ1-1)
CASSSGGNSLNTEAFF

SEQ ID NO: 693679 - protein, 14 aa, Homo sapiens
  CDR3 for alpha chain variable domain of TCR clone 346840 (TRAV3, TRAJ33)
CSVRDMDSNYQLIW

SEQ ID NO: 693680 - protein, 17 aa, Homo sapiens
  CDR3 for beta chain variable domain of TCR clone 346840 (TRBV7-3, TRBJ1-2)
CASSFPQGNDGELWLHL

SEQ ID NO: 693681 - protein, 10 aa, Homo sapiens
  CDR3 for alpha chain variable domain of TCR clone 346841 (TRAV13-2, TRAJ49)
CADTGNQFYF

SEQ ID NO: 693682 - protein, 20 aa, Homo sapiens
  CDR3 for beta chain variable domain of TCR clone 346841 (TRBV28, TRBJ2-1)
CASTPIGRSPGLAGGNEQFF

SEQ ID NO: 693683 - protein, 14 aa, Homo sapiens
  CDR3 for alpha chain variable domain of TCR clone 346842 (TRAV9-2, TRAJ39)
CALYIYNAGNMLTF

SEQ ID NO: 693684 - protein, 17 aa, Homo sapiens
  CDR3 for beta chain variable domain of TCR clone 346842 (TRBV7-8, TRBJ2-6)
CASSAGTRGAGANVLTF

SEQ ID NO: 693685 - protein, 12 aa, Homo sapiens
  CDR3 for alpha chain variable domain of TCR clone 346843 (TRAV13-2, TRAJ23)
CAERHRGGKLIF

SEQ ID NO: 693686 - protein, 12 aa, Homo sapiens
  CDR3 for beta chain variable domain of TCR clone 346843 (TRBV6-5, TRBJ2-7)
CASSDRQNEQYF

SEQ ID NO: 693687 - protein, 15 aa, Homo sapiens
  CDR3 for alpha chain variable domain of TCR clone 346844 (TRAV3, TRAJ22)
CAVRYRGGSARPLTF

SEQ ID NO: 693688 - protein, 13 aa, Homo sapiens
  CDR3 for beta chain variable domain of TCR clone 346844 (TRBV20-1, TRBJ1-1)
CSARVGGNTEAFF

SEQ ID NO: 693689 - protein, 13 aa, Homo sapiens
  CDR3 for alpha chain variable domain of TCR clone 346845 (TRAV8-4, TRAJ11)
CAVRKGGYSTLTF

SEQ ID NO: 693690 - protein, 15 aa, Homo sapiens
  CDR3 for beta chain variable domain of TCR clone 346845 (TRBV6-3, TRBJ2-7)
CASSSPGTVFYEQYF

SEQ ID NO: 693691 - protein, 16 aa, Homo sapiens
  CDR3 for alpha chain variable domain of TCR clone 346846 (TRAV13-1, TRAJ48)
CAASIFGHFGNEKLTF

SEQ ID NO: 693692 - protein, 13 aa, Homo sapiens
  CDR3 for beta chain variable domain of TCR clone 346846 (TRBV7-7, TRBJ2-3)
CASSLSRADTQYF

SEQ ID NO: 693693 - protein, 14 aa, Homo sapiens
  CDR3 for alpha chain variable domain of TCR clone 346847 (TRAV12-2, TRAJ53)
FRERGGGSNYKLTF

SEQ ID NO: 693694 - protein, 13 aa, Homo sapiens
  CDR3 for beta chain variable domain of TCR clone 346847 (TRBV3-1, TRBJ1-1)
CASSPGVITEAFF

SEQ ID NO: 693695 - protein, 12 aa, Homo sapiens
  CDR3 for alpha chain variable domain of TCR clone 346848 (TRAV36/DV7, TRAJ54)
CAVVRGAQKLVF

SEQ ID NO: 693696 - protein, 21 aa, Homo sapiens
  CDR3 for beta chain variable domain of TCR clone 346848 (TRBV6-5, TRBJ1-1)
CTSVPAVTRPPGGTGGTEAFF

SEQ ID NO: 693697 - protein, 20 aa, Homo sapiens
  CDR3 for alpha chain variable domain of TCR clone 346849 (TRAV12-3, TRAJ41)
SLFIRDSQPSDSAAPEALNF

SEQ ID NO: 693698 - protein, 17 aa, Homo sapiens
  CDR3 for beta chain variable domain of TCR clone 346849 (TRBV19, TRBJ2-7)
CASSISFYYSYPYEQYF

SEQ ID NO: 693699 - protein, 14 aa, Homo sapiens
  CDR3 for alpha chain variable domain of TCR clone 346850 (TRAV2, TRAJ15)
CAVTVNQAGTALIF

SEQ ID NO: 693700 - protein, 14 aa, Homo sapiens
  CDR3 for beta chain variable domain of TCR clone 346850 (TRBV12-5, TRBJ2-5)
CASGSRTHQETQYF

SEQ ID NO: 693701 - protein, 14 aa, Homo sapiens
  CDR3 for alpha chain variable domain of TCR clone 346851 (TRAV38-2/DV8, TRAJ29)
CAYRSRSGNTPLVF

SEQ ID NO: 693702 - protein, 13 aa, Homo sapiens
  CDR3 for beta chain variable domain of TCR clone 346851 (TRBV27, TRBJ1-1)
CASSLSIGAEAFF

SEQ ID NO: 693703 - protein, 12 aa, Homo sapiens
  CDR3 for alpha chain variable domain of TCR clone 346852 (TRAV20, TRAJ33)
CAVRVSNYQLIW

SEQ ID NO: 693704 - protein, 15 aa, Homo sapiens
  CDR3 for beta chain variable domain of TCR clone 346852 (TRBV11-3, TRBJ2-3)
CASLKDGREGDTQYF

SEQ ID NO: 693705 - protein, 17 aa, Homo sapiens
  CDR3 for alpha chain variable domain of TCR clone 346853 (TRAV8-6, TRAJ58)
CAVSSWVGETSGSRLTF

SEQ ID NO: 693706 - protein, 15 aa, Homo sapiens
  CDR3 for beta chain variable domain of TCR clone 346853 (TRBV3-1, TRBJ2-5)
CASSANLGGPETQYF

SEQ ID NO: 693707 - protein, 12 aa, Homo sapiens
  CDR3 for alpha chain variable domain of TCR clone 346854 (TRAV8-3, TRAJ20)
CAVDFNDYKPSF

SEQ ID NO: 693708 - protein, 12 aa, Homo sapiens
  CDR3 for beta chain variable domain of TCR clone 346854 (TRBV29-1, TRBJ2-3)
CSVTGGADTQYF

SEQ ID NO: 693709 - protein, 16 aa, Homo sapiens
  CDR3 for alpha chain variable domain of TCR clone 346855 (TRAV30, TRAJ49)
SAAQRVGPNTGNQFYF

SEQ ID NO: 693710 - protein, 17 aa, Homo sapiens
  CDR3 for beta chain variable domain of TCR clone 346855 (TRBV20-1, TRBJ2-1)
CSASSSGLAGSYNEQFF

SEQ ID NO: 693711 - protein, 14 aa, Homo sapiens
  CDR3 for alpha chain variable domain of TCR clone 346856 (TRAV1-2, TRAJ16)
CAVNRFSDGQKLLF

SEQ ID NO: 693712 - protein, 16 aa, Homo sapiens
  CDR3 for beta chain variable domain of TCR clone 346856 (TRBV9, TRBJ2-1)
CTSSALGGIGNNEQFF

SEQ ID NO: 693713 - protein, 15 aa, Homo sapiens
  CDR3 for alpha chain variable domain of TCR clone 346857 (TRAV17, TRAJ16)
CATALRFSDGQKLLF

SEQ ID NO: 693714 - protein, 12 aa, Homo sapiens
  CDR3 for beta chain variable domain of TCR clone 346857 (TRBV2, TRBJ2-7)
CASSDPDYEPYF

SEQ ID NO: 693715 - protein, 14 aa, Homo sapiens
  CDR3 for alpha chain variable domain of TCR clone 346858 (TRAV12-2, TRAJ24)
CAVTPADSWGKLQF

SEQ ID NO: 693716 - protein, 12 aa, Homo sapiens
  CDR3 for beta chain variable domain of TCR clone 346858 (TRBV14, TRBJ2-4)
CASSNLKSIQYF

SEQ ID NO: 693717 - protein, 16 aa, Homo sapiens
  CDR3 for alpha chain variable domain of TCR clone 346859 (TRAV30, TRAJ24)
CGTEIVDADSWGKFQF

SEQ ID NO: 693718 - protein, 15 aa, Homo sapiens
  CDR3 for beta chain variable domain of TCR clone 346859 (TRBV7-2, TRBJ2-3)
CASSLAAGVTDTQYF

SEQ ID NO: 693719 - protein, 12 aa, Homo sapiens
  CDR3 for alpha chain variable domain of TCR clone 346860 (TRAV13-1, TRAJ21)
CAAKEGFNKFYF

SEQ ID NO: 693720 - protein, 20 aa, Homo sapiens
  CDR3 for beta chain variable domain of TCR clone 346860 (TRBV7-8, TRBJ2-2)
CASSHLFPGPTIHITGGLFF

SEQ ID NO: 693721 - protein, 13 aa, Homo sapiens
  CDR3 for alpha chain variable domain of TCR clone 346861 (TRAV13-2, TRAJ13)
CAERPGGYQKVTF

SEQ ID NO: 693722 - protein, 15 aa, Homo sapiens
  CDR3 for beta chain variable domain of TCR clone 346861 (TRBV11-3, TRBJ2-7)
CASSPGPASSYAQYF

SEQ ID NO: 693723 - protein, 14 aa, Homo sapiens
  CDR3 for alpha chain variable domain of TCR clone 346862 (TRAV13-1, TRAJ9)
CAASALTGGFKTTF

SEQ ID NO: 693724 - protein, 14 aa, Homo sapiens
  CDR3 for beta chain variable domain of TCR clone 346862 (TRBV12-5, TRBJ2-5)
CASGSRTHQETQYF

SEQ ID NO: 693725 - protein, 16 aa, Homo sapiens
  CDR3 for alpha chain variable domain of TCR clone 346863 (TRAV1-2, TRAJ10)
RAVRGVLTGGGNKLTF

SEQ ID NO: 693726 - protein, 20 aa, Homo sapiens
  CDR3 for beta chain variable domain of TCR clone 346863 (TRBV7-8, TRBJ2-2)
CASSHLFPGPTIHITGELFF

SEQ ID NO: 693727 - protein, 13 aa, Homo sapiens
  CDR3 for alpha chain variable domain of TCR clone 346864 (TRAV27, TRAJ11)
CAGARSGYSTLTF

SEQ ID NO: 693728 - protein, 15 aa, Homo sapiens
  CDR3 for beta chain variable domain of TCR clone 346864 (TRBV2, TRBJ2-1)
CASSELAGSYNEQFF

SEQ ID NO: 693729 - protein, 12 aa, Homo sapiens
  CDR3 for alpha chain variable domain of TCR clone 346865 (TRAV8-3, TRAJ15)
CAVGAPLSALIF

SEQ ID NO: 693730 - protein, 17 aa, Homo sapiens
  CDR3 for beta chain variable domain of TCR clone 346865 (TRBV5-5, TRBJ1-1)
CASSLRFRGLTNTEAFF

SEQ ID NO: 693731 - protein, 13 aa, Homo sapiens
  CDR3 for alpha chain variable domain of TCR clone 346866 (TRAV12-1, TRAJ34)
CVVTGYNTDKLIF

SEQ ID NO: 693732 - protein, 12 aa, Homo sapiens
  CDR3 for beta chain variable domain of TCR clone 346866 (TRBV28, TRBJ2-7)
CQQSGGVYEQYF

SEQ ID NO: 693733 - protein, 16 aa, Homo sapiens
  CDR3 for alpha chain variable domain of TCR clone 346867 (TRAV30, TRAJ24)
CGTEIVDADSWGKFQF

SEQ ID NO: 693734 - protein, 13 aa, Homo sapiens
  CDR3 for beta chain variable domain of TCR clone 346867 (TRBV18, TRBJ1-2)
CASSAAATEGDTF

SEQ ID NO: 693735 - protein, 11 aa, Homo sapiens
  CDR3 for alpha chain variable domain of TCR clone 346868 (TRAV17, TRAJ9)
CATTGGFKTIF

SEQ ID NO: 693736 - protein, 13 aa, Homo sapiens
  CDR3 for beta chain variable domain of TCR clone 346868 (TRBV25-1, TRBJ2-6)
CASRGPGANVLTF

SEQ ID NO: 693737 - protein, 13 aa, Homo sapiens
  CDR3 for alpha chain variable domain of TCR clone 346869 (TRAV8-4, TRAJ30)
CAVSVNGDDKIIF

SEQ ID NO: 693738 - protein, 13 aa, Homo sapiens
  CDR3 for beta chain variable domain of TCR clone 346869 (TRBV3-1, TRBJ2-2)
CASLARGSGELFF

SEQ ID NO: 693739 - protein, 12 aa, Homo sapiens
  CDR3 for alpha chain variable domain of TCR clone 346870 (TRAV35, TRAJ49)
CAGWNTGNQFYF

SEQ ID NO: 693740 - protein, 14 aa, Homo sapiens
  CDR3 for beta chain variable domain of TCR clone 346870 (TRBV4-1, TRBJ2-7)
CASSPVAGGDEQYF

SEQ ID NO: 693741 - protein, 13 aa, Homo sapiens
  CDR3 for alpha chain variable domain of TCR clone 346871 (TRAV27, TRAJ45)
CRSSAGGADGLTF

SEQ ID NO: 693742 - protein, 17 aa, Homo sapiens
  CDR3 for beta chain variable domain of TCR clone 346871 (TRBV11-2, TRBJ2-1)
CASSLYPPGVEYNEQFF

SEQ ID NO: 693743 - protein, 12 aa, Homo sapiens
  CDR3 for alpha chain variable domain of TCR clone 346872 (TRAV12-3, TRAJ17)
CAMTLTGNKLTF

SEQ ID NO: 693744 - protein, 14 aa, Homo sapiens
  CDR3 for beta chain variable domain of TCR clone 346872 (TRBV20-1, TRBJ2-7)
HARDRVSGMDEQYF

SEQ ID NO: 693745 - protein, 15 aa, Homo sapiens
  CDR3 for alpha chain variable domain of TCR clone 346873 (TRAV6, TRAJ52)
CALTAGGTSYGKLTF

SEQ ID NO: 693746 - protein, 15 aa, Homo sapiens
  CDR3 for beta chain variable domain of TCR clone 346873 (TRBV20-1, TRBJ2-7)
CSARDRVSGMDEQYF

SEQ ID NO: 693747 - protein, 11 aa, Homo sapiens
  CDR3 for alpha chain variable domain of TCR clone 346874 (TRAV13-2, TRAJ23)
CAESPRGKLIF

SEQ ID NO: 693748 - protein, 17 aa, Homo sapiens
  CDR3 for beta chain variable domain of TCR clone 346874 (TRBV20-1, TRBJ2-2)
CSASGSGQGGLTGELFF

SEQ ID NO: 693749 - protein, 17 aa, Homo sapiens
  CDR3 for alpha chain variable domain of TCR clone 346875 (TRAV3, TRAJ6)
CAVRDGPRAGGSYIPTF

SEQ ID NO: 693750 - protein, 14 aa, Homo sapiens
  CDR3 for beta chain variable domain of TCR clone 346875 (TRBV7-2, TRBJ2-7)
CASSPETGFYEQYF

SEQ ID NO: 693751 - protein, 13 aa, Homo sapiens
  CDR3 for alpha chain variable domain of TCR clone 346876 (TRAV27, TRAJ41)
CAGEGNSGYALNF

SEQ ID NO: 693752 - protein, 13 aa, Homo sapiens
  CDR3 for beta chain variable domain of TCR clone 346876 (TRBV7-6, TRBJ1-2)
CASSLVADYGYTF

SEQ ID NO: 693753 - protein, 14 aa, Homo sapiens
  CDR3 for alpha chain variable domain of TCR clone 346877 (TRAV17, TRAJ12)
CATDEKDSSYKLIF

SEQ ID NO: 693754 - protein, 13 aa, Homo sapiens
  CDR3 for beta chain variable domain of TCR clone 346877 (TRBV7-2, TRBJ2-2)
CASSLAVTGELFF

SEQ ID NO: 693755 - protein, 13 aa, Homo sapiens
  CDR3 for alpha chain variable domain of TCR clone 346878 (TRAV3, TRAJ20)
CAVRDTPRYKLSF

SEQ ID NO: 693756 - protein, 15 aa, Homo sapiens
  CDR3 for beta chain variable domain of TCR clone 346878 (TRBV18, TRBJ1-5)
CASSPQARSNQPQHF

SEQ ID NO: 693757 - protein, 13 aa, Homo sapiens
  CDR3 for alpha chain variable domain of TCR clone 346879 (TRAV17, TRAJ9)
CATFLTGGFKTIF

SEQ ID NO: 693758 - protein, 14 aa, Homo sapiens
  CDR3 for beta chain variable domain of TCR clone 346879 (TRBV7-2, TRBJ2-5)
CASSPAGNQETQYF

SEQ ID NO: 693759 - protein, 18 aa, Homo sapiens
  CDR3 for alpha chain variable domain of TCR clone 346880 (TRAV26-1, TRAJ23)
CIVRVGLEEWNQGGKLIF

SEQ ID NO: 693760 - protein, 15 aa, Homo sapiens
  CDR3 for beta chain variable domain of TCR clone 346880 (TRBV5-7, TRBJ2-7)
CASSLGPGRGHEQYF

SEQ ID NO: 693761 - protein, 14 aa, Homo sapiens
  CDR3 for alpha chain variable domain of TCR clone 346881 (TRAV12-2, TRAJ40)
CAVKFPSGTYKYIF

SEQ ID NO: 693762 - protein, 13 aa, Homo sapiens
  CDR3 for beta chain variable domain of TCR clone 346881 (TRBV7-9, TRBJ1-2)
CASSLKQNYGYTF

SEQ ID NO: 693763 - protein, 16 aa, Homo sapiens
  CDR3 for alpha chain variable domain of TCR clone 346882 (TRAV30, TRAJ24)
CGTEIVDADSWGKFQF

SEQ ID NO: 693764 - protein, 15 aa, Homo sapiens
  CDR3 for beta chain variable domain of TCR clone 346882 (TRBV20-1, TRBJ2-7)
SSARDRVSGMDEQYF

SEQ ID NO: 693765 - protein, 16 aa, Homo sapiens
  CDR3 for alpha chain variable domain of TCR clone 346883 (TRAV16, TRAJ4)
CALSRMFSGVYNKLIS

SEQ ID NO: 693766 - protein, 16 aa, Homo sapiens
  CDR3 for beta chain variable domain of TCR clone 346883 (TRBV24-1, TRBJ2-3)
CATSDPGTGATDTQYF

SEQ ID NO: 693767 - protein, 14 aa, Homo sapiens
  CDR3 for alpha chain variable domain of TCR clone 346884 (TRAV38-1, TRAJ40)
CALRPTSGTYKFIF

SEQ ID NO: 693768 - protein, 14 aa, Homo sapiens
  CDR3 for beta chain variable domain of TCR clone 346884 (TRBV25-1, TRBJ1-1)
CASTHVGGNTEAFF

SEQ ID NO: 693769 - protein, 13 aa, Homo sapiens
  CDR3 for alpha chain variable domain of TCR clone 346885 (TRAV25, TRAJ10)
CAGRTGGGNKLTF

SEQ ID NO: 693770 - protein, 15 aa, Homo sapiens
  CDR3 for beta chain variable domain of TCR clone 346885 (TRBV19, TRBJ2-1)
CASSSPGVPLDEQSF

SEQ ID NO: 693771 - protein, 14 aa, Homo sapiens
  CDR3 for alpha chain variable domain of TCR clone 346886 (TRAV1-2, TRAJ16)
CAVNRFSDGQKLLF

SEQ ID NO: 693772 - protein, 15 aa, Homo sapiens
  CDR3 for beta chain variable domain of TCR clone 346886 (TRBV11-3, TRBJ2-3)
CASLKDGRGGDTQYF

SEQ ID NO: 693773 - protein, 14 aa, Homo sapiens
  CDR3 for alpha chain variable domain of TCR clone 346887 (TRAV2, TRAJ37)
CAVDFTSNTGKLIF

SEQ ID NO: 693774 - protein, 12 aa, Homo sapiens
  CDR3 for beta chain variable domain of TCR clone 346887 (TRBV5-1, TRBJ1-1)
CASSQGNTEAFF

SEQ ID NO: 693775 - protein, 17 aa, Homo sapiens
  CDR3 for alpha chain variable domain of TCR clone 346888 (TRAV1-2, TRAJ23)
CAVRPSLTYNQGGKLIF

SEQ ID NO: 693776 - protein, 15 aa, Homo sapiens
  CDR3 for beta chain variable domain of TCR clone 346888 (TRBV4-1, TRBJ2-1)
CASSQAAGGNNEQFF

SEQ ID NO: 693777 - protein, 15 aa, Homo sapiens
  CDR3 for alpha chain variable domain of TCR clone 346889 (TRAV27, TRAJ37)
CAGIHGSSNTGKLIF

SEQ ID NO: 693778 - protein, 13 aa, Homo sapiens
  CDR3 for beta chain variable domain of TCR clone 346889 (TRBV19, TRBJ2-1)
CASRIRSSWEQFF

SEQ ID NO: 693779 - protein, 14 aa, Homo sapiens
  CDR3 for alpha chain variable domain of TCR clone 346890 (TRAV23/DV6, TRAJ37)
CAASTSSNTGKLIF

SEQ ID NO: 693780 - protein, 14 aa, Homo sapiens
  CDR3 for beta chain variable domain of TCR clone 346890 (TRBV4-1, TRBJ2-2)
CASSQAVNTGELFF

SEQ ID NO: 693781 - protein, 14 aa, Homo sapiens
  CDR3 for alpha chain variable domain of TCR clone 346891 (TRAV1-2, TRAJ16)
CAVNRISDGQKLLF

SEQ ID NO: 693782 - protein, 17 aa, Homo sapiens
  CDR3 for beta chain variable domain of TCR clone 346891 (TRBV13, TRBJ2-3)
CASSLSRVAGGRNTQYF

SEQ ID NO: 693783 - protein, 19 aa, Homo sapiens
  CDR3 for alpha chain variable domain of TCR clone 346892 (TRAV26-1, TRAJ52)
CIVRAHRNAGGTSYGKLTF

SEQ ID NO: 693784 - protein, 14 aa, Homo sapiens
  CDR3 for beta chain variable domain of TCR clone 346892 (TRBV4-2, TRBJ2-1)
CASGLDRAYNEQFF

SEQ ID NO: 693785 - protein, 14 aa, Homo sapiens
  CDR3 for alpha chain variable domain of TCR clone 346893 (TRAV12-2, TRAJ45)
CAVYSGGGADGLTF

SEQ ID NO: 693786 - protein, 14 aa, Homo sapiens
  CDR3 for beta chain variable domain of TCR clone 346893 (TRBV27, TRBJ2-2)
CASSLGAATGELFF

SEQ ID NO: 693787 - protein, 14 aa, Homo sapiens
  CDR3 for alpha chain variable domain of TCR clone 346894 (TRAV1-1, TRAJ27)
CAVIYNTNAGKSTF

SEQ ID NO: 693788 - protein, 13 aa, Homo sapiens
  CDR3 for beta chain variable domain of TCR clone 346894 (TRBV7-9, TRBJ1-2)
CASSLAQNYGYTF

SEQ ID NO: 693789 - protein, 14 aa, Homo sapiens
  CDR3 for alpha chain variable domain of TCR clone 346895 (TRAV38-1, TRAJ40)
CSLRPTSGTYKYIF

SEQ ID NO: 693790 - protein, 11 aa, Homo sapiens
  CDR3 for beta chain variable domain of TCR clone 346895 (TRBV25-1, TRBJ1-1)
PTWGGNTEAFF

SEQ ID NO: 693791 - protein, 11 aa, Homo sapiens
  CDR3 for alpha chain variable domain of TCR clone 346896 (TRAV2, TRAJ21)
CAVFNFNKFYF

SEQ ID NO: 693792 - protein, 12 aa, Homo sapiens
  CDR3 for beta chain variable domain of TCR clone 346896 (TRBV7-8, TRBJ2-7)
CASSLGDREQYF

SEQ ID NO: 693793 - protein, 14 aa, Homo sapiens
  CDR3 for alpha chain variable domain of TCR clone 346897 (TRAV12-3, TRAJ53)
CGATSGGSNYTLTF

SEQ ID NO: 693794 - protein, 13 aa, Homo sapiens
  CDR3 for beta chain variable domain of TCR clone 346897 (TRBV19, TRBJ1-5)
CASSTQDGQPQHF

SEQ ID NO: 693795 - protein, 13 aa, Homo sapiens
  CDR3 for alpha chain variable domain of TCR clone 346898 (TRAV24, TRAJ30)
CASGGNRDDKIIF

SEQ ID NO: 693796 - protein, 13 aa, Homo sapiens
  CDR3 for beta chain variable domain of TCR clone 346898 (TRBV15, TRBJ1-6)
CATSGGLNSPLHF

SEQ ID NO: 693797 - protein, 13 aa, Homo sapiens
  CDR3 for alpha chain variable domain of TCR clone 346899 (TRAV12-3, TRAJ33)
CAMSVNSNYQLIW

SEQ ID NO: 693798 - protein, 13 aa, Homo sapiens
  CDR3 for beta chain variable domain of TCR clone 346899 (TRBV4-1, TRBJ2-2)
CSSSQENTGELFF

SEQ ID NO: 693799 - protein, 15 aa, Homo sapiens
  CDR3 for alpha chain variable domain of TCR clone 346900 (TRAV21, TRAJ53)
CATLNSGGSNYKLTF

SEQ ID NO: 693800 - protein, 15 aa, Homo sapiens
  CDR3 for beta chain variable domain of TCR clone 346900 (TRBV18, TRBJ2-1)
CASLPPSASYNEQFF

SEQ ID NO: 693801 - protein, 14 aa, Homo sapiens
  CDR3 for alpha chain variable domain of TCR clone 346901 (TRAV13-1, TRAJ40)
CAASMTSGTYKYIF

SEQ ID NO: 693802 - protein, 15 aa, Homo sapiens
  CDR3 for beta chain variable domain of TCR clone 346901 (TRBV7-3, TRBJ2-1)
CASSPAGGGKVEQFF

SEQ ID NO: 693803 - protein, 13 aa, Homo sapiens
  CDR3 for alpha chain variable domain of TCR clone 346902 (TRAV3, TRAJ30)
CAVRYRGDDKIIF

SEQ ID NO: 693804 - protein, 14 aa, Homo sapiens
  CDR3 for beta chain variable domain of TCR clone 346902 (TRBV5-1, TRBJ1-1)
CASSRTTGDTEAFF

SEQ ID NO: 693805 - protein, 18 aa, Homo sapiens
  CDR3 for alpha chain variable domain of TCR clone 346903 (TRAV26-2, TRAJ54)
CILRDVEVGIQGAQKLVF

SEQ ID NO: 693806 - protein, 13 aa, Homo sapiens
  CDR3 for beta chain variable domain of TCR clone 346903 (TRBV29-1, TRBJ2-1)
CSVEGGRVNEQFF

SEQ ID NO: 693807 - protein, 12 aa, Homo sapiens
  CDR3 for alpha chain variable domain of TCR clone 346904 (TRAV12-3, TRAJ17)
CAMTLTGNKLTF

SEQ ID NO: 693808 - protein, 16 aa, Homo sapiens
  CDR3 for beta chain variable domain of TCR clone 346904 (TRBV12-4, TRBJ2-3)
CASSFISGSGTDTQYF

SEQ ID NO: 693809 - protein, 11 aa, Homo sapiens
  CDR3 for alpha chain variable domain of TCR clone 346905 (TRAV12-3, TRAJ43)
CAMSVSNDMRF

SEQ ID NO: 693810 - protein, 20 aa, Homo sapiens
  CDR3 for beta chain variable domain of TCR clone 346905 (TRBV28, TRBJ2-1)
CASTPIGRSPGLAGGNEQLF

SEQ ID NO: 693811 - protein, 15 aa, Homo sapiens
  CDR3 for alpha chain variable domain of TCR clone 346906 (TRAV8-3, TRAJ45)
CASSYSGGGADGLTF

SEQ ID NO: 693812 - protein, 20 aa, Homo sapiens
  CDR3 for beta chain variable domain of TCR clone 346906 (TRBV6-4, TRBJ2-7)
CASSDSSVSGQVPTSCEQYF

SEQ ID NO: 693813 - protein, 15 aa, Homo sapiens
  CDR3 for alpha chain variable domain of TCR clone 346907 (TRAV8-3, TRAJ11)
CAVGLLNSGYSTLTF

SEQ ID NO: 693814 - protein, 23 aa, Homo sapiens
  CDR3 for beta chain variable domain of TCR clone 346907 (TRBV7-9, TRBJ1-2)
EAQREKSRLLSDRFSSGEDGYTF

SEQ ID NO: 693815 - protein, 16 aa, Homo sapiens
  CDR3 for alpha chain variable domain of TCR clone 346908 (TRAV26-2, TRAJ57)
CILRDVGQGGSEKLVF

SEQ ID NO: 693816 - protein, 16 aa, Homo sapiens
  CDR3 for beta chain variable domain of TCR clone 346908 (TRBV29-1, TRBJ2-7)
CSVEVVGTSGSYEQYF

SEQ ID NO: 693817 - protein, 18 aa, Homo sapiens
  CDR3 for alpha chain variable domain of TCR clone 346909 (TRAV17, TRAJ45)
CATSLDLYSGGGADGLTF

SEQ ID NO: 693818 - protein, 12 aa, Homo sapiens
  CDR3 for beta chain variable domain of TCR clone 346909 (TRBV11-2, TRBJ2-4)
CASSSASGSEYF

SEQ ID NO: 693819 - protein, 16 aa, Homo sapiens
  CDR3 for alpha chain variable domain of TCR clone 346910 (TRAV26-2, TRAJ22)
CILRDGASGSARQLTF

SEQ ID NO: 693820 - protein, 15 aa, Homo sapiens
  CDR3 for beta chain variable domain of TCR clone 346910 (TRBV27, TRBJ1-2)
CASRKQGAPNYGYTF

SEQ ID NO: 693821 - protein, 16 aa, Homo sapiens
  CDR3 for alpha chain variable domain of TCR clone 346911 (TRAV38-2/DV8, TRAJ45)
CAYTTTSGGGADGLTF

SEQ ID NO: 693822 - protein, 14 aa, Homo sapiens
  CDR3 for beta chain variable domain of TCR clone 346911 (TRBV18, TRBJ2-7)
CASSPRGGAYEQYF

SEQ ID NO: 693823 - protein, 13 aa, Homo sapiens
  CDR3 for alpha chain variable domain of TCR clone 346912 (TRAV3, TRAJ21)
CAVREPDFNKFYF

SEQ ID NO: 693824 - protein, 16 aa, Homo sapiens
  CDR3 for beta chain variable domain of TCR clone 346912 (TRBV27, TRBJ2-2)
CASSFRGLVRNGELFF

SEQ ID NO: 693825 - protein, 15 aa, Homo sapiens
  CDR3 for alpha chain variable domain of TCR clone 346913 (TRAV26-2, TRAJ16)
CILSLRFSDGQKLLF

SEQ ID NO: 693826 - protein, 14 aa, Homo sapiens
  CDR3 for beta chain variable domain of TCR clone 346913 (TRBV5-1, TRBJ2-7)
CASSRGESLYEQYF

SEQ ID NO: 693827 - protein, 14 aa, Homo sapiens
  CDR3 for alpha chain variable domain of TCR clone 346914 (TRAV1-2, TRAJ16)
CAVNRFSDGQKLLF

SEQ ID NO: 693828 - protein, 15 aa, Homo sapiens
  CDR3 for beta chain variable domain of TCR clone 346914 (TRBV27, TRBJ2-1)
CASGNGGGSSNEQFF

SEQ ID NO: 693829 - protein, 14 aa, Homo sapiens
  CDR3 for alpha chain variable domain of TCR clone 346915 (TRAV12-2, TRAJ13)
CAVKKTGGYQKVTF

SEQ ID NO: 693830 - protein, 15 aa, Homo sapiens
  CDR3 for beta chain variable domain of TCR clone 346915 (TRBV11-2, TRBJ2-7)
CASSLKGALTYEQYF

SEQ ID NO: 693831 - protein, 17 aa, Homo sapiens
  CDR3 for alpha chain variable domain of TCR clone 346916 (TRAV8-6, TRAJ58)
CAVSSWVGETSGPRLTF

SEQ ID NO: 693832 - protein, 17 aa, Homo sapiens
  CDR3 for beta chain variable domain of TCR clone 346916 (TRBV11-2, TRBJ2-1)
CASSLYPPGVEYNEQFF

SEQ ID NO: 693833 - protein, 13 aa, Homo sapiens
  CDR3 for alpha chain variable domain of TCR clone 346917 (TRAV36/DV7, TRAJ37)
CAVFSSNTGKLIF

SEQ ID NO: 693834 - protein, 12 aa, Homo sapiens
  CDR3 for beta chain variable domain of TCR clone 346917 (TRBV19, TRBJ1-4)
CASKDWPGGLFF

SEQ ID NO: 693835 - protein, 14 aa, Homo sapiens
  CDR3 for alpha chain variable domain of TCR clone 346918 (TRAV13-1, TRAJ9)
CVASALTGGLKTIF

SEQ ID NO: 693836 - protein, 16 aa, Homo sapiens
  CDR3 for beta chain variable domain of TCR clone 346918 (TRBV12-4, TRBJ2-3)
CASSFGTGGISDTQYF

SEQ ID NO: 693837 - protein, 17 aa, Homo sapiens
  CDR3 for alpha chain variable domain of TCR clone 346919 (TRAV3, TRAJ12)
CAVRDGGRMDSSYKLIF

SEQ ID NO: 693838 - protein, 12 aa, Homo sapiens
  CDR3 for beta chain variable domain of TCR clone 346919 (TRBV7-9, TRBJ1-5)
CASSPQGQPQHF

SEQ ID NO: 693839 - protein, 13 aa, Homo sapiens
  CDR3 for alpha chain variable domain of TCR clone 346920 (TRAV23/DV6, TRAJ6)
CAAKTGGSYIPTF

SEQ ID NO: 693840 - protein, 15 aa, Homo sapiens
  CDR3 for beta chain variable domain of TCR clone 346920 (TRBV5-1, TRBJ1-2)
CASSSYGEFDYGCTF

SEQ ID NO: 693841 - protein, 19 aa, Homo sapiens
  CDR3 for alpha chain variable domain of TCR clone 346921 (TRAV2, TRAJ20)
ILPVREADAAVYRDCKLSF

SEQ ID NO: 693842 - protein, 16 aa, Homo sapiens
  CDR3 for beta chain variable domain of TCR clone 346921 (TRBV5-1, TRBJ1-1)
CASSSGGNSLNTEAFF

SEQ ID NO: 693843 - protein, 16 aa, Homo sapiens
  CDR3 for alpha chain variable domain of TCR clone 346922 (TRAV27, TRAJ53)
CAAPEGSGGSNYKLTF

SEQ ID NO: 693844 - protein, 14 aa, Homo sapiens
  CDR3 for beta chain variable domain of TCR clone 346922 (TRBV18, TRBJ2-7)
CASSPRGGAYEQYF

SEQ ID NO: 693845 - protein, 13 aa, Homo sapiens
  CDR3 for alpha chain variable domain of TCR clone 346923 (TRAV13-1, TRAJ10)
CAATAGGGNKLTF

SEQ ID NO: 693846 - protein, 13 aa, Homo sapiens
  CDR3 for beta chain variable domain of TCR clone 346923 (TRBV6-5, TRBJ2-3)
CASRRDYTDTQYF

SEQ ID NO: 693847 - protein, 15 aa, Homo sapiens
  CDR3 for alpha chain variable domain of TCR clone 346924 (TRAV25, TRAJ53)
CAATGGGGSNYKLTF

SEQ ID NO: 693848 - protein, 15 aa, Homo sapiens
  CDR3 for beta chain variable domain of TCR clone 346924 (TRBV4-1, TRBJ1-4)
CASSDTGGTNEKLFF

SEQ ID NO: 693849 - protein, 14 aa, Homo sapiens
  CDR3 for alpha chain variable domain of TCR clone 346925 (TRAV8-4, TRAJ9)
CAVRINTGGFKTIF

SEQ ID NO: 693850 - protein, 14 aa, Homo sapiens
  CDR3 for beta chain variable domain of TCR clone 346925 (TRBV2, TRBJ1-5)
CASSGTVSNQPQHF

SEQ ID NO: 693851 - protein, 15 aa, Homo sapiens
  CDR3 for alpha chain variable domain of TCR clone 346926 (TRAV38-1, TRAJ45)
CAFMKGGGGADGLTF

SEQ ID NO: 693852 - protein, 14 aa, Homo sapiens
  CDR3 for beta chain variable domain of TCR clone 346926 (TRBV5-5, TRBJ1-5)
CASSGQGVDQPQHF

SEQ ID NO: 693853 - protein, 16 aa, Homo sapiens
  CDR3 for alpha chain variable domain of TCR clone 346927 (TRAV3, TRAJ3)
CAVRDRAKSSASKIIF

SEQ ID NO: 693854 - protein, 13 aa, Homo sapiens
  CDR3 for beta chain variable domain of TCR clone 346927 (TRBV10-3, TRBJ2-7)
SASKLAVNYEQYF

SEQ ID NO: 693855 - protein, 12 aa, Homo sapiens
  CDR3 for alpha chain variable domain of TCR clone 346928 (TRAV3, TRAJ20)
CAVRDPDYKLSF

SEQ ID NO: 693856 - protein, 18 aa, Homo sapiens
  CDR3 for beta chain variable domain of TCR clone 346928 (TRBV4-1, TRBJ1-5)
CASSQGPRGQGLNQPQHF

SEQ ID NO: 693857 - protein, 17 aa, Homo sapiens
  CDR3 for alpha chain variable domain of TCR clone 346929 (TRAV38-2/DV8, TRAJ28)
CAYRFAYSGAGSYQLTF

SEQ ID NO: 693858 - protein, 17 aa, Homo sapiens
  CDR3 for beta chain variable domain of TCR clone 346929 (TRBV4-3, TRBJ2-2)
CASSQDTSARSPGDLFF

SEQ ID NO: 693859 - protein, 12 aa, Homo sapiens
  CDR3 for alpha chain variable domain of TCR clone 346930 (TRAV20, TRAJ34)
CAVKDNTDKLIF

SEQ ID NO: 693860 - protein, 14 aa, Homo sapiens
  CDR3 for beta chain variable domain of TCR clone 346930 (TRBV7-9, TRBJ2-7)
CASSRPGGPSEQYF

SEQ ID NO: 693861 - protein, 13 aa, Homo sapiens
  CDR3 for alpha chain variable domain of TCR clone 346931 (TRAV13-2, TRAJ48)
CAEMDFGNEKLTF

SEQ ID NO: 693862 - protein, 15 aa, Homo sapiens
  CDR3 for beta chain variable domain of TCR clone 346931 (TRBV7-9, TRBJ1-6)
CASGSPGRGNSPRHF

SEQ ID NO: 693863 - protein, 12 aa, Homo sapiens
  CDR3 for alpha chain variable domain of TCR clone 346932 (TRAV12-1, TRAJ40)
CVVYSGTYKYIF

SEQ ID NO: 693864 - protein, 10 aa, Homo sapiens
  CDR3 for beta chain variable domain of TCR clone 346932 (TRBV11-2, TRBJ2-3)
CDSSLGGASR

SEQ ID NO: 693865 - protein, 15 aa, Homo sapiens
  CDR3 for alpha chain variable domain of TCR clone 346933 (TRAV2, TRAJ24)
CAVVRLKNSWGKLQF

SEQ ID NO: 693866 - protein, 15 aa, Homo sapiens
  CDR3 for beta chain variable domain of TCR clone 346933 (TRBV11-3, TRBJ2-3)
CASLKDGREGDTQYF

SEQ ID NO: 693867 - protein, 14 aa, Homo sapiens
  CDR3 for alpha chain variable domain of TCR clone 346934 (TRAV1-2, TRAJ16)
CAVNRFSDGQKLLF

SEQ ID NO: 693868 - protein, 13 aa, Homo sapiens
  CDR3 for beta chain variable domain of TCR clone 346934 (TRBV10-2, TRBJ2-7)
CASSEGQYYEQYF

SEQ ID NO: 693869 - protein, 11 aa, Homo sapiens
  CDR3 for alpha chain variable domain of TCR clone 346935 (TRAV21, TRAJ41)
CAVRSGYALNF

SEQ ID NO: 693870 - protein, 13 aa, Homo sapiens
  CDR3 for beta chain variable domain of TCR clone 346935 (TRBV7-9, TRBJ1-2)
CASSLKQNYGDTV

SEQ ID NO: 693871 - protein, 11 aa, Homo sapiens
  CDR3 for alpha chain variable domain of TCR clone 346936 (TRAV2, TRAJ33)
CAVESNYQFIW

SEQ ID NO: 693872 - protein, 13 aa, Homo sapiens
  CDR3 for beta chain variable domain of TCR clone 346936 (TRBV27, TRBJ1-4)
CASSLMGDEKLFF

SEQ ID NO: 693873 - protein, 12 aa, Homo sapiens
  CDR3 for alpha chain variable domain of TCR clone 346937 (TRAV1-1, TRAJ8)
CAGGTGFQKLVF

SEQ ID NO: 693874 - protein, 15 aa, Homo sapiens
  CDR3 for beta chain variable domain of TCR clone 346937 (TRBV7-9, TRBJ1-4)
CASSRTGGINEKLFF

SEQ ID NO: 693875 - protein, 14 aa, Homo sapiens
  CDR3 for alpha chain variable domain of TCR clone 346938 (TRAV9-2, TRAJ39)
CALYIYNAGNMLTF

SEQ ID NO: 693876 - protein, 16 aa, Homo sapiens
  CDR3 for beta chain variable domain of TCR clone 346938 (TRBV19, TRBJ2-2)
CASRSPGSGATGELFF

SEQ ID NO: 693877 - protein, 11 aa, Homo sapiens
  CDR3 for alpha chain variable domain of TCR clone 346939 (TRAV2, TRAJ33)
CAVDSNYRLIW

SEQ ID NO: 693878 - protein, 13 aa, Homo sapiens
  CDR3 for beta chain variable domain of TCR clone 346939 (TRBV7-2, TRBJ2-7)
CASSSPSGSEQYF

SEQ ID NO: 693879 - protein, 13 aa, Homo sapiens
  CDR3 for alpha chain variable domain of TCR clone 346940 (TRAV26-1, TRAJ29)
CIVRRSGNAPLVF

SEQ ID NO: 693880 - protein, 14 aa, Homo sapiens
  CDR3 for beta chain variable domain of TCR clone 346940 (TRBV12-5, TRBJ2-5)
CASGSRTHQETQYF

SEQ ID NO: 693881 - protein, 14 aa, Homo sapiens
  CDR3 for alpha chain variable domain of TCR clone 346941 (TRAV12-3, TRAJ58)
CAMSTETSGSRLTL

SEQ ID NO: 693882 - protein, 13 aa, Homo sapiens
  CDR3 for beta chain variable domain of TCR clone 346941 (TRBV27, TRBJ2-3)
CASSWGRTDTQYF

SEQ ID NO: 693883 - protein, 14 aa, Homo sapiens
  CDR3 for alpha chain variable domain of TCR clone 346942 (TRAV9-2, TRAJ39)
CALYIYNAGNMLPF

SEQ ID NO: 693884 - protein, 14 aa, Homo sapiens
  CDR3 for beta chain variable domain of TCR clone 346942 (TRBV7-9, TRBJ2-1)
CASSPRDSLYEQFF

SEQ ID NO: 693885 - protein, 14 aa, Homo sapiens
  CDR3 for alpha chain variable domain of TCR clone 346943 (TRAV29/DV5, TRAJ28)
CAATEGAGSYQLTF

SEQ ID NO: 693886 - protein, 16 aa, Homo sapiens
  CDR3 for beta chain variable domain of TCR clone 346943 (TRBV11-2, TRBJ1-1)
CASSLRQGGERSKAFF

SEQ ID NO: 693887 - protein, 16 aa, Homo sapiens
  CDR3 for alpha chain variable domain of TCR clone 346944 (TRAV26-2, )
CILTDIQNPDPAVYQL

SEQ ID NO: 693888 - protein, 17 aa, Homo sapiens
  CDR3 for beta chain variable domain of TCR clone 346944 (TRBV13, TRBJ2-3)
CASSLSRVAGGRNTQYF

SEQ ID NO: 693889 - protein, 11 aa, Homo sapiens
  CDR3 for alpha chain variable domain of TCR clone 346945 (TRAV12-1, TRAJ26)
CVVAYGQNFVF

SEQ ID NO: 693890 - protein, 15 aa, Homo sapiens
  CDR3 for beta chain variable domain of TCR clone 346945 (TRBV12-4, TRBJ2-5)
CASSGTGQAQETQHF

SEQ ID NO: 693891 - protein, 11 aa, Homo sapiens
  CDR3 for alpha chain variable domain of TCR clone 346946 (TRAV21, TRAJ34)
CAVTNTGKLIF

SEQ ID NO: 693892 - protein, 17 aa, Homo sapiens
  CDR3 for beta chain variable domain of TCR clone 346946 (TRBV20-1, TRBJ2-1)
CSARSPSGGPPTMSSSS

SEQ ID NO: 693893 - protein, 12 aa, Homo sapiens
  CDR3 for alpha chain variable domain of TCR clone 346947 (TRAV21, TRAJ12)
CAVMDSSYKLIF

SEQ ID NO: 693894 - protein, 16 aa, Homo sapiens
  CDR3 for beta chain variable domain of TCR clone 346947 (TRBV7-9, TRBJ2-5)
CASRLEIGTRKETQYV

SEQ ID NO: 693895 - protein, 14 aa, Homo sapiens
  CDR3 for alpha chain variable domain of TCR clone 346948 (TRAV12-3, TRAJ12)
CAMSEVDSSYKLIF

SEQ ID NO: 693896 - protein, 12 aa, Homo sapiens
  CDR3 for beta chain variable domain of TCR clone 346948 (TRBV18, TRBJ1-4)
CASSPCREKLFF

SEQ ID NO: 693897 - protein, 16 aa, Homo sapiens
  CDR3 for alpha chain variable domain of TCR clone 346949 (TRAV26-2, TRAJ22)
CILRDGASGSARQLTF

SEQ ID NO: 693898 - protein, 13 aa, Homo sapiens
  CDR3 for beta chain variable domain of TCR clone 346949 (TRBV3-1, TRBJ1-2)
CASSQDANYGYTF

SEQ ID NO: 693899 - protein, 17 aa, Homo sapiens
  CDR3 for alpha chain variable domain of TCR clone 346950 (TRAV26-1, TRAJ37)
CIVRVNTVSSNTGKLIF

SEQ ID NO: 693900 - protein, 12 aa, Homo sapiens
  CDR3 for beta chain variable domain of TCR clone 346950 (TRBV7-9, TRBJ1-4)
CASSTDREKLFF

SEQ ID NO: 693901 - protein, 14 aa, Homo sapiens
  CDR3 for alpha chain variable domain of TCR clone 346951 (TRAV26-1, TRAJ21)
CIAHTTSTNFTLDL

SEQ ID NO: 693902 - protein, 15 aa, Homo sapiens
  CDR3 for beta chain variable domain of TCR clone 346951 (TRBV20-1, TRBJ2-7)
CSARDRVSVMDEQYF

SEQ ID NO: 693903 - protein, 18 aa, Homo sapiens
  CDR3 for alpha chain variable domain of TCR clone 346952 (TRAV21, TRAJ52)
CAVRPSPAGGTSYGKLTI

SEQ ID NO: 693904 - protein, 13 aa, Homo sapiens
  CDR3 for beta chain variable domain of TCR clone 346952 (TRBV29-1, TRBJ2-2)
CSVYREDTGELFF

SEQ ID NO: 693905 - protein, 12 aa, Homo sapiens
  CDR3 for alpha chain variable domain of TCR clone 346953 (TRAV13-1, TRAJ53)
AASGGSNYKMTF

SEQ ID NO: 693906 - protein, 12 aa, Homo sapiens
  CDR3 for beta chain variable domain of TCR clone 346953 (TRBV18, TRBJ1-4)
CASSPSREKLFF

SEQ ID NO: 693907 - protein, 17 aa, Homo sapiens
  CDR3 for alpha chain variable domain of TCR clone 346954 (TRAV13-1, TRAJ52)
CAAGLNAGGTSYGKLTF

SEQ ID NO: 693908 - protein, 13 aa, Homo sapiens
  CDR3 for beta chain variable domain of TCR clone 346954 (TRBV7-2, TRBJ1-1)
CASNLKGAKVAFF

SEQ ID NO: 693909 - protein, 16 aa, Homo sapiens
  CDR3 for alpha chain variable domain of TCR clone 346955 (TRAV30, TRAJ24)
CGTEIADADSWGKFQF

SEQ ID NO: 693910 - protein, 14 aa, Homo sapiens
  CDR3 for beta chain variable domain of TCR clone 346955 (TRBV5-4, TRBJ1-1)
CASSLDSRRDEAFF

SEQ ID NO: 693911 - protein, 15 aa, Homo sapiens
  CDR3 for alpha chain variable domain of TCR clone 346956 (TRAV4, TRAJ26)
YLVGDMNNYGQNFVF

SEQ ID NO: 693912 - protein, 16 aa, Homo sapiens
  CDR3 for beta chain variable domain of TCR clone 346956 (TRBV28, TRBJ1-4)
CASSSRTGAADEKLFF

SEQ ID NO: 693913 - protein, 14 aa, Homo sapiens
  CDR3 for alpha chain variable domain of TCR clone 346957 (TRAV30, TRAJ33)
CGTVAPRSNYQLIW

SEQ ID NO: 693914 - protein, 15 aa, Homo sapiens
  CDR3 for beta chain variable domain of TCR clone 346957 (TRBV11-2, TRBJ2-3)
CASSPGGGATDTQYF

SEQ ID NO: 693915 - protein, 17 aa, Homo sapiens
  CDR3 for alpha chain variable domain of TCR clone 346958 (TRAV3, TRAJ6)
CAVRDGPRAGGSYIPTS

SEQ ID NO: 693916 - protein, 18 aa, Homo sapiens
  CDR3 for beta chain variable domain of TCR clone 346958 (TRBV25-1, TRBJ1-2)
CASSGLQNGQGLIFGYTF

SEQ ID NO: 693917 - protein, 16 aa, Homo sapiens
  CDR3 for alpha chain variable domain of TCR clone 346959 (TRAV30, TRAJ24)
CGTEIVDADSWGKFQF

SEQ ID NO: 693918 - protein, 18 aa, Homo sapiens
  CDR3 for beta chain variable domain of TCR clone 346959 (TRBV11-2, TRBJ2-3)
CASSVGGASRGAPNTQYF

SEQ ID NO: 693919 - protein, 14 aa, Homo sapiens
  CDR3 for alpha chain variable domain of TCR clone 346960 (TRAV3, TRAJ7)
CAVREEEREQQTRF

SEQ ID NO: 693920 - protein, 14 aa, Homo sapiens
  CDR3 for beta chain variable domain of TCR clone 346960 (TRBV7-7, TRBJ2-2)
CASSTRASGGELFL

SEQ ID NO: 693921 - protein, 14 aa, Homo sapiens
  CDR3 for alpha chain variable domain of TCR clone 346961 (TRAV13-1, TRAJ45)
CAAMGGGGADGLTF

SEQ ID NO: 693922 - protein, 16 aa, Homo sapiens
  CDR3 for beta chain variable domain of TCR clone 346961 (TRBV7-2, TRBJ1-1)
CASSLGAGWTNTEAFF

SEQ ID NO: 693923 - protein, 16 aa, Homo sapiens
  CDR3 for alpha chain variable domain of TCR clone 346962 (TRAV30, TRAJ24)
CGTEIVDADSWVKFQF

SEQ ID NO: 693924 - protein, 14 aa, Homo sapiens
  CDR3 for beta chain variable domain of TCR clone 346962 (TRBV12-5, TRBJ2-5)
CASGSPTHQETQYF

SEQ ID NO: 693925 - protein, 12 aa, Homo sapiens
  CDR3 for alpha chain variable domain of TCR clone 346963 (TRAV16, TRAJ49)
CALYEGGNQFYF

SEQ ID NO: 693926 - protein, 14 aa, Homo sapiens
  CDR3 for beta chain variable domain of TCR clone 346963 (TRBV7-9, TRBJ2-1)
CASRPTGLRNEQFF

SEQ ID NO: 693927 - protein, 12 aa, Homo sapiens
  CDR3 for alpha chain variable domain of TCR clone 346964 (TRAV30, TRAJ43)
CGTEERGNAMRF

SEQ ID NO: 693928 - protein, 13 aa, Homo sapiens
  CDR3 for beta chain variable domain of TCR clone 346964 (TRBV27, TRBJ2-7)
CASSFSQGYEQYF

SEQ ID NO: 693929 - protein, 22 aa, Homo sapiens
  CDR3 for alpha chain variable domain of TCR clone 346965 (TRAV8-6, TRAJ6)
CAVTLGEEATYLHLEEGPALLF

SEQ ID NO: 693930 - protein, 15 aa, Homo sapiens
  CDR3 for beta chain variable domain of TCR clone 346965 (TRBV7-2, TRBJ1-1)
CASSPQGGANAEAFF

SEQ ID NO: 693931 - protein, 14 aa, Homo sapiens
  CDR3 for alpha chain variable domain of TCR clone 346966 (TRAV12-2, TRAJ40)
CAVKIPSGTYKYIF

SEQ ID NO: 693932 - protein, 16 aa, Homo sapiens
  CDR3 for beta chain variable domain of TCR clone 346966 (TRBV11-2, TRBJ2-7)
CASSLAPRGVNYEQYF

SEQ ID NO: 693933 - protein, 14 aa, Homo sapiens
  CDR3 for alpha chain variable domain of TCR clone 346967 (TRAV3, TRAJ21)
CALGRGSTNFTLDL

SEQ ID NO: 693934 - protein, 16 aa, Homo sapiens
  CDR3 for beta chain variable domain of TCR clone 346967 (TRBV7-3, TRBJ2-2)
CASSLKRGTLSGELFF

SEQ ID NO: 693935 - protein, 13 aa, Homo sapiens
  CDR3 for alpha chain variable domain of TCR clone 346968 (TRAV16, TRAJ34)
CALALYNTDKLIF

SEQ ID NO: 693936 - protein, 13 aa, Homo sapiens
  CDR3 for beta chain variable domain of TCR clone 346968 (TRBV28, TRBJ2-5)
CASSSRNQETQYF

SEQ ID NO: 693937 - protein, 12 aa, Homo sapiens
  CDR3 for alpha chain variable domain of TCR clone 346969 (TRAV13-2, TRAJ33)
CRDFWSNYQLIW

SEQ ID NO: 693938 - protein, 15 aa, Homo sapiens
  CDR3 for beta chain variable domain of TCR clone 346969 (TRBV6-1, TRBJ2-6)
CASSSRPSGANGLTF

SEQ ID NO: 693939 - protein, 10 aa, Homo sapiens
  CDR3 for alpha chain variable domain of TCR clone 346970 (TRAV38-2/DV8, TRAJ40)
CASGTYKYIF

SEQ ID NO: 693940 - protein, 13 aa, Homo sapiens
  CDR3 for beta chain variable domain of TCR clone 346970 (TRBV20-1, TRBJ1-1)
CSARGGGNTEAFF

SEQ ID NO: 693941 - protein, 12 aa, Homo sapiens
  CDR3 for alpha chain variable domain of TCR clone 346971 (TRAV2, TRAJ9)
CAVGAGGLKTIF

SEQ ID NO: 693942 - protein, 19 aa, Homo sapiens
  CDR3 for beta chain variable domain of TCR clone 346971 (TRBV7-9, TRBJ2-6)
CASSLESATVLPGANVLTF

SEQ ID NO: 693943 - protein, 15 aa, Homo sapiens
  CDR3 for alpha chain variable domain of TCR clone 346972 (TRAV8-4, TRAJ3)
CAVTGENLVQQCFQD

SEQ ID NO: 693944 - protein, 14 aa, Homo sapiens
  CDR3 for beta chain variable domain of TCR clone 346972 (TRBV2, TRBJ2-7)
CASNRDRGPYEQYF

SEQ ID NO: 693945 - protein, 15 aa, Homo sapiens
  CDR3 for alpha chain variable domain of TCR clone 346973 (TRAV26-1, TRAJ15)
CTVRAANQAGTALNF

SEQ ID NO: 693946 - protein, 15 aa, Homo sapiens
  CDR3 for beta chain variable domain of TCR clone 346973 (TRBV20-1, TRBJ1-1)
CSARSAATSNTEAFF

SEQ ID NO: 693947 - protein, 14 aa, Homo sapiens
  CDR3 for alpha chain variable domain of TCR clone 346974 (TRAV35, TRAJ33)
CAGSSQDSNCQLIW

SEQ ID NO: 693948 - protein, 16 aa, Homo sapiens
  CDR3 for beta chain variable domain of TCR clone 346974 (TRBV7-7, TRBJ2-1)
CASSLASGNSYNEQFF

SEQ ID NO: 693949 - protein, 14 aa, Homo sapiens
  CDR3 for alpha chain variable domain of TCR clone 346975 (TRAV23/DV6, TRAJ11)
CAASLESGYSTLTF

SEQ ID NO: 693950 - protein, 15 aa, Homo sapiens
  CDR3 for beta chain variable domain of TCR clone 346975 (TRBV28, TRBJ2-7)
CASSSPGIEPFEQYF

SEQ ID NO: 693951 - protein, 19 aa, Homo sapiens
  CDR3 for alpha chain variable domain of TCR clone 346976 (TRAV8-3, TRAJ8)
LSTSVLWEPMNTGFQKLVF

SEQ ID NO: 693952 - protein, 13 aa, Homo sapiens
  CDR3 for beta chain variable domain of TCR clone 346976 (TRBV10-2, TRBJ2-3)
CASSESGDHTQYF

SEQ ID NO: 693953 - protein, 14 aa, Homo sapiens
  CDR3 for alpha chain variable domain of TCR clone 346977 (TRAV8-3, TRAJ4)
CAVGASGGYTKLIF

SEQ ID NO: 693954 - protein, 16 aa, Homo sapiens
  CDR3 for beta chain variable domain of TCR clone 346977 (TRBV2, TRBJ2-1)
CASSVGGSLSYNEQFF

SEQ ID NO: 693955 - protein, 14 aa, Homo sapiens
  CDR3 for alpha chain variable domain of TCR clone 346978 (TRAV12-2, TRAJ17)
CAVLFKAAGNKLTF

SEQ ID NO: 693956 - protein, 13 aa, Homo sapiens
  CDR3 for beta chain variable domain of TCR clone 346978 (TRBV20-1, TRBJ2-5)
CSARYTGEETQYF

SEQ ID NO: 693957 - protein, 12 aa, Homo sapiens
  CDR3 for alpha chain variable domain of TCR clone 346979 (TRAV13-2, TRAJ23)
CAERHRGGKLIF

SEQ ID NO: 693958 - protein, 13 aa, Homo sapiens
  CDR3 for beta chain variable domain of TCR clone 346979 (TRBV25-1, TRBJ1-2)
CASSPAGLYGYTF

SEQ ID NO: 693959 - protein, 14 aa, Homo sapiens
  CDR3 for alpha chain variable domain of TCR clone 346980 (TRAV36/DV7, TRAJ33)
CAVLPRDSNYQLIW

SEQ ID NO: 693960 - protein, 13 aa, Homo sapiens
  CDR3 for beta chain variable domain of TCR clone 346980 (TRBV5-5, TRBJ1-2)
CASSFWRGEDYTF

SEQ ID NO: 693961 - protein, 11 aa, Homo sapiens
  CDR3 for alpha chain variable domain of TCR clone 346981 (TRAV2, TRAJ13)
CASGGYQKVTF

SEQ ID NO: 693962 - protein, 15 aa, Homo sapiens
  CDR3 for beta chain variable domain of TCR clone 346981 (TRBV7-3, TRBJ2-1)
CASSLSSGSFDEQFF

SEQ ID NO: 693963 - protein, 16 aa, Homo sapiens
  CDR3 for alpha chain variable domain of TCR clone 346982 (TRAV12-2, TRAJ18)
CAVTTDRGSTLGRLYC

SEQ ID NO: 693964 - protein, 14 aa, Homo sapiens
  CDR3 for beta chain variable domain of TCR clone 346982 (TRBV4-2, TRBJ1-5)
CASSQDSINQPQHF

SEQ ID NO: 693965 - protein, 14 aa, Homo sapiens
  CDR3 for alpha chain variable domain of TCR clone 346983 (TRAV1-2, TRAJ16)
CAVNRFSDGQKLLF

SEQ ID NO: 693966 - protein, 13 aa, Homo sapiens
  CDR3 for beta chain variable domain of TCR clone 346983 (TRBV5-7, TRBJ2-6)
CASTSSGANVLTF

SEQ ID NO: 693967 - protein, 16 aa, Homo sapiens
  CDR3 for alpha chain variable domain of TCR clone 346984 (TRAV13-1, TRAJ45)
CAAIFYSGGGADGLTF

SEQ ID NO: 693968 - protein, 17 aa, Homo sapiens
  CDR3 for beta chain variable domain of TCR clone 346984 (TRBV5-1, TRBJ2-5)
CASSPVALGQNQETQYF

SEQ ID NO: 693969 - protein, 14 aa, Homo sapiens
  CDR3 for alpha chain variable domain of TCR clone 346985 (TRAV14/DV4, TRAJ42)
CPRGSLRSQGNLIF

SEQ ID NO: 693970 - protein, 15 aa, Homo sapiens
  CDR3 for beta chain variable domain of TCR clone 346985 (TRBV7-9, TRBJ1-5)
CASSQGDQPNQPQHF

SEQ ID NO: 693971 - protein, 13 aa, Homo sapiens
  CDR3 for alpha chain variable domain of TCR clone 346986 (TRAV1-1, TRAJ38)
CASNAGNNRKLIW

SEQ ID NO: 693972 - protein, 12 aa, Homo sapiens
  CDR3 for beta chain variable domain of TCR clone 346986 (TRBV20-1, TRBJ2-7)
CSAGLKMGEQYF

SEQ ID NO: 693973 - protein, 14 aa, Homo sapiens
  CDR3 for alpha chain variable domain of TCR clone 346987 (TRAV13-2, TRAJ44)
GAEWRGGTASKLTF

SEQ ID NO: 693974 - protein, 13 aa, Homo sapiens
  CDR3 for beta chain variable domain of TCR clone 346987 (TRBV29-1, TRBJ2-1)
CSVDGGASDEQFF

SEQ ID NO: 693975 - protein, 13 aa, Homo sapiens
  CDR3 for alpha chain variable domain of TCR clone 346988 (TRAV16, TRAJ34)
CALSPYNTDKLIF

SEQ ID NO: 693976 - protein, 17 aa, Homo sapiens
  CDR3 for beta chain variable domain of TCR clone 346988 (TRBV4-1, TRBJ2-3)
CASSQGYVSGGTDTQYF

SEQ ID NO: 693977 - protein, 13 aa, Homo sapiens
  CDR3 for alpha chain variable domain of TCR clone 346989 (TRAV2, TRAJ40)
CAVVTSGTYKYIF

SEQ ID NO: 693978 - protein, 15 aa, Homo sapiens
  CDR3 for beta chain variable domain of TCR clone 346989 (TRBV18, TRBJ2-1)
CTSSPPSASYNEQFF

SEQ ID NO: 693979 - protein, 12 aa, Homo sapiens
  CDR3 for alpha chain variable domain of TCR clone 346990 (TRAV13-2, TRAJ23)
CAERHRGGKLIF

SEQ ID NO: 693980 - protein, 13 aa, Homo sapiens
  CDR3 for beta chain variable domain of TCR clone 346990 (TRBV12-4, TRBJ2-1)
CASSLAENNEQFF

SEQ ID NO: 693981 - protein, 17 aa, Homo sapiens
  CDR3 for alpha chain variable domain of TCR clone 346991 (TRAV3, TRAJ6)
CAVRDGPMAGGSYIPTF

SEQ ID NO: 693982 - protein, 18 aa, Homo sapiens
  CDR3 for beta chain variable domain of TCR clone 346991 (TRBV7-3, TRBJ2-3)
CASSSTGTYPGSTDTQYF

SEQ ID NO: 693983 - protein, 13 aa, Homo sapiens
  CDR3 for alpha chain variable domain of TCR clone 346992 (TRAV16, TRAJ22)
RQLTLVSGTQLTV

SEQ ID NO: 693984 - protein, 15 aa, Homo sapiens
  CDR3 for beta chain variable domain of TCR clone 346992 (TRBV7-9, TRBJ1-6)
CASSSPGRGNSPLHF

SEQ ID NO: 693985 - protein, 18 aa, Homo sapiens
  CDR3 for alpha chain variable domain of TCR clone 346993 (TRAV21, TRAJ52)
WAVRPSPAGGTSYGKLTF

SEQ ID NO: 693986 - protein, 17 aa, Homo sapiens
  CDR3 for beta chain variable domain of TCR clone 346993 (TRBV13, TRBJ2-3)
CASSLSRVAGGSNTQYF

SEQ ID NO: 693987 - protein, 16 aa, Homo sapiens
  CDR3 for alpha chain variable domain of TCR clone 346994 (TRAV16, TRAJ52)
CALSGVGGTSYGKLTF

SEQ ID NO: 693988 - protein, 12 aa, Homo sapiens
  CDR3 for beta chain variable domain of TCR clone 346994 (TRBV3-1, TRBJ2-1)
CASSQGSSGQFF

SEQ ID NO: 693989 - protein, 16 aa, Homo sapiens
  CDR3 for alpha chain variable domain of TCR clone 346995 (TRAV3, TRAJ18)
CAVRDGRGSTLGRLYF

SEQ ID NO: 693990 - protein, 16 aa, Homo sapiens
  CDR3 for beta chain variable domain of TCR clone 346995 (TRBV28, TRBJ1-5)
CASSFRGGYSNQPQHF

SEQ ID NO: 693991 - protein, 13 aa, Homo sapiens
  CDR3 for alpha chain variable domain of TCR clone 346996 (TRAV2, TRAJ40)
CAVVTSGTYKYIF

SEQ ID NO: 693992 - protein, 14 aa, Homo sapiens
  CDR3 for beta chain variable domain of TCR clone 346996 (TRBV2, TRBJ1-5)
CASSENRGGQPQHF

SEQ ID NO: 693993 - protein, 12 aa, Homo sapiens
  CDR3 for alpha chain variable domain of TCR clone 346997 (TRAV22, TRAJ36)
CAVGTGANNLFF

SEQ ID NO: 693994 - protein, 15 aa, Homo sapiens
  CDR3 for beta chain variable domain of TCR clone 346997 (TRBV2, TRBJ2-7)
CASSEGLARSYEQYF

SEQ ID NO: 693995 - protein, 14 aa, Homo sapiens
  CDR3 for alpha chain variable domain of TCR clone 346998 (TRAV35, TRAJ13)
CAGRSPGGYQKVTF

SEQ ID NO: 693996 - protein, 14 aa, Homo sapiens
  CDR3 for beta chain variable domain of TCR clone 346998 (TRBV19, TRBJ2-2)
CASSMVGLSAELFF

SEQ ID NO: 693997 - protein, 15 aa, Homo sapiens
  CDR3 for alpha chain variable domain of TCR clone 346999 (TRAV35, TRAJ52)
CAGPRGGTSYGKLTF

SEQ ID NO: 693998 - protein, 19 aa, Homo sapiens
  CDR3 for beta chain variable domain of TCR clone 346999 (TRBV19, TRBJ2-5)
CASSIGQVTDFFLGETQYF

SEQ ID NO: 693999 - protein, 14 aa, Homo sapiens
  CDR3 for alpha chain variable domain of TCR clone 347000 (TRAV2, TRAJ39)
CAVEGDNAGNMLTF

SEQ ID NO: 694000 - protein, 14 aa, Homo sapiens
  CDR3 for beta chain variable domain of TCR clone 347000 (TRBV28, TRBJ2-7)
CASSSRARGNEQYF

SEQ ID NO: 694001 - protein, 12 aa, Homo sapiens
  CDR3 for alpha chain variable domain of TCR clone 347001 (TRAV13-2, TRAJ8)
CAPWLGFQKLVF

SEQ ID NO: 694002 - protein, 14 aa, Homo sapiens
  CDR3 for beta chain variable domain of TCR clone 347001 (TRBV18, TRBJ1-5)
CASSRQQRNQTQHF

SEQ ID NO: 694003 - protein, 13 aa, Homo sapiens
  CDR3 for alpha chain variable domain of TCR clone 347002 (TRAV2, TRAJ40)
CDVVTSGTYTYIF

SEQ ID NO: 694004 - protein, 14 aa, Homo sapiens
  CDR3 for beta chain variable domain of TCR clone 347002 (TRBV19, TRBJ2-1)
CASPTFVLSGEQFF

SEQ ID NO: 694005 - protein, 15 aa, Homo sapiens
  CDR3 for alpha chain variable domain of TCR clone 347003 (TRAV12-3, TRAJ6)
CAVSATSGGSCIPTF

SEQ ID NO: 694006 - protein, 11 aa, Homo sapiens
  CDR3 for beta chain variable domain of TCR clone 347003 (TRBV20-1, TRBJ1-5)
CSAQGDQPQHF

SEQ ID NO: 694007 - protein, 12 aa, Homo sapiens
  CDR3 for alpha chain variable domain of TCR clone 347004 (TRAV12-3, TRAJ17)
CAMTLTGNKLTF

SEQ ID NO: 694008 - protein, 16 aa, Homo sapiens
  CDR3 for beta chain variable domain of TCR clone 347004 (TRBV20-1, TRBJ2-1)
CSARDQLAGGRGEQFF

SEQ ID NO: 694009 - protein, 13 aa, Homo sapiens
  CDR3 for alpha chain variable domain of TCR clone 347005 (TRAV3, TRAJ21)
CAVREPDFNNFYF

SEQ ID NO: 694010 - protein, 14 aa, Homo sapiens
  CDR3 for beta chain variable domain of TCR clone 347005 (TRBV2, TRBJ2-7)
CASSLTSGGYEQYF

SEQ ID NO: 694011 - protein, 13 aa, Homo sapiens
  CDR3 for alpha chain variable domain of TCR clone 347006 (TRAV12-3, TRAJ33)
CAMSVNSNYQLIW

SEQ ID NO: 694012 - protein, 13 aa, Homo sapiens
  CDR3 for beta chain variable domain of TCR clone 347006 (TRBV2, TRBJ1-1)
CTRNPTGGFHAFF

SEQ ID NO: 694013 - protein, 11 aa, Homo sapiens
  CDR3 for alpha chain variable domain of TCR clone 347007 (TRAV12-1, TRAJ43)
CVEYDNNDMRF

SEQ ID NO: 694014 - protein, 15 aa, Homo sapiens
  CDR3 for beta chain variable domain of TCR clone 347007 (TRBV5-4, TRBJ2-1)
CSSLVGSGQDNEQFF

SEQ ID NO: 694015 - protein, 13 aa, Homo sapiens
  CDR3 for alpha chain variable domain of TCR clone 347008 (TRAV36/DV7, TRAJ37)
CAVFSSNPGKLIF

SEQ ID NO: 694016 - protein, 18 aa, Homo sapiens
  CDR3 for beta chain variable domain of TCR clone 347008 (TRBV11-2, TRBJ2-3)
CASSLGGASRGAPNTQYF

SEQ ID NO: 694017 - protein, 14 aa, Homo sapiens
  CDR3 for alpha chain variable domain of TCR clone 347009 (TRAV8-2, TRAJ4)
CVVSPSGGCNKLIF

SEQ ID NO: 694018 - protein, 16 aa, Homo sapiens
  CDR3 for beta chain variable domain of TCR clone 347009 (TRBV12-5, TRBJ2-5)
CASGPRTSGNQETQYF

SEQ ID NO: 694019 - protein, 12 aa, Homo sapiens
  CDR3 for alpha chain variable domain of TCR clone 347010 (TRAV26-1, TRAJ43)
CIDRPRGDDMRF

SEQ ID NO: 694020 - protein, 16 aa, Homo sapiens
  CDR3 for beta chain variable domain of TCR clone 347010 (TRBV3-1, TRBJ2-1)
CASSQGGRRSFDEQFF

SEQ ID NO: 694021 - protein, 13 aa, Homo sapiens
  CDR3 for alpha chain variable domain of TCR clone 347011 (TRAV13-2, TRAJ13)
CAERPGGYQKVTF

SEQ ID NO: 694022 - protein, 16 aa, Homo sapiens
  CDR3 for beta chain variable domain of TCR clone 347011 (TRBV7-2, TRBJ2-5)
CASSSKWLSGQETQYF

SEQ ID NO: 694023 - protein, 17 aa, Homo sapiens
  CDR3 for alpha chain variable domain of TCR clone 347012 (TRAV3, TRAJ6)
CAVRDGPRAGGSYKPKF

SEQ ID NO: 694024 - protein, 14 aa, Homo sapiens
  CDR3 for beta chain variable domain of TCR clone 347012 (TRBV7-2, TRBJ2-7)
CASSPKTSFYEQYF

SEQ ID NO: 694025 - protein, 13 aa, Homo sapiens
  CDR3 for alpha chain variable domain of TCR clone 347013 (TRAV8-3, TRAJ36)
CAVGATGANNLFF

SEQ ID NO: 694026 - protein, 13 aa, Homo sapiens
  CDR3 for beta chain variable domain of TCR clone 347013 (TRBV6-1, TRBJ2-5)
CQQPTGPQETQYF

SEQ ID NO: 694027 - protein, 12 aa, Homo sapiens
  CDR3 for alpha chain variable domain of TCR clone 347014 (TRAV1-1, TRAJ30)
CAVRGRDDKIIF

SEQ ID NO: 694028 - protein, 18 aa, Homo sapiens
  CDR3 for beta chain variable domain of TCR clone 347014 (TRBV5-1, TRBJ2-7)
CASSSTGGASGYSYEQYF

SEQ ID NO: 694029 - protein, 13 aa, Homo sapiens
  CDR3 for alpha chain variable domain of TCR clone 347015 (TRAV1-2, TRAJ12)
CAVSMDSSYKLIF

SEQ ID NO: 694030 - protein, 15 aa, Homo sapiens
  CDR3 for beta chain variable domain of TCR clone 347015 (TRBV27, TRBJ2-5)
CASSLIPFGGETQYF

SEQ ID NO: 694031 - protein, 17 aa, Homo sapiens
  CDR3 for alpha chain variable domain of TCR clone 347016 (TRAV3, TRAJ42)
CAVRDRDYGGSQGNLIF

SEQ ID NO: 694032 - protein, 13 aa, Homo sapiens
  CDR3 for beta chain variable domain of TCR clone 347016 (TRBV12-4, TRBJ2-7)
CASSFVPTAEQYF

SEQ ID NO: 694033 - protein, 14 aa, Homo sapiens
  CDR3 for alpha chain variable domain of TCR clone 347017 (TRAV12-2, TRAJ13)
FAVKKTGGYQKVTF

SEQ ID NO: 694034 - protein, 14 aa, Homo sapiens
  CDR3 for beta chain variable domain of TCR clone 347017 (TRBV7-2, TRBJ2-7)
CASSPKTSFYEQYF

SEQ ID NO: 694035 - protein, 13 aa, Homo sapiens
  CDR3 for alpha chain variable domain of TCR clone 347018 (TRAV12-3, TRAJ33)
CAMSVNSHYQFIW

SEQ ID NO: 694036 - protein, 13 aa, Homo sapiens
  CDR3 for beta chain variable domain of TCR clone 347018 (TRBV7-2, TRBJ2-2)
CASSLAVTGELFF

SEQ ID NO: 694037 - protein, 13 aa, Homo sapiens
  CDR3 for alpha chain variable domain of TCR clone 347019 (TRAV26-1, TRAJ33)
CIVRVEGNYQLIW

SEQ ID NO: 694038 - protein, 16 aa, Homo sapiens
  CDR3 for beta chain variable domain of TCR clone 347019 (TRBV15, TRBJ2-7)
CAASRDRGRRRGEQYF

SEQ ID NO: 694039 - protein, 13 aa, Homo sapiens
  CDR3 for alpha chain variable domain of TCR clone 347020 (TRAV26-1, TRAJ36)
CIAVRRGAHNLFF

SEQ ID NO: 694040 - protein, 19 aa, Homo sapiens
  CDR3 for beta chain variable domain of TCR clone 347020 (TRBV27, TRBJ2-1)
CASSLEILSPGAAGNEQFF

SEQ ID NO: 694041 - protein, 12 aa, Homo sapiens
  CDR3 for alpha chain variable domain of TCR clone 347021 (TRAV13-2, TRAJ23)
CAERHRGGKLIF

SEQ ID NO: 694042 - protein, 18 aa, Homo sapiens
  CDR3 for beta chain variable domain of TCR clone 347021 (TRBV11-2, TRBJ2-7)
CASSWRTVQTGQSYEQYF

SEQ ID NO: 694043 - protein, 14 aa, Homo sapiens
  CDR3 for alpha chain variable domain of TCR clone 347022 (TRAV12-3, TRAJ54)
CAMRGIQGAQKLEF

SEQ ID NO: 694044 - protein, 15 aa, Homo sapiens
  CDR3 for beta chain variable domain of TCR clone 347022 (TRBV11-2, TRBJ2-5)
CASSPRSGGLETQYF

SEQ ID NO: 694045 - protein, 14 aa, Homo sapiens
  CDR3 for alpha chain variable domain of TCR clone 347023 (TRAV16, TRAJ17)
CAPRIKAAGNKLTF

SEQ ID NO: 694046 - protein, 11 aa, Homo sapiens
  CDR3 for beta chain variable domain of TCR clone 347023 (TRBV7-8, TRBJ2-7)
CASSLSLEQYF

SEQ ID NO: 694047 - protein, 14 aa, Homo sapiens
  CDR3 for alpha chain variable domain of TCR clone 347024 (TRAV1-2, TRAJ24)
CAVLTTDSWGKFQF

SEQ ID NO: 694048 - protein, 21 aa, Homo sapiens
  CDR3 for beta chain variable domain of TCR clone 347024 (TRBV6-5, TRBJ1-3)
CASSYWEKIAQCMSSGNTIYF

SEQ ID NO: 694049 - protein, 12 aa, Homo sapiens
  CDR3 for alpha chain variable domain of TCR clone 347025 (TRAV26-1, TRAJ35)
CIGLSFGNVLHC

SEQ ID NO: 694050 - protein, 15 aa, Homo sapiens
  CDR3 for beta chain variable domain of TCR clone 347025 (TRBV11-3, TRBJ2-2)
CASSLVGTGAGELFF

SEQ ID NO: 694051 - protein, 11 aa, Homo sapiens
  CDR3 for alpha chain variable domain of TCR clone 347026 (TRAV23/DV6, TRAJ58)
CAARLLRGETS

SEQ ID NO: 694052 - protein, 14 aa, Homo sapiens
  CDR3 for beta chain variable domain of TCR clone 347026 (TRBV7-2, TRBJ2-5)
CASSPRGSSETQYF

SEQ ID NO: 694053 - protein, 16 aa, Homo sapiens
  CDR3 for alpha chain variable domain of TCR clone 347027 (TRAV26-1, TRAJ31)
CIVRPPVLNNNARPMF

SEQ ID NO: 694054 - protein, 16 aa, Homo sapiens
  CDR3 for beta chain variable domain of TCR clone 347027 (TRBV12-5, TRBJ2-5)
CASGPRTSGNQETQYF

SEQ ID NO: 694055 - protein, 12 aa, Homo sapiens
  CDR3 for alpha chain variable domain of TCR clone 347028 (TRAV22, TRAJ22)
CAPGGSARQPTF

SEQ ID NO: 694056 - protein, 13 aa, Homo sapiens
  CDR3 for beta chain variable domain of TCR clone 347028 (TRBV15, TRBJ1-6)
CATSGGLNSPLHF

SEQ ID NO: 694057 - protein, 11 aa, Homo sapiens
  CDR3 for alpha chain variable domain of TCR clone 347029 (TRAV13-1, TRAJ6)
CATLGSYIPTF

SEQ ID NO: 694058 - protein, 12 aa, Homo sapiens
  CDR3 for beta chain variable domain of TCR clone 347029 (TRBV11-2, TRBJ2-1)
CASSPGNNEQFS

SEQ ID NO: 694059 - protein, 17 aa, Homo sapiens
  CDR3 for alpha chain variable domain of TCR clone 347030 (TRAV3, TRAJ42)
CAVRDRDYGGSQGNLIF

SEQ ID NO: 694060 - protein, 20 aa, Homo sapiens
  CDR3 for beta chain variable domain of TCR clone 347030 (TRBV6-4, TRBJ2-7)
CASSDSSVSGQVPTSYEQYF

SEQ ID NO: 694061 - protein, 18 aa, Homo sapiens
  CDR3 for alpha chain variable domain of TCR clone 347031 (TRAV21, TRAJ52)
WAVMPSPAGGTRYGKLTF

SEQ ID NO: 694062 - protein, 14 aa, Homo sapiens
  CDR3 for beta chain variable domain of TCR clone 347031 (TRBV4-1, TRBJ2-2)
CASSQAVNTGELFF

SEQ ID NO: 694063 - protein, 15 aa, Homo sapiens
  CDR3 for alpha chain variable domain of TCR clone 347032 (TRAV3, TRAJ3)
CAVRDRDSSASKIIF

SEQ ID NO: 694064 - protein, 15 aa, Homo sapiens
  CDR3 for beta chain variable domain of TCR clone 347032 (TRBV18, TRBJ2-1)
CASSPPSASYNEQFF

SEQ ID NO: 694065 - protein, 13 aa, Homo sapiens
  CDR3 for alpha chain variable domain of TCR clone 347033 (TRAV17, TRAJ7)
CATDNYGNNRLAF

SEQ ID NO: 694066 - protein, 15 aa, Homo sapiens
  CDR3 for beta chain variable domain of TCR clone 347033 (TRBV4-1, TRBJ2-5)
RQQPSNRGLIGHQYF

SEQ ID NO: 694067 - protein, 14 aa, Homo sapiens
  CDR3 for alpha chain variable domain of TCR clone 347034 (TRAV13-1, TRAJ44)
CAAKATGTASKLTF

SEQ ID NO: 694068 - protein, 16 aa, Homo sapiens
  CDR3 for beta chain variable domain of TCR clone 347034 (TRBV18, TRBJ2-2)
CASSRAGPTNTGELFF

SEQ ID NO: 694069 - protein, 11 aa, Homo sapiens
  CDR3 for alpha chain variable domain of TCR clone 347035 (TRAV12-3, TRAJ43)
CAMSVPNDMRF

SEQ ID NO: 694070 - protein, 16 aa, Homo sapiens
  CDR3 for beta chain variable domain of TCR clone 347035 (TRBV2, TRBJ2-3)
CASSTSVEGVTDTQYF

SEQ ID NO: 694071 - protein, 10 aa, Homo sapiens
  CDR3 for alpha chain variable domain of TCR clone 347036 (TRAV2, TRAJ34)
CAVVNDKLIV

SEQ ID NO: 694072 - protein, 15 aa, Homo sapiens
  CDR3 for beta chain variable domain of TCR clone 347036 (TRBV3-1, TRBJ2-2)
CASSQDWTRAGELFF

SEQ ID NO: 694073 - protein, 15 aa, Homo sapiens
  CDR3 for alpha chain variable domain of TCR clone 347037 (TRAV4, TRAJ39)
CHVGPNNNAGNMLTF

SEQ ID NO: 694074 - protein, 16 aa, Homo sapiens
  CDR3 for beta chain variable domain of TCR clone 347037 (TRBV13, TRBJ2-2)
CASSPRTGEHTGELFF

SEQ ID NO: 694075 - protein, 14 aa, Homo sapiens
  CDR3 for alpha chain variable domain of TCR clone 347038 (TRAV8-3, TRAJ39)
CAVGANNAGNMLTF

SEQ ID NO: 694076 - protein, 16 aa, Homo sapiens
  CDR3 for beta chain variable domain of TCR clone 347038 (TRBV6-1, TRBJ2-5)
CASSETLDRGADTQYF

SEQ ID NO: 694077 - protein, 15 aa, Homo sapiens
  CDR3 for alpha chain variable domain of TCR clone 347039 (TRAV3, TRAJ47)
CAVRDIGEYGTKLVF

SEQ ID NO: 694078 - protein, 13 aa, Homo sapiens
  CDR3 for beta chain variable domain of TCR clone 347039 (TRBV4-2, TRBJ2-3)
CASSLTSTDTQYF

SEQ ID NO: 694079 - protein, 14 aa, Homo sapiens
  CDR3 for alpha chain variable domain of TCR clone 347040 (TRAV1-2, TRAJ6)
CAVRLSGGGYIPTF

SEQ ID NO: 694080 - protein, 15 aa, Homo sapiens
  CDR3 for beta chain variable domain of TCR clone 347040 (TRBV28, TRBJ2-7)
CASSPGGRGFYEQYF

SEQ ID NO: 694081 - protein, 18 aa, Homo sapiens
  CDR3 for alpha chain variable domain of TCR clone 347041 (TRAV26-1, TRAJ42)
CTIHRQTYYGGSQGNLIF

SEQ ID NO: 694082 - protein, 16 aa, Homo sapiens
  CDR3 for beta chain variable domain of TCR clone 347041 (TRBV7-3, TRBJ2-2)
CASSLKRGTLSGELFF

SEQ ID NO: 694083 - protein, 12 aa, Homo sapiens
  CDR3 for alpha chain variable domain of TCR clone 347042 (TRAV26-1, TRAJ48)
CIAVFGNEKLTF

SEQ ID NO: 694084 - protein, 14 aa, Homo sapiens
  CDR3 for beta chain variable domain of TCR clone 347042 (TRBV19, TRBJ2-1)
CASPTFVLSGEQFF

SEQ ID NO: 694085 - protein, 12 aa, Homo sapiens
  CDR3 for alpha chain variable domain of TCR clone 347043 (TRAV17, TRAJ20)
CATLANDYKLSF

SEQ ID NO: 694086 - protein, 16 aa, Homo sapiens
  CDR3 for beta chain variable domain of TCR clone 347043 (TRBV7-2, TRBJ1-6)
CASSLAPGSLNSPLHF

SEQ ID NO: 694087 - protein, 15 aa, Homo sapiens
  CDR3 for alpha chain variable domain of TCR clone 347044 (TRAV2, TRAJ11)
YAVEDPNSGYSTLTF

SEQ ID NO: 694088 - protein, 15 aa, Homo sapiens
  CDR3 for beta chain variable domain of TCR clone 347044 (TRBV20-1, TRBJ2-7)
CSARDRVSGMDEQYF

SEQ ID NO: 694089 - protein, 15 aa, Homo sapiens
  CDR3 for alpha chain variable domain of TCR clone 347045 (TRAV12-1, TRAJ44)
CVVDTPQGTASKLTF

SEQ ID NO: 694090 - protein, 13 aa, Homo sapiens
  CDR3 for beta chain variable domain of TCR clone 347045 (TRBV10-3, TRBJ2-7)
CASKLAVNYEQYF

SEQ ID NO: 694091 - protein, 15 aa, Homo sapiens
  CDR3 for alpha chain variable domain of TCR clone 347046 (TRAV4, TRAJ8)
CLVGEQHKGFQKLVF

SEQ ID NO: 694092 - protein, 15 aa, Homo sapiens
  CDR3 for beta chain variable domain of TCR clone 347046 (TRBV7-9, TRBJ2-5)
CASSNRDYLQETQYF

SEQ ID NO: 694093 - protein, 15 aa, Homo sapiens
  CDR3 for alpha chain variable domain of TCR clone 347047 (TRAV8-4, TRAJ7)
CAVSGGNYGNNRLAF

SEQ ID NO: 694094 - protein, 17 aa, Homo sapiens
  CDR3 for beta chain variable domain of TCR clone 347047 (TRBV20-1, TRBJ2-1)
CSASSSGLAGSYNEQFF

SEQ ID NO: 694095 - protein, 14 aa, Homo sapiens
  CDR3 for alpha chain variable domain of TCR clone 347048 (TRAV21, TRAJ35)
CAVMPIGFGNVLHC

SEQ ID NO: 694096 - protein, 13 aa, Homo sapiens
  CDR3 for beta chain variable domain of TCR clone 347048 (TRBV7-3, TRBJ2-5)
CASSFRGGETQYF

SEQ ID NO: 694097 - protein, 11 aa, Homo sapiens
  CDR3 for alpha chain variable domain of TCR clone 347049 (TRAV8-3, TRAJ15)
CSVGPGTALIF

SEQ ID NO: 694098 - protein, 15 aa, Homo sapiens
  CDR3 for beta chain variable domain of TCR clone 347049 (TRBV7-9, TRBJ2-7)
CASSLALAEAYEQYF

SEQ ID NO: 694099 - protein, 16 aa, Homo sapiens
  CDR3 for alpha chain variable domain of TCR clone 347050 (TRAV8-3, TRAJ13)
CAVGAYPSGGYQKVTF

SEQ ID NO: 694100 - protein, 13 aa, Homo sapiens
  CDR3 for beta chain variable domain of TCR clone 347050 (TRBV19, TRBJ1-5)
CASSMRGYQPQHF

SEQ ID NO: 694101 - protein, 12 aa, Homo sapiens
  CDR3 for alpha chain variable domain of TCR clone 347051 (TRAV21, TRAJ33)
CAKMDSNYQLIW

SEQ ID NO: 694102 - protein, 14 aa, Homo sapiens
  CDR3 for beta chain variable domain of TCR clone 347051 (TRBV2, TRBJ2-7)
CASSLTSGGYEQYY

SEQ ID NO: 694103 - protein, 16 aa, Homo sapiens
  CDR3 for alpha chain variable domain of TCR clone 347052 (TRAV3, TRAJ37)
CAVRPHGSGNTGKLIF

SEQ ID NO: 694104 - protein, 13 aa, Homo sapiens
  CDR3 for beta chain variable domain of TCR clone 347052 (TRBV29-1, TRBJ2-2)
CSTTGVNTGELFF

SEQ ID NO: 694105 - protein, 13 aa, Homo sapiens
  CDR3 for alpha chain variable domain of TCR clone 347053 (TRAV3, TRAJ21)
CAVREPDFNKFYF

SEQ ID NO: 694106 - protein, 16 aa, Homo sapiens
  CDR3 for beta chain variable domain of TCR clone 347053 (TRBV19, TRBJ2-1)
CAISKAGPSSYNEQFF

SEQ ID NO: 694107 - protein, 15 aa, Homo sapiens
  CDR3 for alpha chain variable domain of TCR clone 347054 (TRAV12-1, TRAJ44)
CVADLPTGTASKLTF

SEQ ID NO: 694108 - protein, 17 aa, Homo sapiens
  CDR3 for beta chain variable domain of TCR clone 347054 (TRBV20-1, TRBJ2-1)
CSAPPRLAGTRYNEQFF

SEQ ID NO: 694109 - protein, 14 aa, Homo sapiens
  CDR3 for alpha chain variable domain of TCR clone 347055 (TRAV17, TRAJ57)
CATDPQGGSEKLVF

SEQ ID NO: 694110 - protein, 16 aa, Homo sapiens
  CDR3 for beta chain variable domain of TCR clone 347055 (TRBV20-1, TRBJ1-4)
CSAPGQCLLTNEKLFF

SEQ ID NO: 694111 - protein, 13 aa, Homo sapiens
  CDR3 for alpha chain variable domain of TCR clone 347056 (TRAV12-3, TRAJ9)
CAMRNTGGFKTIF

SEQ ID NO: 694112 - protein, 14 aa, Homo sapiens
  CDR3 for beta chain variable domain of TCR clone 347056 (TRBV11-2, TRBJ2-7)
CASSSKGEGYEQYF

SEQ ID NO: 694113 - protein, 12 aa, Homo sapiens
  CDR3 for alpha chain variable domain of TCR clone 347057 (TRAV12-2, TRAJ10)
WVVTGGGNKLTF

SEQ ID NO: 694114 - protein, 16 aa, Homo sapiens
  CDR3 for beta chain variable domain of TCR clone 347057 (TRBV6-4, TRBJ1-2)
CASSEAVGDPNYGYTF

SEQ ID NO: 694115 - protein, 14 aa, Homo sapiens
  CDR3 for alpha chain variable domain of TCR clone 347058 (TRAV8-4, TRAJ39)
CAVSEGNAGNMLTF

SEQ ID NO: 694116 - protein, 17 aa, Homo sapiens
  CDR3 for beta chain variable domain of TCR clone 347058 (TRBV7-6, TRBJ2-5)
CASSPGLADPWGETQFF

SEQ ID NO: 694117 - protein, 13 aa, Homo sapiens
  CDR3 for alpha chain variable domain of TCR clone 347059 (TRAV21, TRAJ37)
CAVSSGNTGKLIL

SEQ ID NO: 694118 - protein, 17 aa, Homo sapiens
  CDR3 for beta chain variable domain of TCR clone 347059 (TRBV5-1, TRBJ2-5)
CASSLLGLAANQETQYF

SEQ ID NO: 694119 - protein, 12 aa, Homo sapiens
  CDR3 for alpha chain variable domain of TCR clone 347060 (TRAV12-3, TRAJ17)
CAMTLTGNKLTF

SEQ ID NO: 694120 - protein, 16 aa, Homo sapiens
  CDR3 for beta chain variable domain of TCR clone 347060 (TRBV12-4, TRBJ2-5)
CASSVFVRGRQETQYF

SEQ ID NO: 694121 - protein, 11 aa, Homo sapiens
  CDR3 for alpha chain variable domain of TCR clone 347061 (TRAV16, TRAJ49)
CALRSGNQVYF

SEQ ID NO: 694122 - protein, 16 aa, Homo sapiens
  CDR3 for beta chain variable domain of TCR clone 347061 (TRBV20-1, TRBJ1-5)
CSARDVGGGWIQPQHF

SEQ ID NO: 694123 - protein, 15 aa, Homo sapiens
  CDR3 for alpha chain variable domain of TCR clone 347062 (TRAV13-1, TRAJ44)
CAASRGGGTASKLTF

SEQ ID NO: 694124 - protein, 14 aa, Homo sapiens
  CDR3 for beta chain variable domain of TCR clone 347062 (TRBV25-1, TRBJ1-1)
CASTHLGGNTEAFF

SEQ ID NO: 694125 - protein, 14 aa, Homo sapiens
  CDR3 for alpha chain variable domain of TCR clone 347063 (TRAV38-1, TRAJ45)
CASRSGGGADGLTF

SEQ ID NO: 694126 - protein, 12 aa, Homo sapiens
  CDR3 for beta chain variable domain of TCR clone 347063 (TRBV11-2, TRBJ2-2)
CASSLPTGELFF

SEQ ID NO: 694127 - protein, 14 aa, Homo sapiens
  CDR3 for alpha chain variable domain of TCR clone 347064 (TRAV1-2, TRAJ16)
CAVNRFSDGQKLLF

SEQ ID NO: 694128 - protein, 14 aa, Homo sapiens
  CDR3 for beta chain variable domain of TCR clone 347064 (TRBV28, TRBJ2-5)
CASSLGDRAETQYF

SEQ ID NO: 694129 - protein, 15 aa, Homo sapiens
  CDR3 for alpha chain variable domain of TCR clone 347065 (TRAV8-3, TRAJ20)
CAVEAKGSNDYNLSF

SEQ ID NO: 694130 - protein, 15 aa, Homo sapiens
  CDR3 for beta chain variable domain of TCR clone 347065 (TRBV6-3, TRBJ2-2)
CASSFLATLTGELFF

SEQ ID NO: 694131 - protein, 10 aa, Homo sapiens
  CDR3 for alpha chain variable domain of TCR clone 347066 (TRAV26-1, TRAJ22)
CIVSLNFFWF

SEQ ID NO: 694132 - protein, 17 aa, Homo sapiens
  CDR3 for beta chain variable domain of TCR clone 347066 (TRBV5-1, TRBJ1-1)
CASSFMTGGKRDTEAFF

SEQ ID NO: 694133 - protein, 17 aa, Homo sapiens
  CDR3 for alpha chain variable domain of TCR clone 347067 (TRAV3, TRAJ6)
CAVRDGPRAGGSYIPTF

SEQ ID NO: 694134 - protein, 18 aa, Homo sapiens
  CDR3 for beta chain variable domain of TCR clone 347067 (TRBV25-1, TRBJ1-2)
CASSGLQNGQGLIFGYSF

SEQ ID NO: 694135 - protein, 14 aa, Homo sapiens
  CDR3 for alpha chain variable domain of TCR clone 347068 (TRAV13-1, TRAJ17)
LSSRSKAAGNKLTF

SEQ ID NO: 694136 - protein, 14 aa, Homo sapiens
  CDR3 for beta chain variable domain of TCR clone 347068 (TRBV7-9, TRBJ2-1)
CASSSMAGFGEQFF

SEQ ID NO: 694137 - protein, 10 aa, Homo sapiens
  CDR3 for alpha chain variable domain of TCR clone 347069 (TRAV20, TRAJ22)
YAAPARQLTF

SEQ ID NO: 694138 - protein, 14 aa, Homo sapiens
  CDR3 for beta chain variable domain of TCR clone 347069 (TRBV19, TRBJ2-1)
CASSMGSGATEQFF

SEQ ID NO: 694139 - protein, 15 aa, Homo sapiens
  CDR3 for alpha chain variable domain of TCR clone 347070 (TRAV3, TRAJ4)
CAVRDGTGGYIKLIF

SEQ ID NO: 694140 - protein, 13 aa, Homo sapiens
  CDR3 for beta chain variable domain of TCR clone 347070 (TRBV10-3, TRBJ2-7)
CASKLAVNYEQYF

SEQ ID NO: 694141 - protein, 13 aa, Homo sapiens
  CDR3 for alpha chain variable domain of TCR clone 347071 (TRAV21, TRAJ49)
CAVRQSTGNQFYF

SEQ ID NO: 694142 - protein, 16 aa, Homo sapiens
  CDR3 for beta chain variable domain of TCR clone 347071 (TRBV12-4, TRBJ1-5)
CASSSGPRGSNQPQHF

SEQ ID NO: 694143 - protein, 13 aa, Homo sapiens
  CDR3 for alpha chain variable domain of TCR clone 347072 (TRAV12-1, TRAJ33)
CGDAPDSNYQLIW

SEQ ID NO: 694144 - protein, 15 aa, Homo sapiens
  CDR3 for beta chain variable domain of TCR clone 347072 (TRBV27, TRBJ2-1)
CACSNGGGSSNEQFF

SEQ ID NO: 694145 - protein, 15 aa, Homo sapiens
  CDR3 for alpha chain variable domain of TCR clone 347073 (TRAV38-2/DV8, TRAJ28)
CAYRSRGAGSYQLTF

SEQ ID NO: 694146 - protein, 16 aa, Homo sapiens
  CDR3 for beta chain variable domain of TCR clone 347073 (TRBV2, TRBJ2-3)
CASSTSVEGVTDTQYF

SEQ ID NO: 694147 - protein, 14 aa, Homo sapiens
  CDR3 for alpha chain variable domain of TCR clone 347074 (TRAV23/DV6, TRAJ57)
CAAALKGGSEKLVF

SEQ ID NO: 694148 - protein, 14 aa, Homo sapiens
  CDR3 for beta chain variable domain of TCR clone 347074 (TRBV7-2, TRBJ2-1)
CASSLSGVYNEQFF

SEQ ID NO: 694149 - protein, 11 aa, Homo sapiens
  CDR3 for alpha chain variable domain of TCR clone 347075 (TRAV12-2, TRAJ33)
CAVGSNYQLIW

SEQ ID NO: 694150 - protein, 14 aa, Homo sapiens
  CDR3 for beta chain variable domain of TCR clone 347075 (TRBV19, TRBJ2-2)
CASSTGQGAGELFF

SEQ ID NO: 694151 - protein, 16 aa, Homo sapiens
  CDR3 for alpha chain variable domain of TCR clone 347076 (TRAV3, TRAJ21)
CAVRDIERGNFNKFYS

SEQ ID NO: 694152 - protein, 13 aa, Homo sapiens
  CDR3 for beta chain variable domain of TCR clone 347076 (TRBV27, TRBJ2-7)
CASSLTTGYEQYF

SEQ ID NO: 694153 - protein, 13 aa, Homo sapiens
  CDR3 for alpha chain variable domain of TCR clone 347077 (TRAV12-3, TRAJ48)
CALPQSGNEKLTF

SEQ ID NO: 694154 - protein, 12 aa, Homo sapiens
  CDR3 for beta chain variable domain of TCR clone 347077 (TRBV20-1, TRBJ1-5)
CSARAPDQPQHF

SEQ ID NO: 694155 - protein, 20 aa, Homo sapiens
  CDR3 for alpha chain variable domain of TCR clone 347078 (TRAV1-1, TRAJ4)
CLLLLRCEGFLSGGYNKLIF

SEQ ID NO: 694156 - protein, 16 aa, Homo sapiens
  CDR3 for beta chain variable domain of TCR clone 347078 (TRBV28, TRBJ1-4)
CASSTPYRGRSETLFF

SEQ ID NO: 694157 - protein, 11 aa, Homo sapiens
  CDR3 for alpha chain variable domain of TCR clone 347079 (TRAV39, TRAJ49)
CDVDISTQFYF

SEQ ID NO: 694158 - protein, 11 aa, Homo sapiens
  CDR3 for beta chain variable domain of TCR clone 347079 (TRBV7-8, TRBJ2-7)
CASSLSLEQYF

SEQ ID NO: 694159 - protein, 14 aa, Homo sapiens
  CDR3 for alpha chain variable domain of TCR clone 347080 (TRAV1-2, TRAJ8)
CAVREDTGFQKLVF

SEQ ID NO: 694160 - protein, 17 aa, Homo sapiens
  CDR3 for beta chain variable domain of TCR clone 347080 (TRBV28, TRBJ2-4)
CAAGSGHSLWAFSTSAP

SEQ ID NO: 694161 - protein, 16 aa, Homo sapiens
  CDR3 for alpha chain variable domain of TCR clone 347081 (TRAV12-3, TRAJ53)
CAMRVGSGGSNYKLTF

SEQ ID NO: 694162 - protein, 13 aa, Homo sapiens
  CDR3 for beta chain variable domain of TCR clone 347081 (TRBV7-6, TRBJ1-2)
CASSLVADYGYTF

SEQ ID NO: 694163 - protein, 16 aa, Homo sapiens
  CDR3 for alpha chain variable domain of TCR clone 347082 (TRAV30, TRAJ24)
CGTEIVDADSWGKFQL

SEQ ID NO: 694164 - protein, 15 aa, Homo sapiens
  CDR3 for beta chain variable domain of TCR clone 347082 (TRBV12-4, TRBJ2-7)
CASSQRTSGNYEQYF

SEQ ID NO: 694165 - protein, 14 aa, Homo sapiens
  CDR3 for alpha chain variable domain of TCR clone 347083 (TRAV26-1, TRAJ26)
CIGRATFLGQNFVF

SEQ ID NO: 694166 - protein, 14 aa, Homo sapiens
  CDR3 for beta chain variable domain of TCR clone 347083 (TRBV5-6, TRBJ1-1)
CASSLAGDWTEAFF

SEQ ID NO: 694167 - protein, 15 aa, Homo sapiens
  CDR3 for alpha chain variable domain of TCR clone 347084 (TRAV3, TRAJ20)
CAVRDIKLSDYKLSF

SEQ ID NO: 694168 - protein, 15 aa, Homo sapiens
  CDR3 for beta chain variable domain of TCR clone 347084 (TRBV20-1, TRBJ2-7)
CSARDLVSGMDEQYF

SEQ ID NO: 694169 - protein, 13 aa, Homo sapiens
  CDR3 for alpha chain variable domain of TCR clone 347085 (TRAV30, TRAJ49)
CGTEPNTGNQFYF

SEQ ID NO: 694170 - protein, 14 aa, Homo sapiens
  CDR3 for beta chain variable domain of TCR clone 347085 (TRBV29-1, TRBJ2-1)
CSDEFRGIPFEQFF

SEQ ID NO: 694171 - protein, 10 aa, Homo sapiens
  CDR3 for alpha chain variable domain of TCR clone 347086 (TRAV23/DV6, TRAJ57)
CAASSTLSQG

SEQ ID NO: 694172 - protein, 14 aa, Homo sapiens
  CDR3 for beta chain variable domain of TCR clone 347086 (TRBV2, TRBJ1-2)
CASNPDRDNYGYTF

SEQ ID NO: 694173 - protein, 13 aa, Homo sapiens
  CDR3 for alpha chain variable domain of TCR clone 347087 (TRAV13-1, TRAJ37)
CAAVSGNTGKLIF

SEQ ID NO: 694174 - protein, 13 aa, Homo sapiens
  CDR3 for beta chain variable domain of TCR clone 347087 (TRBV7-9, TRBJ1-2)
CASSLKQNYGDTF

SEQ ID NO: 694175 - protein, 11 aa, Homo sapiens
  CDR3 for alpha chain variable domain of TCR clone 347088 (TRAV21, TRAJ56)
GYTGANSKLTF

SEQ ID NO: 694176 - protein, 14 aa, Homo sapiens
  CDR3 for beta chain variable domain of TCR clone 347088 (TRBV19, TRBJ2-1)
CASEVTGARNEQFF

SEQ ID NO: 694177 - protein, 12 aa, Homo sapiens
  CDR3 for alpha chain variable domain of TCR clone 347089 (TRAV1-2, TRAJ42)
CVAGGSQGNLIF

SEQ ID NO: 694178 - protein, 12 aa, Homo sapiens
  CDR3 for beta chain variable domain of TCR clone 347089 (TRBV24-1, TRBJ1-1)
CATSDADRGAFF

SEQ ID NO: 694179 - protein, 17 aa, Homo sapiens
  CDR3 for alpha chain variable domain of TCR clone 347090 (TRAV13-1, TRAJ28)
CAASPPYSGAGSYQLTF

SEQ ID NO: 694180 - protein, 14 aa, Homo sapiens
  CDR3 for beta chain variable domain of TCR clone 347090 (TRBV12-4, TRBJ2-7)
CASTFGLSTYEQYF

SEQ ID NO: 694181 - protein, 15 aa, Homo sapiens
  CDR3 for alpha chain variable domain of TCR clone 347091 (TRAV25, TRAJ53)
CAATGGGGSNYKLTF

SEQ ID NO: 694182 - protein, 19 aa, Homo sapiens
  CDR3 for beta chain variable domain of TCR clone 347091 (TRBV7-2, TRBJ2-3)
CASSFLSRNWGGSTDTQYF

SEQ ID NO: 694183 - protein, 12 aa, Homo sapiens
  CDR3 for alpha chain variable domain of TCR clone 347092 (TRAV16, TRAJ22)
CALEVSARQLTF

SEQ ID NO: 694184 - protein, 14 aa, Homo sapiens
  CDR3 for beta chain variable domain of TCR clone 347092 (TRBV11-2, TRBJ2-3)
CASSSIASTDTQYC

SEQ ID NO: 694185 - protein, 12 aa, Homo sapiens
  CDR3 for alpha chain variable domain of TCR clone 347093 (TRAV3, TRAJ4)
CAVSGGYNKLIF

SEQ ID NO: 694186 - protein, 15 aa, Homo sapiens
  CDR3 for beta chain variable domain of TCR clone 347093 (TRBV20-1, TRBJ1-1)
CSASRGVTGNTEAFF

SEQ ID NO: 694187 - protein, 15 aa, Homo sapiens
  CDR3 for alpha chain variable domain of TCR clone 347094 (TRAV12-3, TRAJ49)
CAMAVTPNTGNSFYF

SEQ ID NO: 694188 - protein, 18 aa, Homo sapiens
  CDR3 for beta chain variable domain of TCR clone 347094 (TRBV4-1, TRBJ1-5)
CASSQDPRGQGLNQPQHF

SEQ ID NO: 694189 - protein, 14 aa, Homo sapiens
  CDR3 for alpha chain variable domain of TCR clone 347095 (TRAV17, TRAJ22)
CATSPSGSARQLTF

SEQ ID NO: 694190 - protein, 17 aa, Homo sapiens
  CDR3 for beta chain variable domain of TCR clone 347095 (TRBV28, TRBJ2-5)
CASSRQGGLAGAETQYF

SEQ ID NO: 694191 - protein, 12 aa, Homo sapiens
  CDR3 for alpha chain variable domain of TCR clone 347096 (TRAV8-6, TRAJ11)
CAVSSGYSTLTF

SEQ ID NO: 694192 - protein, 15 aa, Homo sapiens
  CDR3 for beta chain variable domain of TCR clone 347096 (TRBV29-1, TRBJ2-7)
CSVEFFDRGSYEQYF

SEQ ID NO: 694193 - protein, 10 aa, Homo sapiens
  CDR3 for alpha chain variable domain of TCR clone 347097 (TRAV38-1, TRAJ34)
CAFMDDKLIF

SEQ ID NO: 694194 - protein, 16 aa, Homo sapiens
  CDR3 for beta chain variable domain of TCR clone 347097 (TRBV12-5, TRBJ2-5)
CASGPRTSGNQETQYF

SEQ ID NO: 694195 - protein, 13 aa, Homo sapiens
  CDR3 for alpha chain variable domain of TCR clone 347098 (TRAV12-2, TRAJ13)
CAVTAGGYQKVTF

SEQ ID NO: 694196 - protein, 14 aa, Homo sapiens
  CDR3 for beta chain variable domain of TCR clone 347098 (TRBV4-1, TRBJ2-7)
CASRLTSGSYEQYF

SEQ ID NO: 694197 - protein, 13 aa, Homo sapiens
  CDR3 for alpha chain variable domain of TCR clone 347099 (TRAV3, TRAJ29)
CAVRDWGNTPLVF

SEQ ID NO: 694198 - protein, 13 aa, Homo sapiens
  CDR3 for beta chain variable domain of TCR clone 347099 (TRBV10-3, TRBJ2-7)
CASKLAVNYEQYF

SEQ ID NO: 694199 - protein, 14 aa, Homo sapiens
  CDR3 for alpha chain variable domain of TCR clone 347100 (TRAV35, TRAJ33)
CAGSSQDSNYQLIW

SEQ ID NO: 694200 - protein, 15 aa, Homo sapiens
  CDR3 for beta chain variable domain of TCR clone 347100 (TRBV19, TRBJ1-6)
CASSTQGAVGSPLHF

SEQ ID NO: 694201 - protein, 11 aa, Homo sapiens
  CDR3 for alpha chain variable domain of TCR clone 347101 (TRAV21, TRAJ31)
CAVRNNARLMF

SEQ ID NO: 694202 - protein, 14 aa, Homo sapiens
  CDR3 for beta chain variable domain of TCR clone 347101 (TRBV7-2, TRBJ1-1)
CASSFVTGTTEAFF

SEQ ID NO: 694203 - protein, 14 aa, Homo sapiens
  CDR3 for alpha chain variable domain of TCR clone 347102 (TRAV1-2, TRAJ27)
CAPAEYTNAGKSTF

SEQ ID NO: 694204 - protein, 18 aa, Homo sapiens
  CDR3 for beta chain variable domain of TCR clone 347102 (TRBV28, TRBJ1-2)
CASRQQQGKRGSNYGDTF

SEQ ID NO: 694205 - protein, 14 aa, Homo sapiens
  CDR3 for alpha chain variable domain of TCR clone 347103 (TRAV35, TRAJ13)
CAGSPSGGYQKVTF

SEQ ID NO: 694206 - protein, 17 aa, Homo sapiens
  CDR3 for beta chain variable domain of TCR clone 347103 (TRBV18, TRBJ1-5)
CQLTTCRVRQHNQPQHF

SEQ ID NO: 694207 - protein, 13 aa, Homo sapiens
  CDR3 for alpha chain variable domain of TCR clone 347104 (TRAV8-2, TRAJ36)
CVVSHLPTNNLFF

SEQ ID NO: 694208 - protein, 14 aa, Homo sapiens
  CDR3 for beta chain variable domain of TCR clone 347104 (TRBV19, TRBJ2-1)
CASPTFVLSGEQFF

SEQ ID NO: 694209 - protein, 16 aa, Homo sapiens
  CDR3 for alpha chain variable domain of TCR clone 347105 (TRAV3, TRAJ4)
CAVRPSPSGGCNKLIF

SEQ ID NO: 694210 - protein, 12 aa, Homo sapiens
  CDR3 for beta chain variable domain of TCR clone 347105 (TRBV7-9, TRBJ2-7)
CASSKGVYEQYF

SEQ ID NO: 694211 - protein, 15 aa, Homo sapiens
  CDR3 for alpha chain variable domain of TCR clone 347106 (TRAV12-3, TRAJ6)
CAMSATSGGSYIPTF

SEQ ID NO: 694212 - protein, 11 aa, Homo sapiens
  CDR3 for beta chain variable domain of TCR clone 347106 (TRBV20-1, TRBJ1-5)
YSAQRDQPQHF

SEQ ID NO: 694213 - protein, 16 aa, Homo sapiens
  CDR3 for alpha chain variable domain of TCR clone 347107 (TRAV12-2, TRAJ43)
CAEDDMRFGAGTRLTV

SEQ ID NO: 694214 - protein, 16 aa, Homo sapiens
  CDR3 for beta chain variable domain of TCR clone 347107 (TRBV2, TRBJ2-4)
CASSEAPGGEQNIQYF

SEQ ID NO: 694215 - protein, 12 aa, Homo sapiens
  CDR3 for alpha chain variable domain of TCR clone 347108 (TRAV13-2, TRAJ8)
CAPWLGFQKLVF

SEQ ID NO: 694216 - protein, 16 aa, Homo sapiens
  CDR3 for beta chain variable domain of TCR clone 347108 (TRBV7-3, TRBJ2-3)
CASSLSGYRPEDTQYF

SEQ ID NO: 694217 - protein, 15 aa, Homo sapiens
  CDR3 for alpha chain variable domain of TCR clone 347109 (TRAV26-1, TRAJ44)
CIVRIGTGTASKLTF

SEQ ID NO: 694218 - protein, 12 aa, Homo sapiens
  CDR3 for beta chain variable domain of TCR clone 347109 (TRBV11-2, TRBJ2-1)
CASSPGNNEQFF

SEQ ID NO: 694219 - protein, 14 aa, Homo sapiens
  CDR3 for alpha chain variable domain of TCR clone 347110 (TRAV4, TRAJ9)
CLVGSGTGGFKTIF

SEQ ID NO: 694220 - protein, 13 aa, Homo sapiens
  CDR3 for beta chain variable domain of TCR clone 347110 (TRBV7-2, TRBJ2-4)
CASSREHANIQYF

SEQ ID NO: 694221 - protein, 13 aa, Homo sapiens
  CDR3 for alpha chain variable domain of TCR clone 347111 (TRAV12-1, TRAJ31)
CVVNMNNDARLMF

SEQ ID NO: 694222 - protein, 14 aa, Homo sapiens
  CDR3 for beta chain variable domain of TCR clone 347111 (TRBV4-1, TRBJ1-2)
CASSQGGAAYGYTF

SEQ ID NO: 694223 - protein, 14 aa, Homo sapiens
  CDR3 for alpha chain variable domain of TCR clone 347112 (TRAV26-1, TRAJ45)
CIEVTGGGADGLTF

SEQ ID NO: 694224 - protein, 14 aa, Homo sapiens
  CDR3 for beta chain variable domain of TCR clone 347112 (TRBV7-6, TRBJ1-2)
CASSLVADYGYLRF

SEQ ID NO: 694225 - protein, 15 aa, Homo sapiens
  CDR3 for alpha chain variable domain of TCR clone 347113 (TRAV4, TRAJ39)
CLVGPNNNAGNMLTV

SEQ ID NO: 694226 - protein, 16 aa, Homo sapiens
  CDR3 for beta chain variable domain of TCR clone 347113 (TRBV13, TRBJ2-2)
CASSPRTGEHTGELFF

SEQ ID NO: 694227 - protein, 16 aa, Homo sapiens
  CDR3 for alpha chain variable domain of TCR clone 347114 (TRAV3, TRAJ37)
CAVRGKGSGNTGQLIF

SEQ ID NO: 694228 - protein, 14 aa, Homo sapiens
  CDR3 for beta chain variable domain of TCR clone 347114 (TRBV7-2, TRBJ2-7)
CASSPKTSFYEQYF

SEQ ID NO: 694229 - protein, 12 aa, Homo sapiens
  CDR3 for alpha chain variable domain of TCR clone 347115 (TRAV3, TRAJ9)
CAVLPAGFKTIF

SEQ ID NO: 694230 - protein, 17 aa, Homo sapiens
  CDR3 for beta chain variable domain of TCR clone 347115 (TRBV7-8, TRBJ2-6)
CASSAGTGGAGANVLTF

SEQ ID NO: 694231 - protein, 14 aa, Homo sapiens
  CDR3 for alpha chain variable domain of TCR clone 347116 (TRAV8-1, TRAJ22)
CAAPSSGSARQLTF

SEQ ID NO: 694232 - protein, 13 aa, Homo sapiens
  CDR3 for beta chain variable domain of TCR clone 347116 (TRBV11-2, TRBJ1-3)
CASSLEPVNTIYF

SEQ ID NO: 694233 - protein, 11 aa, Homo sapiens
  CDR3 for alpha chain variable domain of TCR clone 347117 (TRAV13-1, TRAJ20)
RAASNDYKLSF

SEQ ID NO: 694234 - protein, 14 aa, Homo sapiens
  CDR3 for beta chain variable domain of TCR clone 347117 (TRBV7-2, TRBJ2-7)
CASSPKTRFYEQYF

SEQ ID NO: 694235 - protein, 15 aa, Homo sapiens
  CDR3 for alpha chain variable domain of TCR clone 347118 (TRAV25, TRAJ52)
CAGRPGGTSYGKLTF

SEQ ID NO: 694236 - protein, 16 aa, Homo sapiens
  CDR3 for beta chain variable domain of TCR clone 347118 (TRBV7-8, TRBJ2-6)
CQQRRTGGAGANVLTF

SEQ ID NO: 694237 - protein, 12 aa, Homo sapiens
  CDR3 for alpha chain variable domain of TCR clone 347119 (TRAV38-1, TRAJ47)
CAFETYGNKLVF

SEQ ID NO: 694238 - protein, 15 aa, Homo sapiens
  CDR3 for beta chain variable domain of TCR clone 347119 (TRBV5-7, TRBJ2-7)
CASSGGRPVPYEQYY

SEQ ID NO: 694239 - protein, 15 aa, Homo sapiens
  CDR3 for alpha chain variable domain of TCR clone 347120 (TRAV8-3, TRAJ45)
CASSYSGGGADRLTF

SEQ ID NO: 694240 - protein, 13 aa, Homo sapiens
  CDR3 for beta chain variable domain of TCR clone 347120 (TRBV19, TRBJ2-2)
CASSIWSTGELFF

SEQ ID NO: 694241 - protein, 12 aa, Homo sapiens
  CDR3 for alpha chain variable domain of TCR clone 347121 (TRAV2, TRAJ37)
CAFTMNTGKLIF

SEQ ID NO: 694242 - protein, 15 aa, Homo sapiens
  CDR3 for beta chain variable domain of TCR clone 347121 (TRBV5-1, TRBJ2-5)
CASSFGGPPQETQYF

SEQ ID NO: 694243 - protein, 13 aa, Homo sapiens
  CDR3 for alpha chain variable domain of TCR clone 347122 (TRAV36/DV7, TRAJ37)
CAVFSSNTGKLIF

SEQ ID NO: 694244 - protein, 18 aa, Homo sapiens
  CDR3 for beta chain variable domain of TCR clone 347122 (TRBV11-2, TRBJ2-3)
CASSVGGASRGAPNTQYF

SEQ ID NO: 694245 - protein, 17 aa, Homo sapiens
  CDR3 for alpha chain variable domain of TCR clone 347123 (TRAV3, TRAJ42)
CAVRDREYGGSQGNPIF

SEQ ID NO: 694246 - protein, 14 aa, Homo sapiens
  CDR3 for beta chain variable domain of TCR clone 347123 (TRBV25-1, TRBJ1-1)
CASTHLGGNTEAFF

SEQ ID NO: 694247 - protein, 14 aa, Homo sapiens
  CDR3 for alpha chain variable domain of TCR clone 347124 (TRAV29/DV5, TRAJ36)
CAARRKTGANNLFF

SEQ ID NO: 694248 - protein, 13 aa, Homo sapiens
  CDR3 for beta chain variable domain of TCR clone 347124 (TRBV10-3, TRBJ1-2)
CAISERDSYGYTF

SEQ ID NO: 694249 - protein, 16 aa, Homo sapiens
  CDR3 for alpha chain variable domain of TCR clone 347125 (TRAV4, TRAJ9)
CLVGDANRPGGFKTIF

SEQ ID NO: 694250 - protein, 16 aa, Homo sapiens
  CDR3 for beta chain variable domain of TCR clone 347125 (TRBV28, TRBJ1-4)
CASSPPYRGRSEKLFF

SEQ ID NO: 694251 - protein, 16 aa, Homo sapiens
  CDR3 for alpha chain variable domain of TCR clone 347126 (TRAV12-2, TRAJ40)
CAVIRGGTSGTYKYIF

SEQ ID NO: 694252 - protein, 16 aa, Homo sapiens
  CDR3 for beta chain variable domain of TCR clone 347126 (TRBV12-5, TRBJ2-5)
CASGPRTSGNQETQYF

SEQ ID NO: 694253 - protein, 15 aa, Homo sapiens
  CDR3 for alpha chain variable domain of TCR clone 347127 (TRAV3, TRAJ5)
CAVRDLATGRRALTF

SEQ ID NO: 694254 - protein, 13 aa, Homo sapiens
  CDR3 for beta chain variable domain of TCR clone 347127 (TRBV12-4, TRBJ2-7)
CASSPTEAYEQYF

SEQ ID NO: 694255 - protein, 14 aa, Homo sapiens
  CDR3 for alpha chain variable domain of TCR clone 347128 (TRAV1-2, TRAJ8)
CAVREDTGFPKLVF

SEQ ID NO: 694256 - protein, 14 aa, Homo sapiens
  CDR3 for beta chain variable domain of TCR clone 347128 (TRBV25-1, TRBJ1-1)
CASTHLGGNTEAFF

SEQ ID NO: 694257 - protein, 17 aa, Homo sapiens
  CDR3 for alpha chain variable domain of TCR clone 347129 (TRAV13-1, TRAJ52)
WAASIGAGGTSYGKLTF

SEQ ID NO: 694258 - protein, 15 aa, Homo sapiens
  CDR3 for beta chain variable domain of TCR clone 347129 (TRBV5-1, TRBJ2-3)
CASSVTSGSTDTQYF

SEQ ID NO: 694259 - protein, 14 aa, Homo sapiens
  CDR3 for alpha chain variable domain of TCR clone 347130 (TRAV17, TRAJ57)
CATDASGGSEKMVF

SEQ ID NO: 694260 - protein, 14 aa, Homo sapiens
  CDR3 for beta chain variable domain of TCR clone 347130 (TRBV4-2, TRBJ2-1)
CASGLDRAYNEQFF

SEQ ID NO: 694261 - protein, 10 aa, Homo sapiens
  CDR3 for alpha chain variable domain of TCR clone 347131 (TRAV19, TRAJ45)
PGGGADGLTF

SEQ ID NO: 694262 - protein, 16 aa, Homo sapiens
  CDR3 for beta chain variable domain of TCR clone 347131 (TRBV28, TRBJ2-6)
CASSNRRGSGANVLTF

SEQ ID NO: 694263 - protein, 23 aa, Homo sapiens
  CDR3 for alpha chain variable domain of TCR clone 347132 (TRAV26-1, )
CIADNAGNNHIQNTDPAVYQLRD

SEQ ID NO: 694264 - protein, 13 aa, Homo sapiens
  CDR3 for beta chain variable domain of TCR clone 347132 (TRBV20-1, TRBJ1-1)
CSARGGGNTEAFF

SEQ ID NO: 694265 - protein, 13 aa, Homo sapiens
  CDR3 for alpha chain variable domain of TCR clone 347133 (TRAV8-3, TRAJ4)
WVFYSGGYNKLII

SEQ ID NO: 694266 - protein, 16 aa, Homo sapiens
  CDR3 for beta chain variable domain of TCR clone 347133 (TRBV7-8, TRBJ2-3)
CASSTEGQRETDTQYV

SEQ ID NO: 694267 - protein, 15 aa, Homo sapiens
  CDR3 for alpha chain variable domain of TCR clone 347134 (TRAV26-2, TRAJ39)
CSLRGNNNAGNMRTF

SEQ ID NO: 694268 - protein, 15 aa, Homo sapiens
  CDR3 for beta chain variable domain of TCR clone 347134 (TRBV5-4, TRBJ1-1)
CASSSLGWANTEAFF

SEQ ID NO: 694269 - protein, 22 aa, Homo sapiens
  CDR3 for alpha chain variable domain of TCR clone 347135 (TRAV8-6, TRAJ6)
CAVTLGEEATYLNLEEGPALLF

SEQ ID NO: 694270 - protein, 15 aa, Homo sapiens
  CDR3 for beta chain variable domain of TCR clone 347135 (TRBV7-2, TRBJ1-1)
CASSPQGGANTEAFF

SEQ ID NO: 694271 - protein, 12 aa, Homo sapiens
  CDR3 for alpha chain variable domain of TCR clone 347136 (TRAV12-3, TRAJ17)
CAMTLTGNKLTF

SEQ ID NO: 694272 - protein, 13 aa, Homo sapiens
  CDR3 for beta chain variable domain of TCR clone 347136 (TRBV7-3, TRBJ2-5)
CASSVRGGETQYF

SEQ ID NO: 694273 - protein, 13 aa, Homo sapiens
  CDR3 for alpha chain variable domain of TCR clone 347137 (TRAV1-1, TRAJ9)
CAAKNNGGFKTIF

SEQ ID NO: 694274 - protein, 13 aa, Homo sapiens
  CDR3 for beta chain variable domain of TCR clone 347137 (TRBV7-9, TRBJ1-2)
CASSLKQNYGYTF

SEQ ID NO: 694275 - protein, 14 aa, Homo sapiens
  CDR3 for alpha chain variable domain of TCR clone 347138 (TRAV1-2, TRAJ16)
CAVNRFSDGQKLLF

SEQ ID NO: 694276 - protein, 15 aa, Homo sapiens
  CDR3 for beta chain variable domain of TCR clone 347138 (TRBV2, TRBJ2-1)
CASSEERKGDNEQFF

SEQ ID NO: 694277 - protein, 14 aa, Homo sapiens
  CDR3 for alpha chain variable domain of TCR clone 347139 (TRAV12-3, TRAJ10)
SHLPLTGGGNKLTF

SEQ ID NO: 694278 - protein, 19 aa, Homo sapiens
  CDR3 for beta chain variable domain of TCR clone 347139 (TRBV4-1, TRBJ1-1)
CASIRIILTPRGVNTEAFF

SEQ ID NO: 694279 - protein, 16 aa, Homo sapiens
  CDR3 for alpha chain variable domain of TCR clone 347140 (TRAV3, TRAJ37)
CAVRGKGSGNTGKLIF

SEQ ID NO: 694280 - protein, 15 aa, Homo sapiens
  CDR3 for beta chain variable domain of TCR clone 347140 (TRBV11-3, TRBJ2-7)
CASLKDEREGDTQYF

SEQ ID NO: 694281 - protein, 14 aa, Homo sapiens
  CDR3 for alpha chain variable domain of TCR clone 347141 (TRAV2, TRAJ15)
CAVTVNQAGTALII

SEQ ID NO: 694282 - protein, 14 aa, Homo sapiens
  CDR3 for beta chain variable domain of TCR clone 347141 (TRBV12-5, TRBJ2-5)
CASGSRTHQETQYF

SEQ ID NO: 694283 - protein, 16 aa, Homo sapiens
  CDR3 for alpha chain variable domain of TCR clone 347142 (TRAV3, TRAJ37)
CAVRGKGSGNTGKLIF

SEQ ID NO: 694284 - protein, 15 aa, Homo sapiens
  CDR3 for beta chain variable domain of TCR clone 347142 (TRBV11-3, TRBJ2-3)
CASLKDEREGDTQYF

SEQ ID NO: 694285 - protein, 12 aa, Homo sapiens
  CDR3 for alpha chain variable domain of TCR clone 347143 (TRAV13-2, TRAJ23)
CAERHRGGKLIF

SEQ ID NO: 694286 - protein, 15 aa, Homo sapiens
  CDR3 for beta chain variable domain of TCR clone 347143 (TRBV9, TRBJ1-6)
GASSVAGTGDSPLHF

SEQ ID NO: 694287 - protein, 11 aa, Homo sapiens
  CDR3 for alpha chain variable domain of TCR clone 347144 (TRAV3, TRAJ21)
CAVGNFNKFCF

SEQ ID NO: 694288 - protein, 15 aa, Homo sapiens
  CDR3 for beta chain variable domain of TCR clone 347144 (TRBV27, TRBJ2-1)
CASSNGGGSSNEQFF

SEQ ID NO: 694289 - protein, 14 aa, Homo sapiens
  CDR3 for alpha chain variable domain of TCR clone 347145 (TRAV1-1, TRAJ27)
CAVIYNTHAGKSTF

SEQ ID NO: 694290 - protein, 15 aa, Homo sapiens
  CDR3 for beta chain variable domain of TCR clone 347145 (TRBV6-3, TRBJ2-7)
CASSSPGTVFYEQYF

SEQ ID NO: 694291 - protein, 14 aa, Homo sapiens
  CDR3 for alpha chain variable domain of TCR clone 347146 (TRAV12-2, TRAJ17)
CSVLFKAAGNTLTF

SEQ ID NO: 694292 - protein, 14 aa, Homo sapiens
  CDR3 for beta chain variable domain of TCR clone 347146 (TRBV7-2, TRBJ2-7)
CASRSQGAAYEQYF

SEQ ID NO: 694293 - protein, 14 aa, Homo sapiens
  CDR3 for alpha chain variable domain of TCR clone 347147 (TRAV12-2, TRAJ15)
CAPHAGQAGTALIF

SEQ ID NO: 694294 - protein, 17 aa, Homo sapiens
  CDR3 for beta chain variable domain of TCR clone 347147 (TRBV5-5, TRBJ1-2)
CASSLGSLDGQSEGYTF

SEQ ID NO: 694295 - protein, 11 aa, Homo sapiens
  CDR3 for alpha chain variable domain of TCR clone 347148 (TRAV2, TRAJ20)
CAVSDDYKLSF

SEQ ID NO: 694296 - protein, 13 aa, Homo sapiens
  CDR3 for beta chain variable domain of TCR clone 347148 (TRBV7-7, TRBJ1-1)
CASSLGANTEAFF

SEQ ID NO: 694297 - protein, 15 aa, Homo sapiens
  CDR3 for alpha chain variable domain of TCR clone 347149 (TRAV36/DV7, TRAJ42)
CAVERYGGSQGNLIF

SEQ ID NO: 694298 - protein, 16 aa, Homo sapiens
  CDR3 for beta chain variable domain of TCR clone 347149 (TRBV19, TRBJ2-6)
CASSIMFGSGANVLTF

SEQ ID NO: 694299 - protein, 14 aa, Homo sapiens
  CDR3 for alpha chain variable domain of TCR clone 347150 (TRAV12-2, TRAJ22)
CAVRFSGSARQLSF

SEQ ID NO: 694300 - protein, 13 aa, Homo sapiens
  CDR3 for beta chain variable domain of TCR clone 347150 (TRBV6-1, TRBJ2-1)
CASTGTGLNEQFF

SEQ ID NO: 694301 - protein, 14 aa, Homo sapiens
  CDR3 for alpha chain variable domain of TCR clone 347151 (TRAV12-3, TRAJ12)
CAMSRMDSSYKLIF

SEQ ID NO: 694302 - protein, 15 aa, Homo sapiens
  CDR3 for beta chain variable domain of TCR clone 347151 (TRBV5-1, TRBJ2-3)
CASSVTSGSTDTQYF

SEQ ID NO: 694303 - protein, 14 aa, Homo sapiens
  CDR3 for alpha chain variable domain of TCR clone 347152 (TRAV1-2, TRAJ16)
CAVNRFSDVQKLLF

SEQ ID NO: 694304 - protein, 19 aa, Homo sapiens
  CDR3 for beta chain variable domain of TCR clone 347152 (TRBV25-1, TRBJ2-2)
CAILVYRVDRGRKTGELFF

SEQ ID NO: 694305 - protein, 14 aa, Homo sapiens
  CDR3 for alpha chain variable domain of TCR clone 347153 (TRAV1-2, TRAJ16)
CAVKRFSDGQKLLF

SEQ ID NO: 694306 - protein, 14 aa, Homo sapiens
  CDR3 for beta chain variable domain of TCR clone 347153 (TRBV20-1, TRBJ2-1)
CSAQIGGSANEQFF

SEQ ID NO: 694307 - protein, 13 aa, Homo sapiens
  CDR3 for alpha chain variable domain of TCR clone 347154 (TRAV29/DV5, TRAJ31)
CAASRNNNARLMF

SEQ ID NO: 694308 - protein, 13 aa, Homo sapiens
  CDR3 for beta chain variable domain of TCR clone 347154 (TRBV7-2, TRBJ2-1)
CASSEQPYNEQFF

SEQ ID NO: 694309 - protein, 15 aa, Homo sapiens
  CDR3 for alpha chain variable domain of TCR clone 347155 (TRAV8-6, TRAJ10)
CAVSDQAGGGNKLTF

SEQ ID NO: 694310 - protein, 14 aa, Homo sapiens
  CDR3 for beta chain variable domain of TCR clone 347155 (TRBV18, TRBJ2-5)
CASSPGVSQETQYF

SEQ ID NO: 694311 - protein, 17 aa, Homo sapiens
  CDR3 for alpha chain variable domain of TCR clone 347156 (TRAV8-6, TRAJ58)
CAVSSWVGETSGSRLNF

SEQ ID NO: 694312 - protein, 15 aa, Homo sapiens
  CDR3 for beta chain variable domain of TCR clone 347156 (TRBV20-1, TRBJ2-7)
CSARDRVSGMDEQYF

SEQ ID NO: 694313 - protein, 16 aa, Homo sapiens
  CDR3 for alpha chain variable domain of TCR clone 347157 (TRAV30, TRAJ24)
CGTEIVDADSWGKFQF

SEQ ID NO: 694314 - protein, 13 aa, Homo sapiens
  CDR3 for beta chain variable domain of TCR clone 347157 (TRBV11-3, TRBJ2-7)
CASSFEVGYEQYF

SEQ ID NO: 694315 - protein, 16 aa, Homo sapiens
  CDR3 for alpha chain variable domain of TCR clone 347158 (TRAV16, TRAJ4)
CALSRMFSGGYNKLIF

SEQ ID NO: 694316 - protein, 15 aa, Homo sapiens
  CDR3 for beta chain variable domain of TCR clone 347158 (TRBV19, TRBJ2-1)
CASSMGSGTGRQQFF

SEQ ID NO: 694317 - protein, 11 aa, Homo sapiens
  CDR3 for alpha chain variable domain of TCR clone 347159 (TRAV21, TRAJ39)
LLVNAGNMLTF

SEQ ID NO: 694318 - protein, 14 aa, Homo sapiens
  CDR3 for beta chain variable domain of TCR clone 347159 (TRBV7-9, TRBJ2-1)
CASSPRDSLYEQFF

SEQ ID NO: 694319 - protein, 13 aa, Homo sapiens
  CDR3 for alpha chain variable domain of TCR clone 347160 (TRAV3, TRAJ4)
CAVRDGGYNNLIF

SEQ ID NO: 694320 - protein, 14 aa, Homo sapiens
  CDR3 for beta chain variable domain of TCR clone 347160 (TRBV12-4, TRBJ1-2)
CASSSSAAGSSYTF

SEQ ID NO: 694321 - protein, 16 aa, Homo sapiens
  CDR3 for alpha chain variable domain of TCR clone 347161 (TRAV1-2, TRAJ10)
CAVRGVLTGGGNKLTF

SEQ ID NO: 694322 - protein, 15 aa, Homo sapiens
  CDR3 for beta chain variable domain of TCR clone 347161 (TRBV24-1, TRBJ2-1)
CATRASGGQYNEQFF

SEQ ID NO: 694323 - protein, 14 aa, Homo sapiens
  CDR3 for alpha chain variable domain of TCR clone 347162 (TRAV14/DV4, TRAJ38)
CAMRGAGNNRKLIW

SEQ ID NO: 694324 - protein, 15 aa, Homo sapiens
  CDR3 for beta chain variable domain of TCR clone 347162 (TRBV7-9, TRBJ2-7)
CASSSSGLAVYEQYF

SEQ ID NO: 694325 - protein, 14 aa, Homo sapiens
  CDR3 for alpha chain variable domain of TCR clone 347163 (TRAV12-1, TRAJ36)
CVVNYWGKQPLLWD

SEQ ID NO: 694326 - protein, 14 aa, Homo sapiens
  CDR3 for beta chain variable domain of TCR clone 347163 (TRBV19, TRBJ2-1)
CASPTFVLSGEQFF

SEQ ID NO: 694327 - protein, 14 aa, Homo sapiens
  CDR3 for alpha chain variable domain of TCR clone 347164 (TRAV24, TRAJ42)
WAQNYGGSQGNLIF

SEQ ID NO: 694328 - protein, 15 aa, Homo sapiens
  CDR3 for beta chain variable domain of TCR clone 347164 (TRBV19, TRBJ1-5)
CASSIPGGAGQPQHF

SEQ ID NO: 694329 - protein, 15 aa, Homo sapiens
  CDR3 for alpha chain variable domain of TCR clone 347165 (TRAV8-3, TRAJ45)
CASSYSGGCADGLTF

SEQ ID NO: 694330 - protein, 12 aa, Homo sapiens
  CDR3 for beta chain variable domain of TCR clone 347165 (TRBV11-2, TRBJ2-3)
CASRPGTDTQYF

SEQ ID NO: 694331 - protein, 17 aa, Homo sapiens
  CDR3 for alpha chain variable domain of TCR clone 347166 (TRAV3, TRAJ38)
CAVRDCLNAGNNRKLIW

SEQ ID NO: 694332 - protein, 13 aa, Homo sapiens
  CDR3 for beta chain variable domain of TCR clone 347166 (TRBV23-1, TRBJ1-4)
CASRWKFNEKLFF

SEQ ID NO: 694333 - protein, 12 aa, Homo sapiens
  CDR3 for alpha chain variable domain of TCR clone 347167 (TRAV29/DV5, TRAJ49)
CAATDTGNQFFF

SEQ ID NO: 694334 - protein, 12 aa, Homo sapiens
  CDR3 for beta chain variable domain of TCR clone 347167 (TRBV12-4, TRBJ2-7)
CASSLGGYEQYF

SEQ ID NO: 694335 - protein, 13 aa, Homo sapiens
  CDR3 for alpha chain variable domain of TCR clone 347168 (TRAV36/DV7, TRAJ34)
CAGRPYNTDKLIF

SEQ ID NO: 694336 - protein, 16 aa, Homo sapiens
  CDR3 for beta chain variable domain of TCR clone 347168 (TRBV20-1, TRBJ1-4)
CSAPGQGLLTNEKLFF

SEQ ID NO: 694337 - protein, 13 aa, Homo sapiens
  CDR3 for alpha chain variable domain of TCR clone 347169 (TRAV12-2, TRAJ39)
CAVNNNAGNILPF

SEQ ID NO: 694338 - protein, 13 aa, Homo sapiens
  CDR3 for beta chain variable domain of TCR clone 347169 (TRBV2, TRBJ1-5)
CATAGPGNQPQHF

SEQ ID NO: 694339 - protein, 15 aa, Homo sapiens
  CDR3 for alpha chain variable domain of TCR clone 347170 (TRAV8-3, TRAJ48)
CAVGASNFGNEKLTF

SEQ ID NO: 694340 - protein, 16 aa, Homo sapiens
  CDR3 for beta chain variable domain of TCR clone 347170 (TRBV5-1, TRBJ1-1)
CASSSGGNSLNTEAFF

SEQ ID NO: 694341 - protein, 14 aa, Homo sapiens
  CDR3 for alpha chain variable domain of TCR clone 347171 (TRAV12-2, TRAJ13)
CAVKKTGGYQKVTF

SEQ ID NO: 694342 - protein, 11 aa, Homo sapiens
  CDR3 for beta chain variable domain of TCR clone 347171 (TRBV14, TRBJ1-1)
CQQQLKGLAFF

SEQ ID NO: 694343 - protein, 13 aa, Homo sapiens
  CDR3 for alpha chain variable domain of TCR clone 347172 (TRAV2, TRAJ9)
CAALNTGGFKTIF

SEQ ID NO: 694344 - protein, 14 aa, Homo sapiens
  CDR3 for beta chain variable domain of TCR clone 347172 (TRBV13, TRBJ2-3)
CASSSGSPTDTQYF

SEQ ID NO: 694345 - protein, 12 aa, Homo sapiens
  CDR3 for alpha chain variable domain of TCR clone 347173 (TRAV21, TRAJ23)
CAVGPQGGTLIF

SEQ ID NO: 694346 - protein, 13 aa, Homo sapiens
  CDR3 for beta chain variable domain of TCR clone 347173 (TRBV20-1, TRBJ2-7)
CSARTGAGYEQYF

SEQ ID NO: 694347 - protein, 12 aa, Homo sapiens
  CDR3 for alpha chain variable domain of TCR clone 347174 (TRAV2, TRAJ15)
CAVAQAGAALIF

SEQ ID NO: 694348 - protein, 13 aa, Homo sapiens
  CDR3 for beta chain variable domain of TCR clone 347174 (TRBV11-2, TRBJ2-2)
CASGRDREEELFF

SEQ ID NO: 694349 - protein, 13 aa, Homo sapiens
  CDR3 for alpha chain variable domain of TCR clone 347175 (TRAV35, TRAJ36)
CAGPRIGANNLFF

SEQ ID NO: 694350 - protein, 16 aa, Homo sapiens
  CDR3 for beta chain variable domain of TCR clone 347175 (TRBV12-5, TRBJ2-5)
CASGPRTSGNQETQYF

SEQ ID NO: 694351 - protein, 10 aa, Homo sapiens
  CDR3 for alpha chain variable domain of TCR clone 347176 (TRAV26-1, TRAJ40)
CIAGTYKYIF

SEQ ID NO: 694352 - protein, 16 aa, Homo sapiens
  CDR3 for beta chain variable domain of TCR clone 347176 (TRBV7-9, TRBJ1-2)
CASSLGFSSGEDGYTS

SEQ ID NO: 694353 - protein, 13 aa, Homo sapiens
  CDR3 for alpha chain variable domain of TCR clone 347177 (TRAV2, TRAJ21)
CAVEDLNFNKFYF

SEQ ID NO: 694354 - protein, 16 aa, Homo sapiens
  CDR3 for beta chain variable domain of TCR clone 347177 (TRBV11-1, TRBJ2-2)
CASSAEGLKNTGELFF

SEQ ID NO: 694355 - protein, 15 aa, Homo sapiens
  CDR3 for alpha chain variable domain of TCR clone 347178 (TRAV27, TRAJ38)
CAGRFNAGNNRKLIW

SEQ ID NO: 694356 - protein, 12 aa, Homo sapiens
  CDR3 for beta chain variable domain of TCR clone 347178 (TRBV11-2, TRBJ2-2)
CASSLPTGELFF

SEQ ID NO: 694357 - protein, 13 aa, Homo sapiens
  CDR3 for alpha chain variable domain of TCR clone 347179 (TRAV40, TRAJ41)
CLLGAQSGYALNF

SEQ ID NO: 694358 - protein, 15 aa, Homo sapiens
  CDR3 for beta chain variable domain of TCR clone 347179 (TRBV13, TRBJ2-7)
CASSLRPDRGHEQYF

SEQ ID NO: 694359 - protein, 16 aa, Homo sapiens
  CDR3 for alpha chain variable domain of TCR clone 347180 (TRAV17, TRAJ9)
CATGDWGGTGGFKTIF

SEQ ID NO: 694360 - protein, 12 aa, Homo sapiens
  CDR3 for beta chain variable domain of TCR clone 347180 (TRBV11-2, TRBJ2-1)
CASSPGNNEQFF

SEQ ID NO: 694361 - protein, 14 aa, Homo sapiens
  CDR3 for alpha chain variable domain of TCR clone 347181 (TRAV12-2, TRAJ32)
CAHPESGATNKLIF

SEQ ID NO: 694362 - protein, 14 aa, Homo sapiens
  CDR3 for beta chain variable domain of TCR clone 347181 (TRBV4-1, TRBJ2-5)
CASSRSGSGETQYF

SEQ ID NO: 694363 - protein, 13 aa, Homo sapiens
  CDR3 for alpha chain variable domain of TCR clone 347182 (TRAV35, TRAJ44)
CAGLSGTASKLTF

SEQ ID NO: 694364 - protein, 15 aa, Homo sapiens
  CDR3 for beta chain variable domain of TCR clone 347182 (TRBV19, TRBJ2-4)
CASRGPRRGENIQYF

SEQ ID NO: 694365 - protein, 14 aa, Homo sapiens
  CDR3 for alpha chain variable domain of TCR clone 347183 (TRAV16, TRAJ31)
CALSGRNNNARLMF

SEQ ID NO: 694366 - protein, 12 aa, Homo sapiens
  CDR3 for beta chain variable domain of TCR clone 347183 (TRBV11-2, TRBJ1-2)
CASSREGDGYAF

SEQ ID NO: 694367 - protein, 14 aa, Homo sapiens
  CDR3 for alpha chain variable domain of TCR clone 347184 (TRAV12-2, TRAJ17)
CAVNIKAEGNKLTF

SEQ ID NO: 694368 - protein, 16 aa, Homo sapiens
  CDR3 for beta chain variable domain of TCR clone 347184 (TRBV20-1, TRBJ2-6)
CSASSQGDDGANVLTF

SEQ ID NO: 694369 - protein, 14 aa, Homo sapiens
  CDR3 for alpha chain variable domain of TCR clone 347185 (TRAV17, TRAJ16)
CATADFLDGQKLLF

SEQ ID NO: 694370 - protein, 12 aa, Homo sapiens
  CDR3 for beta chain variable domain of TCR clone 347185 (TRBV24-1, TRBJ1-1)
CATLYPDTEAFF

SEQ ID NO: 694371 - protein, 13 aa, Homo sapiens
  CDR3 for alpha chain variable domain of TCR clone 347186 (TRAV36/DV7, TRAJ17)
CARASAAGNKLTF

SEQ ID NO: 694372 - protein, 13 aa, Homo sapiens
  CDR3 for beta chain variable domain of TCR clone 347186 (TRBV7-6, TRBJ1-2)
CASSLVADYGYTF

SEQ ID NO: 694373 - protein, 13 aa, Homo sapiens
  CDR3 for alpha chain variable domain of TCR clone 347187 (TRAV13-1, TRAJ21)
CAESIYNFNKFYF

SEQ ID NO: 694374 - protein, 15 aa, Homo sapiens
  CDR3 for beta chain variable domain of TCR clone 347187 (TRBV9, TRBJ2-1)
CASSLAGSSYNEQFF

SEQ ID NO: 694375 - protein, 17 aa, Homo sapiens
  CDR3 for alpha chain variable domain of TCR clone 347188 (TRAV17, TRAJ7)
CATLGRLAFGKWNQVVV

SEQ ID NO: 694376 - protein, 13 aa, Homo sapiens
  CDR3 for beta chain variable domain of TCR clone 347188 (TRBV12-4, TRBJ2-7)
CASSLERVREQYF

SEQ ID NO: 694377 - protein, 16 aa, Homo sapiens
  CDR3 for alpha chain variable domain of TCR clone 347189 (TRAV30, TRAJ24)
CGTEIVDADSWGNFQF

SEQ ID NO: 694378 - protein, 15 aa, Homo sapiens
  CDR3 for beta chain variable domain of TCR clone 347189 (TRBV27, TRBJ2-1)
CASSNGGGSSNEQFF

SEQ ID NO: 694379 - protein, 13 aa, Homo sapiens
  CDR3 for alpha chain variable domain of TCR clone 347190 (TRAV24, TRAJ15)
CAFKDQAGTALIF

SEQ ID NO: 694380 - protein, 13 aa, Homo sapiens
  CDR3 for beta chain variable domain of TCR clone 347190 (TRBV20-1, TRBJ2-5)
CSAREGGKETQYF

SEQ ID NO: 694381 - protein, 14 aa, Homo sapiens
  CDR3 for alpha chain variable domain of TCR clone 347191 (TRAV41, TRAJ32)
CCPNYGGATSKLIF

SEQ ID NO: 694382 - protein, 15 aa, Homo sapiens
  CDR3 for beta chain variable domain of TCR clone 347191 (TRBV11-2, TRBJ2-1)
CASSKNRGLIYEQFF

SEQ ID NO: 694383 - protein, 12 aa, Homo sapiens
  CDR3 for alpha chain variable domain of TCR clone 347192 (TRAV27, TRAJ35)
CAGADFGNVLHC

SEQ ID NO: 694384 - protein, 15 aa, Homo sapiens
  CDR3 for beta chain variable domain of TCR clone 347192 (TRBV6-3, TRBJ2-2)
CASSFLATLTGELFF

SEQ ID NO: 694385 - protein, 23 aa, Homo sapiens
  CDR3 for alpha chain variable domain of TCR clone 347193 (TRAV12-2, TRAJ36)
SPLIRDSQPSDSATLERANNLFF

SEQ ID NO: 694386 - protein, 16 aa, Homo sapiens
  CDR3 for beta chain variable domain of TCR clone 347193 (TRBV7-3, TRBJ2-2)
CASSLKRGTLSGELFF

SEQ ID NO: 694387 - protein, 12 aa, Homo sapiens
  CDR3 for alpha chain variable domain of TCR clone 347194 (TRAV12-2, TRAJ10)
WGVTGGGNKLNF

SEQ ID NO: 694388 - protein, 16 aa, Homo sapiens
  CDR3 for beta chain variable domain of TCR clone 347194 (TRBV4-1, TRBJ2-1)
CASSQEAGQGSDEQFF

SEQ ID NO: 694389 - protein, 13 aa, Homo sapiens
  CDR3 for alpha chain variable domain of TCR clone 347195 (TRAV12-2, TRAJ39)
CAVNNNAGNMLAF

SEQ ID NO: 694390 - protein, 14 aa, Homo sapiens
  CDR3 for beta chain variable domain of TCR clone 347195 (TRBV4-2, TRBJ1-5)
CASSRDRGNQPQHF

SEQ ID NO: 694391 - protein, 13 aa, Homo sapiens
  CDR3 for alpha chain variable domain of TCR clone 347196 (TRAV13-1, TRAJ15)
CAALYQAGTALIF

SEQ ID NO: 694392 - protein, 16 aa, Homo sapiens
  CDR3 for beta chain variable domain of TCR clone 347196 (TRBV5-5, TRBJ1-4)
CASSLVAALLGGKLFF

SEQ ID NO: 694393 - protein, 14 aa, Homo sapiens
  CDR3 for alpha chain variable domain of TCR clone 347197 (TRAV1-2, TRAJ6)
CAVSLSGGSYIPTF

SEQ ID NO: 694394 - protein, 16 aa, Homo sapiens
  CDR3 for beta chain variable domain of TCR clone 347197 (TRBV12-4, TRBJ1-5)
CASSRPVGGSNQPQHF

SEQ ID NO: 694395 - protein, 12 aa, Homo sapiens
  CDR3 for alpha chain variable domain of TCR clone 347198 (TRAV12-3, TRAJ17)
CAMTLTGNKLTF

SEQ ID NO: 694396 - protein, 12 aa, Homo sapiens
  CDR3 for beta chain variable domain of TCR clone 347198 (TRBV11-2, TRBJ2-2)
CASSLPTEELFF

SEQ ID NO: 694397 - protein, 16 aa, Homo sapiens
  CDR3 for alpha chain variable domain of TCR clone 347199 (TRAV14/DV4, TRAJ53)
CAMREGGGGSNYKLPF

SEQ ID NO: 694398 - protein, 18 aa, Homo sapiens
  CDR3 for beta chain variable domain of TCR clone 347199 (TRBV18, TRBJ1-3)
CASSPRGGAGPSGNTIYF

SEQ ID NO: 694399 - protein, 12 aa, Homo sapiens
  CDR3 for alpha chain variable domain of TCR clone 347200 (TRAV12-2, TRAJ10)
RGVTGGGNKLTF

SEQ ID NO: 694400 - protein, 16 aa, Homo sapiens
  CDR3 for beta chain variable domain of TCR clone 347200 (TRBV6-4, TRBJ1-2)
CSSSEAVGDPNYGYTF

SEQ ID NO: 694401 - protein, 16 aa, Homo sapiens
  CDR3 for alpha chain variable domain of TCR clone 347201 (TRAV14/DV4, TRAJ21)
GAMREGPGNNFNKFYF

SEQ ID NO: 694402 - protein, 12 aa, Homo sapiens
  CDR3 for beta chain variable domain of TCR clone 347201 (TRBV29-1, TRBJ2-2)
CSVDKYTGELFF

SEQ ID NO: 694403 - protein, 11 aa, Homo sapiens
  CDR3 for alpha chain variable domain of TCR clone 347202 (TRAV3, TRAJ21)
CAVGNFNQFYF

SEQ ID NO: 694404 - protein, 16 aa, Homo sapiens
  CDR3 for beta chain variable domain of TCR clone 347202 (TRBV19, TRBJ2-1)
CASSKAGPSPYNEQFF

SEQ ID NO: 694405 - protein, 13 aa, Homo sapiens
  CDR3 for alpha chain variable domain of TCR clone 347203 (TRAV1-2, TRAJ12)
CAVSMDSSYKLIF

SEQ ID NO: 694406 - protein, 17 aa, Homo sapiens
  CDR3 for beta chain variable domain of TCR clone 347203 (TRBV11-2, TRBJ2-1)
CASSLYPPGVEYNEQFL

SEQ ID NO: 694407 - protein, 15 aa, Homo sapiens
  CDR3 for alpha chain variable domain of TCR clone 347204 (TRAV14/DV4, TRAJ15)
CAMREGWQAGTALIF

SEQ ID NO: 694408 - protein, 13 aa, Homo sapiens
  CDR3 for beta chain variable domain of TCR clone 347204 (TRBV24-1, TRBJ2-1)
CATSAGPYNEQFF

SEQ ID NO: 694409 - protein, 16 aa, Homo sapiens
  CDR3 for alpha chain variable domain of TCR clone 347205 (TRAV12-3, TRAJ53)
CAMSPGSGGSNYKLTF

SEQ ID NO: 694410 - protein, 16 aa, Homo sapiens
  CDR3 for beta chain variable domain of TCR clone 347205 (TRBV13, TRBJ2-2)
CASSTRTGEHTGELFF

SEQ ID NO: 694411 - protein, 14 aa, Homo sapiens
  CDR3 for alpha chain variable domain of TCR clone 347206 (TRAV1-2, TRAJ8)
CAVREDTGFRKLVF

SEQ ID NO: 694412 - protein, 15 aa, Homo sapiens
  CDR3 for beta chain variable domain of TCR clone 347206 (TRBV6-3, TRBJ2-7)
CASSSPGTVFYEQYV

SEQ ID NO: 694413 - protein, 14 aa, Homo sapiens
  CDR3 for alpha chain variable domain of TCR clone 347207 (TRAV1-2, TRAJ33)
CAVRAPDSNYQLIW

SEQ ID NO: 694414 - protein, 14 aa, Homo sapiens
  CDR3 for beta chain variable domain of TCR clone 347207 (TRBV11-3, TRBJ1-6)
CASSISGGDSPLHF

SEQ ID NO: 694415 - protein, 14 aa, Homo sapiens
  CDR3 for alpha chain variable domain of TCR clone 347208 (TRAV17, TRAJ15)
CATAPNQAGTALIF

SEQ ID NO: 694416 - protein, 14 aa, Homo sapiens
  CDR3 for beta chain variable domain of TCR clone 347208 (TRBV7-2, TRBJ2-7)
CASSPKTSFYEQYF

SEQ ID NO: 694417 - protein, 14 aa, Homo sapiens
  CDR3 for alpha chain variable domain of TCR clone 347209 (TRAV13-1, TRAJ24)
CAASRTDSWGKLQF

SEQ ID NO: 694418 - protein, 15 aa, Homo sapiens
  CDR3 for beta chain variable domain of TCR clone 347209 (TRBV7-9, TRBJ1-5)
CASSQGHQPNQRQHF

SEQ ID NO: 694419 - protein, 12 aa, Homo sapiens
  CDR3 for alpha chain variable domain of TCR clone 347210 (TRAV5, TRAJ27)
CAEITNAGKSTF

SEQ ID NO: 694420 - protein, 15 aa, Homo sapiens
  CDR3 for beta chain variable domain of TCR clone 347210 (TRBV11-2, TRBJ1-2)
CTSSLEGVQRNGYTF

SEQ ID NO: 694421 - protein, 14 aa, Homo sapiens
  CDR3 for alpha chain variable domain of TCR clone 347211 (TRAV1-2, TRAJ8)
CALREDTGFQKLVL

SEQ ID NO: 694422 - protein, 14 aa, Homo sapiens
  CDR3 for beta chain variable domain of TCR clone 347211 (TRBV29-1, TRBJ2-5)
CSVETSGSGETQYF

SEQ ID NO: 694423 - protein, 13 aa, Homo sapiens
  CDR3 for alpha chain variable domain of TCR clone 347212 (TRAV3, TRAJ20)
CCEAFCNDYKLSF

SEQ ID NO: 694424 - protein, 15 aa, Homo sapiens
  CDR3 for beta chain variable domain of TCR clone 347212 (TRBV19, TRBJ2-6)
CASVRRDYGANDLTF

SEQ ID NO: 694425 - protein, 15 aa, Homo sapiens
  CDR3 for alpha chain variable domain of TCR clone 347213 (TRAV26-1, TRAJ22)
CIVRVSFWFCKATDL

SEQ ID NO: 694426 - protein, 16 aa, Homo sapiens
  CDR3 for beta chain variable domain of TCR clone 347213 (TRBV4-2, TRBJ2-5)
CASSQELVGSQETQYF

SEQ ID NO: 694427 - protein, 15 aa, Homo sapiens
  CDR3 for alpha chain variable domain of TCR clone 347214 (TRAV13-2, TRAJ58)
CVTAQKETSGSRLTF

SEQ ID NO: 694428 - protein, 14 aa, Homo sapiens
  CDR3 for beta chain variable domain of TCR clone 347214 (TRBV7-2, TRBJ2-3)
CASRRGLAADTQYL

SEQ ID NO: 694429 - protein, 12 aa, Homo sapiens
  CDR3 for alpha chain variable domain of TCR clone 347215 (TRAV12-2, TRAJ10)
WGVTGGGNKRTF

SEQ ID NO: 694430 - protein, 14 aa, Homo sapiens
  CDR3 for beta chain variable domain of TCR clone 347215 (TRBV19, TRBJ2-3)
CASSAPRGTDTQYF

SEQ ID NO: 694431 - protein, 14 aa, Homo sapiens
  CDR3 for alpha chain variable domain of TCR clone 347216 (TRAV12-1, TRAJ38)
CVVHNAGNNRKLIW

SEQ ID NO: 694432 - protein, 14 aa, Homo sapiens
  CDR3 for beta chain variable domain of TCR clone 347216 (TRBV7-8, TRBJ2-3)
CASSFPDGQDTQYF

SEQ ID NO: 694433 - protein, 12 aa, Homo sapiens
  CDR3 for alpha chain variable domain of TCR clone 347217 (TRAV35, TRAJ39)
LAPNNAGNMLTF

SEQ ID NO: 694434 - protein, 20 aa, Homo sapiens
  CDR3 for beta chain variable domain of TCR clone 347217 (TRBV19, TRBJ2-1)
CASSISRTVTSTRLNNEQFF

SEQ ID NO: 694435 - protein, 13 aa, Homo sapiens
  CDR3 for alpha chain variable domain of TCR clone 347218 (TRAV3, TRAJ26)
FAVSRGYGQNFVF

SEQ ID NO: 694436 - protein, 15 aa, Homo sapiens
  CDR3 for beta chain variable domain of TCR clone 347218 (TRBV27, TRBJ2-1)
CASSLARGAYNEQFF

SEQ ID NO: 694437 - protein, 14 aa, Homo sapiens
  CDR3 for alpha chain variable domain of TCR clone 347219 (TRAV13-1, TRAJ39)
CAASIVMQATCSPF

SEQ ID NO: 694438 - protein, 15 aa, Homo sapiens
  CDR3 for beta chain variable domain of TCR clone 347219 (TRBV19, TRBJ1-1)
CASTSGQIQNTEAFF

SEQ ID NO: 694439 - protein, 17 aa, Homo sapiens
  CDR3 for alpha chain variable domain of TCR clone 347220 (TRAV26-1, TRAJ58)
CIVRVGAEETSGSRLPF

SEQ ID NO: 694440 - protein, 18 aa, Homo sapiens
  CDR3 for beta chain variable domain of TCR clone 347220 (TRBV7-9, TRBJ2-7)
CASSLTTSGSRTWYEQYF

SEQ ID NO: 694441 - protein, 12 aa, Homo sapiens
  CDR3 for alpha chain variable domain of TCR clone 347221 (TRAV12-3, TRAJ20)
CAMVRGDYKLSF

SEQ ID NO: 694442 - protein, 14 aa, Homo sapiens
  CDR3 for beta chain variable domain of TCR clone 347221 (TRBV5-5, TRBJ1-5)
CASSGQGVEQAQHF

SEQ ID NO: 694443 - protein, 13 aa, Homo sapiens
  CDR3 for alpha chain variable domain of TCR clone 347222 (TRAV20, TRAJ37)
CAVYSGNTGKLIF

SEQ ID NO: 694444 - protein, 13 aa, Homo sapiens
  CDR3 for beta chain variable domain of TCR clone 347222 (TRBV7-9, TRBJ2-7)
CASSFAGAYEQYF

SEQ ID NO: 694445 - protein, 13 aa, Homo sapiens
  CDR3 for alpha chain variable domain of TCR clone 347223 (TRAV12-3, TRAJ33)
CAMSVNSNYQLIW

SEQ ID NO: 694446 - protein, 13 aa, Homo sapiens
  CDR3 for beta chain variable domain of TCR clone 347223 (TRBV28, TRBJ2-7)
CASSNSGNYEQYF

SEQ ID NO: 694447 - protein, 12 aa, Homo sapiens
  CDR3 for alpha chain variable domain of TCR clone 347224 (TRAV17, TRAJ29)
CYASSGNTPLVF

SEQ ID NO: 694448 - protein, 16 aa, Homo sapiens
  CDR3 for beta chain variable domain of TCR clone 347224 (TRBV11-2, TRBJ2-1)
CASSFGGSFVYNEQFF

SEQ ID NO: 694449 - protein, 14 aa, Homo sapiens
  CDR3 for alpha chain variable domain of TCR clone 347225 (TRAV8-2, TRAJ11)
CVVSEKSGYSTLTF

SEQ ID NO: 694450 - protein, 15 aa, Homo sapiens
  CDR3 for beta chain variable domain of TCR clone 347225 (TRBV6-3, TRBJ2-7)
CASSSPGTVFYEQYF

SEQ ID NO: 694451 - protein, 10 aa, Homo sapiens
  CDR3 for alpha chain variable domain of TCR clone 347226 (TRAV26-1, TRAJ22)
CIVSLNFFWF

SEQ ID NO: 694452 - protein, 13 aa, Homo sapiens
  CDR3 for beta chain variable domain of TCR clone 347226 (TRBV11-2, TRBJ2-5)
CASSFSSQETQYF

SEQ ID NO: 694453 - protein, 15 aa, Homo sapiens
  CDR3 for alpha chain variable domain of TCR clone 347227 (TRAV13-1, TRAJ17)
CAARIERAAGNKLTF

SEQ ID NO: 694454 - protein, 17 aa, Homo sapiens
  CDR3 for beta chain variable domain of TCR clone 347227 (TRBV11-2, TRBJ2-1)
CASSLYPPGVEYNEQFF

SEQ ID NO: 694455 - protein, 14 aa, Homo sapiens
  CDR3 for alpha chain variable domain of TCR clone 347228 (TRAV35, TRAJ22)
CAGLRPGSARQVTF

SEQ ID NO: 694456 - protein, 15 aa, Homo sapiens
  CDR3 for beta chain variable domain of TCR clone 347228 (TRBV12-4, TRBJ2-5)
CASSPPTGLQETQYF

SEQ ID NO: 694457 - protein, 12 aa, Homo sapiens
  CDR3 for alpha chain variable domain of TCR clone 347229 (TRAV13-1, TRAJ39)
SKYSNAGNMLTF

SEQ ID NO: 694458 - protein, 16 aa, Homo sapiens
  CDR3 for beta chain variable domain of TCR clone 347229 (TRBV20-1, TRBJ1-4)
CSAPGQGLLTNEKLFF

SEQ ID NO: 694459 - protein, 13 aa, Homo sapiens
  CDR3 for alpha chain variable domain of TCR clone 347230 (TRAV23/DV6, TRAJ22)
CAPYSGSARQLIF

SEQ ID NO: 694460 - protein, 15 aa, Homo sapiens
  CDR3 for beta chain variable domain of TCR clone 347230 (TRBV11-2, TRBJ1-6)
CASSLDPWAVSPLHF

SEQ ID NO: 694461 - protein, 12 aa, Homo sapiens
  CDR3 for alpha chain variable domain of TCR clone 347231 (TRAV21, TRAJ42)
CAVGGSQGNLIF

SEQ ID NO: 694462 - protein, 14 aa, Homo sapiens
  CDR3 for beta chain variable domain of TCR clone 347231 (TRBV12-4, TRBJ1-1)
CDSSLGTGGTEAFF

SEQ ID NO: 694463 - protein, 16 aa, Homo sapiens
  CDR3 for alpha chain variable domain of TCR clone 347232 (TRAV12-3, TRAJ53)
FAMSPGSGGSNYKLTF

SEQ ID NO: 694464 - protein, 16 aa, Homo sapiens
  CDR3 for beta chain variable domain of TCR clone 347232 (TRBV7-2, TRBJ2-6)
CAILSGVSSGANVLTF

SEQ ID NO: 694465 - protein, 17 aa, Homo sapiens
  CDR3 for alpha chain variable domain of TCR clone 347233 (TRAV3, TRAJ6)
CAVRDGPRAGGSYIPTV

SEQ ID NO: 694466 - protein, 18 aa, Homo sapiens
  CDR3 for beta chain variable domain of TCR clone 347233 (TRBV11-2, TRBJ1-6)
CASSLAVQGLSLNSPLHF

SEQ ID NO: 694467 - protein, 17 aa, Homo sapiens
  CDR3 for alpha chain variable domain of TCR clone 347234 (TRAV3, TRAJ42)
CAVRDRDYGGSQGNLIF

SEQ ID NO: 694468 - protein, 16 aa, Homo sapiens
  CDR3 for beta chain variable domain of TCR clone 347234 (TRBV20-1, TRBJ2-1)
CSGESRTGTVRNEQFF

SEQ ID NO: 694469 - protein, 15 aa, Homo sapiens
  CDR3 for alpha chain variable domain of TCR clone 347235 (TRAV2, TRAJ22)
CAVPSRGGSARQLSF

SEQ ID NO: 694470 - protein, 14 aa, Homo sapiens
  CDR3 for beta chain variable domain of TCR clone 347235 (TRBV5-1, TRBJ2-3)
CASSRGQGGGTQYF

SEQ ID NO: 694471 - protein, 18 aa, Homo sapiens
  CDR3 for alpha chain variable domain of TCR clone 347236 (TRAV26-1, TRAJ23)
CIVRVGLEAWNQGGKLIF

SEQ ID NO: 694472 - protein, 15 aa, Homo sapiens
  CDR3 for beta chain variable domain of TCR clone 347236 (TRBV10-3, TRBJ2-3)
CAISDWDRDTDTQYF

SEQ ID NO: 694473 - protein, 16 aa, Homo sapiens
  CDR3 for alpha chain variable domain of TCR clone 347237 (TRAV26-1, TRAJ52)
CIVSNAGGTSYGKLTF

SEQ ID NO: 694474 - protein, 18 aa, Homo sapiens
  CDR3 for beta chain variable domain of TCR clone 347237 (TRBV4-1, TRBJ1-4)
CASSPRTGGAWTNEKLFF

SEQ ID NO: 694475 - protein, 14 aa, Homo sapiens
  CDR3 for alpha chain variable domain of TCR clone 347238 (TRAV1-1, TRAJ28)
CAAPSGAGSYQLTF

SEQ ID NO: 694476 - protein, 13 aa, Homo sapiens
  CDR3 for beta chain variable domain of TCR clone 347238 (TRBV13, TRBJ2-5)
CASSPEVGETQYF

SEQ ID NO: 694477 - protein, 14 aa, Homo sapiens
  CDR3 for alpha chain variable domain of TCR clone 347239 (TRAV8-3, TRAJ47)
CAVGAQGYGNKLVF

SEQ ID NO: 694478 - protein, 16 aa, Homo sapiens
  CDR3 for beta chain variable domain of TCR clone 347239 (TRBV19, TRBJ2-2)
CASSTARASNTGELFF

SEQ ID NO: 694479 - protein, 13 aa, Homo sapiens
  CDR3 for alpha chain variable domain of TCR clone 347240 (TRAV1-2, TRAJ9)
CAALNTGGFETIF

SEQ ID NO: 694480 - protein, 15 aa, Homo sapiens
  CDR3 for beta chain variable domain of TCR clone 347240 (TRBV6-3, TRBJ2-7)
CASSSPGTVFYEQYF

SEQ ID NO: 694481 - protein, 11 aa, Homo sapiens
  CDR3 for alpha chain variable domain of TCR clone 347241 (TRAV25, TRAJ47)
CAGLYGNKLVV

SEQ ID NO: 694482 - protein, 14 aa, Homo sapiens
  CDR3 for beta chain variable domain of TCR clone 347241 (TRBV19, TRBJ2-1)
CASKEGVQVNEQFF

SEQ ID NO: 694483 - protein, 13 aa, Homo sapiens
  CDR3 for alpha chain variable domain of TCR clone 347242 (TRAV1-2, TRAJ12)
CAVSMDSSYKFIF

SEQ ID NO: 694484 - protein, 14 aa, Homo sapiens
  CDR3 for beta chain variable domain of TCR clone 347242 (TRBV19, TRBJ2-1)
CASSSGRDYNEQFF

SEQ ID NO: 694485 - protein, 14 aa, Homo sapiens
  CDR3 for alpha chain variable domain of TCR clone 347243 (TRAV8-1, TRAJ9)
CAVNAWTGGFKTIF

SEQ ID NO: 694486 - protein, 12 aa, Homo sapiens
  CDR3 for beta chain variable domain of TCR clone 347243 (TRBV12-5, TRBJ2-5)
CASGQGVETQYF

SEQ ID NO: 694487 - protein, 18 aa, Homo sapiens
  CDR3 for alpha chain variable domain of TCR clone 347244 (TRAV12-3, TRAJ52)
CAMSVGEAGGTSYGKLTF

SEQ ID NO: 694488 - protein, 14 aa, Homo sapiens
  CDR3 for beta chain variable domain of TCR clone 347244 (TRBV7-2, TRBJ2-7)
CASSPKTSFYEQYF

SEQ ID NO: 694489 - protein, 14 aa, Homo sapiens
  CDR3 for alpha chain variable domain of TCR clone 347245 (TRAV12-2, TRAJ53)
CAVKGGGSNYKLTF

SEQ ID NO: 694490 - protein, 14 aa, Homo sapiens
  CDR3 for beta chain variable domain of TCR clone 347245 (TRBV7-7, TRBJ2-2)
CATRQDSDNGELFF

SEQ ID NO: 694491 - protein, 18 aa, Homo sapiens
  CDR3 for alpha chain variable domain of TCR clone 347246 (TRAV21, TRAJ52)
CAVRPSPAGGTSYGKLTF

SEQ ID NO: 694492 - protein, 14 aa, Homo sapiens
  CDR3 for beta chain variable domain of TCR clone 347246 (TRBV7-9, TRBJ1-2)
CASSSPLREYGYTF

SEQ ID NO: 694493 - protein, 15 aa, Homo sapiens
  CDR3 for alpha chain variable domain of TCR clone 347247 (TRAV27, TRAJ38)
CAARRNTGNNRKLIW

SEQ ID NO: 694494 - protein, 13 aa, Homo sapiens
  CDR3 for beta chain variable domain of TCR clone 347247 (TRBV12-5, TRBJ2-3)
CASDDRQSDTQYF

SEQ ID NO: 694495 - protein, 18 aa, Homo sapiens
  CDR3 for alpha chain variable domain of TCR clone 347248 (TRAV21, TRAJ52)
CAVRPSPAGGTSYVKLTF

SEQ ID NO: 694496 - protein, 13 aa, Homo sapiens
  CDR3 for beta chain variable domain of TCR clone 347248 (TRBV29-1, TRBJ2-1)
CSVEGGRVNEQFF

SEQ ID NO: 694497 - protein, 14 aa, Homo sapiens
  CDR3 for alpha chain variable domain of TCR clone 347249 (TRAV1-2, TRAJ16)
CAVNRFSDGQTLLF

SEQ ID NO: 694498 - protein, 13 aa, Homo sapiens
  CDR3 for beta chain variable domain of TCR clone 347249 (TRBV6-5, TRBJ1-1)
QTSVYFFALRAFF

SEQ ID NO: 694499 - protein, 13 aa, Homo sapiens
  CDR3 for alpha chain variable domain of TCR clone 347250 (TRAV2, TRAJ29)
CAAQNSGNTPLVF

SEQ ID NO: 694500 - protein, 14 aa, Homo sapiens
  CDR3 for beta chain variable domain of TCR clone 347250 (TRBV7-9, TRBJ2-4)
CASSVAMGGNILYF

SEQ ID NO: 694501 - protein, 15 aa, Homo sapiens
  CDR3 for alpha chain variable domain of TCR clone 347251 (TRAV38-2/DV8, TRAJ48)
CAYRSGGFGNEKSTF

SEQ ID NO: 694502 - protein, 16 aa, Homo sapiens
  CDR3 for beta chain variable domain of TCR clone 347251 (TRBV28, TRBJ2-7)
CASSPWVATGDLSQYF

SEQ ID NO: 694503 - protein, 14 aa, Homo sapiens
  CDR3 for alpha chain variable domain of TCR clone 347252 (TRAV8-3, TRAJ35)
CAVVPQGFGNVLHC

SEQ ID NO: 694504 - protein, 13 aa, Homo sapiens
  CDR3 for beta chain variable domain of TCR clone 347252 (TRBV12-4, TRBJ1-1)
CASSPGTGFEAFF

SEQ ID NO: 694505 - protein, 17 aa, Homo sapiens
  CDR3 for alpha chain variable domain of TCR clone 347253 (TRAV3, TRAJ6)
CAVGDGPRAGGSYIPTF

SEQ ID NO: 694506 - protein, 17 aa, Homo sapiens
  CDR3 for beta chain variable domain of TCR clone 347253 (TRBV7-8, TRBJ2-6)
CASSAGTGGAGANVLTF

SEQ ID NO: 694507 - protein, 22 aa, Homo sapiens
  CDR3 for alpha chain variable domain of TCR clone 347254 (TRAV3, TRAJ38)
CAVRDCLNAGNNHIQNPDPAVY

SEQ ID NO: 694508 - protein, 19 aa, Homo sapiens
  CDR3 for beta chain variable domain of TCR clone 347254 (TRBV7-2, TRBJ2-3)
CASSFLSRSWGGGTDTQYF

SEQ ID NO: 694509 - protein, 16 aa, Homo sapiens
  CDR3 for alpha chain variable domain of TCR clone 347255 (TRAV12-1, TRAJ53)
CVVTSVAGGSNYKLTF

SEQ ID NO: 694510 - protein, 16 aa, Homo sapiens
  CDR3 for beta chain variable domain of TCR clone 347255 (TRBV6-6, TRBJ2-3)
CASRYSHAGSTDTQYF

SEQ ID NO: 694511 - protein, 15 aa, Homo sapiens
  CDR3 for alpha chain variable domain of TCR clone 347256 (TRAV27, TRAJ17)
CRSTMIKAAGNKITF

SEQ ID NO: 694512 - protein, 13 aa, Homo sapiens
  CDR3 for beta chain variable domain of TCR clone 347256 (TRBV18, TRBJ2-7)
CASQSGGGYEQYF

SEQ ID NO: 694513 - protein, 14 aa, Homo sapiens
  CDR3 for alpha chain variable domain of TCR clone 347257 (TRAV3, TRAJ22)
CAVRDRGFCKATDL

SEQ ID NO: 694514 - protein, 16 aa, Homo sapiens
  CDR3 for beta chain variable domain of TCR clone 347257 (TRBV5-4, TRBJ2-3)
CASQQPGAGGADTQYF

SEQ ID NO: 694515 - protein, 12 aa, Homo sapiens
  CDR3 for alpha chain variable domain of TCR clone 347258 (TRAV5, TRAJ41)
CAENNFGYALNF

SEQ ID NO: 694516 - protein, 13 aa, Homo sapiens
  CDR3 for beta chain variable domain of TCR clone 347258 (TRBV29-1, TRBJ1-3)
CSADVDSGNTMYF

SEQ ID NO: 694517 - protein, 11 aa, Homo sapiens
  CDR3 for alpha chain variable domain of TCR clone 347259 (TRAV16, TRAJ49)
CSLNTGNQFYF

SEQ ID NO: 694518 - protein, 12 aa, Homo sapiens
  CDR3 for beta chain variable domain of TCR clone 347259 (TRBV7-9, TRBJ1-4)
CASSTDREKLFC

SEQ ID NO: 694519 - protein, 16 aa, Homo sapiens
  CDR3 for alpha chain variable domain of TCR clone 347260 (TRAV1-2, TRAJ10)
CAVRGVLTGGGNKLTF

SEQ ID NO: 694520 - protein, 14 aa, Homo sapiens
  CDR3 for beta chain variable domain of TCR clone 347260 (TRBV2, TRBJ2-3)
CASSEGQNTDTQYF

SEQ ID NO: 694521 - protein, 12 aa, Homo sapiens
  CDR3 for alpha chain variable domain of TCR clone 347261 (TRAV26-2, TRAJ48)
CILRKRNEKLTF

SEQ ID NO: 694522 - protein, 14 aa, Homo sapiens
  CDR3 for beta chain variable domain of TCR clone 347261 (TRBV28, TRBJ2-7)
CASSTLRGRFEQYF

SEQ ID NO: 694523 - protein, 11 aa, Homo sapiens
  CDR3 for alpha chain variable domain of TCR clone 347262 (TRAV21, TRAJ33)
CAKMYSNYQLI

SEQ ID NO: 694524 - protein, 13 aa, Homo sapiens
  CDR3 for beta chain variable domain of TCR clone 347262 (TRBV12-4, TRBJ2-5)
CASSPGTEETQYF

SEQ ID NO: 694525 - protein, 15 aa, Homo sapiens
  CDR3 for alpha chain variable domain of TCR clone 347263 (TRAV1-2, TRAJ32)
CAVRGYGGASNKLIF

SEQ ID NO: 694526 - protein, 15 aa, Homo sapiens
  CDR3 for beta chain variable domain of TCR clone 347263 (TRBV25-1, TRBJ2-5)
CASSDTGTHQETQYF

SEQ ID NO: 694527 - protein, 15 aa, Homo sapiens
  CDR3 for alpha chain variable domain of TCR clone 347264 (TRAV3, TRAJ20)
CAVRDSRSNAYKPSF

SEQ ID NO: 694528 - protein, 14 aa, Homo sapiens
  CDR3 for beta chain variable domain of TCR clone 347264 (TRBV20-1, TRBJ2-7)
CSARRGNGIYEQYF

SEQ ID NO: 694529 - protein, 11 aa, Homo sapiens
  CDR3 for alpha chain variable domain of TCR clone 347265 (TRAV1-1, TRAJ16)
CAAGDGQKLLF

SEQ ID NO: 694530 - protein, 15 aa, Homo sapiens
  CDR3 for beta chain variable domain of TCR clone 347265 (TRBV28, TRBJ1-2)
CASIPQGSDEYGYTF

SEQ ID NO: 694531 - protein, 14 aa, Homo sapiens
  CDR3 for alpha chain variable domain of TCR clone 347266 (TRAV12-2, TRAJ45)
CALPERGGADGFTF

SEQ ID NO: 694532 - protein, 14 aa, Homo sapiens
  CDR3 for beta chain variable domain of TCR clone 347266 (TRBV18, TRBJ1-5)
CGSSPGNSNQPQHF

SEQ ID NO: 694533 - protein, 13 aa, Homo sapiens
  CDR3 for alpha chain variable domain of TCR clone 347267 (TRAV12-1, TRAJ40)
CVVNSSGTYKYIF

SEQ ID NO: 694534 - protein, 14 aa, Homo sapiens
  CDR3 for beta chain variable domain of TCR clone 347267 (TRBV2, TRBJ1-6)
CASEVSSYKSPLHF

SEQ ID NO: 694535 - protein, 15 aa, Homo sapiens
  CDR3 for alpha chain variable domain of TCR clone 347268 (TRAV12-3, TRAJ6)
CAMSATTGGRYIPTF

SEQ ID NO: 694536 - protein, 16 aa, Homo sapiens
  CDR3 for beta chain variable domain of TCR clone 347268 (TRBV20-1, TRBJ1-2)
CSASMGQGVADYGYTF

SEQ ID NO: 694537 - protein, 23 aa, Homo sapiens
  CDR3 for alpha chain variable domain of TCR clone 347269 (TRAV26-1, TRAJ38)
CIADNAGNNHIQNPDPAVYQLRD

SEQ ID NO: 694538 - protein, 16 aa, Homo sapiens
  CDR3 for beta chain variable domain of TCR clone 347269 (TRBV7-2, TRBJ1-2)
CASSSNQDRRGHGYTF

SEQ ID NO: 694539 - protein, 15 aa, Homo sapiens
  CDR3 for alpha chain variable domain of TCR clone 347270 (TRAV3, TRAJ22)
CAVRDRGGSARQPNF

SEQ ID NO: 694540 - protein, 16 aa, Homo sapiens
  CDR3 for beta chain variable domain of TCR clone 347270 (TRBV5-4, TRBJ2-3)
CASQQPGAGGADTQYF

SEQ ID NO: 694541 - protein, 12 aa, Homo sapiens
  CDR3 for alpha chain variable domain of TCR clone 347271 (TRAV17, TRAJ12)
CATLRSSYKLIF

SEQ ID NO: 694542 - protein, 15 aa, Homo sapiens
  CDR3 for beta chain variable domain of TCR clone 347271 (TRBV15, TRBJ1-5)
CATSRDPVSNQPQHF

SEQ ID NO: 694543 - protein, 11 aa, Homo sapiens
  CDR3 for alpha chain variable domain of TCR clone 347272 (TRAV25, TRAJ47)
CAGPYGNKLVF

SEQ ID NO: 694544 - protein, 16 aa, Homo sapiens
  CDR3 for beta chain variable domain of TCR clone 347272 (TRBV12-4, TRBJ1-5)
CASSRPVGGSNQPQHF

SEQ ID NO: 694545 - protein, 18 aa, Homo sapiens
  CDR3 for alpha chain variable domain of TCR clone 347273 (TRAV21, TRAJ52)
CAVRPSPAGGPSYVKLTF

SEQ ID NO: 694546 - protein, 17 aa, Homo sapiens
  CDR3 for beta chain variable domain of TCR clone 347273 (TRBV14, TRBJ2-3)
CASSQEPSGLSTDTQYF

SEQ ID NO: 694547 - protein, 14 aa, Homo sapiens
  CDR3 for alpha chain variable domain of TCR clone 347274 (TRAV1-2, TRAJ16)
CAVIRFSDGQKLLF

SEQ ID NO: 694548 - protein, 11 aa, Homo sapiens
  CDR3 for beta chain variable domain of TCR clone 347274 (TRBV29-1, TRBJ2-5)
CSEDRTGTQYF

SEQ ID NO: 694549 - protein, 13 aa, Homo sapiens
  CDR3 for alpha chain variable domain of TCR clone 347275 (TRAV35, TRAJ48)
CAGHEFGNDKLTF

SEQ ID NO: 694550 - protein, 16 aa, Homo sapiens
  CDR3 for beta chain variable domain of TCR clone 347275 (TRBV12-5, TRBJ2-5)
CASGPRTSGNQETQYF

SEQ ID NO: 694551 - protein, 13 aa, Homo sapiens
  CDR3 for alpha chain variable domain of TCR clone 347276 (TRAV23/DV6, TRAJ33)
CAASADSNYQLIW

SEQ ID NO: 694552 - protein, 20 aa, Homo sapiens
  CDR3 for beta chain variable domain of TCR clone 347276 (TRBV28, TRBJ2-1)
CASTPIGRSPGLAGGNEQFF

SEQ ID NO: 694553 - protein, 15 aa, Homo sapiens
  CDR3 for alpha chain variable domain of TCR clone 347277 (TRAV13-1, TRAJ17)
CAASIERAASNKLTF

SEQ ID NO: 694554 - protein, 13 aa, Homo sapiens
  CDR3 for beta chain variable domain of TCR clone 347277 (TRBV7-7, TRBJ2-3)
CASSLSRADTQYF

SEQ ID NO: 694555 - protein, 12 aa, Homo sapiens
  CDR3 for alpha chain variable domain of TCR clone 347278 (TRAV8-3, TRAJ41)
CAVGALGYALNF

SEQ ID NO: 694556 - protein, 13 aa, Homo sapiens
  CDR3 for beta chain variable domain of TCR clone 347278 (TRBV7-9, TRBJ1-2)
CASSLKQNYGYTF

SEQ ID NO: 694557 - protein, 13 aa, Homo sapiens
  CDR3 for alpha chain variable domain of TCR clone 347279 (TRAV21, TRAJ27)
CAARPGNAGKSTF

SEQ ID NO: 694558 - protein, 16 aa, Homo sapiens
  CDR3 for beta chain variable domain of TCR clone 347279 (TRBV7-3, TRBJ2-2)
CASSLKRGALSGELFF

SEQ ID NO: 694559 - protein, 13 aa, Homo sapiens
  CDR3 for alpha chain variable domain of TCR clone 347280 (TRAV8-6, TRAJ50)
CAVIKTSYDKLIF

SEQ ID NO: 694560 - protein, 13 aa, Homo sapiens
  CDR3 for beta chain variable domain of TCR clone 347280 (TRBV4-2, TRBJ1-1)
CASSQAGNTEAFF

SEQ ID NO: 694561 - protein, 13 aa, Homo sapiens
  CDR3 for alpha chain variable domain of TCR clone 347281 (TRAV8-6, TRAJ16)
CAVSRWVGQKLLF

SEQ ID NO: 694562 - protein, 15 aa, Homo sapiens
  CDR3 for beta chain variable domain of TCR clone 347281 (TRBV12-4, TRBJ2-1)
CASSLSTGVSNEQFS

SEQ ID NO: 694563 - protein, 16 aa, Homo sapiens
  CDR3 for alpha chain variable domain of TCR clone 347282 (TRAV12-3, TRAJ53)
CAMSPGSGGSNYKLTF

SEQ ID NO: 694564 - protein, 20 aa, Homo sapiens
  CDR3 for beta chain variable domain of TCR clone 347282 (TRBV7-8, TRBJ2-2)
FASSHLFPGPTIHITGELFF

SEQ ID NO: 694565 - protein, 18 aa, Homo sapiens
  CDR3 for alpha chain variable domain of TCR clone 347283 (TRAV21, TRAJ13)
CAVPRSFWGLPESYLCNW

SEQ ID NO: 694566 - protein, 15 aa, Homo sapiens
  CDR3 for beta chain variable domain of TCR clone 347283 (TRBV6-3, TRBJ2-7)
CASSSPGTVFYEQYF

SEQ ID NO: 694567 - protein, 14 aa, Homo sapiens
  CDR3 for alpha chain variable domain of TCR clone 347284 (TRAV20, TRAJ37)
CAVQSSSNTGKLIF

SEQ ID NO: 694568 - protein, 14 aa, Homo sapiens
  CDR3 for beta chain variable domain of TCR clone 347284 (TRBV7-3, TRBJ2-2)
CASSLNSNTGELYF

SEQ ID NO: 694569 - protein, 17 aa, Homo sapiens
  CDR3 for alpha chain variable domain of TCR clone 347285 (TRAV16, TRAJ42)
CALSPKLYGGSQGNLIF

SEQ ID NO: 694570 - protein, 13 aa, Homo sapiens
  CDR3 for beta chain variable domain of TCR clone 347285 (TRBV19, TRBJ1-5)
CASSTRRDQAQHF

SEQ ID NO: 694571 - protein, 14 aa, Homo sapiens
  CDR3 for alpha chain variable domain of TCR clone 347286 (TRAV8-4, TRAJ9)
CAVRINTGGFKTIF

SEQ ID NO: 694572 - protein, 18 aa, Homo sapiens
  CDR3 for beta chain variable domain of TCR clone 347286 (TRBV7-9, TRBJ2-7)
CASSLTTSGSRTWYEQYF

SEQ ID NO: 694573 - protein, 14 aa, Homo sapiens
  CDR3 for alpha chain variable domain of TCR clone 347287 (TRAV13-1, TRAJ6)
CAASITGGSYIPTF

SEQ ID NO: 694574 - protein, 13 aa, Homo sapiens
  CDR3 for beta chain variable domain of TCR clone 347287 (TRBV19, TRBJ2-7)
CASSPRQSYEQYF

SEQ ID NO: 694575 - protein, 13 aa, Homo sapiens
  CDR3 for alpha chain variable domain of TCR clone 347288 (TRAV26-1, )
CLVSHRVEGIWNQ

SEQ ID NO: 694576 - protein, 14 aa, Homo sapiens
  CDR3 for beta chain variable domain of TCR clone 347288 (TRBV20-1, TRBJ2-7)
CSAWTALSSYEQYF

SEQ ID NO: 694577 - protein, 12 aa, Homo sapiens
  CDR3 for alpha chain variable domain of TCR clone 347289 (TRAV8-3, TRAJ20)
CAVGADDYKLSF

SEQ ID NO: 694578 - protein, 16 aa, Homo sapiens
  CDR3 for beta chain variable domain of TCR clone 347289 (TRBV19, TRBJ2-2)
CTSRSPGTGATGELFF

SEQ ID NO: 694579 - protein, 15 aa, Homo sapiens
  CDR3 for alpha chain variable domain of TCR clone 347290 (TRAV3, TRAJ42)
CAVRGGTGSQGNLIF

SEQ ID NO: 694580 - protein, 14 aa, Homo sapiens
  CDR3 for beta chain variable domain of TCR clone 347290 (TRBV19, TRBJ1-2)
CASSSLCARDVYTF

SEQ ID NO: 694581 - protein, 11 aa, Homo sapiens
  CDR3 for alpha chain variable domain of TCR clone 347291 (TRAV21, TRAJ41)
CAVRSGYALNF

SEQ ID NO: 694582 - protein, 13 aa, Homo sapiens
  CDR3 for beta chain variable domain of TCR clone 347291 (TRBV7-3, TRBJ1-2)
CASSLKRGYGYTF

SEQ ID NO: 694583 - protein, 12 aa, Homo sapiens
  CDR3 for alpha chain variable domain of TCR clone 347292 (TRAV16, TRAJ10)
WSRTGGGNKLTF

SEQ ID NO: 694584 - protein, 14 aa, Homo sapiens
  CDR3 for beta chain variable domain of TCR clone 347292 (TRBV7-2, TRBJ2-7)
CASRSQGAAYEQYF

SEQ ID NO: 694585 - protein, 14 aa, Homo sapiens
  CDR3 for alpha chain variable domain of TCR clone 347293 (TRAV17, TRAJ57)
CATDPQGGSEKLVF

SEQ ID NO: 694586 - protein, 18 aa, Homo sapiens
  CDR3 for beta chain variable domain of TCR clone 347293 (TRBV6-6, TRBJ1-3)
CASSYSKWDSFSGNTIYF

SEQ ID NO: 694587 - protein, 16 aa, Homo sapiens
  CDR3 for alpha chain variable domain of TCR clone 347294 (TRAV13-1, TRAJ18)
CAASRMRGSTLGRLYF

SEQ ID NO: 694588 - protein, 16 aa, Homo sapiens
  CDR3 for beta chain variable domain of TCR clone 347294 (TRBV27, TRBJ1-1)
CASSSRGRTGYTGAFF

SEQ ID NO: 694589 - protein, 15 aa, Homo sapiens
  CDR3 for alpha chain variable domain of TCR clone 347295 (TRAV13-2, TRAJ45)
CAEHHSGGGADGLTF

SEQ ID NO: 694590 - protein, 13 aa, Homo sapiens
  CDR3 for beta chain variable domain of TCR clone 347295 (TRBV15, TRBJ1-6)
CATSGGLNSPLHF

SEQ ID NO: 694591 - protein, 12 aa, Homo sapiens
  CDR3 for alpha chain variable domain of TCR clone 347296 (TRAV22, TRAJ29)
CAPHSGNTPLVF

SEQ ID NO: 694592 - protein, 14 aa, Homo sapiens
  CDR3 for beta chain variable domain of TCR clone 347296 (TRBV11-2, TRBJ2-7)
CASSLGAGAYEQYF

SEQ ID NO: 694593 - protein, 15 aa, Homo sapiens
  CDR3 for alpha chain variable domain of TCR clone 347297 (TRAV2, TRAJ9)
CAVEDRGTGGFKTIF

SEQ ID NO: 694594 - protein, 16 aa, Homo sapiens
  CDR3 for beta chain variable domain of TCR clone 347297 (TRBV19, TRBJ2-3)
CASIPGAASRTDTQYF

SEQ ID NO: 694595 - protein, 13 aa, Homo sapiens
  CDR3 for alpha chain variable domain of TCR clone 347298 (TRAV3, TRAJ21)
CAVREPDFNKFYF

SEQ ID NO: 694596 - protein, 16 aa, Homo sapiens
  CDR3 for beta chain variable domain of TCR clone 347298 (TRBV3-1, TRBJ2-5)
CASSPGQFNGFGTQYF

SEQ ID NO: 694597 - protein, 14 aa, Homo sapiens
  CDR3 for alpha chain variable domain of TCR clone 347299 (TRAV12-2, TRAJ17)
CAVNIKAAGNKLTF

SEQ ID NO: 694598 - protein, 14 aa, Homo sapiens
  CDR3 for beta chain variable domain of TCR clone 347299 (TRBV13, TRBJ2-1)
CASSPRPRYNEQFF

SEQ ID NO: 694599 - protein, 12 aa, Homo sapiens
  CDR3 for alpha chain variable domain of TCR clone 347300 (TRAV13-2, TRAJ23)
CAERHRGGKLIF

SEQ ID NO: 694600 - protein, 13 aa, Homo sapiens
  CDR3 for beta chain variable domain of TCR clone 347300 (TRBV7-9, TRBJ1-2)
CASSLKKNYGYTF

SEQ ID NO: 694601 - protein, 10 aa, Homo sapiens
  CDR3 for alpha chain variable domain of TCR clone 347301 (TRAV2, TRAJ43)
CCGNNNDMRF

SEQ ID NO: 694602 - protein, 15 aa, Homo sapiens
  CDR3 for beta chain variable domain of TCR clone 347301 (TRBV10-3, TRBJ2-3)
CAISLTSGGTDTQYF

SEQ ID NO: 694603 - protein, 14 aa, Homo sapiens
  CDR3 for alpha chain variable domain of TCR clone 347302 (TRAV12-3, TRAJ13)
CAMRNSGGYKKVTF

SEQ ID NO: 694604 - protein, 14 aa, Homo sapiens
  CDR3 for beta chain variable domain of TCR clone 347302 (TRBV4-1, TRBJ1-6)
CASSPGSDSSPLHF

SEQ ID NO: 694605 - protein, 13 aa, Homo sapiens
  CDR3 for alpha chain variable domain of TCR clone 347303 (TRAV29/DV5, TRAJ31)
CAASRNNNARLMF

SEQ ID NO: 694606 - protein, 12 aa, Homo sapiens
  CDR3 for beta chain variable domain of TCR clone 347303 (TRBV7-6, TRBJ2-7)
CASSLADSEQYF

SEQ ID NO: 694607 - protein, 14 aa, Homo sapiens
  CDR3 for alpha chain variable domain of TCR clone 347304 (TRAV12-2, TRAJ17)
CAVLFKAAGTKLTF

SEQ ID NO: 694608 - protein, 12 aa, Homo sapiens
  CDR3 for beta chain variable domain of TCR clone 347304 (TRBV29-1, TRBJ2-3)
CSVTGGADTQYF

SEQ ID NO: 694609 - protein, 13 aa, Homo sapiens
  CDR3 for alpha chain variable domain of TCR clone 347305 (TRAV21, TRAJ20)
CAVGLRVDYKLSF

SEQ ID NO: 694610 - protein, 17 aa, Homo sapiens
  CDR3 for beta chain variable domain of TCR clone 347305 (TRBV4-3, TRBJ2-1)
CASSQFSSGRASGEQFF

SEQ ID NO: 694611 - protein, 15 aa, Homo sapiens
  CDR3 for alpha chain variable domain of TCR clone 347306 (TRAV12-1, TRAJ44)
CVVDEYTGTASRLTF

SEQ ID NO: 694612 - protein, 15 aa, Homo sapiens
  CDR3 for beta chain variable domain of TCR clone 347306 (TRBV11-3, TRBJ2-7)
CASSPGPASSYEQYF

SEQ ID NO: 694613 - protein, 11 aa, Homo sapiens
  CDR3 for alpha chain variable domain of TCR clone 347307 (TRAV1-1, TRAJ23)
CAVCQGGKLIF

SEQ ID NO: 694614 - protein, 13 aa, Homo sapiens
  CDR3 for beta chain variable domain of TCR clone 347307 (TRBV7-3, TRBJ1-1)
CASSQDWGAEAFF

SEQ ID NO: 694615 - protein, 10 aa, Homo sapiens
  CDR3 for alpha chain variable domain of TCR clone 347308 (TRAV8-2, TRAJ29)
CTGGNTPHVF

SEQ ID NO: 694616 - protein, 13 aa, Homo sapiens
  CDR3 for beta chain variable domain of TCR clone 347308 (TRBV20-1, TRBJ1-1)
CSARGGGNTEAFF

SEQ ID NO: 694617 - protein, 14 aa, Homo sapiens
  CDR3 for alpha chain variable domain of TCR clone 347309 (TRAV12-3, TRAJ10)
SHLPLTGEGNKLTF

SEQ ID NO: 694618 - protein, 15 aa, Homo sapiens
  CDR3 for beta chain variable domain of TCR clone 347309 (TRBV29-1, TRBJ2-6)
CSVGDRGSGANVLTF

SEQ ID NO: 694619 - protein, 18 aa, Homo sapiens
  CDR3 for alpha chain variable domain of TCR clone 347310 (TRAV26-1, TRAJ22)
CIVRVALISSGSARQLTF

SEQ ID NO: 694620 - protein, 15 aa, Homo sapiens
  CDR3 for beta chain variable domain of TCR clone 347310 (TRBV4-3, TRBJ2-1)
CASSQESAIYNEQFF

SEQ ID NO: 694621 - protein, 16 aa, Homo sapiens
  CDR3 for alpha chain variable domain of TCR clone 347311 (TRAV36/DV7, )
CALTDIQNPDPAVYQL

SEQ ID NO: 694622 - protein, 13 aa, Homo sapiens
  CDR3 for beta chain variable domain of TCR clone 347311 (TRBV4-1, TRBJ2-7)
CASSQGQAYEQYF

SEQ ID NO: 694623 - protein, 15 aa, Homo sapiens
  CDR3 for alpha chain variable domain of TCR clone 347312 (TRAV8-2, )
CVVNIQNPAPAVYQL

SEQ ID NO: 694624 - protein, 14 aa, Homo sapiens
  CDR3 for beta chain variable domain of TCR clone 347312 (TRBV7-9, TRBJ2-5)
CASSLVGGEETQYF

SEQ ID NO: 694625 - protein, 13 aa, Homo sapiens
  CDR3 for alpha chain variable domain of TCR clone 347313 (TRAV21, TRAJ27)
CAARPGNAGKSTF

SEQ ID NO: 694626 - protein, 14 aa, Homo sapiens
  CDR3 for beta chain variable domain of TCR clone 347313 (TRBV7-6, TRBJ2-1)
GASSLGGGQMSSSS

SEQ ID NO: 694627 - protein, 13 aa, Homo sapiens
  CDR3 for alpha chain variable domain of TCR clone 347314 (TRAV13-1, TRAJ41)
CAASNDSGYALNF

SEQ ID NO: 694628 - protein, 17 aa, Homo sapiens
  CDR3 for beta chain variable domain of TCR clone 347314 (TRBV13, TRBJ2-3)
CASSLSRVAGGRNTQYF

SEQ ID NO: 694629 - protein, 14 aa, Homo sapiens
  CDR3 for alpha chain variable domain of TCR clone 347315 (TRAV1-2, TRAJ27)
CAVRAGTNAGKSTF

SEQ ID NO: 694630 - protein, 15 aa, Homo sapiens
  CDR3 for beta chain variable domain of TCR clone 347315 (TRBV18, TRBJ2-7)
CASSPLQGRTYEQYF

SEQ ID NO: 694631 - protein, 16 aa, Homo sapiens
  CDR3 for alpha chain variable domain of TCR clone 347316 (TRAV27, TRAJ53)
CAAPEVSGGSNYKLTF

SEQ ID NO: 694632 - protein, 14 aa, Homo sapiens
  CDR3 for beta chain variable domain of TCR clone 347316 (TRBV4-3, TRBJ1-5)
CASSQGGQGWPQHF

SEQ ID NO: 694633 - protein, 17 aa, Homo sapiens
  CDR3 for alpha chain variable domain of TCR clone 347317 (TRAV13-1, TRAJ52)
CAASSGAGGTSYGKLTL

SEQ ID NO: 694634 - protein, 21 aa, Homo sapiens
  CDR3 for beta chain variable domain of TCR clone 347317 (TRBV6-1, TRBJ1-1)
CASSGVGNYKGISGFDTEAFF

SEQ ID NO: 694635 - protein, 14 aa, Homo sapiens
  CDR3 for alpha chain variable domain of TCR clone 347318 (TRAV8-4, TRAJ29)
CAVSAAEGNTPLVF

SEQ ID NO: 694636 - protein, 13 aa, Homo sapiens
  CDR3 for beta chain variable domain of TCR clone 347318 (TRBV12-4, TRBJ2-7)
CASSFQGRYEQYF

SEQ ID NO: 694637 - protein, 12 aa, Homo sapiens
  CDR3 for alpha chain variable domain of TCR clone 347319 (TRAV21, TRAJ11)
CAVRGGNSTLTF

SEQ ID NO: 694638 - protein, 15 aa, Homo sapiens
  CDR3 for beta chain variable domain of TCR clone 347319 (TRBV20-1, TRBJ2-7)
CSARDPTEVGHEQYF

SEQ ID NO: 694639 - protein, 12 aa, Homo sapiens
  CDR3 for alpha chain variable domain of TCR clone 347320 (TRAV13-1, TRAJ9)
CASHTGGFKTIF

SEQ ID NO: 694640 - protein, 18 aa, Homo sapiens
  CDR3 for beta chain variable domain of TCR clone 347320 (TRBV11-2, TRBJ2-3)
CARSLGGASRGAPNTQYF

SEQ ID NO: 694641 - protein, 15 aa, Homo sapiens
  CDR3 for alpha chain variable domain of TCR clone 347321 (TRAV12-3, TRAJ44)
CAMSGLTGTASKLPF

SEQ ID NO: 694642 - protein, 15 aa, Homo sapiens
  CDR3 for beta chain variable domain of TCR clone 347321 (TRBV20-1, TRBJ2-7)
CSARTPGTITYGQYF

SEQ ID NO: 694643 - protein, 10 aa, Homo sapiens
  CDR3 for alpha chain variable domain of TCR clone 347322 (TRAV13-1, TRAJ30)
CAARDDKIIF

SEQ ID NO: 694644 - protein, 12 aa, Homo sapiens
  CDR3 for beta chain variable domain of TCR clone 347322 (TRBV11-2, TRBJ2-2)
CASSLGGGELFF

SEQ ID NO: 694645 - protein, 15 aa, Homo sapiens
  CDR3 for alpha chain variable domain of TCR clone 347323 (TRAV13-1, TRAJ52)
CAADAGGTSYGKLTF

SEQ ID NO: 694646 - protein, 13 aa, Homo sapiens
  CDR3 for beta chain variable domain of TCR clone 347323 (TRBV12-4, TRBJ2-7)
CASSFVPTAEQYF

SEQ ID NO: 694647 - protein, 12 aa, Homo sapiens
  CDR3 for alpha chain variable domain of TCR clone 347324 (TRAV21, TRAJ31)
CVLAGNNARLMF

SEQ ID NO: 694648 - protein, 15 aa, Homo sapiens
  CDR3 for beta chain variable domain of TCR clone 347324 (TRBV28, TRBJ2-5)
CASSSGRTIQETQYF

SEQ ID NO: 694649 - protein, 12 aa, Homo sapiens
  CDR3 for alpha chain variable domain of TCR clone 347325 (TRAV2, TRAJ34)
CAVERNTDKLIL

SEQ ID NO: 694650 - protein, 14 aa, Homo sapiens
  CDR3 for beta chain variable domain of TCR clone 347325 (TRBV7-9, TRBJ2-1)
CASSDNSGYNEQFF

SEQ ID NO: 694651 - protein, 11 aa, Homo sapiens
  CDR3 for alpha chain variable domain of TCR clone 347326 (TRAV8-2, TRAJ45)
CTGGGADGLTF

SEQ ID NO: 694652 - protein, 14 aa, Homo sapiens
  CDR3 for beta chain variable domain of TCR clone 347326 (TRBV11-2, TRBJ2-5)
CASSRTGGIETQYF

SEQ ID NO: 694653 - protein, 14 aa, Homo sapiens
  CDR3 for alpha chain variable domain of TCR clone 347327 (TRAV9-2, TRAJ39)
CALYIYNAGNMLTF

SEQ ID NO: 694654 - protein, 15 aa, Homo sapiens
  CDR3 for beta chain variable domain of TCR clone 347327 (TRBV19, TRBJ2-7)
CASSIGLAVSYEQYF

SEQ ID NO: 694655 - protein, 16 aa, Homo sapiens
  CDR3 for alpha chain variable domain of TCR clone 347328 (TRAV8-3, TRAJ10)
CAVGPGVAGGGNKLTF

SEQ ID NO: 694656 - protein, 13 aa, Homo sapiens
  CDR3 for beta chain variable domain of TCR clone 347328 (TRBV18, TRBJ1-1)
CASSPGPSGEAFF

SEQ ID NO: 694657 - protein, 18 aa, Homo sapiens
  CDR3 for alpha chain variable domain of TCR clone 347329 (TRAV12-3, TRAJ52)
CPMIRTNAGGTSYGKLTF

SEQ ID NO: 694658 - protein, 17 aa, Homo sapiens
  CDR3 for beta chain variable domain of TCR clone 347329 (TRBV7-3, TRBJ2-3)
CASSLMKRMRGADTQYF

SEQ ID NO: 694659 - protein, 12 aa, Homo sapiens
  CDR3 for alpha chain variable domain of TCR clone 347330 (TRAV13-1, TRAJ21)
CAAKEGFNKFYF

SEQ ID NO: 694660 - protein, 13 aa, Homo sapiens
  CDR3 for beta chain variable domain of TCR clone 347330 (TRBV3-1, TRBJ1-1)
CASSQLQGAEAFF

SEQ ID NO: 694661 - protein, 15 aa, Homo sapiens
  CDR3 for alpha chain variable domain of TCR clone 347331 (TRAV29/DV5, TRAJ24)
CAASGATDSWGKFQF

SEQ ID NO: 694662 - protein, 18 aa, Homo sapiens
  CDR3 for beta chain variable domain of TCR clone 347331 (TRBV11-2, TRBJ2-3)
CASSLGGASRGAPNTQYF

SEQ ID NO: 694663 - protein, 17 aa, Homo sapiens
  CDR3 for alpha chain variable domain of TCR clone 347332 (TRAV3, TRAJ6)
CAVRDGPRAGGNYITTF

SEQ ID NO: 694664 - protein, 14 aa, Homo sapiens
  CDR3 for beta chain variable domain of TCR clone 347332 (TRBV7-2, TRBJ2-7)
CASSPKTSFYEQYF

SEQ ID NO: 694665 - protein, 14 aa, Homo sapiens
  CDR3 for alpha chain variable domain of TCR clone 347333 (TRAV8-6, TRAJ22)
CAVRNAQSARQLTF

SEQ ID NO: 694666 - protein, 19 aa, Homo sapiens
  CDR3 for beta chain variable domain of TCR clone 347333 (TRBV7-2, TRBJ2-3)
CASSFLSRNWGGGTDTQYF

SEQ ID NO: 694667 - protein, 13 aa, Homo sapiens
  CDR3 for alpha chain variable domain of TCR clone 347334 (TRAV12-1, TRAJ16)
CVVNGPDGRKLLF

SEQ ID NO: 694668 - protein, 15 aa, Homo sapiens
  CDR3 for beta chain variable domain of TCR clone 347334 (TRBV6-3, TRBJ2-7)
CASSSPGTVFYEQYF

SEQ ID NO: 694669 - protein, 14 aa, Homo sapiens
  CDR3 for alpha chain variable domain of TCR clone 347335 (TRAV17, TRAJ31)
CATVLRNNNTRLMF

SEQ ID NO: 694670 - protein, 14 aa, Homo sapiens
  CDR3 for beta chain variable domain of TCR clone 347335 (TRBV12-4, TRBJ2-5)
CASSLWQKQETQYF

SEQ ID NO: 694671 - protein, 16 aa, Homo sapiens
  CDR3 for alpha chain variable domain of TCR clone 347336 (TRAV30, TRAJ49)
SAAQRVGQNTGNQFYF

SEQ ID NO: 694672 - protein, 15 aa, Homo sapiens
  CDR3 for beta chain variable domain of TCR clone 347336 (TRBV2, TRBJ2-1)
CASSELAGNYNEQFF

SEQ ID NO: 694673 - protein, 13 aa, Homo sapiens
  CDR3 for alpha chain variable domain of TCR clone 347337 (TRAV36/DV7, TRAJ37)
CAVFSSNTGKLIF

SEQ ID NO: 694674 - protein, 15 aa, Homo sapiens
  CDR3 for beta chain variable domain of TCR clone 347337 (TRBV20-1, TRBJ1-1)
CSARAPRGEYTEAFF

SEQ ID NO: 694675 - protein, 14 aa, Homo sapiens
  CDR3 for alpha chain variable domain of TCR clone 347338 (TRAV8-1, TRAJ5)
CAVRTDTGRRALTL

SEQ ID NO: 694676 - protein, 15 aa, Homo sapiens
  CDR3 for beta chain variable domain of TCR clone 347338 (TRBV29-1, TRBJ2-7)
CSARDRVSGMDEQYF

SEQ ID NO: 694677 - protein, 10 aa, Homo sapiens
  CDR3 for alpha chain variable domain of TCR clone 347339 (TRAV8-3, TRAJ20)
CAVRQKDLTT

SEQ ID NO: 694678 - protein, 12 aa, Homo sapiens
  CDR3 for beta chain variable domain of TCR clone 347339 (TRBV7-2, TRBJ1-2)
CASRDSIYGYTF

SEQ ID NO: 694679 - protein, 13 aa, Homo sapiens
  CDR3 for alpha chain variable domain of TCR clone 347340 (TRAV3, TRAJ21)
CAVREPDFNKFYF

SEQ ID NO: 694680 - protein, 13 aa, Homo sapiens
  CDR3 for beta chain variable domain of TCR clone 347340 (TRBV4-1, TRBJ2-1)
CASSQTPGTPEFF

SEQ ID NO: 694681 - protein, 14 aa, Homo sapiens
  CDR3 for alpha chain variable domain of TCR clone 347341 (TRAV13-1, TRAJ35)
GAASKGGFGNVLHS

SEQ ID NO: 694682 - protein, 13 aa, Homo sapiens
  CDR3 for beta chain variable domain of TCR clone 347341 (TRBV7-3, TRBJ1-1)
CASSQDWGAEAFF

SEQ ID NO: 694683 - protein, 16 aa, Homo sapiens
  CDR3 for alpha chain variable domain of TCR clone 347342 (TRAV30, TRAJ24)
CGTEIVDADSWGKLQF

SEQ ID NO: 694684 - protein, 12 aa, Homo sapiens
  CDR3 for beta chain variable domain of TCR clone 347342 (TRBV27, TRBJ2-1)
CASRGFYNEQFF

SEQ ID NO: 694685 - protein, 12 aa, Homo sapiens
  CDR3 for alpha chain variable domain of TCR clone 347343 (TRAV12-3, TRAJ20)
CAMVRGDYKRSF

SEQ ID NO: 694686 - protein, 14 aa, Homo sapiens
  CDR3 for beta chain variable domain of TCR clone 347343 (TRBV18, TRBJ2-5)
CASSPGVSQETQYF

SEQ ID NO: 694687 - protein, 12 aa, Homo sapiens
  CDR3 for alpha chain variable domain of TCR clone 347344 (TRAV8-3, TRAJ26)
CAGDNYGQNFVF

SEQ ID NO: 694688 - protein, 14 aa, Homo sapiens
  CDR3 for beta chain variable domain of TCR clone 347344 (TRBV13, TRBJ2-5)
CASSLGRGQETQYF

SEQ ID NO: 694689 - protein, 11 aa, Homo sapiens
  CDR3 for alpha chain variable domain of TCR clone 347345 (TRAV21, TRAJ34)
CAVTNTDKRIF

SEQ ID NO: 694690 - protein, 16 aa, Homo sapiens
  CDR3 for beta chain variable domain of TCR clone 347345 (TRBV12-5, TRBJ2-5)
CASGPRTSGNQETQYF

SEQ ID NO: 694691 - protein, 12 aa, Homo sapiens
  CDR3 for alpha chain variable domain of TCR clone 347346 (TRAV12-3, TRAJ20)
CAMVRGDYKLSF

SEQ ID NO: 694692 - protein, 13 aa, Homo sapiens
  CDR3 for beta chain variable domain of TCR clone 347346 (TRBV20-1, TRBJ1-1)
CSAPLGGGTEAFF

SEQ ID NO: 694693 - protein, 15 aa, Homo sapiens
  CDR3 for alpha chain variable domain of TCR clone 347347 (TRAV20, TRAJ58)
CAVQDLENSGSRLTF

SEQ ID NO: 694694 - protein, 13 aa, Homo sapiens
  CDR3 for beta chain variable domain of TCR clone 347347 (TRBV20-1, TRBJ1-1)
CSARGGGNTEAFF

SEQ ID NO: 694695 - protein, 14 aa, Homo sapiens
  CDR3 for alpha chain variable domain of TCR clone 347348 (TRAV8-3, TRAJ4)
CAVGASGGYNKLIF

SEQ ID NO: 694696 - protein, 17 aa, Homo sapiens
  CDR3 for beta chain variable domain of TCR clone 347348 (TRBV11-2, TRBJ2-1)
CASSLYPPGVEYNEQFS

SEQ ID NO: 694697 - protein, 14 aa, Homo sapiens
  CDR3 for alpha chain variable domain of TCR clone 347349 (TRAV17, TRAJ34)
CATDSLEGTDKLIF

SEQ ID NO: 694698 - protein, 16 aa, Homo sapiens
  CDR3 for beta chain variable domain of TCR clone 347349 (TRBV7-3, TRBJ2-2)
CASSLKRGTLSGELFF

SEQ ID NO: 694699 - protein, 15 aa, Homo sapiens
  CDR3 for alpha chain variable domain of TCR clone 347350 (TRAV14/DV4, TRAJ10)
CAMRELTGGGNKLTF

SEQ ID NO: 694700 - protein, 12 aa, Homo sapiens
  CDR3 for beta chain variable domain of TCR clone 347350 (TRBV11-2, TRBJ2-2)
CASSLGGGELFF

SEQ ID NO: 694701 - protein, 13 aa, Homo sapiens
  CDR3 for alpha chain variable domain of TCR clone 347351 (TRAV12-3, TRAJ13)
CTMSSGGYQKVTF

SEQ ID NO: 694702 - protein, 16 aa, Homo sapiens
  CDR3 for beta chain variable domain of TCR clone 347351 (TRBV4-1, TRBJ2-7)
CASSRGDILNSYEQYF

SEQ ID NO: 694703 - protein, 14 aa, Homo sapiens
  CDR3 for alpha chain variable domain of TCR clone 347352 (TRAV26-1, TRAJ38)
CIADNAGNNRELIW

SEQ ID NO: 694704 - protein, 17 aa, Homo sapiens
  CDR3 for beta chain variable domain of TCR clone 347352 (TRBV15, TRBJ1-1)
CATSRVGGADGDTEAFF

SEQ ID NO: 694705 - protein, 16 aa, Homo sapiens
  CDR3 for alpha chain variable domain of TCR clone 347353 (TRAV8-1, TRAJ33)
CAVNARGGDSNYQLIW

SEQ ID NO: 694706 - protein, 15 aa, Homo sapiens
  CDR3 for beta chain variable domain of TCR clone 347353 (TRBV9, TRBJ1-6)
CASSVAGTGDSPLHF

SEQ ID NO: 694707 - protein, 14 aa, Homo sapiens
  CDR3 for alpha chain variable domain of TCR clone 347354 (TRAV26-1, TRAJ39)
CIVFTNNAGYMLTF

SEQ ID NO: 694708 - protein, 15 aa, Homo sapiens
  CDR3 for beta chain variable domain of TCR clone 347354 (TRBV19, TRBJ2-4)
CASSLTGLTKNIQYF

SEQ ID NO: 694709 - protein, 16 aa, Homo sapiens
  CDR3 for alpha chain variable domain of TCR clone 347355 (TRAV12-2, TRAJ43)
CAGDDMRFGAGTRLTV

SEQ ID NO: 694710 - protein, 13 aa, Homo sapiens
  CDR3 for beta chain variable domain of TCR clone 347355 (TRBV7-3, TRBJ1-1)
CASSQDWGAEAFF

SEQ ID NO: 694711 - protein, 13 aa, Homo sapiens
  CDR3 for alpha chain variable domain of TCR clone 347356 (TRAV8-3, TRAJ20)
CAVGRPNDYKLSF

SEQ ID NO: 694712 - protein, 14 aa, Homo sapiens
  CDR3 for beta chain variable domain of TCR clone 347356 (TRBV12-5, TRBJ2-5)
CASGSRTHQETHYF

SEQ ID NO: 694713 - protein, 11 aa, Homo sapiens
  CDR3 for alpha chain variable domain of TCR clone 347357 (TRAV12-2, TRAJ43)
CASPIGNDMRF

SEQ ID NO: 694714 - protein, 14 aa, Homo sapiens
  CDR3 for beta chain variable domain of TCR clone 347357 (TRBV12-5, TRBJ2-5)
CASGSRTHQETQYF

SEQ ID NO: 694715 - protein, 15 aa, Homo sapiens
  CDR3 for alpha chain variable domain of TCR clone 347358 (TRAV35, TRAJ42)
CAGRLYGGSQGNLIF

SEQ ID NO: 694716 - protein, 12 aa, Homo sapiens
  CDR3 for beta chain variable domain of TCR clone 347358 (TRBV11-2, TRBJ2-2)
CASSLPTGELFF

SEQ ID NO: 694717 - protein, 14 aa, Homo sapiens
  CDR3 for alpha chain variable domain of TCR clone 347359 (TRAV3, TRAJ21)
CAVREAYNFNKFYF

SEQ ID NO: 694718 - protein, 17 aa, Homo sapiens
  CDR3 for beta chain variable domain of TCR clone 347359 (TRBV20-1, TRBJ1-6)
CSARGGYTFSYNSPLHF

SEQ ID NO: 694719 - protein, 16 aa, Homo sapiens
  CDR3 for alpha chain variable domain of TCR clone 347360 (TRAV8-3, TRAJ44)
CAVGASNTGTASQLTF

SEQ ID NO: 694720 - protein, 15 aa, Homo sapiens
  CDR3 for beta chain variable domain of TCR clone 347360 (TRBV27, TRBJ1-5)
CASTFNRGSNQPQHF

SEQ ID NO: 694721 - protein, 10 aa, Homo sapiens
  CDR3 for alpha chain variable domain of TCR clone 347361 (TRAV23/DV6, TRAJ31)
CARGGARLMF

SEQ ID NO: 694722 - protein, 16 aa, Homo sapiens
  CDR3 for beta chain variable domain of TCR clone 347361 (TRBV7-2, TRBJ2-5)
CQQPRQGRKSRETQYF

SEQ ID NO: 694723 - protein, 14 aa, Homo sapiens
  CDR3 for alpha chain variable domain of TCR clone 347362 (TRAV8-6, TRAJ37)
CAARLSGNTGKLIF

SEQ ID NO: 694724 - protein, 15 aa, Homo sapiens
  CDR3 for beta chain variable domain of TCR clone 347362 (TRBV28, TRBJ2-7)
CASSPGGRGFYEQYF

SEQ ID NO: 694725 - protein, 15 aa, Homo sapiens
  CDR3 for alpha chain variable domain of TCR clone 347363 (TRAV13-1, TRAJ9)
CAASTLNTGGFKTIF

SEQ ID NO: 694726 - protein, 13 aa, Homo sapiens
  CDR3 for beta chain variable domain of TCR clone 347363 (TRBV2, TRBJ1-4)
CASNRGTNEKLFF

SEQ ID NO: 694727 - protein, 12 aa, Homo sapiens
  CDR3 for alpha chain variable domain of TCR clone 347364 (TRAV13-1, TRAJ6)
CAAMGGSYIPTF

SEQ ID NO: 694728 - protein, 15 aa, Homo sapiens
  CDR3 for beta chain variable domain of TCR clone 347364 (TRBV7-8, TRBJ2-7)
CASSLESSGGYEQYF

SEQ ID NO: 694729 - protein, 11 aa, Homo sapiens
  CDR3 for alpha chain variable domain of TCR clone 347365 (TRAV12-2, TRAJ39)
CAVNNTLTFGG

SEQ ID NO: 694730 - protein, 16 aa, Homo sapiens
  CDR3 for beta chain variable domain of TCR clone 347365 (TRBV9, TRBJ2-7)
CASSAGPDRSPYEQYF

SEQ ID NO: 694731 - protein, 15 aa, Homo sapiens
  CDR3 for alpha chain variable domain of TCR clone 347366 (TRAV27, TRAJ17)
CRSTMIKAAGNKLTF

SEQ ID NO: 694732 - protein, 15 aa, Homo sapiens
  CDR3 for beta chain variable domain of TCR clone 347366 (TRBV20-1, TRBJ2-1)
CSARHGTSEHNEQFF

SEQ ID NO: 694733 - protein, 13 aa, Homo sapiens
  CDR3 for alpha chain variable domain of TCR clone 347367 (TRAV12-3, TRAJ54)
FALVPQGAQKLVF

SEQ ID NO: 694734 - protein, 15 aa, Homo sapiens
  CDR3 for beta chain variable domain of TCR clone 347367 (TRBV4-1, TRBJ2-2)
CASSQDSRGTGELFF

SEQ ID NO: 694735 - protein, 12 aa, Homo sapiens
  CDR3 for alpha chain variable domain of TCR clone 347368 (TRAV17, TRAJ53)
CATEGSNYKLTF

SEQ ID NO: 694736 - protein, 19 aa, Homo sapiens
  CDR3 for beta chain variable domain of TCR clone 347368 (TRBV5-1, TRBJ2-3)
CASSLWTSRGITTPDTQYF

SEQ ID NO: 694737 - protein, 17 aa, Homo sapiens
  CDR3 for alpha chain variable domain of TCR clone 347369 (TRAV26-1, TRAJ27)
FIVSTPWINTNAGKSTF

SEQ ID NO: 694738 - protein, 16 aa, Homo sapiens
  CDR3 for beta chain variable domain of TCR clone 347369 (TRBV7-9, TRBJ2-1)
CASSLDPGLAIDEQFF

SEQ ID NO: 694739 - protein, 14 aa, Homo sapiens
  CDR3 for alpha chain variable domain of TCR clone 347370 (TRAV35, TRAJ22)
CAGLRPGSARQLIF

SEQ ID NO: 694740 - protein, 14 aa, Homo sapiens
  CDR3 for beta chain variable domain of TCR clone 347370 (TRBV6-1, TRBJ2-6)
CASQQGAGANVLTF

SEQ ID NO: 694741 - protein, 15 aa, Homo sapiens
  CDR3 for alpha chain variable domain of TCR clone 347371 (TRAV21, TRAJ53)
CATLNSGGSNYKLTF

SEQ ID NO: 694742 - protein, 15 aa, Homo sapiens
  CDR3 for beta chain variable domain of TCR clone 347371 (TRBV18, TRBJ2-1)
CASSPPSAYYNEQFF

SEQ ID NO: 694743 - protein, 12 aa, Homo sapiens
  CDR3 for alpha chain variable domain of TCR clone 347372 (TRAV22, TRAJ45)
CAVGGGADGLTF

SEQ ID NO: 694744 - protein, 18 aa, Homo sapiens
  CDR3 for beta chain variable domain of TCR clone 347372 (TRBV3-1, TRBJ1-2)
CASSQDVIGWNGDYGYTF

SEQ ID NO: 694745 - protein, 14 aa, Homo sapiens
  CDR3 for alpha chain variable domain of TCR clone 347373 (TRAV1-2, TRAJ8)
CAVREDTGFQTLVF

SEQ ID NO: 694746 - protein, 14 aa, Homo sapiens
  CDR3 for beta chain variable domain of TCR clone 347373 (TRBV11-3, TRBJ2-3)
CASSRLARTDTQYF

SEQ ID NO: 694747 - protein, 12 aa, Homo sapiens
  CDR3 for alpha chain variable domain of TCR clone 347374 (TRAV13-1, TRAJ15)
CAARQAGTALIF

SEQ ID NO: 694748 - protein, 13 aa, Homo sapiens
  CDR3 for beta chain variable domain of TCR clone 347374 (TRBV10-3, TRBJ1-2)
CAISERDSYGYTF

SEQ ID NO: 694749 - protein, 11 aa, Homo sapiens
  CDR3 for alpha chain variable domain of TCR clone 347375 (TRAV2, TRAJ13)
CASGGYQKVTF

SEQ ID NO: 694750 - protein, 16 aa, Homo sapiens
  CDR3 for beta chain variable domain of TCR clone 347375 (TRBV28, TRBJ2-1)
CASRRSGRVVGNEQFF

SEQ ID NO: 694751 - protein, 15 aa, Homo sapiens
  CDR3 for alpha chain variable domain of TCR clone 347376 (TRAV12-2, TRAJ53)
CAVNGGGGSNYKLTF

SEQ ID NO: 694752 - protein, 13 aa, Homo sapiens
  CDR3 for beta chain variable domain of TCR clone 347376 (TRBV3-1, TRBJ1-1)
CASSPGVITEVFF

SEQ ID NO: 694753 - protein, 18 aa, Homo sapiens
  CDR3 for alpha chain variable domain of TCR clone 347377 (TRAV13-1, TRAJ52)
CAAKNPNAGGTSYGKLPF

SEQ ID NO: 694754 - protein, 13 aa, Homo sapiens
  CDR3 for beta chain variable domain of TCR clone 347377 (TRBV20-1, TRBJ1-1)
CSARGGGNTEAFF

SEQ ID NO: 694755 - protein, 11 aa, Homo sapiens
  CDR3 for alpha chain variable domain of TCR clone 347378 (TRAV3, TRAJ32)
CAVREGIMVVL

SEQ ID NO: 694756 - protein, 15 aa, Homo sapiens
  CDR3 for beta chain variable domain of TCR clone 347378 (TRBV2, TRBJ1-1)
CASSEGGTLKLSLDK

SEQ ID NO: 694757 - protein, 12 aa, Homo sapiens
  CDR3 for alpha chain variable domain of TCR clone 347379 (TRAV2, TRAJ31)
CAVEDNTARLMF

SEQ ID NO: 694758 - protein, 12 aa, Homo sapiens
  CDR3 for beta chain variable domain of TCR clone 347379 (TRBV11-2, TRBJ2-2)
CASSLGGGELFF

SEQ ID NO: 694759 - protein, 13 aa, Homo sapiens
  CDR3 for alpha chain variable domain of TCR clone 347380 (TRAV12-1, TRAJ34)
CGEPLRNTDKIIF

SEQ ID NO: 694760 - protein, 20 aa, Homo sapiens
  CDR3 for beta chain variable domain of TCR clone 347380 (TRBV28, TRBJ2-1)
CASTPIGRSPGLAGGNEQFF

SEQ ID NO: 694761 - protein, 15 aa, Homo sapiens
  CDR3 for alpha chain variable domain of TCR clone 347381 (TRAV8-4, TRAJ6)
CAVSAPSGGSYIPTF

SEQ ID NO: 694762 - protein, 15 aa, Homo sapiens
  CDR3 for beta chain variable domain of TCR clone 347381 (TRBV7-3, TRBJ2-2)
CASKANGANTGELVF

SEQ ID NO: 694763 - protein, 13 aa, Homo sapiens
  CDR3 for alpha chain variable domain of TCR clone 347382 (TRAV27, TRAJ49)
CAPRPYTGNQFYF

SEQ ID NO: 694764 - protein, 16 aa, Homo sapiens
  CDR3 for beta chain variable domain of TCR clone 347382 (TRBV4-1, TRBJ1-2)
CASSQDAGQVLYGYTY

SEQ ID NO: 694765 - protein, 13 aa, Homo sapiens
  CDR3 for alpha chain variable domain of TCR clone 347383 (TRAV2, TRAJ3)
CAVEDSSASKIIF

SEQ ID NO: 694766 - protein, 13 aa, Homo sapiens
  CDR3 for beta chain variable domain of TCR clone 347383 (TRBV7-9, TRBJ1-2)
CASSLKQNYGYTF

SEQ ID NO: 694767 - protein, 14 aa, Homo sapiens
  CDR3 for alpha chain variable domain of TCR clone 347384 (TRAV8-3, TRAJ22)
CAVKPPGSARQLTF

SEQ ID NO: 694768 - protein, 14 aa, Homo sapiens
  CDR3 for beta chain variable domain of TCR clone 347384 (TRBV12-4, TRBJ2-2)
CASSLSQDTGELLF

SEQ ID NO: 694769 - protein, 12 aa, Homo sapiens
  CDR3 for alpha chain variable domain of TCR clone 347385 (TRAV12-3, TRAJ17)
CAMTLTGNKLTF

SEQ ID NO: 694770 - protein, 14 aa, Homo sapiens
  CDR3 for beta chain variable domain of TCR clone 347385 (TRBV25-1, TRBJ1-3)
CASSRQLSGNTIYF

SEQ ID NO: 694771 - protein, 16 aa, Homo sapiens
  CDR3 for alpha chain variable domain of TCR clone 347386 (TRAV30, TRAJ24)
CGPEIVDADSWGKFQF

SEQ ID NO: 694772 - protein, 14 aa, Homo sapiens
  CDR3 for beta chain variable domain of TCR clone 347386 (TRBV12-5, TRBJ2-5)
CARGSRTHQENQYF

SEQ ID NO: 694773 - protein, 13 aa, Homo sapiens
  CDR3 for alpha chain variable domain of TCR clone 347387 (TRAV20, TRAJ15)
CATINQAGTALIF

SEQ ID NO: 694774 - protein, 13 aa, Homo sapiens
  CDR3 for beta chain variable domain of TCR clone 347387 (TRBV12-4, TRBJ2-1)
CAIRQPSNNEQFF

SEQ ID NO: 694775 - protein, 11 aa, Homo sapiens
  CDR3 for alpha chain variable domain of TCR clone 347388 (TRAV21, TRAJ34)
CAHYHTDKLIF

SEQ ID NO: 694776 - protein, 13 aa, Homo sapiens
  CDR3 for beta chain variable domain of TCR clone 347388 (TRBV7-6, TRBJ1-2)
CASSLVADYGDTF

SEQ ID NO: 694777 - protein, 14 aa, Homo sapiens
  CDR3 for alpha chain variable domain of TCR clone 347389 (TRAV35, TRAJ42)
CCVPYGGSQGNLIF

SEQ ID NO: 694778 - protein, 14 aa, Homo sapiens
  CDR3 for beta chain variable domain of TCR clone 347389 (TRBV12-5, TRBJ2-5)
CASGSRTHQETQYF

SEQ ID NO: 694779 - protein, 14 aa, Homo sapiens
  CDR3 for alpha chain variable domain of TCR clone 347390 (TRAV23/DV6, TRAJ8)
CSASKATGFQKLVF

SEQ ID NO: 694780 - protein, 16 aa, Homo sapiens
  CDR3 for beta chain variable domain of TCR clone 347390 (TRBV18, TRBJ2-7)
CASSPGRAGGAYEQYF

SEQ ID NO: 694781 - protein, 14 aa, Homo sapiens
  CDR3 for alpha chain variable domain of TCR clone 347391 (TRAV12-1, TRAJ23)
CVVVVYNQGGKLIF

SEQ ID NO: 694782 - protein, 15 aa, Homo sapiens
  CDR3 for beta chain variable domain of TCR clone 347391 (TRBV20-1, TRBJ1-5)
CSAKPPGQGPQPQHF

SEQ ID NO: 694783 - protein, 14 aa, Homo sapiens
  CDR3 for alpha chain variable domain of TCR clone 347392 (TRAV1-2, TRAJ17)
WAVRDMTAGNKLTF

SEQ ID NO: 694784 - protein, 15 aa, Homo sapiens
  CDR3 for beta chain variable domain of TCR clone 347392 (TRBV20-1, TRBJ2-7)
CSARDRVSGMDEQYF

SEQ ID NO: 694785 - protein, 13 aa, Homo sapiens
  CDR3 for alpha chain variable domain of TCR clone 347393 (TRAV17, TRAJ9)
CATAITEGFKTIF

SEQ ID NO: 694786 - protein, 16 aa, Homo sapiens
  CDR3 for beta chain variable domain of TCR clone 347393 (TRBV15, TRBJ2-1)
CATSRNLAGGYNEQFF

SEQ ID NO: 694787 - protein, 18 aa, Homo sapiens
  CDR3 for alpha chain variable domain of TCR clone 347394 (TRAV29/DV5, TRAJ52)
CAAGFRGAGGTSYGKLTF

SEQ ID NO: 694788 - protein, 16 aa, Homo sapiens
  CDR3 for beta chain variable domain of TCR clone 347394 (TRBV7-3, TRBJ2-2)
CASSLKRGTLSGELFF

SEQ ID NO: 694789 - protein, 14 aa, Homo sapiens
  CDR3 for alpha chain variable domain of TCR clone 347395 (TRAV9-2, TRAJ20)
CALRDPLNDYKLSL

SEQ ID NO: 694790 - protein, 14 aa, Homo sapiens
  CDR3 for beta chain variable domain of TCR clone 347395 (TRBV4-1, TRBJ2-2)
CASSQAVNTGELFF

SEQ ID NO: 694791 - protein, 10 aa, Homo sapiens
  CDR3 for alpha chain variable domain of TCR clone 347396 (TRAV1-2, TRAJ34)
CAVNTDKLIF

SEQ ID NO: 694792 - protein, 13 aa, Homo sapiens
  CDR3 for beta chain variable domain of TCR clone 347396 (TRBV27, TRBJ2-7)
CASSLTTGYEQYF

SEQ ID NO: 694793 - protein, 18 aa, Homo sapiens
  CDR3 for alpha chain variable domain of TCR clone 347397 (TRAV21, TRAJ52)
CAVRPSPAGGTSCGKLTF

SEQ ID NO: 694794 - protein, 17 aa, Homo sapiens
  CDR3 for beta chain variable domain of TCR clone 347397 (TRBV13, TRBJ2-3)
WASSLSRVAGGRNTQYF

SEQ ID NO: 694795 - protein, 14 aa, Homo sapiens
  CDR3 for alpha chain variable domain of TCR clone 347398 (TRAV21, TRAJ11)
CAVRRNSGYSTITF

SEQ ID NO: 694796 - protein, 11 aa, Homo sapiens
  CDR3 for beta chain variable domain of TCR clone 347398 (TRBV11-2, TRBJ1-1)
CASSINTKAFF

SEQ ID NO: 694797 - protein, 11 aa, Homo sapiens
  CDR3 for alpha chain variable domain of TCR clone 347399 (TRAV3, TRAJ21)
CAVGNFDKFYF

SEQ ID NO: 694798 - protein, 15 aa, Homo sapiens
  CDR3 for beta chain variable domain of TCR clone 347399 (TRBV19, TRBJ1-2)
CASSVGQVLNYGYTF

SEQ ID NO: 694799 - protein, 16 aa, Homo sapiens
  CDR3 for alpha chain variable domain of TCR clone 347400 (TRAV3, TRAJ37)
CAVRGKGSGNTGKLIF

SEQ ID NO: 694800 - protein, 14 aa, Homo sapiens
  CDR3 for beta chain variable domain of TCR clone 347400 (TRBV20-1, TRBJ2-3)
CSARGGTSKDTQYF

SEQ ID NO: 694801 - protein, 19 aa, Homo sapiens
  CDR3 for alpha chain variable domain of TCR clone 347401 (TRAV3, TRAJ6)
CAVRDRNPSRSGGSYIPTF

SEQ ID NO: 694802 - protein, 15 aa, Homo sapiens
  CDR3 for beta chain variable domain of TCR clone 347401 (TRBV28, TRBJ2-5)
CASSTGQGSIETQYF

SEQ ID NO: 694803 - protein, 15 aa, Homo sapiens
  CDR3 for alpha chain variable domain of TCR clone 347402 (TRAV17, TRAJ56)
CATEPFTGANSKLTF

SEQ ID NO: 694804 - protein, 12 aa, Homo sapiens
  CDR3 for beta chain variable domain of TCR clone 347402 (TRBV7-9, TRBJ2-7)
CASSFGSYEQYF

SEQ ID NO: 694805 - protein, 12 aa, Homo sapiens
  CDR3 for alpha chain variable domain of TCR clone 347403 (TRAV13-1, TRAJ48)
CAANFGNEKLTF

SEQ ID NO: 694806 - protein, 13 aa, Homo sapiens
  CDR3 for beta chain variable domain of TCR clone 347403 (TRBV7-3, TRBJ1-1)
CASSLDWGSEAFF

SEQ ID NO: 694807 - protein, 14 aa, Homo sapiens
  CDR3 for alpha chain variable domain of TCR clone 347404 (TRAV17, TRAJ6)
CATDASGGSYIPTF

SEQ ID NO: 694808 - protein, 19 aa, Homo sapiens
  CDR3 for beta chain variable domain of TCR clone 347404 (TRBV4-3, TRBJ2-7)
CASSQEFIGWQLTPYEQYF

SEQ ID NO: 694809 - protein, 13 aa, Homo sapiens
  CDR3 for alpha chain variable domain of TCR clone 347405 (TRAV12-1, TRAJ16)
CVVNGPDGQKLLF

SEQ ID NO: 694810 - protein, 13 aa, Homo sapiens
  CDR3 for beta chain variable domain of TCR clone 347405 (TRBV2, TRBJ1-1)
CARNATGGFHAFF

SEQ ID NO: 694811 - protein, 17 aa, Homo sapiens
  CDR3 for alpha chain variable domain of TCR clone 347406 (TRAV13-1, TRAJ31)
CAPRDRLMFGDGTQLVV

SEQ ID NO: 694812 - protein, 12 aa, Homo sapiens
  CDR3 for beta chain variable domain of TCR clone 347406 (TRBV7-9, TRBJ2-7)
CASSLEGYDQHF

SEQ ID NO: 694813 - protein, 14 aa, Homo sapiens
  CDR3 for alpha chain variable domain of TCR clone 347407 (TRAV1-2, TRAJ16)
CAVRSASDGQKLLF

SEQ ID NO: 694814 - protein, 17 aa, Homo sapiens
  CDR3 for beta chain variable domain of TCR clone 347407 (TRBV7-3, TRBJ2-3)
CASSLMKRMRGADTQYL

SEQ ID NO: 694815 - protein, 13 aa, Homo sapiens
  CDR3 for alpha chain variable domain of TCR clone 347408 (TRAV3, TRAJ36)
CAVRDSGANNPFF

SEQ ID NO: 694816 - protein, 15 aa, Homo sapiens
  CDR3 for beta chain variable domain of TCR clone 347408 (TRBV6-5, TRBJ2-1)
CASSPREGTYNEQFF

SEQ ID NO: 694817 - protein, 16 aa, Homo sapiens
  CDR3 for alpha chain variable domain of TCR clone 347409 (TRAV12-3, TRAJ58)
CAMTDTEETGGSRLTF

SEQ ID NO: 694818 - protein, 22 aa, Homo sapiens
  CDR3 for beta chain variable domain of TCR clone 347409 (TRBV23-1, TRBJ2-7)
CASSRRLDSGQGYVGGGYEQCF

SEQ ID NO: 694819 - protein, 12 aa, Homo sapiens
  CDR3 for alpha chain variable domain of TCR clone 347410 (TRAV3, TRAJ20)
CAVRDPDYKLSF

SEQ ID NO: 694820 - protein, 13 aa, Homo sapiens
  CDR3 for beta chain variable domain of TCR clone 347410 (TRBV4-1, TRBJ2-2)
CASSQENTGELFF

SEQ ID NO: 694821 - protein, 13 aa, Homo sapiens
  CDR3 for alpha chain variable domain of TCR clone 347411 (TRAV27, TRAJ45)
CRSSGGGADGLTF

SEQ ID NO: 694822 - protein, 17 aa, Homo sapiens
  CDR3 for beta chain variable domain of TCR clone 347411 (TRBV11-2, TRBJ2-1)
CASSLYPPGAEYNEQSF

SEQ ID NO: 694823 - protein, 15 aa, Homo sapiens
  CDR3 for alpha chain variable domain of TCR clone 347412 (TRAV8-3, TRAJ45)
CASSYSGGGPDGLPF

SEQ ID NO: 694824 - protein, 13 aa, Homo sapiens
  CDR3 for beta chain variable domain of TCR clone 347412 (TRBV10-3, TRBJ2-7)
CASKLAVNYEQYF

SEQ ID NO: 694825 - protein, 14 aa, Homo sapiens
  CDR3 for alpha chain variable domain of TCR clone 347413 (TRAV12-1, TRAJ12)
CVVTRMDSSYKLIC

SEQ ID NO: 694826 - protein, 13 aa, Homo sapiens
  CDR3 for beta chain variable domain of TCR clone 347413 (TRBV20-1, TRBJ1-1)
CSARGGGNTEAFF

SEQ ID NO: 694827 - protein, 11 aa, Homo sapiens
  CDR3 for alpha chain variable domain of TCR clone 347414 (TRAV17, TRAJ31)
CATSNNARLMF

SEQ ID NO: 694828 - protein, 16 aa, Homo sapiens
  CDR3 for beta chain variable domain of TCR clone 347414 (TRBV3-1, TRBJ2-7)
CASSQGATGVAYEQYF

SEQ ID NO: 694829 - protein, 14 aa, Homo sapiens
  CDR3 for alpha chain variable domain of TCR clone 347415 (TRAV13-1, TRAJ35)
CAASKGGFGNVLHC

SEQ ID NO: 694830 - protein, 13 aa, Homo sapiens
  CDR3 for beta chain variable domain of TCR clone 347415 (TRBV7-3, TRBJ1-1)
CASSQDWGAEALV

SEQ ID NO: 694831 - protein, 12 aa, Homo sapiens
  CDR3 for alpha chain variable domain of TCR clone 347416 (TRAV17, TRAJ57)
CATDGGSEKLVF

SEQ ID NO: 694832 - protein, 13 aa, Homo sapiens
  CDR3 for beta chain variable domain of TCR clone 347416 (TRBV7-9, TRBJ2-7)
CASSFTGAYEQYF

SEQ ID NO: 694833 - protein, 19 aa, Homo sapiens
  CDR3 for alpha chain variable domain of TCR clone 347417 (TRAV26-1, TRAJ52)
CIVRAHLNAGGTSYGKLTF

SEQ ID NO: 694834 - protein, 13 aa, Homo sapiens
  CDR3 for beta chain variable domain of TCR clone 347417 (TRBV20-1, TRBJ1-6)
CSAPLGVGSPLHF

SEQ ID NO: 694835 - protein, 10 aa, Homo sapiens
  CDR3 for alpha chain variable domain of TCR clone 347418 (TRAV36/DV7, TRAJ48)
CAVGNEKLTF

SEQ ID NO: 694836 - protein, 14 aa, Homo sapiens
  CDR3 for beta chain variable domain of TCR clone 347418 (TRBV4-1, TRBJ2-2)
CASSQAVNTGELFF

SEQ ID NO: 694837 - protein, 14 aa, Homo sapiens
  CDR3 for alpha chain variable domain of TCR clone 347419 (TRAV17, TRAJ54)
CATDANQGAQKLVF

SEQ ID NO: 694838 - protein, 13 aa, Homo sapiens
  CDR3 for beta chain variable domain of TCR clone 347419 (TRBV4-2, TRBJ1-1)
CASSQAGNTEAFF

SEQ ID NO: 694839 - protein, 15 aa, Homo sapiens
  CDR3 for alpha chain variable domain of TCR clone 347420 (TRAV8-1, TRAJ30)
CAVTRPGGRDDKIVF

SEQ ID NO: 694840 - protein, 14 aa, Homo sapiens
  CDR3 for beta chain variable domain of TCR clone 347420 (TRBV28, TRBJ2-7)
CASSYRTGSYEQYF

SEQ ID NO: 694841 - protein, 13 aa, Homo sapiens
  CDR3 for alpha chain variable domain of TCR clone 347421 (TRAV27, TRAJ11)
CAGARSGYSTLTF

SEQ ID NO: 694842 - protein, 16 aa, Homo sapiens
  CDR3 for beta chain variable domain of TCR clone 347421 (TRBV10-2, TRBJ2-2)
CASSESRVRGSGELFF

SEQ ID NO: 694843 - protein, 16 aa, Homo sapiens
  CDR3 for alpha chain variable domain of TCR clone 347422 (TRAV27, TRAJ13)
CAGAKSDSGGYQKVTF

SEQ ID NO: 694844 - protein, 15 aa, Homo sapiens
  CDR3 for beta chain variable domain of TCR clone 347422 (TRBV4-2, TRBJ1-2)
CASSRNTGAGYGYTF

SEQ ID NO: 694845 - protein, 16 aa, Homo sapiens
  CDR3 for alpha chain variable domain of TCR clone 347423 (TRAV3, TRAJ37)
CAVRGKGSGNTGKQIF

SEQ ID NO: 694846 - protein, 14 aa, Homo sapiens
  CDR3 for beta chain variable domain of TCR clone 347423 (TRBV7-2, TRBJ2-7)
CASRSQGAAYEQYF

SEQ ID NO: 694847 - protein, 10 aa, Homo sapiens
  CDR3 for alpha chain variable domain of TCR clone 347424 (TRAV8-4, TRAJ39)
CAVSGNMLTF

SEQ ID NO: 694848 - protein, 14 aa, Homo sapiens
  CDR3 for beta chain variable domain of TCR clone 347424 (TRBV6-9, TRBJ1-5)
CASSYPTGGQTQHF

SEQ ID NO: 694849 - protein, 14 aa, Homo sapiens
  CDR3 for alpha chain variable domain of TCR clone 347425 (TRAV26-1, TRAJ21)
CIVRPPYNFNKFYF

SEQ ID NO: 694850 - protein, 13 aa, Homo sapiens
  CDR3 for beta chain variable domain of TCR clone 347425 (TRBV14, TRBJ2-7)
CASSPRRPYEQYF

SEQ ID NO: 694851 - protein, 13 aa, Homo sapiens
  CDR3 for alpha chain variable domain of TCR clone 347426 (TRAV17, TRAJ9)
CATGSTGGFKTIF

SEQ ID NO: 694852 - protein, 14 aa, Homo sapiens
  CDR3 for beta chain variable domain of TCR clone 347426 (TRBV7-8, TRBJ2-7)
CASTFSGGPNEQYF

SEQ ID NO: 694853 - protein, 12 aa, Homo sapiens
  CDR3 for alpha chain variable domain of TCR clone 347427 (TRAV12-3, TRAJ42)
CAPGGSQGNLIF

SEQ ID NO: 694854 - protein, 15 aa, Homo sapiens
  CDR3 for beta chain variable domain of TCR clone 347427 (TRBV5-4, TRBJ2-1)
CASSLGLADINEQFF

SEQ ID NO: 694855 - protein, 14 aa, Homo sapiens
  CDR3 for alpha chain variable domain of TCR clone 347428 (TRAV4, TRAJ9)
CLVGSGTGGFKTIF

SEQ ID NO: 694856 - protein, 15 aa, Homo sapiens
  CDR3 for beta chain variable domain of TCR clone 347428 (TRBV19, TRBJ1-4)
CASSQYRETNEKLFF

SEQ ID NO: 694857 - protein, 15 aa, Homo sapiens
  CDR3 for alpha chain variable domain of TCR clone 347429 (TRAV13-1, TRAJ21)
CAASIYNFNKFTLDL

SEQ ID NO: 694858 - protein, 13 aa, Homo sapiens
  CDR3 for beta chain variable domain of TCR clone 347429 (TRBV27, TRBJ1-4)
CASSLMGEEKLFF

SEQ ID NO: 694859 - protein, 10 aa, Homo sapiens
  CDR3 for alpha chain variable domain of TCR clone 347430 (TRAV26-1, TRAJ22)
CSGSAWQLTF

SEQ ID NO: 694860 - protein, 13 aa, Homo sapiens
  CDR3 for beta chain variable domain of TCR clone 347430 (TRBV7-9, TRBJ1-2)
CASSLKQNYGYTF

SEQ ID NO: 694861 - protein, 14 aa, Homo sapiens
  CDR3 for alpha chain variable domain of TCR clone 347431 (TRAV12-2, TRAJ13)
RAAKKTGGYQKVTF

SEQ ID NO: 694862 - protein, 16 aa, Homo sapiens
  CDR3 for beta chain variable domain of TCR clone 347431 (TRBV20-1, TRBJ1-2)
CSASMGQGVANYGYTF

SEQ ID NO: 694863 - protein, 14 aa, Homo sapiens
  CDR3 for alpha chain variable domain of TCR clone 347432 (TRAV26-1, TRAJ44)
CIARTTGTASKLTF

SEQ ID NO: 694864 - protein, 15 aa, Homo sapiens
  CDR3 for beta chain variable domain of TCR clone 347432 (TRBV10-3, TRBJ2-3)
CAISLTSGGTDTQYF

SEQ ID NO: 694865 - protein, 16 aa, Homo sapiens
  CDR3 for alpha chain variable domain of TCR clone 347433 (TRAV8-3, TRAJ42)
CAVGEGNGGRQGNLIF

SEQ ID NO: 694866 - protein, 14 aa, Homo sapiens
  CDR3 for beta chain variable domain of TCR clone 347433 (TRBV7-2, TRBJ2-1)
CASSRGGARNEQFF

SEQ ID NO: 694867 - protein, 11 aa, Homo sapiens
  CDR3 for alpha chain variable domain of TCR clone 347434 (TRAV3, TRAJ21)
CAVGNFNKFYF

SEQ ID NO: 694868 - protein, 15 aa, Homo sapiens
  CDR3 for beta chain variable domain of TCR clone 347434 (TRBV29-1, TRBJ2-1)
CSVGGGPAAYNEQFF

SEQ ID NO: 694869 - protein, 13 aa, Homo sapiens
  CDR3 for alpha chain variable domain of TCR clone 347435 (TRAV22, TRAJ43)
CAVVAFDNNDMRF

SEQ ID NO: 694870 - protein, 14 aa, Homo sapiens
  CDR3 for beta chain variable domain of TCR clone 347435 (TRBV19, TRBJ2-7)
CASSMGQGAIEQYF

SEQ ID NO: 694871 - protein, 15 aa, Homo sapiens
  CDR3 for alpha chain variable domain of TCR clone 347436 (TRAV2, TRAJ24)
CAVEVLTDSWGKFQF

SEQ ID NO: 694872 - protein, 12 aa, Homo sapiens
  CDR3 for beta chain variable domain of TCR clone 347436 (TRBV7-3, TRBJ2-5)
RASSPGKETQYF

SEQ ID NO: 694873 - protein, 11 aa, Homo sapiens
  CDR3 for alpha chain variable domain of TCR clone 347437 (TRAV2, TRAJ33)
CAVERNYQLIW

SEQ ID NO: 694874 - protein, 13 aa, Homo sapiens
  CDR3 for beta chain variable domain of TCR clone 347437 (TRBV12-5, TRBJ2-3)
CASGDRQSDTQYF

SEQ ID NO: 694875 - protein, 19 aa, Homo sapiens
  CDR3 for alpha chain variable domain of TCR clone 347438 (TRAV3, TRAJ6)
CAVRDRNPSRSGGSYIPNF

SEQ ID NO: 694876 - protein, 15 aa, Homo sapiens
  CDR3 for beta chain variable domain of TCR clone 347438 (TRBV18, TRBJ2-7)
CASSPTFMDSYEQYF

SEQ ID NO: 694877 - protein, 15 aa, Homo sapiens
  CDR3 for alpha chain variable domain of TCR clone 347439 (TRAV3, TRAJ5)
CAVRDLDTGMRALTF

SEQ ID NO: 694878 - protein, 12 aa, Homo sapiens
  CDR3 for beta chain variable domain of TCR clone 347439 (TRBV11-2, TRBJ2-2)
CASSLGGGELFF

SEQ ID NO: 694879 - protein, 15 aa, Homo sapiens
  CDR3 for alpha chain variable domain of TCR clone 347440 (TRAV9-2, TRAJ49)
FALSPPDHTGNQFYL

SEQ ID NO: 694880 - protein, 14 aa, Homo sapiens
  CDR3 for beta chain variable domain of TCR clone 347440 (TRBV12-4, TRBJ1-1)
CASSLGTGGTEAFF

SEQ ID NO: 694881 - protein, 16 aa, Homo sapiens
  CDR3 for alpha chain variable domain of TCR clone 347441 (TRAV30, TRAJ24)
CGTEIVDADSWGKFQF

SEQ ID NO: 694882 - protein, 15 aa, Homo sapiens
  CDR3 for beta chain variable domain of TCR clone 347441 (TRBV20-1, TRBJ2-7)
CSARGRVSGMDEQYF

SEQ ID NO: 694883 - protein, 14 aa, Homo sapiens
  CDR3 for alpha chain variable domain of TCR clone 347442 (TRAV13-1, TRAJ44)
CAAKATSTASKLTF

SEQ ID NO: 694884 - protein, 14 aa, Homo sapiens
  CDR3 for beta chain variable domain of TCR clone 347442 (TRBV19, TRBJ2-2)
CASSTLHRSGELFF

SEQ ID NO: 694885 - protein, 15 aa, Homo sapiens
  CDR3 for alpha chain variable domain of TCR clone 347443 (TRAV34, TRAJ38)
CGADFTPGNNRKLIW

SEQ ID NO: 694886 - protein, 13 aa, Homo sapiens
  CDR3 for beta chain variable domain of TCR clone 347443 (TRBV19, TRBJ1-5)
CASSMRGYQPQHF

SEQ ID NO: 694887 - protein, 14 aa, Homo sapiens
  CDR3 for alpha chain variable domain of TCR clone 347444 (TRAV12-3, TRAJ22)
CAMSLFGSARQLTF

SEQ ID NO: 694888 - protein, 14 aa, Homo sapiens
  CDR3 for beta chain variable domain of TCR clone 347444 (TRBV19, TRBJ1-1)
CASSKAGWTTEAFF

SEQ ID NO: 694889 - protein, 14 aa, Homo sapiens
  CDR3 for alpha chain variable domain of TCR clone 347445 (TRAV1-2, TRAJ16)
CAVNRLSDGQKLLF

SEQ ID NO: 694890 - protein, 13 aa, Homo sapiens
  CDR3 for beta chain variable domain of TCR clone 347445 (TRBV18, TRBJ2-5)
CASSPAGKETQYF

SEQ ID NO: 694891 - protein, 18 aa, Homo sapiens
  CDR3 for alpha chain variable domain of TCR clone 347446 (TRAV21, TRAJ52)
CAVRPSPAGGTSYGKLTF

SEQ ID NO: 694892 - protein, 14 aa, Homo sapiens
  CDR3 for beta chain variable domain of TCR clone 347446 (TRBV13, TRBJ2-3)
CASSRLARTDTQYF

SEQ ID NO: 694893 - protein, 11 aa, Homo sapiens
  CDR3 for alpha chain variable domain of TCR clone 347447 (TRAV4, TRAJ31)
CLVGDNARLML

SEQ ID NO: 694894 - protein, 16 aa, Homo sapiens
  CDR3 for beta chain variable domain of TCR clone 347447 (TRBV7-2, TRBJ2-5)
CASSSKWLSGQENQYF

SEQ ID NO: 694895 - protein, 13 aa, Homo sapiens
  CDR3 for alpha chain variable domain of TCR clone 347448 (TRAV22, TRAJ29)
CAVGGSGNTPLVF

SEQ ID NO: 694896 - protein, 13 aa, Homo sapiens
  CDR3 for beta chain variable domain of TCR clone 347448 (TRBV6-5, TRBJ2-5)
CASSPQGGETQYF

SEQ ID NO: 694897 - protein, 14 aa, Homo sapiens
  CDR3 for alpha chain variable domain of TCR clone 347449 (TRAV8-3, TRAJ4)
CAVGAAGCSNKLIF

SEQ ID NO: 694898 - protein, 15 aa, Homo sapiens
  CDR3 for beta chain variable domain of TCR clone 347449 (TRBV6-5, TRBJ2-1)
CASSYDAGAGNEQFF

SEQ ID NO: 694899 - protein, 14 aa, Homo sapiens
  CDR3 for alpha chain variable domain of TCR clone 347450 (TRAV9-2, TRAJ39)
CALYIYNAGNTLTF

SEQ ID NO: 694900 - protein, 13 aa, Homo sapiens
  CDR3 for beta chain variable domain of TCR clone 347450 (TRBV12-4, TRBJ2-7)
CASSRDSGYEQYF

SEQ ID NO: 694901 - protein, 16 aa, Homo sapiens
  CDR3 for alpha chain variable domain of TCR clone 347451 (TRAV3, TRAJ10)
CAVRDMRAGGGNKLTF

SEQ ID NO: 694902 - protein, 15 aa, Homo sapiens
  CDR3 for beta chain variable domain of TCR clone 347451 (TRBV5-1, TRBJ2-1)
CASTGSGRTYNEQFF

SEQ ID NO: 694903 - protein, 13 aa, Homo sapiens
  CDR3 for alpha chain variable domain of TCR clone 347452 (TRAV27, TRAJ45)
CRSSGGGADGLTF

SEQ ID NO: 694904 - protein, 14 aa, Homo sapiens
  CDR3 for beta chain variable domain of TCR clone 347452 (TRBV11-2, TRBJ2-7)
CASSGQGALDEQYF

SEQ ID NO: 694905 - protein, 12 aa, Homo sapiens
  CDR3 for alpha chain variable domain of TCR clone 347453 (TRAV2, TRAJ31)
CAVEDNNARLMF

SEQ ID NO: 694906 - protein, 14 aa, Homo sapiens
  CDR3 for beta chain variable domain of TCR clone 347453 (TRBV5-1, TRBJ2-2)
CASSLIWIPGELFF

SEQ ID NO: 694907 - protein, 11 aa, Homo sapiens
  CDR3 for alpha chain variable domain of TCR clone 347454 (TRAV2, TRAJ23)
CAVETRGKLIF

SEQ ID NO: 694908 - protein, 13 aa, Homo sapiens
  CDR3 for beta chain variable domain of TCR clone 347454 (TRBV27, TRBJ1-1)
CASSLSIGAEAFF

SEQ ID NO: 694909 - protein, 13 aa, Homo sapiens
  CDR3 for alpha chain variable domain of TCR clone 347455 (TRAV27, TRAJ45)
CRSSGGGADGLTF

SEQ ID NO: 694910 - protein, 14 aa, Homo sapiens
  CDR3 for beta chain variable domain of TCR clone 347455 (TRBV9, TRBJ2-2)
CQQRLRRGIRELFF

SEQ ID NO: 694911 - protein, 13 aa, Homo sapiens
  CDR3 for alpha chain variable domain of TCR clone 347456 (TRAV8-3, TRAJ48)
CAVVPFVNEKLTF

SEQ ID NO: 694912 - protein, 19 aa, Homo sapiens
  CDR3 for beta chain variable domain of TCR clone 347456 (TRBV25-1, TRBJ2-2)
CAILVYRVDRGRKTGELFF

SEQ ID NO: 694913 - protein, 15 aa, Homo sapiens
  CDR3 for alpha chain variable domain of TCR clone 347457 (TRAV8-3, TRAJ45)
CASSYSGGGADGLTF

SEQ ID NO: 694914 - protein, 17 aa, Homo sapiens
  CDR3 for beta chain variable domain of TCR clone 347457 (TRBV7-8, TRBJ1-2)
CASRLRPLQGHLYGYPF

SEQ ID NO: 694915 - protein, 13 aa, Homo sapiens
  CDR3 for alpha chain variable domain of TCR clone 347458 (TRAV27, TRAJ3)
ASLRGSSASEVIF

SEQ ID NO: 694916 - protein, 15 aa, Homo sapiens
  CDR3 for beta chain variable domain of TCR clone 347458 (TRBV28, TRBJ1-3)
CASSMGWASGNTIYF

SEQ ID NO: 694917 - protein, 14 aa, Homo sapiens
  CDR3 for alpha chain variable domain of TCR clone 347459 (TRAV8-3, TRAJ13)
CAVGAAGGYQKVTF

SEQ ID NO: 694918 - protein, 14 aa, Homo sapiens
  CDR3 for beta chain variable domain of TCR clone 347459 (TRBV7-8, TRBJ2-2)
CASSLEPNTGELFF

SEQ ID NO: 694919 - protein, 15 aa, Homo sapiens
  CDR3 for alpha chain variable domain of TCR clone 347460 (TRAV12-2, TRAJ53)
CAVNGGGGSNYKLTF

SEQ ID NO: 694920 - protein, 17 aa, Homo sapiens
  CDR3 for beta chain variable domain of TCR clone 347460 (TRBV7-2, TRBJ1-4)
CASSFKAGPTTNEKLFF

SEQ ID NO: 694921 - protein, 19 aa, Homo sapiens
  CDR3 for alpha chain variable domain of TCR clone 347461 (TRAV26-1, TRAJ28)
CIVRVAHAYSGAGSYQLTF

SEQ ID NO: 694922 - protein, 19 aa, Homo sapiens
  CDR3 for beta chain variable domain of TCR clone 347461 (TRBV28, TRBJ2-1)
CASSFSIRGSGRTRYEQFL

SEQ ID NO: 694923 - protein, 11 aa, Homo sapiens
  CDR3 for alpha chain variable domain of TCR clone 347462 (TRAV1-2, TRAJ20)
CAVSNDYKLCF

SEQ ID NO: 694924 - protein, 16 aa, Homo sapiens
  CDR3 for beta chain variable domain of TCR clone 347462 (TRBV29-1, TRBJ2-6)
CSVEDITYSGANVLTF

SEQ ID NO: 694925 - protein, 15 aa, Homo sapiens
  CDR3 for alpha chain variable domain of TCR clone 347463 (TRAV8-3, TRAJ27)
CAVGPPKTNAGKSTF

SEQ ID NO: 694926 - protein, 14 aa, Homo sapiens
  CDR3 for beta chain variable domain of TCR clone 347463 (TRBV14, TRBJ2-1)
CASSQVQGRGEQFF

SEQ ID NO: 694927 - protein, 16 aa, Homo sapiens
  CDR3 for alpha chain variable domain of TCR clone 347464 (TRAV27, TRAJ13)
CAGAKRDSWGYQKVTF

SEQ ID NO: 694928 - protein, 15 aa, Homo sapiens
  CDR3 for beta chain variable domain of TCR clone 347464 (TRBV29-1, TRBJ2-1)
CSVGRHALFYNEQFF

SEQ ID NO: 694929 - protein, 23 aa, Homo sapiens
  CDR3 for alpha chain variable domain of TCR clone 347465 (TRAV30, TRAJ43)
CTLRPPISVTQEPTSAALSDMRF

SEQ ID NO: 694930 - protein, 13 aa, Homo sapiens
  CDR3 for beta chain variable domain of TCR clone 347465 (TRBV12-4, TRBJ2-2)
CASSITGSGELFF

SEQ ID NO: 694931 - protein, 14 aa, Homo sapiens
  CDR3 for alpha chain variable domain of TCR clone 347466 (TRAV35, TRAJ24)
CAGPRRDSWGKLQF

SEQ ID NO: 694932 - protein, 17 aa, Homo sapiens
  CDR3 for beta chain variable domain of TCR clone 347466 (TRBV11-2, TRBJ2-1)
CASSLYPPGVEYNEQFF

SEQ ID NO: 694933 - protein, 14 aa, Homo sapiens
  CDR3 for alpha chain variable domain of TCR clone 347467 (TRAV12-3, TRAJ13)
CAMKNSGGYQKVNF

SEQ ID NO: 694934 - protein, 13 aa, Homo sapiens
  CDR3 for beta chain variable domain of TCR clone 347467 (TRBV29-1, TRBJ2-5)
CSARDRVEETQYF

SEQ ID NO: 694935 - protein, 11 aa, Homo sapiens
  CDR3 for alpha chain variable domain of TCR clone 347468 (TRAV13-1, TRAJ42)
CAARKPRKSHL

SEQ ID NO: 694936 - protein, 10 aa, Homo sapiens
  CDR3 for beta chain variable domain of TCR clone 347468 (TRBV28, TRBJ2-5)
CQQSSWTQYF

SEQ ID NO: 694937 - protein, 13 aa, Homo sapiens
  CDR3 for alpha chain variable domain of TCR clone 347469 (TRAV23/DV6, TRAJ47)
CAASSQYGNKLVF

SEQ ID NO: 694938 - protein, 14 aa, Homo sapiens
  CDR3 for beta chain variable domain of TCR clone 347469 (TRBV7-9, TRBJ2-1)
CASSSMVGFGEQVF

SEQ ID NO: 694939 - protein, 11 aa, Homo sapiens
  CDR3 for alpha chain variable domain of TCR clone 347470 (TRAV12-2, TRAJ49)
CAVNGGNQFYF

SEQ ID NO: 694940 - protein, 14 aa, Homo sapiens
  CDR3 for beta chain variable domain of TCR clone 347470 (TRBV20-1, TRBJ1-1)
CSAQTRIGGTEAFF

SEQ ID NO: 694941 - protein, 11 aa, Homo sapiens
  CDR3 for alpha chain variable domain of TCR clone 347471 (TRAV26-1, TRAJ37)
CIVRVGRKLIF

SEQ ID NO: 694942 - protein, 14 aa, Homo sapiens
  CDR3 for beta chain variable domain of TCR clone 347471 (TRBV6-1, TRBJ2-1)
CASAGGAIKNEQFF

SEQ ID NO: 694943 - protein, 14 aa, Homo sapiens
  CDR3 for alpha chain variable domain of TCR clone 347472 (TRAV1-2, TRAJ8)
CAVREDTGFQKLVF

SEQ ID NO: 694944 - protein, 12 aa, Homo sapiens
  CDR3 for beta chain variable domain of TCR clone 347472 (TRBV2, TRBJ2-1)
CAYGPPGDEQFF

SEQ ID NO: 694945 - protein, 10 aa, Homo sapiens
  CDR3 for alpha chain variable domain of TCR clone 347473 (TRAV12-2, TRAJ48)
CAGANEKLTF

SEQ ID NO: 694946 - protein, 15 aa, Homo sapiens
  CDR3 for beta chain variable domain of TCR clone 347473 (TRBV5-5, TRBJ1-5)
CASSSTPGSNQPQHF

SEQ ID NO: 694947 - protein, 10 aa, Homo sapiens
  CDR3 for alpha chain variable domain of TCR clone 347474 (TRAV23/DV6, TRAJ57)
CAASSTLSQV

SEQ ID NO: 694948 - protein, 15 aa, Homo sapiens
  CDR3 for beta chain variable domain of TCR clone 347474 (TRBV27, TRBJ2-1)
CASSNGGGSPNEQFF

SEQ ID NO: 694949 - protein, 16 aa, Homo sapiens
  CDR3 for alpha chain variable domain of TCR clone 347475 (TRAV17, TRAJ52)
CATGIIGGTSYGKLTF

SEQ ID NO: 694950 - protein, 12 aa, Homo sapiens
  CDR3 for beta chain variable domain of TCR clone 347475 (TRBV7-3, TRBJ2-1)
CASSFINNEQFW

SEQ ID NO: 694951 - protein, 12 aa, Homo sapiens
  CDR3 for alpha chain variable domain of TCR clone 347476 (TRAV29/DV5, TRAJ15)
CASNQAGTALIF

SEQ ID NO: 694952 - protein, 15 aa, Homo sapiens
  CDR3 for beta chain variable domain of TCR clone 347476 (TRBV11-2, TRBJ2-2)
CASSSDRVNAWELFF

SEQ ID NO: 694953 - protein, 17 aa, Homo sapiens
  CDR3 for alpha chain variable domain of TCR clone 347477 (TRAV21, TRAJ53)
CCEGGENSGGSNYKLTF

SEQ ID NO: 694954 - protein, 14 aa, Homo sapiens
  CDR3 for beta chain variable domain of TCR clone 347477 (TRBV6-1, TRBJ1-5)
CASSAGAGSQPQHF

SEQ ID NO: 694955 - protein, 11 aa, Homo sapiens
  CDR3 for alpha chain variable domain of TCR clone 347478 (TRAV12-1, TRAJ30)
CVVNGQDKIIF

SEQ ID NO: 694956 - protein, 12 aa, Homo sapiens
  CDR3 for beta chain variable domain of TCR clone 347478 (TRBV27, TRBJ2-2)
CASKLFTGELFC

SEQ ID NO: 694957 - protein, 15 aa, Homo sapiens
  CDR3 for alpha chain variable domain of TCR clone 347479 (TRAV12-1, TRAJ48)
CVVNPLGFGNEKLTF

SEQ ID NO: 694958 - protein, 15 aa, Homo sapiens
  CDR3 for beta chain variable domain of TCR clone 347479 (TRBV20-1, TRBJ1-1)
CSASRGVTGNTEAFF

SEQ ID NO: 694959 - protein, 13 aa, Homo sapiens
  CDR3 for alpha chain variable domain of TCR clone 347480 (TRAV21, TRAJ57)
CAVTQGGSEKLVF

SEQ ID NO: 694960 - protein, 14 aa, Homo sapiens
  CDR3 for beta chain variable domain of TCR clone 347480 (TRBV18, TRBJ2-5)
CASSPGVSQETQYS

SEQ ID NO: 694961 - protein, 16 aa, Homo sapiens
  CDR3 for alpha chain variable domain of TCR clone 347481 (TRAV3, TRAJ37)
CAVRGKGSGNTGKLIF

SEQ ID NO: 694962 - protein, 14 aa, Homo sapiens
  CDR3 for beta chain variable domain of TCR clone 347481 (TRBV15, TRBJ2-3)
CATRSGTSTDTQYF

SEQ ID NO: 694963 - protein, 13 aa, Homo sapiens
  CDR3 for alpha chain variable domain of TCR clone 347482 (TRAV12-2, TRAJ53)
CAGVGGSNYKLTF

SEQ ID NO: 694964 - protein, 12 aa, Homo sapiens
  CDR3 for beta chain variable domain of TCR clone 347482 (TRBV18, TRBJ2-1)
CASSSDEDEQFF

SEQ ID NO: 694965 - protein, 17 aa, Homo sapiens
  CDR3 for alpha chain variable domain of TCR clone 347483 (TRAV3, TRAJ6)
CAVRDGPRAGGGYIPTF

SEQ ID NO: 694966 - protein, 15 aa, Homo sapiens
  CDR3 for beta chain variable domain of TCR clone 347483 (TRBV6-3, TRBJ2-7)
CASSSPGTVFYEQYF

SEQ ID NO: 694967 - protein, 12 aa, Homo sapiens
  CDR3 for alpha chain variable domain of TCR clone 347484 (TRAV2, TRAJ9)
CAVGAGGFKTIF

SEQ ID NO: 694968 - protein, 19 aa, Homo sapiens
  CDR3 for beta chain variable domain of TCR clone 347484 (TRBV13, TRBJ2-2)
CTSVPAALGQGSTPGSCFF

SEQ ID NO: 694969 - protein, 13 aa, Homo sapiens
  CDR3 for alpha chain variable domain of TCR clone 347485 (TRAV12-3, TRAJ13)
CAMSSGGYQKVTF

SEQ ID NO: 694970 - protein, 16 aa, Homo sapiens
  CDR3 for beta chain variable domain of TCR clone 347485 (TRBV4-2, TRBJ1-1)
CASSQAGFGMNTEAFF

SEQ ID NO: 694971 - protein, 13 aa, Homo sapiens
  CDR3 for alpha chain variable domain of TCR clone 347486 (TRAV12-3, TRAJ7)
CAMTPYGNNRLAF

SEQ ID NO: 694972 - protein, 14 aa, Homo sapiens
  CDR3 for beta chain variable domain of TCR clone 347486 (TRBV7-9, TRBJ1-2)
CASSRQGANYGYTF

SEQ ID NO: 694973 - protein, 11 aa, Homo sapiens
  CDR3 for alpha chain variable domain of TCR clone 347487 (TRAV2, TRAJ13)
CASGGYQKVTF

SEQ ID NO: 694974 - protein, 16 aa, Homo sapiens
  CDR3 for beta chain variable domain of TCR clone 347487 (TRBV5-1, TRBJ2-2)
CASSSKLAENTGELFF

SEQ ID NO: 694975 - protein, 12 aa, Homo sapiens
  CDR3 for alpha chain variable domain of TCR clone 347488 (TRAV12-3, TRAJ17)
CAMTLTGNKLTF

SEQ ID NO: 694976 - protein, 14 aa, Homo sapiens
  CDR3 for beta chain variable domain of TCR clone 347488 (TRBV28, TRBJ2-1)
CASSLNGRNNEQFF

SEQ ID NO: 694977 - protein, 20 aa, Homo sapiens
  CDR3 for alpha chain variable domain of TCR clone 347489 (TRAV12-1, TRAJ42)
SSVIQPPTSVKGGSQGNLIF

SEQ ID NO: 694978 - protein, 13 aa, Homo sapiens
  CDR3 for beta chain variable domain of TCR clone 347489 (TRBV19, TRBJ2-7)
CASRRAGGSEQYF

SEQ ID NO: 694979 - protein, 13 aa, Homo sapiens
  CDR3 for alpha chain variable domain of TCR clone 347490 (TRAV35, TRAJ42)
FAGFPGSQGNRIF

SEQ ID NO: 694980 - protein, 13 aa, Homo sapiens
  CDR3 for beta chain variable domain of TCR clone 347490 (TRBV29-1, TRBJ2-1)
CSVEGGRVNEQFF

SEQ ID NO: 694981 - protein, 11 aa, Homo sapiens
  CDR3 for alpha chain variable domain of TCR clone 347491 (TRAV3, TRAJ21)
CAVVNFNKFYF

SEQ ID NO: 694982 - protein, 14 aa, Homo sapiens
  CDR3 for beta chain variable domain of TCR clone 347491 (TRBV18, TRBJ2-5)
CASSPGVSQETQYF

SEQ ID NO: 694983 - protein, 19 aa, Homo sapiens
  CDR3 for alpha chain variable domain of TCR clone 347492 (TRAV29/DV5, TRAJ49)
CSVLLCSKLTVDTGNQFYF

SEQ ID NO: 694984 - protein, 13 aa, Homo sapiens
  CDR3 for beta chain variable domain of TCR clone 347492 (TRBV20-1, TRBJ1-1)
CSARAGGNTEAFF

SEQ ID NO: 694985 - protein, 14 aa, Homo sapiens
  CDR3 for alpha chain variable domain of TCR clone 347493 (TRAV17, TRAJ31)
CATVLRNNNARLMV

SEQ ID NO: 694986 - protein, 14 aa, Homo sapiens
  CDR3 for beta chain variable domain of TCR clone 347493 (TRBV12-4, TRBJ2-5)
CASSLWQKQETQYF

SEQ ID NO: 694987 - protein, 11 aa, Homo sapiens
  CDR3 for alpha chain variable domain of TCR clone 347494 (TRAV4, TRAJ28)
CLVGDNRAENL

SEQ ID NO: 694988 - protein, 13 aa, Homo sapiens
  CDR3 for beta chain variable domain of TCR clone 347494 (TRBV20-1, TRBJ2-7)
CSATHTSGYEQYF

SEQ ID NO: 694989 - protein, 15 aa, Homo sapiens
  CDR3 for alpha chain variable domain of TCR clone 347495 (TRAV23/DV6, TRAJ13)
CAAWPGGGGYQKVTF

SEQ ID NO: 694990 - protein, 19 aa, Homo sapiens
  CDR3 for beta chain variable domain of TCR clone 347495 (TRBV5-1, TRBJ2-3)
CASSLWLAGGITTTDTQYF

SEQ ID NO: 694991 - protein, 14 aa, Homo sapiens
  CDR3 for alpha chain variable domain of TCR clone 347496 (TRAV12-1, TRAJ17)
CVVNYKAAGNKLTF

SEQ ID NO: 694992 - protein, 17 aa, Homo sapiens
  CDR3 for beta chain variable domain of TCR clone 347496 (TRBV11-2, TRBJ2-1)
CASSLYPPGAEYNEQFF

SEQ ID NO: 694993 - protein, 12 aa, Homo sapiens
  CDR3 for alpha chain variable domain of TCR clone 347497 (TRAV29/DV5, TRAJ41)
CAAISSGYALNF

SEQ ID NO: 694994 - protein, 14 aa, Homo sapiens
  CDR3 for beta chain variable domain of TCR clone 347497 (TRBV19, TRBJ2-1)
CASPTFVLSGEQFF

SEQ ID NO: 694995 - protein, 12 aa, Homo sapiens
  CDR3 for alpha chain variable domain of TCR clone 347498 (TRAV1-1, TRAJ39)
CAVPVVGNMHTF

SEQ ID NO: 694996 - protein, 13 aa, Homo sapiens
  CDR3 for beta chain variable domain of TCR clone 347498 (TRBV7-9, TRBJ2-1)
CASSSSNFNEQFF

SEQ ID NO: 694997 - protein, 15 aa, Homo sapiens
  CDR3 for alpha chain variable domain of TCR clone 347499 (TRAV1-2, TRAJ12)
CAVIPEVDSSYKLIF

SEQ ID NO: 694998 - protein, 13 aa, Homo sapiens
  CDR3 for beta chain variable domain of TCR clone 347499 (TRBV7-9, TRBJ1-2)
CASSLKQNYGYTF

SEQ ID NO: 694999 - protein, 14 aa, Homo sapiens
  CDR3 for alpha chain variable domain of TCR clone 347500 (TRAV4, TRAJ17)
CLVGDMAAGNKLTF

SEQ ID NO: 695000 - protein, 13 aa, Homo sapiens
  CDR3 for beta chain variable domain of TCR clone 347500 (TRBV18, TRBJ2-7)
CASQPGGGYEQYF

SEQ ID NO: 695001 - protein, 22 aa, Homo sapiens
  CDR3 for alpha chain variable domain of TCR clone 347501 (TRAV2, TRAJ10)
ILQVREADAAVYYTGGGNKLTF

SEQ ID NO: 695002 - protein, 17 aa, Homo sapiens
  CDR3 for beta chain variable domain of TCR clone 347501 (TRBV11-2, TRBJ2-1)
CASSLYPPGVEYNEQFF

SEQ ID NO: 695003 - protein, 15 aa, Homo sapiens
  CDR3 for alpha chain variable domain of TCR clone 347502 (TRAV27, TRAJ38)
CAARRNAGNNRTLSW

SEQ ID NO: 695004 - protein, 13 aa, Homo sapiens
  CDR3 for beta chain variable domain of TCR clone 347502 (TRBV12-5, TRBJ2-3)
CASGDRQSDTQYF

SEQ ID NO: 695005 - protein, 14 aa, Homo sapiens
  CDR3 for alpha chain variable domain of TCR clone 347503 (TRAV1-2, TRAJ16)
CAVRGFSDGQKLLF

SEQ ID NO: 695006 - protein, 16 aa, Homo sapiens
  CDR3 for beta chain variable domain of TCR clone 347503 (TRBV20-1, TRBJ2-1)
CSARDPLAGGRGEQFF

SEQ ID NO: 695007 - protein, 16 aa, Homo sapiens
  CDR3 for alpha chain variable domain of TCR clone 347504 (TRAV3, TRAJ10)
CALRDMRAGGGTKLTF

SEQ ID NO: 695008 - protein, 13 aa, Homo sapiens
  CDR3 for beta chain variable domain of TCR clone 347504 (TRBV6-1, TRBJ1-1)
CASSRQGNTEAFF

SEQ ID NO: 695009 - protein, 13 aa, Homo sapiens
  CDR3 for alpha chain variable domain of TCR clone 347505 (TRAV13-1, TRAJ36)
CAARVTGANNLFF

SEQ ID NO: 695010 - protein, 16 aa, Homo sapiens
  CDR3 for beta chain variable domain of TCR clone 347505 (TRBV20-1, TRBJ1-4)
CSARPYGGELNEKLFF

SEQ ID NO: 695011 - protein, 14 aa, Homo sapiens
  CDR3 for alpha chain variable domain of TCR clone 347506 (TRAV1-2, TRAJ16)
CAVNRFTDGQKLLF

SEQ ID NO: 695012 - protein, 16 aa, Homo sapiens
  CDR3 for beta chain variable domain of TCR clone 347506 (TRBV19, TRBJ2-1)
CASSKAGPSSYNEQFF

SEQ ID NO: 695013 - protein, 15 aa, Homo sapiens
  CDR3 for alpha chain variable domain of TCR clone 347507 (TRAV23/DV6, TRAJ13)
CAAWPGGGGYQKGTL

SEQ ID NO: 695014 - protein, 17 aa, Homo sapiens
  CDR3 for beta chain variable domain of TCR clone 347507 (TRBV19, TRBJ2-7)
CASSISFYDSYPYEQYF

SEQ ID NO: 695015 - protein, 14 aa, Homo sapiens
  CDR3 for alpha chain variable domain of TCR clone 347508 (TRAV1-2, TRAJ27)
CAMRSGTNAGKSTF

SEQ ID NO: 695016 - protein, 15 aa, Homo sapiens
  CDR3 for beta chain variable domain of TCR clone 347508 (TRBV18, TRBJ2-7)
CASSPLQGRTYEQYF

SEQ ID NO: 695017 - protein, 20 aa, Homo sapiens
  CDR3 for alpha chain variable domain of TCR clone 347509 (TRAV26-1, TRAJ47)
CCVLLHRQSSFMEFGNKLVF

SEQ ID NO: 695018 - protein, 14 aa, Homo sapiens
  CDR3 for beta chain variable domain of TCR clone 347509 (TRBV7-2, TRBJ1-2)
CASSRGGTNYGYTF

SEQ ID NO: 695019 - protein, 14 aa, Homo sapiens
  CDR3 for alpha chain variable domain of TCR clone 347510 (TRAV2, TRAJ39)
CTTVHNNAGNMLTF

SEQ ID NO: 695020 - protein, 16 aa, Homo sapiens
  CDR3 for beta chain variable domain of TCR clone 347510 (TRBV24-1, TRBJ2-3)
CATSGYRDRDTDTQYF

SEQ ID NO: 695021 - protein, 15 aa, Homo sapiens
  CDR3 for alpha chain variable domain of TCR clone 347511 (TRAV17, TRAJ40)
CATVSSTSGTYKYIF

SEQ ID NO: 695022 - protein, 13 aa, Homo sapiens
  CDR3 for beta chain variable domain of TCR clone 347511 (TRBV7-6, TRBJ2-1)
CQQLGGGADEQFF

SEQ ID NO: 695023 - protein, 12 aa, Homo sapiens
  CDR3 for alpha chain variable domain of TCR clone 347512 (TRAV1-2, TRAJ33)
CAALDSNYQLIW

SEQ ID NO: 695024 - protein, 16 aa, Homo sapiens
  CDR3 for beta chain variable domain of TCR clone 347512 (TRBV6-4, TRBJ1-2)
CASSESVGDPNYGYTF

SEQ ID NO: 695025 - protein, 10 aa, Homo sapiens
  CDR3 for alpha chain variable domain of TCR clone 347513 (TRAV12-3, TRAJ49)
CAMNDDQFYF

SEQ ID NO: 695026 - protein, 16 aa, Homo sapiens
  CDR3 for beta chain variable domain of TCR clone 347513 (TRBV20-1, TRBJ1-4)
CIAPGQGLLTNEKLFF

SEQ ID NO: 695027 - protein, 14 aa, Homo sapiens
  CDR3 for alpha chain variable domain of TCR clone 347514 (TRAV17, TRAJ35)
CATDRPGFGNVLHC

SEQ ID NO: 695028 - protein, 19 aa, Homo sapiens
  CDR3 for beta chain variable domain of TCR clone 347514 (TRBV11-3, TRBJ2-2)
CASCTRPGAKTTNTGELFF

SEQ ID NO: 695029 - protein, 14 aa, Homo sapiens
  CDR3 for alpha chain variable domain of TCR clone 347515 (TRAV13-1, TRAJ23)
CAARRLGRGGKLIF

SEQ ID NO: 695030 - protein, 13 aa, Homo sapiens
  CDR3 for beta chain variable domain of TCR clone 347515 (TRBV7-7, TRBJ2-5)
CASSRSGQETQYF

SEQ ID NO: 695031 - protein, 16 aa, Homo sapiens
  CDR3 for alpha chain variable domain of TCR clone 347516 (TRAV12-2, TRAJ18)
CAVTTDRGSTLGRLYF

SEQ ID NO: 695032 - protein, 14 aa, Homo sapiens
  CDR3 for beta chain variable domain of TCR clone 347516 (TRBV4-2, TRBJ1-5)
CASNQDSINQPQHF

SEQ ID NO: 695033 - protein, 13 aa, Homo sapiens
  CDR3 for alpha chain variable domain of TCR clone 347517 (TRAV8-6, TRAJ21)
CAVSPSSLNKFYF

SEQ ID NO: 695034 - protein, 12 aa, Homo sapiens
  CDR3 for beta chain variable domain of TCR clone 347517 (TRBV7-9, TRBJ2-7)
CASSIKREEQYF

SEQ ID NO: 695035 - protein, 16 aa, Homo sapiens
  CDR3 for alpha chain variable domain of TCR clone 347518 (TRAV17, TRAJ52)
CATSNSGGTSYGKLTF

SEQ ID NO: 695036 - protein, 13 aa, Homo sapiens
  CDR3 for beta chain variable domain of TCR clone 347518 (TRBV27, TRBJ1-6)
CASSLVLVSPLHF

SEQ ID NO: 695037 - protein, 22 aa, Homo sapiens
  CDR3 for alpha chain variable domain of TCR clone 347519 (TRAV16, )
CALRTQIPDIQNPDPAVYQLRD

SEQ ID NO: 695038 - protein, 16 aa, Homo sapiens
  CDR3 for beta chain variable domain of TCR clone 347519 (TRBV7-2, TRBJ1-2)
CASSSNQDRRGHGYTV

SEQ ID NO: 695039 - protein, 13 aa, Homo sapiens
  CDR3 for alpha chain variable domain of TCR clone 347520 (TRAV27, TRAJ39)
CAGPNNAGNMLTF

SEQ ID NO: 695040 - protein, 15 aa, Homo sapiens
  CDR3 for beta chain variable domain of TCR clone 347520 (TRBV5-1, TRBJ1-1)
CASSSTTGTNTEAFF

SEQ ID NO: 695041 - protein, 14 aa, Homo sapiens
  CDR3 for alpha chain variable domain of TCR clone 347521 (TRAV29/DV5, TRAJ32)
CAAAYGGATNKLIF

SEQ ID NO: 695042 - protein, 15 aa, Homo sapiens
  CDR3 for beta chain variable domain of TCR clone 347521 (TRBV27, TRBJ2-7)
CASSTAGTGPYEQYF

SEQ ID NO: 695043 - protein, 15 aa, Homo sapiens
  CDR3 for alpha chain variable domain of TCR clone 347522 (TRAV12-2, TRAJ53)
CAANGGGGSNYELTL

SEQ ID NO: 695044 - protein, 16 aa, Homo sapiens
  CDR3 for beta chain variable domain of TCR clone 347522 (TRBV19, TRBJ2-1)
CASSKAGPSSYNEQFF

SEQ ID NO: 695045 - protein, 14 aa, Homo sapiens
  CDR3 for alpha chain variable domain of TCR clone 347523 (TRAV1-2, TRAJ16)
CAVNRFSDGQKLLF

SEQ ID NO: 695046 - protein, 15 aa, Homo sapiens
  CDR3 for beta chain variable domain of TCR clone 347523 (TRBV28, TRBJ1-5)
CASRHGTGFNQPQHF

SEQ ID NO: 695047 - protein, 13 aa, Homo sapiens
  CDR3 for alpha chain variable domain of TCR clone 347524 (TRAV12-3, TRAJ13)
CAMSSGGYQKVTF

SEQ ID NO: 695048 - protein, 15 aa, Homo sapiens
  CDR3 for beta chain variable domain of TCR clone 347524 (TRBV6-5, TRBJ2-1)
CASSYDAGAGNEQFF

SEQ ID NO: 695049 - protein, 13 aa, Homo sapiens
  CDR3 for alpha chain variable domain of TCR clone 347525 (TRAV8-4, TRAJ4)
CAVSDIGYNKLIF

SEQ ID NO: 695050 - protein, 14 aa, Homo sapiens
  CDR3 for beta chain variable domain of TCR clone 347525 (TRBV7-2, TRBJ2-7)
CASRSQGAAYEQYF

SEQ ID NO: 695051 - protein, 12 aa, Homo sapiens
  CDR3 for alpha chain variable domain of TCR clone 347526 (TRAV17, TRAJ20)
CATDRYDYKLSF

SEQ ID NO: 695052 - protein, 16 aa, Homo sapiens
  CDR3 for beta chain variable domain of TCR clone 347526 (TRBV28, TRBJ1-2)
CASREGQGTPYYGYTF

SEQ ID NO: 695053 - protein, 14 aa, Homo sapiens
  CDR3 for alpha chain variable domain of TCR clone 347527 (TRAV26-1, TRAJ38)
CIADNAGNNRKLIW

SEQ ID NO: 695054 - protein, 13 aa, Homo sapiens
  CDR3 for beta chain variable domain of TCR clone 347527 (TRBV19, TRBJ2-7)
CASRKAGGSEQYF

SEQ ID NO: 695055 - protein, 12 aa, Homo sapiens
  CDR3 for alpha chain variable domain of TCR clone 347528 (TRAV13-1, TRAJ11)
CAASKGYSTLTF

SEQ ID NO: 695056 - protein, 15 aa, Homo sapiens
  CDR3 for beta chain variable domain of TCR clone 347528 (TRBV11-2, TRBJ1-6)
CASTLRGTGNSPLHF

SEQ ID NO: 695057 - protein, 14 aa, Homo sapiens
  CDR3 for alpha chain variable domain of TCR clone 347529 (TRAV13-1, TRAJ44)
CAAKSTGTASKLTF

SEQ ID NO: 695058 - protein, 13 aa, Homo sapiens
  CDR3 for beta chain variable domain of TCR clone 347529 (TRBV5-5, TRBJ1-2)
CASSFWRGEDYTF

SEQ ID NO: 695059 - protein, 11 aa, Homo sapiens
  CDR3 for alpha chain variable domain of TCR clone 347530 (TRAV21, TRAJ39)
LLVNAGTMLTF

SEQ ID NO: 695060 - protein, 17 aa, Homo sapiens
  CDR3 for beta chain variable domain of TCR clone 347530 (TRBV7-8, TRBJ2-6)
CASSAGTGGAGANVLTF

SEQ ID NO: 695061 - protein, 12 aa, Homo sapiens
  CDR3 for alpha chain variable domain of TCR clone 347531 (TRAV12-2, TRAJ47)
CAVAEYGNKLVF

SEQ ID NO: 695062 - protein, 15 aa, Homo sapiens
  CDR3 for beta chain variable domain of TCR clone 347531 (TRBV4-1, TRBJ2-7)
CASSQQGQGFDEQYF

SEQ ID NO: 695063 - protein, 11 aa, Homo sapiens
  CDR3 for alpha chain variable domain of TCR clone 347532 (TRAV4, TRAJ31)
CLVGDNARLMF

SEQ ID NO: 695064 - protein, 15 aa, Homo sapiens
  CDR3 for beta chain variable domain of TCR clone 347532 (TRBV10-2, TRBJ2-6)
CASSEQGTRANVLTF

SEQ ID NO: 695065 - protein, 15 aa, Homo sapiens
  CDR3 for alpha chain variable domain of TCR clone 347533 (TRAV3, TRAJ4)
CAVRDGTDGYNKLIF

SEQ ID NO: 695066 - protein, 16 aa, Homo sapiens
  CDR3 for beta chain variable domain of TCR clone 347533 (TRBV27, TRBJ2-2)
CASSSSGVSNTGELFF

SEQ ID NO: 695067 - protein, 18 aa, Homo sapiens
  CDR3 for alpha chain variable domain of TCR clone 347534 (TRAV12-3, TRAJ52)
CAMSVGGAGGTSYGKLTF

SEQ ID NO: 695068 - protein, 15 aa, Homo sapiens
  CDR3 for beta chain variable domain of TCR clone 347534 (TRBV27, TRBJ1-6)
CASSFDRGLGSPLHR

SEQ ID NO: 695069 - protein, 15 aa, Homo sapiens
  CDR3 for alpha chain variable domain of TCR clone 347535 (TRAV16, TRAJ16)
CALQGGGSDGQKLLF

SEQ ID NO: 695070 - protein, 15 aa, Homo sapiens
  CDR3 for beta chain variable domain of TCR clone 347535 (TRBV20-1, TRBJ2-7)
CSARDRVSGMDEQYF

SEQ ID NO: 695071 - protein, 16 aa, Homo sapiens
  CDR3 for alpha chain variable domain of TCR clone 347536 (TRAV3, TRAJ21)
CAVRYIERGNFNKFYF

SEQ ID NO: 695072 - protein, 16 aa, Homo sapiens
  CDR3 for beta chain variable domain of TCR clone 347536 (TRBV12-4, TRBJ1-5)
CASSRPVGGSNQPQHF

SEQ ID NO: 695073 - protein, 14 aa, Homo sapiens
  CDR3 for alpha chain variable domain of TCR clone 347537 (TRAV22, TRAJ6)
CAGVGPGGSYIPKF

SEQ ID NO: 695074 - protein, 11 aa, Homo sapiens
  CDR3 for beta chain variable domain of TCR clone 347537 (TRBV20-1, TRBJ2-1)
CSLSSGSEQFF

SEQ ID NO: 695075 - protein, 11 aa, Homo sapiens
  CDR3 for alpha chain variable domain of TCR clone 347538 (TRAV12-1, TRAJ15)
CVVNAGTALIF

SEQ ID NO: 695076 - protein, 17 aa, Homo sapiens
  CDR3 for beta chain variable domain of TCR clone 347538 (TRBV7-8, TRBJ2-6)
CASSAGTGGAGANVLTF

SEQ ID NO: 695077 - protein, 12 aa, Homo sapiens
  CDR3 for alpha chain variable domain of TCR clone 347539 (TRAV12-3, TRAJ17)
CAMTLTGNELTF

SEQ ID NO: 695078 - protein, 14 aa, Homo sapiens
  CDR3 for beta chain variable domain of TCR clone 347539 (TRBV20-1, TRBJ2-1)
CSAQIGGSANEQFF

SEQ ID NO: 695079 - protein, 14 aa, Homo sapiens
  CDR3 for alpha chain variable domain of TCR clone 347540 (TRAV8-3, TRAJ3)
CAVVPRSSASKIIF

SEQ ID NO: 695080 - protein, 13 aa, Homo sapiens
  CDR3 for beta chain variable domain of TCR clone 347540 (TRBV11-2, TRBJ2-7)
CASSGTRPYEQYF

SEQ ID NO: 695081 - protein, 13 aa, Homo sapiens
  CDR3 for alpha chain variable domain of TCR clone 347541 (TRAV21, TRAJ37)
CAVSSGNTGKLIF

SEQ ID NO: 695082 - protein, 17 aa, Homo sapiens
  CDR3 for beta chain variable domain of TCR clone 347541 (TRBV5-1, TRBJ2-5)
CASSLLGLAASQETQYF

SEQ ID NO: 695083 - protein, 16 aa, Homo sapiens
  CDR3 for alpha chain variable domain of TCR clone 347542 (TRAV12-3, TRAJ53)
CAMSSGSGGSNSKLTF

SEQ ID NO: 695084 - protein, 16 aa, Homo sapiens
  CDR3 for beta chain variable domain of TCR clone 347542 (TRBV4-2, TRBJ1-1)
CASRPLDGGGDTEAFF

SEQ ID NO: 695085 - protein, 11 aa, Homo sapiens
  CDR3 for alpha chain variable domain of TCR clone 347543 (TRAV1-2, TRAJ20)
CAASNDYKLSF

SEQ ID NO: 695086 - protein, 16 aa, Homo sapiens
  CDR3 for beta chain variable domain of TCR clone 347543 (TRBV29-1, TRBJ2-6)
CSVEDITYSGANVLTF

SEQ ID NO: 695087 - protein, 14 aa, Homo sapiens
  CDR3 for alpha chain variable domain of TCR clone 347544 (TRAV16, TRAJ33)
CALSAMDSNYQLIW

SEQ ID NO: 695088 - protein, 18 aa, Homo sapiens
  CDR3 for beta chain variable domain of TCR clone 347544 (TRBV7-2, TRBJ2-2)
CASSLDPYSYGPPGELFF

SEQ ID NO: 695089 - protein, 14 aa, Homo sapiens
  CDR3 for alpha chain variable domain of TCR clone 347545 (TRAV8-1, TRAJ34)
CAVNPSYNTGKLIF

SEQ ID NO: 695090 - protein, 16 aa, Homo sapiens
  CDR3 for beta chain variable domain of TCR clone 347545 (TRBV7-2, TRBJ2-6)
CASSLAGRSGANVLTF

SEQ ID NO: 695091 - protein, 14 aa, Homo sapiens
  CDR3 for alpha chain variable domain of TCR clone 347546 (TRAV13-2, TRAJ17)
CAENSKAVGNKLTF

SEQ ID NO: 695092 - protein, 13 aa, Homo sapiens
  CDR3 for beta chain variable domain of TCR clone 347546 (TRBV7-9, TRBJ1-2)
CASSLKQNYGYTF

SEQ ID NO: 695093 - protein, 14 aa, Homo sapiens
  CDR3 for alpha chain variable domain of TCR clone 347547 (TRAV1-2, TRAJ8)
CAVREDTGFQKLVV

SEQ ID NO: 695094 - protein, 11 aa, Homo sapiens
  CDR3 for beta chain variable domain of TCR clone 347547 (TRBV12-4, TRBJ2-3)
CASTATDTQYF

SEQ ID NO: 695095 - protein, 16 aa, Homo sapiens
  CDR3 for alpha chain variable domain of TCR clone 347548 (TRAV8-3, TRAJ44)
CAVGASNTGTASKLTF

SEQ ID NO: 695096 - protein, 14 aa, Homo sapiens
  CDR3 for beta chain variable domain of TCR clone 347548 (TRBV11-1, TRBJ2-7)
CASSFRQGSYEQYF

SEQ ID NO: 695097 - protein, 14 aa, Homo sapiens
  CDR3 for alpha chain variable domain of TCR clone 347549 (TRAV16, TRAJ32)
FALKSGGATNKLIF

SEQ ID NO: 695098 - protein, 17 aa, Homo sapiens
  CDR3 for beta chain variable domain of TCR clone 347549 (TRBV20-1, TRBJ2-1)
CSASSSGLAGSYNEQFF

SEQ ID NO: 695099 - protein, 11 aa, Homo sapiens
  CDR3 for alpha chain variable domain of TCR clone 347550 (TRAV21, TRAJ41)
CAVRSGYALNF

SEQ ID NO: 695100 - protein, 13 aa, Homo sapiens
  CDR3 for beta chain variable domain of TCR clone 347550 (TRBV7-2, TRBJ2-5)
CARSQTSVETQYF

SEQ ID NO: 695101 - protein, 13 aa, Homo sapiens
  CDR3 for alpha chain variable domain of TCR clone 347551 (TRAV21, TRAJ57)
CAVTQGGSEKLVF

SEQ ID NO: 695102 - protein, 12 aa, Homo sapiens
  CDR3 for beta chain variable domain of TCR clone 347551 (TRBV5-5, TRBJ2-5)
CASSYFGETQYF

SEQ ID NO: 695103 - protein, 16 aa, Homo sapiens
  CDR3 for alpha chain variable domain of TCR clone 347552 (TRAV8-3, TRAJ10)
CAVGPLLTGGGNKLTF

SEQ ID NO: 695104 - protein, 11 aa, Homo sapiens
  CDR3 for beta chain variable domain of TCR clone 347552 (TRBV29-1, TRBJ2-5)
CSEDRTGTQYF

SEQ ID NO: 695105 - protein, 13 aa, Homo sapiens
  CDR3 for alpha chain variable domain of TCR clone 347553 (TRAV12-2, TRAJ4)
CAGFSGGYNKLIF

SEQ ID NO: 695106 - protein, 16 aa, Homo sapiens
  CDR3 for beta chain variable domain of TCR clone 347553 (TRBV7-9, TRBJ2-3)
CASSPWREVGTDTQYF

SEQ ID NO: 695107 - protein, 16 aa, Homo sapiens
  CDR3 for alpha chain variable domain of TCR clone 347554 (TRAV14/DV4, TRAJ53)
CAMREGGGGSNYKLTF

SEQ ID NO: 695108 - protein, 12 aa, Homo sapiens
  CDR3 for beta chain variable domain of TCR clone 347554 (TRBV7-9, TRBJ1-5)
CASSPQGQPQHF

SEQ ID NO: 695109 - protein, 12 aa, Homo sapiens
  CDR3 for alpha chain variable domain of TCR clone 347555 (TRAV13-1, TRAJ17)
CAARTAGNKLTF

SEQ ID NO: 695110 - protein, 15 aa, Homo sapiens
  CDR3 for beta chain variable domain of TCR clone 347555 (TRBV27, TRBJ2-1)
CASSNGGGSSNEQFF

SEQ ID NO: 695111 - protein, 16 aa, Homo sapiens
  CDR3 for alpha chain variable domain of TCR clone 347556 (TRAV16, TRAJ4)
CALSRMFSGGYNKRIF

SEQ ID NO: 695112 - protein, 16 aa, Homo sapiens
  CDR3 for beta chain variable domain of TCR clone 347556 (TRBV24-1, TRBJ2-3)
CATSDPETGATDTQYF

SEQ ID NO: 695113 - protein, 15 aa, Homo sapiens
  CDR3 for alpha chain variable domain of TCR clone 347557 (TRAV12-2, TRAJ28)
CAVLSPGAGSYQLTF

SEQ ID NO: 695114 - protein, 15 aa, Homo sapiens
  CDR3 for beta chain variable domain of TCR clone 347557 (TRBV29-1, TRBJ1-2)
CSVEKTGGPFYGYTF

SEQ ID NO: 695115 - protein, 12 aa, Homo sapiens
  CDR3 for alpha chain variable domain of TCR clone 347558 (TRAV23/DV6, TRAJ33)
CAAEDSNYQLIW

SEQ ID NO: 695116 - protein, 14 aa, Homo sapiens
  CDR3 for beta chain variable domain of TCR clone 347558 (TRBV18, TRBJ1-5)
CASSRQQRKQPQHF

SEQ ID NO: 695117 - protein, 13 aa, Homo sapiens
  CDR3 for alpha chain variable domain of TCR clone 347559 (TRAV23/DV6, TRAJ22)
CAPYSGSARPLTF

SEQ ID NO: 695118 - protein, 15 aa, Homo sapiens
  CDR3 for beta chain variable domain of TCR clone 347559 (TRBV11-2, TRBJ1-6)
CASSLDPWAGSPLHF

SEQ ID NO: 695119 - protein, 13 aa, Homo sapiens
  CDR3 for alpha chain variable domain of TCR clone 347560 (TRAV12-2, TRAJ11)
CREQESGYSTLTF

SEQ ID NO: 695120 - protein, 10 aa, Homo sapiens
  CDR3 for beta chain variable domain of TCR clone 347560 (TRBV20-1, TRBJ2-5)
CSARFETQYF

SEQ ID NO: 695121 - protein, 11 aa, Homo sapiens
  CDR3 for alpha chain variable domain of TCR clone 347561 (TRAV21, TRAJ34)
CAVTNTDKLIF

SEQ ID NO: 695122 - protein, 14 aa, Homo sapiens
  CDR3 for beta chain variable domain of TCR clone 347561 (TRBV27, TRBJ2-2)
CASRRDTNTGELFF

SEQ ID NO: 695123 - protein, 14 aa, Homo sapiens
  CDR3 for alpha chain variable domain of TCR clone 347562 (TRAV1-2, TRAJ16)
CAVNRFSDGQKLLF

SEQ ID NO: 695124 - protein, 16 aa, Homo sapiens
  CDR3 for beta chain variable domain of TCR clone 347562 (TRBV2, TRBJ1-5)
CASGSTGSNFGQPQHF

SEQ ID NO: 695125 - protein, 14 aa, Homo sapiens
  CDR3 for alpha chain variable domain of TCR clone 347563 (TRAV25, TRAJ6)
CAGRESGGSYIPTF

SEQ ID NO: 695126 - protein, 12 aa, Homo sapiens
  CDR3 for beta chain variable domain of TCR clone 347563 (TRBV10-3, TRBJ2-7)
CAHGADSGEQYF

SEQ ID NO: 695127 - protein, 12 aa, Homo sapiens
  CDR3 for alpha chain variable domain of TCR clone 347564 (TRAV35, TRAJ40)
CAGRAGTYKYIF

SEQ ID NO: 695128 - protein, 14 aa, Homo sapiens
  CDR3 for beta chain variable domain of TCR clone 347564 (TRBV7-2, TRBJ1-3)
CASSRGGTGNTIYL

SEQ ID NO: 695129 - protein, 18 aa, Homo sapiens
  CDR3 for alpha chain variable domain of TCR clone 347565 (TRAV26-1, TRAJ22)
CIVRVALISSGSAGQLTF

SEQ ID NO: 695130 - protein, 13 aa, Homo sapiens
  CDR3 for beta chain variable domain of TCR clone 347565 (TRBV13, TRBJ2-5)
CASSPEVGETQYF

SEQ ID NO: 695131 - protein, 11 aa, Homo sapiens
  CDR3 for alpha chain variable domain of TCR clone 347566 (TRAV2, TRAJ33)
CAVDSNYQLIW

SEQ ID NO: 695132 - protein, 18 aa, Homo sapiens
  CDR3 for beta chain variable domain of TCR clone 347566 (TRBV11-2, TRBJ2-3)
CASSLGGASRGAPNTQYF

SEQ ID NO: 695133 - protein, 16 aa, Homo sapiens
  CDR3 for alpha chain variable domain of TCR clone 347567 (TRAV3, TRAJ10)
CAVRDMRAGGGNKLTF

SEQ ID NO: 695134 - protein, 12 aa, Homo sapiens
  CDR3 for beta chain variable domain of TCR clone 347567 (TRBV6-3, TRBJ2-7)
CASSRQGYEQYF

SEQ ID NO: 695135 - protein, 17 aa, Homo sapiens
  CDR3 for alpha chain variable domain of TCR clone 347568 (TRAV26-1, TRAJ37)
CIVRVITVSSNTGKLIF

SEQ ID NO: 695136 - protein, 15 aa, Homo sapiens
  CDR3 for beta chain variable domain of TCR clone 347568 (TRBV7-9, TRBJ1-2)
CASSLDREPNYGYTF

SEQ ID NO: 695137 - protein, 12 aa, Homo sapiens
  CDR3 for alpha chain variable domain of TCR clone 347569 (TRAV16, TRAJ27)
CALNTNAGKSTF

SEQ ID NO: 695138 - protein, 16 aa, Homo sapiens
  CDR3 for beta chain variable domain of TCR clone 347569 (TRBV12-4, TRBJ2-5)
CASSFFVRGRQETQYF

SEQ ID NO: 695139 - protein, 14 aa, Homo sapiens
  CDR3 for alpha chain variable domain of TCR clone 347570 (TRAV12-2, TRAJ13)
CAVKKTGGYQKVTF

SEQ ID NO: 695140 - protein, 14 aa, Homo sapiens
  CDR3 for beta chain variable domain of TCR clone 347570 (TRBV12-4, TRBJ2-3)
CASTIAGWGDTQYF

SEQ ID NO: 695141 - protein, 15 aa, Homo sapiens
  CDR3 for alpha chain variable domain of TCR clone 347571 (TRAV27, TRAJ38)
CAARRNAGNNRKRIW

SEQ ID NO: 695142 - protein, 15 aa, Homo sapiens
  CDR3 for beta chain variable domain of TCR clone 347571 (TRBV20-1, TRBJ2-7)
CSARDRVSGMDEQYF

SEQ ID NO: 695143 - protein, 17 aa, Homo sapiens
  CDR3 for alpha chain variable domain of TCR clone 347572 (TRAV3, TRAJ6)
CAVRDGPRAGGSYIPTF

SEQ ID NO: 695144 - protein, 14 aa, Homo sapiens
  CDR3 for beta chain variable domain of TCR clone 347572 (TRBV7-2, TRBJ2-7)
CASNPKTSFYEQYC

SEQ ID NO: 695145 - protein, 16 aa, Homo sapiens
  CDR3 for alpha chain variable domain of TCR clone 347573 (TRAV3, TRAJ37)
CAVRGKGPGNTGKLIF

SEQ ID NO: 695146 - protein, 14 aa, Homo sapiens
  CDR3 for beta chain variable domain of TCR clone 347573 (TRBV12-5, TRBJ2-5)
CASGSRTHQETQYF

SEQ ID NO: 695147 - protein, 19 aa, Homo sapiens
  CDR3 for alpha chain variable domain of TCR clone 347574 (TRAV26-1, TRAJ28)
CIVRVAHAYSGAGSYQLTV

SEQ ID NO: 695148 - protein, 17 aa, Homo sapiens
  CDR3 for beta chain variable domain of TCR clone 347574 (TRBV9, TRBJ2-2)
CASSVGGQGTDTGELFF

SEQ ID NO: 695149 - protein, 10 aa, Homo sapiens
  CDR3 for alpha chain variable domain of TCR clone 347575 (TRAV13-2, TRAJ20)
CAENICRLQA

SEQ ID NO: 695150 - protein, 15 aa, Homo sapiens
  CDR3 for beta chain variable domain of TCR clone 347575 (TRBV18, TRBJ1-2)
CASPPGNGLGYGYTF

SEQ ID NO: 695151 - protein, 14 aa, Homo sapiens
  CDR3 for alpha chain variable domain of TCR clone 347576 (TRAV13-1, TRAJ44)
CAAKATGTASKLTF

SEQ ID NO: 695152 - protein, 14 aa, Homo sapiens
  CDR3 for beta chain variable domain of TCR clone 347576 (TRBV4-2, TRBJ1-5)
CASSQDSINQPQHF

SEQ ID NO: 695153 - protein, 18 aa, Homo sapiens
  CDR3 for alpha chain variable domain of TCR clone 347577 (TRAV21, TRAJ52)
CGVRPSPAGGTSYGKLTF

SEQ ID NO: 695154 - protein, 13 aa, Homo sapiens
  CDR3 for beta chain variable domain of TCR clone 347577 (TRBV7-3, TRBJ1-1)
CASSQDWGAEAFF

SEQ ID NO: 695155 - protein, 14 aa, Homo sapiens
  CDR3 for alpha chain variable domain of TCR clone 347578 (TRAV26-1, TRAJ54)
CIVRVPQGAQKLVF

SEQ ID NO: 695156 - protein, 14 aa, Homo sapiens
  CDR3 for beta chain variable domain of TCR clone 347578 (TRBV7-6, TRBJ2-7)
CASSFRQGADEHYF

SEQ ID NO: 695157 - protein, 17 aa, Homo sapiens
  CDR3 for alpha chain variable domain of TCR clone 347579 (TRAV13-1, TRAJ31)
CAPRDRLMFGDGTQLVV

SEQ ID NO: 695158 - protein, 16 aa, Homo sapiens
  CDR3 for beta chain variable domain of TCR clone 347579 (TRBV13, TRBJ2-2)
CASSEVFGANTGELFF

SEQ ID NO: 695159 - protein, 10 aa, Homo sapiens
  CDR3 for alpha chain variable domain of TCR clone 347580 (TRAV30, TRAJ32)
CGTEKDMVVL

SEQ ID NO: 695160 - protein, 13 aa, Homo sapiens
  CDR3 for beta chain variable domain of TCR clone 347580 (TRBV10-3, TRBJ2-7)
CASRLAVNYEQYF

SEQ ID NO: 695161 - protein, 16 aa, Homo sapiens
  CDR3 for alpha chain variable domain of TCR clone 347581 (TRAV4, TRAJ22)
CLVCDLYSGSASQLTF

SEQ ID NO: 695162 - protein, 16 aa, Homo sapiens
  CDR3 for beta chain variable domain of TCR clone 347581 (TRBV7-9, TRBJ2-1)
CASSDVAGGSYNEQFF

SEQ ID NO: 695163 - protein, 12 aa, Homo sapiens
  CDR3 for alpha chain variable domain of TCR clone 347582 (TRAV12-3, TRAJ37)
CAMSSNTGKLIF

SEQ ID NO: 695164 - protein, 14 aa, Homo sapiens
  CDR3 for beta chain variable domain of TCR clone 347582 (TRBV7-2, TRBJ2-7)
CASRSQGAAYEQYF

SEQ ID NO: 695165 - protein, 12 aa, Homo sapiens
  CDR3 for alpha chain variable domain of TCR clone 347583 (TRAV12-3, TRAJ21)
CAMFNNFNKFYF

SEQ ID NO: 695166 - protein, 16 aa, Homo sapiens
  CDR3 for beta chain variable domain of TCR clone 347583 (TRBV7-9, TRBJ1-2)
CASSLAPLRAAYCYTF

SEQ ID NO: 695167 - protein, 13 aa, Homo sapiens
  CDR3 for alpha chain variable domain of TCR clone 347584 (TRAV27, TRAJ29)
CAGPHSGNTPLVF

SEQ ID NO: 695168 - protein, 14 aa, Homo sapiens
  CDR3 for beta chain variable domain of TCR clone 347584 (TRBV19, TRBJ2-1)
CASPTFVLSGEQFF

SEQ ID NO: 695169 - protein, 13 aa, Homo sapiens
  CDR3 for alpha chain variable domain of TCR clone 347585 (TRAV27, TRAJ11)
CAGGGSGYSPLTF

SEQ ID NO: 695170 - protein, 15 aa, Homo sapiens
  CDR3 for beta chain variable domain of TCR clone 347585 (TRBV5-1, TRBJ1-1)
CASSLGQGRFAEAFF

SEQ ID NO: 695171 - protein, 17 aa, Homo sapiens
  CDR3 for alpha chain variable domain of TCR clone 347586 (TRAV27, TRAJ52)
CSGAGWAGGTSYGKLTF

SEQ ID NO: 695172 - protein, 16 aa, Homo sapiens
  CDR3 for beta chain variable domain of TCR clone 347586 (TRBV19, TRBJ2-1)
CASSKAGPSSYNEQFF

SEQ ID NO: 695173 - protein, 15 aa, Homo sapiens
  CDR3 for alpha chain variable domain of TCR clone 347587 (TRAV16, TRAJ16)
CALQGGGSDGQELLF

SEQ ID NO: 695174 - protein, 17 aa, Homo sapiens
  CDR3 for beta chain variable domain of TCR clone 347587 (TRBV2, TRBJ1-6)
CASSLRSGGLMTSPLHF

SEQ ID NO: 695175 - protein, 14 aa, Homo sapiens
  CDR3 for alpha chain variable domain of TCR clone 347588 (TRAV38-1, TRAJ28)
CAFTSWAGSYQLTF

SEQ ID NO: 695176 - protein, 13 aa, Homo sapiens
  CDR3 for beta chain variable domain of TCR clone 347588 (TRBV12-4, TRBJ2-7)
CASSFVPTAEQYF

SEQ ID NO: 695177 - protein, 12 aa, Homo sapiens
  CDR3 for alpha chain variable domain of TCR clone 347589 (TRAV12-1, TRAJ34)
CVVAGATDKLIF

SEQ ID NO: 695178 - protein, 13 aa, Homo sapiens
  CDR3 for beta chain variable domain of TCR clone 347589 (TRBV12-4, TRBJ1-2)
CASSLRQGKGYTF

SEQ ID NO: 695179 - protein, 14 aa, Homo sapiens
  CDR3 for alpha chain variable domain of TCR clone 347590 (TRAV1-2, TRAJ16)
CAVNRFSDGQKLLF

SEQ ID NO: 695180 - protein, 17 aa, Homo sapiens
  CDR3 for beta chain variable domain of TCR clone 347590 (TRBV11-2, TRBJ2-1)
CASSFYPPGVEYNEQFF

SEQ ID NO: 695181 - protein, 12 aa, Homo sapiens
  CDR3 for alpha chain variable domain of TCR clone 347591 (TRAV36/DV7, TRAJ31)
CAVANNNARLMF

SEQ ID NO: 695182 - protein, 17 aa, Homo sapiens
  CDR3 for beta chain variable domain of TCR clone 347591 (TRBV7-8, TRBJ2-6)
CASSAGTGGAGANVLTF

SEQ ID NO: 695183 - protein, 13 aa, Homo sapiens
  CDR3 for alpha chain variable domain of TCR clone 347592 (TRAV3, TRAJ27)
CAVRPLGAGKSTF

SEQ ID NO: 695184 - protein, 16 aa, Homo sapiens
  CDR3 for beta chain variable domain of TCR clone 347592 (TRBV28, TRBJ2-7)
CASSLFFETGGPEQYF

SEQ ID NO: 695185 - protein, 14 aa, Homo sapiens
  CDR3 for alpha chain variable domain of TCR clone 347593 (TRAV12-2, TRAJ53)
CRERGGGSNYKLTF

SEQ ID NO: 695186 - protein, 16 aa, Homo sapiens
  CDR3 for beta chain variable domain of TCR clone 347593 (TRBV7-3, TRBJ2-2)
CASSLKRGTLSGELFF

SEQ ID NO: 695187 - protein, 16 aa, Homo sapiens
  CDR3 for alpha chain variable domain of TCR clone 347594 (TRAV30, TRAJ24)
CGTEIVDADSGGRFQF

SEQ ID NO: 695188 - protein, 14 aa, Homo sapiens
  CDR3 for beta chain variable domain of TCR clone 347594 (TRBV12-5, TRBJ2-5)
CASGSRTHQETQYF

SEQ ID NO: 695189 - protein, 16 aa, Homo sapiens
  CDR3 for alpha chain variable domain of TCR clone 347595 (TRAV27, TRAJ52)
CAGAPAGGTSYEKLTF

SEQ ID NO: 695190 - protein, 12 aa, Homo sapiens
  CDR3 for beta chain variable domain of TCR clone 347595 (TRBV27, TRBJ2-1)
CASRGFYNEQFF

SEQ ID NO: 695191 - protein, 14 aa, Homo sapiens
  CDR3 for alpha chain variable domain of TCR clone 347596 (TRAV14/DV4, TRAJ32)
SNVLPLTPTNKLIF

SEQ ID NO: 695192 - protein, 15 aa, Homo sapiens
  CDR3 for beta chain variable domain of TCR clone 347596 (TRBV7-2, TRBJ2-5)
CASSAARSLTETQYF

SEQ ID NO: 695193 - protein, 12 aa, Homo sapiens
  CDR3 for alpha chain variable domain of TCR clone 347597 (TRAV12-1, TRAJ29)
CVADSGNTPLVF

SEQ ID NO: 695194 - protein, 14 aa, Homo sapiens
  CDR3 for beta chain variable domain of TCR clone 347597 (TRBV7-6, TRBJ2-3)
CASSLGTVTDTQYF

SEQ ID NO: 695195 - protein, 14 aa, Homo sapiens
  CDR3 for alpha chain variable domain of TCR clone 347598 (TRAV13-1, TRAJ17)
LSSRSKAAGNKLTF

SEQ ID NO: 695196 - protein, 13 aa, Homo sapiens
  CDR3 for beta chain variable domain of TCR clone 347598 (TRBV7-2, TRBJ1-4)
CASSLAGLEKLFF

SEQ ID NO: 695197 - protein, 14 aa, Homo sapiens
  CDR3 for alpha chain variable domain of TCR clone 347599 (TRAV17, TRAJ54)
CATDANQGAQKLVF

SEQ ID NO: 695198 - protein, 15 aa, Homo sapiens
  CDR3 for beta chain variable domain of TCR clone 347599 (TRBV5-5, TRBJ1-5)
CASSSTPGSNQPQHF

SEQ ID NO: 695199 - protein, 14 aa, Homo sapiens
  CDR3 for alpha chain variable domain of TCR clone 347600 (TRAV12-2, TRAJ40)
CAGKIPSGPSKYIF

SEQ ID NO: 695200 - protein, 14 aa, Homo sapiens
  CDR3 for beta chain variable domain of TCR clone 347600 (TRBV20-1, TRBJ1-1)
CSAQTRIGGTEAFF

SEQ ID NO: 695201 - protein, 11 aa, Homo sapiens
  CDR3 for alpha chain variable domain of TCR clone 347601 (TRAV27, TRAJ47)
CAGAYGNKLVF

SEQ ID NO: 695202 - protein, 15 aa, Homo sapiens
  CDR3 for beta chain variable domain of TCR clone 347601 (TRBV28, TRBJ1-1)
CASSPPGGLGTEAFF

SEQ ID NO: 695203 - protein, 16 aa, Homo sapiens
  CDR3 for alpha chain variable domain of TCR clone 347602 (TRAV12-3, TRAJ53)
CAMSPGSGGSNYKLKF

SEQ ID NO: 695204 - protein, 14 aa, Homo sapiens
  CDR3 for beta chain variable domain of TCR clone 347602 (TRBV4-1, TRBJ2-7)
CASSPVAGGDEQYF

SEQ ID NO: 695205 - protein, 14 aa, Homo sapiens
  CDR3 for alpha chain variable domain of TCR clone 347603 (TRAV17, TRAJ56)
CATVPAGANSKLTF

SEQ ID NO: 695206 - protein, 17 aa, Homo sapiens
  CDR3 for beta chain variable domain of TCR clone 347603 (TRBV28, TRBJ2-5)
CASSRQGGLAGAETQYF

SEQ ID NO: 695207 - protein, 13 aa, Homo sapiens
  CDR3 for alpha chain variable domain of TCR clone 347604 (TRAV20, TRAJ37)
SAGCSSNTGKLIF

SEQ ID NO: 695208 - protein, 11 aa, Homo sapiens
  CDR3 for beta chain variable domain of TCR clone 347604 (TRBV12-4, TRBJ2-3)
CASTATDTQYF

SEQ ID NO: 695209 - protein, 14 aa, Homo sapiens
  CDR3 for alpha chain variable domain of TCR clone 347605 (TRAV12-2, TRAJ40)
CAVKIPSGTYKYIF

SEQ ID NO: 695210 - protein, 16 aa, Homo sapiens
  CDR3 for beta chain variable domain of TCR clone 347605 (TRBV20-1, TRBJ1-4)
CSAPGRGLLTNEKLFF

SEQ ID NO: 695211 - protein, 12 aa, Homo sapiens
  CDR3 for alpha chain variable domain of TCR clone 347606 (TRAV29/DV5, TRAJ43)
CVAPYNNNDMRF

SEQ ID NO: 695212 - protein, 17 aa, Homo sapiens
  CDR3 for beta chain variable domain of TCR clone 347606 (TRBV19, TRBJ2-6)
CASSTGQVFSGANVLTF

SEQ ID NO: 695213 - protein, 16 aa, Homo sapiens
  CDR3 for alpha chain variable domain of TCR clone 347607 (TRAV4, TRAJ5)
CLVGPDHGHGQESTYF

SEQ ID NO: 695214 - protein, 14 aa, Homo sapiens
  CDR3 for beta chain variable domain of TCR clone 347607 (TRBV7-8, TRBJ2-3)
CASSLEAGTDTQYF

SEQ ID NO: 695215 - protein, 14 aa, Homo sapiens
  CDR3 for alpha chain variable domain of TCR clone 347608 (TRAV13-1, TRAJ35)
CAASKRGFGNVLHF

SEQ ID NO: 695216 - protein, 13 aa, Homo sapiens
  CDR3 for beta chain variable domain of TCR clone 347608 (TRBV7-3, TRBJ1-1)
CASSQDWGAEAFF

SEQ ID NO: 695217 - protein, 15 aa, Homo sapiens
  CDR3 for alpha chain variable domain of TCR clone 347609 (TRAV23/DV6, TRAJ30)
CAASSQESRDDKIIF

SEQ ID NO: 695218 - protein, 14 aa, Homo sapiens
  CDR3 for beta chain variable domain of TCR clone 347609 (TRBV19, TRBJ2-1)
CASPTFVLSGEQYF

SEQ ID NO: 695219 - protein, 11 aa, Homo sapiens
  CDR3 for alpha chain variable domain of TCR clone 347610 (TRAV35, TRAJ30)
CAGPGDDKIIF

SEQ ID NO: 695220 - protein, 14 aa, Homo sapiens
  CDR3 for beta chain variable domain of TCR clone 347610 (TRBV19, TRBJ2-7)
CASSMGQGAIEQYF

SEQ ID NO: 695221 - protein, 16 aa, Homo sapiens
  CDR3 for alpha chain variable domain of TCR clone 347611 (TRAV26-1, TRAJ33)
CIVPFWGEDSNYQLIW

SEQ ID NO: 695222 - protein, 13 aa, Homo sapiens
  CDR3 for beta chain variable domain of TCR clone 347611 (TRBV20-1, TRBJ1-6)
CSAPLGVGSPVHF

SEQ ID NO: 695223 - protein, 14 aa, Homo sapiens
  CDR3 for alpha chain variable domain of TCR clone 347612 (TRAV21, TRAJ57)
CAVSRGGGSEKLVF

SEQ ID NO: 695224 - protein, 14 aa, Homo sapiens
  CDR3 for beta chain variable domain of TCR clone 347612 (TRBV12-5, TRBJ2-5)
CASGSRTHQETQYF

SEQ ID NO: 695225 - protein, 13 aa, Homo sapiens
  CDR3 for alpha chain variable domain of TCR clone 347613 (TRAV6, TRAJ45)
SPFSGGGADGLTF

SEQ ID NO: 695226 - protein, 13 aa, Homo sapiens
  CDR3 for beta chain variable domain of TCR clone 347613 (TRBV7-9, TRBJ1-2)
CASSLKQNYGYAF

SEQ ID NO: 695227 - protein, 12 aa, Homo sapiens
  CDR3 for alpha chain variable domain of TCR clone 347614 (TRAV12-3, TRAJ17)
CAMTLTGNKLTF

SEQ ID NO: 695228 - protein, 13 aa, Homo sapiens
  CDR3 for beta chain variable domain of TCR clone 347614 (TRBV7-9, TRBJ1-2)
CASSLQQNYGYTF

SEQ ID NO: 695229 - protein, 13 aa, Homo sapiens
  CDR3 for alpha chain variable domain of TCR clone 347615 (TRAV29/DV5, TRAJ29)
CAASAAGNTPLVF

SEQ ID NO: 695230 - protein, 16 aa, Homo sapiens
  CDR3 for beta chain variable domain of TCR clone 347615 (TRBV7-3, TRBJ2-2)
CASSLKRGTLSGELFF

SEQ ID NO: 695231 - protein, 15 aa, Homo sapiens
  CDR3 for alpha chain variable domain of TCR clone 347616 (TRAV26-1, TRAJ22)
CIVRVSFWFCKATYL

SEQ ID NO: 695232 - protein, 14 aa, Homo sapiens
  CDR3 for beta chain variable domain of TCR clone 347616 (TRBV4-1, TRBJ2-2)
CASSQAVNTGELFF

SEQ ID NO: 695233 - protein, 12 aa, Homo sapiens
  CDR3 for alpha chain variable domain of TCR clone 347617 (TRAV12-3, TRAJ17)
CAMTLTGNKLTF

SEQ ID NO: 695234 - protein, 20 aa, Homo sapiens
  CDR3 for beta chain variable domain of TCR clone 347617 (TRBV7-9, TRBJ1-6)
CASSSPGRGNSLWEWDQAHC

SEQ ID NO: 695235 - protein, 16 aa, Homo sapiens
  CDR3 for alpha chain variable domain of TCR clone 347618 (TRAV3, TRAJ10)
CAVRDIRAGGGNKLTF

SEQ ID NO: 695236 - protein, 15 aa, Homo sapiens
  CDR3 for beta chain variable domain of TCR clone 347618 (TRBV6-6, TRBJ2-7)
CASSYSYGGSYEQYF

SEQ ID NO: 695237 - protein, 15 aa, Homo sapiens
  CDR3 for alpha chain variable domain of TCR clone 347619 (TRAV25, TRAJ53)
CPTSNSGGSNYKLPF

SEQ ID NO: 695238 - protein, 14 aa, Homo sapiens
  CDR3 for beta chain variable domain of TCR clone 347619 (TRBV11-2, TRBJ2-3)
CASSRLARTDTKYF

SEQ ID NO: 695239 - protein, 18 aa, Homo sapiens
  CDR3 for alpha chain variable domain of TCR clone 347620 (TRAV21, TRAJ52)
CAVRLSPAGGTSYGKLTF

SEQ ID NO: 695240 - protein, 17 aa, Homo sapiens
  CDR3 for beta chain variable domain of TCR clone 347620 (TRBV13, TRBJ2-3)
CASSLSRVAGGRNTQHF

SEQ ID NO: 695241 - protein, 18 aa, Homo sapiens
  CDR3 for alpha chain variable domain of TCR clone 347621 (TRAV21, TRAJ52)
CAVRPSPAGGTSYGKLTF

SEQ ID NO: 695242 - protein, 14 aa, Homo sapiens
  CDR3 for beta chain variable domain of TCR clone 347621 (TRBV6-1, TRBJ2-7)
CASTRTGDYYEQYF

SEQ ID NO: 695243 - protein, 12 aa, Homo sapiens
  CDR3 for alpha chain variable domain of TCR clone 347622 (TRAV21, TRAJ33)
CAKMDSNYQLIW

SEQ ID NO: 695244 - protein, 11 aa, Homo sapiens
  CDR3 for beta chain variable domain of TCR clone 347622 (TRBV19, TRBJ1-1)
CASSIGSEAFF

SEQ ID NO: 695245 - protein, 12 aa, Homo sapiens
  CDR3 for alpha chain variable domain of TCR clone 347623 (TRAV12-3, TRAJ41)
CAMSYSGYALNF

SEQ ID NO: 695246 - protein, 13 aa, Homo sapiens
  CDR3 for beta chain variable domain of TCR clone 347623 (TRBV7-3, TRBJ2-1)
CAISLDGYNEQFF

SEQ ID NO: 695247 - protein, 14 aa, Homo sapiens
  CDR3 for alpha chain variable domain of TCR clone 347624 (TRAV1-2, TRAJ8)
CAVREDTGLQKLVF

SEQ ID NO: 695248 - protein, 13 aa, Homo sapiens
  CDR3 for beta chain variable domain of TCR clone 347624 (TRBV12-5, TRBJ2-3)
CASGDRQSDTQYF

SEQ ID NO: 695249 - protein, 23 aa, Homo sapiens
  CDR3 for alpha chain variable domain of TCR clone 347625 (TRAV26-1, TRAJ38)
CIADNAGNNHIQNPDPAGYQLRD

SEQ ID NO: 695250 - protein, 14 aa, Homo sapiens
  CDR3 for beta chain variable domain of TCR clone 347625 (TRBV6-1, TRBJ1-3)
CASVQGGGGNTIYF

SEQ ID NO: 695251 - protein, 12 aa, Homo sapiens
  CDR3 for alpha chain variable domain of TCR clone 347626 (TRAV8-3, TRAJ20)
CAVGGGDYKLSF

SEQ ID NO: 695252 - protein, 15 aa, Homo sapiens
  CDR3 for beta chain variable domain of TCR clone 347626 (TRBV24-1, TRBJ1-3)
CATSDHGESGNTIYF

SEQ ID NO: 695253 - protein, 17 aa, Homo sapiens
  CDR3 for alpha chain variable domain of TCR clone 347627 (TRAV27, TRAJ42)
CAERVIYYGGSQGNLIF

SEQ ID NO: 695254 - protein, 14 aa, Homo sapiens
  CDR3 for beta chain variable domain of TCR clone 347627 (TRBV6-6, TRBJ2-3)
CASRLQREEDTQYF

SEQ ID NO: 695255 - protein, 11 aa, Homo sapiens
  CDR3 for alpha chain variable domain of TCR clone 347628 (TRAV21, TRAJ39)
LLVNAGNMLTF

SEQ ID NO: 695256 - protein, 18 aa, Homo sapiens
  CDR3 for beta chain variable domain of TCR clone 347628 (TRBV7-2, TRBJ2-7)
CASSLSGRGLAGGYEQYF

SEQ ID NO: 695257 - protein, 18 aa, Homo sapiens
  CDR3 for alpha chain variable domain of TCR clone 347629 (TRAV17, TRAJ45)
CATSLDLYSGGGADGLTF

SEQ ID NO: 695258 - protein, 15 aa, Homo sapiens
  CDR3 for beta chain variable domain of TCR clone 347629 (TRBV4-2, TRBJ1-1)
CASSQEDLPRTEAFF

SEQ ID NO: 695259 - protein, 14 aa, Homo sapiens
  CDR3 for alpha chain variable domain of TCR clone 347630 (TRAV12-2, TRAJ17)
CAVLFKAAGNKLTF

SEQ ID NO: 695260 - protein, 15 aa, Homo sapiens
  CDR3 for beta chain variable domain of TCR clone 347630 (TRBV6-1, TRBJ2-5)
CASSEGWGIQETQYF

SEQ ID NO: 695261 - protein, 11 aa, Homo sapiens
  CDR3 for alpha chain variable domain of TCR clone 347631 (TRAV12-3, TRAJ43)
CAMSVSNDMRF

SEQ ID NO: 695262 - protein, 15 aa, Homo sapiens
  CDR3 for beta chain variable domain of TCR clone 347631 (TRBV10-2, TRBJ2-6)
CASSEQGTGANVLTF

SEQ ID NO: 695263 - protein, 13 aa, Homo sapiens
  CDR3 for alpha chain variable domain of TCR clone 347632 (TRAV39, TRAJ49)
CALDRNTGNQFYF

SEQ ID NO: 695264 - protein, 14 aa, Homo sapiens
  CDR3 for beta chain variable domain of TCR clone 347632 (TRBV4-1, TRBJ1-1)
CASSRSGQSFEAFF

SEQ ID NO: 695265 - protein, 14 aa, Homo sapiens
  CDR3 for alpha chain variable domain of TCR clone 347633 (TRAV12-2, TRAJ40)
FAVKIPSGTYKYIF

SEQ ID NO: 695266 - protein, 12 aa, Homo sapiens
  CDR3 for beta chain variable domain of TCR clone 347633 (TRBV12-4, TRBJ2-7)
CASSLGGYEQYF

SEQ ID NO: 695267 - protein, 15 aa, Homo sapiens
  CDR3 for alpha chain variable domain of TCR clone 347634 (TRAV12-3, TRAJ6)
CAMSATTGGSYIPTF

SEQ ID NO: 695268 - protein, 13 aa, Homo sapiens
  CDR3 for beta chain variable domain of TCR clone 347634 (TRBV7-2, TRBJ2-7)
CASSAGLSYEQYL

SEQ ID NO: 695269 - protein, 13 aa, Homo sapiens
  CDR3 for alpha chain variable domain of TCR clone 347635 (TRAV21, TRAJ15)
CAVANQARTALIF

SEQ ID NO: 695270 - protein, 14 aa, Homo sapiens
  CDR3 for beta chain variable domain of TCR clone 347635 (TRBV27, TRBJ2-2)
CASSLGAATGELFF

SEQ ID NO: 695271 - protein, 12 aa, Homo sapiens
  CDR3 for alpha chain variable domain of TCR clone 347636 (TRAV17, TRAJ20)
CSTDSNDYKLSF

SEQ ID NO: 695272 - protein, 16 aa, Homo sapiens
  CDR3 for beta chain variable domain of TCR clone 347636 (TRBV7-2, TRBJ1-2)
CASSSNQDRRGHGYTF

SEQ ID NO: 695273 - protein, 15 aa, Homo sapiens
  CDR3 for alpha chain variable domain of TCR clone 347637 (TRAV8-4, TRAJ45)
RELGGPGGGADGLTF

SEQ ID NO: 695274 - protein, 16 aa, Homo sapiens
  CDR3 for beta chain variable domain of TCR clone 347637 (TRBV4-2, TRBJ2-3)
CASSQELAGDTDTQYF

SEQ ID NO: 695275 - protein, 13 aa, Homo sapiens
  CDR3 for alpha chain variable domain of TCR clone 347638 (TRAV1-2, TRAJ12)
CAVSMDSSYKLIF

SEQ ID NO: 695276 - protein, 14 aa, Homo sapiens
  CDR3 for beta chain variable domain of TCR clone 347638 (TRBV19, TRBJ2-1)
CASSSGRDYNEQLF

SEQ ID NO: 695277 - protein, 13 aa, Homo sapiens
  CDR3 for alpha chain variable domain of TCR clone 347639 (TRAV3, TRAJ21)
CAVREPDFNNFYF

SEQ ID NO: 695278 - protein, 14 aa, Homo sapiens
  CDR3 for beta chain variable domain of TCR clone 347639 (TRBV4-2, TRBJ2-1)
CASGLDRAYNEQFF

SEQ ID NO: 695279 - protein, 12 aa, Homo sapiens
  CDR3 for alpha chain variable domain of TCR clone 347640 (TRAV21, TRAJ3)
CCFYSSASKIIF

SEQ ID NO: 695280 - protein, 17 aa, Homo sapiens
  CDR3 for beta chain variable domain of TCR clone 347640 (TRBV3-1, TRBJ2-5)
CASSNWGGTSGQETQYF

SEQ ID NO: 695281 - protein, 14 aa, Homo sapiens
  CDR3 for alpha chain variable domain of TCR clone 347641 (TRAV8-2, TRAJ11)
CVVSEKSGYCTLTF

SEQ ID NO: 695282 - protein, 16 aa, Homo sapiens
  CDR3 for beta chain variable domain of TCR clone 347641 (TRBV28, TRBJ2-1)
CASSSPEYPRDNEQFF

SEQ ID NO: 695283 - protein, 13 aa, Homo sapiens
  CDR3 for alpha chain variable domain of TCR clone 347642 (TRAV13-2, TRAJ22)
CLGWISSARHLTF

SEQ ID NO: 695284 - protein, 15 aa, Homo sapiens
  CDR3 for beta chain variable domain of TCR clone 347642 (TRBV7-2, TRBJ2-3)
CASSSTGLETDTQYF

SEQ ID NO: 695285 - protein, 14 aa, Homo sapiens
  CDR3 for alpha chain variable domain of TCR clone 347643 (TRAV12-2, TRAJ13)
CAVKKTGGYQKVTF

SEQ ID NO: 695286 - protein, 22 aa, Homo sapiens
  CDR3 for beta chain variable domain of TCR clone 347643 (TRBV6-1, TRBJ1-3)
CASVQGGGWKHHIFWRGKLAHC

SEQ ID NO: 695287 - protein, 13 aa, Homo sapiens
  CDR3 for alpha chain variable domain of TCR clone 347644 (TRAV8-3, TRAJ44)
CAVLPGTASKLTF

SEQ ID NO: 695288 - protein, 12 aa, Homo sapiens
  CDR3 for beta chain variable domain of TCR clone 347644 (TRBV7-8, TRBJ2-7)
CASSLGDREQYF

SEQ ID NO: 695289 - protein, 18 aa, Homo sapiens
  CDR3 for alpha chain variable domain of TCR clone 347645 (TRAV21, TRAJ52)
CAVRPSPAGGTSYGKLTF

SEQ ID NO: 695290 - protein, 14 aa, Homo sapiens
  CDR3 for beta chain variable domain of TCR clone 347645 (TRBV7-8, TRBJ2-7)
CASSVGQGAYEQYF

SEQ ID NO: 695291 - protein, 15 aa, Homo sapiens
  CDR3 for alpha chain variable domain of TCR clone 347646 (TRAV29/DV5, TRAJ53)
CAASASGGSNYKLTF

SEQ ID NO: 695292 - protein, 19 aa, Homo sapiens
  CDR3 for beta chain variable domain of TCR clone 347646 (TRBV5-1, TRBJ2-3)
CASSLWLAGGIATTDQQYF

SEQ ID NO: 695293 - protein, 11 aa, Homo sapiens
  CDR3 for alpha chain variable domain of TCR clone 347647 (TRAV21, TRAJ9)
CAVPGGFKTIF

SEQ ID NO: 695294 - protein, 15 aa, Homo sapiens
  CDR3 for beta chain variable domain of TCR clone 347647 (TRBV7-9, TRBJ2-5)
CSSVPLQGAQETQYF

SEQ ID NO: 695295 - protein, 13 aa, Homo sapiens
  CDR3 for alpha chain variable domain of TCR clone 347648 (TRAV3, TRAJ20)
CAVRSLNDYKLSF

SEQ ID NO: 695296 - protein, 15 aa, Homo sapiens
  CDR3 for beta chain variable domain of TCR clone 347648 (TRBV7-2, TRBJ2-3)
CASSLASARTDTQYF

SEQ ID NO: 695297 - protein, 17 aa, Homo sapiens
  CDR3 for alpha chain variable domain of TCR clone 347649 (TRAV26-2, TRAJ42)
CILRDVGSGGSQGNLIF

SEQ ID NO: 695298 - protein, 16 aa, Homo sapiens
  CDR3 for beta chain variable domain of TCR clone 347649 (TRBV6-3, TRBJ2-2)
CASSFSGTDNTGELFF

SEQ ID NO: 695299 - protein, 17 aa, Homo sapiens
  CDR3 for alpha chain variable domain of TCR clone 347650 (TRAV3, TRAJ38)
CAVRDCLNAGNNRKLIW

SEQ ID NO: 695300 - protein, 16 aa, Homo sapiens
  CDR3 for beta chain variable domain of TCR clone 347650 (TRBV13, TRBJ2-2)
CASSPRTGEHTGELFF

SEQ ID NO: 695301 - protein, 12 aa, Homo sapiens
  CDR3 for alpha chain variable domain of TCR clone 347651 (TRAV8-4, TRAJ43)
CAVSVNNNDMRL

SEQ ID NO: 695302 - protein, 16 aa, Homo sapiens
  CDR3 for beta chain variable domain of TCR clone 347651 (TRBV7-2, TRBJ2-6)
CPSSLAGRSGANVLTF

SEQ ID NO: 695303 - protein, 23 aa, Homo sapiens
  CDR3 for alpha chain variable domain of TCR clone 347652 (TRAV1-1, TRAJ4)
LLQELQMKDSASYFCALYNKLIF

SEQ ID NO: 695304 - protein, 16 aa, Homo sapiens
  CDR3 for beta chain variable domain of TCR clone 347652 (TRBV7-2, TRBJ2-1)
CASSLVAGAGYNEQFF

SEQ ID NO: 695305 - protein, 12 aa, Homo sapiens
  CDR3 for alpha chain variable domain of TCR clone 347653 (TRAV3, TRAJ43)
CAVRDPNNDMRF

SEQ ID NO: 695306 - protein, 15 aa, Homo sapiens
  CDR3 for beta chain variable domain of TCR clone 347653 (TRBV6-5, TRBJ2-1)
CASSYDAGAVNEQFF

SEQ ID NO: 695307 - protein, 14 aa, Homo sapiens
  CDR3 for alpha chain variable domain of TCR clone 347654 (TRAV13-2, TRAJ22)
CADGTLGSARQLTF

SEQ ID NO: 695308 - protein, 15 aa, Homo sapiens
  CDR3 for beta chain variable domain of TCR clone 347654 (TRBV20-1, TRBJ2-7)
CSARVPAAYFYEQYF

SEQ ID NO: 695309 - protein, 17 aa, Homo sapiens
  CDR3 for alpha chain variable domain of TCR clone 347655 (TRAV13-1, TRAJ31)
CAPRDRLMFGDGTQLVV

SEQ ID NO: 695310 - protein, 14 aa, Homo sapiens
  CDR3 for beta chain variable domain of TCR clone 347655 (TRBV18, TRBJ2-7)
CASSPRGGAYEQYF

SEQ ID NO: 695311 - protein, 15 aa, Homo sapiens
  CDR3 for alpha chain variable domain of TCR clone 347656 (TRAV26-1, TRAJ29)
CIVRVEGSGNTPLVF

SEQ ID NO: 695312 - protein, 16 aa, Homo sapiens
  CDR3 for beta chain variable domain of TCR clone 347656 (TRBV12-4, TRBJ1-5)
CASSRPVGGSNQTQHF

SEQ ID NO: 695313 - protein, 13 aa, Homo sapiens
  CDR3 for alpha chain variable domain of TCR clone 347657 (TRAV13-1, TRAJ12)
CSKYMGSRYKLIF

SEQ ID NO: 695314 - protein, 14 aa, Homo sapiens
  CDR3 for beta chain variable domain of TCR clone 347657 (TRBV4-2, TRBJ2-1)
CASGLDRAYNEQFF

SEQ ID NO: 695315 - protein, 12 aa, Homo sapiens
  CDR3 for alpha chain variable domain of TCR clone 347658 (TRAV13-1, TRAJ49)
CAASIRSNQFYF

SEQ ID NO: 695316 - protein, 14 aa, Homo sapiens
  CDR3 for beta chain variable domain of TCR clone 347658 (TRBV7-2, TRBJ2-1)
CASSPGRAGNEQFF

SEQ ID NO: 695317 - protein, 14 aa, Homo sapiens
  CDR3 for alpha chain variable domain of TCR clone 347659 (TRAV13-1, TRAJ44)
CEAKATGTASKLTF

SEQ ID NO: 695318 - protein, 15 aa, Homo sapiens
  CDR3 for beta chain variable domain of TCR clone 347659 (TRBV10-3, TRBJ2-1)
CAISDVQDRAYEQFF

SEQ ID NO: 695319 - protein, 10 aa, Homo sapiens
  CDR3 for alpha chain variable domain of TCR clone 347660 (TRAV8-3, TRAJ33)
CAVGPIATIS

SEQ ID NO: 695320 - protein, 13 aa, Homo sapiens
  CDR3 for beta chain variable domain of TCR clone 347660 (TRBV27, TRBJ2-7)
CASSLTTGYEQYF

SEQ ID NO: 695321 - protein, 16 aa, Homo sapiens
  CDR3 for alpha chain variable domain of TCR clone 347661 (TRAV30, TRAJ24)
CGTEIVDADSWGKLQV

SEQ ID NO: 695322 - protein, 14 aa, Homo sapiens
  CDR3 for beta chain variable domain of TCR clone 347661 (TRBV12-5, TRBJ2-5)
CASGSRTHQETQYV

SEQ ID NO: 695323 - protein, 15 aa, Homo sapiens
  CDR3 for alpha chain variable domain of TCR clone 347662 (TRAV17, TRAJ57)
CATGPSQGGSEKLVF

SEQ ID NO: 695324 - protein, 15 aa, Homo sapiens
  CDR3 for beta chain variable domain of TCR clone 347662 (TRBV7-9, TRBJ1-6)
CASSSPGSGNSPLHF

SEQ ID NO: 695325 - protein, 15 aa, Homo sapiens
  CDR3 for alpha chain variable domain of TCR clone 347663 (TRAV4, TRAJ36)
CLVGDIQTGANNLFF

SEQ ID NO: 695326 - protein, 15 aa, Homo sapiens
  CDR3 for beta chain variable domain of TCR clone 347663 (TRBV7-6, TRBJ2-1)
CASSSLAGEGNEQFF

SEQ ID NO: 695327 - protein, 17 aa, Homo sapiens
  CDR3 for alpha chain variable domain of TCR clone 347664 (TRAV38-1, TRAJ45)
CAFMKHYMGGGADGLTF

SEQ ID NO: 695328 - protein, 14 aa, Homo sapiens
  CDR3 for beta chain variable domain of TCR clone 347664 (TRBV7-2, TRBJ1-1)
CASSFLTGTTEAFF

SEQ ID NO: 695329 - protein, 13 aa, Homo sapiens
  CDR3 for alpha chain variable domain of TCR clone 347665 (TRAV8-6, TRAJ8)
CAVSNTGFQKLVF

SEQ ID NO: 695330 - protein, 15 aa, Homo sapiens
  CDR3 for beta chain variable domain of TCR clone 347665 (TRBV28, TRBJ2-5)
CASSSGRTIQEAQYF

SEQ ID NO: 695331 - protein, 16 aa, Homo sapiens
  CDR3 for alpha chain variable domain of TCR clone 347666 (TRAV26-1, TRAJ23)
CIVRVERYNQGGKLIF

SEQ ID NO: 695332 - protein, 16 aa, Homo sapiens
  CDR3 for beta chain variable domain of TCR clone 347666 (TRBV9, TRBJ1-2)
CASSVDKGGGNYGYAF

SEQ ID NO: 695333 - protein, 13 aa, Homo sapiens
  CDR3 for alpha chain variable domain of TCR clone 347667 (TRAV8-3, TRAJ15)
CAVGIQAGTALIF

SEQ ID NO: 695334 - protein, 17 aa, Homo sapiens
  CDR3 for beta chain variable domain of TCR clone 347667 (TRBV20-1, TRBJ2-1)
CSASDPLAGVSYNEQFF

SEQ ID NO: 695335 - protein, 15 aa, Homo sapiens
  CDR3 for alpha chain variable domain of TCR clone 347668 (TRAV17, TRAJ22)
CATVAPSGSAMQLTF

SEQ ID NO: 695336 - protein, 16 aa, Homo sapiens
  CDR3 for beta chain variable domain of TCR clone 347668 (TRBV10-3, TRBJ2-7)
CAISADFADRPYEQYF

SEQ ID NO: 695337 - protein, 14 aa, Homo sapiens
  CDR3 for alpha chain variable domain of TCR clone 347669 (TRAV2, TRAJ15)
CAGGSQPGRNCSDL

SEQ ID NO: 695338 - protein, 13 aa, Homo sapiens
  CDR3 for beta chain variable domain of TCR clone 347669 (TRBV10-2, TRBJ2-1)
CASGASGDAKQFF

SEQ ID NO: 695339 - protein, 16 aa, Homo sapiens
  CDR3 for alpha chain variable domain of TCR clone 347670 (TRAV26-1, TRAJ40)
CIVRGYPTSGTYKYIF

SEQ ID NO: 695340 - protein, 14 aa, Homo sapiens
  CDR3 for beta chain variable domain of TCR clone 347670 (TRBV5-1, TRBJ1-4)
CASSSGQGGETLLF

SEQ ID NO: 695341 - protein, 12 aa, Homo sapiens
  CDR3 for alpha chain variable domain of TCR clone 347671 (TRAV4, TRAJ26)
CLVGDYGQNFVF

SEQ ID NO: 695342 - protein, 23 aa, Homo sapiens
  CDR3 for beta chain variable domain of TCR clone 347671 (TRBV7-2, TRBJ1-2)
RRTRPCISVPAANQDRRGHGYTF

SEQ ID NO: 695343 - protein, 10 aa, Homo sapiens
  CDR3 for alpha chain variable domain of TCR clone 347672 (TRAV12-2, TRAJ43)
CAVKVLSMRF

SEQ ID NO: 695344 - protein, 16 aa, Homo sapiens
  CDR3 for beta chain variable domain of TCR clone 347672 (TRBV7-2, TRBJ1-2)
CASSSNQDRRGHGYTF

SEQ ID NO: 695345 - protein, 13 aa, Homo sapiens
  CDR3 for alpha chain variable domain of TCR clone 347673 (TRAV20, TRAJ3)
CASRYSSASKIIF

SEQ ID NO: 695346 - protein, 16 aa, Homo sapiens
  CDR3 for beta chain variable domain of TCR clone 347673 (TRBV6-1, TRBJ1-6)
CASSSDGSPRNSPLHL

SEQ ID NO: 695347 - protein, 14 aa, Homo sapiens
  CDR3 for alpha chain variable domain of TCR clone 347674 (TRAV26-1, TRAJ40)
CIVRLLSGTYKYIF

SEQ ID NO: 695348 - protein, 14 aa, Homo sapiens
  CDR3 for beta chain variable domain of TCR clone 347674 (TRBV4-1, TRBJ1-2)
CASSQDGQVRGYTF

SEQ ID NO: 695349 - protein, 10 aa, Homo sapiens
  CDR3 for alpha chain variable domain of TCR clone 347675 (TRAV36/DV7, TRAJ48)
CAVGNEELTF

SEQ ID NO: 695350 - protein, 16 aa, Homo sapiens
  CDR3 for beta chain variable domain of TCR clone 347675 (TRBV3-1, TRBJ2-7)
CASSQGATGVAYEQYF

SEQ ID NO: 695351 - protein, 14 aa, Homo sapiens
  CDR3 for alpha chain variable domain of TCR clone 347676 (TRAV16, TRAJ39)
CALSKNNAGNMLTF

SEQ ID NO: 695352 - protein, 14 aa, Homo sapiens
  CDR3 for beta chain variable domain of TCR clone 347676 (TRBV19, TRBJ2-3)
CASSIDLGGDTQYF

SEQ ID NO: 695353 - protein, 15 aa, Homo sapiens
  CDR3 for alpha chain variable domain of TCR clone 347677 (TRAV27, TRAJ33)
GAGADIMDSNYQLIW

SEQ ID NO: 695354 - protein, 13 aa, Homo sapiens
  CDR3 for beta chain variable domain of TCR clone 347677 (TRBV28, TRBJ1-2)
CASSLQGRGGYTF

SEQ ID NO: 695355 - protein, 18 aa, Homo sapiens
  CDR3 for alpha chain variable domain of TCR clone 347678 (TRAV26-1, TRAJ5)
CIVRVVPPRDTGSRALTF

SEQ ID NO: 695356 - protein, 15 aa, Homo sapiens
  CDR3 for beta chain variable domain of TCR clone 347678 (TRBV7-9, TRBJ2-7)
CASSLPMGQANEQYF

SEQ ID NO: 695357 - protein, 12 aa, Homo sapiens
  CDR3 for alpha chain variable domain of TCR clone 347679 (TRAV9-2, TRAJ36)
CALKKGANKLFF

SEQ ID NO: 695358 - protein, 13 aa, Homo sapiens
  CDR3 for beta chain variable domain of TCR clone 347679 (TRBV27, TRBJ1-1)
CASSLSIGAEAFF

SEQ ID NO: 695359 - protein, 15 aa, Homo sapiens
  CDR3 for alpha chain variable domain of TCR clone 347680 (TRAV3, TRAJ3)
CAVRDRDSSASKIIF

SEQ ID NO: 695360 - protein, 18 aa, Homo sapiens
  CDR3 for beta chain variable domain of TCR clone 347680 (TRBV25-1, TRBJ1-2)
WASSGLQNGQGLIFGDSF

SEQ ID NO: 695361 - protein, 15 aa, Homo sapiens
  CDR3 for alpha chain variable domain of TCR clone 347681 (TRAV20, TRAJ39)
CAVQALLVAGNMLTF

SEQ ID NO: 695362 - protein, 13 aa, Homo sapiens
  CDR3 for beta chain variable domain of TCR clone 347681 (TRBV27, TRBJ1-4)
CASSLMGDEKLFF

SEQ ID NO: 695363 - protein, 14 aa, Homo sapiens
  CDR3 for alpha chain variable domain of TCR clone 347682 (TRAV17, TRAJ6)
CATPAIGGSYIPTF

SEQ ID NO: 695364 - protein, 13 aa, Homo sapiens
  CDR3 for beta chain variable domain of TCR clone 347682 (TRBV6-3, TRBJ1-1)
CASSYGRGSGAFF

SEQ ID NO: 695365 - protein, 13 aa, Homo sapiens
  CDR3 for alpha chain variable domain of TCR clone 347683 (TRAV27, TRAJ56)
CAGKHGANSKLTF

SEQ ID NO: 695366 - protein, 18 aa, Homo sapiens
  CDR3 for beta chain variable domain of TCR clone 347683 (TRBV11-2, TRBJ2-3)
CASSLGGASRGAPNTQYF

SEQ ID NO: 695367 - protein, 15 aa, Homo sapiens
  CDR3 for alpha chain variable domain of TCR clone 347684 (TRAV8-3, TRAJ40)
CAAPSLTSGTSKYIF

SEQ ID NO: 695368 - protein, 16 aa, Homo sapiens
  CDR3 for beta chain variable domain of TCR clone 347684 (TRBV7-3, TRBJ2-3)
CASSLSGYRPEDTQYF

SEQ ID NO: 695369 - protein, 13 aa, Homo sapiens
  CDR3 for alpha chain variable domain of TCR clone 347685 (TRAV2, TRAJ40)
CAVVTSGTYKYIF

SEQ ID NO: 695370 - protein, 13 aa, Homo sapiens
  CDR3 for beta chain variable domain of TCR clone 347685 (TRBV20-1, TRBJ2-5)
CSARGDYQETQYF

SEQ ID NO: 695371 - protein, 11 aa, Homo sapiens
  CDR3 for alpha chain variable domain of TCR clone 347686 (TRAV1-2, TRAJ20)
CAVSNDYKLSF

SEQ ID NO: 695372 - protein, 14 aa, Homo sapiens
  CDR3 for beta chain variable domain of TCR clone 347686 (TRBV5-8, TRBJ2-3)
CASSLGQGTDTQYF

SEQ ID NO: 695373 - protein, 17 aa, Homo sapiens
  CDR3 for alpha chain variable domain of TCR clone 347687 (TRAV12-2, TRAJ4)
CAVNVRPVSGGSNKLIF

SEQ ID NO: 695374 - protein, 18 aa, Homo sapiens
  CDR3 for beta chain variable domain of TCR clone 347687 (TRBV7-9, TRBJ2-7)
CASSLTTSGSRTWYEQYF

SEQ ID NO: 695375 - protein, 18 aa, Homo sapiens
  CDR3 for alpha chain variable domain of TCR clone 347688 (TRAV12-3, TRAJ52)
CAMSRTNAGGTSYGKLTF

SEQ ID NO: 695376 - protein, 17 aa, Homo sapiens
  CDR3 for beta chain variable domain of TCR clone 347688 (TRBV7-3, TRBJ2-3)
CASSLMKWMRGADARYF

SEQ ID NO: 695377 - protein, 12 aa, Homo sapiens
  CDR3 for alpha chain variable domain of TCR clone 347689 (TRAV16, TRAJ10)
CSRTGGGNKLTF

SEQ ID NO: 695378 - protein, 15 aa, Homo sapiens
  CDR3 for beta chain variable domain of TCR clone 347689 (TRBV6-3, TRBJ2-7)
GASSSPGTVFYEQYF

SEQ ID NO: 695379 - protein, 13 aa, Homo sapiens
  CDR3 for alpha chain variable domain of TCR clone 347690 (TRAV36/DV7, TRAJ21)
CAVEAYNFNKFYF

SEQ ID NO: 695380 - protein, 14 aa, Homo sapiens
  CDR3 for beta chain variable domain of TCR clone 347690 (TRBV6-1, TRBJ1-1)
CASSGTWLNTEAFF

SEQ ID NO: 695381 - protein, 13 aa, Homo sapiens
  CDR3 for alpha chain variable domain of TCR clone 347691 (TRAV12-1, TRAJ40)
CVVPTSGTYKYLF

SEQ ID NO: 695382 - protein, 18 aa, Homo sapiens
  CDR3 for beta chain variable domain of TCR clone 347691 (TRBV7-6, TRBJ2-1)
CASSPRTSGMSSYNEQFF

SEQ ID NO: 695383 - protein, 13 aa, Homo sapiens
  CDR3 for alpha chain variable domain of TCR clone 347692 (TRAV1-2, TRAJ9)
CAVLNTGGFKTIF

SEQ ID NO: 695384 - protein, 14 aa, Homo sapiens
  CDR3 for beta chain variable domain of TCR clone 347692 (TRBV20-1, TRBJ2-3)
CSARGETSTDTQYF

SEQ ID NO: 695385 - protein, 15 aa, Homo sapiens
  CDR3 for alpha chain variable domain of TCR clone 347693 (TRAV4, TRAJ28)
CLVEGSGAGSYQLTF

SEQ ID NO: 695386 - protein, 15 aa, Homo sapiens
  CDR3 for beta chain variable domain of TCR clone 347693 (TRBV9, TRBJ2-3)
CASSVRVLAVDTQYF

SEQ ID NO: 695387 - protein, 13 aa, Homo sapiens
  CDR3 for alpha chain variable domain of TCR clone 347694 (TRAV8-1, TRAJ28)
CAVSGAGSYQLTF

SEQ ID NO: 695388 - protein, 13 aa, Homo sapiens
  CDR3 for beta chain variable domain of TCR clone 347694 (TRBV24-1, TRBJ1-2)
CATSGTALDGYTF

SEQ ID NO: 695389 - protein, 11 aa, Homo sapiens
  CDR3 for alpha chain variable domain of TCR clone 347695 (TRAV2, TRAJ33)
CAVESNYQLIW

SEQ ID NO: 695390 - protein, 16 aa, Homo sapiens
  CDR3 for beta chain variable domain of TCR clone 347695 (TRBV2, TRBJ2-3)
CASSTSVEGVTDTQYF

SEQ ID NO: 695391 - protein, 14 aa, Homo sapiens
  CDR3 for alpha chain variable domain of TCR clone 347696 (TRAV12-2, TRAJ11)
FAVEGGSGYSTLTF

SEQ ID NO: 695392 - protein, 13 aa, Homo sapiens
  CDR3 for beta chain variable domain of TCR clone 347696 (TRBV27, TRBJ1-1)
CASSLSIGAEAFF

SEQ ID NO: 695393 - protein, 12 aa, Homo sapiens
  CDR3 for alpha chain variable domain of TCR clone 347697 (TRAV12-1, TRAJ40)
CVFYSGIYKYIF

SEQ ID NO: 695394 - protein, 18 aa, Homo sapiens
  CDR3 for beta chain variable domain of TCR clone 347697 (TRBV12-4, TRBJ2-2)
CASSLVAGTRGRTGELFF

SEQ ID NO: 695395 - protein, 14 aa, Homo sapiens
  CDR3 for alpha chain variable domain of TCR clone 347698 (TRAV26-1, TRAJ22)
CIVRVYGSARQLTF

SEQ ID NO: 695396 - protein, 14 aa, Homo sapiens
  CDR3 for beta chain variable domain of TCR clone 347698 (TRBV7-2, TRBJ2-7)
CASSLYPGRYEQYF

SEQ ID NO: 695397 - protein, 14 aa, Homo sapiens
  CDR3 for alpha chain variable domain of TCR clone 347699 (TRAV17, TRAJ40)
CATALTSGTYKYIF

SEQ ID NO: 695398 - protein, 15 aa, Homo sapiens
  CDR3 for beta chain variable domain of TCR clone 347699 (TRBV2, TRBJ2-7)
CASSEGLARSYEQYF

SEQ ID NO: 695399 - protein, 12 aa, Homo sapiens
  CDR3 for alpha chain variable domain of TCR clone 347700 (TRAV1-2, TRAJ33)
CAALDSNYQLIW

SEQ ID NO: 695400 - protein, 14 aa, Homo sapiens
  CDR3 for beta chain variable domain of TCR clone 347700 (TRBV4-1, TRBJ2-2)
CSSSQAVNTGELFF

SEQ ID NO: 695401 - protein, 13 aa, Homo sapiens
  CDR3 for alpha chain variable domain of TCR clone 347701 (TRAV30, TRAJ18)
CGTEASTLGRLCF

SEQ ID NO: 695402 - protein, 15 aa, Homo sapiens
  CDR3 for beta chain variable domain of TCR clone 347701 (TRBV7-3, TRBJ2-1)
CASSRIGTGSSEQFF

SEQ ID NO: 695403 - protein, 14 aa, Homo sapiens
  CDR3 for alpha chain variable domain of TCR clone 347702 (TRAV26-1, TRAJ38)
CIADNVGNNRKLIW

SEQ ID NO: 695404 - protein, 12 aa, Homo sapiens
  CDR3 for beta chain variable domain of TCR clone 347702 (TRBV11-2, TRBJ2-2)
CASSLPTGELFF

SEQ ID NO: 695405 - protein, 12 aa, Homo sapiens
  CDR3 for alpha chain variable domain of TCR clone 347703 (TRAV16, TRAJ26)
CALRMYGQNFVF

SEQ ID NO: 695406 - protein, 14 aa, Homo sapiens
  CDR3 for beta chain variable domain of TCR clone 347703 (TRBV7-6, TRBJ2-3)
CASSLGTVTDTQYF

SEQ ID NO: 695407 - protein, 13 aa, Homo sapiens
  CDR3 for alpha chain variable domain of TCR clone 347704 (TRAV3, TRAJ4)
CAVRDGGYNKLIF

SEQ ID NO: 695408 - protein, 15 aa, Homo sapiens
  CDR3 for beta chain variable domain of TCR clone 347704 (TRBV5-1, TRBJ2-1)
CASSPPRALYNEQFF

SEQ ID NO: 695409 - protein, 15 aa, Homo sapiens
  CDR3 for alpha chain variable domain of TCR clone 347705 (TRAV8-3, TRAJ45)
CASSYSGGCVDGLTF

SEQ ID NO: 695410 - protein, 13 aa, Homo sapiens
  CDR3 for beta chain variable domain of TCR clone 347705 (TRBV10-3, TRBJ2-7)
CASKLAVNYEQYF

SEQ ID NO: 695411 - protein, 13 aa, Homo sapiens
  CDR3 for alpha chain variable domain of TCR clone 347706 (TRAV12-1, TRAJ26)
CVVRRNYGQNFVF

SEQ ID NO: 695412 - protein, 15 aa, Homo sapiens
  CDR3 for beta chain variable domain of TCR clone 347706 (TRBV28, TRBJ2-1)
CAGSIIAGGRSEQFI

SEQ ID NO: 695413 - protein, 13 aa, Homo sapiens
  CDR3 for alpha chain variable domain of TCR clone 347707 (TRAV8-3, TRAJ40)
CAVDPSGTYKYIF

SEQ ID NO: 695414 - protein, 12 aa, Homo sapiens
  CDR3 for beta chain variable domain of TCR clone 347707 (TRBV7-6, TRBJ2-7)
CASSLADSEQYF

SEQ ID NO: 695415 - protein, 13 aa, Homo sapiens
  CDR3 for alpha chain variable domain of TCR clone 347708 (TRAV21, TRAJ27)
CAARPGNAGQSTF

SEQ ID NO: 695416 - protein, 18 aa, Homo sapiens
  CDR3 for beta chain variable domain of TCR clone 347708 (TRBV12-4, TRBJ2-2)
CASSLVAGTRGRTGELFF

SEQ ID NO: 695417 - protein, 16 aa, Homo sapiens
  CDR3 for alpha chain variable domain of TCR clone 347709 (TRAV13-1, TRAJ48)
CAASIFGSFGNEKLTF

SEQ ID NO: 695418 - protein, 14 aa, Homo sapiens
  CDR3 for beta chain variable domain of TCR clone 347709 (TRBV24-1, TRBJ1-1)
CATSIPRGDTEAFF

SEQ ID NO: 695419 - protein, 15 aa, Homo sapiens
  CDR3 for alpha chain variable domain of TCR clone 347710 (TRAV35, TRAJ20)
CAGQLGGSNDYKLSF

SEQ ID NO: 695420 - protein, 13 aa, Homo sapiens
  CDR3 for beta chain variable domain of TCR clone 347710 (TRBV19, TRBJ2-7)
CASSKTGTHEQYF

SEQ ID NO: 695421 - protein, 11 aa, Homo sapiens
  CDR3 for alpha chain variable domain of TCR clone 347711 (TRAV13-1, TRAJ24)
CAANGWGKLQF

SEQ ID NO: 695422 - protein, 15 aa, Homo sapiens
  CDR3 for beta chain variable domain of TCR clone 347711 (TRBV11-2, TRBJ2-2)
CASSLDTGNTGELFF

SEQ ID NO: 695423 - protein, 11 aa, Homo sapiens
  CDR3 for alpha chain variable domain of TCR clone 347712 (TRAV12-1, TRAJ31)
CVGRVQCQTHV

SEQ ID NO: 695424 - protein, 14 aa, Homo sapiens
  CDR3 for beta chain variable domain of TCR clone 347712 (TRBV11-2, TRBJ2-3)
CASSRLARTDTQYF

SEQ ID NO: 695425 - protein, 14 aa, Homo sapiens
  CDR3 for alpha chain variable domain of TCR clone 347713 (TRAV8-6, TRAJ57)
CAVILEGGSEKMVF

SEQ ID NO: 695426 - protein, 15 aa, Homo sapiens
  CDR3 for beta chain variable domain of TCR clone 347713 (TRBV20-1, TRBJ2-7)
CSARDRVSGMDEQYF

SEQ ID NO: 695427 - protein, 14 aa, Homo sapiens
  CDR3 for alpha chain variable domain of TCR clone 347714 (TRAV12-2, TRAJ17)
CAVLFKAAGNKLTF

SEQ ID NO: 695428 - protein, 12 aa, Homo sapiens
  CDR3 for beta chain variable domain of TCR clone 347714 (TRBV19, TRBJ1-1)
CASSIGTEEAFF

SEQ ID NO: 695429 - protein, 14 aa, Homo sapiens
  CDR3 for alpha chain variable domain of TCR clone 347715 (TRAV1-2, TRAJ16)
CAVNRFSDCQKLLF

SEQ ID NO: 695430 - protein, 17 aa, Homo sapiens
  CDR3 for beta chain variable domain of TCR clone 347715 (TRBV4-2, TRBJ2-1)
CASSQVSGLAMNNEQFF

SEQ ID NO: 695431 - protein, 15 aa, Homo sapiens
  CDR3 for alpha chain variable domain of TCR clone 347716 (TRAV38-1, TRAJ37)
CAFIHVSGNTGKLIF

SEQ ID NO: 695432 - protein, 18 aa, Homo sapiens
  CDR3 for beta chain variable domain of TCR clone 347716 (TRBV7-9, TRBJ1-1)
CASSKPWDTMGMNTEAFF

SEQ ID NO: 695433 - protein, 14 aa, Homo sapiens
  CDR3 for alpha chain variable domain of TCR clone 347717 (TRAV24, TRAJ42)
CAQNYGGIQGNLIF

SEQ ID NO: 695434 - protein, 15 aa, Homo sapiens
  CDR3 for beta chain variable domain of TCR clone 347717 (TRBV19, TRBJ1-5)
CASSIPGGAGQPQHF

SEQ ID NO: 695435 - protein, 13 aa, Homo sapiens
  CDR3 for alpha chain variable domain of TCR clone 347718 (TRAV12-1, TRAJ39)
CVALNNSGNMLTF

SEQ ID NO: 695436 - protein, 17 aa, Homo sapiens
  CDR3 for beta chain variable domain of TCR clone 347718 (TRBV6-1, TRBJ2-3)
CASSEFVTGGPTDTQYF

SEQ ID NO: 695437 - protein, 16 aa, Homo sapiens
  CDR3 for alpha chain variable domain of TCR clone 347719 (TRAV12-3, TRAJ53)
CAMSPGSGGSNYKLTF

SEQ ID NO: 695438 - protein, 14 aa, Homo sapiens
  CDR3 for beta chain variable domain of TCR clone 347719 (TRBV7-8, TRBJ1-2)
CASSPDSLSYGYTF

SEQ ID NO: 695439 - protein, 14 aa, Homo sapiens
  CDR3 for alpha chain variable domain of TCR clone 347720 (TRAV12-2, TRAJ40)
CAVEIPSGTYKYIF

SEQ ID NO: 695440 - protein, 14 aa, Homo sapiens
  CDR3 for beta chain variable domain of TCR clone 347720 (TRBV20-1, TRBJ1-1)
CSAQTRIGGTEAVF

SEQ ID NO: 695441 - protein, 14 aa, Homo sapiens
  CDR3 for alpha chain variable domain of TCR clone 347721 (TRAV35, TRAJ40)
CAGSTTSGTYKYIF

SEQ ID NO: 695442 - protein, 13 aa, Homo sapiens
  CDR3 for beta chain variable domain of TCR clone 347721 (TRBV20-1, TRBJ1-6)
CSAPVGGGSPLHF

SEQ ID NO: 695443 - protein, 14 aa, Homo sapiens
  CDR3 for alpha chain variable domain of TCR clone 347722 (TRAV8-4, TRAJ34)
CAVSDPGDTDKLIF

SEQ ID NO: 695444 - protein, 15 aa, Homo sapiens
  CDR3 for beta chain variable domain of TCR clone 347722 (TRBV5-7, TRBJ1-5)
CASSYGKLWDQPQHF

SEQ ID NO: 695445 - protein, 12 aa, Homo sapiens
  CDR3 for alpha chain variable domain of TCR clone 347723 (TRAV3, TRAJ20)
CAVRHKVERLQA

SEQ ID NO: 695446 - protein, 15 aa, Homo sapiens
  CDR3 for beta chain variable domain of TCR clone 347723 (TRBV7-9, TRBJ1-6)
CASSSPGRGNSPLHF

SEQ ID NO: 695447 - protein, 23 aa, Homo sapiens
  CDR3 for alpha chain variable domain of TCR clone 347724 (TRAV3, TRAJ38)
CAVRDCLNAGNNHIQKPDPAVYH

SEQ ID NO: 695448 - protein, 19 aa, Homo sapiens
  CDR3 for beta chain variable domain of TCR clone 347724 (TRBV7-2, TRBJ2-3)
CASSFLSRNWGGGTDTQYF

SEQ ID NO: 695449 - protein, 18 aa, Homo sapiens
  CDR3 for alpha chain variable domain of TCR clone 347725 (TRAV35, TRAJ28)
CAGHNYPLSGSGSYQLTF

SEQ ID NO: 695450 - protein, 12 aa, Homo sapiens
  CDR3 for beta chain variable domain of TCR clone 347725 (TRBV7-9, TRBJ1-1)
CASSLEGTEAFF

SEQ ID NO: 695451 - protein, 16 aa, Homo sapiens
  CDR3 for alpha chain variable domain of TCR clone 347726 (TRAV3, TRAJ37)
CAVRGKWSGNTGKLIF

SEQ ID NO: 695452 - protein, 16 aa, Homo sapiens
  CDR3 for beta chain variable domain of TCR clone 347726 (TRBV28, TRBJ1-5)
CASSFRGGCSNQPQHF

SEQ ID NO: 695453 - protein, 14 aa, Homo sapiens
  CDR3 for alpha chain variable domain of TCR clone 347727 (TRAV3, TRAJ34)
FAVRAPGKTDKLIF

SEQ ID NO: 695454 - protein, 12 aa, Homo sapiens
  CDR3 for beta chain variable domain of TCR clone 347727 (TRBV11-2, TRBJ2-1)
CASSPGNNEQFF

SEQ ID NO: 695455 - protein, 13 aa, Homo sapiens
  CDR3 for alpha chain variable domain of TCR clone 347728 (TRAV8-6, TRAJ13)
CAVRDGGYQKGTF

SEQ ID NO: 695456 - protein, 15 aa, Homo sapiens
  CDR3 for beta chain variable domain of TCR clone 347728 (TRBV7-9, TRBJ2-2)
CASRPEGTSTGELFF

SEQ ID NO: 695457 - protein, 13 aa, Homo sapiens
  CDR3 for alpha chain variable domain of TCR clone 347729 (TRAV13-2, TRAJ48)
CAEMDFGNEKLTF

SEQ ID NO: 695458 - protein, 14 aa, Homo sapiens
  CDR3 for beta chain variable domain of TCR clone 347729 (TRBV5-7, TRBJ2-2)
CASSLARNTGELFF

SEQ ID NO: 695459 - protein, 15 aa, Homo sapiens
  CDR3 for alpha chain variable domain of TCR clone 347730 (TRAV27, TRAJ38)
CAGRFNAGNNRKLIW

SEQ ID NO: 695460 - protein, 13 aa, Homo sapiens
  CDR3 for beta chain variable domain of TCR clone 347730 (TRBV12-5, TRBJ2-3)
CASQNRGIDTQYF

SEQ ID NO: 695461 - protein, 14 aa, Homo sapiens
  CDR3 for alpha chain variable domain of TCR clone 347731 (TRAV12-2, TRAJ45)
CDVNKGGGADGLTF

SEQ ID NO: 695462 - protein, 14 aa, Homo sapiens
  CDR3 for beta chain variable domain of TCR clone 347731 (TRBV20-1, TRBJ1-1)
CSAMGGTANTEAFF

SEQ ID NO: 695463 - protein, 14 aa, Homo sapiens
  CDR3 for alpha chain variable domain of TCR clone 347732 (TRAV1-2, TRAJ8)
CAVREDTGFQKLGF

SEQ ID NO: 695464 - protein, 15 aa, Homo sapiens
  CDR3 for beta chain variable domain of TCR clone 347732 (TRBV7-9, TRBJ1-4)
CASSARTGGNEKLFF

SEQ ID NO: 695465 - protein, 18 aa, Homo sapiens
  CDR3 for alpha chain variable domain of TCR clone 347733 (TRAV1-2, TRAJ8)
CLLPLCCERGTGFQKLVF

SEQ ID NO: 695466 - protein, 14 aa, Homo sapiens
  CDR3 for beta chain variable domain of TCR clone 347733 (TRBV7-6, TRBJ2-3)
CASSLGTVTDTQYF

SEQ ID NO: 695467 - protein, 15 aa, Homo sapiens
  CDR3 for alpha chain variable domain of TCR clone 347734 (TRAV4, TRAJ39)
CLVGPNNNAGNMLTF

SEQ ID NO: 695468 - protein, 15 aa, Homo sapiens
  CDR3 for beta chain variable domain of TCR clone 347734 (TRBV7-9, TRBJ1-5)
CASSQGHQPNQPQHF

SEQ ID NO: 695469 - protein, 14 aa, Homo sapiens
  CDR3 for alpha chain variable domain of TCR clone 347735 (TRAV13-1, TRAJ26)
YAAPKGPDGQNFVF

SEQ ID NO: 695470 - protein, 15 aa, Homo sapiens
  CDR3 for beta chain variable domain of TCR clone 347735 (TRBV28, TRBJ2-5)
CASSFRQGALETQYF

SEQ ID NO: 695471 - protein, 13 aa, Homo sapiens
  CDR3 for alpha chain variable domain of TCR clone 347736 (TRAV38-1, TRAJ20)
CPFMRDNDYKLSF

SEQ ID NO: 695472 - protein, 12 aa, Homo sapiens
  CDR3 for beta chain variable domain of TCR clone 347736 (TRBV18, TRBJ2-5)
CASSPSKETQYF

SEQ ID NO: 695473 - protein, 10 aa, Homo sapiens
  CDR3 for alpha chain variable domain of TCR clone 347737 (TRAV23/DV6, TRAJ57)
CAASSTLSQG

SEQ ID NO: 695474 - protein, 15 aa, Homo sapiens
  CDR3 for beta chain variable domain of TCR clone 347737 (TRBV18, TRBJ1-1)
CASSPSSWVNTEAFF

SEQ ID NO: 695475 - protein, 14 aa, Homo sapiens
  CDR3 for alpha chain variable domain of TCR clone 347738 (TRAV1-2, TRAJ16)
CAVRSASDGRKLLF

SEQ ID NO: 695476 - protein, 17 aa, Homo sapiens
  CDR3 for beta chain variable domain of TCR clone 347738 (TRBV7-3, TRBJ2-3)
CASSLMKRMRGADTQYF

SEQ ID NO: 695477 - protein, 13 aa, Homo sapiens
  CDR3 for alpha chain variable domain of TCR clone 347739 (TRAV36/DV7, TRAJ54)
CAVLIQGAQKLVF

SEQ ID NO: 695478 - protein, 12 aa, Homo sapiens
  CDR3 for beta chain variable domain of TCR clone 347739 (TRBV23-1, TRBJ2-1)
RPSGGGGNEQFF

SEQ ID NO: 695479 - protein, 14 aa, Homo sapiens
  CDR3 for alpha chain variable domain of TCR clone 347740 (TRAV26-1, TRAJ38)
CMADNAGNNRKLIW

SEQ ID NO: 695480 - protein, 13 aa, Homo sapiens
  CDR3 for beta chain variable domain of TCR clone 347740 (TRBV20-1, TRBJ2-1)
CSARSSPRDEQFF

SEQ ID NO: 695481 - protein, 17 aa, Homo sapiens
  CDR3 for alpha chain variable domain of TCR clone 347741 (TRAV8-6, TRAJ58)
SAVSSWVGETSGSRLTF

SEQ ID NO: 695482 - protein, 14 aa, Homo sapiens
  CDR3 for beta chain variable domain of TCR clone 347741 (TRBV4-2, TRBJ2-1)
CASGLDRAYNEQLF

SEQ ID NO: 695483 - protein, 19 aa, Homo sapiens
  CDR3 for alpha chain variable domain of TCR clone 347742 (TRAV2, TRAJ20)
ILQVREADAAVYRDCKLSF

SEQ ID NO: 695484 - protein, 14 aa, Homo sapiens
  CDR3 for beta chain variable domain of TCR clone 347742 (TRBV7-2, TRBJ2-7)
CASRSQGAAYEQYF

SEQ ID NO: 695485 - protein, 15 aa, Homo sapiens
  CDR3 for alpha chain variable domain of TCR clone 347743 (TRAV3, TRAJ4)
CAVRDGTGGYNKLIF

SEQ ID NO: 695486 - protein, 13 aa, Homo sapiens
  CDR3 for beta chain variable domain of TCR clone 347743 (TRBV7-9, TRBJ2-7)
CASSAGLQYEQYF

SEQ ID NO: 695487 - protein, 15 aa, Homo sapiens
  CDR3 for alpha chain variable domain of TCR clone 347744 (TRAV21, TRAJ53)
CAVRQSGGSSYKLTF

SEQ ID NO: 695488 - protein, 16 aa, Homo sapiens
  CDR3 for beta chain variable domain of TCR clone 347744 (TRBV7-3, TRBJ2-2)
CASSLKRGTLSGELFF

SEQ ID NO: 695489 - protein, 12 aa, Homo sapiens
  CDR3 for alpha chain variable domain of TCR clone 347745 (TRAV21, TRAJ23)
CAVPNQGGKLIF

SEQ ID NO: 695490 - protein, 17 aa, Homo sapiens
  CDR3 for beta chain variable domain of TCR clone 347745 (TRBV9, TRBJ2-1)
CASSVASVPSIYNEQFF

SEQ ID NO: 695491 - protein, 12 aa, Homo sapiens
  CDR3 for alpha chain variable domain of TCR clone 347746 (TRAV13-1, TRAJ21)
CAAKEGFNNFYF

SEQ ID NO: 695492 - protein, 13 aa, Homo sapiens
  CDR3 for beta chain variable domain of TCR clone 347746 (TRBV7-9, TRBJ2-1)
CASSLGTVNEQFF

SEQ ID NO: 695493 - protein, 12 aa, Homo sapiens
  CDR3 for alpha chain variable domain of TCR clone 347747 (TRAV13-1, TRAJ21)
CAAKEGFNNFYF

SEQ ID NO: 695494 - protein, 15 aa, Homo sapiens
  CDR3 for beta chain variable domain of TCR clone 347747 (TRBV20-1, TRBJ2-7)
CSARDRVSGMDEQYF

SEQ ID NO: 695495 - protein, 16 aa, Homo sapiens
  CDR3 for alpha chain variable domain of TCR clone 347748 (TRAV29/DV5, TRAJ30)
QCTSVQQANRDDTIIF

SEQ ID NO: 695496 - protein, 13 aa, Homo sapiens
  CDR3 for beta chain variable domain of TCR clone 347748 (TRBV12-5, TRBJ2-3)
CASQNRGTDTQYF

SEQ ID NO: 695497 - protein, 13 aa, Homo sapiens
  CDR3 for alpha chain variable domain of TCR clone 347749 (TRAV27, TRAJ45)
CRSSGGGADGLTF

SEQ ID NO: 695498 - protein, 13 aa, Homo sapiens
  CDR3 for beta chain variable domain of TCR clone 347749 (TRBV20-1, TRBJ1-1)
CSAPLGGGTEAFF

SEQ ID NO: 695499 - protein, 14 aa, Homo sapiens
  CDR3 for alpha chain variable domain of TCR clone 347750 (TRAV12-2, TRAJ24)
CAVTPADSWGKLQF

SEQ ID NO: 695500 - protein, 17 aa, Homo sapiens
  CDR3 for beta chain variable domain of TCR clone 347750 (TRBV19, TRBJ2-7)
CASSISFYDSYPYEQYF

SEQ ID NO: 695501 - protein, 11 aa, Homo sapiens
  CDR3 for alpha chain variable domain of TCR clone 347751 (TRAV17, TRAJ9)
CATTGGCKTIF

SEQ ID NO: 695502 - protein, 15 aa, Homo sapiens
  CDR3 for beta chain variable domain of TCR clone 347751 (TRBV9, TRBJ1-6)
CASSVAGTGDSHLHF

SEQ ID NO: 695503 - protein, 12 aa, Homo sapiens
  CDR3 for alpha chain variable domain of TCR clone 347752 (TRAV12-1, TRAJ40)
CVVHSGTYKYIF

SEQ ID NO: 695504 - protein, 18 aa, Homo sapiens
  CDR3 for beta chain variable domain of TCR clone 347752 (TRBV11-2, TRBJ2-3)
RASSLGGASRGAPNTQYF

SEQ ID NO: 695505 - protein, 16 aa, Homo sapiens
  CDR3 for alpha chain variable domain of TCR clone 347753 (TRAV3, TRAJ10)
CAVRAMRAGGGNKLTF

SEQ ID NO: 695506 - protein, 19 aa, Homo sapiens
  CDR3 for beta chain variable domain of TCR clone 347753 (TRBV6-3, TRBJ1-2)
CASSYSKGRTGPPNYGYTF

SEQ ID NO: 695507 - protein, 14 aa, Homo sapiens
  CDR3 for alpha chain variable domain of TCR clone 347754 (TRAV26-1, TRAJ45)
CIEVTGGGADGLTF

SEQ ID NO: 695508 - protein, 16 aa, Homo sapiens
  CDR3 for beta chain variable domain of TCR clone 347754 (TRBV12-4, TRBJ2-5)
CASSFFVRGRQETQYF

SEQ ID NO: 695509 - protein, 14 aa, Homo sapiens
  CDR3 for alpha chain variable domain of TCR clone 347755 (TRAV13-1, TRAJ4)
CAASFSGGYNKLIF

SEQ ID NO: 695510 - protein, 14 aa, Homo sapiens
  CDR3 for beta chain variable domain of TCR clone 347755 (TRBV6-6, TRBJ2-7)
CASQQGIRSYEQYF

SEQ ID NO: 695511 - protein, 14 aa, Homo sapiens
  CDR3 for alpha chain variable domain of TCR clone 347756 (TRAV29/DV5, TRAJ45)
CAASFRGGADGRTF

SEQ ID NO: 695512 - protein, 11 aa, Homo sapiens
  CDR3 for beta chain variable domain of TCR clone 347756 (TRBV11-3, TRBJ2-2)
CASSLPGELFF

SEQ ID NO: 695513 - protein, 16 aa, Homo sapiens
  CDR3 for alpha chain variable domain of TCR clone 347757 (TRAV21, TRAJ52)
CAGSDAGGTSYGKLTF

SEQ ID NO: 695514 - protein, 13 aa, Homo sapiens
  CDR3 for beta chain variable domain of TCR clone 347757 (TRBV7-3, TRBJ2-5)
CASSFRGSQTQYF

SEQ ID NO: 695515 - protein, 14 aa, Homo sapiens
  CDR3 for alpha chain variable domain of TCR clone 347758 (TRAV26-1, TRAJ38)
CIADNAGNNRKLIW

SEQ ID NO: 695516 - protein, 13 aa, Homo sapiens
  CDR3 for beta chain variable domain of TCR clone 347758 (TRBV20-1, TRBJ1-1)
CSARGGGNNEDFF

SEQ ID NO: 695517 - protein, 22 aa, Homo sapiens
  CDR3 for alpha chain variable domain of TCR clone 347759 (TRAV8-3, TRAJ32)
CAVEGVLQTSSSLELALCLLSS

SEQ ID NO: 695518 - protein, 15 aa, Homo sapiens
  CDR3 for beta chain variable domain of TCR clone 347759 (TRBV7-2, TRBJ2-3)
CASSSTGLETDTQYF

SEQ ID NO: 695519 - protein, 15 aa, Homo sapiens
  CDR3 for alpha chain variable domain of TCR clone 347760 (TRAV26-1, TRAJ22)
CIVRASFWFCKATDL

SEQ ID NO: 695520 - protein, 12 aa, Homo sapiens
  CDR3 for beta chain variable domain of TCR clone 347760 (TRBV11-2, TRBJ2-2)
CASSLGGGELFF

SEQ ID NO: 695521 - protein, 13 aa, Homo sapiens
  CDR3 for alpha chain variable domain of TCR clone 347761 (TRAV2, TRAJ15)
CAVAPQAGTALIF

SEQ ID NO: 695522 - protein, 16 aa, Homo sapiens
  CDR3 for beta chain variable domain of TCR clone 347761 (TRBV20-1, TRBJ1-4)
CSAPGQGLLTNEKLFF

SEQ ID NO: 695523 - protein, 15 aa, Homo sapiens
  CDR3 for alpha chain variable domain of TCR clone 347762 (TRAV22, TRAJ24)
CVVPLSTDSWGKLQF

SEQ ID NO: 695524 - protein, 14 aa, Homo sapiens
  CDR3 for beta chain variable domain of TCR clone 347762 (TRBV7-2, TRBJ2-7)
CDSRSQGAAYEQYF

SEQ ID NO: 695525 - protein, 13 aa, Homo sapiens
  CDR3 for alpha chain variable domain of TCR clone 347763 (TRAV2, TRAJ15)
FAVASQAGTALIF

SEQ ID NO: 695526 - protein, 15 aa, Homo sapiens
  CDR3 for beta chain variable domain of TCR clone 347763 (TRBV20-1, TRBJ2-7)
CSARDRVSGMDEQYF

SEQ ID NO: 695527 - protein, 12 aa, Homo sapiens
  CDR3 for alpha chain variable domain of TCR clone 347764 (TRAV13-2, TRAJ23)
CAERHRGGKLIF

SEQ ID NO: 695528 - protein, 14 aa, Homo sapiens
  CDR3 for beta chain variable domain of TCR clone 347764 (TRBV2, TRBJ2-1)
CASRLIVGHDEQFF

SEQ ID NO: 695529 - protein, 14 aa, Homo sapiens
  CDR3 for alpha chain variable domain of TCR clone 347765 (TRAV13-1, TRAJ17)
LSSRSKAGGNKLTF

SEQ ID NO: 695530 - protein, 14 aa, Homo sapiens
  CDR3 for beta chain variable domain of TCR clone 347765 (TRBV7-9, TRBJ2-1)
CASSSMVGFGEQFF

SEQ ID NO: 695531 - protein, 15 aa, Homo sapiens
  CDR3 for alpha chain variable domain of TCR clone 347766 (TRAV12-2, TRAJ45)
CAVLLGGGGADGLTF

SEQ ID NO: 695532 - protein, 18 aa, Homo sapiens
  CDR3 for beta chain variable domain of TCR clone 347766 (TRBV7-6, TRBJ2-2)
CASSSSRQGGGNTGELFF

SEQ ID NO: 695533 - protein, 13 aa, Homo sapiens
  CDR3 for alpha chain variable domain of TCR clone 347767 (TRAV1-2, TRAJ36)
CAVVQTGANNLFF

SEQ ID NO: 695534 - protein, 14 aa, Homo sapiens
  CDR3 for beta chain variable domain of TCR clone 347767 (TRBV20-1, TRBJ2-5)
CSAREMTKQETQYF

SEQ ID NO: 695535 - protein, 14 aa, Homo sapiens
  CDR3 for alpha chain variable domain of TCR clone 347768 (TRAV16, TRAJ37)
CALDISGNTGKLIF

SEQ ID NO: 695536 - protein, 16 aa, Homo sapiens
  CDR3 for beta chain variable domain of TCR clone 347768 (TRBV12-5, TRBJ2-5)
CASGPRTSGNQETQYF

SEQ ID NO: 695537 - protein, 17 aa, Homo sapiens
  CDR3 for alpha chain variable domain of TCR clone 347769 (TRAV3, TRAJ42)
CAVRDRGYGGSQGNLIF

SEQ ID NO: 695538 - protein, 15 aa, Homo sapiens
  CDR3 for beta chain variable domain of TCR clone 347769 (TRBV2, TRBJ2-5)
CASSEQGLIGETQYF

SEQ ID NO: 695539 - protein, 17 aa, Homo sapiens
  CDR3 for alpha chain variable domain of TCR clone 347770 (TRAV8-4, TRAJ10)
CAVSRPTLTGGGNKLTF

SEQ ID NO: 695540 - protein, 14 aa, Homo sapiens
  CDR3 for beta chain variable domain of TCR clone 347770 (TRBV27, TRBJ2-7)
CASSLAGLSYEQYF

SEQ ID NO: 695541 - protein, 15 aa, Homo sapiens
  CDR3 for alpha chain variable domain of TCR clone 347771 (TRAV13-1, TRAJ52)
CAATSPRTSYGKLTF

SEQ ID NO: 695542 - protein, 17 aa, Homo sapiens
  CDR3 for beta chain variable domain of TCR clone 347771 (TRBV15, TRBJ1-2)
CATSGREIDVVNYGYTF

SEQ ID NO: 695543 - protein, 13 aa, Homo sapiens
  CDR3 for alpha chain variable domain of TCR clone 347772 (TRAV27, TRAJ45)
CRSSGGGADGLSF

SEQ ID NO: 695544 - protein, 11 aa, Homo sapiens
  CDR3 for beta chain variable domain of TCR clone 347772 (TRBV19, TRBJ1-1)
CASSIGSEAFF

SEQ ID NO: 695545 - protein, 14 aa, Homo sapiens
  CDR3 for alpha chain variable domain of TCR clone 347773 (TRAV12-2, TRAJ15)
CAPHTGQAGPALIF

SEQ ID NO: 695546 - protein, 17 aa, Homo sapiens
  CDR3 for beta chain variable domain of TCR clone 347773 (TRBV5-5, TRBJ1-2)
CASSLGSLDGQSEGYTF

SEQ ID NO: 695547 - protein, 17 aa, Homo sapiens
  CDR3 for alpha chain variable domain of TCR clone 347774 (TRAV3, TRAJ42)
CAGRYRDYGGSQGNLIF

SEQ ID NO: 695548 - protein, 15 aa, Homo sapiens
  CDR3 for beta chain variable domain of TCR clone 347774 (TRBV6-6, TRBJ2-7)
CASSYSYGGSYEQYF

SEQ ID NO: 695549 - protein, 20 aa, Homo sapiens
  CDR3 for alpha chain variable domain of TCR clone 347775 (TRAV27, TRAJ10)
ASTSVPSRGILTGGGNKLTF

SEQ ID NO: 695550 - protein, 15 aa, Homo sapiens
  CDR3 for beta chain variable domain of TCR clone 347775 (TRBV9, TRBJ2-3)
CARSLEGGLTDTQYF

SEQ ID NO: 695551 - protein, 13 aa, Homo sapiens
  CDR3 for alpha chain variable domain of TCR clone 347776 (TRAV1-2, TRAJ9)
CAVLNTGGFKTIF

SEQ ID NO: 695552 - protein, 15 aa, Homo sapiens
  CDR3 for beta chain variable domain of TCR clone 347776 (TRBV19, TRBJ1-1)
CASTSGQIQNTEAFF

SEQ ID NO: 695553 - protein, 14 aa, Homo sapiens
  CDR3 for alpha chain variable domain of TCR clone 347777 (TRAV1-2, TRAJ16)
CAVNRFSDGQKLLF

SEQ ID NO: 695554 - protein, 15 aa, Homo sapiens
  CDR3 for beta chain variable domain of TCR clone 347777 (TRBV27, TRBJ1-1)
CASSPYADPYNEAFF

SEQ ID NO: 695555 - protein, 15 aa, Homo sapiens
  CDR3 for alpha chain variable domain of TCR clone 347778 (TRAV12-3, TRAJ42)
CAMSGHGGSQGNLIF

SEQ ID NO: 695556 - protein, 15 aa, Homo sapiens
  CDR3 for beta chain variable domain of TCR clone 347778 (TRBV12-4, TRBJ2-5)
CASSGTGQAQETQYF

SEQ ID NO: 695557 - protein, 13 aa, Homo sapiens
  CDR3 for alpha chain variable domain of TCR clone 347779 (TRAV20, TRAJ56)
CAVQAGANSKLPF

SEQ ID NO: 695558 - protein, 14 aa, Homo sapiens
  CDR3 for beta chain variable domain of TCR clone 347779 (TRBV28, TRBJ1-1)
CASSPRTRWAEAFF

SEQ ID NO: 695559 - protein, 13 aa, Homo sapiens
  CDR3 for alpha chain variable domain of TCR clone 347780 (TRAV12-2, TRAJ48)
CAVRDFGNEKLTF

SEQ ID NO: 695560 - protein, 12 aa, Homo sapiens
  CDR3 for beta chain variable domain of TCR clone 347780 (TRBV7-9, TRBJ1-5)
CASSPQGQPQHF

SEQ ID NO: 695561 - protein, 14 aa, Homo sapiens
  CDR3 for alpha chain variable domain of TCR clone 347781 (TRAV2, TRAJ37)
CAVEDLGNTGKLIF

SEQ ID NO: 695562 - protein, 11 aa, Homo sapiens
  CDR3 for beta chain variable domain of TCR clone 347781 (TRBV29-1, TRBJ2-5)
CSEDRTGTQYF

SEQ ID NO: 695563 - protein, 12 aa, Homo sapiens
  CDR3 for alpha chain variable domain of TCR clone 347782 (TRAV36/DV7, TRAJ26)
CAADNYGQNFVF

SEQ ID NO: 695564 - protein, 15 aa, Homo sapiens
  CDR3 for beta chain variable domain of TCR clone 347782 (TRBV6-1, TRBJ2-7)
CASSESMGDFYEQYF

SEQ ID NO: 695565 - protein, 16 aa, Homo sapiens
  CDR3 for alpha chain variable domain of TCR clone 347783 (TRAV3, TRAJ37)
CAVRPPGSGNTGKLIF

SEQ ID NO: 695566 - protein, 14 aa, Homo sapiens
  CDR3 for beta chain variable domain of TCR clone 347783 (TRBV19, TRBJ2-7)
CASGMGQGAIEQYF

SEQ ID NO: 695567 - protein, 16 aa, Homo sapiens
  CDR3 for alpha chain variable domain of TCR clone 347784 (TRAV23/DV6, TRAJ9)
CAASIGGNTGGFKTIF

SEQ ID NO: 695568 - protein, 13 aa, Homo sapiens
  CDR3 for beta chain variable domain of TCR clone 347784 (TRBV19, TRBJ1-1)
CASSPQMNTEAFF

SEQ ID NO: 695569 - protein, 14 aa, Homo sapiens
  CDR3 for alpha chain variable domain of TCR clone 347785 (TRAV1-2, TRAJ8)
CPVREDTGFQKLVF

SEQ ID NO: 695570 - protein, 15 aa, Homo sapiens
  CDR3 for beta chain variable domain of TCR clone 347785 (TRBV28, TRBJ2-6)
CASSLAGSGANVLAF

SEQ ID NO: 695571 - protein, 13 aa, Homo sapiens
  CDR3 for alpha chain variable domain of TCR clone 347786 (TRAV27, TRAJ45)
CRSSGGGADGLTF

SEQ ID NO: 695572 - protein, 14 aa, Homo sapiens
  CDR3 for beta chain variable domain of TCR clone 347786 (TRBV7-9, TRBJ2-1)
CASSSMVGFGERFF

SEQ ID NO: 695573 - protein, 14 aa, Homo sapiens
  CDR3 for alpha chain variable domain of TCR clone 347787 (TRAV12-3, TRAJ10)
SHLPLTGGGNKLTF

SEQ ID NO: 695574 - protein, 15 aa, Homo sapiens
  CDR3 for beta chain variable domain of TCR clone 347787 (TRBV7-9, TRBJ1-4)
CASSRTGGFNDTLFF

SEQ ID NO: 695575 - protein, 14 aa, Homo sapiens
  CDR3 for alpha chain variable domain of TCR clone 347788 (TRAV12-2, TRAJ54)
CAVNRRQGAQKLVF

SEQ ID NO: 695576 - protein, 13 aa, Homo sapiens
  CDR3 for beta chain variable domain of TCR clone 347788 (TRBV24-1, TRBJ2-1)
YATSAGPYNEQFF

SEQ ID NO: 695577 - protein, 16 aa, Homo sapiens
  CDR3 for alpha chain variable domain of TCR clone 347789 (TRAV38-1, TRAJ42)
CAFMKLGGGSQGNLIF

SEQ ID NO: 695578 - protein, 13 aa, Homo sapiens
  CDR3 for beta chain variable domain of TCR clone 347789 (TRBV11-2, TRBJ2-5)
CASSSTGEETQYF

SEQ ID NO: 695579 - protein, 15 aa, Homo sapiens
  CDR3 for alpha chain variable domain of TCR clone 347790 (TRAV35, TRAJ58)
CAGRRQETSGSRLTF

SEQ ID NO: 695580 - protein, 13 aa, Homo sapiens
  CDR3 for beta chain variable domain of TCR clone 347790 (TRBV25-1, TRBJ2-6)
CASRGPGANVLTF

SEQ ID NO: 695581 - protein, 21 aa, Homo sapiens
  CDR3 for alpha chain variable domain of TCR clone 347791 (TRAV12-1, TRAJ32)
SSVIQPPTSMNYGGATNKLIF

SEQ ID NO: 695582 - protein, 15 aa, Homo sapiens
  CDR3 for beta chain variable domain of TCR clone 347791 (TRBV7-8, TRBJ1-2)
CASSLVRDGGLGYTF

SEQ ID NO: 695583 - protein, 14 aa, Homo sapiens
  CDR3 for alpha chain variable domain of TCR clone 347792 (TRAV9-2, TRAJ39)
CALYIYHAGNMLTF

SEQ ID NO: 695584 - protein, 14 aa, Homo sapiens
  CDR3 for beta chain variable domain of TCR clone 347792 (TRBV7-9, TRBJ2-1)
CASSPRDSLYEQFF

SEQ ID NO: 695585 - protein, 12 aa, Homo sapiens
  CDR3 for alpha chain variable domain of TCR clone 347793 (TRAV12-1, TRAJ40)
CVVYSGTYKYIF

SEQ ID NO: 695586 - protein, 15 aa, Homo sapiens
  CDR3 for beta chain variable domain of TCR clone 347793 (TRBV4-3, TRBJ2-7)
CASSQGGRGIYEQYF

SEQ ID NO: 695587 - protein, 13 aa, Homo sapiens
  CDR3 for alpha chain variable domain of TCR clone 347794 (TRAV35, TRAJ42)
CAGFTGSQGNLIF

SEQ ID NO: 695588 - protein, 13 aa, Homo sapiens
  CDR3 for beta chain variable domain of TCR clone 347794 (TRBV29-1, TRBJ2-1)
CSVEGGRVNEQFF

SEQ ID NO: 695589 - protein, 15 aa, Homo sapiens
  CDR3 for alpha chain variable domain of TCR clone 347795 (TRAV3, TRAJ22)
FAVRDRGGSARQLTF

SEQ ID NO: 695590 - protein, 14 aa, Homo sapiens
  CDR3 for beta chain variable domain of TCR clone 347795 (TRBV20-1, TRBJ2-5)
CSALVPGYQETQYF

SEQ ID NO: 695591 - protein, 13 aa, Homo sapiens
  CDR3 for alpha chain variable domain of TCR clone 347796 (TRAV8-6, TRAJ9)
CAVGDTGGFKTIF

SEQ ID NO: 695592 - protein, 13 aa, Homo sapiens
  CDR3 for beta chain variable domain of TCR clone 347796 (TRBV27, TRBJ1-1)
CASSLSIGAEAFF

SEQ ID NO: 695593 - protein, 15 aa, Homo sapiens
  CDR3 for alpha chain variable domain of TCR clone 347797 (TRAV27, TRAJ56)
CAGRDGTGANSKLTF

SEQ ID NO: 695594 - protein, 14 aa, Homo sapiens
  CDR3 for beta chain variable domain of TCR clone 347797 (TRBV6-1, TRBJ1-3)
CASVQGGGGNTIYF

SEQ ID NO: 695595 - protein, 13 aa, Homo sapiens
  CDR3 for alpha chain variable domain of TCR clone 347798 (TRAV2, TRAJ34)
CAVEEDNTDKLIF

SEQ ID NO: 695596 - protein, 14 aa, Homo sapiens
  CDR3 for beta chain variable domain of TCR clone 347798 (TRBV4-1, TRBJ2-2)
CASSQAVNTGELFF

SEQ ID NO: 695597 - protein, 13 aa, Homo sapiens
  CDR3 for alpha chain variable domain of TCR clone 347799 (TRAV2, TRAJ40)
CAVVTSGTYKYIF

SEQ ID NO: 695598 - protein, 21 aa, Homo sapiens
  CDR3 for beta chain variable domain of TCR clone 347799 (TRBV19, TRBJ2-1)
CASPTFVLSGAVLRARDTAHR

SEQ ID NO: 695599 - protein, 16 aa, Homo sapiens
  CDR3 for alpha chain variable domain of TCR clone 347800 (TRAV9-2, TRAJ6)
CALRGPASGGSYIPTF

SEQ ID NO: 695600 - protein, 13 aa, Homo sapiens
  CDR3 for beta chain variable domain of TCR clone 347800 (TRBV7-9, TRBJ2-7)
CASSAGLQDEQYF

SEQ ID NO: 695601 - protein, 15 aa, Homo sapiens
  CDR3 for alpha chain variable domain of TCR clone 347801 (TRAV12-3, TRAJ6)
CAMSATSGESYIPTF

SEQ ID NO: 695602 - protein, 11 aa, Homo sapiens
  CDR3 for beta chain variable domain of TCR clone 347801 (TRBV20-1, TRBJ1-5)
CSAQGDQPQHF

SEQ ID NO: 695603 - protein, 11 aa, Homo sapiens
  CDR3 for alpha chain variable domain of TCR clone 347802 (TRAV29/DV5, TRAJ49)
CAAVLGNQFYF

SEQ ID NO: 695604 - protein, 13 aa, Homo sapiens
  CDR3 for beta chain variable domain of TCR clone 347802 (TRBV7-9, TRBJ1-2)
CASSLKQNYGYTF

SEQ ID NO: 695605 - protein, 10 aa, Homo sapiens
  CDR3 for alpha chain variable domain of TCR clone 347803 (TRAV13-1, TRAJ22)
CAASARQLTF

SEQ ID NO: 695606 - protein, 16 aa, Homo sapiens
  CDR3 for beta chain variable domain of TCR clone 347803 (TRBV12-5, TRBJ2-5)
CASGPRTSGNQETQYF

SEQ ID NO: 695607 - protein, 10 aa, Homo sapiens
  CDR3 for alpha chain variable domain of TCR clone 347804 (TRAV21, TRAJ31)
CAVDNARLMF

SEQ ID NO: 695608 - protein, 13 aa, Homo sapiens
  CDR3 for beta chain variable domain of TCR clone 347804 (TRBV12-4, TRBJ2-2)
CASSITGSGELFF

SEQ ID NO: 695609 - protein, 12 aa, Homo sapiens
  CDR3 for alpha chain variable domain of TCR clone 347805 (TRAV8-3, TRAJ26)
CAGNNYGQNFVF

SEQ ID NO: 695610 - protein, 15 aa, Homo sapiens
  CDR3 for beta chain variable domain of TCR clone 347805 (TRBV9, TRBJ2-1)
CASNLAGSSYNEQFF

SEQ ID NO: 695611 - protein, 13 aa, Homo sapiens
  CDR3 for alpha chain variable domain of TCR clone 347806 (TRAV8-3, TRAJ20)
CAVGRPTDYKLSF

SEQ ID NO: 695612 - protein, 14 aa, Homo sapiens
  CDR3 for beta chain variable domain of TCR clone 347806 (TRBV12-5, TRBJ2-5)
CASGSRTHQETQYF

SEQ ID NO: 695613 - protein, 23 aa, Homo sapiens
  CDR3 for alpha chain variable domain of TCR clone 347807 (TRAV16, TRAJ26)
CALSGSEFCLWSRNQIVRAALYP

SEQ ID NO: 695614 - protein, 12 aa, Homo sapiens
  CDR3 for beta chain variable domain of TCR clone 347807 (TRBV11-2, TRBJ2-1)
CASSPGNNEQFF

SEQ ID NO: 695615 - protein, 15 aa, Homo sapiens
  CDR3 for alpha chain variable domain of TCR clone 347808 (TRAV26-1, TRAJ22)
CIVRVSFWFCKATDL

SEQ ID NO: 695616 - protein, 15 aa, Homo sapiens
  CDR3 for beta chain variable domain of TCR clone 347808 (TRBV20-1, TRBJ1-1)
CSASRGVTGNTEAFF

SEQ ID NO: 695617 - protein, 12 aa, Homo sapiens
  CDR3 for alpha chain variable domain of TCR clone 347809 (TRAV12-3, TRAJ17)
CAMTLTGNKLTF

SEQ ID NO: 695618 - protein, 13 aa, Homo sapiens
  CDR3 for beta chain variable domain of TCR clone 347809 (TRBV12-4, TRBJ2-2)
CASSITGSGELSF

SEQ ID NO: 695619 - protein, 12 aa, Homo sapiens
  CDR3 for alpha chain variable domain of TCR clone 347810 (TRAV8-6, TRAJ31)
CAVSPNNARLMF

SEQ ID NO: 695620 - protein, 12 aa, Homo sapiens
  CDR3 for beta chain variable domain of TCR clone 347810 (TRBV29-1, TRBJ2-3)
CSVTGGADTQYF

SEQ ID NO: 695621 - protein, 13 aa, Homo sapiens
  CDR3 for alpha chain variable domain of TCR clone 347811 (TRAV12-1, TRAJ22)
CVVPSGSARQLTF

SEQ ID NO: 695622 - protein, 15 aa, Homo sapiens
  CDR3 for beta chain variable domain of TCR clone 347811 (TRBV11-3, TRBJ2-7)
CASSPGPASSCEQYS

SEQ ID NO: 695623 - protein, 11 aa, Homo sapiens
  CDR3 for alpha chain variable domain of TCR clone 347812 (TRAV13-1, TRAJ15)
CAATPGTALIF

SEQ ID NO: 695624 - protein, 17 aa, Homo sapiens
  CDR3 for beta chain variable domain of TCR clone 347812 (TRBV13, TRBJ2-3)
CASSLSRVAGGRNTQDF

SEQ ID NO: 695625 - protein, 14 aa, Homo sapiens
  CDR3 for alpha chain variable domain of TCR clone 347813 (TRAV13-1, TRAJ35)
CAASKGGLGNVLHC

SEQ ID NO: 695626 - protein, 15 aa, Homo sapiens
  CDR3 for beta chain variable domain of TCR clone 347813 (TRBV7-9, TRBJ1-6)
CASSSPGRGNSPLHF

SEQ ID NO: 695627 - protein, 15 aa, Homo sapiens
  CDR3 for alpha chain variable domain of TCR clone 347814 (TRAV16, TRAJ20)
CALKGGLRADYKPSF

SEQ ID NO: 695628 - protein, 16 aa, Homo sapiens
  CDR3 for beta chain variable domain of TCR clone 347814 (TRBV11-3, TRBJ2-2)
CASSSRTRPGTGELFF

SEQ ID NO: 695629 - protein, 13 aa, Homo sapiens
  CDR3 for alpha chain variable domain of TCR clone 347815 (TRAV2, TRAJ40)
CAVVTSGTYKYIF

SEQ ID NO: 695630 - protein, 14 aa, Homo sapiens
  CDR3 for beta chain variable domain of TCR clone 347815 (TRBV19, TRBJ2-1)
CASPTFVWSGEQFV

SEQ ID NO: 695631 - protein, 17 aa, Homo sapiens
  CDR3 for alpha chain variable domain of TCR clone 347816 (TRAV12-2, TRAJ6)
CAPQGPPRAGGSYIPTF

SEQ ID NO: 695632 - protein, 16 aa, Homo sapiens
  CDR3 for beta chain variable domain of TCR clone 347816 (TRBV19, TRBJ2-2)
CASITARASNTGELFF

SEQ ID NO: 695633 - protein, 14 aa, Homo sapiens
  CDR3 for alpha chain variable domain of TCR clone 347817 (TRAV1-2, TRAJ16)
CAVNRLSDGQKLLF

SEQ ID NO: 695634 - protein, 16 aa, Homo sapiens
  CDR3 for beta chain variable domain of TCR clone 347817 (TRBV5-1, TRBJ1-1)
CASSSGGNSLNTEAFF

SEQ ID NO: 695635 - protein, 13 aa, Homo sapiens
  CDR3 for alpha chain variable domain of TCR clone 347818 (TRAV17, TRAJ22)
CAQHSGSARQLTF

SEQ ID NO: 695636 - protein, 16 aa, Homo sapiens
  CDR3 for beta chain variable domain of TCR clone 347818 (TRBV4-1, TRBJ1-2)
CASSQDAGQVLYGYTF

SEQ ID NO: 695637 - protein, 15 aa, Homo sapiens
  CDR3 for alpha chain variable domain of TCR clone 347819 (TRAV12-3, TRAJ6)
CAMSATTGGSYIPTF

SEQ ID NO: 695638 - protein, 13 aa, Homo sapiens
  CDR3 for beta chain variable domain of TCR clone 347819 (TRBV28, TRBJ2-7)
CASTPGLAGEQYF

SEQ ID NO: 695639 - protein, 15 aa, Homo sapiens
  CDR3 for alpha chain variable domain of TCR clone 347820 (TRAV3, TRAJ3)
CAVRDGQSSSSKIIF

SEQ ID NO: 695640 - protein, 14 aa, Homo sapiens
  CDR3 for beta chain variable domain of TCR clone 347820 (TRBV28, TRBJ1-4)
CASSFGTFDEKLFF

SEQ ID NO: 695641 - protein, 12 aa, Homo sapiens
  CDR3 for alpha chain variable domain of TCR clone 347821 (TRAV2, TRAJ9)
CAVGAGGFKTIF

SEQ ID NO: 695642 - protein, 15 aa, Homo sapiens
  CDR3 for beta chain variable domain of TCR clone 347821 (TRBV10-3, TRBJ2-3)
CAISLTSGGTDTQYF

SEQ ID NO: 695643 - protein, 13 aa, Homo sapiens
  CDR3 for alpha chain variable domain of TCR clone 347822 (TRAV1-2, TRAJ23)
CAVRDRQGGKLIF

SEQ ID NO: 695644 - protein, 14 aa, Homo sapiens
  CDR3 for beta chain variable domain of TCR clone 347822 (TRBV18, TRBJ2-1)
CASSPQGRFNEQFF

SEQ ID NO: 695645 - protein, 15 aa, Homo sapiens
  CDR3 for alpha chain variable domain of TCR clone 347823 (TRAV34, TRAJ38)
CGADFTPGNNRKLIW

SEQ ID NO: 695646 - protein, 12 aa, Homo sapiens
  CDR3 for beta chain variable domain of TCR clone 347823 (TRBV11-2, TRBJ2-1)
CASSVQREGQFF

SEQ ID NO: 695647 - protein, 13 aa, Homo sapiens
  CDR3 for alpha chain variable domain of TCR clone 347824 (TRAV2, TRAJ15)
CAVASQAGTALIF

SEQ ID NO: 695648 - protein, 15 aa, Homo sapiens
  CDR3 for beta chain variable domain of TCR clone 347824 (TRBV19, TRBJ2-1)
CASSIQATSYNEQFF

SEQ ID NO: 695649 - protein, 16 aa, Homo sapiens
  CDR3 for alpha chain variable domain of TCR clone 347825 (TRAV1-2, TRAJ10)
CAVRGVLTGGGNKLTF

SEQ ID NO: 695650 - protein, 20 aa, Homo sapiens
  CDR3 for beta chain variable domain of TCR clone 347825 (TRBV7-8, TRBJ2-2)
CASSHLFPGPTIHNTGELFF

SEQ ID NO: 695651 - protein, 14 aa, Homo sapiens
  CDR3 for alpha chain variable domain of TCR clone 347826 (TRAV12-2, TRAJ33)
CAVKRARSNHQLIW

SEQ ID NO: 695652 - protein, 14 aa, Homo sapiens
  CDR3 for beta chain variable domain of TCR clone 347826 (TRBV13, TRBJ2-7)
CASSLKGASYEQYF

SEQ ID NO: 695653 - protein, 17 aa, Homo sapiens
  CDR3 for alpha chain variable domain of TCR clone 347827 (TRAV26-1, TRAJ22)
CIVRVPSHSGSARQLTL

SEQ ID NO: 695654 - protein, 16 aa, Homo sapiens
  CDR3 for beta chain variable domain of TCR clone 347827 (TRBV28, TRBJ2-1)
CASRRSGRVVGNEQFF

SEQ ID NO: 695655 - protein, 15 aa, Homo sapiens
  CDR3 for alpha chain variable domain of TCR clone 347828 (TRAV12-1, TRAJ15)
CVVTRANQAGTALIF

SEQ ID NO: 695656 - protein, 14 aa, Homo sapiens
  CDR3 for beta chain variable domain of TCR clone 347828 (TRBV5-1, TRBJ1-1)
CASSLVPINTEAFF

SEQ ID NO: 695657 - protein, 14 aa, Homo sapiens
  CDR3 for alpha chain variable domain of TCR clone 347829 (TRAV26-1, TRAJ38)
CIADSAGNNRKLLW

SEQ ID NO: 695658 - protein, 13 aa, Homo sapiens
  CDR3 for beta chain variable domain of TCR clone 347829 (TRBV20-1, TRBJ1-1)
CSARGGGNTEAFF

SEQ ID NO: 695659 - protein, 12 aa, Homo sapiens
  CDR3 for alpha chain variable domain of TCR clone 347830 (TRAV3, TRAJ20)
CAVRDPDYKLSF

SEQ ID NO: 695660 - protein, 14 aa, Homo sapiens
  CDR3 for beta chain variable domain of TCR clone 347830 (TRBV15, TRBJ2-3)
CATRSGTSTDTQYF

SEQ ID NO: 695661 - protein, 13 aa, Homo sapiens
  CDR3 for alpha chain variable domain of TCR clone 347831 (TRAV3, TRAJ40)
CAVRGSGAYKYIF

SEQ ID NO: 695662 - protein, 15 aa, Homo sapiens
  CDR3 for beta chain variable domain of TCR clone 347831 (TRBV27, TRBJ1-5)
CASSSSGTGNQHQHF

SEQ ID NO: 695663 - protein, 14 aa, Homo sapiens
  CDR3 for alpha chain variable domain of TCR clone 347832 (TRAV13-2, TRAJ9)
CAENSFTGGFKTIF

SEQ ID NO: 695664 - protein, 13 aa, Homo sapiens
  CDR3 for beta chain variable domain of TCR clone 347832 (TRBV19, TRBJ2-7)
CASSIDRNYEQYF

SEQ ID NO: 695665 - protein, 14 aa, Homo sapiens
  CDR3 for alpha chain variable domain of TCR clone 347833 (TRAV8-4, TRAJ9)
CAVRINTGGFKTIF

SEQ ID NO: 695666 - protein, 14 aa, Homo sapiens
  CDR3 for beta chain variable domain of TCR clone 347833 (TRBV7-2, TRBJ1-1)
CASSFLTGTTEAFF

SEQ ID NO: 695667 - protein, 10 aa, Homo sapiens
  CDR3 for alpha chain variable domain of TCR clone 347834 (TRAV8-4, TRAJ43)
CAVSADDMRF

SEQ ID NO: 695668 - protein, 15 aa, Homo sapiens
  CDR3 for beta chain variable domain of TCR clone 347834 (TRBV5-1, TRBJ2-3)
CASSVTSGSTVTQYF

SEQ ID NO: 695669 - protein, 14 aa, Homo sapiens
  CDR3 for alpha chain variable domain of TCR clone 347835 (TRAV8-4, TRAJ40)
CAVLSTSGTYKYIF

SEQ ID NO: 695670 - protein, 16 aa, Homo sapiens
  CDR3 for beta chain variable domain of TCR clone 347835 (TRBV7-2, TRBJ2-5)
CASSSKWLSGQETQYF

SEQ ID NO: 695671 - protein, 16 aa, Homo sapiens
  CDR3 for alpha chain variable domain of TCR clone 347836 (TRAV8-3, TRAJ13)
CAVCAYPSGGYQKVTF

SEQ ID NO: 695672 - protein, 15 aa, Homo sapiens
  CDR3 for beta chain variable domain of TCR clone 347836 (TRBV19, TRBJ1-5)
CASSIVWADNQTQHF

SEQ ID NO: 695673 - protein, 14 aa, Homo sapiens
  CDR3 for alpha chain variable domain of TCR clone 347837 (TRAV1-2, TRAJ16)
CAVSRFSDSQKLLF

SEQ ID NO: 695674 - protein, 15 aa, Homo sapiens
  CDR3 for beta chain variable domain of TCR clone 347837 (TRBV20-1, TRBJ1-5)
CSAFKNGQRNQPQHF

SEQ ID NO: 695675 - protein, 13 aa, Homo sapiens
  CDR3 for alpha chain variable domain of TCR clone 347838 (TRAV21, TRAJ57)
CAVTQGGSEKLVF

SEQ ID NO: 695676 - protein, 15 aa, Homo sapiens
  CDR3 for beta chain variable domain of TCR clone 347838 (TRBV6-6, TRBJ1-1)
CASSPRGDVETEAFF

SEQ ID NO: 695677 - protein, 11 aa, Homo sapiens
  CDR3 for alpha chain variable domain of TCR clone 347839 (TRAV35, TRAJ30)
CAGPGDDKIIF

SEQ ID NO: 695678 - protein, 14 aa, Homo sapiens
  CDR3 for beta chain variable domain of TCR clone 347839 (TRBV20-1, TRBJ1-1)
CSAQTRIGGTEAFF

SEQ ID NO: 695679 - protein, 16 aa, Homo sapiens
  CDR3 for alpha chain variable domain of TCR clone 347840 (TRAV13-1, TRAJ10)
CAAGYILTGGGNKLTF

SEQ ID NO: 695680 - protein, 14 aa, Homo sapiens
  CDR3 for beta chain variable domain of TCR clone 347840 (TRBV12-4, TRBJ1-2)
CASSPERNFYGYTF

SEQ ID NO: 695681 - protein, 14 aa, Homo sapiens
  CDR3 for alpha chain variable domain of TCR clone 347841 (TRAV1-2, TRAJ16)
CAVNRFSDGQKLLF

SEQ ID NO: 695682 - protein, 17 aa, Homo sapiens
  CDR3 for beta chain variable domain of TCR clone 347841 (TRBV20-1, TRBJ2-2)
CSTSGSGQGGLTGELFF

SEQ ID NO: 695683 - protein, 15 aa, Homo sapiens
  CDR3 for alpha chain variable domain of TCR clone 347842 (TRAV3, TRAJ5)
CAVRDRKTGRRALTF

SEQ ID NO: 695684 - protein, 15 aa, Homo sapiens
  CDR3 for beta chain variable domain of TCR clone 347842 (TRBV7-9, TRBJ2-2)
CASGPLDTFPGELVF

SEQ ID NO: 695685 - protein, 13 aa, Homo sapiens
  CDR3 for alpha chain variable domain of TCR clone 347843 (TRAV13-1, TRAJ39)
CSKYSNAGNMLTF

SEQ ID NO: 695686 - protein, 14 aa, Homo sapiens
  CDR3 for beta chain variable domain of TCR clone 347843 (TRBV12-4, TRBJ1-1)
CASSLGTGGTEAFF

SEQ ID NO: 695687 - protein, 18 aa, Homo sapiens
  CDR3 for alpha chain variable domain of TCR clone 347844 (TRAV21, TRAJ52)
CAVRPSPAGGTSYGKLTF

SEQ ID NO: 695688 - protein, 14 aa, Homo sapiens
  CDR3 for beta chain variable domain of TCR clone 347844 (TRBV20-1, TRBJ1-1)
CSARAVNGYTEAFF

SEQ ID NO: 695689 - protein, 15 aa, Homo sapiens
  CDR3 for alpha chain variable domain of TCR clone 347845 (TRAV8-2, TRAJ16)
CVVGDGFSDGQKLLF

SEQ ID NO: 695690 - protein, 15 aa, Homo sapiens
  CDR3 for beta chain variable domain of TCR clone 347845 (TRBV12-4, TRBJ2-5)
CASSPPTGLQETQYF

SEQ ID NO: 695691 - protein, 11 aa, Homo sapiens
  CDR3 for alpha chain variable domain of TCR clone 347846 (TRAV12-3, TRAJ43)
CAMSVSNDVRF

SEQ ID NO: 695692 - protein, 14 aa, Homo sapiens
  CDR3 for beta chain variable domain of TCR clone 347846 (TRBV7-8, TRBJ2-3)
CASSLEAGTDTQYF

SEQ ID NO: 695693 - protein, 12 aa, Homo sapiens
  CDR3 for alpha chain variable domain of TCR clone 347847 (TRAV1-1, TRAJ8)
CAGGTGFQKLVI

SEQ ID NO: 695694 - protein, 17 aa, Homo sapiens
  CDR3 for beta chain variable domain of TCR clone 347847 (TRBV7-9, TRBJ1-4)
CASSRTGALMKNCLLAV

SEQ ID NO: 695695 - protein, 15 aa, Homo sapiens
  CDR3 for alpha chain variable domain of TCR clone 347848 (TRAV38-1, TRAJ57)
CAFMDSQGGSEKLVF

SEQ ID NO: 695696 - protein, 16 aa, Homo sapiens
  CDR3 for beta chain variable domain of TCR clone 347848 (TRBV10-3, TRBJ2-1)
CAIRGGGRGDYNEQFF

SEQ ID NO: 695697 - protein, 13 aa, Homo sapiens
  CDR3 for alpha chain variable domain of TCR clone 347849 (TRAV29/DV5, TRAJ47)
CAASAEYGNKLVF

SEQ ID NO: 695698 - protein, 14 aa, Homo sapiens
  CDR3 for beta chain variable domain of TCR clone 347849 (TRBV4-1, TRBJ2-2)
CASSQAVNTGELFF

SEQ ID NO: 695699 - protein, 13 aa, Homo sapiens
  CDR3 for alpha chain variable domain of TCR clone 347850 (TRAV12-3, TRAJ33)
CAMSVNSNYQLIW

SEQ ID NO: 695700 - protein, 16 aa, Homo sapiens
  CDR3 for beta chain variable domain of TCR clone 347850 (TRBV13, TRBJ2-5)
CASSLRTGGSWETEYF

SEQ ID NO: 695701 - protein, 14 aa, Homo sapiens
  CDR3 for alpha chain variable domain of TCR clone 347851 (TRAV12-1, TRAJ9)
CVVTGYTGGFKTIF

SEQ ID NO: 695702 - protein, 17 aa, Homo sapiens
  CDR3 for beta chain variable domain of TCR clone 347851 (TRBV4-1, TRBJ1-4)
CASSQEGPRGVEEKLFF

SEQ ID NO: 695703 - protein, 12 aa, Homo sapiens
  CDR3 for alpha chain variable domain of TCR clone 347852 (TRAV3, TRAJ29)
CSPNSGNTPLVF

SEQ ID NO: 695704 - protein, 16 aa, Homo sapiens
  CDR3 for beta chain variable domain of TCR clone 347852 (TRBV19, TRBJ2-1)
CASSKAGPSSYNEQFF

SEQ ID NO: 695705 - protein, 13 aa, Homo sapiens
  CDR3 for alpha chain variable domain of TCR clone 347853 (TRAV8-3, TRAJ47)
CAVSMEYGNKLVF

SEQ ID NO: 695706 - protein, 12 aa, Homo sapiens
  CDR3 for beta chain variable domain of TCR clone 347853 (TRBV11-2, TRBJ2-1)
CASSPGNNEQFF

SEQ ID NO: 695707 - protein, 14 aa, Homo sapiens
  CDR3 for alpha chain variable domain of TCR clone 347854 (TRAV12-1, TRAJ43)
CVVHGRSNNNDMRF

SEQ ID NO: 695708 - protein, 12 aa, Homo sapiens
  CDR3 for beta chain variable domain of TCR clone 347854 (TRBV29-1, TRBJ2-3)
CSVTGGADTQYF

SEQ ID NO: 695709 - protein, 14 aa, Homo sapiens
  CDR3 for alpha chain variable domain of TCR clone 347855 (TRAV29/DV5, TRAJ36)
CAARRKTGANNLLF

SEQ ID NO: 695710 - protein, 13 aa, Homo sapiens
  CDR3 for beta chain variable domain of TCR clone 347855 (TRBV15, TRBJ1-2)
CATSMTANYGYTF

SEQ ID NO: 695711 - protein, 16 aa, Homo sapiens
  CDR3 for alpha chain variable domain of TCR clone 347856 (TRAV38-1, TRAJ32)
CAFMPFLGGATNKLIF

SEQ ID NO: 695712 - protein, 13 aa, Homo sapiens
  CDR3 for beta chain variable domain of TCR clone 347856 (TRBV28, TRBJ2-7)
CASTPGLAGEQYF

SEQ ID NO: 695713 - protein, 12 aa, Homo sapiens
  CDR3 for alpha chain variable domain of TCR clone 347857 (TRAV27, TRAJ33)
CAGDGSNYQLIW

SEQ ID NO: 695714 - protein, 16 aa, Homo sapiens
  CDR3 for beta chain variable domain of TCR clone 347857 (TRBV4-1, TRBJ2-1)
CASSQQGAWESNEQFF

SEQ ID NO: 695715 - protein, 19 aa, Homo sapiens
  CDR3 for alpha chain variable domain of TCR clone 347858 (TRAV1-1, TRAJ27)
CAGSEMTRSSLEKGHDFIF

SEQ ID NO: 695716 - protein, 14 aa, Homo sapiens
  CDR3 for beta chain variable domain of TCR clone 347858 (TRBV11-3, TRBJ1-6)
CASSFSGGDSPLHV

SEQ ID NO: 695717 - protein, 11 aa, Homo sapiens
  CDR3 for alpha chain variable domain of TCR clone 347859 (TRAV2, TRAJ13)
CASGGYRKVTF

SEQ ID NO: 695718 - protein, 17 aa, Homo sapiens
  CDR3 for beta chain variable domain of TCR clone 347859 (TRBV13, TRBJ2-3)
CASSLSRVAGGRNTQYF

SEQ ID NO: 695719 - protein, 13 aa, Homo sapiens
  CDR3 for alpha chain variable domain of TCR clone 347860 (TRAV8-2, TRAJ43)
WVVSDQGDNDTRF

SEQ ID NO: 695720 - protein, 12 aa, Homo sapiens
  CDR3 for beta chain variable domain of TCR clone 347860 (TRBV7-9, TRBJ2-7)
CASRTGFDEQYF

SEQ ID NO: 695721 - protein, 12 aa, Homo sapiens
  CDR3 for alpha chain variable domain of TCR clone 347861 (TRAV27, TRAJ41)
CAGRNSGYALNF

SEQ ID NO: 695722 - protein, 15 aa, Homo sapiens
  CDR3 for beta chain variable domain of TCR clone 347861 (TRBV6-3, TRBJ2-7)
CASSFPGTVFYEQYF

SEQ ID NO: 695723 - protein, 12 aa, Homo sapiens
  CDR3 for alpha chain variable domain of TCR clone 347862 (TRAV17, TRAJ20)
CATYSNDYKLSF

SEQ ID NO: 695724 - protein, 16 aa, Homo sapiens
  CDR3 for beta chain variable domain of TCR clone 347862 (TRBV11-3, TRBJ2-5)
CASSSVVAGSTETQYF

SEQ ID NO: 695725 - protein, 11 aa, Homo sapiens
  CDR3 for alpha chain variable domain of TCR clone 347863 (TRAV21, TRAJ48)
CAVDGNEKLTF

SEQ ID NO: 695726 - protein, 11 aa, Homo sapiens
  CDR3 for beta chain variable domain of TCR clone 347863 (TRBV23-1, TRBJ2-7)
SSSGTGLEQYF

SEQ ID NO: 695727 - protein, 13 aa, Homo sapiens
  CDR3 for alpha chain variable domain of TCR clone 347864 (TRAV12-3, TRAJ33)
CAMSVNSNYQLIW

SEQ ID NO: 695728 - protein, 14 aa, Homo sapiens
  CDR3 for beta chain variable domain of TCR clone 347864 (TRBV25-1, TRBJ1-1)
CASTHLGENTEAFF

SEQ ID NO: 695729 - protein, 14 aa, Homo sapiens
  CDR3 for alpha chain variable domain of TCR clone 347865 (TRAV17, TRAJ42)
CAKNYGGSQGNLIF

SEQ ID NO: 695730 - protein, 13 aa, Homo sapiens
  CDR3 for beta chain variable domain of TCR clone 347865 (TRBV20-1, TRBJ1-2)
CSAPRSGRYGYTF

SEQ ID NO: 695731 - protein, 15 aa, Homo sapiens
  CDR3 for alpha chain variable domain of TCR clone 347866 (TRAV21, TRAJ53)
CATLNSGGSNDKLTF

SEQ ID NO: 695732 - protein, 14 aa, Homo sapiens
  CDR3 for beta chain variable domain of TCR clone 347866 (TRBV12-5, TRBJ2-5)
CASGSRTHQETQYF

SEQ ID NO: 695733 - protein, 16 aa, Homo sapiens
  CDR3 for alpha chain variable domain of TCR clone 347867 (TRAV13-1, TRAJ13)
CTAFFLGVTRTLPLEL

SEQ ID NO: 695734 - protein, 15 aa, Homo sapiens
  CDR3 for beta chain variable domain of TCR clone 347867 (TRBV7-8, TRBJ2-1)
CASSLADSLYNEQFF

SEQ ID NO: 695735 - protein, 15 aa, Homo sapiens
  CDR3 for alpha chain variable domain of TCR clone 347868 (TRAV38-2/DV8, TRAJ57)
CASARAQGGSEKLVL

SEQ ID NO: 695736 - protein, 17 aa, Homo sapiens
  CDR3 for beta chain variable domain of TCR clone 347868 (TRBV18, TRBJ1-5)
CASSPTMGQGTNQHQHF

SEQ ID NO: 695737 - protein, 12 aa, Homo sapiens
  CDR3 for alpha chain variable domain of TCR clone 347869 (TRAV17, TRAJ12)
CATLRSSYKLIF

SEQ ID NO: 695738 - protein, 14 aa, Homo sapiens
  CDR3 for beta chain variable domain of TCR clone 347869 (TRBV19, TRBJ2-1)
CARGARSFQWEQFF

SEQ ID NO: 695739 - protein, 15 aa, Homo sapiens
  CDR3 for alpha chain variable domain of TCR clone 347870 (TRAV35, TRAJ28)
CWAKVLWAGSYQLTF

SEQ ID NO: 695740 - protein, 13 aa, Homo sapiens
  CDR3 for beta chain variable domain of TCR clone 347870 (TRBV19, TRBJ1-2)
CASSQGQVYGYTF

SEQ ID NO: 695741 - protein, 15 aa, Homo sapiens
  CDR3 for alpha chain variable domain of TCR clone 347871 (TRAV8-1, TRAJ6)
CAVNTTPGGSNIPTF

SEQ ID NO: 695742 - protein, 15 aa, Homo sapiens
  CDR3 for beta chain variable domain of TCR clone 347871 (TRBV11-2, TRBJ2-2)
CASSSDRVNAGELFF

SEQ ID NO: 695743 - protein, 10 aa, Homo sapiens
  CDR3 for alpha chain variable domain of TCR clone 347872 (TRAV1-2, TRAJ23)
CAGQGGKLIF

SEQ ID NO: 695744 - protein, 15 aa, Homo sapiens
  CDR3 for beta chain variable domain of TCR clone 347872 (TRBV6-5, TRBJ2-1)
CASSYDAGAGNEQFF

SEQ ID NO: 695745 - protein, 13 aa, Homo sapiens
  CDR3 for alpha chain variable domain of TCR clone 347873 (TRAV1-2, TRAJ9)
CAALNTGGFKTIF

SEQ ID NO: 695746 - protein, 16 aa, Homo sapiens
  CDR3 for beta chain variable domain of TCR clone 347873 (TRBV11-2, TRBJ2-1)
CASSPRLAGVYKEQFF

SEQ ID NO: 695747 - protein, 17 aa, Homo sapiens
  CDR3 for alpha chain variable domain of TCR clone 347874 (TRAV3, TRAJ6)
CAVRDCPRAGGRYIPTF

SEQ ID NO: 695748 - protein, 14 aa, Homo sapiens
  CDR3 for beta chain variable domain of TCR clone 347874 (TRBV7-2, TRBJ2-7)
CASSPKTSFYEQYF

SEQ ID NO: 695749 - protein, 13 aa, Homo sapiens
  CDR3 for alpha chain variable domain of TCR clone 347875 (TRAV22, TRAJ29)
CAVGGSGNTPLVF

SEQ ID NO: 695750 - protein, 15 aa, Homo sapiens
  CDR3 for beta chain variable domain of TCR clone 347875 (TRBV5-1, TRBJ2-1)
CASSPPRAPYNEQFF

SEQ ID NO: 695751 - protein, 20 aa, Homo sapiens
  CDR3 for alpha chain variable domain of TCR clone 347876 (TRAV1-2, TRAJ8)
CAVREDTGFRNLYLELAPDF

SEQ ID NO: 695752 - protein, 17 aa, Homo sapiens
  CDR3 for beta chain variable domain of TCR clone 347876 (TRBV20-1, TRBJ2-2)
CSASGSGQGGSTGELFF

SEQ ID NO: 695753 - protein, 19 aa, Homo sapiens
  CDR3 for alpha chain variable domain of TCR clone 347877 (TRAV29/DV5, TRAJ49)
CSVLLCSKLTVDTGNQFYF

SEQ ID NO: 695754 - protein, 14 aa, Homo sapiens
  CDR3 for beta chain variable domain of TCR clone 347877 (TRBV5-4, TRBJ1-4)
CASSLNLGREKLFF

SEQ ID NO: 695755 - protein, 15 aa, Homo sapiens
  CDR3 for alpha chain variable domain of TCR clone 347878 (TRAV5, TRAJ50)
CAESLTKTSYDKVIF

SEQ ID NO: 695756 - protein, 15 aa, Homo sapiens
  CDR3 for beta chain variable domain of TCR clone 347878 (TRBV7-9, TRBJ1-4)
CASSRTGGFNEKLFF

SEQ ID NO: 695757 - protein, 12 aa, Homo sapiens
  CDR3 for alpha chain variable domain of TCR clone 347879 (TRAV38-1, TRAJ20)
CAFIWNDYKLSF

SEQ ID NO: 695758 - protein, 14 aa, Homo sapiens
  CDR3 for beta chain variable domain of TCR clone 347879 (TRBV27, TRBJ1-1)
CASSPQGKMAEAFF

SEQ ID NO: 695759 - protein, 17 aa, Homo sapiens
  CDR3 for alpha chain variable domain of TCR clone 347880 (TRAV3, TRAJ6)
CAVRDGPRAGGRYIPTF

SEQ ID NO: 695760 - protein, 14 aa, Homo sapiens
  CDR3 for beta chain variable domain of TCR clone 347880 (TRBV7-2, TRBJ2-7)
CASSPKTRFYEQYF

SEQ ID NO: 695761 - protein, 12 aa, Homo sapiens
  CDR3 for alpha chain variable domain of TCR clone 347881 (TRAV21, TRAJ33)
CAKMDSNYQLIC

SEQ ID NO: 695762 - protein, 14 aa, Homo sapiens
  CDR3 for beta chain variable domain of TCR clone 347881 (TRBV2, TRBJ2-7)
CASSLPSGGYEQYF

SEQ ID NO: 695763 - protein, 13 aa, Homo sapiens
  CDR3 for alpha chain variable domain of TCR clone 347882 (TRAV16, TRAJ34)
CALISYNTDKLIF

SEQ ID NO: 695764 - protein, 18 aa, Homo sapiens
  CDR3 for beta chain variable domain of TCR clone 347882 (TRBV11-2, TRBJ2-3)
CASSLGGASRGAPNTQYF

SEQ ID NO: 695765 - protein, 13 aa, Homo sapiens
  CDR3 for alpha chain variable domain of TCR clone 347883 (TRAV25, TRAJ58)
CAGRRTSGSRLTF

SEQ ID NO: 695766 - protein, 17 aa, Homo sapiens
  CDR3 for beta chain variable domain of TCR clone 347883 (TRBV11-3, TRBJ2-6)
CASKWGQGLSGANVLTF

SEQ ID NO: 695767 - protein, 13 aa, Homo sapiens
  CDR3 for alpha chain variable domain of TCR clone 347884 (TRAV8-4, TRAJ10)
CAAFTGGGNKLTF

SEQ ID NO: 695768 - protein, 15 aa, Homo sapiens
  CDR3 for beta chain variable domain of TCR clone 347884 (TRBV19, TRBJ1-1)
CASTSGQIQNTEAFF

SEQ ID NO: 695769 - protein, 14 aa, Homo sapiens
  CDR3 for alpha chain variable domain of TCR clone 347885 (TRAV21, TRAJ35)
CAVMPIGFGNVLHC

SEQ ID NO: 695770 - protein, 12 aa, Homo sapiens
  CDR3 for beta chain variable domain of TCR clone 347885 (TRBV7-9, TRBJ2-7)
CASSIKRQEQYF

SEQ ID NO: 695771 - protein, 12 aa, Homo sapiens
  CDR3 for alpha chain variable domain of TCR clone 347886 (TRAV12-3, TRAJ17)
CAMTLTGNKLTF

SEQ ID NO: 695772 - protein, 15 aa, Homo sapiens
  CDR3 for beta chain variable domain of TCR clone 347886 (TRBV20-1, TRBJ2-7)
CSARDRVSGIYEQYF

SEQ ID NO: 695773 - protein, 14 aa, Homo sapiens
  CDR3 for alpha chain variable domain of TCR clone 347887 (TRAV1-1, TRAJ35)
CAVRSIGFGNVLHF

SEQ ID NO: 695774 - protein, 16 aa, Homo sapiens
  CDR3 for beta chain variable domain of TCR clone 347887 (TRBV6-1, TRBJ2-5)
CASSETLDRGAETQYF

SEQ ID NO: 695775 - protein, 16 aa, Homo sapiens
  CDR3 for alpha chain variable domain of TCR clone 347888 (TRAV17, TRAJ52)
CATGIIGGTSYGKLTF

SEQ ID NO: 695776 - protein, 13 aa, Homo sapiens
  CDR3 for beta chain variable domain of TCR clone 347888 (TRBV19, TRBJ2-7)
CASSPRQSYEQYF

SEQ ID NO: 695777 - protein, 12 aa, Homo sapiens
  CDR3 for alpha chain variable domain of TCR clone 347889 (TRAV21, TRAJ37)
CAVRGNTGKLIF

SEQ ID NO: 695778 - protein, 15 aa, Homo sapiens
  CDR3 for beta chain variable domain of TCR clone 347889 (TRBV2, TRBJ2-1)
CATLPSGLPYNEQFF

SEQ ID NO: 695779 - protein, 12 aa, Homo sapiens
  CDR3 for alpha chain variable domain of TCR clone 347890 (TRAV9-2, TRAJ57)
CALRSGSEKLVF

SEQ ID NO: 695780 - protein, 15 aa, Homo sapiens
  CDR3 for beta chain variable domain of TCR clone 347890 (TRBV15, TRBJ1-1)
CATSLQGGRNTEAVF

SEQ ID NO: 695781 - protein, 18 aa, Homo sapiens
  CDR3 for alpha chain variable domain of TCR clone 347891 (TRAV12-2, )
CAVEDIQNPDPAVYHLRD

SEQ ID NO: 695782 - protein, 16 aa, Homo sapiens
  CDR3 for beta chain variable domain of TCR clone 347891 (TRBV6-1, TRBJ1-2)
CASSGAWQGRSHGYTF

SEQ ID NO: 695783 - protein, 16 aa, Homo sapiens
  CDR3 for alpha chain variable domain of TCR clone 347892 (TRAV12-2, TRAJ43)
CAGDDMRFGAGTRLTV

SEQ ID NO: 695784 - protein, 16 aa, Homo sapiens
  CDR3 for beta chain variable domain of TCR clone 347892 (TRBV2, TRBJ2-4)
CSSSEAPGGEQNIQYF

SEQ ID NO: 695785 - protein, 13 aa, Homo sapiens
  CDR3 for alpha chain variable domain of TCR clone 347893 (TRAV1-2, TRAJ12)
CAAWMDSSYKLIF

SEQ ID NO: 695786 - protein, 13 aa, Homo sapiens
  CDR3 for beta chain variable domain of TCR clone 347893 (TRBV7-3, TRBJ1-1)
CASSQDWGAEAFF

SEQ ID NO: 695787 - protein, 14 aa, Homo sapiens
  CDR3 for alpha chain variable domain of TCR clone 347894 (TRAV9-2, TRAJ39)
CALYIYNAGKMLTF

SEQ ID NO: 695788 - protein, 13 aa, Homo sapiens
  CDR3 for beta chain variable domain of TCR clone 347894 (TRBV7-2, TRBJ2-2)
CASSLAVTGELFF

SEQ ID NO: 695789 - protein, 15 aa, Homo sapiens
  CDR3 for alpha chain variable domain of TCR clone 347895 (TRAV12-2, TRAJ43)
CAFDMRFGAGTRLTE

SEQ ID NO: 695790 - protein, 17 aa, Homo sapiens
  CDR3 for beta chain variable domain of TCR clone 347895 (TRBV13, TRBJ2-3)
CASSLSRVAGGRNTQYF

SEQ ID NO: 695791 - protein, 17 aa, Homo sapiens
  CDR3 for alpha chain variable domain of TCR clone 347896 (TRAV3, TRAJ42)
CGVRDRDYGGSQGNLIF

SEQ ID NO: 695792 - protein, 15 aa, Homo sapiens
  CDR3 for beta chain variable domain of TCR clone 347896 (TRBV6-6, TRBJ2-7)
CASSYSYGGSYEQYF

SEQ ID NO: 695793 - protein, 14 aa, Homo sapiens
  CDR3 for alpha chain variable domain of TCR clone 347897 (TRAV26-2, TRAJ31)
CCVLLPLNNARLIF

SEQ ID NO: 695794 - protein, 15 aa, Homo sapiens
  CDR3 for beta chain variable domain of TCR clone 347897 (TRBV28, TRBJ2-1)
CASSIIAGGRSEQFF

SEQ ID NO: 695795 - protein, 14 aa, Homo sapiens
  CDR3 for alpha chain variable domain of TCR clone 347898 (TRAV26-1, TRAJ38)
CIADNAGNNRKLYW

SEQ ID NO: 695796 - protein, 13 aa, Homo sapiens
  CDR3 for beta chain variable domain of TCR clone 347898 (TRBV20-1, TRBJ1-1)
CSARGGGNTEAFF

SEQ ID NO: 695797 - protein, 13 aa, Homo sapiens
  CDR3 for alpha chain variable domain of TCR clone 347899 (TRAV1-1, TRAJ9)
CAAKNTGGFKTIF

SEQ ID NO: 695798 - protein, 13 aa, Homo sapiens
  CDR3 for beta chain variable domain of TCR clone 347899 (TRBV12-4, TRBJ1-2)
CASSSGLTVISTF

SEQ ID NO: 695799 - protein, 16 aa, Homo sapiens
  CDR3 for alpha chain variable domain of TCR clone 347900 (TRAV30, TRAJ24)
CGTEIVDADSWRKFQF

SEQ ID NO: 695800 - protein, 14 aa, Homo sapiens
  CDR3 for beta chain variable domain of TCR clone 347900 (TRBV12-5, TRBJ2-5)
CASGSRTHQETQDF

SEQ ID NO: 695801 - protein, 15 aa, Homo sapiens
  CDR3 for alpha chain variable domain of TCR clone 347901 (TRAV8-4, TRAJ9)
CAVSDLEGGGFKTIF

SEQ ID NO: 695802 - protein, 19 aa, Homo sapiens
  CDR3 for beta chain variable domain of TCR clone 347901 (TRBV25-1, TRBJ2-2)
CAILVYRVDRGRKTGELFF

SEQ ID NO: 695803 - protein, 11 aa, Homo sapiens
  CDR3 for alpha chain variable domain of TCR clone 347902 (TRAV12-3, TRAJ27)
CAMANEANQPL

SEQ ID NO: 695804 - protein, 13 aa, Homo sapiens
  CDR3 for beta chain variable domain of TCR clone 347902 (TRBV20-1, TRBJ1-1)
CSARVGGNTEAFF

SEQ ID NO: 695805 - protein, 14 aa, Homo sapiens
  CDR3 for alpha chain variable domain of TCR clone 347903 (TRAV2, TRAJ37)
CAVDFTSNTGKLIF

SEQ ID NO: 695806 - protein, 13 aa, Homo sapiens
  CDR3 for beta chain variable domain of TCR clone 347903 (TRBV4-1, TRBJ2-2)
CASSQENTRELFF

SEQ ID NO: 695807 - protein, 15 aa, Homo sapiens
  CDR3 for alpha chain variable domain of TCR clone 347904 (TRAV12-1, TRAJ8)
CVVNVENTGFQKIVF

SEQ ID NO: 695808 - protein, 15 aa, Homo sapiens
  CDR3 for beta chain variable domain of TCR clone 347904 (TRBV12-4, TRBJ1-6)
CASSLGQGFRSPLHF

SEQ ID NO: 695809 - protein, 18 aa, Homo sapiens
  CDR3 for alpha chain variable domain of TCR clone 347905 (TRAV23/DV6, TRAJ21)
CAASSGGGTTSTTFTLDL

SEQ ID NO: 695810 - protein, 11 aa, Homo sapiens
  CDR3 for beta chain variable domain of TCR clone 347905 (TRBV7-8, TRBJ2-7)
CASSLSLEQYF

SEQ ID NO: 695811 - protein, 12 aa, Homo sapiens
  CDR3 for alpha chain variable domain of TCR clone 347906 (TRAV23/DV6, TRAJ49)
CAASNDGNQFHF

SEQ ID NO: 695812 - protein, 14 aa, Homo sapiens
  CDR3 for beta chain variable domain of TCR clone 347906 (TRBV18, TRBJ1-2)
CASSPSRTGNGYTF

SEQ ID NO: 695813 - protein, 16 aa, Homo sapiens
  CDR3 for alpha chain variable domain of TCR clone 347907 (TRAV12-3, TRAJ10)
CAMKKGITGGGNKLTF

SEQ ID NO: 695814 - protein, 16 aa, Homo sapiens
  CDR3 for beta chain variable domain of TCR clone 347907 (TRBV19, TRBJ2-1)
CASSKAGPSSYNEQFF

SEQ ID NO: 695815 - protein, 23 aa, Homo sapiens
  CDR3 for alpha chain variable domain of TCR clone 347908 (TRAV8-6, TRAJ38)
CAVRNAGNNHIQNPDPTVYQLRD

SEQ ID NO: 695816 - protein, 15 aa, Homo sapiens
  CDR3 for beta chain variable domain of TCR clone 347908 (TRBV4-1, TRBJ2-2)
CASSEGQGITGELFF

SEQ ID NO: 695817 - protein, 16 aa, Homo sapiens
  CDR3 for alpha chain variable domain of TCR clone 347909 (TRAV26-1, TRAJ22)
CIVRVPSSGSARQLTF

SEQ ID NO: 695818 - protein, 13 aa, Homo sapiens
  CDR3 for beta chain variable domain of TCR clone 347909 (TRBV7-9, TRBJ2-5)
CASTPVGQETQYF

SEQ ID NO: 695819 - protein, 23 aa, Homo sapiens
  CDR3 for alpha chain variable domain of TCR clone 347910 (TRAV26-1, TRAJ38)
CIVRPLNAGNNHIQNPDPAVYQL

SEQ ID NO: 695820 - protein, 13 aa, Homo sapiens
  CDR3 for beta chain variable domain of TCR clone 347910 (TRBV18, TRBJ1-1)
CASSSNGDTEDFF

SEQ ID NO: 695821 - protein, 16 aa, Homo sapiens
  CDR3 for alpha chain variable domain of TCR clone 347911 (TRAV26-1, TRAJ53)
CTVRVAMGGSNYKLTF

SEQ ID NO: 695822 - protein, 12 aa, Homo sapiens
  CDR3 for beta chain variable domain of TCR clone 347911 (TRBV7-9, TRBJ1-5)
CASSPRGQPQHF

SEQ ID NO: 695823 - protein, 16 aa, Homo sapiens
  CDR3 for alpha chain variable domain of TCR clone 347912 (TRAV3, TRAJ27)
CAVRDPQGTNAGNSTF

SEQ ID NO: 695824 - protein, 14 aa, Homo sapiens
  CDR3 for beta chain variable domain of TCR clone 347912 (TRBV7-2, TRBJ2-7)
CASRSQGAAYEQYF

SEQ ID NO: 695825 - protein, 13 aa, Homo sapiens
  CDR3 for alpha chain variable domain of TCR clone 347913 (TRAV1-2, TRAJ9)
CAALNTGGFKTIF

SEQ ID NO: 695826 - protein, 16 aa, Homo sapiens
  CDR3 for beta chain variable domain of TCR clone 347913 (TRBV3-1, TRBJ1-2)
CASSQGQGVQRDGYTF

SEQ ID NO: 695827 - protein, 14 aa, Homo sapiens
  CDR3 for alpha chain variable domain of TCR clone 347914 (TRAV16, TRAJ4)
CALHFSGGYNKLIS

SEQ ID NO: 695828 - protein, 15 aa, Homo sapiens
  CDR3 for beta chain variable domain of TCR clone 347914 (TRBV7-2, TRBJ2-7)
CASSTRQAGVDEQYF

SEQ ID NO: 695829 - protein, 17 aa, Homo sapiens
  CDR3 for alpha chain variable domain of TCR clone 347915 (TRAV26-2, TRAJ42)
CILSDVGYGGSQGNLIF

SEQ ID NO: 695830 - protein, 16 aa, Homo sapiens
  CDR3 for beta chain variable domain of TCR clone 347915 (TRBV12-4, TRBJ2-7)
CASSLIGGTGTYGQYF

SEQ ID NO: 695831 - protein, 13 aa, Homo sapiens
  CDR3 for alpha chain variable domain of TCR clone 347916 (TRAV23/DV6, TRAJ12)
CAPRVDSSYKLIF

SEQ ID NO: 695832 - protein, 12 aa, Homo sapiens
  CDR3 for beta chain variable domain of TCR clone 347916 (TRBV7-8, TRBJ2-7)
CASSLGVREQYF

SEQ ID NO: 695833 - protein, 13 aa, Homo sapiens
  CDR3 for alpha chain variable domain of TCR clone 347917 (TRAV23/DV6, TRAJ58)
CAASEIGGSRLTF

SEQ ID NO: 695834 - protein, 15 aa, Homo sapiens
  CDR3 for beta chain variable domain of TCR clone 347917 (TRBV19, TRBJ1-1)
CASTSGQIQNTEVFF

SEQ ID NO: 695835 - protein, 14 aa, Homo sapiens
  CDR3 for alpha chain variable domain of TCR clone 347918 (TRAV16, TRAJ33)
CALSALDSNYQLIW

SEQ ID NO: 695836 - protein, 17 aa, Homo sapiens
  CDR3 for beta chain variable domain of TCR clone 347918 (TRBV25-1, TRBJ2-7)
CASSDARVVFSSYEQYF

SEQ ID NO: 695837 - protein, 14 aa, Homo sapiens
  CDR3 for alpha chain variable domain of TCR clone 347919 (TRAV20, TRAJ42)
CAVQAGGRQGNLIL

SEQ ID NO: 695838 - protein, 14 aa, Homo sapiens
  CDR3 for beta chain variable domain of TCR clone 347919 (TRBV28, TRBJ1-2)
CASRIQGANYGYTF

SEQ ID NO: 695839 - protein, 14 aa, Homo sapiens
  CDR3 for alpha chain variable domain of TCR clone 347920 (TRAV27, TRAJ23)
CAGAFDNQGGQLIF

SEQ ID NO: 695840 - protein, 15 aa, Homo sapiens
  CDR3 for beta chain variable domain of TCR clone 347920 (TRBV7-3, TRBJ2-7)
CASSLTGQGKYEQYF

SEQ ID NO: 695841 - protein, 13 aa, Homo sapiens
  CDR3 for alpha chain variable domain of TCR clone 347921 (TRAV12-3, TRAJ40)
CAMSDSGTYKYIF

SEQ ID NO: 695842 - protein, 15 aa, Homo sapiens
  CDR3 for beta chain variable domain of TCR clone 347921 (TRBV7-2, TRBJ2-3)
CASSSTGLETDTQYF

SEQ ID NO: 695843 - protein, 14 aa, Homo sapiens
  CDR3 for alpha chain variable domain of TCR clone 347922 (TRAV1-2, TRAJ8)
WAVREDTGFQKLVF

SEQ ID NO: 695844 - protein, 16 aa, Homo sapiens
  CDR3 for beta chain variable domain of TCR clone 347922 (TRBV19, TRBJ2-1)
CASSKAGPSSYNEQFF

SEQ ID NO: 695845 - protein, 11 aa, Homo sapiens
  CDR3 for alpha chain variable domain of TCR clone 347923 (TRAV1-2, TRAJ20)
CAVANGYKLSF

SEQ ID NO: 695846 - protein, 16 aa, Homo sapiens
  CDR3 for beta chain variable domain of TCR clone 347923 (TRBV5-5, TRBJ2-2)
CASSGRREGATGELFF

SEQ ID NO: 695847 - protein, 16 aa, Homo sapiens
  CDR3 for alpha chain variable domain of TCR clone 347924 (TRAV14/DV4, TRAJ17)
CAMREAGRAAGNKLTF

SEQ ID NO: 695848 - protein, 16 aa, Homo sapiens
  CDR3 for beta chain variable domain of TCR clone 347924 (TRBV7-9, TRBJ2-1)
CASSDVAGGSYNEQFF

SEQ ID NO: 695849 - protein, 18 aa, Homo sapiens
  CDR3 for alpha chain variable domain of TCR clone 347925 (TRAV21, TRAJ52)
CAVRPSPAGGTSYGKLTF

SEQ ID NO: 695850 - protein, 15 aa, Homo sapiens
  CDR3 for beta chain variable domain of TCR clone 347925 (TRBV4-2, TRBJ1-4)
CASSLVQREVEKLFF

SEQ ID NO: 695851 - protein, 14 aa, Homo sapiens
  CDR3 for alpha chain variable domain of TCR clone 347926 (TRAV12-2, TRAJ9)
CAVNLNTGGFKTIF

SEQ ID NO: 695852 - protein, 17 aa, Homo sapiens
  CDR3 for beta chain variable domain of TCR clone 347926 (TRBV20-1, TRBJ2-2)
SSASRQVGQGYTGELFF

SEQ ID NO: 695853 - protein, 14 aa, Homo sapiens
  CDR3 for alpha chain variable domain of TCR clone 347927 (TRAV2, TRAJ9)
CAVEDRSGGVKTIF

SEQ ID NO: 695854 - protein, 15 aa, Homo sapiens
  CDR3 for beta chain variable domain of TCR clone 347927 (TRBV7-3, TRBJ2-7)
CASSPEEGSSYEQYF

SEQ ID NO: 695855 - protein, 12 aa, Homo sapiens
  CDR3 for alpha chain variable domain of TCR clone 347928 (TRAV21, TRAJ27)
CAANTNAGKSTF

SEQ ID NO: 695856 - protein, 15 aa, Homo sapiens
  CDR3 for beta chain variable domain of TCR clone 347928 (TRBV29-1, TRBJ1-4)
CSVVGIGDFNEKLFF

SEQ ID NO: 695857 - protein, 17 aa, Homo sapiens
  CDR3 for alpha chain variable domain of TCR clone 347929 (TRAV8-6, TRAJ58)
CAVSSWVGETSGSRFTF

SEQ ID NO: 695858 - protein, 14 aa, Homo sapiens
  CDR3 for beta chain variable domain of TCR clone 347929 (TRBV19, TRBJ2-1)
CASPTFVLSGEQFF

SEQ ID NO: 695859 - protein, 12 aa, Homo sapiens
  CDR3 for alpha chain variable domain of TCR clone 347930 (TRAV13-2, TRAJ23)
CAERHRGGKLII

SEQ ID NO: 695860 - protein, 13 aa, Homo sapiens
  CDR3 for beta chain variable domain of TCR clone 347930 (TRBV7-9, TRBJ1-2)
CASSLKQNYGYTF

SEQ ID NO: 695861 - protein, 14 aa, Homo sapiens
  CDR3 for alpha chain variable domain of TCR clone 347931 (TRAV16, TRAJ33)
CALSAMDSNYQLIW

SEQ ID NO: 695862 - protein, 15 aa, Homo sapiens
  CDR3 for beta chain variable domain of TCR clone 347931 (TRBV10-2, TRBJ2-6)
CASSEQGTGANVLTF

SEQ ID NO: 695863 - protein, 16 aa, Homo sapiens
  CDR3 for alpha chain variable domain of TCR clone 347932 (TRAV30, TRAJ24)
CGTEIVDADSWGKFQF

SEQ ID NO: 695864 - protein, 14 aa, Homo sapiens
  CDR3 for beta chain variable domain of TCR clone 347932 (TRBV12-5, TRBJ2-5)
CASSSRTHQGTQYF

SEQ ID NO: 695865 - protein, 16 aa, Homo sapiens
  CDR3 for alpha chain variable domain of TCR clone 347933 (TRAV12-2, TRAJ40)
CAVIRGGTSGTYKYIF

SEQ ID NO: 695866 - protein, 14 aa, Homo sapiens
  CDR3 for beta chain variable domain of TCR clone 347933 (TRBV28, TRBJ2-3)
CASSWRGRADTQYF

SEQ ID NO: 695867 - protein, 17 aa, Homo sapiens
  CDR3 for alpha chain variable domain of TCR clone 347934 (TRAV3, TRAJ6)
CTVRDGPRAGGSYIPTS

SEQ ID NO: 695868 - protein, 14 aa, Homo sapiens
  CDR3 for beta chain variable domain of TCR clone 347934 (TRBV7-2, TRBJ2-7)
CASSPKTSFYEQYF

SEQ ID NO: 695869 - protein, 14 aa, Homo sapiens
  CDR3 for alpha chain variable domain of TCR clone 347935 (TRAV1-2, TRAJ8)
CAVREDTGFQKLVF

SEQ ID NO: 695870 - protein, 15 aa, Homo sapiens
  CDR3 for beta chain variable domain of TCR clone 347935 (TRBV15, TRBJ1-1)
CATSLQGGRNTEAFY

SEQ ID NO: 695871 - protein, 17 aa, Homo sapiens
  CDR3 for alpha chain variable domain of TCR clone 347936 (TRAV3, TRAJ6)
CAVRDGPRAGGSYIPKF

SEQ ID NO: 695872 - protein, 19 aa, Homo sapiens
  CDR3 for beta chain variable domain of TCR clone 347936 (TRBV25-1, TRBJ2-2)
CAILVYRVDRGHKTGELFF

SEQ ID NO: 695873 - protein, 17 aa, Homo sapiens
  CDR3 for alpha chain variable domain of TCR clone 347937 (TRAV8-6, TRAJ58)
CAVSSWLGETSGSRLTF

SEQ ID NO: 695874 - protein, 13 aa, Homo sapiens
  CDR3 for beta chain variable domain of TCR clone 347937 (TRBV4-2, TRBJ1-1)
CASSQAGNTEAFF

SEQ ID NO: 695875 - protein, 14 aa, Homo sapiens
  CDR3 for alpha chain variable domain of TCR clone 347938 (TRAV12-3, TRAJ10)
SYLPLTGGGNKLTF

SEQ ID NO: 695876 - protein, 15 aa, Homo sapiens
  CDR3 for beta chain variable domain of TCR clone 347938 (TRBV11-3, TRBJ2-3)
CASLKDGREGDTQYF

SEQ ID NO: 695877 - protein, 14 aa, Homo sapiens
  CDR3 for alpha chain variable domain of TCR clone 347939 (TRAV14/DV4, TRAJ7)
CAMREAYGNNILAF

SEQ ID NO: 695878 - protein, 15 aa, Homo sapiens
  CDR3 for beta chain variable domain of TCR clone 347939 (TRBV19, TRBJ2-1)
CASSINREPSHEQFF

SEQ ID NO: 695879 - protein, 11 aa, Homo sapiens
  CDR3 for alpha chain variable domain of TCR clone 347940 (TRAV23/DV6, TRAJ58)
CAARLLRGETS

SEQ ID NO: 695880 - protein, 13 aa, Homo sapiens
  CDR3 for beta chain variable domain of TCR clone 347940 (TRBV13, TRBJ2-4)
CASSLAGADIQYF

SEQ ID NO: 695881 - protein, 12 aa, Homo sapiens
  CDR3 for alpha chain variable domain of TCR clone 347941 (TRAV12-2, TRAJ43)
CAALPVTDDMRF

SEQ ID NO: 695882 - protein, 14 aa, Homo sapiens
  CDR3 for beta chain variable domain of TCR clone 347941 (TRBV4-1, TRBJ1-2)
CASSVGQGGYGYTF

SEQ ID NO: 695883 - protein, 12 aa, Homo sapiens
  CDR3 for alpha chain variable domain of TCR clone 347942 (TRAV13-1, TRAJ21)
CAAKEGFNKFYF

SEQ ID NO: 695884 - protein, 16 aa, Homo sapiens
  CDR3 for beta chain variable domain of TCR clone 347942 (TRBV7-8, TRBJ2-4)
CASSAERTLAKNSQYF

SEQ ID NO: 695885 - protein, 11 aa, Homo sapiens
  CDR3 for alpha chain variable domain of TCR clone 347943 (TRAV12-1, TRAJ30)
CVVNGQDKSIF

SEQ ID NO: 695886 - protein, 13 aa, Homo sapiens
  CDR3 for beta chain variable domain of TCR clone 347943 (TRBV19, TRBJ1-2)
CASSQGQVYGYTF

SEQ ID NO: 695887 - protein, 14 aa, Homo sapiens
  CDR3 for alpha chain variable domain of TCR clone 347944 (TRAV2, TRAJ37)
CAVDFTSNTGKLIF

SEQ ID NO: 695888 - protein, 13 aa, Homo sapiens
  CDR3 for beta chain variable domain of TCR clone 347944 (TRBV20-1, TRBJ1-1)
CSSPLGGGTEAFF

SEQ ID NO: 695889 - protein, 12 aa, Homo sapiens
  CDR3 for alpha chain variable domain of TCR clone 347945 (TRAV3, TRAJ43)
CAVRDPNNDMRF

SEQ ID NO: 695890 - protein, 15 aa, Homo sapiens
  CDR3 for beta chain variable domain of TCR clone 347945 (TRBV7-7, TRBJ1-5)
CASSLGTGFDQPQHF

SEQ ID NO: 695891 - protein, 12 aa, Homo sapiens
  CDR3 for alpha chain variable domain of TCR clone 347946 (TRAV3, TRAJ43)
CALRDPNNDMRF

SEQ ID NO: 695892 - protein, 15 aa, Homo sapiens
  CDR3 for beta chain variable domain of TCR clone 347946 (TRBV11-1, TRBJ1-5)
CASSLGTGFDQPQHF

SEQ ID NO: 695893 - protein, 14 aa, Homo sapiens
  CDR3 for alpha chain variable domain of TCR clone 347947 (TRAV4, TRAJ10)
CLVGDTGGGNKLTF

SEQ ID NO: 695894 - protein, 18 aa, Homo sapiens
  CDR3 for beta chain variable domain of TCR clone 347947 (TRBV11-2, TRBJ2-3)
CASSLGGASRGAPNTQYF

SEQ ID NO: 695895 - protein, 12 aa, Homo sapiens
  CDR3 for alpha chain variable domain of TCR clone 347948 (TRAV21, TRAJ58)
CALSASGSRLTF

SEQ ID NO: 695896 - protein, 12 aa, Homo sapiens
  CDR3 for beta chain variable domain of TCR clone 347948 (TRBV27, TRBJ2-2)
CASSFLPGELFF

SEQ ID NO: 695897 - protein, 14 aa, Homo sapiens
  CDR3 for alpha chain variable domain of TCR clone 347949 (TRAV12-2, TRAJ17)
CAVLFKAAGNKLTF

SEQ ID NO: 695898 - protein, 17 aa, Homo sapiens
  CDR3 for beta chain variable domain of TCR clone 347949 (TRBV23-1, TRBJ2-7)
CISAPAVNDSTSYEQYF

SEQ ID NO: 695899 - protein, 14 aa, Homo sapiens
  CDR3 for alpha chain variable domain of TCR clone 347950 (TRAV3, TRAJ37)
CAVKESGNTGKLIF

SEQ ID NO: 695900 - protein, 13 aa, Homo sapiens
  CDR3 for beta chain variable domain of TCR clone 347950 (TRBV4-3, TRBJ1-1)
CASSQVEGSMAFF

SEQ ID NO: 695901 - protein, 16 aa, Homo sapiens
  CDR3 for alpha chain variable domain of TCR clone 347951 (TRAV12-3, TRAJ53)
CAMSPGSGGSNYKMTF

SEQ ID NO: 695902 - protein, 13 aa, Homo sapiens
  CDR3 for beta chain variable domain of TCR clone 347951 (TRBV19, TRBJ1-2)
CASSVPGQDGYTF

SEQ ID NO: 695903 - protein, 13 aa, Homo sapiens
  CDR3 for alpha chain variable domain of TCR clone 347952 (TRAV29/DV5, TRAJ31)
CSASRNNNARLMF

SEQ ID NO: 695904 - protein, 14 aa, Homo sapiens
  CDR3 for beta chain variable domain of TCR clone 347952 (TRBV7-9, TRBJ2-2)
CASSLVQDTGELFF

SEQ ID NO: 695905 - protein, 14 aa, Homo sapiens
  CDR3 for alpha chain variable domain of TCR clone 347953 (TRAV8-3, TRAJ17)
CAVGAQTAGNKLTF

SEQ ID NO: 695906 - protein, 17 aa, Homo sapiens
  CDR3 for beta chain variable domain of TCR clone 347953 (TRBV20-1, TRBJ2-1)
CSASSSGLAGSYNEQLF

SEQ ID NO: 695907 - protein, 14 aa, Homo sapiens
  CDR3 for alpha chain variable domain of TCR clone 347954 (TRAV12-2, TRAJ53)
CAVKGGGSNYKLTF

SEQ ID NO: 695908 - protein, 15 aa, Homo sapiens
  CDR3 for beta chain variable domain of TCR clone 347954 (TRBV7-2, TRBJ1-2)
CASSLVSGGDYGYTF

SEQ ID NO: 695909 - protein, 14 aa, Homo sapiens
  CDR3 for alpha chain variable domain of TCR clone 347955 (TRAV1-2, TRAJ8)
CAVREDTGFQKLVF

SEQ ID NO: 695910 - protein, 14 aa, Homo sapiens
  CDR3 for beta chain variable domain of TCR clone 347955 (TRBV6-1, TRBJ2-1)
CASSLGDGWDEQFF

SEQ ID NO: 695911 - protein, 13 aa, Homo sapiens
  CDR3 for alpha chain variable domain of TCR clone 347956 (TRAV2, TRAJ40)
SAVATSGTYKYIF

SEQ ID NO: 695912 - protein, 15 aa, Homo sapiens
  CDR3 for beta chain variable domain of TCR clone 347956 (TRBV11-3, TRBJ2-3)
CASLKDGREGDTQYF

SEQ ID NO: 695913 - protein, 14 aa, Homo sapiens
  CDR3 for alpha chain variable domain of TCR clone 347957 (TRAV3, TRAJ8)
CAVSLNPGFQKLVF

SEQ ID NO: 695914 - protein, 14 aa, Homo sapiens
  CDR3 for beta chain variable domain of TCR clone 347957 (TRBV6-6, TRBJ1-5)
RASVDSGFNQPQHF

SEQ ID NO: 695915 - protein, 14 aa, Homo sapiens
  CDR3 for alpha chain variable domain of TCR clone 347958 (TRAV12-3, TRAJ42)
CAMNYGGSQGNLIF

SEQ ID NO: 695916 - protein, 13 aa, Homo sapiens
  CDR3 for beta chain variable domain of TCR clone 347958 (TRBV20-1, TRBJ1-6)
CSAPLGVGSPLLF

SEQ ID NO: 695917 - protein, 14 aa, Homo sapiens
  CDR3 for alpha chain variable domain of TCR clone 347959 (TRAV13-1, TRAJ44)
CAAKATGTASKLTF

SEQ ID NO: 695918 - protein, 14 aa, Homo sapiens
  CDR3 for beta chain variable domain of TCR clone 347959 (TRBV7-2, TRBJ2-7)
CASSLYPGRYEQYF

SEQ ID NO: 695919 - protein, 15 aa, Homo sapiens
  CDR3 for alpha chain variable domain of TCR clone 347960 (TRAV3, TRAJ20)
CAVRDIKLSDYKLSF

SEQ ID NO: 695920 - protein, 13 aa, Homo sapiens
  CDR3 for beta chain variable domain of TCR clone 347960 (TRBV20-1, TRBJ1-1)
CSARVGGNTEAFC

SEQ ID NO: 695921 - protein, 13 aa, Homo sapiens
  CDR3 for alpha chain variable domain of TCR clone 347961 (TRAV8-6, TRAJ34)
GAVSDQGTDKLIF

SEQ ID NO: 695922 - protein, 14 aa, Homo sapiens
  CDR3 for beta chain variable domain of TCR clone 347961 (TRBV12-4, TRBJ1-1)
CASTWTGHDTEAFF

SEQ ID NO: 695923 - protein, 14 aa, Homo sapiens
  CDR3 for alpha chain variable domain of TCR clone 347962 (TRAV8-1, TRAJ10)
CAVIFTGGGNKLTF

SEQ ID NO: 695924 - protein, 14 aa, Homo sapiens
  CDR3 for beta chain variable domain of TCR clone 347962 (TRBV19, TRBJ2-7)
CASTVQGRPYEQYF

SEQ ID NO: 695925 - protein, 14 aa, Homo sapiens
  CDR3 for alpha chain variable domain of TCR clone 347963 (TRAV13-1, TRAJ35)
CAASKGGFGNVLHC

SEQ ID NO: 695926 - protein, 15 aa, Homo sapiens
  CDR3 for beta chain variable domain of TCR clone 347963 (TRBV2, TRBJ2-2)
CASSRQGPNTGELFF

SEQ ID NO: 695927 - protein, 11 aa, Homo sapiens
  CDR3 for alpha chain variable domain of TCR clone 347964 (TRAV2, TRAJ33)
CAVESNYQLIW

SEQ ID NO: 695928 - protein, 15 aa, Homo sapiens
  CDR3 for beta chain variable domain of TCR clone 347964 (TRBV27, TRBJ2-1)
CASSLARGAYNEQFF

SEQ ID NO: 695929 - protein, 13 aa, Homo sapiens
  CDR3 for alpha chain variable domain of TCR clone 347965 (TRAV12-1, TRAJ9)
CVVLNTGGFKTIF

SEQ ID NO: 695930 - protein, 14 aa, Homo sapiens
  CDR3 for beta chain variable domain of TCR clone 347965 (TRBV4-1, TRBJ2-3)
CASSQEGSTDTQYF

SEQ ID NO: 695931 - protein, 15 aa, Homo sapiens
  CDR3 for alpha chain variable domain of TCR clone 347966 (TRAV35, TRAJ33)
CAGQPPRYSNYQLIW

SEQ ID NO: 695932 - protein, 13 aa, Homo sapiens
  CDR3 for beta chain variable domain of TCR clone 347966 (TRBV14, TRBJ1-2)
CASSEDRRYGYTF

SEQ ID NO: 695933 - protein, 16 aa, Homo sapiens
  CDR3 for alpha chain variable domain of TCR clone 347967 (TRAV3, TRAJ10)
CAVRVMRAGGGNKLTF

SEQ ID NO: 695934 - protein, 13 aa, Homo sapiens
  CDR3 for beta chain variable domain of TCR clone 347967 (TRBV4-2, TRBJ1-1)
CASSQAGNTEAFF

SEQ ID NO: 695935 - protein, 14 aa, Homo sapiens
  CDR3 for alpha chain variable domain of TCR clone 347968 (TRAV16, TRAJ26)
CALSGCNYGQNFVF

SEQ ID NO: 695936 - protein, 15 aa, Homo sapiens
  CDR3 for beta chain variable domain of TCR clone 347968 (TRBV7-3, TRBJ2-1)
CASSLGQGPFGEQFF

SEQ ID NO: 695937 - protein, 11 aa, Homo sapiens
  CDR3 for alpha chain variable domain of TCR clone 347969 (TRAV14/DV4, TRAJ31)
CAMRENARLMF

SEQ ID NO: 695938 - protein, 15 aa, Homo sapiens
  CDR3 for beta chain variable domain of TCR clone 347969 (TRBV19, TRBJ2-1)
CASSLETSGYNEQFV

SEQ ID NO: 695939 - protein, 13 aa, Homo sapiens
  CDR3 for alpha chain variable domain of TCR clone 347970 (TRAV26-1, TRAJ48)
CIVRVVGDEKLTF

SEQ ID NO: 695940 - protein, 15 aa, Homo sapiens
  CDR3 for beta chain variable domain of TCR clone 347970 (TRBV7-2, TRBJ2-1)
CASSSRTSREDEQFF

SEQ ID NO: 695941 - protein, 11 aa, Homo sapiens
  CDR3 for alpha chain variable domain of TCR clone 347971 (TRAV12-1, TRAJ15)
CVVNEGTALIF

SEQ ID NO: 695942 - protein, 16 aa, Homo sapiens
  CDR3 for beta chain variable domain of TCR clone 347971 (TRBV28, TRBJ2-1)
CASSSRVRDSYNEQFF

SEQ ID NO: 695943 - protein, 14 aa, Homo sapiens
  CDR3 for alpha chain variable domain of TCR clone 347972 (TRAV8-3, TRAJ13)
CAVGAQEGYKKVTF

SEQ ID NO: 695944 - protein, 15 aa, Homo sapiens
  CDR3 for beta chain variable domain of TCR clone 347972 (TRBV3-1, TRBJ1-1)
CASKMRATMNTEAFF

SEQ ID NO: 695945 - protein, 14 aa, Homo sapiens
  CDR3 for alpha chain variable domain of TCR clone 347973 (TRAV16, TRAJ37)
CALDISGNKGKLIF

SEQ ID NO: 695946 - protein, 14 aa, Homo sapiens
  CDR3 for beta chain variable domain of TCR clone 347973 (TRBV7-6, TRBJ2-7)
CASSFRQGADEQYF

SEQ ID NO: 695947 - protein, 16 aa, Homo sapiens
  CDR3 for alpha chain variable domain of TCR clone 347974 (TRAV17, TRAJ22)
CATGPISSGSARQLTF

SEQ ID NO: 695948 - protein, 13 aa, Homo sapiens
  CDR3 for beta chain variable domain of TCR clone 347974 (TRBV11-2, TRBJ2-1)
CASSLALAGGRFF

SEQ ID NO: 695949 - protein, 13 aa, Homo sapiens
  CDR3 for alpha chain variable domain of TCR clone 347975 (TRAV5, TRAJ30)
CAEIANSDDKIIF

SEQ ID NO: 695950 - protein, 14 aa, Homo sapiens
  CDR3 for beta chain variable domain of TCR clone 347975 (TRBV4-1, TRBJ2-2)
CASSQAVNTGELFF

SEQ ID NO: 695951 - protein, 14 aa, Homo sapiens
  CDR3 for alpha chain variable domain of TCR clone 347976 (TRAV26-1, TRAJ34)
CIVRVAYNTDNLIF

SEQ ID NO: 695952 - protein, 15 aa, Homo sapiens
  CDR3 for beta chain variable domain of TCR clone 347976 (TRBV7-9, TRBJ1-4)
CASSRTGGFNETLFF

SEQ ID NO: 695953 - protein, 14 aa, Homo sapiens
  CDR3 for alpha chain variable domain of TCR clone 347977 (TRAV35, TRAJ42)
CAGRYGGSQGNLIF

SEQ ID NO: 695954 - protein, 15 aa, Homo sapiens
  CDR3 for beta chain variable domain of TCR clone 347977 (TRBV7-9, TRBJ2-1)
CASSLGWRRANEQFF

SEQ ID NO: 695955 - protein, 14 aa, Homo sapiens
  CDR3 for alpha chain variable domain of TCR clone 347978 (TRAV17, TRAJ16)
CATADFSDGQKLLF

SEQ ID NO: 695956 - protein, 15 aa, Homo sapiens
  CDR3 for beta chain variable domain of TCR clone 347978 (TRBV18, TRBJ2-1)
CASSPPSDSFNEQFF

SEQ ID NO: 695957 - protein, 14 aa, Homo sapiens
  CDR3 for alpha chain variable domain of TCR clone 347979 (TRAV12-3, TRAJ58)
CAMSTETSGPRLTF

SEQ ID NO: 695958 - protein, 15 aa, Homo sapiens
  CDR3 for beta chain variable domain of TCR clone 347979 (TRBV11-3, TRBJ1-1)
CASSLGGPGDTEAFF

SEQ ID NO: 695959 - protein, 11 aa, Homo sapiens
  CDR3 for alpha chain variable domain of TCR clone 347980 (TRAV30, TRAJ43)
CGPKRHALLSR

SEQ ID NO: 695960 - protein, 13 aa, Homo sapiens
  CDR3 for beta chain variable domain of TCR clone 347980 (TRBV12-4, TRBJ2-2)
CASSITGSGELFF

SEQ ID NO: 695961 - protein, 14 aa, Homo sapiens
  CDR3 for alpha chain variable domain of TCR clone 347981 (TRAV38-2/DV8, TRAJ23)
CAYRSQNQGGKLIF

SEQ ID NO: 695962 - protein, 12 aa, Homo sapiens
  CDR3 for beta chain variable domain of TCR clone 347981 (TRBV24-1, TRBJ2-1)
CHLGGSLNEQFF

SEQ ID NO: 695963 - protein, 15 aa, Homo sapiens
  CDR3 for alpha chain variable domain of TCR clone 347982 (TRAV21, TRAJ10)
CAVRGLTGGGNKLTF

SEQ ID NO: 695964 - protein, 16 aa, Homo sapiens
  CDR3 for beta chain variable domain of TCR clone 347982 (TRBV7-3, TRBJ2-2)
CASSLKRGTLSGELFF

SEQ ID NO: 695965 - protein, 14 aa, Homo sapiens
  CDR3 for alpha chain variable domain of TCR clone 347983 (TRAV8-4, TRAJ13)
CAVTLSGGYQKVTF

SEQ ID NO: 695966 - protein, 16 aa, Homo sapiens
  CDR3 for beta chain variable domain of TCR clone 347983 (TRBV12-4, TRBJ2-7)
CASSLIGGTGTYEQYF

SEQ ID NO: 695967 - protein, 13 aa, Homo sapiens
  CDR3 for alpha chain variable domain of TCR clone 347984 (TRAV2, TRAJ40)
CAVVTSGTYKYLF

SEQ ID NO: 695968 - protein, 15 aa, Homo sapiens
  CDR3 for beta chain variable domain of TCR clone 347984 (TRBV9, TRBJ1-6)
CASSVAGTGDSPLHF

SEQ ID NO: 695969 - protein, 17 aa, Homo sapiens
  CDR3 for alpha chain variable domain of TCR clone 347985 (TRAV26-1, TRAJ53)
CIVTVDDSGGSNYKLTF

SEQ ID NO: 695970 - protein, 15 aa, Homo sapiens
  CDR3 for beta chain variable domain of TCR clone 347985 (TRBV20-1, TRBJ2-7)
CSARVPAAYFYEQYF

SEQ ID NO: 695971 - protein, 16 aa, Homo sapiens
  CDR3 for alpha chain variable domain of TCR clone 347986 (TRAV14/DV4, TRAJ21)
CAMREGPENDFNKFYF

SEQ ID NO: 695972 - protein, 12 aa, Homo sapiens
  CDR3 for beta chain variable domain of TCR clone 347986 (TRBV29-1, TRBJ2-2)
CSVDKYTGELFF

SEQ ID NO: 695973 - protein, 14 aa, Homo sapiens
  CDR3 for alpha chain variable domain of TCR clone 347987 (TRAV13-1, TRAJ40)
CAASMTSGTYKYIF

SEQ ID NO: 695974 - protein, 16 aa, Homo sapiens
  CDR3 for beta chain variable domain of TCR clone 347987 (TRBV19, TRBJ1-6)
CASSVAPVAGNSPLHF

SEQ ID NO: 695975 - protein, 15 aa, Homo sapiens
  CDR3 for alpha chain variable domain of TCR clone 347988 (TRAV17, TRAJ23)
CATDAEDNQGGKLIF

SEQ ID NO: 695976 - protein, 13 aa, Homo sapiens
  CDR3 for beta chain variable domain of TCR clone 347988 (TRBV7-3, TRBJ2-5)
CASSFRGGETQYF

SEQ ID NO: 695977 - protein, 18 aa, Homo sapiens
  CDR3 for alpha chain variable domain of TCR clone 347989 (TRAV12-1, TRAJ52)
CVVKLINAGGTSYGKLTF

SEQ ID NO: 695978 - protein, 17 aa, Homo sapiens
  CDR3 for beta chain variable domain of TCR clone 347989 (TRBV11-2, TRBJ2-1)
CASSLYPPGVEYNEQFF

SEQ ID NO: 695979 - protein, 14 aa, Homo sapiens
  CDR3 for alpha chain variable domain of TCR clone 347990 (TRAV17, TRAJ5)
CATVALTGRRALTF

SEQ ID NO: 695980 - protein, 14 aa, Homo sapiens
  CDR3 for beta chain variable domain of TCR clone 347990 (TRBV19, TRBJ2-7)
CASNFRDTFTGMYF

SEQ ID NO: 695981 - protein, 12 aa, Homo sapiens
  CDR3 for alpha chain variable domain of TCR clone 347991 (TRAV1-1, TRAJ9)
CAVDTGGFKTIF

SEQ ID NO: 695982 - protein, 10 aa, Homo sapiens
  CDR3 for beta chain variable domain of TCR clone 347991 (TRBV20-1, TRBJ2-7)
SAAYFYEQYF

SEQ ID NO: 695983 - protein, 13 aa, Homo sapiens
  CDR3 for alpha chain variable domain of TCR clone 347992 (TRAV21, TRAJ57)
CAVTQGGSEKLVF

SEQ ID NO: 695984 - protein, 16 aa, Homo sapiens
  CDR3 for beta chain variable domain of TCR clone 347992 (TRBV29-1, TRBJ2-7)
CSVEGAADGTAYEQYF

SEQ ID NO: 695985 - protein, 14 aa, Homo sapiens
  CDR3 for alpha chain variable domain of TCR clone 347993 (TRAV27, TRAJ21)
CAGVRQLQQILLWI

SEQ ID NO: 695986 - protein, 16 aa, Homo sapiens
  CDR3 for beta chain variable domain of TCR clone 347993 (TRBV7-9, TRBJ1-4)
CASSLEGQSEKLFLAV

SEQ ID NO: 695987 - protein, 15 aa, Homo sapiens
  CDR3 for alpha chain variable domain of TCR clone 347994 (TRAV26-1, TRAJ9)
CIVRGRNTGGFKTIF

SEQ ID NO: 695988 - protein, 15 aa, Homo sapiens
  CDR3 for beta chain variable domain of TCR clone 347994 (TRBV29-1, TRBJ2-3)
CSVEAGHPSTDTQYF

SEQ ID NO: 695989 - protein, 12 aa, Homo sapiens
  CDR3 for alpha chain variable domain of TCR clone 347995 (TRAV12-3, TRAJ40)
CAMTSGTYKYIF

SEQ ID NO: 695990 - protein, 10 aa, Homo sapiens
  CDR3 for beta chain variable domain of TCR clone 347995 (TRBV7-3, TRBJ2-2)
CASSLTGQGT

SEQ ID NO: 695991 - protein, 14 aa, Homo sapiens
  CDR3 for alpha chain variable domain of TCR clone 347996 (TRAV12-2, TRAJ13)
CAVKKTGGYQKVTF

SEQ ID NO: 695992 - protein, 17 aa, Homo sapiens
  CDR3 for beta chain variable domain of TCR clone 347996 (TRBV27, TRBJ2-1)
CTSVPAVMGEGPNEQFF

SEQ ID NO: 695993 - protein, 18 aa, Homo sapiens
  CDR3 for alpha chain variable domain of TCR clone 347997 (TRAV12-2, TRAJ37)
CAGGSQHRQTNLWARDNF

SEQ ID NO: 695994 - protein, 14 aa, Homo sapiens
  CDR3 for beta chain variable domain of TCR clone 347997 (TRBV6-1, TRBJ2-6)
CASQQGAGANVLTF

SEQ ID NO: 695995 - protein, 10 aa, Homo sapiens
  CDR3 for alpha chain variable domain of TCR clone 347998 (TRAV12-3, TRAJ49)
CAMNDDQFYF

SEQ ID NO: 695996 - protein, 16 aa, Homo sapiens
  CDR3 for beta chain variable domain of TCR clone 347998 (TRBV5-1, TRBJ2-1)
CASSLTLAGGRNEQFF

SEQ ID NO: 695997 - protein, 16 aa, Homo sapiens
  CDR3 for alpha chain variable domain of TCR clone 347999 (TRAV1-2, TRAJ10)
CAVRGVLTGGGNKLTF

SEQ ID NO: 695998 - protein, 15 aa, Homo sapiens
  CDR3 for beta chain variable domain of TCR clone 347999 (TRBV4-1, TRBJ2-1)
CASSQVLAGGDEQFF

SEQ ID NO: 695999 - protein, 11 aa, Homo sapiens
  CDR3 for alpha chain variable domain of TCR clone 348000 (TRAV2, TRAJ13)
CASGGYQKVTF

SEQ ID NO: 696000 - protein, 13 aa, Homo sapiens
  CDR3 for beta chain variable domain of TCR clone 348000 (TRBV20-1, TRBJ1-1)
CSAPLGGGTEAVF

SEQ ID NO: 696001 - protein, 10 aa, Homo sapiens
  CDR3 for alpha chain variable domain of TCR clone 348001 (TRAV12-1, TRAJ37)
ARGNTGKLIF

SEQ ID NO: 696002 - protein, 15 aa, Homo sapiens
  CDR3 for beta chain variable domain of TCR clone 348001 (TRBV7-2, TRBJ2-3)
GASSVEQGGTDTQYF

SEQ ID NO: 696003 - protein, 19 aa, Homo sapiens
  CDR3 for alpha chain variable domain of TCR clone 348002 (TRAV26-1, TRAJ22)
CCVLLHRWVFSGSARQLTF

SEQ ID NO: 696004 - protein, 19 aa, Homo sapiens
  CDR3 for beta chain variable domain of TCR clone 348002 (TRBV19, TRBJ2-5)
CASSIGPVTDFFLGETQYF

SEQ ID NO: 696005 - protein, 12 aa, Homo sapiens
  CDR3 for alpha chain variable domain of TCR clone 348003 (TRAV23/DV6, TRAJ30)
CAASNGDDKIIF

SEQ ID NO: 696006 - protein, 18 aa, Homo sapiens
  CDR3 for beta chain variable domain of TCR clone 348003 (TRBV10-3, TRBJ2-3)
CAISESRVGPMRGDTQYF

SEQ ID NO: 696007 - protein, 12 aa, Homo sapiens
  CDR3 for alpha chain variable domain of TCR clone 348004 (TRAV12-3, TRAJ17)
CAMTLTSNKLTL

SEQ ID NO: 696008 - protein, 15 aa, Homo sapiens
  CDR3 for beta chain variable domain of TCR clone 348004 (TRBV20-1, TRBJ2-7)
CSARDRVSGMDEQYF

SEQ ID NO: 696009 - protein, 13 aa, Homo sapiens
  CDR3 for alpha chain variable domain of TCR clone 348005 (TRAV16, TRAJ54)
CALKVRGAQKLVF

SEQ ID NO: 696010 - protein, 15 aa, Homo sapiens
  CDR3 for beta chain variable domain of TCR clone 348005 (TRBV18, TRBJ2-1)
CASSPPSASYNEQFF

SEQ ID NO: 696011 - protein, 17 aa, Homo sapiens
  CDR3 for alpha chain variable domain of TCR clone 348006 (TRAV3, TRAJ6)
CAVRDGPRAGGSYIPTF

SEQ ID NO: 696012 - protein, 10 aa, Homo sapiens
  CDR3 for beta chain variable domain of TCR clone 348006 (TRBV7-3, TRBJ2-3)
CASSSTGTYP

SEQ ID NO: 696013 - protein, 15 aa, Homo sapiens
  CDR3 for alpha chain variable domain of TCR clone 348007 (TRAV27, TRAJ38)
CAARRNAGNNRKLIW

SEQ ID NO: 696014 - protein, 14 aa, Homo sapiens
  CDR3 for beta chain variable domain of TCR clone 348007 (TRBV20-1, TRBJ2-1)
CSATLAGGLGEQFF

SEQ ID NO: 696015 - protein, 14 aa, Homo sapiens
  CDR3 for alpha chain variable domain of TCR clone 348008 (TRAV26-1, TRAJ38)
CIADNAGNNGKLIW

SEQ ID NO: 696016 - protein, 13 aa, Homo sapiens
  CDR3 for beta chain variable domain of TCR clone 348008 (TRBV20-1, TRBJ1-1)
CSARGEGNTEAFF

SEQ ID NO: 696017 - protein, 14 aa, Homo sapiens
  CDR3 for alpha chain variable domain of TCR clone 348009 (TRAV17, TRAJ16)
CATADFSDGQKLLF

SEQ ID NO: 696018 - protein, 16 aa, Homo sapiens
  CDR3 for beta chain variable domain of TCR clone 348009 (TRBV20-1, TRBJ1-4)
CSAPGHGLLTDEKLFF

SEQ ID NO: 696019 - protein, 17 aa, Homo sapiens
  CDR3 for alpha chain variable domain of TCR clone 348010 (TRAV3, TRAJ6)
CAVSDGPRAGGSYIPTF

SEQ ID NO: 696020 - protein, 14 aa, Homo sapiens
  CDR3 for beta chain variable domain of TCR clone 348010 (TRBV7-2, TRBJ2-7)
GASSPKTSFYEQYF

SEQ ID NO: 696021 - protein, 12 aa, Homo sapiens
  CDR3 for alpha chain variable domain of TCR clone 348011 (TRAV21, TRAJ3)
CCFYSSASKIIF

SEQ ID NO: 696022 - protein, 16 aa, Homo sapiens
  CDR3 for beta chain variable domain of TCR clone 348011 (TRBV19, TRBJ2-1)
CASSKAGPSSCNEQFF

SEQ ID NO: 696023 - protein, 13 aa, Homo sapiens
  CDR3 for alpha chain variable domain of TCR clone 348012 (TRAV21, TRAJ27)
CAARPGNAGKSTF

SEQ ID NO: 696024 - protein, 12 aa, Homo sapiens
  CDR3 for beta chain variable domain of TCR clone 348012 (TRBV7-9, TRBJ1-5)
CASSSDQATQHF

SEQ ID NO: 696025 - protein, 13 aa, Homo sapiens
  CDR3 for alpha chain variable domain of TCR clone 348013 (TRAV3, TRAJ21)
CAVREPDFNKFCF

SEQ ID NO: 696026 - protein, 15 aa, Homo sapiens
  CDR3 for beta chain variable domain of TCR clone 348013 (TRBV9, TRBJ1-6)
CASSVAGTGDSPLHF

SEQ ID NO: 696027 - protein, 11 aa, Homo sapiens
  CDR3 for alpha chain variable domain of TCR clone 348014 (TRAV1-2, TRAJ20)
CAVSNDYKRSF

SEQ ID NO: 696028 - protein, 16 aa, Homo sapiens
  CDR3 for beta chain variable domain of TCR clone 348014 (TRBV7-3, TRBJ2-2)
CASSLKRGALSGELFF

SEQ ID NO: 696029 - protein, 15 aa, Homo sapiens
  CDR3 for alpha chain variable domain of TCR clone 348015 (TRAV13-1, TRAJ48)
CSKYLGNFGNEKLTF

SEQ ID NO: 696030 - protein, 14 aa, Homo sapiens
  CDR3 for beta chain variable domain of TCR clone 348015 (TRBV7-3, TRBJ1-1)
CASSLKGGNTEAFF

SEQ ID NO: 696031 - protein, 14 aa, Homo sapiens
  CDR3 for alpha chain variable domain of TCR clone 348016 (TRAV12-1, TRAJ17)
RVVNPKAAGNKLTF

SEQ ID NO: 696032 - protein, 15 aa, Homo sapiens
  CDR3 for beta chain variable domain of TCR clone 348016 (TRBV7-2, TRBJ2-3)
CASSLAGAFIDTQYF

SEQ ID NO: 696033 - protein, 11 aa, Homo sapiens
  CDR3 for alpha chain variable domain of TCR clone 348017 (TRAV35, TRAJ57)
GPQGGSEKLVF

SEQ ID NO: 696034 - protein, 15 aa, Homo sapiens
  CDR3 for beta chain variable domain of TCR clone 348017 (TRBV27, TRBJ2-1)
CASSNGGGSSNEQFF

SEQ ID NO: 696035 - protein, 12 aa, Homo sapiens
  CDR3 for alpha chain variable domain of TCR clone 348018 (TRAV35, TRAJ12)
CAGMDSCYKLIF

SEQ ID NO: 696036 - protein, 14 aa, Homo sapiens
  CDR3 for beta chain variable domain of TCR clone 348018 (TRBV28, TRBJ2-5)
CASSLYRGTETQYF

SEQ ID NO: 696037 - protein, 14 aa, Homo sapiens
  CDR3 for alpha chain variable domain of TCR clone 348019 (TRAV17, TRAJ57)
CATDPQGGSEKLVL

SEQ ID NO: 696038 - protein, 13 aa, Homo sapiens
  CDR3 for beta chain variable domain of TCR clone 348019 (TRBV29-1, TRBJ2-1)
CSVEGGRVNEQFF

SEQ ID NO: 696039 - protein, 18 aa, Homo sapiens
  CDR3 for alpha chain variable domain of TCR clone 348020 (TRAV21, TRAJ52)
CAVRPSPAGGTSYGKLTF

SEQ ID NO: 696040 - protein, 14 aa, Homo sapiens
  CDR3 for beta chain variable domain of TCR clone 348020 (TRBV20-1, TRBJ1-1)
CSAQTRIGGTEAVF

SEQ ID NO: 696041 - protein, 14 aa, Homo sapiens
  CDR3 for alpha chain variable domain of TCR clone 348021 (TRAV12-2, TRAJ13)
CAVKKTGGYQKVTF

SEQ ID NO: 696042 - protein, 11 aa, Homo sapiens
  CDR3 for beta chain variable domain of TCR clone 348021 (TRBV5-1, TRBJ2-1)
CASSIGQEQFF

SEQ ID NO: 696043 - protein, 14 aa, Homo sapiens
  CDR3 for alpha chain variable domain of TCR clone 348022 (TRAV23/DV6, TRAJ22)
CAASVSGSARQLTF

SEQ ID NO: 696044 - protein, 15 aa, Homo sapiens
  CDR3 for beta chain variable domain of TCR clone 348022 (TRBV20-1, TRBJ2-7)
CSARARVSGMDEQYF

SEQ ID NO: 696045 - protein, 12 aa, Homo sapiens
  CDR3 for alpha chain variable domain of TCR clone 348023 (TRAV17, TRAJ12)
CATLRSSYQLIF

SEQ ID NO: 696046 - protein, 15 aa, Homo sapiens
  CDR3 for beta chain variable domain of TCR clone 348023 (TRBV28, TRBJ2-1)
CASSIIAGGRSEQFF

SEQ ID NO: 696047 - protein, 14 aa, Homo sapiens
  CDR3 for alpha chain variable domain of TCR clone 348024 (TRAV29/DV5, TRAJ36)
CAARRKTGANNLFF

SEQ ID NO: 696048 - protein, 15 aa, Homo sapiens
  CDR3 for beta chain variable domain of TCR clone 348024 (TRBV7-9, TRBJ2-7)
CASSLALAEAYEQYF

SEQ ID NO: 696049 - protein, 12 aa, Homo sapiens
  CDR3 for alpha chain variable domain of TCR clone 348025 (TRAV3, TRAJ43)
CAVRDPNNDMCF

SEQ ID NO: 696050 - protein, 15 aa, Homo sapiens
  CDR3 for beta chain variable domain of TCR clone 348025 (TRBV6-6, TRBJ1-5)
CASSLGTGFDQPQHF

SEQ ID NO: 696051 - protein, 15 aa, Homo sapiens
  CDR3 for alpha chain variable domain of TCR clone 348026 (TRAV8-3, TRAJ32)
CAVGPYGGANNKLIF

SEQ ID NO: 696052 - protein, 14 aa, Homo sapiens
  CDR3 for beta chain variable domain of TCR clone 348026 (TRBV29-1, TRBJ2-2)
CSVLAETNTGELFF

SEQ ID NO: 696053 - protein, 16 aa, Homo sapiens
  CDR3 for alpha chain variable domain of TCR clone 348027 (TRAV13-2, TRAJ28)
CAEKSYSGAGSYQLTF

SEQ ID NO: 696054 - protein, 16 aa, Homo sapiens
  CDR3 for beta chain variable domain of TCR clone 348027 (TRBV19, TRBJ2-1)
CASSKAGPSSYNGQFF

SEQ ID NO: 696055 - protein, 12 aa, Homo sapiens
  CDR3 for alpha chain variable domain of TCR clone 348028 (TRAV21, TRAJ31)
CAVWGNNARLMF

SEQ ID NO: 696056 - protein, 22 aa, Homo sapiens
  CDR3 for beta chain variable domain of TCR clone 348028 (TRBV6-1, TRBJ1-3)
CASVQGGGWKHHIFWRGKLAHC

SEQ ID NO: 696057 - protein, 14 aa, Homo sapiens
  CDR3 for alpha chain variable domain of TCR clone 348029 (TRAV36/DV7, TRAJ13)
WGSGENGGYQKGTF

SEQ ID NO: 696058 - protein, 15 aa, Homo sapiens
  CDR3 for beta chain variable domain of TCR clone 348029 (TRBV19, TRBJ2-1)
CASSTGTSSYNEQFF

SEQ ID NO: 696059 - protein, 13 aa, Homo sapiens
  CDR3 for alpha chain variable domain of TCR clone 348030 (TRAV2, TRAJ15)
CAVASQAGTALIF

SEQ ID NO: 696060 - protein, 17 aa, Homo sapiens
  CDR3 for beta chain variable domain of TCR clone 348030 (TRBV20-1, TRBJ2-1)
CSAPPRLAGTRYNEQFF

SEQ ID NO: 696061 - protein, 12 aa, Homo sapiens
  CDR3 for alpha chain variable domain of TCR clone 348031 (TRAV2, TRAJ31)
CAVEDNNARLMF

SEQ ID NO: 696062 - protein, 16 aa, Homo sapiens
  CDR3 for beta chain variable domain of TCR clone 348031 (TRBV10-3, TRBJ2-1)
CAISGVGDGRGGEQFF

SEQ ID NO: 696063 - protein, 20 aa, Homo sapiens
  CDR3 for alpha chain variable domain of TCR clone 348032 (TRAV12-3, TRAJ41)
SLFIRDSQPSASATPEALNF

SEQ ID NO: 696064 - protein, 13 aa, Homo sapiens
  CDR3 for beta chain variable domain of TCR clone 348032 (TRBV10-3, TRBJ2-7)
CASKLAVNYEQYF

SEQ ID NO: 696065 - protein, 15 aa, Homo sapiens
  CDR3 for alpha chain variable domain of TCR clone 348033 (TRAV3, TRAJ32)
CAVSSYGGATNKLIF

SEQ ID NO: 696066 - protein, 13 aa, Homo sapiens
  CDR3 for beta chain variable domain of TCR clone 348033 (TRBV10-3, TRBJ2-7)
CASKLAVNYEQYF

SEQ ID NO: 696067 - protein, 13 aa, Homo sapiens
  CDR3 for alpha chain variable domain of TCR clone 348034 (TRAV1-2, TRAJ12)
CAVSMDSSYNLIF

SEQ ID NO: 696068 - protein, 14 aa, Homo sapiens
  CDR3 for beta chain variable domain of TCR clone 348034 (TRBV19, TRBJ2-1)
CASSSGRDYNEQFF

SEQ ID NO: 696069 - protein, 14 aa, Homo sapiens
  CDR3 for alpha chain variable domain of TCR clone 348035 (TRAV16, TRAJ26)
CITVLSAYGQNFVF

SEQ ID NO: 696070 - protein, 14 aa, Homo sapiens
  CDR3 for beta chain variable domain of TCR clone 348035 (TRBV7-2, TRBJ2-7)
CASRSQGAAYERYF

SEQ ID NO: 696071 - protein, 14 aa, Homo sapiens
  CDR3 for alpha chain variable domain of TCR clone 348036 (TRAV9-2, TRAJ39)
CALYIYNAGNMLTF

SEQ ID NO: 696072 - protein, 15 aa, Homo sapiens
  CDR3 for beta chain variable domain of TCR clone 348036 (TRBV18, TRBJ2-7)
CASSPSSTGNDEQYF

SEQ ID NO: 696073 - protein, 14 aa, Homo sapiens
  CDR3 for alpha chain variable domain of TCR clone 348037 (TRAV17, TRAJ15)
CATDRGQAGTALIF

SEQ ID NO: 696074 - protein, 14 aa, Homo sapiens
  CDR3 for beta chain variable domain of TCR clone 348037 (TRBV6-1, TRBJ1-3)
CASVQGGGGNTMYF

SEQ ID NO: 696075 - protein, 10 aa, Homo sapiens
  CDR3 for alpha chain variable domain of TCR clone 348038 (TRAV16, TRAJ10)
CAPAREEETN

SEQ ID NO: 696076 - protein, 15 aa, Homo sapiens
  CDR3 for beta chain variable domain of TCR clone 348038 (TRBV6-3, TRBJ2-7)
CASSSPGTVFYEQYF

SEQ ID NO: 696077 - protein, 13 aa, Homo sapiens
  CDR3 for alpha chain variable domain of TCR clone 348039 (TRAV1-1, TRAJ33)
CASHMDSNCQLIW

SEQ ID NO: 696078 - protein, 18 aa, Homo sapiens
  CDR3 for beta chain variable domain of TCR clone 348039 (TRBV20-1, TRBJ2-2)
CSARVQTARPSGTGELFF

SEQ ID NO: 696079 - protein, 12 aa, Homo sapiens
  CDR3 for alpha chain variable domain of TCR clone 348040 (TRAV12-3, TRAJ42)
CAPGGSQGNLIF

SEQ ID NO: 696080 - protein, 14 aa, Homo sapiens
  CDR3 for beta chain variable domain of TCR clone 348040 (TRBV5-4, TRBJ1-1)
CASSLDSRRDEAFL

SEQ ID NO: 696081 - protein, 11 aa, Homo sapiens
  CDR3 for alpha chain variable domain of TCR clone 348041 (TRAV35, TRAJ34)
CWARNTDKLIF

SEQ ID NO: 696082 - protein, 15 aa, Homo sapiens
  CDR3 for beta chain variable domain of TCR clone 348041 (TRBV19, TRBJ2-4)
RASRGPRRGENIQYF

SEQ ID NO: 696083 - protein, 11 aa, Homo sapiens
  CDR3 for alpha chain variable domain of TCR clone 348042 (TRAV12-1, TRAJ26)
CVVAYGKNFVF

SEQ ID NO: 696084 - protein, 15 aa, Homo sapiens
  CDR3 for beta chain variable domain of TCR clone 348042 (TRBV12-4, TRBJ2-5)
CAGSGTGQAQETQYF

SEQ ID NO: 696085 - protein, 11 aa, Homo sapiens
  CDR3 for alpha chain variable domain of TCR clone 348043 (TRAV26-1, TRAJ37)
CIVKVGRKLIF

SEQ ID NO: 696086 - protein, 13 aa, Homo sapiens
  CDR3 for beta chain variable domain of TCR clone 348043 (TRBV14, TRBJ1-2)
CASSEDRRYGYTF

SEQ ID NO: 696087 - protein, 12 aa, Homo sapiens
  CDR3 for alpha chain variable domain of TCR clone 348044 (TRAV29/DV5, TRAJ33)
CAANAPGYQLIW

SEQ ID NO: 696088 - protein, 15 aa, Homo sapiens
  CDR3 for beta chain variable domain of TCR clone 348044 (TRBV11-3, TRBJ2-3)
CASLKDGREGDTQYF

SEQ ID NO: 696089 - protein, 16 aa, Homo sapiens
  CDR3 for alpha chain variable domain of TCR clone 348045 (TRAV14/DV4, TRAJ53)
CAMREGGGGSNYKLTF

SEQ ID NO: 696090 - protein, 14 aa, Homo sapiens
  CDR3 for beta chain variable domain of TCR clone 348045 (TRBV12-5, TRBJ2-5)
CDSGSRTHQETQYF

SEQ ID NO: 696091 - protein, 14 aa, Homo sapiens
  CDR3 for alpha chain variable domain of TCR clone 348046 (TRAV12-1, TRAJ12)
CVVTRMDSSYKLIF

SEQ ID NO: 696092 - protein, 13 aa, Homo sapiens
  CDR3 for beta chain variable domain of TCR clone 348046 (TRBV20-1, TRBJ1-1)
CSVRGGGNTEAFF

SEQ ID NO: 696093 - protein, 14 aa, Homo sapiens
  CDR3 for alpha chain variable domain of TCR clone 348047 (TRAV29/DV5, TRAJ49)
CAASLSNTGNQFYF

SEQ ID NO: 696094 - protein, 15 aa, Homo sapiens
  CDR3 for beta chain variable domain of TCR clone 348047 (TRBV11-3, TRBJ2-3)
CASLKDGREGDTQYF

SEQ ID NO: 696095 - protein, 14 aa, Homo sapiens
  CDR3 for alpha chain variable domain of TCR clone 348048 (TRAV30, TRAJ33)
CGTERRFSNYQLIW

SEQ ID NO: 696096 - protein, 13 aa, Homo sapiens
  CDR3 for beta chain variable domain of TCR clone 348048 (TRBV7-3, TRBJ1-1)
CASSQDWGAEAFF

SEQ ID NO: 696097 - protein, 14 aa, Homo sapiens
  CDR3 for alpha chain variable domain of TCR clone 348049 (TRAV12-1, TRAJ17)
CVVDYKAAGNKLTF

SEQ ID NO: 696098 - protein, 14 aa, Homo sapiens
  CDR3 for beta chain variable domain of TCR clone 348049 (TRBV20-1, TRBJ1-1)
CSAQTRIGGTEAFF

SEQ ID NO: 696099 - protein, 14 aa, Homo sapiens
  CDR3 for alpha chain variable domain of TCR clone 348050 (TRAV1-2, TRAJ16)
CAVNRFSDGQKLPF

SEQ ID NO: 696100 - protein, 17 aa, Homo sapiens
  CDR3 for beta chain variable domain of TCR clone 348050 (TRBV7-8, TRBJ2-6)
CASSAGTGGAGANDLTF

SEQ ID NO: 696101 - protein, 16 aa, Homo sapiens
  CDR3 for alpha chain variable domain of TCR clone 348051 (TRAV12-3, TRAJ53)
CAMSPGSGGSNYKLTF

SEQ ID NO: 696102 - protein, 16 aa, Homo sapiens
  CDR3 for beta chain variable domain of TCR clone 348051 (TRBV12-4, TRBJ2-2)
CASSFWIVGNTGELFF

SEQ ID NO: 696103 - protein, 16 aa, Homo sapiens
  CDR3 for alpha chain variable domain of TCR clone 348052 (TRAV3, TRAJ37)
CAVRGKGSGNTGKLIF

SEQ ID NO: 696104 - protein, 13 aa, Homo sapiens
  CDR3 for beta chain variable domain of TCR clone 348052 (TRBV14, TRBJ2-7)
CPSSKDRRYEQYF

SEQ ID NO: 696105 - protein, 14 aa, Homo sapiens
  CDR3 for alpha chain variable domain of TCR clone 348053 (TRAV26-1, TRAJ39)
CIVFPNNAGNMLTF

SEQ ID NO: 696106 - protein, 15 aa, Homo sapiens
  CDR3 for beta chain variable domain of TCR clone 348053 (TRBV19, TRBJ2-4)
CASSLTGLTKNIQYF

SEQ ID NO: 696107 - protein, 13 aa, Homo sapiens
  CDR3 for alpha chain variable domain of TCR clone 348054 (TRAV8-4, TRAJ29)
CAVSATGNTPLVF

SEQ ID NO: 696108 - protein, 15 aa, Homo sapiens
  CDR3 for beta chain variable domain of TCR clone 348054 (TRBV2, TRBJ2-7)
CASSEGLARSYEQYF

SEQ ID NO: 696109 - protein, 14 aa, Homo sapiens
  CDR3 for alpha chain variable domain of TCR clone 348055 (TRAV2, TRAJ9)
CAVEDRSGGFKTIF

SEQ ID NO: 696110 - protein, 17 aa, Homo sapiens
  CDR3 for beta chain variable domain of TCR clone 348055 (TRBV7-8, TRBJ2-6)
CASSAGTGGAGANILTF

SEQ ID NO: 696111 - protein, 16 aa, Homo sapiens
  CDR3 for alpha chain variable domain of TCR clone 348056 (TRAV12-3, TRAJ50)
CAMRDPLKTSYDKVIF

SEQ ID NO: 696112 - protein, 13 aa, Homo sapiens
  CDR3 for beta chain variable domain of TCR clone 348056 (TRBV4-1, TRBJ2-3)
CASSLDFTDTQYF

SEQ ID NO: 696113 - protein, 13 aa, Homo sapiens
  CDR3 for alpha chain variable domain of TCR clone 348057 (TRAV17, TRAJ22)
CAHRSGSARQLTF

SEQ ID NO: 696114 - protein, 14 aa, Homo sapiens
  CDR3 for beta chain variable domain of TCR clone 348057 (TRBV16, TRBJ1-1)
CASSQAGPNTEAFF

SEQ ID NO: 696115 - protein, 15 aa, Homo sapiens
  CDR3 for alpha chain variable domain of TCR clone 348058 (TRAV12-1, TRAJ44)
CVADLPTGTASKLTF

SEQ ID NO: 696116 - protein, 15 aa, Homo sapiens
  CDR3 for beta chain variable domain of TCR clone 348058 (TRBV20-1, TRBJ1-1)
CSASRGVTGNTEAFF

SEQ ID NO: 696117 - protein, 20 aa, Homo sapiens
  CDR3 for alpha chain variable domain of TCR clone 348059 (TRAV30, TRAJ32)
RNLLLRHREGYGGSTNKLIF

SEQ ID NO: 696118 - protein, 13 aa, Homo sapiens
  CDR3 for beta chain variable domain of TCR clone 348059 (TRBV10-3, TRBJ2-7)
CASKLAVNYEQYF

SEQ ID NO: 696119 - protein, 13 aa, Homo sapiens
  CDR3 for alpha chain variable domain of TCR clone 348060 (TRAV8-3, TRAJ43)
CAVGPDNNNGMRF

SEQ ID NO: 696120 - protein, 14 aa, Homo sapiens
  CDR3 for beta chain variable domain of TCR clone 348060 (TRBV19, TRBJ2-1)
CASPTFVLSGEQFV

SEQ ID NO: 696121 - protein, 13 aa, Homo sapiens
  CDR3 for alpha chain variable domain of TCR clone 348061 (TRAV12-1, TRAJ6)
CVVLPGGSYIPTF

SEQ ID NO: 696122 - protein, 13 aa, Homo sapiens
  CDR3 for beta chain variable domain of TCR clone 348061 (TRBV7-9, TRBJ1-2)
CASSLKQNYGYTF

SEQ ID NO: 696123 - protein, 13 aa, Homo sapiens
  CDR3 for alpha chain variable domain of TCR clone 348062 (TRAV21, TRAJ32)
CAVSGGDTNKLIF

SEQ ID NO: 696124 - protein, 17 aa, Homo sapiens
  CDR3 for beta chain variable domain of TCR clone 348062 (TRBV23-1, TRBJ2-1)
CASSQWPQLTMSSSSGQ

SEQ ID NO: 696125 - protein, 15 aa, Homo sapiens
  CDR3 for alpha chain variable domain of TCR clone 348063 (TRAV8-3, TRAJ11)
CAVGLLNSGYSTLTF

SEQ ID NO: 696126 - protein, 10 aa, Homo sapiens
  CDR3 for beta chain variable domain of TCR clone 348063 (TRBV7-9, TRBJ1-2)
CASSLGFSSG

SEQ ID NO: 696127 - protein, 17 aa, Homo sapiens
  CDR3 for alpha chain variable domain of TCR clone 348064 (TRAV4, TRAJ42)
CLVGVLNYGGSQGNLIF

SEQ ID NO: 696128 - protein, 15 aa, Homo sapiens
  CDR3 for beta chain variable domain of TCR clone 348064 (TRBV7-7, TRBJ2-5)
CASSQLERAEETQYF

SEQ ID NO: 696129 - protein, 12 aa, Homo sapiens
  CDR3 for alpha chain variable domain of TCR clone 348065 (TRAV20, TRAJ37)
CALPSNTGKLIF

SEQ ID NO: 696130 - protein, 16 aa, Homo sapiens
  CDR3 for beta chain variable domain of TCR clone 348065 (TRBV28, TRBJ1-2)
CASSHEQGVYKDGYTF

SEQ ID NO: 696131 - protein, 14 aa, Homo sapiens
  CDR3 for alpha chain variable domain of TCR clone 348066 (TRAV2, TRAJ9)
CAVEDRSGGAKTIF

SEQ ID NO: 696132 - protein, 12 aa, Homo sapiens
  CDR3 for beta chain variable domain of TCR clone 348066 (TRBV11-2, TRBJ2-1)
CASSPGNNEQFF

SEQ ID NO: 696133 - protein, 15 aa, Homo sapiens
  CDR3 for alpha chain variable domain of TCR clone 348067 (TRAV20, TRAJ28)
CAVQYSGAGSYQLTF

SEQ ID NO: 696134 - protein, 13 aa, Homo sapiens
  CDR3 for beta chain variable domain of TCR clone 348067 (TRBV7-7, TRBJ1-1)
CASSLGANTEAFF

SEQ ID NO: 696135 - protein, 13 aa, Homo sapiens
  CDR3 for alpha chain variable domain of TCR clone 348068 (TRAV12-1, TRAJ31)
CVVNMNNNARLIV

SEQ ID NO: 696136 - protein, 15 aa, Homo sapiens
  CDR3 for beta chain variable domain of TCR clone 348068 (TRBV4-1, TRBJ1-2)
CASSQGQGAAYGYTF

SEQ ID NO: 696137 - protein, 14 aa, Homo sapiens
  CDR3 for alpha chain variable domain of TCR clone 348069 (TRAV12-3, TRAJ6)
CAMSATGGSYIPTF

SEQ ID NO: 696138 - protein, 14 aa, Homo sapiens
  CDR3 for beta chain variable domain of TCR clone 348069 (TRBV7-2, TRBJ1-2)
CASSQTGSTYGYTF

SEQ ID NO: 696139 - protein, 11 aa, Homo sapiens
  CDR3 for alpha chain variable domain of TCR clone 348070 (TRAV35, TRAJ42)
LGFRSQGNLIF

SEQ ID NO: 696140 - protein, 13 aa, Homo sapiens
  CDR3 for beta chain variable domain of TCR clone 348070 (TRBV29-1, TRBJ2-1)
CSVEGGSVNEQFF

SEQ ID NO: 696141 - protein, 14 aa, Homo sapiens
  CDR3 for alpha chain variable domain of TCR clone 348071 (TRAV13-1, TRAJ44)
CAAKATGTASKLPF

SEQ ID NO: 696142 - protein, 15 aa, Homo sapiens
  CDR3 for beta chain variable domain of TCR clone 348071 (TRBV10-3, TRBJ2-1)
CAISDVQDRAYEQFF

SEQ ID NO: 696143 - protein, 14 aa, Homo sapiens
  CDR3 for alpha chain variable domain of TCR clone 348072 (TRAV2, TRAJ9)
CAVEDRSGGFKTIS

SEQ ID NO: 696144 - protein, 12 aa, Homo sapiens
  CDR3 for beta chain variable domain of TCR clone 348072 (TRBV7-9, TRBJ2-7)
CASSLEGYEQYF

SEQ ID NO: 696145 - protein, 18 aa, Homo sapiens
  CDR3 for alpha chain variable domain of TCR clone 348073 (TRAV26-1, TRAJ49)
CCVLFHRQTSNTGNQFYF

SEQ ID NO: 696146 - protein, 15 aa, Homo sapiens
  CDR3 for beta chain variable domain of TCR clone 348073 (TRBV19, TRBJ1-1)
CASMGFRDVNTEAFF

SEQ ID NO: 696147 - protein, 11 aa, Homo sapiens
  CDR3 for alpha chain variable domain of TCR clone 348074 (TRAV3, TRAJ21)
CAVGNFNKFYF

SEQ ID NO: 696148 - protein, 14 aa, Homo sapiens
  CDR3 for beta chain variable domain of TCR clone 348074 (TRBV4-2, TRBJ2-1)
CANGLDRAYNEQFF

SEQ ID NO: 696149 - protein, 13 aa, Homo sapiens
  CDR3 for alpha chain variable domain of TCR clone 348075 (TRAV3, TRAJ20)
CCEAFCNDYKLRL

SEQ ID NO: 696150 - protein, 15 aa, Homo sapiens
  CDR3 for beta chain variable domain of TCR clone 348075 (TRBV19, TRBJ2-6)
CASVRRDSGANVLTF

SEQ ID NO: 696151 - protein, 15 aa, Homo sapiens
  CDR3 for alpha chain variable domain of TCR clone 348076 (TRAV9-2, TRAJ42)
CALSGPGGSQGNLIF

SEQ ID NO: 696152 - protein, 13 aa, Homo sapiens
  CDR3 for beta chain variable domain of TCR clone 348076 (TRBV6-5, TRBJ2-5)
CATAPSPQETQYF

SEQ ID NO: 696153 - protein, 13 aa, Homo sapiens
  CDR3 for alpha chain variable domain of TCR clone 348077 (TRAV13-1, TRAJ6)
CAASSGGSYIPTF

SEQ ID NO: 696154 - protein, 17 aa, Homo sapiens
  CDR3 for beta chain variable domain of TCR clone 348077 (TRBV12-4, TRBJ2-5)
CTSVPAVPRQASKRQYF

SEQ ID NO: 696155 - protein, 15 aa, Homo sapiens
  CDR3 for alpha chain variable domain of TCR clone 348078 (TRAV8-6, TRAJ11)
CAVNFMNSGYSTLTF

SEQ ID NO: 696156 - protein, 14 aa, Homo sapiens
  CDR3 for beta chain variable domain of TCR clone 348078 (TRBV9, TRBJ2-7)
CASSVGVGSYEQYF

SEQ ID NO: 696157 - protein, 14 aa, Homo sapiens
  CDR3 for alpha chain variable domain of TCR clone 348079 (TRAV17, TRAJ22)
CATSPSGSTRQLTF

SEQ ID NO: 696158 - protein, 15 aa, Homo sapiens
  CDR3 for beta chain variable domain of TCR clone 348079 (TRBV4-1, TRBJ2-5)
CASSQWDLYQESQYF

SEQ ID NO: 696159 - protein, 14 aa, Homo sapiens
  CDR3 for alpha chain variable domain of TCR clone 348080 (TRAV12-2, TRAJ44)
CAVNPAGTASNLTF

SEQ ID NO: 696160 - protein, 14 aa, Homo sapiens
  CDR3 for beta chain variable domain of TCR clone 348080 (TRBV7-2, TRBJ1-3)
CASSRLRSGNTIYF

SEQ ID NO: 696161 - protein, 18 aa, Homo sapiens
  CDR3 for alpha chain variable domain of TCR clone 348081 (TRAV13-1, TRAJ52)
CAAKNPNAGGTSYGKLPF

SEQ ID NO: 696162 - protein, 14 aa, Homo sapiens
  CDR3 for beta chain variable domain of TCR clone 348081 (TRBV7-3, TRBJ1-1)
CASSRQGGDTEAFF

SEQ ID NO: 696163 - protein, 12 aa, Homo sapiens
  CDR3 for alpha chain variable domain of TCR clone 348082 (TRAV8-3, TRAJ26)
CAGDNYGQNFVF

SEQ ID NO: 696164 - protein, 15 aa, Homo sapiens
  CDR3 for beta chain variable domain of TCR clone 348082 (TRBV5-1, TRBJ1-2)
CASSLLEEPNYGYTF

SEQ ID NO: 696165 - protein, 11 aa, Homo sapiens
  CDR3 for alpha chain variable domain of TCR clone 348083 (TRAV23/DV6, TRAJ48)
CAPHWGEKLTF

SEQ ID NO: 696166 - protein, 13 aa, Homo sapiens
  CDR3 for beta chain variable domain of TCR clone 348083 (TRBV12-4, TRBJ2-5)
CASSPGTEETQYF

SEQ ID NO: 696167 - protein, 15 aa, Homo sapiens
  CDR3 for alpha chain variable domain of TCR clone 348084 (TRAV3, TRAJ5)
CAVRDLDTGRRALTF

SEQ ID NO: 696168 - protein, 15 aa, Homo sapiens
  CDR3 for beta chain variable domain of TCR clone 348084 (TRBV20-1, TRBJ2-1)
CSARSPGGPGNEQVF

SEQ ID NO: 696169 - protein, 17 aa, Homo sapiens
  CDR3 for alpha chain variable domain of TCR clone 348085 (TRAV3, TRAJ6)
CAVRDGPRAGGSYIPTF

SEQ ID NO: 696170 - protein, 12 aa, Homo sapiens
  CDR3 for beta chain variable domain of TCR clone 348085 (TRBV5-5, TRBJ2-5)
CASSYFGETQYF

SEQ ID NO: 696171 - protein, 16 aa, Homo sapiens
  CDR3 for alpha chain variable domain of TCR clone 348086 (TRAV3, TRAJ42)
CAVSDIEGGSQGNPIF

SEQ ID NO: 696172 - protein, 15 aa, Homo sapiens
  CDR3 for beta chain variable domain of TCR clone 348086 (TRBV9, TRBJ2-2)
CASSDFAGASGELFF

SEQ ID NO: 696173 - protein, 15 aa, Homo sapiens
  CDR3 for alpha chain variable domain of TCR clone 348087 (TRAV12-3, TRAJ6)
CAMSAPSGGSYIPTF

SEQ ID NO: 696174 - protein, 11 aa, Homo sapiens
  CDR3 for beta chain variable domain of TCR clone 348087 (TRBV20-1, TRBJ1-5)
CSAQGDQPQHF

SEQ ID NO: 696175 - protein, 14 aa, Homo sapiens
  CDR3 for alpha chain variable domain of TCR clone 348088 (TRAV1-2, TRAJ16)
CSVNRFSDGQKLLF

SEQ ID NO: 696176 - protein, 13 aa, Homo sapiens
  CDR3 for beta chain variable domain of TCR clone 348088 (TRBV11-2, TRBJ2-1)
CASSLGLAGGRFF

SEQ ID NO: 696177 - protein, 12 aa, Homo sapiens
  CDR3 for alpha chain variable domain of TCR clone 348089 (TRAV3, TRAJ20)
CAVRDPDYKLSF

SEQ ID NO: 696178 - protein, 12 aa, Homo sapiens
  CDR3 for beta chain variable domain of TCR clone 348089 (TRBV7-3, TRBJ2-5)
CRQLPGGETQYF

SEQ ID NO: 696179 - protein, 11 aa, Homo sapiens
  CDR3 for alpha chain variable domain of TCR clone 348090 (TRAV13-1, TRAJ8)
CASGGFQKLVF

SEQ ID NO: 696180 - protein, 14 aa, Homo sapiens
  CDR3 for beta chain variable domain of TCR clone 348090 (TRBV4-1, TRBJ2-2)
CASSQAVNTGELFF

SEQ ID NO: 696181 - protein, 14 aa, Homo sapiens
  CDR3 for alpha chain variable domain of TCR clone 348091 (TRAV12-3, TRAJ10)
SHLPLTGGGNKLTF

SEQ ID NO: 696182 - protein, 14 aa, Homo sapiens
  CDR3 for beta chain variable domain of TCR clone 348091 (TRBV7-6, TRBJ1-6)
CASSQAGGGSPLHF

SEQ ID NO: 696183 - protein, 14 aa, Homo sapiens
  CDR3 for alpha chain variable domain of TCR clone 348092 (TRAV12-3, TRAJ9)
CAMSPNTGRFKTIF

SEQ ID NO: 696184 - protein, 12 aa, Homo sapiens
  CDR3 for beta chain variable domain of TCR clone 348092 (TRBV19, TRBJ1-5)
CASSIAQQPQHF

SEQ ID NO: 696185 - protein, 13 aa, Homo sapiens
  CDR3 for alpha chain variable domain of TCR clone 348093 (TRAV27, TRAJ45)
CRSSGGGADGLTF

SEQ ID NO: 696186 - protein, 15 aa, Homo sapiens
  CDR3 for beta chain variable domain of TCR clone 348093 (TRBV28, TRBJ2-7)
CASSLISGGSYEQYF

SEQ ID NO: 696187 - protein, 12 aa, Homo sapiens
  CDR3 for alpha chain variable domain of TCR clone 348094 (TRAV25, TRAJ48)
CAGDFGNEKLTF

SEQ ID NO: 696188 - protein, 12 aa, Homo sapiens
  CDR3 for beta chain variable domain of TCR clone 348094 (TRBV2, TRBJ2-5)
CASKEYGETQYC

SEQ ID NO: 696189 - protein, 13 aa, Homo sapiens
  CDR3 for alpha chain variable domain of TCR clone 348095 (TRAV1-1, TRAJ9)
CAAKNTGGFKTIF

SEQ ID NO: 696190 - protein, 14 aa, Homo sapiens
  CDR3 for beta chain variable domain of TCR clone 348095 (TRBV12-5, TRBJ2-5)
CASGSRTDQETQYF

SEQ ID NO: 696191 - protein, 15 aa, Homo sapiens
  CDR3 for alpha chain variable domain of TCR clone 348096 (TRAV16, TRAJ16)
CALQGGGSDGQKLLF

SEQ ID NO: 696192 - protein, 16 aa, Homo sapiens
  CDR3 for beta chain variable domain of TCR clone 348096 (TRBV4-2, TRBJ1-2)
CASSQERRIHYIGYTF

SEQ ID NO: 696193 - protein, 13 aa, Homo sapiens
  CDR3 for alpha chain variable domain of TCR clone 348097 (TRAV2, TRAJ40)
CAVVTSGTYKYIF

SEQ ID NO: 696194 - protein, 15 aa, Homo sapiens
  CDR3 for beta chain variable domain of TCR clone 348097 (TRBV18, TRBJ2-1)
CASSTPSASYNEQFF

SEQ ID NO: 696195 - protein, 14 aa, Homo sapiens
  CDR3 for alpha chain variable domain of TCR clone 348098 (TRAV12-1, TRAJ30)
CVVNIGGRDDKIIF

SEQ ID NO: 696196 - protein, 13 aa, Homo sapiens
  CDR3 for beta chain variable domain of TCR clone 348098 (TRBV12-5, TRBJ2-1)
CTSGLVRGNEQFF

SEQ ID NO: 696197 - protein, 21 aa, Homo sapiens
  CDR3 for alpha chain variable domain of TCR clone 348099 (TRAV1-1, TRAJ6)
CLLLLRCARLERTGGSYIPTF

SEQ ID NO: 696198 - protein, 13 aa, Homo sapiens
  CDR3 for beta chain variable domain of TCR clone 348099 (TRBV10-2, TRBJ2-7)
CASGASGGYEQYF

SEQ ID NO: 696199 - protein, 15 aa, Homo sapiens
  CDR3 for alpha chain variable domain of TCR clone 348100 (TRAV13-2, TRAJ45)
CAESDSGGGADGLTF

SEQ ID NO: 696200 - protein, 17 aa, Homo sapiens
  CDR3 for beta chain variable domain of TCR clone 348100 (TRBV27, TRBJ1-6)
CAISLDQLSSYNSPLHF

SEQ ID NO: 696201 - protein, 14 aa, Homo sapiens
  CDR3 for alpha chain variable domain of TCR clone 348101 (TRAV26-1, TRAJ49)
CIVRLTNTGNQFYF

SEQ ID NO: 696202 - protein, 17 aa, Homo sapiens
  CDR3 for beta chain variable domain of TCR clone 348101 (TRBV7-7, TRBJ1-1)
CASIGDRPNLGVTEAFF

SEQ ID NO: 696203 - protein, 12 aa, Homo sapiens
  CDR3 for alpha chain variable domain of TCR clone 348102 (TRAV27, TRAJ35)
CAGADFGNVLHC

SEQ ID NO: 696204 - protein, 15 aa, Homo sapiens
  CDR3 for beta chain variable domain of TCR clone 348102 (TRBV19, TRBJ2-1)
CASGIASGGYNEQFF

SEQ ID NO: 696205 - protein, 17 aa, Homo sapiens
  CDR3 for alpha chain variable domain of TCR clone 348103 (TRAV38-1, TRAJ56)
CAFMRILDTGANSKLTF

SEQ ID NO: 696206 - protein, 17 aa, Homo sapiens
  CDR3 for beta chain variable domain of TCR clone 348103 (TRBV7-8, TRBJ2-6)
CASSAGTGGAGANVLTF

SEQ ID NO: 696207 - protein, 18 aa, Homo sapiens
  CDR3 for alpha chain variable domain of TCR clone 348104 (TRAV12-3, TRAJ52)
CAMSVGAAGGTSYGKLTF

SEQ ID NO: 696208 - protein, 14 aa, Homo sapiens
  CDR3 for beta chain variable domain of TCR clone 348104 (TRBV7-2, TRBJ2-7)
CASRSQGAAYEQYF

SEQ ID NO: 696209 - protein, 12 aa, Homo sapiens
  CDR3 for alpha chain variable domain of TCR clone 348105 (TRAV3, TRAJ20)
CAVRDPDYKLSF

SEQ ID NO: 696210 - protein, 16 aa, Homo sapiens
  CDR3 for beta chain variable domain of TCR clone 348105 (TRBV7-9, TRBJ2-3)
CASSFSVAGGTDTQYF

SEQ ID NO: 696211 - protein, 12 aa, Homo sapiens
  CDR3 for alpha chain variable domain of TCR clone 348106 (TRAV12-3, TRAJ20)
CAMVRGDYELSF

SEQ ID NO: 696212 - protein, 14 aa, Homo sapiens
  CDR3 for beta chain variable domain of TCR clone 348106 (TRBV19, TRBJ1-1)
CASSRDRDATEAFF

SEQ ID NO: 696213 - protein, 13 aa, Homo sapiens
  CDR3 for alpha chain variable domain of TCR clone 348107 (TRAV13-2, TRAJ53)
CAENMGSNYKLTF

SEQ ID NO: 696214 - protein, 16 aa, Homo sapiens
  CDR3 for beta chain variable domain of TCR clone 348107 (TRBV4-1, TRBJ2-7)
CASSQEWTSGPLEQYF

SEQ ID NO: 696215 - protein, 16 aa, Homo sapiens
  CDR3 for alpha chain variable domain of TCR clone 348108 (TRAV12-3, TRAJ4)
CAMTRLFSGGYNKLIF

SEQ ID NO: 696216 - protein, 16 aa, Homo sapiens
  CDR3 for beta chain variable domain of TCR clone 348108 (TRBV12-4, TRBJ1-4)
CASSLKGIGHGEKLFF

SEQ ID NO: 696217 - protein, 17 aa, Homo sapiens
  CDR3 for alpha chain variable domain of TCR clone 348109 (TRAV26-1, TRAJ27)
CIVSTPWINTNAGKSTF

SEQ ID NO: 696218 - protein, 16 aa, Homo sapiens
  CDR3 for beta chain variable domain of TCR clone 348109 (TRBV7-9, TRBJ2-1)
CASSLAPGLAIDEQFF

SEQ ID NO: 696219 - protein, 20 aa, Homo sapiens
  CDR3 for alpha chain variable domain of TCR clone 348110 (TRAV27, TRAJ45)
CAGAQEEVLTDSPLAKGLIY

SEQ ID NO: 696220 - protein, 15 aa, Homo sapiens
  CDR3 for beta chain variable domain of TCR clone 348110 (TRBV20-1, TRBJ2-7)
CSARDRVSGMDEQYF

SEQ ID NO: 696221 - protein, 14 aa, Homo sapiens
  CDR3 for alpha chain variable domain of TCR clone 348111 (TRAV12-1, TRAJ3)
CVVGRHSSASKIIF

SEQ ID NO: 696222 - protein, 16 aa, Homo sapiens
  CDR3 for beta chain variable domain of TCR clone 348111 (TRBV5-4, TRBJ2-1)
CASSLALAGAYNEQFF

SEQ ID NO: 696223 - protein, 14 aa, Homo sapiens
  CDR3 for alpha chain variable domain of TCR clone 348112 (TRAV4, TRAJ23)
CLVGSYNQGGKRIF

SEQ ID NO: 696224 - protein, 18 aa, Homo sapiens
  CDR3 for beta chain variable domain of TCR clone 348112 (TRBV6-5, TRBJ2-6)
GASRTPGQGKTGANVLTF

SEQ ID NO: 696225 - protein, 15 aa, Homo sapiens
  CDR3 for alpha chain variable domain of TCR clone 348113 (TRAV3, TRAJ22)
CAVRDRGGSARQLAF

SEQ ID NO: 696226 - protein, 14 aa, Homo sapiens
  CDR3 for beta chain variable domain of TCR clone 348113 (TRBV19, TRBJ1-5)
CASSLGLIGQPQHF

SEQ ID NO: 696227 - protein, 14 aa, Homo sapiens
  CDR3 for alpha chain variable domain of TCR clone 348114 (TRAV17, TRAJ56)
CATVPAGANSKLTF

SEQ ID NO: 696228 - protein, 15 aa, Homo sapiens
  CDR3 for beta chain variable domain of TCR clone 348114 (TRBV7-2, TRBJ1-2)
CASSLVSGGDYGYTF

SEQ ID NO: 696229 - protein, 19 aa, Homo sapiens
  CDR3 for alpha chain variable domain of TCR clone 348115 (TRAV26-1, TRAJ52)
CIVRVANNAGGTSYGKLTF

SEQ ID NO: 696230 - protein, 16 aa, Homo sapiens
  CDR3 for beta chain variable domain of TCR clone 348115 (TRBV28, TRBJ2-1)
CASSSSYSGSLNEQFF

SEQ ID NO: 696231 - protein, 12 aa, Homo sapiens
  CDR3 for alpha chain variable domain of TCR clone 348116 (TRAV3, TRAJ27)
CSVRDGAGKSTF

SEQ ID NO: 696232 - protein, 13 aa, Homo sapiens
  CDR3 for beta chain variable domain of TCR clone 348116 (TRBV10-3, TRBJ1-2)
CAINADLNYGYTF

SEQ ID NO: 696233 - protein, 14 aa, Homo sapiens
  CDR3 for alpha chain variable domain of TCR clone 348117 (TRAV12-3, TRAJ29)
CAMILLSGTTPLVF

SEQ ID NO: 696234 - protein, 16 aa, Homo sapiens
  CDR3 for beta chain variable domain of TCR clone 348117 (TRBV28, TRBJ2-7)
CASSSGTSRRGYEHYF

SEQ ID NO: 696235 - protein, 15 aa, Homo sapiens
  CDR3 for alpha chain variable domain of TCR clone 348118 (TRAV29/DV5, TRAJ24)
CAASGATDSWGKFQF

SEQ ID NO: 696236 - protein, 12 aa, Homo sapiens
  CDR3 for beta chain variable domain of TCR clone 348118 (TRBV11-2, TRBJ2-2)
CASSLPTGELFL

SEQ ID NO: 696237 - protein, 12 aa, Homo sapiens
  CDR3 for alpha chain variable domain of TCR clone 348119 (TRAV21, TRAJ11)
CAATSGYSTLTF

SEQ ID NO: 696238 - protein, 16 aa, Homo sapiens
  CDR3 for beta chain variable domain of TCR clone 348119 (TRBV4-2, TRBJ1-4)
CASSQARGPTNEKLFF

SEQ ID NO: 696239 - protein, 13 aa, Homo sapiens
  CDR3 for alpha chain variable domain of TCR clone 348120 (TRAV8-6, TRAJ49)
CAVITNTGNQSYF

SEQ ID NO: 696240 - protein, 17 aa, Homo sapiens
  CDR3 for beta chain variable domain of TCR clone 348120 (TRBV11-2, TRBJ2-1)
CASSLCPPGVEYNEQFF

SEQ ID NO: 696241 - protein, 14 aa, Homo sapiens
  CDR3 for alpha chain variable domain of TCR clone 348121 (TRAV12-2, TRAJ13)
CAVKKTGGYQKVTF

SEQ ID NO: 696242 - protein, 15 aa, Homo sapiens
  CDR3 for beta chain variable domain of TCR clone 348121 (TRBV9, TRBJ1-6)
CASSVAGTGDSPLHF

SEQ ID NO: 696243 - protein, 14 aa, Homo sapiens
  CDR3 for alpha chain variable domain of TCR clone 348122 (TRAV12-3, TRAJ29)
CAMILLSGNTPLVF

SEQ ID NO: 696244 - protein, 14 aa, Homo sapiens
  CDR3 for beta chain variable domain of TCR clone 348122 (TRBV7-6, TRBJ1-6)
CASSQAGGGSPLHF

SEQ ID NO: 696245 - protein, 14 aa, Homo sapiens
  CDR3 for alpha chain variable domain of TCR clone 348123 (TRAV13-1, TRAJ20)
CAARPGSNGYKLSF

SEQ ID NO: 696246 - protein, 15 aa, Homo sapiens
  CDR3 for beta chain variable domain of TCR clone 348123 (TRBV4-1, TRBJ2-7)
FASSQQGQGFDEQYF

SEQ ID NO: 696247 - protein, 13 aa, Homo sapiens
  CDR3 for alpha chain variable domain of TCR clone 348124 (TRAV8-3, TRAJ28)
CAVGAVGSYQLTF

SEQ ID NO: 696248 - protein, 15 aa, Homo sapiens
  CDR3 for beta chain variable domain of TCR clone 348124 (TRBV4-1, TRBJ2-5)
CASSQWDLYQETQYF

SEQ ID NO: 696249 - protein, 14 aa, Homo sapiens
  CDR3 for alpha chain variable domain of TCR clone 348125 (TRAV12-1, TRAJ43)
CVVNGRSNSNDTRF

SEQ ID NO: 696250 - protein, 13 aa, Homo sapiens
  CDR3 for beta chain variable domain of TCR clone 348125 (TRBV27, TRBJ1-1)
CASSLSIGAESFF

SEQ ID NO: 696251 - protein, 18 aa, Homo sapiens
  CDR3 for alpha chain variable domain of TCR clone 348126 (TRAV8-4, TRAJ52)
CAVTRANAGGTSDGKLTF

SEQ ID NO: 696252 - protein, 14 aa, Homo sapiens
  CDR3 for beta chain variable domain of TCR clone 348126 (TRBV19, TRBJ2-7)
CASTVQGRPYEQYF

SEQ ID NO: 696253 - protein, 13 aa, Homo sapiens
  CDR3 for alpha chain variable domain of TCR clone 348127 (TRAV35, TRAJ22)
CAGLSGSARQLTF

SEQ ID NO: 696254 - protein, 16 aa, Homo sapiens
  CDR3 for beta chain variable domain of TCR clone 348127 (TRBV7-9, TRBJ2-1)
CASSLVLTGKGNEQFF

SEQ ID NO: 696255 - protein, 15 aa, Homo sapiens
  CDR3 for alpha chain variable domain of TCR clone 348128 (TRAV8-3, TRAJ11)
CALGLLNSGYSTLTF

SEQ ID NO: 696256 - protein, 16 aa, Homo sapiens
  CDR3 for beta chain variable domain of TCR clone 348128 (TRBV7-9, TRBJ1-2)
CASTLGFSSGEDGYTF

SEQ ID NO: 696257 - protein, 14 aa, Homo sapiens
  CDR3 for alpha chain variable domain of TCR clone 348129 (TRAV20, TRAJ29)
CAVRAWVGNTPLVF

SEQ ID NO: 696258 - protein, 15 aa, Homo sapiens
  CDR3 for beta chain variable domain of TCR clone 348129 (TRBV29-1, TRBJ2-7)
CSVEFFDRGSYEQYF

SEQ ID NO: 696259 - protein, 14 aa, Homo sapiens
  CDR3 for alpha chain variable domain of TCR clone 348130 (TRAV8-1, TRAJ24)
CAVNAADSWGKLQF

SEQ ID NO: 696260 - protein, 16 aa, Homo sapiens
  CDR3 for beta chain variable domain of TCR clone 348130 (TRBV4-3, TRBJ2-1)
CASSPALDRGENEQFF

SEQ ID NO: 696261 - protein, 16 aa, Homo sapiens
  CDR3 for alpha chain variable domain of TCR clone 348131 (TRAV35, TRAJ28)
CAGYLYSGAGSHQLTF

SEQ ID NO: 696262 - protein, 16 aa, Homo sapiens
  CDR3 for beta chain variable domain of TCR clone 348131 (TRBV5-1, TRBJ2-1)
CASSHGLAGPQNEQFF

SEQ ID NO: 696263 - protein, 14 aa, Homo sapiens
  CDR3 for alpha chain variable domain of TCR clone 348132 (TRAV1-2, TRAJ16)
CAVNRFSDGQNLLF

SEQ ID NO: 696264 - protein, 13 aa, Homo sapiens
  CDR3 for beta chain variable domain of TCR clone 348132 (TRBV19, TRBJ1-2)
CASSVPGQDGYTF

SEQ ID NO: 696265 - protein, 14 aa, Homo sapiens
  CDR3 for alpha chain variable domain of TCR clone 348133 (TRAV38-1, TRAJ40)
CALRPTSGTYKYIF

SEQ ID NO: 696266 - protein, 16 aa, Homo sapiens
  CDR3 for beta chain variable domain of TCR clone 348133 (TRBV28, TRBJ2-7)
CASSLFFETGGPEQYF

SEQ ID NO: 696267 - protein, 16 aa, Homo sapiens
  CDR3 for alpha chain variable domain of TCR clone 348134 (TRAV12-1, TRAJ42)
CVVTPYYGGSQGNLIF

SEQ ID NO: 696268 - protein, 17 aa, Homo sapiens
  CDR3 for beta chain variable domain of TCR clone 348134 (TRBV28, TRBJ2-3)
CASSPTPAGGRVDTQYF

SEQ ID NO: 696269 - protein, 15 aa, Homo sapiens
  CDR3 for alpha chain variable domain of TCR clone 348135 (TRAV8-3, TRAJ11)
CAVGLLNSGYSTLTF

SEQ ID NO: 696270 - protein, 16 aa, Homo sapiens
  CDR3 for beta chain variable domain of TCR clone 348135 (TRBV28, TRBJ2-1)
CASSWWGRTSGTLQFF

SEQ ID NO: 696271 - protein, 21 aa, Homo sapiens
  CDR3 for alpha chain variable domain of TCR clone 348136 (TRAV27, TRAJ24)
ASTSVRNDIPTTTDSWGKLQF

SEQ ID NO: 696272 - protein, 15 aa, Homo sapiens
  CDR3 for beta chain variable domain of TCR clone 348136 (TRBV11-2, TRBJ2-1)
CASSKNRGLIYEQFF

SEQ ID NO: 696273 - protein, 14 aa, Homo sapiens
  CDR3 for alpha chain variable domain of TCR clone 348137 (TRAV29/DV5, TRAJ32)
CAAAYGCATTQLIF

SEQ ID NO: 696274 - protein, 15 aa, Homo sapiens
  CDR3 for beta chain variable domain of TCR clone 348137 (TRBV27, TRBJ2-7)
CASSTAGTGSYEQYF

SEQ ID NO: 696275 - protein, 12 aa, Homo sapiens
  CDR3 for alpha chain variable domain of TCR clone 348138 (TRAV12-3, TRAJ40)
CAMSSGTYKYIF

SEQ ID NO: 696276 - protein, 15 aa, Homo sapiens
  CDR3 for beta chain variable domain of TCR clone 348138 (TRBV7-3, TRBJ2-2)
CASSGTGQGTEELFF

SEQ ID NO: 696277 - protein, 13 aa, Homo sapiens
  CDR3 for alpha chain variable domain of TCR clone 348139 (TRAV2, TRAJ40)
CAVVTSGTYKYIF

SEQ ID NO: 696278 - protein, 14 aa, Homo sapiens
  CDR3 for beta chain variable domain of TCR clone 348139 (TRBV19, TRBJ2-1)
CASSRLASINEQFF

SEQ ID NO: 696279 - protein, 14 aa, Homo sapiens
  CDR3 for alpha chain variable domain of TCR clone 348140 (TRAV12-1, TRAJ3)
CVVNPGSSASKIIF

SEQ ID NO: 696280 - protein, 18 aa, Homo sapiens
  CDR3 for beta chain variable domain of TCR clone 348140 (TRBV4-2, TRBJ1-2)
CASSQDKVGHTANYGYSF

SEQ ID NO: 696281 - protein, 12 aa, Homo sapiens
  CDR3 for alpha chain variable domain of TCR clone 348141 (TRAV12-3, TRAJ17)
CAMTLTGNKLTF

SEQ ID NO: 696282 - protein, 12 aa, Homo sapiens
  CDR3 for beta chain variable domain of TCR clone 348141 (TRBV18, TRBJ1-4)
CASAPSREKLFF

SEQ ID NO: 696283 - protein, 15 aa, Homo sapiens
  CDR3 for alpha chain variable domain of TCR clone 348142 (TRAV3, TRAJ9)
CAVRDINTGGFTTIF

SEQ ID NO: 696284 - protein, 13 aa, Homo sapiens
  CDR3 for beta chain variable domain of TCR clone 348142 (TRBV19, TRBJ2-7)
CASSIPSVREQYF

SEQ ID NO: 696285 - protein, 13 aa, Homo sapiens
  CDR3 for alpha chain variable domain of TCR clone 348143 (TRAV39, TRAJ33)
CAANPDSNYQLIW

SEQ ID NO: 696286 - protein, 17 aa, Homo sapiens
  CDR3 for beta chain variable domain of TCR clone 348143 (TRBV13, TRBJ2-3)
CASSLSRVAGGRNTQYF

SEQ ID NO: 696287 - protein, 14 aa, Homo sapiens
  CDR3 for alpha chain variable domain of TCR clone 348144 (TRAV12-1, TRAJ30)
CVVNIGGRDHKIIF

SEQ ID NO: 696288 - protein, 13 aa, Homo sapiens
  CDR3 for beta chain variable domain of TCR clone 348144 (TRBV12-5, TRBJ2-1)
CASGLGRGNEQFF

SEQ ID NO: 696289 - protein, 15 aa, Homo sapiens
  CDR3 for alpha chain variable domain of TCR clone 348145 (TRAV12-1, TRAJ45)
CVVLSGGGGADGLTF

SEQ ID NO: 696290 - protein, 14 aa, Homo sapiens
  CDR3 for beta chain variable domain of TCR clone 348145 (TRBV11-2, TRBJ2-5)
YASSRTGGIETQYF

SEQ ID NO: 696291 - protein, 16 aa, Homo sapiens
  CDR3 for alpha chain variable domain of TCR clone 348146 (TRAV21, TRAJ37)
CAVRTAGSSDTGKRIF

SEQ ID NO: 696292 - protein, 13 aa, Homo sapiens
  CDR3 for beta chain variable domain of TCR clone 348146 (TRBV7-9, TRBJ2-5)
CASLPSGRETQYF

SEQ ID NO: 696293 - protein, 16 aa, Homo sapiens
  CDR3 for alpha chain variable domain of TCR clone 348147 (TRAV3, TRAJ37)
CAVRPHGSGNAGKLIF

SEQ ID NO: 696294 - protein, 11 aa, Homo sapiens
  CDR3 for beta chain variable domain of TCR clone 348147 (TRBV10-3, TRBJ2-7)
CAISEGLEQYF

SEQ ID NO: 696295 - protein, 16 aa, Homo sapiens
  CDR3 for alpha chain variable domain of TCR clone 348148 (TRAV16, TRAJ42)
CARKMNYGGSQGNFIF

SEQ ID NO: 696296 - protein, 15 aa, Homo sapiens
  CDR3 for beta chain variable domain of TCR clone 348148 (TRBV20-1, TRBJ2-7)
CSAREGRDSLYEQYF

SEQ ID NO: 696297 - protein, 16 aa, Homo sapiens
  CDR3 for alpha chain variable domain of TCR clone 348149 (TRAV30, TRAJ24)
CGTEIVGADSWGKFQF

SEQ ID NO: 696298 - protein, 14 aa, Homo sapiens
  CDR3 for beta chain variable domain of TCR clone 348149 (TRBV12-5, TRBJ2-5)
CASGSRTHQDTQYF

SEQ ID NO: 696299 - protein, 10 aa, Homo sapiens
  CDR3 for alpha chain variable domain of TCR clone 348150 (TRAV1-2, TRAJ23)
GAGQGGKLIF

SEQ ID NO: 696300 - protein, 16 aa, Homo sapiens
  CDR3 for beta chain variable domain of TCR clone 348150 (TRBV11-2, TRBJ1-1)
CASSLRQGGEHSKAFF

SEQ ID NO: 696301 - protein, 15 aa, Homo sapiens
  CDR3 for alpha chain variable domain of TCR clone 348151 (TRAV26-1, TRAJ29)
CIVRVEGSGNTPLVF

SEQ ID NO: 696302 - protein, 15 aa, Homo sapiens
  CDR3 for beta chain variable domain of TCR clone 348151 (TRBV28, TRBJ2-5)
CASSRGQGSIETQYF

SEQ ID NO: 696303 - protein, 16 aa, Homo sapiens
  CDR3 for alpha chain variable domain of TCR clone 348152 (TRAV30, TRAJ24)
CGTEIVDADSWGKFQF

SEQ ID NO: 696304 - protein, 12 aa, Homo sapiens
  CDR3 for beta chain variable domain of TCR clone 348152 (TRBV6-5, TRBJ2-7)
CASSDRQNEQYF

SEQ ID NO: 696305 - protein, 16 aa, Homo sapiens
  CDR3 for alpha chain variable domain of TCR clone 348153 (TRAV8-4, TRAJ52)
CAAANAGGTSHGKLTF

SEQ ID NO: 696306 - protein, 15 aa, Homo sapiens
  CDR3 for beta chain variable domain of TCR clone 348153 (TRBV6-3, TRBJ2-7)
CASSSPGTVFYEQYF

SEQ ID NO: 696307 - protein, 15 aa, Homo sapiens
  CDR3 for alpha chain variable domain of TCR clone 348154 (TRAV3, TRAJ20)
CAVRDIKLSDYKLSF

SEQ ID NO: 696308 - protein, 13 aa, Homo sapiens
  CDR3 for beta chain variable domain of TCR clone 348154 (TRBV28, TRBJ2-5)
CASSFAGGETQYF

SEQ ID NO: 696309 - protein, 12 aa, Homo sapiens
  CDR3 for alpha chain variable domain of TCR clone 348155 (TRAV12-1, TRAJ40)
CVFYSGTYKYIL

SEQ ID NO: 696310 - protein, 15 aa, Homo sapiens
  CDR3 for beta chain variable domain of TCR clone 348155 (TRBV7-2, TRBJ2-1)
CASSSGLAGGNEQFF

SEQ ID NO: 696311 - protein, 12 aa, Homo sapiens
  CDR3 for alpha chain variable domain of TCR clone 348156 (TRAV6, TRAJ15)
CVRNQAGTALIF

SEQ ID NO: 696312 - protein, 13 aa, Homo sapiens
  CDR3 for beta chain variable domain of TCR clone 348156 (TRBV7-3, TRBJ1-1)
CASSQDWGAEAFF

SEQ ID NO: 696313 - protein, 13 aa, Homo sapiens
  CDR3 for alpha chain variable domain of TCR clone 348157 (TRAV21, TRAJ27)
CAARPGNAGQSTF

SEQ ID NO: 696314 - protein, 15 aa, Homo sapiens
  CDR3 for beta chain variable domain of TCR clone 348157 (TRBV11-3, TRBJ2-7)
CASSPGPASSYEQYF

SEQ ID NO: 696315 - protein, 16 aa, Homo sapiens
  CDR3 for alpha chain variable domain of TCR clone 348158 (TRAV12-1, TRAJ43)
CVVNPHRFGAGTRLTV

SEQ ID NO: 696316 - protein, 14 aa, Homo sapiens
  CDR3 for beta chain variable domain of TCR clone 348158 (TRBV19, TRBJ2-1)
CASPTFVLSGEQFF

SEQ ID NO: 696317 - protein, 15 aa, Homo sapiens
  CDR3 for alpha chain variable domain of TCR clone 348159 (TRAV3, TRAJ20)
CAVRDIKLSDYKLSF

SEQ ID NO: 696318 - protein, 11 aa, Homo sapiens
  CDR3 for beta chain variable domain of TCR clone 348159 (TRBV7-9, TRBJ1-6)
CASSSPGRGKF

SEQ ID NO: 696319 - protein, 14 aa, Homo sapiens
  CDR3 for alpha chain variable domain of TCR clone 348160 (TRAV1-2, TRAJ16)
CAVNRFSDGQKLLF

SEQ ID NO: 696320 - protein, 12 aa, Homo sapiens
  CDR3 for beta chain variable domain of TCR clone 348160 (TRBV19, TRBJ2-1)
CASSRQGAEQFF

SEQ ID NO: 696321 - protein, 12 aa, Homo sapiens
  CDR3 for alpha chain variable domain of TCR clone 348161 (TRAV21, TRAJ33)
CAVQVSNYQLIW

SEQ ID NO: 696322 - protein, 14 aa, Homo sapiens
  CDR3 for beta chain variable domain of TCR clone 348161 (TRBV28, TRBJ2-1)
CASSPGEGGNEQFF

SEQ ID NO: 696323 - protein, 18 aa, Homo sapiens
  CDR3 for alpha chain variable domain of TCR clone 348162 (TRAV13-1, TRAJ52)
CAARKRSAGGTSYGKLTF

SEQ ID NO: 696324 - protein, 12 aa, Homo sapiens
  CDR3 for beta chain variable domain of TCR clone 348162 (TRBV12-4, TRBJ2-7)
CASSLGGYEQYF

SEQ ID NO: 696325 - protein, 11 aa, Homo sapiens
  CDR3 for alpha chain variable domain of TCR clone 348163 (TRAV2, TRAJ21)
CAVFNFNKFYF

SEQ ID NO: 696326 - protein, 14 aa, Homo sapiens
  CDR3 for beta chain variable domain of TCR clone 348163 (TRBV4-2, TRBJ2-1)
CASGLDRAYNEQFF

SEQ ID NO: 696327 - protein, 12 aa, Homo sapiens
  CDR3 for alpha chain variable domain of TCR clone 348164 (TRAV12-3, TRAJ17)
CAMTLTGNQLTF

SEQ ID NO: 696328 - protein, 15 aa, Homo sapiens
  CDR3 for beta chain variable domain of TCR clone 348164 (TRBV19, TRBJ2-1)
CASSILGEGRNEQFF

SEQ ID NO: 696329 - protein, 16 aa, Homo sapiens
  CDR3 for alpha chain variable domain of TCR clone 348165 (TRAV13-1, TRAJ48)
CSKYRESNFGHEKLTF

SEQ ID NO: 696330 - protein, 17 aa, Homo sapiens
  CDR3 for beta chain variable domain of TCR clone 348165 (TRBV28, TRBJ2-1)
CASSSARQALTYNEQFF

SEQ ID NO: 696331 - protein, 15 aa, Homo sapiens
  CDR3 for alpha chain variable domain of TCR clone 348166 (TRAV12-3, TRAJ13)
CAMSARSGGYQKVTF

SEQ ID NO: 696332 - protein, 13 aa, Homo sapiens
  CDR3 for beta chain variable domain of TCR clone 348166 (TRBV7-9, TRBJ1-2)
CAGSLKQNYGYTF

SEQ ID NO: 696333 - protein, 14 aa, Homo sapiens
  CDR3 for alpha chain variable domain of TCR clone 348167 (TRAV25, TRAJ44)
CAVFPTVTASKLTF

SEQ ID NO: 696334 - protein, 14 aa, Homo sapiens
  CDR3 for beta chain variable domain of TCR clone 348167 (TRBV19, TRBJ1-1)
CASTGHRLNTEAFF

SEQ ID NO: 696335 - protein, 15 aa, Homo sapiens
  CDR3 for alpha chain variable domain of TCR clone 348168 (TRAV3, TRAJ5)
CAVRDLDTGRRALTF

SEQ ID NO: 696336 - protein, 14 aa, Homo sapiens
  CDR3 for beta chain variable domain of TCR clone 348168 (TRBV27, TRBJ2-2)
CASSLGAATGELFF

SEQ ID NO: 696337 - protein, 13 aa, Homo sapiens
  CDR3 for alpha chain variable domain of TCR clone 348169 (TRAV13-1, TRAJ11)
CAAVLPGYSTLTF

SEQ ID NO: 696338 - protein, 17 aa, Homo sapiens
  CDR3 for beta chain variable domain of TCR clone 348169 (TRBV25-1, TRBJ2-7)
CASSDARVVFSSYEQYF

SEQ ID NO: 696339 - protein, 23 aa, Homo sapiens
  CDR3 for alpha chain variable domain of TCR clone 348170 (TRAV26-1, TRAJ38)
CIADNAGNNHIQNPDPAVYPLRD

SEQ ID NO: 696340 - protein, 17 aa, Homo sapiens
  CDR3 for beta chain variable domain of TCR clone 348170 (TRBV11-2, TRBJ2-6)
CASSQRDIFSGANVLTF

SEQ ID NO: 696341 - protein, 13 aa, Homo sapiens
  CDR3 for alpha chain variable domain of TCR clone 348171 (TRAV3, TRAJ21)
CAVRAPDFNKFYF

SEQ ID NO: 696342 - protein, 16 aa, Homo sapiens
  CDR3 for beta chain variable domain of TCR clone 348171 (TRBV12-4, TRBJ2-1)
CASSAVGQGNGDEQFF

SEQ ID NO: 696343 - protein, 14 aa, Homo sapiens
  CDR3 for alpha chain variable domain of TCR clone 348172 (TRAV26-1, TRAJ45)
CIEVTGGGADGLTF

SEQ ID NO: 696344 - protein, 13 aa, Homo sapiens
  CDR3 for beta chain variable domain of TCR clone 348172 (TRBV6-3, TRBJ1-1)
CASSYGRGSGAFF

SEQ ID NO: 696345 - protein, 12 aa, Homo sapiens
  CDR3 for alpha chain variable domain of TCR clone 348173 (TRAV13-1, TRAJ49)
CAASPMGKQFYF

SEQ ID NO: 696346 - protein, 17 aa, Homo sapiens
  CDR3 for beta chain variable domain of TCR clone 348173 (TRBV11-2, TRBJ2-1)
CASSLYPPGVEYNEQFF

SEQ ID NO: 696347 - protein, 13 aa, Homo sapiens
  CDR3 for alpha chain variable domain of TCR clone 348174 (TRAV21, TRAJ27)
CAARPGNAGKSTF

SEQ ID NO: 696348 - protein, 16 aa, Homo sapiens
  CDR3 for beta chain variable domain of TCR clone 348174 (TRBV7-6, TRBJ2-1)
CIAVPAAWGGADEQLF

SEQ ID NO: 696349 - protein, 11 aa, Homo sapiens
  CDR3 for alpha chain variable domain of TCR clone 348175 (TRAV12-1, TRAJ30)
CVVNGQDKIIF

SEQ ID NO: 696350 - protein, 12 aa, Homo sapiens
  CDR3 for beta chain variable domain of TCR clone 348175 (TRBV27, TRBJ2-2)
CASKLCTGEMFF

SEQ ID NO: 696351 - protein, 15 aa, Homo sapiens
  CDR3 for alpha chain variable domain of TCR clone 348176 (TRAV23/DV6, TRAJ12)
CAAIDLGAMDSSYKL

SEQ ID NO: 696352 - protein, 14 aa, Homo sapiens
  CDR3 for beta chain variable domain of TCR clone 348176 (TRBV20-1, TRBJ2-1)
CSARRGGSYNEQFC

SEQ ID NO: 696353 - protein, 13 aa, Homo sapiens
  CDR3 for alpha chain variable domain of TCR clone 348177 (TRAV21, TRAJ27)
CAARPGNSGKSTF

SEQ ID NO: 696354 - protein, 14 aa, Homo sapiens
  CDR3 for beta chain variable domain of TCR clone 348177 (TRBV7-6, TRBJ2-3)
CASSVGTVTDTQYF

SEQ ID NO: 696355 - protein, 14 aa, Homo sapiens
  CDR3 for alpha chain variable domain of TCR clone 348178 (TRAV12-1, TRAJ30)
CVVNIGGRDDKIIF

SEQ ID NO: 696356 - protein, 14 aa, Homo sapiens
  CDR3 for beta chain variable domain of TCR clone 348178 (TRBV7-9, TRBJ2-3)
CASSLEDGTDTQYF

SEQ ID NO: 696357 - protein, 13 aa, Homo sapiens
  CDR3 for alpha chain variable domain of TCR clone 348179 (TRAV26-2, TRAJ45)
AAVYGGGPDGLTF

SEQ ID NO: 696358 - protein, 13 aa, Homo sapiens
  CDR3 for beta chain variable domain of TCR clone 348179 (TRBV10-3, TRBJ2-7)
CASKLAVNYEQYF

SEQ ID NO: 696359 - protein, 14 aa, Homo sapiens
  CDR3 for alpha chain variable domain of TCR clone 348180 (TRAV21, TRAJ52)
CGRAGGTSYGKLTF

SEQ ID NO: 696360 - protein, 18 aa, Homo sapiens
  CDR3 for beta chain variable domain of TCR clone 348180 (TRBV4-3, TRBJ1-2)
CASSQDGQSAPPDYGYTF

SEQ ID NO: 696361 - protein, 12 aa, Homo sapiens
  CDR3 for alpha chain variable domain of TCR clone 348181 (TRAV6, TRAJ9)
CALNTGGFKTIF

SEQ ID NO: 696362 - protein, 16 aa, Homo sapiens
  CDR3 for beta chain variable domain of TCR clone 348181 (TRBV19, TRBJ2-1)
CASSKAGPSSYNEQFF

SEQ ID NO: 696363 - protein, 14 aa, Homo sapiens
  CDR3 for alpha chain variable domain of TCR clone 348182 (TRAV12-2, TRAJ13)
CAVKKTGGYRKVTF

SEQ ID NO: 696364 - protein, 17 aa, Homo sapiens
  CDR3 for beta chain variable domain of TCR clone 348182 (TRBV13, TRBJ2-3)
RASSLSRVAGGRNTQYF

SEQ ID NO: 696365 - protein, 12 aa, Homo sapiens
  CDR3 for alpha chain variable domain of TCR clone 348183 (TRAV2, TRAJ9)
CAVGAGGFKTIF

SEQ ID NO: 696366 - protein, 16 aa, Homo sapiens
  CDR3 for beta chain variable domain of TCR clone 348183 (TRBV13, TRBJ2-2)
CASRPRTGEHTGGLFF

SEQ ID NO: 696367 - protein, 12 aa, Homo sapiens
  CDR3 for alpha chain variable domain of TCR clone 348184 (TRAV8-4, TRAJ20)
CAVRDDDYKLSF

SEQ ID NO: 696368 - protein, 17 aa, Homo sapiens
  CDR3 for beta chain variable domain of TCR clone 348184 (TRBV12-4, TRBJ1-5)
CASSRHQAGGVNQPQHF

SEQ ID NO: 696369 - protein, 13 aa, Homo sapiens
  CDR3 for alpha chain variable domain of TCR clone 348185 (TRAV8-4, TRAJ54)
CAVRIQGAQKLVF

SEQ ID NO: 696370 - protein, 16 aa, Homo sapiens
  CDR3 for beta chain variable domain of TCR clone 348185 (TRBV9, TRBJ1-2)
CASSVEEKVSPYGYTF

SEQ ID NO: 696371 - protein, 12 aa, Homo sapiens
  CDR3 for alpha chain variable domain of TCR clone 348186 (TRAV17, TRAJ12)
CATLRSSYKFIF

SEQ ID NO: 696372 - protein, 16 aa, Homo sapiens
  CDR3 for beta chain variable domain of TCR clone 348186 (TRBV28, TRBJ2-7)
CASSLFFETGGAEQYF

SEQ ID NO: 696373 - protein, 12 aa, Homo sapiens
  CDR3 for alpha chain variable domain of TCR clone 348187 (TRAV13-2, TRAJ23)
CAERHRGGKLIF

SEQ ID NO: 696374 - protein, 15 aa, Homo sapiens
  CDR3 for beta chain variable domain of TCR clone 348187 (TRBV6-1, TRBJ2-7)
CASSESMGDFYEQYF

SEQ ID NO: 696375 - protein, 12 aa, Homo sapiens
  CDR3 for alpha chain variable domain of TCR clone 348188 (TRAV8-3, TRAJ26)
CAGDNYGQNFVF

SEQ ID NO: 696376 - protein, 13 aa, Homo sapiens
  CDR3 for beta chain variable domain of TCR clone 348188 (TRBV28, TRBJ2-7)
CASKAGGVYEQYF

SEQ ID NO: 696377 - protein, 17 aa, Homo sapiens
  CDR3 for alpha chain variable domain of TCR clone 348189 (TRAV3, TRAJ38)
CAVRDCLNAGNNRKRIW

SEQ ID NO: 696378 - protein, 12 aa, Homo sapiens
  CDR3 for beta chain variable domain of TCR clone 348189 (TRBV11-2, TRBJ2-2)
CASSLPTGELFF

SEQ ID NO: 696379 - protein, 21 aa, Homo sapiens
  CDR3 for alpha chain variable domain of TCR clone 348190 (TRAV1-1, TRAJ22)
CLLLLRCERSGSSGSAGQLTF

SEQ ID NO: 696380 - protein, 12 aa, Homo sapiens
  CDR3 for beta chain variable domain of TCR clone 348190 (TRBV5-5, TRBJ2-5)
CASSYFGETQYF

SEQ ID NO: 696381 - protein, 16 aa, Homo sapiens
  CDR3 for alpha chain variable domain of TCR clone 348191 (TRAV30, TRAJ24)
CGTEIVDADSWGKFQF

SEQ ID NO: 696382 - protein, 13 aa, Homo sapiens
  CDR3 for beta chain variable domain of TCR clone 348191 (TRBV4-2, TRBJ2-3)
CASSQDWQHTQYF

SEQ ID NO: 696383 - protein, 12 aa, Homo sapiens
  CDR3 for alpha chain variable domain of TCR clone 348192 (TRAV27, TRAJ21)
CAGVRQLQQILL

SEQ ID NO: 696384 - protein, 14 aa, Homo sapiens
  CDR3 for beta chain variable domain of TCR clone 348192 (TRBV7-9, TRBJ1-4)
CASSLEGQSDKLFF

SEQ ID NO: 696385 - protein, 18 aa, Homo sapiens
  CDR3 for alpha chain variable domain of TCR clone 348193 (TRAV26-1, TRAJ52)
CIFRVEGAVGTSYGKLTF

SEQ ID NO: 696386 - protein, 13 aa, Homo sapiens
  CDR3 for beta chain variable domain of TCR clone 348193 (TRBV7-3, TRBJ1-2)
CASSLKRGYGYTF

SEQ ID NO: 696387 - protein, 12 aa, Homo sapiens
  CDR3 for alpha chain variable domain of TCR clone 348194 (TRAV12-3, TRAJ20)
CAMVRGDYKLSF

SEQ ID NO: 696388 - protein, 16 aa, Homo sapiens
  CDR3 for beta chain variable domain of TCR clone 348194 (TRBV5-1, TRBJ2-3)
CASSVGLAVYTDTQYF

SEQ ID NO: 696389 - protein, 15 aa, Homo sapiens
  CDR3 for alpha chain variable domain of TCR clone 348195 (TRAV1-2, TRAJ16)
CAVRARFSDGQKLIF

SEQ ID NO: 696390 - protein, 19 aa, Homo sapiens
  CDR3 for beta chain variable domain of TCR clone 348195 (TRBV11-3, TRBJ2-3)
CASGFGTSGGPRGGGTQYF

SEQ ID NO: 696391 - protein, 16 aa, Homo sapiens
  CDR3 for alpha chain variable domain of TCR clone 348196 (TRAV23/DV6, TRAJ9)
CAASIGGNTGGFKTSF

SEQ ID NO: 696392 - protein, 13 aa, Homo sapiens
  CDR3 for beta chain variable domain of TCR clone 348196 (TRBV7-9, TRBJ1-2)
CASSLKQNYGYTF

SEQ ID NO: 696393 - protein, 15 aa, Homo sapiens
  CDR3 for alpha chain variable domain of TCR clone 348197 (TRAV26-1, TRAJ23)
CMVRVAGYQGGKLIF

SEQ ID NO: 696394 - protein, 18 aa, Homo sapiens
  CDR3 for beta chain variable domain of TCR clone 348197 (TRBV28, TRBJ2-1)
CASSSTSGRANSYNEQFF

SEQ ID NO: 696395 - protein, 15 aa, Homo sapiens
  CDR3 for alpha chain variable domain of TCR clone 348198 (TRAV13-1, TRAJ50)
CAAKGSETSYDKVIF

SEQ ID NO: 696396 - protein, 18 aa, Homo sapiens
  CDR3 for beta chain variable domain of TCR clone 348198 (TRBV10-3, TRBJ2-1)
CTSVPSVSLWGGVDEQFF

SEQ ID NO: 696397 - protein, 12 aa, Homo sapiens
  CDR3 for alpha chain variable domain of TCR clone 348199 (TRAV12-3, TRAJ17)
CAMTLTGNKITF

SEQ ID NO: 696398 - protein, 14 aa, Homo sapiens
  CDR3 for beta chain variable domain of TCR clone 348199 (TRBV12-5, TRBJ2-5)
CASGSRTHQETQYF

SEQ ID NO: 696399 - protein, 12 aa, Homo sapiens
  CDR3 for alpha chain variable domain of TCR clone 348200 (TRAV26-1, TRAJ13)
CNVSRGYQKVTF

SEQ ID NO: 696400 - protein, 16 aa, Homo sapiens
  CDR3 for beta chain variable domain of TCR clone 348200 (TRBV27, TRBJ2-1)
CASSLSKGFGLDEQFF

SEQ ID NO: 696401 - protein, 13 aa, Homo sapiens
  CDR3 for alpha chain variable domain of TCR clone 348201 (TRAV2, TRAJ40)
CAVVTSGTYKYIF

SEQ ID NO: 696402 - protein, 16 aa, Homo sapiens
  CDR3 for beta chain variable domain of TCR clone 348201 (TRBV7-7, TRBJ2-3)
CASSPGTSGSTDTQYF

SEQ ID NO: 696403 - protein, 19 aa, Homo sapiens
  CDR3 for alpha chain variable domain of TCR clone 348202 (TRAV8-4, TRAJ3)
CAVTGENLVQQCFQDNLWI

SEQ ID NO: 696404 - protein, 15 aa, Homo sapiens
  CDR3 for beta chain variable domain of TCR clone 348202 (TRBV6-5, TRBJ2-1)
CASSYDAGAGNEQFF

SEQ ID NO: 696405 - protein, 12 aa, Homo sapiens
  CDR3 for alpha chain variable domain of TCR clone 348203 (TRAV12-3, TRAJ17)
CAMTLTGNKLTF

SEQ ID NO: 696406 - protein, 13 aa, Homo sapiens
  CDR3 for beta chain variable domain of TCR clone 348203 (TRBV2, TRBJ2-7)
CASSGGSAYEQYF

SEQ ID NO: 696407 - protein, 16 aa, Homo sapiens
  CDR3 for alpha chain variable domain of TCR clone 348204 (TRAV8-4, TRAJ52)
CAVRKGGGTSYGKLTF

SEQ ID NO: 696408 - protein, 11 aa, Homo sapiens
  CDR3 for beta chain variable domain of TCR clone 348204 (TRBV11-2, TRBJ1-1)
CASSINTEAFF

SEQ ID NO: 696409 - protein, 10 aa, Homo sapiens
  CDR3 for alpha chain variable domain of TCR clone 348205 (TRAV3, TRAJ6)
CAVRDGPGQE

SEQ ID NO: 696410 - protein, 20 aa, Homo sapiens
  CDR3 for beta chain variable domain of TCR clone 348205 (TRBV28, TRBJ2-1)
CASTPIGRSPGLAGGNEQFF

SEQ ID NO: 696411 - protein, 18 aa, Homo sapiens
  CDR3 for alpha chain variable domain of TCR clone 348206 (TRAV26-2, TRAJ54)
CILRDVEVGIQGAQKLVF

SEQ ID NO: 696412 - protein, 15 aa, Homo sapiens
  CDR3 for beta chain variable domain of TCR clone 348206 (TRBV7-9, TRBJ1-5)
CASSQGHQPNQPQHF

SEQ ID NO: 696413 - protein, 16 aa, Homo sapiens
  CDR3 for alpha chain variable domain of TCR clone 348207 (TRAV30, TRAJ24)
CGAEIVDADSWGKFQF

SEQ ID NO: 696414 - protein, 13 aa, Homo sapiens
  CDR3 for beta chain variable domain of TCR clone 348207 (TRBV20-1, TRBJ1-1)
CSAPLGGGTEAFF

SEQ ID NO: 696415 - protein, 12 aa, Homo sapiens
  CDR3 for alpha chain variable domain of TCR clone 348208 (TRAV12-1, TRAJ23)
CVVIIPGGKLIF

SEQ ID NO: 696416 - protein, 15 aa, Homo sapiens
  CDR3 for beta chain variable domain of TCR clone 348208 (TRBV6-3, TRBJ2-7)
CASSSPGTVFYEQYF

SEQ ID NO: 696417 - protein, 13 aa, Homo sapiens
  CDR3 for alpha chain variable domain of TCR clone 348209 (TRAV8-4, TRAJ22)
CAVSENSARQLTF

SEQ ID NO: 696418 - protein, 15 aa, Homo sapiens
  CDR3 for beta chain variable domain of TCR clone 348209 (TRBV6-3, TRBJ2-1)
CASSYASDSYNEQFF

SEQ ID NO: 696419 - protein, 15 aa, Homo sapiens
  CDR3 for alpha chain variable domain of TCR clone 348210 (TRAV1-2, TRAJ9)
CAVRDDGTGGFKTIF

SEQ ID NO: 696420 - protein, 15 aa, Homo sapiens
  CDR3 for beta chain variable domain of TCR clone 348210 (TRBV9, TRBJ1-6)
CASSVAGTGDSPLHF

SEQ ID NO: 696421 - protein, 16 aa, Homo sapiens
  CDR3 for alpha chain variable domain of TCR clone 348211 (TRAV30, TRAJ24)
CGTEIVNADSWGKFKF

SEQ ID NO: 696422 - protein, 15 aa, Homo sapiens
  CDR3 for beta chain variable domain of TCR clone 348211 (TRBV7-9, TRBJ1-4)
CASSARTGGNEKLFF

SEQ ID NO: 696423 - protein, 15 aa, Homo sapiens
  CDR3 for alpha chain variable domain of TCR clone 348212 (TRAV4, TRAJ10)
CLVGDGSGGGNKLTF

SEQ ID NO: 696424 - protein, 14 aa, Homo sapiens
  CDR3 for beta chain variable domain of TCR clone 348212 (TRBV9, TRBJ2-4)
CASSPSGTSGFQYF

SEQ ID NO: 696425 - protein, 14 aa, Homo sapiens
  CDR3 for alpha chain variable domain of TCR clone 348213 (TRAV38-1, TRAJ29)
CAFITPSGNTPLVF

SEQ ID NO: 696426 - protein, 13 aa, Homo sapiens
  CDR3 for beta chain variable domain of TCR clone 348213 (TRBV18, TRBJ2-7)
CQLTEMGAYEQYF

SEQ ID NO: 696427 - protein, 17 aa, Homo sapiens
  CDR3 for alpha chain variable domain of TCR clone 348214 (TRAV16, TRAJ37)
CAFWPKNGSSNTGKLIF

SEQ ID NO: 696428 - protein, 18 aa, Homo sapiens
  CDR3 for beta chain variable domain of TCR clone 348214 (TRBV11-2, TRBJ2-3)
CASSLGGASRGAPNTQYF

SEQ ID NO: 696429 - protein, 13 aa, Homo sapiens
  CDR3 for alpha chain variable domain of TCR clone 348215 (TRAV24, TRAJ23)
CASHWNQGGKLIF

SEQ ID NO: 696430 - protein, 16 aa, Homo sapiens
  CDR3 for beta chain variable domain of TCR clone 348215 (TRBV12-5, TRBJ2-5)
CASGPRTSGNQETQYF

SEQ ID NO: 696431 - protein, 12 aa, Homo sapiens
  CDR3 for alpha chain variable domain of TCR clone 348216 (TRAV17, TRAJ20)
CATDSNDYKLSF

SEQ ID NO: 696432 - protein, 14 aa, Homo sapiens
  CDR3 for beta chain variable domain of TCR clone 348216 (TRBV12-4, TRBJ1-2)
CASSSAGHIYGYTF

SEQ ID NO: 696433 - protein, 14 aa, Homo sapiens
  CDR3 for alpha chain variable domain of TCR clone 348217 (TRAV8-4, TRAJ43)
CAVSDPRNNNDMPF

SEQ ID NO: 696434 - protein, 15 aa, Homo sapiens
  CDR3 for beta chain variable domain of TCR clone 348217 (TRBV4-2, TRBJ1-2)
CASSQRTGGRDGYTF

SEQ ID NO: 696435 - protein, 11 aa, Homo sapiens
  CDR3 for alpha chain variable domain of TCR clone 348218 (TRAV2, TRAJ23)
CAVETRGNLIF

SEQ ID NO: 696436 - protein, 14 aa, Homo sapiens
  CDR3 for beta chain variable domain of TCR clone 348218 (TRBV2, TRBJ2-3)
CASSEGQNTDTQYF

SEQ ID NO: 696437 - protein, 13 aa, Homo sapiens
  CDR3 for alpha chain variable domain of TCR clone 348219 (TRAV8-4, TRAJ39)
STPPSDAGNMLTF

SEQ ID NO: 696438 - protein, 13 aa, Homo sapiens
  CDR3 for beta chain variable domain of TCR clone 348219 (TRBV6-3, TRBJ2-5)
CASRRGSQETQYF

SEQ ID NO: 696439 - protein, 16 aa, Homo sapiens
  CDR3 for alpha chain variable domain of TCR clone 348220 (TRAV3, TRAJ37)
CAVRGKGSGNTGKLIF

SEQ ID NO: 696440 - protein, 11 aa, Homo sapiens
  CDR3 for beta chain variable domain of TCR clone 348220 (TRBV7-8, TRBJ2-5)
CASSPSETLYF

SEQ ID NO: 696441 - protein, 12 aa, Homo sapiens
  CDR3 for alpha chain variable domain of TCR clone 348221 (TRAV3, TRAJ20)
CAVRDPDYKLSF

SEQ ID NO: 696442 - protein, 15 aa, Homo sapiens
  CDR3 for beta chain variable domain of TCR clone 348221 (TRBV6-1, TRBJ2-3)
CASSERGGITDTQYF

SEQ ID NO: 696443 - protein, 14 aa, Homo sapiens
  CDR3 for alpha chain variable domain of TCR clone 348222 (TRAV12-3, TRAJ10)
SHLPLTGGGNKLTF

SEQ ID NO: 696444 - protein, 17 aa, Homo sapiens
  CDR3 for beta chain variable domain of TCR clone 348222 (TRBV20-1, TRBJ2-7)
CSATRAGGVAGVEEQYF

SEQ ID NO: 696445 - protein, 13 aa, Homo sapiens
  CDR3 for alpha chain variable domain of TCR clone 348223 (TRAV20, TRAJ34)
CAVRSYNTDKLIF

SEQ ID NO: 696446 - protein, 15 aa, Homo sapiens
  CDR3 for beta chain variable domain of TCR clone 348223 (TRBV20-1, TRBJ1-4)
CSARGQLASNEKLFF

SEQ ID NO: 696447 - protein, 15 aa, Homo sapiens
  CDR3 for alpha chain variable domain of TCR clone 348224 (TRAV12-1, TRAJ15)
CVVTRANQAGTALIF

SEQ ID NO: 696448 - protein, 14 aa, Homo sapiens
  CDR3 for beta chain variable domain of TCR clone 348224 (TRBV5-1, TRBJ1-1)
CASSLVSINTEAFV

SEQ ID NO: 696449 - protein, 16 aa, Homo sapiens
  CDR3 for alpha chain variable domain of TCR clone 348225 (TRAV30, TRAJ24)
FVTEIVDADSWGKFQF

SEQ ID NO: 696450 - protein, 14 aa, Homo sapiens
  CDR3 for beta chain variable domain of TCR clone 348225 (TRBV12-5, TRBJ2-5)
CASGSRTHQETQYF

SEQ ID NO: 696451 - protein, 14 aa, Homo sapiens
  CDR3 for alpha chain variable domain of TCR clone 348226 (TRAV1-2, TRAJ8)
CAVREDTGFQKLVF

SEQ ID NO: 696452 - protein, 14 aa, Homo sapiens
  CDR3 for beta chain variable domain of TCR clone 348226 (TRBV7-9, TRBJ1-1)
CASSLGGANNEAFF

SEQ ID NO: 696453 - protein, 15 aa, Homo sapiens
  CDR3 for alpha chain variable domain of TCR clone 348227 (TRAV12-3, TRAJ6)
CAMSATTGGSYIPTF

SEQ ID NO: 696454 - protein, 13 aa, Homo sapiens
  CDR3 for beta chain variable domain of TCR clone 348227 (TRBV2, TRBJ1-5)
CATAGPGNQPQHF

SEQ ID NO: 696455 - protein, 18 aa, Homo sapiens
  CDR3 for alpha chain variable domain of TCR clone 348228 (TRAV21, TRAJ52)
CAVRPSPAGGTSYGKLTF

SEQ ID NO: 696456 - protein, 12 aa, Homo sapiens
  CDR3 for beta chain variable domain of TCR clone 348228 (TRBV19, TRBJ1-5)
CASSIAQQPQHF

SEQ ID NO: 696457 - protein, 14 aa, Homo sapiens
  CDR3 for alpha chain variable domain of TCR clone 348229 (TRAV13-2, TRAJ11)
CAETGNSGYGTLTF

SEQ ID NO: 696458 - protein, 11 aa, Homo sapiens
  CDR3 for beta chain variable domain of TCR clone 348229 (TRBV10-3, TRBJ2-7)
CAISEGLEQYF

SEQ ID NO: 696459 - protein, 15 aa, Homo sapiens
  CDR3 for alpha chain variable domain of TCR clone 348230 (TRAV3, TRAJ5)
CAVRDLDTGRRALTF

SEQ ID NO: 696460 - protein, 13 aa, Homo sapiens
  CDR3 for beta chain variable domain of TCR clone 348230 (TRBV19, TRBJ2-2)
CASSIWSTGELFF

SEQ ID NO: 696461 - protein, 21 aa, Homo sapiens
  CDR3 for alpha chain variable domain of TCR clone 348231 (TRAV26-1, TRAJ17)
CCVLLHRQSSGPKAAGNKLTF

SEQ ID NO: 696462 - protein, 14 aa, Homo sapiens
  CDR3 for beta chain variable domain of TCR clone 348231 (TRBV28, TRBJ1-2)
CASRIQGANYGYTF

SEQ ID NO: 696463 - protein, 11 aa, Homo sapiens
  CDR3 for alpha chain variable domain of TCR clone 348232 (TRAV16, TRAJ26)
CALTRWSAFCL

SEQ ID NO: 696464 - protein, 16 aa, Homo sapiens
  CDR3 for beta chain variable domain of TCR clone 348232 (TRBV9, TRBJ2-1)
CASSVGGGGNYNEQFF

SEQ ID NO: 696465 - protein, 12 aa, Homo sapiens
  CDR3 for alpha chain variable domain of TCR clone 348233 (TRAV13-1, TRAJ49)
CAASPMGNHFYF

SEQ ID NO: 696466 - protein, 13 aa, Homo sapiens
  CDR3 for beta chain variable domain of TCR clone 348233 (TRBV20-1, TRBJ2-2)
CSASAAGTGELFF

SEQ ID NO: 696467 - protein, 12 aa, Homo sapiens
  CDR3 for alpha chain variable domain of TCR clone 348234 (TRAV12-3, TRAJ41)
CAMGYSGYALNF

SEQ ID NO: 696468 - protein, 13 aa, Homo sapiens
  CDR3 for beta chain variable domain of TCR clone 348234 (TRBV7-3, TRBJ2-1)
CASSLDSYNEQFF

SEQ ID NO: 696469 - protein, 12 aa, Homo sapiens
  CDR3 for alpha chain variable domain of TCR clone 348235 (TRAV30, TRAJ43)
CGAEERGNDMRF

SEQ ID NO: 696470 - protein, 17 aa, Homo sapiens
  CDR3 for beta chain variable domain of TCR clone 348235 (TRBV11-2, TRBJ2-1)
CASSLYPPGVEYNEQFF

SEQ ID NO: 696471 - protein, 14 aa, Homo sapiens
  CDR3 for alpha chain variable domain of TCR clone 348236 (TRAV3, TRAJ7)
CAMREEEREQQTRF

SEQ ID NO: 696472 - protein, 12 aa, Homo sapiens
  CDR3 for beta chain variable domain of TCR clone 348236 (TRBV7-8, TRBJ2-7)
CASSLGDREQYF

SEQ ID NO: 696473 - protein, 15 aa, Homo sapiens
  CDR3 for alpha chain variable domain of TCR clone 348237 (TRAV12-1, TRAJ42)
CVVTRDGGSQGNLIF

SEQ ID NO: 696474 - protein, 14 aa, Homo sapiens
  CDR3 for beta chain variable domain of TCR clone 348237 (TRBV11-2, TRBJ2-3)
CARSVGWGGGAQDG

SEQ ID NO: 696475 - protein, 15 aa, Homo sapiens
  CDR3 for alpha chain variable domain of TCR clone 348238 (TRAV17, TRAJ4)
CATGTWSGGYNKLIF

SEQ ID NO: 696476 - protein, 14 aa, Homo sapiens
  CDR3 for beta chain variable domain of TCR clone 348238 (TRBV19, TRBJ1-5)
CASRAPDSFLSQHF

SEQ ID NO: 696477 - protein, 16 aa, Homo sapiens
  CDR3 for alpha chain variable domain of TCR clone 348239 (TRAV3, TRAJ37)
CAVRGKGSGNTGKLIF

SEQ ID NO: 696478 - protein, 15 aa, Homo sapiens
  CDR3 for beta chain variable domain of TCR clone 348239 (TRBV7-2, TRBJ2-1)
CASSSGLAGGNEQFF

SEQ ID NO: 696479 - protein, 11 aa, Homo sapiens
  CDR3 for alpha chain variable domain of TCR clone 348240 (TRAV30, TRAJ23)
CGREIAGKLIF

SEQ ID NO: 696480 - protein, 16 aa, Homo sapiens
  CDR3 for beta chain variable domain of TCR clone 348240 (TRBV7-2, TRBJ2-7)
CASTSQAASGGYEQYF

SEQ ID NO: 696481 - protein, 14 aa, Homo sapiens
  CDR3 for alpha chain variable domain of TCR clone 348241 (TRAV27, TRAJ49)
CAGRPEGTGNQFYF

SEQ ID NO: 696482 - protein, 12 aa, Homo sapiens
  CDR3 for beta chain variable domain of TCR clone 348241 (TRBV5-7, TRBJ1-2)
CASSDRIHGYTF

SEQ ID NO: 696483 - protein, 16 aa, Homo sapiens
  CDR3 for alpha chain variable domain of TCR clone 348242 (TRAV30, TRAJ24)
CGTEIVDADSWGKFQF

SEQ ID NO: 696484 - protein, 12 aa, Homo sapiens
  CDR3 for beta chain variable domain of TCR clone 348242 (TRBV20-1, TRBJ2-5)
CSATRNQETQYF

SEQ ID NO: 696485 - protein, 14 aa, Homo sapiens
  CDR3 for alpha chain variable domain of TCR clone 348243 (TRAV27, TRAJ36)
CAGPPKRGANNLFF

SEQ ID NO: 696486 - protein, 15 aa, Homo sapiens
  CDR3 for beta chain variable domain of TCR clone 348243 (TRBV27, TRBJ1-4)
CASSPRHATNEKLFF

SEQ ID NO: 696487 - protein, 10 aa, Homo sapiens
  CDR3 for alpha chain variable domain of TCR clone 348244 (TRAV25, TRAJ20)
CAVNAYKLSF

SEQ ID NO: 696488 - protein, 13 aa, Homo sapiens
  CDR3 for beta chain variable domain of TCR clone 348244 (TRBV6-3, TRBJ2-7)
CASSFSGGYEQYF

SEQ ID NO: 696489 - protein, 10 aa, Homo sapiens
  CDR3 for alpha chain variable domain of TCR clone 348245 (TRAV1-2, TRAJ23)
CAGQEGKLIF

SEQ ID NO: 696490 - protein, 16 aa, Homo sapiens
  CDR3 for beta chain variable domain of TCR clone 348245 (TRBV11-2, TRBJ1-1)
CASSLRQGGEHSKAFF

SEQ ID NO: 696491 - protein, 13 aa, Homo sapiens
  CDR3 for alpha chain variable domain of TCR clone 348246 (TRAV13-1, TRAJ43)
CAASKNNNNDMRF

SEQ ID NO: 696492 - protein, 16 aa, Homo sapiens
  CDR3 for beta chain variable domain of TCR clone 348246 (TRBV19, TRBJ2-1)
CASSKAGPSSYNEQFF

SEQ ID NO: 696493 - protein, 14 aa, Homo sapiens
  CDR3 for alpha chain variable domain of TCR clone 348247 (TRAV26-1, TRAJ39)
CIVRGSRAGNMLTF

SEQ ID NO: 696494 - protein, 15 aa, Homo sapiens
  CDR3 for beta chain variable domain of TCR clone 348247 (TRBV7-9, TRBJ1-5)
CASSQGHQANQPQHF

SEQ ID NO: 696495 - protein, 14 aa, Homo sapiens
  CDR3 for alpha chain variable domain of TCR clone 348248 (TRAV13-1, TRAJ26)
CAASRGNYGQNFVF

SEQ ID NO: 696496 - protein, 16 aa, Homo sapiens
  CDR3 for beta chain variable domain of TCR clone 348248 (TRBV29-1, TRBJ2-6)
CSVEDITESGANVLTF

SEQ ID NO: 696497 - protein, 14 aa, Homo sapiens
  CDR3 for alpha chain variable domain of TCR clone 348249 (TRAV12-2, TRAJ45)
CAVNKGGGADGFTF

SEQ ID NO: 696498 - protein, 19 aa, Homo sapiens
  CDR3 for beta chain variable domain of TCR clone 348249 (TRBV7-2, TRBJ2-3)
CASSLVLSAYISRPDTQYF

SEQ ID NO: 696499 - protein, 14 aa, Homo sapiens
  CDR3 for alpha chain variable domain of TCR clone 348250 (TRAV8-3, TRAJ39)
CAVGANNAGNMRTF

SEQ ID NO: 696500 - protein, 16 aa, Homo sapiens
  CDR3 for beta chain variable domain of TCR clone 348250 (TRBV6-1, TRBJ2-5)
CASSETLDRGAETQYF

SEQ ID NO: 696501 - protein, 11 aa, Homo sapiens
  CDR3 for alpha chain variable domain of TCR clone 348251 (TRAV29/DV5, TRAJ47)
CAAQRGNKLVF

SEQ ID NO: 696502 - protein, 15 aa, Homo sapiens
  CDR3 for beta chain variable domain of TCR clone 348251 (TRBV7-9, TRBJ2-5)
CASSLEGGSGETQYF

SEQ ID NO: 696503 - protein, 14 aa, Homo sapiens
  CDR3 for alpha chain variable domain of TCR clone 348252 (TRAV12-2, TRAJ24)
CAVTPADSWGKLQF

SEQ ID NO: 696504 - protein, 13 aa, Homo sapiens
  CDR3 for beta chain variable domain of TCR clone 348252 (TRBV6-4, TRBJ1-5)
CASSADLNQPQRF

SEQ ID NO: 696505 - protein, 13 aa, Homo sapiens
  CDR3 for alpha chain variable domain of TCR clone 348253 (TRAV12-1, TRAJ43)
CVVSHHNNNDMRV

SEQ ID NO: 696506 - protein, 14 aa, Homo sapiens
  CDR3 for beta chain variable domain of TCR clone 348253 (TRBV5-5, TRBJ2-2)
CASSLLGDTGELFF

SEQ ID NO: 696507 - protein, 23 aa, Homo sapiens
  CDR3 for alpha chain variable domain of TCR clone 348254 (TRAV26-1, TRAJ38)
CIADNAGNNHIQNPDPAVYQLRD

SEQ ID NO: 696508 - protein, 15 aa, Homo sapiens
  CDR3 for beta chain variable domain of TCR clone 348254 (TRBV29-1, TRBJ2-1)
CSVGRHALFYNEQFF

SEQ ID NO: 696509 - protein, 13 aa, Homo sapiens
  CDR3 for alpha chain variable domain of TCR clone 348255 (TRAV1-1, TRAJ9)
CAAKNTGGFTTIF

SEQ ID NO: 696510 - protein, 15 aa, Homo sapiens
  CDR3 for beta chain variable domain of TCR clone 348255 (TRBV5-1, TRBJ2-1)
CASTGSGRTYNEQFF

SEQ ID NO: 696511 - protein, 13 aa, Homo sapiens
  CDR3 for alpha chain variable domain of TCR clone 348256 (TRAV36/DV7, TRAJ37)
CAVFSSNTGTLIF

SEQ ID NO: 696512 - protein, 15 aa, Homo sapiens
  CDR3 for beta chain variable domain of TCR clone 348256 (TRBV12-4, TRBJ2-5)
CQQFFVRGRQETQYF

SEQ ID NO: 696513 - protein, 17 aa, Homo sapiens
  CDR3 for alpha chain variable domain of TCR clone 348257 (TRAV3, TRAJ6)
CAVRDGPRAGGSYIPTV

SEQ ID NO: 696514 - protein, 15 aa, Homo sapiens
  CDR3 for beta chain variable domain of TCR clone 348257 (TRBV7-8, TRBJ1-5)
CASSLERRGLEPQHF

SEQ ID NO: 696515 - protein, 15 aa, Homo sapiens
  CDR3 for alpha chain variable domain of TCR clone 348258 (TRAV17, TRAJ4)
CATGTWSGGYNKLIF

SEQ ID NO: 696516 - protein, 15 aa, Homo sapiens
  CDR3 for beta chain variable domain of TCR clone 348258 (TRBV20-1, TRBJ2-7)
CSAGDRVSGMDEQYF

SEQ ID NO: 696517 - protein, 13 aa, Homo sapiens
  CDR3 for alpha chain variable domain of TCR clone 348259 (TRAV26-2, TRAJ43)
CILRAVYNNDMRF

SEQ ID NO: 696518 - protein, 15 aa, Homo sapiens
  CDR3 for beta chain variable domain of TCR clone 348259 (TRBV7-2, TRBJ2-1)
CASTHGTGIYNEQFF

SEQ ID NO: 696519 - protein, 12 aa, Homo sapiens
  CDR3 for alpha chain variable domain of TCR clone 348260 (TRAV2, TRAJ9)
CAVGAGGFKTIF

SEQ ID NO: 696520 - protein, 16 aa, Homo sapiens
  CDR3 for beta chain variable domain of TCR clone 348260 (TRBV13, TRBJ2-2)
CASSPRTGEHTGERFF

SEQ ID NO: 696521 - protein, 14 aa, Homo sapiens
  CDR3 for alpha chain variable domain of TCR clone 348261 (TRAV23/DV6, TRAJ24)
CAASLSDSWGKLQF

SEQ ID NO: 696522 - protein, 16 aa, Homo sapiens
  CDR3 for beta chain variable domain of TCR clone 348261 (TRBV7-9, TRBJ2-6)
CASSLKGPLSANVLTF

SEQ ID NO: 696523 - protein, 16 aa, Homo sapiens
  CDR3 for alpha chain variable domain of TCR clone 348262 (TRAV13-1, TRAJ22)
FAAKGGRSGSARQLTF

SEQ ID NO: 696524 - protein, 15 aa, Homo sapiens
  CDR3 for beta chain variable domain of TCR clone 348262 (TRBV9, TRBJ1-6)
CASSVAGTGDSPLHF

SEQ ID NO: 696525 - protein, 11 aa, Homo sapiens
  CDR3 for alpha chain variable domain of TCR clone 348263 (TRAV13-1, TRAJ30)
CAASRDDKIIF

SEQ ID NO: 696526 - protein, 13 aa, Homo sapiens
  CDR3 for beta chain variable domain of TCR clone 348263 (TRBV12-5, TRBJ2-3)
CASGDRQSDTQYF

SEQ ID NO: 696527 - protein, 15 aa, Homo sapiens
  CDR3 for alpha chain variable domain of TCR clone 348264 (TRAV9-2, TRAJ49)
CALSPPDHTGNLFYF

SEQ ID NO: 696528 - protein, 14 aa, Homo sapiens
  CDR3 for beta chain variable domain of TCR clone 348264 (TRBV12-4, TRBJ1-1)
CASSLGTGGTEAFF

SEQ ID NO: 696529 - protein, 16 aa, Homo sapiens
  CDR3 for alpha chain variable domain of TCR clone 348265 (TRAV13-1, TRAJ37)
CAASIGGSSNTGKLIF

SEQ ID NO: 696530 - protein, 16 aa, Homo sapiens
  CDR3 for beta chain variable domain of TCR clone 348265 (TRBV11-2, TRBJ2-1)
CASSLLLLSSYNEQFF

SEQ ID NO: 696531 - protein, 12 aa, Homo sapiens
  CDR3 for alpha chain variable domain of TCR clone 348266 (TRAV13-2, TRAJ23)
CAERHRGGKLIF

SEQ ID NO: 696532 - protein, 16 aa, Homo sapiens
  CDR3 for beta chain variable domain of TCR clone 348266 (TRBV27, TRBJ2-2)
CASSFRGLVRTGELFF

SEQ ID NO: 696533 - protein, 12 aa, Homo sapiens
  CDR3 for alpha chain variable domain of TCR clone 348267 (TRAV26-1, TRAJ17)
CISQSCRQQANF

SEQ ID NO: 696534 - protein, 16 aa, Homo sapiens
  CDR3 for beta chain variable domain of TCR clone 348267 (TRBV28, TRBJ1-4)
CASSSRTGAANEKLFC

SEQ ID NO: 696535 - protein, 11 aa, Homo sapiens
  CDR3 for alpha chain variable domain of TCR clone 348268 (TRAV17, TRAJ31)
CATSNNARLMF

SEQ ID NO: 696536 - protein, 15 aa, Homo sapiens
  CDR3 for beta chain variable domain of TCR clone 348268 (TRBV7-8, TRBJ1-1)
CASSLGDSRNTEAFF

SEQ ID NO: 696537 - protein, 13 aa, Homo sapiens
  CDR3 for alpha chain variable domain of TCR clone 348269 (TRAV4, TRAJ15)
CLVGPEAGTARIF

SEQ ID NO: 696538 - protein, 15 aa, Homo sapiens
  CDR3 for beta chain variable domain of TCR clone 348269 (TRBV7-2, TRBJ2-1)
CASSFDPGRRNEQFF

SEQ ID NO: 696539 - protein, 18 aa, Homo sapiens
  CDR3 for alpha chain variable domain of TCR clone 348270 (TRAV13-1, TRAJ52)
CAAKNPNAGGTSYGKLTF

SEQ ID NO: 696540 - protein, 15 aa, Homo sapiens
  CDR3 for beta chain variable domain of TCR clone 348270 (TRBV7-6, TRBJ2-7)
CASSQLSSGIYEQYF

SEQ ID NO: 696541 - protein, 14 aa, Homo sapiens
  CDR3 for alpha chain variable domain of TCR clone 348271 (TRAV17, TRAJ39)
CATDPVRAGNMLTF

SEQ ID NO: 696542 - protein, 14 aa, Homo sapiens
  CDR3 for beta chain variable domain of TCR clone 348271 (TRBV13, TRBJ1-5)
CQQLRTGGCSAQHF

SEQ ID NO: 696543 - protein, 14 aa, Homo sapiens
  CDR3 for alpha chain variable domain of TCR clone 348272 (TRAV8-4, TRAJ27)
CAVSKGTNAGKSTF

SEQ ID NO: 696544 - protein, 13 aa, Homo sapiens
  CDR3 for beta chain variable domain of TCR clone 348272 (TRBV10-3, TRBJ2-7)
CASKLAVNYEQYF

SEQ ID NO: 696545 - protein, 14 aa, Homo sapiens
  CDR3 for alpha chain variable domain of TCR clone 348273 (TRAV1-2, TRAJ16)
CAVNRFSDGQKLLF

SEQ ID NO: 696546 - protein, 15 aa, Homo sapiens
  CDR3 for beta chain variable domain of TCR clone 348273 (TRBV3-1, TRBJ1-1)
CASSRLNPPNTEAFF

SEQ ID NO: 696547 - protein, 15 aa, Homo sapiens
  CDR3 for alpha chain variable domain of TCR clone 348274 (TRAV12-1, TRAJ42)
CVVTRDGGSQGNLIC

SEQ ID NO: 696548 - protein, 14 aa, Homo sapiens
  CDR3 for beta chain variable domain of TCR clone 348274 (TRBV11-2, TRBJ2-3)
CASSLGGGANTQYF

SEQ ID NO: 696549 - protein, 14 aa, Homo sapiens
  CDR3 for alpha chain variable domain of TCR clone 348275 (TRAV12-3, TRAJ10)
SHLPLTGGENKLTF

SEQ ID NO: 696550 - protein, 13 aa, Homo sapiens
  CDR3 for beta chain variable domain of TCR clone 348275 (TRBV29-1, TRBJ2-5)
CSVEATAQGTQYF

SEQ ID NO: 696551 - protein, 17 aa, Homo sapiens
  CDR3 for alpha chain variable domain of TCR clone 348276 (TRAV3, TRAJ6)
CAVRDGPRAGGSYIPTF

SEQ ID NO: 696552 - protein, 17 aa, Homo sapiens
  CDR3 for beta chain variable domain of TCR clone 348276 (TRBV27, TRBJ2-6)
CASSLTGFASGANVLTS

SEQ ID NO: 696553 - protein, 13 aa, Homo sapiens
  CDR3 for alpha chain variable domain of TCR clone 348277 (TRAV2, TRAJ24)
CAVTTDSWGNCSL

SEQ ID NO: 696554 - protein, 14 aa, Homo sapiens
  CDR3 for beta chain variable domain of TCR clone 348277 (TRBV13, TRBJ2-5)
CASSLGREQETQYF

SEQ ID NO: 696555 - protein, 16 aa, Homo sapiens
  CDR3 for alpha chain variable domain of TCR clone 348278 (TRAV26-2, TRAJ57)
CILRDVGSGGSEKLVF

SEQ ID NO: 696556 - protein, 16 aa, Homo sapiens
  CDR3 for beta chain variable domain of TCR clone 348278 (TRBV28, TRBJ2-1)
CASSSPEYPRDNEQFF

SEQ ID NO: 696557 - protein, 15 aa, Homo sapiens
  CDR3 for alpha chain variable domain of TCR clone 348279 (TRAV8-6, TRAJ10)
CAVSDQAGGGNKLTF

SEQ ID NO: 696558 - protein, 13 aa, Homo sapiens
  CDR3 for beta chain variable domain of TCR clone 348279 (TRBV10-2, TRBJ2-3)
CASSESGDQTQYF

SEQ ID NO: 696559 - protein, 23 aa, Homo sapiens
  CDR3 for alpha chain variable domain of TCR clone 348280 (TRAV8-3, TRAJ38)
CAVGASNAGNNHIQNPDPAVYQL

SEQ ID NO: 696560 - protein, 15 aa, Homo sapiens
  CDR3 for beta chain variable domain of TCR clone 348280 (TRBV11-3, TRBJ1-3)
CASSLFDPSGNTIYF

SEQ ID NO: 696561 - protein, 14 aa, Homo sapiens
  CDR3 for alpha chain variable domain of TCR clone 348281 (TRAV35, TRAJ22)
CAGLRPGSGRQLTF

SEQ ID NO: 696562 - protein, 13 aa, Homo sapiens
  CDR3 for beta chain variable domain of TCR clone 348281 (TRBV20-1, TRBJ2-7)
CSATHTSRYEQYF

SEQ ID NO: 696563 - protein, 12 aa, Homo sapiens
  CDR3 for alpha chain variable domain of TCR clone 348282 (TRAV1-1, TRAJ33)
CASSDSNYQLIW

SEQ ID NO: 696564 - protein, 18 aa, Homo sapiens
  CDR3 for beta chain variable domain of TCR clone 348282 (TRBV20-1, TRBJ2-2)
CSARVQTARPSGTGELFF

SEQ ID NO: 696565 - protein, 18 aa, Homo sapiens
  CDR3 for alpha chain variable domain of TCR clone 348283 (TRAV13-1, TRAJ52)
CEAKNPNAGGTSYGKLTF

SEQ ID NO: 696566 - protein, 18 aa, Homo sapiens
  CDR3 for beta chain variable domain of TCR clone 348283 (TRBV4-1, TRBJ1-4)
CASSPRTGGAWTNEKLFF

SEQ ID NO: 696567 - protein, 13 aa, Homo sapiens
  CDR3 for alpha chain variable domain of TCR clone 348284 (TRAV39, TRAJ58)
CAGEETSGSRLTF

SEQ ID NO: 696568 - protein, 14 aa, Homo sapiens
  CDR3 for beta chain variable domain of TCR clone 348284 (TRBV11-1, TRBJ2-7)
CASTFAVPSYEQYF

SEQ ID NO: 696569 - protein, 16 aa, Homo sapiens
  CDR3 for alpha chain variable domain of TCR clone 348285 (TRAV27, TRAJ48)
TAAQPGDTGLYLPLTF

SEQ ID NO: 696570 - protein, 12 aa, Homo sapiens
  CDR3 for beta chain variable domain of TCR clone 348285 (TRBV14, TRBJ2-7)
CASSSLKGEQYF

SEQ ID NO: 696571 - protein, 11 aa, Homo sapiens
  CDR3 for alpha chain variable domain of TCR clone 348286 (TRAV21, TRAJ11)
CAVNGYSTLTF

SEQ ID NO: 696572 - protein, 13 aa, Homo sapiens
  CDR3 for beta chain variable domain of TCR clone 348286 (TRBV12-4, TRBJ2-7)
CASSPTETYEQYF

SEQ ID NO: 696573 - protein, 15 aa, Homo sapiens
  CDR3 for alpha chain variable domain of TCR clone 348287 (TRAV12-3, TRAJ17)
CAMSPSLAPGNKLTF

SEQ ID NO: 696574 - protein, 16 aa, Homo sapiens
  CDR3 for beta chain variable domain of TCR clone 348287 (TRBV2, TRBJ2-3)
CASSTSVEGVTDTQYF

SEQ ID NO: 696575 - protein, 11 aa, Homo sapiens
  CDR3 for alpha chain variable domain of TCR clone 348288 (TRAV12-3, TRAJ43)
CAMSVSNDMRF

SEQ ID NO: 696576 - protein, 16 aa, Homo sapiens
  CDR3 for beta chain variable domain of TCR clone 348288 (TRBV13, TRBJ2-2)
CASSPRTGEHTGELFF

SEQ ID NO: 696577 - protein, 13 aa, Homo sapiens
  CDR3 for alpha chain variable domain of TCR clone 348289 (TRAV20, TRAJ34)
CAVSSYNTDKLIF

SEQ ID NO: 696578 - protein, 16 aa, Homo sapiens
  CDR3 for beta chain variable domain of TCR clone 348289 (TRBV2, TRBJ2-3)
CASSTSVEGVTDTQYF

SEQ ID NO: 696579 - protein, 13 aa, Homo sapiens
  CDR3 for alpha chain variable domain of TCR clone 348290 (TRAV14/DV4, TRAJ20)
CAMRESNEYKLSF

SEQ ID NO: 696580 - protein, 15 aa, Homo sapiens
  CDR3 for beta chain variable domain of TCR clone 348290 (TRBV7-9, TRBJ1-1)
CASSRPGTANTEAFF

SEQ ID NO: 696581 - protein, 15 aa, Homo sapiens
  CDR3 for alpha chain variable domain of TCR clone 348291 (TRAV26-2, TRAJ57)
CILRDIQGGSEKLVF

SEQ ID NO: 696582 - protein, 17 aa, Homo sapiens
  CDR3 for beta chain variable domain of TCR clone 348291 (TRBV19, TRBJ2-6)
CASSTGQVFSGANVLTF

SEQ ID NO: 696583 - protein, 15 aa, Homo sapiens
  CDR3 for alpha chain variable domain of TCR clone 348292 (TRAV12-3, TRAJ6)
CAMSATTGGSYIPTF

SEQ ID NO: 696584 - protein, 15 aa, Homo sapiens
  CDR3 for beta chain variable domain of TCR clone 348292 (TRBV5-4, TRBJ1-1)
CASSSLGWANTEAFF

SEQ ID NO: 696585 - protein, 16 aa, Homo sapiens
  CDR3 for alpha chain variable domain of TCR clone 348293 (TRAV16, TRAJ52)
CALSAAGGTSNGKLTF

SEQ ID NO: 696586 - protein, 12 aa, Homo sapiens
  CDR3 for beta chain variable domain of TCR clone 348293 (TRBV12-4, TRBJ1-3)
CASSFSGNTIDF

SEQ ID NO: 696587 - protein, 13 aa, Homo sapiens
  CDR3 for alpha chain variable domain of TCR clone 348294 (TRAV8-2, TRAJ43)
CVVSDQGDNDTHF

SEQ ID NO: 696588 - protein, 12 aa, Homo sapiens
  CDR3 for beta chain variable domain of TCR clone 348294 (TRBV7-9, TRBJ2-7)
CASRTGFDEQYF

SEQ ID NO: 696589 - protein, 13 aa, Homo sapiens
  CDR3 for alpha chain variable domain of TCR clone 348295 (TRAV2, TRAJ16)
CAVEWSDCQKLLF

SEQ ID NO: 696590 - protein, 15 aa, Homo sapiens
  CDR3 for beta chain variable domain of TCR clone 348295 (TRBV20-1, TRBJ2-5)
CSAIKGQGRQETQYF

SEQ ID NO: 696591 - protein, 18 aa, Homo sapiens
  CDR3 for alpha chain variable domain of TCR clone 348296 (TRAV12-3, TRAJ52)
CAMSRTNAGGTSYGKLTF

SEQ ID NO: 696592 - protein, 15 aa, Homo sapiens
  CDR3 for beta chain variable domain of TCR clone 348296 (TRBV15, TRBJ1-1)
CATSLQGGRNTEAFF

SEQ ID NO: 696593 - protein, 15 aa, Homo sapiens
  CDR3 for alpha chain variable domain of TCR clone 348297 (TRAV21, TRAJ24)
CAARSSTDSWGKLQF

SEQ ID NO: 696594 - protein, 13 aa, Homo sapiens
  CDR3 for beta chain variable domain of TCR clone 348297 (TRBV23-1, TRBJ1-4)
CASRGKFNEKLFF

SEQ ID NO: 696595 - protein, 14 aa, Homo sapiens
  CDR3 for alpha chain variable domain of TCR clone 348298 (TRAV29/DV5, TRAJ49)
CAASLSNTGNQFYF

SEQ ID NO: 696596 - protein, 13 aa, Homo sapiens
  CDR3 for beta chain variable domain of TCR clone 348298 (TRBV20-1, TRBJ1-6)
CSAPLGVGSPLHF

SEQ ID NO: 696597 - protein, 14 aa, Homo sapiens
  CDR3 for alpha chain variable domain of TCR clone 348299 (TRAV12-2, TRAJ40)
CAVKIPSGTYKYIF

SEQ ID NO: 696598 - protein, 20 aa, Homo sapiens
  CDR3 for beta chain variable domain of TCR clone 348299 (TRBV28, TRBJ2-1)
CASNPIGRSPGLAGGNEQFF

SEQ ID NO: 696599 - protein, 14 aa, Homo sapiens
  CDR3 for alpha chain variable domain of TCR clone 348300 (TRAV1-2, TRAJ16)
CAVNRFSDGQKLLF

SEQ ID NO: 696600 - protein, 15 aa, Homo sapiens
  CDR3 for beta chain variable domain of TCR clone 348300 (TRBV29-1, TRBJ2-5)
CSVRLASGGGKTQYF

SEQ ID NO: 696601 - protein, 15 aa, Homo sapiens
  CDR3 for alpha chain variable domain of TCR clone 348301 (TRAV27, TRAJ38)
CAPRRNAGNNRKLIW

SEQ ID NO: 696602 - protein, 13 aa, Homo sapiens
  CDR3 for beta chain variable domain of TCR clone 348301 (TRBV12-5, TRBJ2-3)
CASGDRQSDTQYF

SEQ ID NO: 696603 - protein, 14 aa, Homo sapiens
  CDR3 for alpha chain variable domain of TCR clone 348302 (TRAV1-2, TRAJ16)
CAVNRFSDGQKLLF

SEQ ID NO: 696604 - protein, 13 aa, Homo sapiens
  CDR3 for beta chain variable domain of TCR clone 348302 (TRBV2, TRBJ2-3)
CASILAGGQGQYF

SEQ ID NO: 696605 - protein, 12 aa, Homo sapiens
  CDR3 for alpha chain variable domain of TCR clone 348303 (TRAV12-3, TRAJ17)
CAMTLTGNKLTF

SEQ ID NO: 696606 - protein, 13 aa, Homo sapiens
  CDR3 for beta chain variable domain of TCR clone 348303 (TRBV4-1, TRBJ2-5)
CASSQEVQETQYF

SEQ ID NO: 696607 - protein, 14 aa, Homo sapiens
  CDR3 for alpha chain variable domain of TCR clone 348304 (TRAV12-2, TRAJ9)
CAVHLNTGGFKTIF

SEQ ID NO: 696608 - protein, 17 aa, Homo sapiens
  CDR3 for beta chain variable domain of TCR clone 348304 (TRBV20-1, TRBJ2-2)
CSASRQVGQGYTGELFF

SEQ ID NO: 696609 - protein, 13 aa, Homo sapiens
  CDR3 for alpha chain variable domain of TCR clone 348305 (TRAV20, TRAJ37)
CAGCSSNTGKLIF

SEQ ID NO: 696610 - protein, 16 aa, Homo sapiens
  CDR3 for beta chain variable domain of TCR clone 348305 (TRBV7-8, TRBJ2-1)
CASSLERVGGTNEQFF

SEQ ID NO: 696611 - protein, 14 aa, Homo sapiens
  CDR3 for alpha chain variable domain of TCR clone 348306 (TRAV17, TRAJ12)
CATDREDSSYKLIF

SEQ ID NO: 696612 - protein, 15 aa, Homo sapiens
  CDR3 for beta chain variable domain of TCR clone 348306 (TRBV11-2, TRBJ1-1)
CASSLLEQGGTEAFF

SEQ ID NO: 696613 - protein, 16 aa, Homo sapiens
  CDR3 for alpha chain variable domain of TCR clone 348307 (TRAV8-3, TRAJ52)
CAVQPAGGSSYGKLTF

SEQ ID NO: 696614 - protein, 15 aa, Homo sapiens
  CDR3 for beta chain variable domain of TCR clone 348307 (TRBV11-2, TRBJ2-7)
CASSLAGGVATEQYF

SEQ ID NO: 696615 - protein, 15 aa, Homo sapiens
  CDR3 for alpha chain variable domain of TCR clone 348308 (TRAV3, TRAJ29)
CAVRDINSGNTPLVF

SEQ ID NO: 696616 - protein, 20 aa, Homo sapiens
  CDR3 for beta chain variable domain of TCR clone 348308 (TRBV4-1, TRBJ2-5)
CASSHLLWGSRDPVLRARHA

SEQ ID NO: 696617 - protein, 10 aa, Homo sapiens
  CDR3 for alpha chain variable domain of TCR clone 348309 (TRAV20, TRAJ22)
CAAPARQLTF

SEQ ID NO: 696618 - protein, 14 aa, Homo sapiens
  CDR3 for beta chain variable domain of TCR clone 348309 (TRBV19, TRBJ2-1)
CASSMGSGAKEQFF

SEQ ID NO: 696619 - protein, 15 aa, Homo sapiens
  CDR3 for alpha chain variable domain of TCR clone 348310 (TRAV21, TRAJ53)
CATLNNGGSNYKLTF

SEQ ID NO: 696620 - protein, 16 aa, Homo sapiens
  CDR3 for beta chain variable domain of TCR clone 348310 (TRBV20-1, TRBJ1-4)
CGAPGQGLLTNEKLFF

SEQ ID NO: 696621 - protein, 14 aa, Homo sapiens
  CDR3 for alpha chain variable domain of TCR clone 348311 (TRAV26-1, TRAJ44)
CISPLPGTASNLTF

SEQ ID NO: 696622 - protein, 16 aa, Homo sapiens
  CDR3 for beta chain variable domain of TCR clone 348311 (TRBV19, TRBJ2-1)
CASSKAGPSAYNEQFF

SEQ ID NO: 696623 - protein, 13 aa, Homo sapiens
  CDR3 for alpha chain variable domain of TCR clone 348312 (TRAV2, TRAJ24)
TTVPLVSWGKLQF

SEQ ID NO: 696624 - protein, 16 aa, Homo sapiens
  CDR3 for beta chain variable domain of TCR clone 348312 (TRBV25-1, TRBJ2-7)
CASSELTGGGIYEQYF

SEQ ID NO: 696625 - protein, 11 aa, Homo sapiens
  CDR3 for alpha chain variable domain of TCR clone 348313 (TRAV3, TRAJ21)
CAVGNFNKFYF

SEQ ID NO: 696626 - protein, 16 aa, Homo sapiens
  CDR3 for beta chain variable domain of TCR clone 348313 (TRBV19, TRBJ2-1)
CANSKAGPGSYNEQFF

SEQ ID NO: 696627 - protein, 15 aa, Homo sapiens
  CDR3 for alpha chain variable domain of TCR clone 348314 (TRAV3, TRAJ13)
CAVRVYSGGYQKVTF

SEQ ID NO: 696628 - protein, 15 aa, Homo sapiens
  CDR3 for beta chain variable domain of TCR clone 348314 (TRBV5-7, TRBJ1-2)
CASSLWVAANYGYTF

SEQ ID NO: 696629 - protein, 17 aa, Homo sapiens
  CDR3 for alpha chain variable domain of TCR clone 348315 (TRAV3, TRAJ38)
CAVRDCLNAGNNRKLIW

SEQ ID NO: 696630 - protein, 14 aa, Homo sapiens
  CDR3 for beta chain variable domain of TCR clone 348315 (TRBV12-5, TRBJ2-5)
CASGSRTHQEAQYF

SEQ ID NO: 696631 - protein, 14 aa, Homo sapiens
  CDR3 for alpha chain variable domain of TCR clone 348316 (TRAV38-2/DV8, TRAJ30)
CAYMDGLGGDKIIF

SEQ ID NO: 696632 - protein, 15 aa, Homo sapiens
  CDR3 for beta chain variable domain of TCR clone 348316 (TRBV7-9, TRBJ2-2)
CASRPADRDTGELFL

SEQ ID NO: 696633 - protein, 14 aa, Homo sapiens
  CDR3 for alpha chain variable domain of TCR clone 348317 (TRAV1-2, TRAJ16)
CAVNRFSAGQKLLF

SEQ ID NO: 696634 - protein, 15 aa, Homo sapiens
  CDR3 for beta chain variable domain of TCR clone 348317 (TRBV9, TRBJ1-6)
CASSVAGTGDSPLLF

SEQ ID NO: 696635 - protein, 13 aa, Homo sapiens
  CDR3 for alpha chain variable domain of TCR clone 348318 (TRAV12-2, TRAJ20)
CAVYPSNDYKLSF

SEQ ID NO: 696636 - protein, 14 aa, Homo sapiens
  CDR3 for beta chain variable domain of TCR clone 348318 (TRBV27, TRBJ2-5)
CSSLYPRGGETQYF

SEQ ID NO: 696637 - protein, 12 aa, Homo sapiens
  CDR3 for alpha chain variable domain of TCR clone 348319 (TRAV36/DV7, TRAJ40)
CAVGTGTYKYIF

SEQ ID NO: 696638 - protein, 13 aa, Homo sapiens
  CDR3 for beta chain variable domain of TCR clone 348319 (TRBV7-3, TRBJ1-2)
CASSLKRGYGYTF

SEQ ID NO: 696639 - protein, 15 aa, Homo sapiens
  CDR3 for alpha chain variable domain of TCR clone 348320 (TRAV3, TRAJ3)
CAVRDRDSSASKIIF

SEQ ID NO: 696640 - protein, 14 aa, Homo sapiens
  CDR3 for beta chain variable domain of TCR clone 348320 (TRBV18, TRBJ2-7)
CASSPRGGAYEQYF

SEQ ID NO: 696641 - protein, 15 aa, Homo sapiens
  CDR3 for alpha chain variable domain of TCR clone 348321 (TRAV4, TRAJ42)
CLVGGYGGSQGNLIF

SEQ ID NO: 696642 - protein, 16 aa, Homo sapiens
  CDR3 for beta chain variable domain of TCR clone 348321 (TRBV27, TRBJ1-1)
CASSTRTGGVGTEALF

SEQ ID NO: 696643 - protein, 13 aa, Homo sapiens
  CDR3 for alpha chain variable domain of TCR clone 348322 (TRAV12-2, TRAJ10)
CAVPTGGGNKLTF

SEQ ID NO: 696644 - protein, 13 aa, Homo sapiens
  CDR3 for beta chain variable domain of TCR clone 348322 (TRBV27, TRBJ2-7)
CASSFSQGYEQYF

SEQ ID NO: 696645 - protein, 14 aa, Homo sapiens
  CDR3 for alpha chain variable domain of TCR clone 348323 (TRAV21, TRAJ35)
HAVMPIGFGNVLHC

SEQ ID NO: 696646 - protein, 15 aa, Homo sapiens
  CDR3 for beta chain variable domain of TCR clone 348323 (TRBV7-9, TRBJ1-4)
CASSRTGGFNEKLFF

SEQ ID NO: 696647 - protein, 16 aa, Homo sapiens
  CDR3 for alpha chain variable domain of TCR clone 348324 (TRAV8-1, TRAJ42)
CAVTSRYGGSQGNLIL

SEQ ID NO: 696648 - protein, 12 aa, Homo sapiens
  CDR3 for beta chain variable domain of TCR clone 348324 (TRBV6-3, TRBJ2-7)
CASSLGRRGLYF

SEQ ID NO: 696649 - protein, 13 aa, Homo sapiens
  CDR3 for alpha chain variable domain of TCR clone 348325 (TRAV8-6, TRAJ33)
CAVSEGSNYQLIW

SEQ ID NO: 696650 - protein, 15 aa, Homo sapiens
  CDR3 for beta chain variable domain of TCR clone 348325 (TRBV18, TRBJ2-1)
CASSPPSASYNEQFF

SEQ ID NO: 696651 - protein, 13 aa, Homo sapiens
  CDR3 for alpha chain variable domain of TCR clone 348326 (TRAV35, TRAJ42)
CTGFRGSQGNLIL

SEQ ID NO: 696652 - protein, 13 aa, Homo sapiens
  CDR3 for beta chain variable domain of TCR clone 348326 (TRBV29-1, TRBJ2-1)
CSVEGGRGNEQFF

SEQ ID NO: 696653 - protein, 14 aa, Homo sapiens
  CDR3 for alpha chain variable domain of TCR clone 348327 (TRAV21, TRAJ37)
CALKGSSNTGKLIF

SEQ ID NO: 696654 - protein, 14 aa, Homo sapiens
  CDR3 for beta chain variable domain of TCR clone 348327 (TRBV7-2, TRBJ2-1)
CASSRGGARNEQFF

SEQ ID NO: 696655 - protein, 17 aa, Homo sapiens
  CDR3 for alpha chain variable domain of TCR clone 348328 (TRAV38-1, TRAJ28)
CAFMKPTSGAGSYQLTF

SEQ ID NO: 696656 - protein, 12 aa, Homo sapiens
  CDR3 for beta chain variable domain of TCR clone 348328 (TRBV11-2, TRBJ2-2)
CASSLGGGELFF

SEQ ID NO: 696657 - protein, 13 aa, Homo sapiens
  CDR3 for alpha chain variable domain of TCR clone 348329 (TRAV12-1, TRAJ49)
CVVTPFTGNQFYF

SEQ ID NO: 696658 - protein, 15 aa, Homo sapiens
  CDR3 for beta chain variable domain of TCR clone 348329 (TRBV20-1, TRBJ2-1)
CSASSAGSSYNEQFF

SEQ ID NO: 696659 - protein, 12 aa, Homo sapiens
  CDR3 for alpha chain variable domain of TCR clone 348330 (TRAV21, TRAJ33)
CAKMDSNYQLIW

SEQ ID NO: 696660 - protein, 15 aa, Homo sapiens
  CDR3 for beta chain variable domain of TCR clone 348330 (TRBV5-1, TRBJ2-3)
CASSPGGARTDTQYF

SEQ ID NO: 696661 - protein, 12 aa, Homo sapiens
  CDR3 for alpha chain variable domain of TCR clone 348331 (TRAV20, TRAJ56)
CAVTGANSKLTF

SEQ ID NO: 696662 - protein, 14 aa, Homo sapiens
  CDR3 for beta chain variable domain of TCR clone 348331 (TRBV20-1, TRBJ2-5)
CSALVPGYQETQHF

SEQ ID NO: 696663 - protein, 15 aa, Homo sapiens
  CDR3 for alpha chain variable domain of TCR clone 348332 (TRAV23/DV6, TRAJ44)
RAAALNTGTASKLTF

SEQ ID NO: 696664 - protein, 12 aa, Homo sapiens
  CDR3 for beta chain variable domain of TCR clone 348332 (TRBV20-1, TRBJ1-5)
CSARAPDQPQHF

SEQ ID NO: 696665 - protein, 11 aa, Homo sapiens
  CDR3 for alpha chain variable domain of TCR clone 348333 (TRAV2, TRAJ13)
CASGVYQKVTF

SEQ ID NO: 696666 - protein, 14 aa, Homo sapiens
  CDR3 for beta chain variable domain of TCR clone 348333 (TRBV19, TRBJ2-1)
CASPTFVLSGEQFF

SEQ ID NO: 696667 - protein, 12 aa, Homo sapiens
  CDR3 for alpha chain variable domain of TCR clone 348334 (TRAV13-1, TRAJ49)
CAASPMGNQFYF

SEQ ID NO: 696668 - protein, 13 aa, Homo sapiens
  CDR3 for beta chain variable domain of TCR clone 348334 (TRBV20-1, TRBJ2-2)
CSARAGGTGELFF

SEQ ID NO: 696669 - protein, 14 aa, Homo sapiens
  CDR3 for alpha chain variable domain of TCR clone 348335 (TRAV3, TRAJ22)
CAVRDYGSARQLTF

SEQ ID NO: 696670 - protein, 13 aa, Homo sapiens
  CDR3 for beta chain variable domain of TCR clone 348335 (TRBV12-4, TRBJ2-7)
CDSSPTETYEQYF

SEQ ID NO: 696671 - protein, 18 aa, Homo sapiens
  CDR3 for alpha chain variable domain of TCR clone 348336 (TRAV13-1, TRAJ52)
CAAKNPNAGGTSYGKLTF

SEQ ID NO: 696672 - protein, 15 aa, Homo sapiens
  CDR3 for beta chain variable domain of TCR clone 348336 (TRBV20-1, TRBJ1-1)
CSASWDRFLNTEAFF

SEQ ID NO: 696673 - protein, 12 aa, Homo sapiens
  CDR3 for alpha chain variable domain of TCR clone 348337 (TRAV27, TRAJ33)
CAGDGSNYQLIW

SEQ ID NO: 696674 - protein, 15 aa, Homo sapiens
  CDR3 for beta chain variable domain of TCR clone 348337 (TRBV6-5, TRBJ2-7)
CASSYSTSGNYEQYC

SEQ ID NO: 696675 - protein, 12 aa, Homo sapiens
  CDR3 for alpha chain variable domain of TCR clone 348338 (TRAV3, TRAJ27)
CAVRDKAGKSHF

SEQ ID NO: 696676 - protein, 14 aa, Homo sapiens
  CDR3 for beta chain variable domain of TCR clone 348338 (TRBV5-1, TRBJ1-2)
CASSVDSTNYGYTF

SEQ ID NO: 696677 - protein, 13 aa, Homo sapiens
  CDR3 for alpha chain variable domain of TCR clone 348339 (TRAV26-1, TRAJ34)
CIVRPWITDKLIF

SEQ ID NO: 696678 - protein, 15 aa, Homo sapiens
  CDR3 for beta chain variable domain of TCR clone 348339 (TRBV28, TRBJ2-7)
CASSPGGRGFYEQYF

SEQ ID NO: 696679 - protein, 18 aa, Homo sapiens
  CDR3 for alpha chain variable domain of TCR clone 348340 (TRAV26-1, TRAJ52)
CIVRVEGAGGTSYGKLTF

SEQ ID NO: 696680 - protein, 12 aa, Homo sapiens
  CDR3 for beta chain variable domain of TCR clone 348340 (TRBV11-2, TRBJ2-7)
CASSPPADEQYF

SEQ ID NO: 696681 - protein, 14 aa, Homo sapiens
  CDR3 for alpha chain variable domain of TCR clone 348341 (TRAV29/DV5, TRAJ36)
CAARRKTGANNIFF

SEQ ID NO: 696682 - protein, 13 aa, Homo sapiens
  CDR3 for beta chain variable domain of TCR clone 348341 (TRBV15, TRBJ1-2)
CATSMTANYGYTF

SEQ ID NO: 696683 - protein, 17 aa, Homo sapiens
  CDR3 for alpha chain variable domain of TCR clone 348342 (TRAV38-2/DV8, TRAJ28)
CAFLTLYSGAGSYQLTF

SEQ ID NO: 696684 - protein, 14 aa, Homo sapiens
  CDR3 for beta chain variable domain of TCR clone 348342 (TRBV9, TRBJ1-2)
CASSVSTRSYGYTF

SEQ ID NO: 696685 - protein, 13 aa, Homo sapiens
  CDR3 for alpha chain variable domain of TCR clone 348343 (TRAV12-2, TRAJ18)
CAVRGSTLGRLYF

SEQ ID NO: 696686 - protein, 14 aa, Homo sapiens
  CDR3 for beta chain variable domain of TCR clone 348343 (TRBV7-2, TRBJ2-7)
YASSLPPGQGPQYF

SEQ ID NO: 696687 - protein, 14 aa, Homo sapiens
  CDR3 for alpha chain variable domain of TCR clone 348344 (TRAV1-2, TRAJ8)
CAVRGDTGFQKLVF

SEQ ID NO: 696688 - protein, 15 aa, Homo sapiens
  CDR3 for beta chain variable domain of TCR clone 348344 (TRBV7-3, TRBJ2-2)
CASSETGQGTGELFF

SEQ ID NO: 696689 - protein, 15 aa, Homo sapiens
  CDR3 for alpha chain variable domain of TCR clone 348345 (TRAV12-1, TRAJ52)
CVGNAGGTSYGKLTF

SEQ ID NO: 696690 - protein, 14 aa, Homo sapiens
  CDR3 for beta chain variable domain of TCR clone 348345 (TRBV24-1, TRBJ1-1)
CATSIPRGDTEAFF

SEQ ID NO: 696691 - protein, 16 aa, Homo sapiens
  CDR3 for alpha chain variable domain of TCR clone 348346 (TRAV14/DV4, TRAJ53)
CAMREGGGGSNYKLTF

SEQ ID NO: 696692 - protein, 12 aa, Homo sapiens
  CDR3 for beta chain variable domain of TCR clone 348346 (TRBV11-2, TRBJ2-1)
CASSPGNNEQFF

SEQ ID NO: 696693 - protein, 12 aa, Homo sapiens
  CDR3 for alpha chain variable domain of TCR clone 348347 (TRAV26-2, TRAJ21)
CILKGNFNKFYF

SEQ ID NO: 696694 - protein, 17 aa, Homo sapiens
  CDR3 for beta chain variable domain of TCR clone 348347 (TRBV6-5, TRBJ2-7)
CASSYSFWGQGSYEQYF

SEQ ID NO: 696695 - protein, 16 aa, Homo sapiens
  CDR3 for alpha chain variable domain of TCR clone 348348 (TRAV3, TRAJ37)
CAVRGKGSGNTGKLIF

SEQ ID NO: 696696 - protein, 15 aa, Homo sapiens
  CDR3 for beta chain variable domain of TCR clone 348348 (TRBV12-4, TRBJ1-5)
CQQPPVGGSNQPQHF

SEQ ID NO: 696697 - protein, 14 aa, Homo sapiens
  CDR3 for alpha chain variable domain of TCR clone 348349 (TRAV13-2, TRAJ43)
CAEIPTYNNNDMRF

SEQ ID NO: 696698 - protein, 17 aa, Homo sapiens
  CDR3 for beta chain variable domain of TCR clone 348349 (TRBV11-2, TRBJ2-1)
CASSLYPPGVEYNEQFF

SEQ ID NO: 696699 - protein, 12 aa, Homo sapiens
  CDR3 for alpha chain variable domain of TCR clone 348350 (TRAV27, TRAJ13)
CAGAGGYQKITF

SEQ ID NO: 696700 - protein, 15 aa, Homo sapiens
  CDR3 for beta chain variable domain of TCR clone 348350 (TRBV20-1, TRBJ2-6)
CSARDRGPGANVLTF

SEQ ID NO: 696701 - protein, 16 aa, Homo sapiens
  CDR3 for alpha chain variable domain of TCR clone 348351 (TRAV1-2, TRAJ10)
CAVRGVLTGGGNKLTF

SEQ ID NO: 696702 - protein, 13 aa, Homo sapiens
  CDR3 for beta chain variable domain of TCR clone 348351 (TRBV29-1, TRBJ1-1)
CSVGDSRNTEAFF

SEQ ID NO: 696703 - protein, 13 aa, Homo sapiens
  CDR3 for alpha chain variable domain of TCR clone 348352 (TRAV13-2, TRAJ40)
CAEFASGTYKYIF

SEQ ID NO: 696704 - protein, 14 aa, Homo sapiens
  CDR3 for beta chain variable domain of TCR clone 348352 (TRBV10-2, TRBJ1-5)
CASSPTGRNQPQHF

SEQ ID NO: 696705 - protein, 12 aa, Homo sapiens
  CDR3 for alpha chain variable domain of TCR clone 348353 (TRAV12-3, TRAJ17)
CAMTLTGNKLTF

SEQ ID NO: 696706 - protein, 16 aa, Homo sapiens
  CDR3 for beta chain variable domain of TCR clone 348353 (TRBV10-2, TRBJ2-7)
CASSESPGSSGFEQYF

SEQ ID NO: 696707 - protein, 14 aa, Homo sapiens
  CDR3 for alpha chain variable domain of TCR clone 348354 (TRAV1-1, TRAJ27)
CAVNSGAGSYQLTF

SEQ ID NO: 696708 - protein, 15 aa, Homo sapiens
  CDR3 for beta chain variable domain of TCR clone 348354 (TRBV3-1, TRBJ2-7)
CASSHRDRVSYEQYF

SEQ ID NO: 696709 - protein, 18 aa, Homo sapiens
  CDR3 for alpha chain variable domain of TCR clone 348355 (TRAV21, TRAJ52)
CAVRPSPAGGTSYGRLTF

SEQ ID NO: 696710 - protein, 17 aa, Homo sapiens
  CDR3 for beta chain variable domain of TCR clone 348355 (TRBV20-1, TRBJ2-1)
CSASSSGLAGSYNEQFF

SEQ ID NO: 696711 - protein, 11 aa, Homo sapiens
  CDR3 for alpha chain variable domain of TCR clone 348356 (TRAV16, TRAJ33)
CALHSNYQLIW

SEQ ID NO: 696712 - protein, 15 aa, Homo sapiens
  CDR3 for beta chain variable domain of TCR clone 348356 (TRBV2, TRBJ2-1)
CASSELAGSYNEQFF

SEQ ID NO: 696713 - protein, 14 aa, Homo sapiens
  CDR3 for alpha chain variable domain of TCR clone 348357 (TRAV1-2, TRAJ16)
CAANRFSDGQKLLL

SEQ ID NO: 696714 - protein, 15 aa, Homo sapiens
  CDR3 for beta chain variable domain of TCR clone 348357 (TRBV20-1, TRBJ2-7)
CSARDRVSGMDEQYF

SEQ ID NO: 696715 - protein, 13 aa, Homo sapiens
  CDR3 for alpha chain variable domain of TCR clone 348358 (TRAV20, TRAJ37)
CAGCSSNTGKLIF

SEQ ID NO: 696716 - protein, 12 aa, Homo sapiens
  CDR3 for beta chain variable domain of TCR clone 348358 (TRBV7-9, TRBJ1-4)
CASSTDREKLFF

SEQ ID NO: 696717 - protein, 15 aa, Homo sapiens
  CDR3 for alpha chain variable domain of TCR clone 348359 (TRAV3, TRAJ47)
CAVRDIGEYGNKLVF

SEQ ID NO: 696718 - protein, 14 aa, Homo sapiens
  CDR3 for beta chain variable domain of TCR clone 348359 (TRBV7-3, TRBJ1-1)
CASSLKGGNTEAFF

SEQ ID NO: 696719 - protein, 14 aa, Homo sapiens
  CDR3 for alpha chain variable domain of TCR clone 348360 (TRAV8-4, TRAJ9)
CAVRINTGGFKTIL

SEQ ID NO: 696720 - protein, 15 aa, Homo sapiens
  CDR3 for beta chain variable domain of TCR clone 348360 (TRBV10-2, TRBJ2-6)
CASSEQGTGANVLTF

SEQ ID NO: 696721 - protein, 15 aa, Homo sapiens
  CDR3 for alpha chain variable domain of TCR clone 348361 (TRAV3, TRAJ22)
CAVRDRGGSARQLTF

SEQ ID NO: 696722 - protein, 20 aa, Homo sapiens
  CDR3 for beta chain variable domain of TCR clone 348361 (TRBV11-2, TRBJ1-6)
CASSLVFATGGSVHTSTLGT

SEQ ID NO: 696723 - protein, 11 aa, Homo sapiens
  CDR3 for alpha chain variable domain of TCR clone 348362 (TRAV1-1, TRAJ40)
CAVTGTYKYIF

SEQ ID NO: 696724 - protein, 16 aa, Homo sapiens
  CDR3 for beta chain variable domain of TCR clone 348362 (TRBV7-8, TRBJ2-4)
CASSAERTLAKNIQYF

SEQ ID NO: 696725 - protein, 14 aa, Homo sapiens
  CDR3 for alpha chain variable domain of TCR clone 348363 (TRAV35, TRAJ13)
CAGSPSGGYQKVTF

SEQ ID NO: 696726 - protein, 15 aa, Homo sapiens
  CDR3 for beta chain variable domain of TCR clone 348363 (TRBV27, TRBJ2-3)
CASRSLAGVIDTQYF

SEQ ID NO: 696727 - protein, 13 aa, Homo sapiens
  CDR3 for alpha chain variable domain of TCR clone 348364 (TRAV27, TRAJ17)
CAWAATAGNKLTF

SEQ ID NO: 696728 - protein, 15 aa, Homo sapiens
  CDR3 for beta chain variable domain of TCR clone 348364 (TRBV5-1, TRBJ2-3)
CASRNQAGSTDTQYF

SEQ ID NO: 696729 - protein, 13 aa, Homo sapiens
  CDR3 for alpha chain variable domain of TCR clone 348365 (TRAV30, TRAJ6)
CGTEAGGSYIPTF

SEQ ID NO: 696730 - protein, 16 aa, Homo sapiens
  CDR3 for beta chain variable domain of TCR clone 348365 (TRBV4-3, TRBJ2-3)
CASSIGLAGEGDTQYF

SEQ ID NO: 696731 - protein, 15 aa, Homo sapiens
  CDR3 for alpha chain variable domain of TCR clone 348366 (TRAV29/DV5, TRAJ24)
CAESGATDSWGKFQF

SEQ ID NO: 696732 - protein, 12 aa, Homo sapiens
  CDR3 for beta chain variable domain of TCR clone 348366 (TRBV11-2, TRBJ2-2)
CASSLPTGELFF

SEQ ID NO: 696733 - protein, 14 aa, Homo sapiens
  CDR3 for alpha chain variable domain of TCR clone 348367 (TRAV12-2, TRAJ13)
CAVKQTGGYQKVTF

SEQ ID NO: 696734 - protein, 16 aa, Homo sapiens
  CDR3 for beta chain variable domain of TCR clone 348367 (TRBV10-3, TRBJ2-1)
CAISGVGDGGGGEQFF

SEQ ID NO: 696735 - protein, 15 aa, Homo sapiens
  CDR3 for alpha chain variable domain of TCR clone 348368 (TRAV3, TRAJ29)
CAVRDLYSGNTPLVF

SEQ ID NO: 696736 - protein, 17 aa, Homo sapiens
  CDR3 for beta chain variable domain of TCR clone 348368 (TRBV20-1, TRBJ2-1)
CSARDALAGVWDNEQFF

SEQ ID NO: 696737 - protein, 14 aa, Homo sapiens
  CDR3 for alpha chain variable domain of TCR clone 348369 (TRAV13-1, TRAJ35)
CAARKGGFGNVLHC

SEQ ID NO: 696738 - protein, 12 aa, Homo sapiens
  CDR3 for beta chain variable domain of TCR clone 348369 (TRBV7-3, TRBJ1-1)
CQQPGLGAEAFF

SEQ ID NO: 696739 - protein, 12 aa, Homo sapiens
  CDR3 for alpha chain variable domain of TCR clone 348370 (TRAV29/DV5, TRAJ49)
CAATDTGNQFYF

SEQ ID NO: 696740 - protein, 14 aa, Homo sapiens
  CDR3 for beta chain variable domain of TCR clone 348370 (TRBV20-1, TRBJ2-1)
CSAQIGGSANEQFF

SEQ ID NO: 696741 - protein, 14 aa, Homo sapiens
  CDR3 for alpha chain variable domain of TCR clone 348371 (TRAV4, TRAJ11)
CLVGEYSGYSTLTF

SEQ ID NO: 696742 - protein, 15 aa, Homo sapiens
  CDR3 for beta chain variable domain of TCR clone 348371 (TRBV19, TRBJ2-1)
CASSSPGVPLDEQFF

SEQ ID NO: 696743 - protein, 16 aa, Homo sapiens
  CDR3 for alpha chain variable domain of TCR clone 348372 (TRAV8-1, TRAJ42)
CAVTSRYRGSQGNLIF

SEQ ID NO: 696744 - protein, 12 aa, Homo sapiens
  CDR3 for beta chain variable domain of TCR clone 348372 (TRBV6-3, TRBJ2-7)
CASSLGRRGLYF

SEQ ID NO: 696745 - protein, 14 aa, Homo sapiens
  CDR3 for alpha chain variable domain of TCR clone 348373 (TRAV1-2, TRAJ16)
CAVNRFSDGQKLLF

SEQ ID NO: 696746 - protein, 12 aa, Homo sapiens
  CDR3 for beta chain variable domain of TCR clone 348373 (TRBV20-1, TRBJ1-5)
CSAAGWDQPQHC

SEQ ID NO: 696747 - protein, 11 aa, Homo sapiens
  CDR3 for alpha chain variable domain of TCR clone 348374 (TRAV13-1, TRAJ24)
CAASGWGKLQF

SEQ ID NO: 696748 - protein, 13 aa, Homo sapiens
  CDR3 for beta chain variable domain of TCR clone 348374 (TRBV4-1, TRBJ2-7)
CASSQGQAYEQYF

SEQ ID NO: 696749 - protein, 17 aa, Homo sapiens
  CDR3 for alpha chain variable domain of TCR clone 348375 (TRAV3, TRAJ6)
CAVRDGPRAGGSYIPTL

SEQ ID NO: 696750 - protein, 13 aa, Homo sapiens
  CDR3 for beta chain variable domain of TCR clone 348375 (TRBV20-1, TRBJ1-6)
CSAPLVVGSPLHF

SEQ ID NO: 696751 - protein, 17 aa, Homo sapiens
  CDR3 for alpha chain variable domain of TCR clone 348376 (TRAV13-1, TRAJ52)
CSKKPQCWCTSYGKLTF

SEQ ID NO: 696752 - protein, 15 aa, Homo sapiens
  CDR3 for beta chain variable domain of TCR clone 348376 (TRBV6-1, TRBJ2-3)
CASSERGGITDTQYF

SEQ ID NO: 696753 - protein, 15 aa, Homo sapiens
  CDR3 for alpha chain variable domain of TCR clone 348377 (TRAV21, TRAJ53)
CATLNSGGSNYKLTF

SEQ ID NO: 696754 - protein, 14 aa, Homo sapiens
  CDR3 for beta chain variable domain of TCR clone 348377 (TRBV7-2, TRBJ2-7)
CARRSQGAAYEQYF

SEQ ID NO: 696755 - protein, 14 aa, Homo sapiens
  CDR3 for alpha chain variable domain of TCR clone 348378 (TRAV13-1, TRAJ35)
CAASKGGFGNVLHC

SEQ ID NO: 696756 - protein, 14 aa, Homo sapiens
  CDR3 for beta chain variable domain of TCR clone 348378 (TRBV7-3, TRBJ2-2)
CASSLNSNTGELFV

SEQ ID NO: 696757 - protein, 13 aa, Homo sapiens
  CDR3 for alpha chain variable domain of TCR clone 348379 (TRAV2, TRAJ40)
CAVVTSGAYKYIF

SEQ ID NO: 696758 - protein, 14 aa, Homo sapiens
  CDR3 for beta chain variable domain of TCR clone 348379 (TRBV19, TRBJ2-1)
CASPTFVLSSEQFF

SEQ ID NO: 696759 - protein, 16 aa, Homo sapiens
  CDR3 for alpha chain variable domain of TCR clone 348380 (TRAV12-1, TRAJ48)
CVVNMVSNFGNEKLTF

SEQ ID NO: 696760 - protein, 18 aa, Homo sapiens
  CDR3 for beta chain variable domain of TCR clone 348380 (TRBV11-2, TRBJ2-6)
CASSLNTFLGTGANVLTF

SEQ ID NO: 696761 - protein, 12 aa, Homo sapiens
  CDR3 for alpha chain variable domain of TCR clone 348381 (TRAV26-1, TRAJ36)
CIVRVRPDNLFF

SEQ ID NO: 696762 - protein, 15 aa, Homo sapiens
  CDR3 for beta chain variable domain of TCR clone 348381 (TRBV6-3, TRBJ2-7)
CASSSPGTVFYEQYF

SEQ ID NO: 696763 - protein, 13 aa, Homo sapiens
  CDR3 for alpha chain variable domain of TCR clone 348382 (TRAV21, TRAJ27)
CAARPGNAGKSTL

SEQ ID NO: 696764 - protein, 14 aa, Homo sapiens
  CDR3 for beta chain variable domain of TCR clone 348382 (TRBV7-6, TRBJ2-3)
CASSLGTVADTQYF

SEQ ID NO: 696765 - protein, 15 aa, Homo sapiens
  CDR3 for alpha chain variable domain of TCR clone 348383 (TRAV3, TRAJ22)
CAVRDRGGSARPLTF

SEQ ID NO: 696766 - protein, 15 aa, Homo sapiens
  CDR3 for beta chain variable domain of TCR clone 348383 (TRBV20-1, TRBJ1-1)
CSASRGVTGNTEAFF

SEQ ID NO: 696767 - protein, 18 aa, Homo sapiens
  CDR3 for alpha chain variable domain of TCR clone 348384 (TRAV13-1, TRAJ52)
CAAKNPNAGGTSYGKLTF

SEQ ID NO: 696768 - protein, 16 aa, Homo sapiens
  CDR3 for beta chain variable domain of TCR clone 348384 (TRBV2, TRBJ1-4)
CASNLLQGATNEKLFF

SEQ ID NO: 696769 - protein, 11 aa, Homo sapiens
  CDR3 for alpha chain variable domain of TCR clone 348385 (TRAV17, TRAJ9)
CGFTGGLKTIF

SEQ ID NO: 696770 - protein, 14 aa, Homo sapiens
  CDR3 for beta chain variable domain of TCR clone 348385 (TRBV7-9, TRBJ2-2)
YASSLVQDTGELFF

SEQ ID NO: 696771 - protein, 19 aa, Homo sapiens
  CDR3 for alpha chain variable domain of TCR clone 348386 (TRAV38-1, TRAJ53)
CAFMKNGLESGGSNYKLKF

SEQ ID NO: 696772 - protein, 13 aa, Homo sapiens
  CDR3 for beta chain variable domain of TCR clone 348386 (TRBV19, TRBJ2-7)
CASSPRQSYEQYF

SEQ ID NO: 696773 - protein, 16 aa, Homo sapiens
  CDR3 for alpha chain variable domain of TCR clone 348387 (TRAV35, TRAJ20)
CWADPSSGFNDYKLSF

SEQ ID NO: 696774 - protein, 17 aa, Homo sapiens
  CDR3 for beta chain variable domain of TCR clone 348387 (TRBV4-3, TRBJ1-6)
CASSAQGARVHPSTLGT

SEQ ID NO: 696775 - protein, 15 aa, Homo sapiens
  CDR3 for alpha chain variable domain of TCR clone 348388 (TRAV26-1, TRAJ29)
CIVRVEGSGNTPLVF

SEQ ID NO: 696776 - protein, 15 aa, Homo sapiens
  CDR3 for beta chain variable domain of TCR clone 348388 (TRBV28, TRBJ2-5)
CASSQTSGSLETQYF

SEQ ID NO: 696777 - protein, 13 aa, Homo sapiens
  CDR3 for alpha chain variable domain of TCR clone 348389 (TRAV1-2, TRAJ9)
CAVLNTGGLKTIF

SEQ ID NO: 696778 - protein, 17 aa, Homo sapiens
  CDR3 for beta chain variable domain of TCR clone 348389 (TRBV7-2, TRBJ2-3)
CASSLAGGLAGTAGQYF

SEQ ID NO: 696779 - protein, 18 aa, Homo sapiens
  CDR3 for alpha chain variable domain of TCR clone 348390 (TRAV21, TRAJ52)
CAVRPSPPGGTSYGKLTF

SEQ ID NO: 696780 - protein, 14 aa, Homo sapiens
  CDR3 for beta chain variable domain of TCR clone 348390 (TRBV7-8, TRBJ2-3)
CASSLEAGTDTQYF

SEQ ID NO: 696781 - protein, 15 aa, Homo sapiens
  CDR3 for alpha chain variable domain of TCR clone 348391 (TRAV3, TRAJ22)
CAVRDRGGSAGQLTF

SEQ ID NO: 696782 - protein, 16 aa, Homo sapiens
  CDR3 for beta chain variable domain of TCR clone 348391 (TRBV11-2, TRBJ2-1)
CASARGSYSHHNEQFF

SEQ ID NO: 696783 - protein, 17 aa, Homo sapiens
  CDR3 for alpha chain variable domain of TCR clone 348392 (TRAV3, TRAJ6)
CAVRDGPRAGGSYIHTF

SEQ ID NO: 696784 - protein, 18 aa, Homo sapiens
  CDR3 for beta chain variable domain of TCR clone 348392 (TRBV7-9, TRBJ2-7)
CASSLTTSGSRTWYEQYF

SEQ ID NO: 696785 - protein, 13 aa, Homo sapiens
  CDR3 for alpha chain variable domain of TCR clone 348393 (TRAV12-3, TRAJ7)
CAMTPYGNNRLAF

SEQ ID NO: 696786 - protein, 16 aa, Homo sapiens
  CDR3 for beta chain variable domain of TCR clone 348393 (TRBV20-1, TRBJ1-4)
CSARPYGGELNKKLFF

SEQ ID NO: 696787 - protein, 13 aa, Homo sapiens
  CDR3 for alpha chain variable domain of TCR clone 348394 (TRAV27, TRAJ41)
CAGEGNSGYALNF

SEQ ID NO: 696788 - protein, 16 aa, Homo sapiens
  CDR3 for beta chain variable domain of TCR clone 348394 (TRBV7-9, TRBJ2-1)
CASSDVAGGSCNEQFF

SEQ ID NO: 696789 - protein, 12 aa, Homo sapiens
  CDR3 for alpha chain variable domain of TCR clone 348395 (TRAV12-3, TRAJ17)
CAMTLTGDKLTF

SEQ ID NO: 696790 - protein, 16 aa, Homo sapiens
  CDR3 for beta chain variable domain of TCR clone 348395 (TRBV5-1, TRBJ2-3)
CASSLGLAVYTDTQYF

SEQ ID NO: 696791 - protein, 13 aa, Homo sapiens
  CDR3 for alpha chain variable domain of TCR clone 348396 (TRAV38-2/DV8, TRAJ34)
CAYRTWNTDKLIF

SEQ ID NO: 696792 - protein, 15 aa, Homo sapiens
  CDR3 for beta chain variable domain of TCR clone 348396 (TRBV7-6, TRBJ2-5)
CASSLAGGTGETQYF

SEQ ID NO: 696793 - protein, 15 aa, Homo sapiens
  CDR3 for alpha chain variable domain of TCR clone 348397 (TRAV29/DV5, TRAJ29)
CAASEGSSGNTPLVF

SEQ ID NO: 696794 - protein, 17 aa, Homo sapiens
  CDR3 for beta chain variable domain of TCR clone 348397 (TRBV4-1, TRBJ1-4)
CASSQEGPRGVEEKLFF

SEQ ID NO: 696795 - protein, 14 aa, Homo sapiens
  CDR3 for alpha chain variable domain of TCR clone 348398 (TRAV1-1, TRAJ28)
CAVQLWGWELPTHF

SEQ ID NO: 696796 - protein, 13 aa, Homo sapiens
  CDR3 for beta chain variable domain of TCR clone 348398 (TRBV10-3, TRBJ2-7)
CASKLAVNYEQYF

SEQ ID NO: 696797 - protein, 10 aa, Homo sapiens
  CDR3 for alpha chain variable domain of TCR clone 348399 (TRAV1-2, TRAJ4)
LSGGYNKLIF

SEQ ID NO: 696798 - protein, 11 aa, Homo sapiens
  CDR3 for beta chain variable domain of TCR clone 348399 (TRBV6-3, TRBJ2-3)
CATGQADTQYF

SEQ ID NO: 696799 - protein, 13 aa, Homo sapiens
  CDR3 for alpha chain variable domain of TCR clone 348400 (TRAV13-1, TRAJ39)
GAASIWAGNMLTF

SEQ ID NO: 696800 - protein, 15 aa, Homo sapiens
  CDR3 for beta chain variable domain of TCR clone 348400 (TRBV7-9, TRBJ1-1)
CASSLLEQGGTEAFF

SEQ ID NO: 696801 - protein, 14 aa, Homo sapiens
  CDR3 for alpha chain variable domain of TCR clone 348401 (TRAV12-2, TRAJ17)
CAVLFKAASNKLTF

SEQ ID NO: 696802 - protein, 17 aa, Homo sapiens
  CDR3 for beta chain variable domain of TCR clone 348401 (TRBV20-1, TRBJ2-2)
CSASGSVQGGLTGELFF

SEQ ID NO: 696803 - protein, 14 aa, Homo sapiens
  CDR3 for alpha chain variable domain of TCR clone 348402 (TRAV17, TRAJ15)
CATAPNQAGTALIF

SEQ ID NO: 696804 - protein, 16 aa, Homo sapiens
  CDR3 for beta chain variable domain of TCR clone 348402 (TRBV19, TRBJ2-7)
CASSMGQARSSSTSGR

SEQ ID NO: 696805 - protein, 15 aa, Homo sapiens
  CDR3 for alpha chain variable domain of TCR clone 348403 (TRAV8-6, TRAJ37)
CAVIFSSGNTGKLIF

SEQ ID NO: 696806 - protein, 15 aa, Homo sapiens
  CDR3 for beta chain variable domain of TCR clone 348403 (TRBV25-1, TRBJ2-4)
CASSETESAENIQYF

SEQ ID NO: 696807 - protein, 14 aa, Homo sapiens
  CDR3 for alpha chain variable domain of TCR clone 348404 (TRAV3, TRAJ17)
CAVRYAAAGNKLTF

SEQ ID NO: 696808 - protein, 16 aa, Homo sapiens
  CDR3 for beta chain variable domain of TCR clone 348404 (TRBV20-1, TRBJ1-2)
CSASMGQGVANYGYTF

SEQ ID NO: 696809 - protein, 14 aa, Homo sapiens
  CDR3 for alpha chain variable domain of TCR clone 348405 (TRAV29/DV5, TRAJ20)
CAATIRSNDYKLSF

SEQ ID NO: 696810 - protein, 15 aa, Homo sapiens
  CDR3 for beta chain variable domain of TCR clone 348405 (TRBV20-1, TRBJ2-1)
CSASSAGGSYNEQFF

SEQ ID NO: 696811 - protein, 15 aa, Homo sapiens
  CDR3 for alpha chain variable domain of TCR clone 348406 (TRAV12-3, TRAJ6)
CAMSATTGGSYIPTF

SEQ ID NO: 696812 - protein, 16 aa, Homo sapiens
  CDR3 for beta chain variable domain of TCR clone 348406 (TRBV20-1, TRBJ1-2)
CSASLGLGVVGCGSLF

SEQ ID NO: 696813 - protein, 15 aa, Homo sapiens
  CDR3 for alpha chain variable domain of TCR clone 348407 (TRAV21, TRAJ32)
CAVNSYGGATNKLIF

SEQ ID NO: 696814 - protein, 18 aa, Homo sapiens
  CDR3 for beta chain variable domain of TCR clone 348407 (TRBV7-9, TRBJ2-1)
CASSTGLAEGSSDNEQFF

SEQ ID NO: 696815 - protein, 22 aa, Homo sapiens
  CDR3 for alpha chain variable domain of TCR clone 348408 (TRAV2, )
CAVEDFPNSGNNHIQNPDPAVY

SEQ ID NO: 696816 - protein, 14 aa, Homo sapiens
  CDR3 for beta chain variable domain of TCR clone 348408 (TRBV29-1, TRBJ1-4)
CSVSGRQGGEKLFF

SEQ ID NO: 696817 - protein, 15 aa, Homo sapiens
  CDR3 for alpha chain variable domain of TCR clone 348409 (TRAV26-1, TRAJ37)
CIVKTGSSITGKLIF

SEQ ID NO: 696818 - protein, 12 aa, Homo sapiens
  CDR3 for beta chain variable domain of TCR clone 348409 (TRBV7-8, TRBJ2-7)
CASSLGDREQYF

SEQ ID NO: 696819 - protein, 17 aa, Homo sapiens
  CDR3 for alpha chain variable domain of TCR clone 348410 (TRAV26-1, TRAJ37)
CIVRVITVSSNTGKLIF

SEQ ID NO: 696820 - protein, 13 aa, Homo sapiens
  CDR3 for beta chain variable domain of TCR clone 348410 (TRBV7-2, TRBJ2-2)
CASSLAVTGELFF

SEQ ID NO: 696821 - protein, 13 aa, Homo sapiens
  CDR3 for alpha chain variable domain of TCR clone 348411 (TRAV12-1, TRAJ6)
CVVFPGGSYIPTF

SEQ ID NO: 696822 - protein, 14 aa, Homo sapiens
  CDR3 for beta chain variable domain of TCR clone 348411 (TRBV12-5, TRBJ2-5)
CASGSRTHQETQYF

SEQ ID NO: 696823 - protein, 15 aa, Homo sapiens
  CDR3 for alpha chain variable domain of TCR clone 348412 (TRAV29/DV5, TRAJ29)
CAASERSSGNRPLVF

SEQ ID NO: 696824 - protein, 17 aa, Homo sapiens
  CDR3 for beta chain variable domain of TCR clone 348412 (TRBV4-1, TRBJ1-4)
CASSQEGPRGVEEKLFF

SEQ ID NO: 696825 - protein, 12 aa, Homo sapiens
  CDR3 for alpha chain variable domain of TCR clone 348413 (TRAV12-2, TRAJ10)
WGVTGGGNKLTF

SEQ ID NO: 696826 - protein, 14 aa, Homo sapiens
  CDR3 for beta chain variable domain of TCR clone 348413 (TRBV7-2, TRBJ2-5)
CASSFGGAQETQYF

SEQ ID NO: 696827 - protein, 15 aa, Homo sapiens
  CDR3 for alpha chain variable domain of TCR clone 348414 (TRAV3, TRAJ29)
CAVRDINSGNTPLVF

SEQ ID NO: 696828 - protein, 15 aa, Homo sapiens
  CDR3 for beta chain variable domain of TCR clone 348414 (TRBV9, TRBJ1-6)
CASSVAGTGDSPLHF

SEQ ID NO: 696829 - protein, 11 aa, Homo sapiens
  CDR3 for alpha chain variable domain of TCR clone 348415 (TRAV17, TRAJ36)
CAPTGANNLFF

SEQ ID NO: 696830 - protein, 13 aa, Homo sapiens
  CDR3 for beta chain variable domain of TCR clone 348415 (TRBV12-4, TRBJ2-7)
CASSPTEAYEQYF

SEQ ID NO: 696831 - protein, 16 aa, Homo sapiens
  CDR3 for alpha chain variable domain of TCR clone 348416 (TRAV30, TRAJ24)
CGTEIVDADSWGKFQF

SEQ ID NO: 696832 - protein, 17 aa, Homo sapiens
  CDR3 for beta chain variable domain of TCR clone 348416 (TRBV7-9, TRBJ2-6)
CASSFGAGYSGANVLTF

SEQ ID NO: 696833 - protein, 12 aa, Homo sapiens
  CDR3 for alpha chain variable domain of TCR clone 348417 (TRAV20, TRAJ39)
CAVGNAGNILTF

SEQ ID NO: 696834 - protein, 14 aa, Homo sapiens
  CDR3 for beta chain variable domain of TCR clone 348417 (TRBV20-1, TRBJ2-7)
CSAKRGRSSYEQYF

SEQ ID NO: 696835 - protein, 12 aa, Homo sapiens
  CDR3 for alpha chain variable domain of TCR clone 348418 (TRAV13-1, TRAJ49)
CAAPNTGNQFYF

SEQ ID NO: 696836 - protein, 14 aa, Homo sapiens
  CDR3 for beta chain variable domain of TCR clone 348418 (TRBV19, TRBJ2-1)
CASPTFVLSGEQFF

SEQ ID NO: 696837 - protein, 17 aa, Homo sapiens
  CDR3 for alpha chain variable domain of TCR clone 348419 (TRAV26-1, TRAJ53)
CIVRVDDSGGSNYKLKF

SEQ ID NO: 696838 - protein, 19 aa, Homo sapiens
  CDR3 for beta chain variable domain of TCR clone 348419 (TRBV25-1, TRBJ2-2)
CAILVYRVDRGRKTGELFF

SEQ ID NO: 696839 - protein, 14 aa, Homo sapiens
  CDR3 for alpha chain variable domain of TCR clone 348420 (TRAV12-1, TRAJ17)
RVVNYKAAGNKLTF

SEQ ID NO: 696840 - protein, 13 aa, Homo sapiens
  CDR3 for beta chain variable domain of TCR clone 348420 (TRBV7-9, TRBJ1-2)
CASSLKQNYGYTF

SEQ ID NO: 696841 - protein, 14 aa, Homo sapiens
  CDR3 for alpha chain variable domain of TCR clone 348421 (TRAV13-1, TRAJ4)
CAATLPSGYNKLIF

SEQ ID NO: 696842 - protein, 14 aa, Homo sapiens
  CDR3 for beta chain variable domain of TCR clone 348421 (TRBV19, TRBJ2-1)
CDSPTFVLSGEQFF

SEQ ID NO: 696843 - protein, 12 aa, Homo sapiens
  CDR3 for alpha chain variable domain of TCR clone 348422 (TRAV1-1, TRAJ43)
YAPRVSSNDMRF

SEQ ID NO: 696844 - protein, 15 aa, Homo sapiens
  CDR3 for beta chain variable domain of TCR clone 348422 (TRBV5-1, TRBJ2-7)
CASSLGDFTTYEQYF

SEQ ID NO: 696845 - protein, 15 aa, Homo sapiens
  CDR3 for alpha chain variable domain of TCR clone 348423 (TRAV8-1, TRAJ23)
CAVNSHYNQGGKLIF

SEQ ID NO: 696846 - protein, 14 aa, Homo sapiens
  CDR3 for beta chain variable domain of TCR clone 348423 (TRBV7-2, TRBJ2-5)
CASSPRGSSETQYF

SEQ ID NO: 696847 - protein, 15 aa, Homo sapiens
  CDR3 for alpha chain variable domain of TCR clone 348424 (TRAV1-1, TRAJ20)
CAVRDNVANDYKLSF

SEQ ID NO: 696848 - protein, 13 aa, Homo sapiens
  CDR3 for beta chain variable domain of TCR clone 348424 (TRBV4-1, TRBJ2-2)
CDSSQENTGELFF

SEQ ID NO: 696849 - protein, 14 aa, Homo sapiens
  CDR3 for alpha chain variable domain of TCR clone 348425 (TRAV21, TRAJ58)
CAVRRGRSGSRLTF

SEQ ID NO: 696850 - protein, 13 aa, Homo sapiens
  CDR3 for beta chain variable domain of TCR clone 348425 (TRBV7-2, TRBJ1-6)
CASSLKSDSHLHF

SEQ ID NO: 696851 - protein, 18 aa, Homo sapiens
  CDR3 for alpha chain variable domain of TCR clone 348426 (TRAV26-2, TRAJ45)
CILRLWGCSGGGADGLTF

SEQ ID NO: 696852 - protein, 17 aa, Homo sapiens
  CDR3 for beta chain variable domain of TCR clone 348426 (TRBV28, TRBJ2-3)
CASSPTPAGGRVDTQYF

SEQ ID NO: 696853 - protein, 11 aa, Homo sapiens
  CDR3 for alpha chain variable domain of TCR clone 348427 (TRAV2, TRAJ33)
CAVDSNYQLIW

SEQ ID NO: 696854 - protein, 16 aa, Homo sapiens
  CDR3 for beta chain variable domain of TCR clone 348427 (TRBV12-4, TRBJ1-5)
CASRQPVEGSNQPQHF

SEQ ID NO: 696855 - protein, 16 aa, Homo sapiens
  CDR3 for alpha chain variable domain of TCR clone 348428 (TRAV30, TRAJ24)
CGTEIVDADSWGKFQV

SEQ ID NO: 696856 - protein, 17 aa, Homo sapiens
  CDR3 for beta chain variable domain of TCR clone 348428 (TRBV20-1, TRBJ2-2)
CSASGSGQGGLTGELFF

SEQ ID NO: 696857 - protein, 10 aa, Homo sapiens
  CDR3 for alpha chain variable domain of TCR clone 348429 (TRAV12-3, TRAJ18)
CAMSTEAQPW

SEQ ID NO: 696858 - protein, 13 aa, Homo sapiens
  CDR3 for beta chain variable domain of TCR clone 348429 (TRBV15, TRBJ1-6)
CATSGGLNSPLHF

SEQ ID NO: 696859 - protein, 14 aa, Homo sapiens
  CDR3 for alpha chain variable domain of TCR clone 348430 (TRAV35, TRAJ13)
CAGSPSGRYQKVTF

SEQ ID NO: 696860 - protein, 13 aa, Homo sapiens
  CDR3 for beta chain variable domain of TCR clone 348430 (TRBV29-1, TRBJ1-1)
CSVGDSRNTEAFF

SEQ ID NO: 696861 - protein, 14 aa, Homo sapiens
  CDR3 for alpha chain variable domain of TCR clone 348431 (TRAV17, TRAJ33)
CATDARQSNYQLIW

SEQ ID NO: 696862 - protein, 14 aa, Homo sapiens
  CDR3 for beta chain variable domain of TCR clone 348431 (TRBV25-1, TRBJ1-4)
CASSGGGQPEKLFF

SEQ ID NO: 696863 - protein, 15 aa, Homo sapiens
  CDR3 for alpha chain variable domain of TCR clone 348432 (TRAV12-2, TRAJ43)
CAFDMRFGAGTRLTV

SEQ ID NO: 696864 - protein, 15 aa, Homo sapiens
  CDR3 for beta chain variable domain of TCR clone 348432 (TRBV29-1, TRBJ2-1)
CSVPTGLALYNEQFF

SEQ ID NO: 696865 - protein, 13 aa, Homo sapiens
  CDR3 for alpha chain variable domain of TCR clone 348433 (TRAV27, TRAJ6)
CAGGTRGSYKPTF

SEQ ID NO: 696866 - protein, 13 aa, Homo sapiens
  CDR3 for beta chain variable domain of TCR clone 348433 (TRBV19, TRBJ1-5)
CASSIGGEQPQHF

SEQ ID NO: 696867 - protein, 14 aa, Homo sapiens
  CDR3 for alpha chain variable domain of TCR clone 348434 (TRAV1-2, TRAJ8)
CAVREDTGFQKLVF

SEQ ID NO: 696868 - protein, 15 aa, Homo sapiens
  CDR3 for beta chain variable domain of TCR clone 348434 (TRBV6-3, TRBJ2-7)
CASSFPGTVSYEQYF

SEQ ID NO: 696869 - protein, 15 aa, Homo sapiens
  CDR3 for alpha chain variable domain of TCR clone 348435 (TRAV3, TRAJ45)
CAVRTPWGGADALTF

SEQ ID NO: 696870 - protein, 16 aa, Homo sapiens
  CDR3 for beta chain variable domain of TCR clone 348435 (TRBV6-1, TRBJ2-2)
CASSFGQGANTGELFF

SEQ ID NO: 696871 - protein, 14 aa, Homo sapiens
  CDR3 for alpha chain variable domain of TCR clone 348436 (TRAV12-1, TRAJ43)
CVVNGRSNNHDMRF

SEQ ID NO: 696872 - protein, 12 aa, Homo sapiens
  CDR3 for beta chain variable domain of TCR clone 348436 (TRBV29-1, TRBJ2-3)
CSVTGGADTQYF

SEQ ID NO: 696873 - protein, 14 aa, Homo sapiens
  CDR3 for alpha chain variable domain of TCR clone 348437 (TRAV13-1, TRAJ13)
CAASRVGGYQKVTF

SEQ ID NO: 696874 - protein, 17 aa, Homo sapiens
  CDR3 for beta chain variable domain of TCR clone 348437 (TRBV15, TRBJ1-5)
CAPSRAPPGTRNQPQHF

SEQ ID NO: 696875 - protein, 13 aa, Homo sapiens
  CDR3 for alpha chain variable domain of TCR clone 348438 (TRAV26-1, TRAJ20)
CIVRVDSDYKLSF

SEQ ID NO: 696876 - protein, 13 aa, Homo sapiens
  CDR3 for beta chain variable domain of TCR clone 348438 (TRBV12-5, TRBJ2-3)
CASGDRQSDTQYF

SEQ ID NO: 696877 - protein, 13 aa, Homo sapiens
  CDR3 for alpha chain variable domain of TCR clone 348439 (TRAV30, TRAJ34)
CGTVGYNTDKPIF

SEQ ID NO: 696878 - protein, 16 aa, Homo sapiens
  CDR3 for beta chain variable domain of TCR clone 348439 (TRBV7-9, TRBJ1-2)
CASILGFSSGEDGYTF

SEQ ID NO: 696879 - protein, 14 aa, Homo sapiens
  CDR3 for alpha chain variable domain of TCR clone 348440 (TRAV17, TRAJ34)
CATDSLEATDKLIF

SEQ ID NO: 696880 - protein, 13 aa, Homo sapiens
  CDR3 for beta chain variable domain of TCR clone 348440 (TRBV11-2, TRBJ2-7)
CASSGTRPYEQYF

SEQ ID NO: 696881 - protein, 12 aa, Homo sapiens
  CDR3 for alpha chain variable domain of TCR clone 348441 (TRAV3, TRAJ31)
CAVRDGNARLLF

SEQ ID NO: 696882 - protein, 14 aa, Homo sapiens
  CDR3 for beta chain variable domain of TCR clone 348441 (TRBV6-3, TRBJ1-1)
CASSYGGQHTEAFF

SEQ ID NO: 696883 - protein, 12 aa, Homo sapiens
  CDR3 for alpha chain variable domain of TCR clone 348442 (TRAV13-1, TRAJ20)
CAASRGDYKLSF

SEQ ID NO: 696884 - protein, 12 aa, Homo sapiens
  CDR3 for beta chain variable domain of TCR clone 348442 (TRBV14, TRBJ1-1)
CASSQLKGLAFF

SEQ ID NO: 696885 - protein, 14 aa, Homo sapiens
  CDR3 for alpha chain variable domain of TCR clone 348443 (TRAV12-2, TRAJ45)
CAVNIGGGADGLTF

SEQ ID NO: 696886 - protein, 18 aa, Homo sapiens
  CDR3 for beta chain variable domain of TCR clone 348443 (TRBV6-6, TRBJ1-3)
CASSYSKWDSISGNTIYF

SEQ ID NO: 696887 - protein, 17 aa, Homo sapiens
  CDR3 for alpha chain variable domain of TCR clone 348444 (TRAV27, TRAJ52)
CAGAGWAGGSSYGKLTF

SEQ ID NO: 696888 - protein, 16 aa, Homo sapiens
  CDR3 for beta chain variable domain of TCR clone 348444 (TRBV19, TRBJ2-1)
CASSKAGPSSYNEQFF

SEQ ID NO: 696889 - protein, 13 aa, Homo sapiens
  CDR3 for alpha chain variable domain of TCR clone 348445 (TRAV16, TRAJ10)
CALLTGGGHKLTF

SEQ ID NO: 696890 - protein, 12 aa, Homo sapiens
  CDR3 for beta chain variable domain of TCR clone 348445 (TRBV28, TRBJ2-7)
CASTGNHYEQYF

SEQ ID NO: 696891 - protein, 16 aa, Homo sapiens
  CDR3 for alpha chain variable domain of TCR clone 348446 (TRAV1-2, TRAJ10)
CAVRGVLTGGGNKLTF

SEQ ID NO: 696892 - protein, 16 aa, Homo sapiens
  CDR3 for beta chain variable domain of TCR clone 348446 (TRBV7-2, TRBJ1-3)
CASSRLEASSGNTIYF

SEQ ID NO: 696893 - protein, 14 aa, Homo sapiens
  CDR3 for alpha chain variable domain of TCR clone 348447 (TRAV4, TRAJ17)
CLVGPRAAGNKLTF

SEQ ID NO: 696894 - protein, 18 aa, Homo sapiens
  CDR3 for beta chain variable domain of TCR clone 348447 (TRBV7-9, TRBJ2-7)
CASSLTTSGSRTWYEQYF

SEQ ID NO: 696895 - protein, 14 aa, Homo sapiens
  CDR3 for alpha chain variable domain of TCR clone 348448 (TRAV30, TRAJ33)
CGTVAPRSNYQLIW

SEQ ID NO: 696896 - protein, 18 aa, Homo sapiens
  CDR3 for beta chain variable domain of TCR clone 348448 (TRBV11-2, TRBJ2-3)
CASSLGGASRGARNTQYF

SEQ ID NO: 696897 - protein, 13 aa, Homo sapiens
  CDR3 for alpha chain variable domain of TCR clone 348449 (TRAV17, TRAJ9)
CATAITGGFKTIF

SEQ ID NO: 696898 - protein, 15 aa, Homo sapiens
  CDR3 for beta chain variable domain of TCR clone 348449 (TRBV15, TRBJ2-1)
CHSRNLAGGYNEQFF

SEQ ID NO: 696899 - protein, 12 aa, Homo sapiens
  CDR3 for alpha chain variable domain of TCR clone 348450 (TRAV1-2, TRAJ33)
CAALDSNYQLIW

SEQ ID NO: 696900 - protein, 14 aa, Homo sapiens
  CDR3 for beta chain variable domain of TCR clone 348450 (TRBV20-1, TRBJ2-2)
CSAPDTANTGELFF

SEQ ID NO: 696901 - protein, 14 aa, Homo sapiens
  CDR3 for alpha chain variable domain of TCR clone 348451 (TRAV1-2, TRAJ8)
CAVREDTGFQKLVF

SEQ ID NO: 696902 - protein, 15 aa, Homo sapiens
  CDR3 for beta chain variable domain of TCR clone 348451 (TRBV28, TRBJ2-1)
CASSIIAEGRSEQFF

SEQ ID NO: 696903 - protein, 14 aa, Homo sapiens
  CDR3 for alpha chain variable domain of TCR clone 348452 (TRAV12-3, TRAJ10)
SHLPLTGGGNKLTF

SEQ ID NO: 696904 - protein, 15 aa, Homo sapiens
  CDR3 for beta chain variable domain of TCR clone 348452 (TRBV7-9, TRBJ2-7)
CASSPGLAFDYEQYF

SEQ ID NO: 696905 - protein, 14 aa, Homo sapiens
  CDR3 for alpha chain variable domain of TCR clone 348453 (TRAV16, TRAJ32)
CALKSSGATNKLIF

SEQ ID NO: 696906 - protein, 13 aa, Homo sapiens
  CDR3 for beta chain variable domain of TCR clone 348453 (TRBV15, TRBJ1-6)
CATLGGLNSPLHF

SEQ ID NO: 696907 - protein, 14 aa, Homo sapiens
  CDR3 for alpha chain variable domain of TCR clone 348454 (TRAV26-1, TRAJ38)
CIADNAGNNRKLIW

SEQ ID NO: 696908 - protein, 16 aa, Homo sapiens
  CDR3 for beta chain variable domain of TCR clone 348454 (TRBV25-1, TRBJ1-1)
CASSGDRDRGRIEAFF

SEQ ID NO: 696909 - protein, 11 aa, Homo sapiens
  CDR3 for alpha chain variable domain of TCR clone 348455 (TRAV21, TRAJ30)
CCEVTDDKIIV

SEQ ID NO: 696910 - protein, 15 aa, Homo sapiens
  CDR3 for beta chain variable domain of TCR clone 348455 (TRBV6-6, TRBJ2-7)
CASSYSYGGSYEQYF

SEQ ID NO: 696911 - protein, 18 aa, Homo sapiens
  CDR3 for alpha chain variable domain of TCR clone 348456 (TRAV13-1, TRAJ52)
CAAKNPNACGTSYGKLTF

SEQ ID NO: 696912 - protein, 12 aa, Homo sapiens
  CDR3 for beta chain variable domain of TCR clone 348456 (TRBV2, TRBJ2-1)
CAYVPPGNEQFF

SEQ ID NO: 696913 - protein, 19 aa, Homo sapiens
  CDR3 for alpha chain variable domain of TCR clone 348457 (TRAV17, TRAJ17)
CATDGRPGVIKAAGNRLTF

SEQ ID NO: 696914 - protein, 17 aa, Homo sapiens
  CDR3 for beta chain variable domain of TCR clone 348457 (TRBV12-4, TRBJ1-1)
CASSLSGFRTMNTEAFF

SEQ ID NO: 696915 - protein, 15 aa, Homo sapiens
  CDR3 for alpha chain variable domain of TCR clone 348458 (TRAV8-3, TRAJ40)
CAAPSLGSGTYKYIF

SEQ ID NO: 696916 - protein, 16 aa, Homo sapiens
  CDR3 for beta chain variable domain of TCR clone 348458 (TRBV7-3, TRBJ2-3)
CASSLSGYRPEYTQYF

SEQ ID NO: 696917 - protein, 15 aa, Homo sapiens
  CDR3 for alpha chain variable domain of TCR clone 348459 (TRAV17, TRAJ57)
CATGPSQGGSEKRAF

SEQ ID NO: 696918 - protein, 16 aa, Homo sapiens
  CDR3 for beta chain variable domain of TCR clone 348459 (TRBV12-4, TRBJ1-5)
CASSRPVGGSNQPQHF

SEQ ID NO: 696919 - protein, 14 aa, Homo sapiens
  CDR3 for alpha chain variable domain of TCR clone 348460 (TRAV8-4, TRAJ13)
CAVTLSGGYQKVTF

SEQ ID NO: 696920 - protein, 15 aa, Homo sapiens
  CDR3 for beta chain variable domain of TCR clone 348460 (TRBV7-3, TRBJ2-2)
CASSETGQGTGELFF

SEQ ID NO: 696921 - protein, 15 aa, Homo sapiens
  CDR3 for alpha chain variable domain of TCR clone 348461 (TRAV12-3, TRAJ6)
CAMSATSGGSYIPTF

SEQ ID NO: 696922 - protein, 13 aa, Homo sapiens
  CDR3 for beta chain variable domain of TCR clone 348461 (TRBV10-3, TRBJ2-7)
CASKLAVNYEQYF

SEQ ID NO: 696923 - protein, 19 aa, Homo sapiens
  CDR3 for alpha chain variable domain of TCR clone 348462 (TRAV13-1, TRAJ52)
CAASSSPNAGGTSYGELTF

SEQ ID NO: 696924 - protein, 15 aa, Homo sapiens
  CDR3 for beta chain variable domain of TCR clone 348462 (TRBV9, TRBJ1-6)
CASSTGGGVDSPLHF

SEQ ID NO: 696925 - protein, 18 aa, Homo sapiens
  CDR3 for alpha chain variable domain of TCR clone 348463 (TRAV21, TRAJ52)
CAVRPSPAAGTSYGKLTF

SEQ ID NO: 696926 - protein, 16 aa, Homo sapiens
  CDR3 for beta chain variable domain of TCR clone 348463 (TRBV19, TRBJ2-2)
CASRSPGTGATGELFF

SEQ ID NO: 696927 - protein, 16 aa, Homo sapiens
  CDR3 for alpha chain variable domain of TCR clone 348464 (TRAV3, TRAJ10)
CAVRDMRAGGGNKLTF

SEQ ID NO: 696928 - protein, 14 aa, Homo sapiens
  CDR3 for beta chain variable domain of TCR clone 348464 (TRBV7-2, TRBJ1-4)
CASSGVEGGEKLFV

SEQ ID NO: 696929 - protein, 18 aa, Homo sapiens
  CDR3 for alpha chain variable domain of TCR clone 348465 (TRAV21, TRAJ52)
CAVMPSPAGGTSYGKLTF

SEQ ID NO: 696930 - protein, 17 aa, Homo sapiens
  CDR3 for beta chain variable domain of TCR clone 348465 (TRBV13, TRBJ2-3)
CASSLSRVAGGKNTQYF

SEQ ID NO: 696931 - protein, 16 aa, Homo sapiens
  CDR3 for alpha chain variable domain of TCR clone 348466 (TRAV4, TRAJ22)
CLVGDLYSGSARQLTF

SEQ ID NO: 696932 - protein, 16 aa, Homo sapiens
  CDR3 for beta chain variable domain of TCR clone 348466 (TRBV7-9, TRBJ2-1)
CASSDVSGGSYNEQFF

SEQ ID NO: 696933 - protein, 15 aa, Homo sapiens
  CDR3 for alpha chain variable domain of TCR clone 348467 (TRAV3, TRAJ22)
CAVRDRGGSARQLTF

SEQ ID NO: 696934 - protein, 17 aa, Homo sapiens
  CDR3 for beta chain variable domain of TCR clone 348467 (TRBV13, TRBJ2-3)
CASSLSGVAGGRNTQYF

SEQ ID NO: 696935 - protein, 11 aa, Homo sapiens
  CDR3 for alpha chain variable domain of TCR clone 348468 (TRAV30, TRAJ23)
CGTAIAGKLIF

SEQ ID NO: 696936 - protein, 16 aa, Homo sapiens
  CDR3 for beta chain variable domain of TCR clone 348468 (TRBV7-2, TRBJ2-7)
CASTSQAASGGYEQYF

SEQ ID NO: 696937 - protein, 12 aa, Homo sapiens
  CDR3 for alpha chain variable domain of TCR clone 348469 (TRAV8-3, TRAJ20)
CAVGANDYKLSF

SEQ ID NO: 696938 - protein, 13 aa, Homo sapiens
  CDR3 for beta chain variable domain of TCR clone 348469 (TRBV20-1, TRBJ2-2)
CSASAAGTGELFF

SEQ ID NO: 696939 - protein, 14 aa, Homo sapiens
  CDR3 for alpha chain variable domain of TCR clone 348470 (TRAV12-3, TRAJ50)
CAMSPKTSYDKVIF

SEQ ID NO: 696940 - protein, 15 aa, Homo sapiens
  CDR3 for beta chain variable domain of TCR clone 348470 (TRBV7-2, TRBJ2-3)
CASSSTGLETDTQYF

SEQ ID NO: 696941 - protein, 12 aa, Homo sapiens
  CDR3 for alpha chain variable domain of TCR clone 348471 (TRAV13-1, TRAJ9)
CASHTGGFKTIL

SEQ ID NO: 696942 - protein, 13 aa, Homo sapiens
  CDR3 for beta chain variable domain of TCR clone 348471 (TRBV12-4, TRBJ1-2)
CASSSGSKGGYTF

SEQ ID NO: 696943 - protein, 13 aa, Homo sapiens
  CDR3 for alpha chain variable domain of TCR clone 348472 (TRAV8-6, TRAJ49)
CAVITNTGNQFYF

SEQ ID NO: 696944 - protein, 13 aa, Homo sapiens
  CDR3 for beta chain variable domain of TCR clone 348472 (TRBV15, TRBJ1-1)
CATSREMVEKAFF

SEQ ID NO: 696945 - protein, 17 aa, Homo sapiens
  CDR3 for alpha chain variable domain of TCR clone 348473 (TRAV3, TRAJ38)
CAVRDCLNAGNNRKLIW

SEQ ID NO: 696946 - protein, 15 aa, Homo sapiens
  CDR3 for beta chain variable domain of TCR clone 348473 (TRBV5-1, TRBJ2-7)
CASSLGDFTTYEQYF

SEQ ID NO: 696947 - protein, 18 aa, Homo sapiens
  CDR3 for alpha chain variable domain of TCR clone 348474 (TRAV26-1, TRAJ22)
CIVRVALISSGSARQLTF

SEQ ID NO: 696948 - protein, 12 aa, Homo sapiens
  CDR3 for beta chain variable domain of TCR clone 348474 (TRBV11-2, TRBJ2-2)
CASSLGGGELFF

SEQ ID NO: 696949 - protein, 17 aa, Homo sapiens
  CDR3 for alpha chain variable domain of TCR clone 348475 (TRAV3, TRAJ42)
CAVRGGDYGGSQGNLIF

SEQ ID NO: 696950 - protein, 14 aa, Homo sapiens
  CDR3 for beta chain variable domain of TCR clone 348475 (TRBV5-4, TRBJ1-1)
CASSLDSRRDEAFF

SEQ ID NO: 696951 - protein, 12 aa, Homo sapiens
  CDR3 for alpha chain variable domain of TCR clone 348476 (TRAV12-2, TRAJ9)
CAVNTGGFKTIF

SEQ ID NO: 696952 - protein, 15 aa, Homo sapiens
  CDR3 for beta chain variable domain of TCR clone 348476 (TRBV20-1, TRBJ2-7)
CSAESGTSGAYEQYF

SEQ ID NO: 696953 - protein, 15 aa, Homo sapiens
  CDR3 for alpha chain variable domain of TCR clone 348477 (TRAV8-1, TRAJ23)
CAVNSHYNQGGKLIF

SEQ ID NO: 696954 - protein, 16 aa, Homo sapiens
  CDR3 for beta chain variable domain of TCR clone 348477 (TRBV29-1, TRBJ2-7)
CSVEDAEDGTAYEQYF

SEQ ID NO: 696955 - protein, 13 aa, Homo sapiens
  CDR3 for alpha chain variable domain of TCR clone 348478 (TRAV27, TRAJ27)
CAGGITDAGKSTF

SEQ ID NO: 696956 - protein, 13 aa, Homo sapiens
  CDR3 for beta chain variable domain of TCR clone 348478 (TRBV20-1, TRBJ1-2)
CSASLGVGYGYTF

SEQ ID NO: 696957 - protein, 13 aa, Homo sapiens
  CDR3 for alpha chain variable domain of TCR clone 348479 (TRAV36/DV7, TRAJ7)
CSGTRYGNNRLAF

SEQ ID NO: 696958 - protein, 15 aa, Homo sapiens
  CDR3 for beta chain variable domain of TCR clone 348479 (TRBV11-3, TRBJ2-7)
CASSPGPASSYEQYF

SEQ ID NO: 696959 - protein, 16 aa, Homo sapiens
  CDR3 for alpha chain variable domain of TCR clone 348480 (TRAV3, TRAJ37)
CAVRPPGAGNTGKLIF

SEQ ID NO: 696960 - protein, 16 aa, Homo sapiens
  CDR3 for beta chain variable domain of TCR clone 348480 (TRBV9, TRBJ1-2)
CASSVEEKVSPYGYTF

SEQ ID NO: 696961 - protein, 14 aa, Homo sapiens
  CDR3 for alpha chain variable domain of TCR clone 348481 (TRAV1-2, TRAJ8)
CAVREDTGFQKLVF

SEQ ID NO: 696962 - protein, 14 aa, Homo sapiens
  CDR3 for beta chain variable domain of TCR clone 348481 (TRBV20-1, TRBJ1-1)
CSAMGGTANTEAFF

SEQ ID NO: 696963 - protein, 13 aa, Homo sapiens
  CDR3 for alpha chain variable domain of TCR clone 348482 (TRAV8-3, TRAJ28)
CAVGAVRSYQLTF

SEQ ID NO: 696964 - protein, 15 aa, Homo sapiens
  CDR3 for beta chain variable domain of TCR clone 348482 (TRBV28, TRBJ2-5)
CASSPGQGSIETQYF

SEQ ID NO: 696965 - protein, 10 aa, Homo sapiens
  CDR3 for alpha chain variable domain of TCR clone 348483 (TRAV8-4, TRAJ43)
CAVSADDMRF

SEQ ID NO: 696966 - protein, 16 aa, Homo sapiens
  CDR3 for beta chain variable domain of TCR clone 348483 (TRBV19, TRBJ1-1)
CASRFGGPVTGTEAFF

SEQ ID NO: 696967 - protein, 16 aa, Homo sapiens
  CDR3 for alpha chain variable domain of TCR clone 348484 (TRAV20, TRAJ38)
CAVQASNAGNNRKPNW

SEQ ID NO: 696968 - protein, 16 aa, Homo sapiens
  CDR3 for beta chain variable domain of TCR clone 348484 (TRBV7-8, TRBJ2-6)
CASRVGDSSGANVLTF

SEQ ID NO: 696969 - protein, 15 aa, Homo sapiens
  CDR3 for alpha chain variable domain of TCR clone 348485 (TRAV12-2, TRAJ53)
CVVNGGGGGNYKLTF

SEQ ID NO: 696970 - protein, 17 aa, Homo sapiens
  CDR3 for beta chain variable domain of TCR clone 348485 (TRBV7-3, TRBJ2-3)
RASSLMKRMRGADTQYF

SEQ ID NO: 696971 - protein, 15 aa, Homo sapiens
  CDR3 for alpha chain variable domain of TCR clone 348486 (TRAV3, TRAJ36)
CAVRASQTGANNLFF

SEQ ID NO: 696972 - protein, 15 aa, Homo sapiens
  CDR3 for beta chain variable domain of TCR clone 348486 (TRBV6-5, TRBJ2-1)
CASSYDAGAGNEQFF

SEQ ID NO: 696973 - protein, 15 aa, Homo sapiens
  CDR3 for alpha chain variable domain of TCR clone 348487 (TRAV38-1, TRAJ37)
CAFIFGSGNSGKLIF

SEQ ID NO: 696974 - protein, 17 aa, Homo sapiens
  CDR3 for beta chain variable domain of TCR clone 348487 (TRBV19, TRBJ2-5)
CASSIARTSGGEETQYF

SEQ ID NO: 696975 - protein, 14 aa, Homo sapiens
  CDR3 for alpha chain variable domain of TCR clone 348488 (TRAV1-2, TRAJ16)
CAVNRFSDGQKLLV

SEQ ID NO: 696976 - protein, 16 aa, Homo sapiens
  CDR3 for beta chain variable domain of TCR clone 348488 (TRBV12-4, TRBJ2-5)
CASSFFVRGRQETQYF

SEQ ID NO: 696977 - protein, 16 aa, Homo sapiens
  CDR3 for alpha chain variable domain of TCR clone 348489 (TRAV17, TRAJ28)
CATASVSGAGRYQLTF

SEQ ID NO: 696978 - protein, 11 aa, Homo sapiens
  CDR3 for beta chain variable domain of TCR clone 348489 (TRBV7-9, TRBJ2-5)
CASSLGGTQYL

SEQ ID NO: 696979 - protein, 16 aa, Homo sapiens
  CDR3 for alpha chain variable domain of TCR clone 348490 (TRAV8-3, TRAJ13)
CAVGAYPSGGYQKVTF

SEQ ID NO: 696980 - protein, 15 aa, Homo sapiens
  CDR3 for beta chain variable domain of TCR clone 348490 (TRBV19, TRBJ1-5)
CASSIVWADNQQQHF

SEQ ID NO: 696981 - protein, 13 aa, Homo sapiens
  CDR3 for alpha chain variable domain of TCR clone 348491 (TRAV29/DV5, TRAJ31)
CAASRNNNARLMF

SEQ ID NO: 696982 - protein, 16 aa, Homo sapiens
  CDR3 for beta chain variable domain of TCR clone 348491 (TRBV15, TRBJ2-6)
CATSVNGGFLANVLTF

SEQ ID NO: 696983 - protein, 12 aa, Homo sapiens
  CDR3 for alpha chain variable domain of TCR clone 348492 (TRAV20, TRAJ56)
CAVTGANSKLTF

SEQ ID NO: 696984 - protein, 14 aa, Homo sapiens
  CDR3 for beta chain variable domain of TCR clone 348492 (TRBV20-1, TRBJ2-5)
CSALVPGYQDTQYF

SEQ ID NO: 696985 - protein, 15 aa, Homo sapiens
  CDR3 for alpha chain variable domain of TCR clone 348493 (TRAV12-1, TRAJ44)
CVVDTPQGTASKLTF

SEQ ID NO: 696986 - protein, 13 aa, Homo sapiens
  CDR3 for beta chain variable domain of TCR clone 348493 (TRBV19, TRBJ2-7)
CASSPRQSYEQYF

SEQ ID NO: 696987 - protein, 14 aa, Homo sapiens
  CDR3 for alpha chain variable domain of TCR clone 348494 (TRAV1-2, TRAJ16)
CAVNRFSDGQKLHF

SEQ ID NO: 696988 - protein, 11 aa, Homo sapiens
  CDR3 for beta chain variable domain of TCR clone 348494 (TRBV29-1, TRBJ2-5)
CSEDRAGTQYF

SEQ ID NO: 696989 - protein, 13 aa, Homo sapiens
  CDR3 for alpha chain variable domain of TCR clone 348495 (TRAV17, TRAJ40)
CATAPGGTYKYSF

SEQ ID NO: 696990 - protein, 12 aa, Homo sapiens
  CDR3 for beta chain variable domain of TCR clone 348495 (TRBV2, TRBJ1-5)
CASSENRTPQHF

SEQ ID NO: 696991 - protein, 12 aa, Homo sapiens
  CDR3 for alpha chain variable domain of TCR clone 348496 (TRAV12-2, TRAJ7)
CAVMRGNNRLAF

SEQ ID NO: 696992 - protein, 16 aa, Homo sapiens
  CDR3 for beta chain variable domain of TCR clone 348496 (TRBV7-9, TRBJ2-3)
CQQPYCSGDLTDTQYF

SEQ ID NO: 696993 - protein, 11 aa, Homo sapiens
  CDR3 for alpha chain variable domain of TCR clone 348497 (TRAV3, TRAJ21)
CAVGNFNKFYF

SEQ ID NO: 696994 - protein, 15 aa, Homo sapiens
  CDR3 for beta chain variable domain of TCR clone 348497 (TRBV27, TRBJ1-6)
CASSFDRGLGSPLHF

SEQ ID NO: 696995 - protein, 16 aa, Homo sapiens
  CDR3 for alpha chain variable domain of TCR clone 348498 (TRAV17, TRAJ22)
CATDAISSGSARQLTF

SEQ ID NO: 696996 - protein, 14 aa, Homo sapiens
  CDR3 for beta chain variable domain of TCR clone 348498 (TRBV5-1, TRBJ2-3)
CASSRGQGGGTQYF

SEQ ID NO: 696997 - protein, 15 aa, Homo sapiens
  CDR3 for alpha chain variable domain of TCR clone 348499 (TRAV12-2, TRAJ43)
CAFDMRFGAGTRLTV

SEQ ID NO: 696998 - protein, 15 aa, Homo sapiens
  CDR3 for beta chain variable domain of TCR clone 348499 (TRBV28, TRBJ2-1)
CASSGLAEVENEQFF

SEQ ID NO: 696999 - protein, 15 aa, Homo sapiens
  CDR3 for alpha chain variable domain of TCR clone 348500 (TRAV4, TRAJ39)
CLGGPNNNAGNMLAF

SEQ ID NO: 697000 - protein, 13 aa, Homo sapiens
  CDR3 for beta chain variable domain of TCR clone 348500 (TRBV11-2, TRBJ2-5)
CASSSTGEESQYF

SEQ ID NO: 697001 - protein, 23 aa, Homo sapiens
  CDR3 for alpha chain variable domain of TCR clone 348501 (TRAV26-1, TRAJ38)
CIADNAGNNHIQNPDPAVHKLRD

SEQ ID NO: 697002 - protein, 13 aa, Homo sapiens
  CDR3 for beta chain variable domain of TCR clone 348501 (TRBV20-1, TRBJ1-1)
CSARGGGNTEAFF

SEQ ID NO: 697003 - protein, 15 aa, Homo sapiens
  CDR3 for alpha chain variable domain of TCR clone 348502 (TRAV8-3, TRAJ45)
CASSYSGGGADGLTF

SEQ ID NO: 697004 - protein, 15 aa, Homo sapiens
  CDR3 for beta chain variable domain of TCR clone 348502 (TRBV20-1, TRBJ1-5)
CSAFKNGQRNQPQHF

SEQ ID NO: 697005 - protein, 16 aa, Homo sapiens
  CDR3 for alpha chain variable domain of TCR clone 348503 (TRAV26-1, TRAJ48)
CIVREPPNFGNEKLTF

SEQ ID NO: 697006 - protein, 15 aa, Homo sapiens
  CDR3 for beta chain variable domain of TCR clone 348503 (TRBV7-2, TRBJ2-6)
CASSLQEAGANGLTF

SEQ ID NO: 697007 - protein, 16 aa, Homo sapiens
  CDR3 for alpha chain variable domain of TCR clone 348504 (TRAV8-3, TRAJ13)
CAVGAYPSGGYQKVTF

SEQ ID NO: 697008 - protein, 14 aa, Homo sapiens
  CDR3 for beta chain variable domain of TCR clone 348504 (TRBV19, TRBJ2-2)
CASSTLHRSGELFF

SEQ ID NO: 697009 - protein, 14 aa, Homo sapiens
  CDR3 for alpha chain variable domain of TCR clone 348505 (TRAV12-2, TRAJ53)
CAVKGGGSNYKLTF

SEQ ID NO: 697010 - protein, 14 aa, Homo sapiens
  CDR3 for beta chain variable domain of TCR clone 348505 (TRBV19, TRBJ2-1)
CASPTLVLSGEQFF

SEQ ID NO: 697011 - protein, 14 aa, Homo sapiens
  CDR3 for alpha chain variable domain of TCR clone 348506 (TRAV13-1, TRAJ8)
CAAGMSTGFQKLVF

SEQ ID NO: 697012 - protein, 13 aa, Homo sapiens
  CDR3 for beta chain variable domain of TCR clone 348506 (TRBV13, TRBJ2-1)
CASTPGSYNEQFF

SEQ ID NO: 697013 - protein, 15 aa, Homo sapiens
  CDR3 for alpha chain variable domain of TCR clone 348507 (TRAV21, TRAJ38)
CAVRQDAGNDRKLIW

SEQ ID NO: 697014 - protein, 16 aa, Homo sapiens
  CDR3 for beta chain variable domain of TCR clone 348507 (TRBV4-2, TRBJ1-1)
CASRPRDGGGDTEAFF

SEQ ID NO: 697015 - protein, 13 aa, Homo sapiens
  CDR3 for alpha chain variable domain of TCR clone 348508 (TRAV13-1, TRAJ20)
CAARVSNDYKLSF

SEQ ID NO: 697016 - protein, 14 aa, Homo sapiens
  CDR3 for beta chain variable domain of TCR clone 348508 (TRBV27, TRBJ2-7)
CASSCRDGPYEQYF

SEQ ID NO: 697017 - protein, 15 aa, Homo sapiens
  CDR3 for alpha chain variable domain of TCR clone 348509 (TRAV8-3, TRAJ9)
CAVAPFVTGGFKTIF

SEQ ID NO: 697018 - protein, 15 aa, Homo sapiens
  CDR3 for beta chain variable domain of TCR clone 348509 (TRBV5-7, TRBJ2-5)
CASRWGSPYQETQYF

SEQ ID NO: 697019 - protein, 10 aa, Homo sapiens
  CDR3 for alpha chain variable domain of TCR clone 348510 (TRAV8-4, TRAJ39)
CAVSGNMLTF

SEQ ID NO: 697020 - protein, 18 aa, Homo sapiens
  CDR3 for beta chain variable domain of TCR clone 348510 (TRBV11-2, TRBJ2-3)
CASSLGGASRGAPNTQYF

SEQ ID NO: 697021 - protein, 15 aa, Homo sapiens
  CDR3 for alpha chain variable domain of TCR clone 348511 (TRAV13-1, TRAJ44)
CAAIRGGGTASKLTF

SEQ ID NO: 697022 - protein, 12 aa, Homo sapiens
  CDR3 for beta chain variable domain of TCR clone 348511 (TRBV11-2, TRBJ2-2)
CASSLGGGELFF

SEQ ID NO: 697023 - protein, 14 aa, Homo sapiens
  CDR3 for alpha chain variable domain of TCR clone 348512 (TRAV2, TRAJ3)
CAVRPYSSASKIIC

SEQ ID NO: 697024 - protein, 17 aa, Homo sapiens
  CDR3 for beta chain variable domain of TCR clone 348512 (TRBV7-6, TRBJ2-5)
CASSSPQAGDPSETQYF

SEQ ID NO: 697025 - protein, 11 aa, Homo sapiens
  CDR3 for alpha chain variable domain of TCR clone 348513 (TRAV12-2, TRAJ34)
CAHYNTDKLIF

SEQ ID NO: 697026 - protein, 16 aa, Homo sapiens
  CDR3 for beta chain variable domain of TCR clone 348513 (TRBV4-1, TRBJ2-3)
CASSQRAGGLTDTQYF

SEQ ID NO: 697027 - protein, 16 aa, Homo sapiens
  CDR3 for alpha chain variable domain of TCR clone 348514 (TRAV8-1, TRAJ39)
CAVNVPSYNAGNMLPF

SEQ ID NO: 697028 - protein, 15 aa, Homo sapiens
  CDR3 for beta chain variable domain of TCR clone 348514 (TRBV4-1, TRBJ2-3)
CASRSTRAGTDTQYF

SEQ ID NO: 697029 - protein, 23 aa, Homo sapiens
  CDR3 for alpha chain variable domain of TCR clone 348515 (TRAV8-3, )
CAVVTTRIPDIQNPDPAVYQLRD

SEQ ID NO: 697030 - protein, 14 aa, Homo sapiens
  CDR3 for beta chain variable domain of TCR clone 348515 (TRBV11-2, TRBJ2-7)
CASSPSTTSYEQYY

SEQ ID NO: 697031 - protein, 16 aa, Homo sapiens
  CDR3 for alpha chain variable domain of TCR clone 348516 (TRAV3, TRAJ10)
CAVRDMRAGGGNKLTF

SEQ ID NO: 697032 - protein, 16 aa, Homo sapiens
  CDR3 for beta chain variable domain of TCR clone 348516 (TRBV5-7, TRBJ1-5)
CASSLQQDREYQTQHF

SEQ ID NO: 697033 - protein, 11 aa, Homo sapiens
  CDR3 for alpha chain variable domain of TCR clone 348517 (TRAV12-1, TRAJ30)
CVVNGQDKIVF

SEQ ID NO: 697034 - protein, 15 aa, Homo sapiens
  CDR3 for beta chain variable domain of TCR clone 348517 (TRBV28, TRBJ2-5)
CASSSGRTIQETQYF

SEQ ID NO: 697035 - protein, 14 aa, Homo sapiens
  CDR3 for alpha chain variable domain of TCR clone 348518 (TRAV3, TRAJ6)
CAVRDPWGSYIPTF

SEQ ID NO: 697036 - protein, 13 aa, Homo sapiens
  CDR3 for beta chain variable domain of TCR clone 348518 (TRBV18, TRBJ1-2)
CASSASATEGYTF

SEQ ID NO: 697037 - protein, 11 aa, Homo sapiens
  CDR3 for alpha chain variable domain of TCR clone 348519 (TRAV4, TRAJ23)
RLVAPGGKLIF

SEQ ID NO: 697038 - protein, 13 aa, Homo sapiens
  CDR3 for beta chain variable domain of TCR clone 348519 (TRBV7-9, TRBJ1-2)
CASSLKQNYGYTF

SEQ ID NO: 697039 - protein, 15 aa, Homo sapiens
  CDR3 for alpha chain variable domain of TCR clone 348520 (TRAV38-1, TRAJ37)
CAFFFGSGNTGKLIF

SEQ ID NO: 697040 - protein, 12 aa, Homo sapiens
  CDR3 for beta chain variable domain of TCR clone 348520 (TRBV7-9, TRBJ2-7)
CASSSEGYEQYF

SEQ ID NO: 697041 - protein, 16 aa, Homo sapiens
  CDR3 for alpha chain variable domain of TCR clone 348521 (TRAV3, TRAJ37)
YAVRPHGSGNTGKLIF

SEQ ID NO: 697042 - protein, 15 aa, Homo sapiens
  CDR3 for beta chain variable domain of TCR clone 348521 (TRBV3-1, TRBJ1-2)
CASSHPGTPGYGYTF

SEQ ID NO: 697043 - protein, 18 aa, Homo sapiens
  CDR3 for alpha chain variable domain of TCR clone 348522 (TRAV26-1, TRAJ23)
CIVRVGLEVWNQGGKLIF

SEQ ID NO: 697044 - protein, 16 aa, Homo sapiens
  CDR3 for beta chain variable domain of TCR clone 348522 (TRBV12-4, TRBJ2-5)
CAISFFVRGRQETQYF

SEQ ID NO: 697045 - protein, 14 aa, Homo sapiens
  CDR3 for alpha chain variable domain of TCR clone 348523 (TRAV26-1, TRAJ16)
CIVRVPSDGQKLLF

SEQ ID NO: 697046 - protein, 17 aa, Homo sapiens
  CDR3 for beta chain variable domain of TCR clone 348523 (TRBV20-1, TRBJ2-1)
CSASSSGLAGSYSEQFF

SEQ ID NO: 697047 - protein, 15 aa, Homo sapiens
  CDR3 for alpha chain variable domain of TCR clone 348524 (TRAV12-2, TRAJ53)
CAVNGGGGSNYKLTF

SEQ ID NO: 697048 - protein, 20 aa, Homo sapiens
  CDR3 for beta chain variable domain of TCR clone 348524 (TRBV7-8, TRBJ2-2)
CASSHLFPGPTIHITGELFF

SEQ ID NO: 697049 - protein, 14 aa, Homo sapiens
  CDR3 for alpha chain variable domain of TCR clone 348525 (TRAV12-1, TRAJ17)
CVVNFKAAGNKLTF

SEQ ID NO: 697050 - protein, 15 aa, Homo sapiens
  CDR3 for beta chain variable domain of TCR clone 348525 (TRBV12-4, TRBJ2-1)
CASSLRDAAYNEQFF

SEQ ID NO: 697051 - protein, 14 aa, Homo sapiens
  CDR3 for alpha chain variable domain of TCR clone 348526 (TRAV12-1, TRAJ41)
CVVLNSNSGYALNF

SEQ ID NO: 697052 - protein, 14 aa, Homo sapiens
  CDR3 for beta chain variable domain of TCR clone 348526 (TRBV5-1, TRBJ2-7)
CASSRGESLYEQYL

SEQ ID NO: 697053 - protein, 13 aa, Homo sapiens
  CDR3 for alpha chain variable domain of TCR clone 348527 (TRAV17, TRAJ5)
CALRGTGRRALTF

SEQ ID NO: 697054 - protein, 13 aa, Homo sapiens
  CDR3 for beta chain variable domain of TCR clone 348527 (TRBV4-2, TRBJ1-1)
CASSQAGDTESFF

SEQ ID NO: 697055 - protein, 23 aa, Homo sapiens
  CDR3 for alpha chain variable domain of TCR clone 348528 (TRAV2, TRAJ38)
CAVEDFPNAGNNHIQNPDPAVYQ

SEQ ID NO: 697056 - protein, 20 aa, Homo sapiens
  CDR3 for beta chain variable domain of TCR clone 348528 (TRBV28, TRBJ2-1)
CASTPIGRSPGLAGGNEQSF

SEQ ID NO: 697057 - protein, 12 aa, Homo sapiens
  CDR3 for alpha chain variable domain of TCR clone 348529 (TRAV12-3, TRAJ20)
CAMVRGDYKLSF

SEQ ID NO: 697058 - protein, 17 aa, Homo sapiens
  CDR3 for beta chain variable domain of TCR clone 348529 (TRBV4-1, TRBJ2-1)
CASSQGRGGGLYNEQFF

SEQ ID NO: 697059 - protein, 14 aa, Homo sapiens
  CDR3 for alpha chain variable domain of TCR clone 348530 (TRAV12-2, TRAJ44)
CAVNPAGTASKLTL

SEQ ID NO: 697060 - protein, 16 aa, Homo sapiens
  CDR3 for beta chain variable domain of TCR clone 348530 (TRBV2, TRBJ2-1)
CASSVGGSLSYNEQFF

SEQ ID NO: 697061 - protein, 13 aa, Homo sapiens
  CDR3 for alpha chain variable domain of TCR clone 348531 (TRAV2, TRAJ40)
CAVVTSGTYKYIF

SEQ ID NO: 697062 - protein, 16 aa, Homo sapiens
  CDR3 for beta chain variable domain of TCR clone 348531 (TRBV7-3, TRBJ2-3)
CRSLMKRMRGADTQYF

SEQ ID NO: 697063 - protein, 11 aa, Homo sapiens
  CDR3 for alpha chain variable domain of TCR clone 348532 (TRAV12-2, TRAJ49)
CAVNTGNQFYF

SEQ ID NO: 697064 - protein, 13 aa, Homo sapiens
  CDR3 for beta chain variable domain of TCR clone 348532 (TRBV12-4, TRBJ1-5)
CASSPDRAQPQHF

SEQ ID NO: 697065 - protein, 14 aa, Homo sapiens
  CDR3 for alpha chain variable domain of TCR clone 348533 (TRAV8-4, TRAJ42)
CAVSEGGSQGNLIF

SEQ ID NO: 697066 - protein, 15 aa, Homo sapiens
  CDR3 for beta chain variable domain of TCR clone 348533 (TRBV20-1, TRBJ2-1)
CSAEGGLLAGDEQFF

SEQ ID NO: 697067 - protein, 15 aa, Homo sapiens
  CDR3 for alpha chain variable domain of TCR clone 348534 (TRAV16, TRAJ4)
CALEDPSGGYNKLIF

SEQ ID NO: 697068 - protein, 15 aa, Homo sapiens
  CDR3 for beta chain variable domain of TCR clone 348534 (TRBV11-2, TRBJ1-2)
CASSLEGVQRNGYTF

SEQ ID NO: 697069 - protein, 14 aa, Homo sapiens
  CDR3 for alpha chain variable domain of TCR clone 348535 (TRAV12-2, TRAJ5)
CAVNRSTGRRALTF

SEQ ID NO: 697070 - protein, 12 aa, Homo sapiens
  CDR3 for beta chain variable domain of TCR clone 348535 (TRBV19, TRBJ1-5)
CASSIAQQPQYF

SEQ ID NO: 697071 - protein, 14 aa, Homo sapiens
  CDR3 for alpha chain variable domain of TCR clone 348536 (TRAV12-2, TRAJ40)
CAVKIPSGTYKYIF

SEQ ID NO: 697072 - protein, 16 aa, Homo sapiens
  CDR3 for beta chain variable domain of TCR clone 348536 (TRBV4-3, TRBJ2-3)
CASSQGGLAGTDTQYF

SEQ ID NO: 697073 - protein, 12 aa, Homo sapiens
  CDR3 for alpha chain variable domain of TCR clone 348537 (TRAV12-3, TRAJ17)
CSMTLTGNKLTF

SEQ ID NO: 697074 - protein, 15 aa, Homo sapiens
  CDR3 for beta chain variable domain of TCR clone 348537 (TRBV20-1, TRBJ2-7)
CSARYRVSGMDEQYF

SEQ ID NO: 697075 - protein, 12 aa, Homo sapiens
  CDR3 for alpha chain variable domain of TCR clone 348538 (TRAV12-2, TRAJ4)
GWPEGGYNKLIF

SEQ ID NO: 697076 - protein, 16 aa, Homo sapiens
  CDR3 for beta chain variable domain of TCR clone 348538 (TRBV12-5, TRBJ2-5)
CASGPRTSGNQETQYF

SEQ ID NO: 697077 - protein, 15 aa, Homo sapiens
  CDR3 for alpha chain variable domain of TCR clone 348539 (TRAV27, TRAJ38)
CAARRNAGNNRKLIW

SEQ ID NO: 697078 - protein, 17 aa, Homo sapiens
  CDR3 for beta chain variable domain of TCR clone 348539 (TRBV20-1, TRBJ2-2)
CSVSGSGQGGLTGELFF

SEQ ID NO: 697079 - protein, 15 aa, Homo sapiens
  CDR3 for alpha chain variable domain of TCR clone 348540 (TRAV35, TRAJ23)
CAGPLGNNQGGKLIF

SEQ ID NO: 697080 - protein, 14 aa, Homo sapiens
  CDR3 for beta chain variable domain of TCR clone 348540 (TRBV7-9, TRBJ1-1)
CASTPLRSYSEAFF

SEQ ID NO: 697081 - protein, 17 aa, Homo sapiens
  CDR3 for alpha chain variable domain of TCR clone 348541 (TRAV8-6, TRAJ58)
CSVSSWVGETSGSRLTF

SEQ ID NO: 697082 - protein, 16 aa, Homo sapiens
  CDR3 for beta chain variable domain of TCR clone 348541 (TRBV12-4, TRBJ1-5)
CASSRPVGGSNQPQHF

SEQ ID NO: 697083 - protein, 14 aa, Homo sapiens
  CDR3 for alpha chain variable domain of TCR clone 348542 (TRAV13-1, TRAJ35)
CAAGKGGFGNVLHC

SEQ ID NO: 697084 - protein, 12 aa, Homo sapiens
  CDR3 for beta chain variable domain of TCR clone 348542 (TRBV12-4, TRBJ2-7)
CASSLGGYEQYF

SEQ ID NO: 697085 - protein, 13 aa, Homo sapiens
  CDR3 for alpha chain variable domain of TCR clone 348543 (TRAV13-2, TRAJ13)
CAERPGGYQKVTF

SEQ ID NO: 697086 - protein, 17 aa, Homo sapiens
  CDR3 for beta chain variable domain of TCR clone 348543 (TRBV4-1, TRBJ1-4)
CASSDTGELMKNCFLAV

SEQ ID NO: 697087 - protein, 14 aa, Homo sapiens
  CDR3 for alpha chain variable domain of TCR clone 348544 (TRAV6, TRAJ6)
CALPTSGGSYKPTF

SEQ ID NO: 697088 - protein, 17 aa, Homo sapiens
  CDR3 for beta chain variable domain of TCR clone 348544 (TRBV5-1, TRBJ2-5)
CASSPVALGQNQETQFF

SEQ ID NO: 697089 - protein, 15 aa, Homo sapiens
  CDR3 for alpha chain variable domain of TCR clone 348545 (TRAV10, TRAJ10)
CVVSADTGGGNKLTL

SEQ ID NO: 697090 - protein, 15 aa, Homo sapiens
  CDR3 for beta chain variable domain of TCR clone 348545 (TRBV11-3, TRBJ2-7)
CASSLLSGSSYEQYF

SEQ ID NO: 697091 - protein, 15 aa, Homo sapiens
  CDR3 for alpha chain variable domain of TCR clone 348546 (TRAV26-2, TRAJ50)
CILRDEETSYDKVIF

SEQ ID NO: 697092 - protein, 15 aa, Homo sapiens
  CDR3 for beta chain variable domain of TCR clone 348546 (TRBV23-1, TRBJ2-7)
TVSLRQQSDSYEQYF

SEQ ID NO: 697093 - protein, 14 aa, Homo sapiens
  CDR3 for alpha chain variable domain of TCR clone 348547 (TRAV1-2, TRAJ16)
CAVNRFSDGQKLLF

SEQ ID NO: 697094 - protein, 13 aa, Homo sapiens
  CDR3 for beta chain variable domain of TCR clone 348547 (TRBV19, TRBJ2-7)
CASSTRSSYEQYF

SEQ ID NO: 697095 - protein, 13 aa, Homo sapiens
  CDR3 for alpha chain variable domain of TCR clone 348548 (TRAV25, TRAJ30)
CAGRVDRDDKIIF

SEQ ID NO: 697096 - protein, 17 aa, Homo sapiens
  CDR3 for beta chain variable domain of TCR clone 348548 (TRBV7-9, TRBJ2-6)
CASSFGAGYSGSNVLSF

SEQ ID NO: 697097 - protein, 13 aa, Homo sapiens
  CDR3 for alpha chain variable domain of TCR clone 348549 (TRAV23/DV6, TRAJ3)
CAATYSSASNITF

SEQ ID NO: 697098 - protein, 15 aa, Homo sapiens
  CDR3 for beta chain variable domain of TCR clone 348549 (TRBV19, TRBJ1-1)
CASTSGQIQNTEAFF

SEQ ID NO: 697099 - protein, 14 aa, Homo sapiens
  CDR3 for alpha chain variable domain of TCR clone 348550 (TRAV10, TRAJ48)
CVGAFRFGNEKLTF

SEQ ID NO: 697100 - protein, 13 aa, Homo sapiens
  CDR3 for beta chain variable domain of TCR clone 348550 (TRBV4-1, TRBJ2-7)
CASSQGQAYEQYF

SEQ ID NO: 697101 - protein, 14 aa, Homo sapiens
  CDR3 for alpha chain variable domain of TCR clone 348551 (TRAV26-2, TRAJ27)
CILRYISDAGKSTF

SEQ ID NO: 697102 - protein, 15 aa, Homo sapiens
  CDR3 for beta chain variable domain of TCR clone 348551 (TRBV10-3, TRBJ2-7)
CATREQGLRSYEQYF

SEQ ID NO: 697103 - protein, 12 aa, Homo sapiens
  CDR3 for alpha chain variable domain of TCR clone 348552 (TRAV26-1, TRAJ13)
CIFSRGYQKVTF

SEQ ID NO: 697104 - protein, 14 aa, Homo sapiens
  CDR3 for beta chain variable domain of TCR clone 348552 (TRBV7-2, TRBJ2-7)
CASSPKTSFYEQYF

SEQ ID NO: 697105 - protein, 14 aa, Homo sapiens
  CDR3 for alpha chain variable domain of TCR clone 348553 (TRAV26-1, TRAJ15)
CIEAGNQAGTALIF

SEQ ID NO: 697106 - protein, 16 aa, Homo sapiens
  CDR3 for beta chain variable domain of TCR clone 348553 (TRBV27, TRBJ2-2)
CASSFRGLVRTGELFF

SEQ ID NO: 697107 - protein, 13 aa, Homo sapiens
  CDR3 for alpha chain variable domain of TCR clone 348554 (TRAV17, TRAJ5)
CALRGTGRRALTF

SEQ ID NO: 697108 - protein, 14 aa, Homo sapiens
  CDR3 for beta chain variable domain of TCR clone 348554 (TRBV12-5, TRBJ2-5)
CASGSRTLQETQYF

SEQ ID NO: 697109 - protein, 15 aa, Homo sapiens
  CDR3 for alpha chain variable domain of TCR clone 348555 (TRAV26-1, TRAJ48)
CIARWSWVGNEKLTF

SEQ ID NO: 697110 - protein, 12 aa, Homo sapiens
  CDR3 for beta chain variable domain of TCR clone 348555 (TRBV19, TRBJ2-5)
CASSISEETQHF

SEQ ID NO: 697111 - protein, 13 aa, Homo sapiens
  CDR3 for alpha chain variable domain of TCR clone 348556 (TRAV21, TRAJ10)
CAVLTGGGNKLTF

SEQ ID NO: 697112 - protein, 14 aa, Homo sapiens
  CDR3 for beta chain variable domain of TCR clone 348556 (TRBV7-8, TRBJ2-1)
CASSLGQGGYEQFF

SEQ ID NO: 697113 - protein, 15 aa, Homo sapiens
  CDR3 for alpha chain variable domain of TCR clone 348557 (TRAV12-1, TRAJ15)
CVVTRANQAGTALIF

SEQ ID NO: 697114 - protein, 14 aa, Homo sapiens
  CDR3 for beta chain variable domain of TCR clone 348557 (TRBV5-1, TRBJ1-1)
CASSLASINTEAFF

SEQ ID NO: 697115 - protein, 13 aa, Homo sapiens
  CDR3 for alpha chain variable domain of TCR clone 348558 (TRAV3, TRAJ15)
CAVRDQAGTALIF

SEQ ID NO: 697116 - protein, 15 aa, Homo sapiens
  CDR3 for beta chain variable domain of TCR clone 348558 (TRBV11-1, TRBJ2-7)
CARSLNYGAAYEQYF

SEQ ID NO: 697117 - protein, 18 aa, Homo sapiens
  CDR3 for alpha chain variable domain of TCR clone 348559 (TRAV35, TRAJ28)
CAGHNYPLSGAGTYQLTF

SEQ ID NO: 697118 - protein, 12 aa, Homo sapiens
  CDR3 for beta chain variable domain of TCR clone 348559 (TRBV7-9, TRBJ1-1)
CASSLEGTEAFF

SEQ ID NO: 697119 - protein, 15 aa, Homo sapiens
  CDR3 for alpha chain variable domain of TCR clone 348560 (TRAV3, TRAJ3)
CAVRDGHSSASKIIF

SEQ ID NO: 697120 - protein, 17 aa, Homo sapiens
  CDR3 for beta chain variable domain of TCR clone 348560 (TRBV25-1, TRBJ2-7)
GASSDARVVFSSYEQYF

SEQ ID NO: 697121 - protein, 13 aa, Homo sapiens
  CDR3 for alpha chain variable domain of TCR clone 348561 (TRAV24, TRAJ42)
CAFSTGSQGNLIF

SEQ ID NO: 697122 - protein, 15 aa, Homo sapiens
  CDR3 for beta chain variable domain of TCR clone 348561 (TRBV5-7, TRBJ1-5)
CASSYGKLWDQPQHF

SEQ ID NO: 697123 - protein, 13 aa, Homo sapiens
  CDR3 for alpha chain variable domain of TCR clone 348562 (TRAV12-2, TRAJ20)
CAVYPSNDYKLSF

SEQ ID NO: 697124 - protein, 15 aa, Homo sapiens
  CDR3 for beta chain variable domain of TCR clone 348562 (TRBV7-9, TRBJ1-4)
CASSRTGGFNEKLFF

SEQ ID NO: 697125 - protein, 18 aa, Homo sapiens
  CDR3 for alpha chain variable domain of TCR clone 348563 (TRAV12-3, TRAJ52)
CAMSRTNAGGTGYGKLTF

SEQ ID NO: 697126 - protein, 17 aa, Homo sapiens
  CDR3 for beta chain variable domain of TCR clone 348563 (TRBV7-3, TRBJ2-3)
CASSLMKWMRGADTQYF

SEQ ID NO: 697127 - protein, 14 aa, Homo sapiens
  CDR3 for alpha chain variable domain of TCR clone 348564 (TRAV12-3, TRAJ10)
SHLPLTGGGNKLTF

SEQ ID NO: 697128 - protein, 15 aa, Homo sapiens
  CDR3 for beta chain variable domain of TCR clone 348564 (TRBV7-9, TRBJ1-4)
CASSRTGGFNEKLFL

SEQ ID NO: 697129 - protein, 15 aa, Homo sapiens
  CDR3 for alpha chain variable domain of TCR clone 348565 (TRAV17, TRAJ13)
CATVPISGGYQKVTF

SEQ ID NO: 697130 - protein, 13 aa, Homo sapiens
  CDR3 for beta chain variable domain of TCR clone 348565 (TRBV3-1, TRBJ1-5)
CASSQAGGQPQHF

SEQ ID NO: 697131 - protein, 15 aa, Homo sapiens
  CDR3 for alpha chain variable domain of TCR clone 348566 (TRAV26-1, TRAJ56)
CIVRVATGANSKLTV

SEQ ID NO: 697132 - protein, 15 aa, Homo sapiens
  CDR3 for beta chain variable domain of TCR clone 348566 (TRBV27, TRBJ2-7)
CASSPQREGQREQYF

SEQ ID NO: 697133 - protein, 16 aa, Homo sapiens
  CDR3 for alpha chain variable domain of TCR clone 348567 (TRAV4, TRAJ5)
CLVGPDHGHGQESTYF

SEQ ID NO: 697134 - protein, 15 aa, Homo sapiens
  CDR3 for beta chain variable domain of TCR clone 348567 (TRBV9, TRBJ2-1)
CASSLAGSSYNEQFF

SEQ ID NO: 697135 - protein, 13 aa, Homo sapiens
  CDR3 for alpha chain variable domain of TCR clone 348568 (TRAV30, TRAJ24)
CGTVTDNWGKLQF

SEQ ID NO: 697136 - protein, 14 aa, Homo sapiens
  CDR3 for beta chain variable domain of TCR clone 348568 (TRBV6-3, TRBJ2-2)
CASTYTPDTGELFF

SEQ ID NO: 697137 - protein, 14 aa, Homo sapiens
  CDR3 for alpha chain variable domain of TCR clone 348569 (TRAV25, TRAJ22)
CAVRSSGSARQLTF

SEQ ID NO: 697138 - protein, 16 aa, Homo sapiens
  CDR3 for beta chain variable domain of TCR clone 348569 (TRBV4-2, TRBJ1-1)
CASSPSSGRAAPEAFF

SEQ ID NO: 697139 - protein, 15 aa, Homo sapiens
  CDR3 for alpha chain variable domain of TCR clone 348570 (TRAV26-1, TRAJ21)
CIVRVPNYNFNKFYF

SEQ ID NO: 697140 - protein, 15 aa, Homo sapiens
  CDR3 for beta chain variable domain of TCR clone 348570 (TRBV28, TRBJ2-7)
CASSPGGRGFYEQYF

SEQ ID NO: 697141 - protein, 13 aa, Homo sapiens
  CDR3 for alpha chain variable domain of TCR clone 348571 (TRAV23/DV6, TRAJ22)
CACGAGSARQLTF

SEQ ID NO: 697142 - protein, 15 aa, Homo sapiens
  CDR3 for beta chain variable domain of TCR clone 348571 (TRBV11-3, TRBJ1-1)
CASSLGGPGGTEAFF

SEQ ID NO: 697143 - protein, 16 aa, Homo sapiens
  CDR3 for alpha chain variable domain of TCR clone 348572 (TRAV30, TRAJ32)
CGTESSYGGATNKLIF

SEQ ID NO: 697144 - protein, 15 aa, Homo sapiens
  CDR3 for beta chain variable domain of TCR clone 348572 (TRBV11-3, TRBJ2-3)
CASLKDGREGDTQYF

SEQ ID NO: 697145 - protein, 15 aa, Homo sapiens
  CDR3 for alpha chain variable domain of TCR clone 348573 (TRAV8-4, TRAJ37)
CAVTYRSSNTGKLIF

SEQ ID NO: 697146 - protein, 13 aa, Homo sapiens
  CDR3 for beta chain variable domain of TCR clone 348573 (TRBV12-4, TRBJ2-5)
CASSLGGSRTQYF

SEQ ID NO: 697147 - protein, 14 aa, Homo sapiens
  CDR3 for alpha chain variable domain of TCR clone 348574 (TRAV12-1, TRAJ30)
CVVNIGGRDDKIIF

SEQ ID NO: 697148 - protein, 12 aa, Homo sapiens
  CDR3 for beta chain variable domain of TCR clone 348574 (TRBV14, TRBJ2-7)
CASSLYKDEQYF

SEQ ID NO: 697149 - protein, 14 aa, Homo sapiens
  CDR3 for alpha chain variable domain of TCR clone 348575 (TRAV12-2, TRAJ13)
CAVRKTGGYQKVTF

SEQ ID NO: 697150 - protein, 16 aa, Homo sapiens
  CDR3 for beta chain variable domain of TCR clone 348575 (TRBV2, TRBJ2-1)
CASRRPAGGKYNEQFF

SEQ ID NO: 697151 - protein, 14 aa, Homo sapiens
  CDR3 for alpha chain variable domain of TCR clone 348576 (TRAV12-2, TRAJ9)
CAVNLNTGGFKTIF

SEQ ID NO: 697152 - protein, 17 aa, Homo sapiens
  CDR3 for beta chain variable domain of TCR clone 348576 (TRBV20-1, TRBJ2-2)
CSASRQVRQGYTGELFF

SEQ ID NO: 697153 - protein, 13 aa, Homo sapiens
  CDR3 for alpha chain variable domain of TCR clone 348577 (TRAV8-3, TRAJ36)
CAVGATGANNLFF

SEQ ID NO: 697154 - protein, 13 aa, Homo sapiens
  CDR3 for beta chain variable domain of TCR clone 348577 (TRBV11-2, TRBJ2-5)
CASSFSSQETQYF

SEQ ID NO: 697155 - protein, 16 aa, Homo sapiens
  CDR3 for alpha chain variable domain of TCR clone 348578 (TRAV30, TRAJ24)
CGTEIVDADSWGKFQF

SEQ ID NO: 697156 - protein, 11 aa, Homo sapiens
  CDR3 for beta chain variable domain of TCR clone 348578 (TRBV29-1, TRBJ2-5)
CSEDRTWTQYF

SEQ ID NO: 697157 - protein, 12 aa, Homo sapiens
  CDR3 for alpha chain variable domain of TCR clone 348579 (TRAV26-1, TRAJ36)
CIVRVRADNRFF

SEQ ID NO: 697158 - protein, 14 aa, Homo sapiens
  CDR3 for beta chain variable domain of TCR clone 348579 (TRBV14, TRBJ2-3)
CASSRKLAADTQYF

SEQ ID NO: 697159 - protein, 14 aa, Homo sapiens
  CDR3 for alpha chain variable domain of TCR clone 348580 (TRAV17, TRAJ34)
CATDSLEGTDKLIF

SEQ ID NO: 697160 - protein, 13 aa, Homo sapiens
  CDR3 for beta chain variable domain of TCR clone 348580 (TRBV10-3, TRBJ2-7)
CASKLAVNYEQYF

SEQ ID NO: 697161 - protein, 16 aa, Homo sapiens
  CDR3 for alpha chain variable domain of TCR clone 348581 (TRAV2, TRAJ10)
CCGGSTVTGGGNKLTF

SEQ ID NO: 697162 - protein, 16 aa, Homo sapiens
  CDR3 for beta chain variable domain of TCR clone 348581 (TRBV18, TRBJ1-5)
CASSPSTGNSNQPQHY

SEQ ID NO: 697163 - protein, 14 aa, Homo sapiens
  CDR3 for alpha chain variable domain of TCR clone 348582 (TRAV1-2, TRAJ16)
CAVNRFSDGQKLLF

SEQ ID NO: 697164 - protein, 15 aa, Homo sapiens
  CDR3 for beta chain variable domain of TCR clone 348582 (TRBV15, TRBJ2-7)
CATSRGVTPTYEQYF

SEQ ID NO: 697165 - protein, 14 aa, Homo sapiens
  CDR3 for alpha chain variable domain of TCR clone 348583 (TRAV12-3, TRAJ12)
CAMSRMDSSYKLIF

SEQ ID NO: 697166 - protein, 14 aa, Homo sapiens
  CDR3 for beta chain variable domain of TCR clone 348583 (TRBV20-1, TRBJ1-4)
CSARSGQSNETLFF

SEQ ID NO: 697167 - protein, 16 aa, Homo sapiens
  CDR3 for alpha chain variable domain of TCR clone 348584 (TRAV3, TRAJ37)
CAVRVRGSGNTGKLIF

SEQ ID NO: 697168 - protein, 15 aa, Homo sapiens
  CDR3 for beta chain variable domain of TCR clone 348584 (TRBV7-9, TRBJ2-5)
CASSFKAGREETQYF

SEQ ID NO: 697169 - protein, 16 aa, Homo sapiens
  CDR3 for alpha chain variable domain of TCR clone 348585 (TRAV12-3, TRAJ53)
CAMSPGRGGNNYKLTF

SEQ ID NO: 697170 - protein, 15 aa, Homo sapiens
  CDR3 for beta chain variable domain of TCR clone 348585 (TRBV25-1, TRBJ1-4)
CASSKRIATNEKLFF

SEQ ID NO: 697171 - protein, 15 aa, Homo sapiens
  CDR3 for alpha chain variable domain of TCR clone 348586 (TRAV27, TRAJ38)
CAARRNACNNRKLLW

SEQ ID NO: 697172 - protein, 13 aa, Homo sapiens
  CDR3 for beta chain variable domain of TCR clone 348586 (TRBV12-5, TRBJ2-3)
CASGDRQSDTQYF

SEQ ID NO: 697173 - protein, 14 aa, Homo sapiens
  CDR3 for alpha chain variable domain of TCR clone 348587 (TRAV1-1, TRAJ30)
CAVRSLNRDDKIIF

SEQ ID NO: 697174 - protein, 17 aa, Homo sapiens
  CDR3 for beta chain variable domain of TCR clone 348587 (TRBV20-1, TRBJ1-5)
CSARVGGERQGNQPQHF

SEQ ID NO: 697175 - protein, 15 aa, Homo sapiens
  CDR3 for alpha chain variable domain of TCR clone 348588 (TRAV14/DV4, TRAJ46)
CAMREKKSSGDKLTF

SEQ ID NO: 697176 - protein, 15 aa, Homo sapiens
  CDR3 for beta chain variable domain of TCR clone 348588 (TRBV20-1, TRBJ2-1)
CSASSAGSSYNEQFF

SEQ ID NO: 697177 - protein, 11 aa, Homo sapiens
  CDR3 for alpha chain variable domain of TCR clone 348589 (TRAV35, TRAJ30)
CAGPGDDKIIF

SEQ ID NO: 697178 - protein, 15 aa, Homo sapiens
  CDR3 for beta chain variable domain of TCR clone 348589 (TRBV2, TRBJ2-3)
CASSERSGHTDTQYF

SEQ ID NO: 697179 - protein, 13 aa, Homo sapiens
  CDR3 for alpha chain variable domain of TCR clone 348590 (TRAV24, TRAJ42)
CAFSTGSQGNLIF

SEQ ID NO: 697180 - protein, 13 aa, Homo sapiens
  CDR3 for beta chain variable domain of TCR clone 348590 (TRBV9, TRBJ2-1)
CASSPSGGSEQFF

SEQ ID NO: 697181 - protein, 14 aa, Homo sapiens
  CDR3 for alpha chain variable domain of TCR clone 348591 (TRAV1-2, TRAJ8)
CAVREDTGFQKLVF

SEQ ID NO: 697182 - protein, 15 aa, Homo sapiens
  CDR3 for beta chain variable domain of TCR clone 348591 (TRBV4-1, TRBJ2-7)
CASSQNTGRLYEHYF

SEQ ID NO: 697183 - protein, 13 aa, Homo sapiens
  CDR3 for alpha chain variable domain of TCR clone 348592 (TRAV3, TRAJ21)
CAVREPDFNNFYF

SEQ ID NO: 697184 - protein, 19 aa, Homo sapiens
  CDR3 for beta chain variable domain of TCR clone 348592 (TRBV5-1, TRBJ2-4)
FAPAASRLSGEWTKNIQYF

SEQ ID NO: 697185 - protein, 15 aa, Homo sapiens
  CDR3 for alpha chain variable domain of TCR clone 348593 (TRAV21, TRAJ24)
CAARSSTDSWGKLQF

SEQ ID NO: 697186 - protein, 15 aa, Homo sapiens
  CDR3 for beta chain variable domain of TCR clone 348593 (TRBV7-9, TRBJ1-5)
CASSQGHQPNQPQHF

SEQ ID NO: 697187 - protein, 13 aa, Homo sapiens
  CDR3 for alpha chain variable domain of TCR clone 348594 (TRAV21, TRAJ27)
CAARPGNAGNSTF

SEQ ID NO: 697188 - protein, 15 aa, Homo sapiens
  CDR3 for beta chain variable domain of TCR clone 348594 (TRBV28, TRBJ2-7)
CASSLISGGSYEQYF

SEQ ID NO: 697189 - protein, 19 aa, Homo sapiens
  CDR3 for alpha chain variable domain of TCR clone 348595 (TRAV38-1, TRAJ53)
CAFMKHGLESGGSNYKLTF

SEQ ID NO: 697190 - protein, 15 aa, Homo sapiens
  CDR3 for beta chain variable domain of TCR clone 348595 (TRBV7-8, TRBJ2-1)
CASSLAGGLYNEQFF

SEQ ID NO: 697191 - protein, 13 aa, Homo sapiens
  CDR3 for alpha chain variable domain of TCR clone 348596 (TRAV9-2, TRAJ52)
CALSRHNAGGTSY

SEQ ID NO: 697192 - protein, 16 aa, Homo sapiens
  CDR3 for beta chain variable domain of TCR clone 348596 (TRBV19, TRBJ2-1)
CASSKAGPSSYNEQFF

SEQ ID NO: 697193 - protein, 12 aa, Homo sapiens
  CDR3 for alpha chain variable domain of TCR clone 348597 (TRAV2, TRAJ5)
CALDTGRRALTF

SEQ ID NO: 697194 - protein, 15 aa, Homo sapiens
  CDR3 for beta chain variable domain of TCR clone 348597 (TRBV5-1, TRBJ2-1)
CASSPPRAPYNEQFF

SEQ ID NO: 697195 - protein, 14 aa, Homo sapiens
  CDR3 for alpha chain variable domain of TCR clone 348598 (TRAV12-2, TRAJ36)
CAVNPPTGANNLFF

SEQ ID NO: 697196 - protein, 13 aa, Homo sapiens
  CDR3 for beta chain variable domain of TCR clone 348598 (TRBV20-1, TRBJ1-6)
FSAPTGLGSPLYF

SEQ ID NO: 697197 - protein, 13 aa, Homo sapiens
  CDR3 for alpha chain variable domain of TCR clone 348599 (TRAV13-2, TRAJ13)
CADRPGGYQKVTF

SEQ ID NO: 697198 - protein, 15 aa, Homo sapiens
  CDR3 for beta chain variable domain of TCR clone 348599 (TRBV4-1, TRBJ1-4)
CASSDTGGTNEKLFF

SEQ ID NO: 697199 - protein, 15 aa, Homo sapiens
  CDR3 for alpha chain variable domain of TCR clone 348600 (TRAV2, TRAJ24)
CTVEVLTDSWGKFQF

SEQ ID NO: 697200 - protein, 14 aa, Homo sapiens
  CDR3 for beta chain variable domain of TCR clone 348600 (TRBV19, TRBJ2-1)
CASSMGSGRRSSSS

SEQ ID NO: 697201 - protein, 12 aa, Homo sapiens
  CDR3 for alpha chain variable domain of TCR clone 348601 (TRAV12-3, TRAJ17)
CAMTLTGNKLTF

SEQ ID NO: 697202 - protein, 14 aa, Homo sapiens
  CDR3 for beta chain variable domain of TCR clone 348601 (TRBV7-3, TRBJ2-1)
CASSLAGGTNEQCF

SEQ ID NO: 697203 - protein, 13 aa, Homo sapiens
  CDR3 for alpha chain variable domain of TCR clone 348602 (TRAV17, TRAJ40)
CAGALGGAYKYIF

SEQ ID NO: 697204 - protein, 16 aa, Homo sapiens
  CDR3 for beta chain variable domain of TCR clone 348602 (TRBV7-2, TRBJ1-4)
CASSLAPGRRDEKLFF

SEQ ID NO: 697205 - protein, 14 aa, Homo sapiens
  CDR3 for alpha chain variable domain of TCR clone 348603 (TRAV1-2, TRAJ16)
CAVNRFPDGQKLLF

SEQ ID NO: 697206 - protein, 14 aa, Homo sapiens
  CDR3 for beta chain variable domain of TCR clone 348603 (TRBV7-2, TRBJ1-2)
CASSQTGSTYGYTF

SEQ ID NO: 697207 - protein, 16 aa, Homo sapiens
  CDR3 for alpha chain variable domain of TCR clone 348604 (TRAV3, TRAJ34)
CAVRARGTPTSSSLGL

SEQ ID NO: 697208 - protein, 16 aa, Homo sapiens
  CDR3 for beta chain variable domain of TCR clone 348604 (TRBV18, TRBJ1-1)
CASSPGVGGRGGEAFF

SEQ ID NO: 697209 - protein, 11 aa, Homo sapiens
  CDR3 for alpha chain variable domain of TCR clone 348605 (TRAV13-1, TRAJ20)
CSAKRRLQAQL

SEQ ID NO: 697210 - protein, 13 aa, Homo sapiens
  CDR3 for beta chain variable domain of TCR clone 348605 (TRBV12-4, TRBJ1-1)
CASSLIGDTEAFF

SEQ ID NO: 697211 - protein, 23 aa, Homo sapiens
  CDR3 for alpha chain variable domain of TCR clone 348606 (TRAV26-1, TRAJ38)
CIADNAGNNHIQNPDPAVYQLRD

SEQ ID NO: 697212 - protein, 12 aa, Homo sapiens
  CDR3 for beta chain variable domain of TCR clone 348606 (TRBV11-2, TRBJ2-2)
CASSLGGGELCF

SEQ ID NO: 697213 - protein, 11 aa, Homo sapiens
  CDR3 for alpha chain variable domain of TCR clone 348607 (TRAV21, TRAJ34)
CAVTNTDKLIF

SEQ ID NO: 697214 - protein, 14 aa, Homo sapiens
  CDR3 for beta chain variable domain of TCR clone 348607 (TRBV27, TRBJ2-7)
CASSFRDGPYEQYF

SEQ ID NO: 697215 - protein, 16 aa, Homo sapiens
  CDR3 for alpha chain variable domain of TCR clone 348608 (TRAV8-3, TRAJ4)
CAVGAAGGYNKLILEK

SEQ ID NO: 697216 - protein, 15 aa, Homo sapiens
  CDR3 for beta chain variable domain of TCR clone 348608 (TRBV6-5, TRBJ2-1)
CASSYDAGAGNEQFF

SEQ ID NO: 697217 - protein, 11 aa, Homo sapiens
  CDR3 for alpha chain variable domain of TCR clone 348609 (TRAV3, TRAJ21)
CAVGNFNTFYF

SEQ ID NO: 697218 - protein, 14 aa, Homo sapiens
  CDR3 for beta chain variable domain of TCR clone 348609 (TRBV29-1, TRBJ2-2)
CSGRGSGNTGELFF

SEQ ID NO: 697219 - protein, 15 aa, Homo sapiens
  CDR3 for alpha chain variable domain of TCR clone 348610 (TRAV26-1, TRAJ29)
CIVIVEGSGKTPLVF

SEQ ID NO: 697220 - protein, 14 aa, Homo sapiens
  CDR3 for beta chain variable domain of TCR clone 348610 (TRBV18, TRBJ2-5)
CASSPGVSQETQYF

SEQ ID NO: 697221 - protein, 16 aa, Homo sapiens
  CDR3 for alpha chain variable domain of TCR clone 348611 (TRAV30, TRAJ24)
CGTEIVDAYSWGKFQF

SEQ ID NO: 697222 - protein, 14 aa, Homo sapiens
  CDR3 for beta chain variable domain of TCR clone 348611 (TRBV12-5, TRBJ2-5)
CASGSRTHQETQYF

SEQ ID NO: 697223 - protein, 16 aa, Homo sapiens
  CDR3 for alpha chain variable domain of TCR clone 348612 (TRAV3, TRAJ10)
CAVRDMRAGGGNKLTF

SEQ ID NO: 697224 - protein, 15 aa, Homo sapiens
  CDR3 for beta chain variable domain of TCR clone 348612 (TRBV7-3, TRBJ2-2)
ELSLKRGTLSGELFF

SEQ ID NO: 697225 - protein, 12 aa, Homo sapiens
  CDR3 for alpha chain variable domain of TCR clone 348613 (TRAV12-3, TRAJ17)
CAMTLTGNKLTF

SEQ ID NO: 697226 - protein, 15 aa, Homo sapiens
  CDR3 for beta chain variable domain of TCR clone 348613 (TRBV29-1, TRBJ2-6)
CSFTGGRSGVNDLTF

SEQ ID NO: 697227 - protein, 15 aa, Homo sapiens
  CDR3 for alpha chain variable domain of TCR clone 348614 (TRAV35, TRAJ50)
CAGQLRKTSYDKVIF

SEQ ID NO: 697228 - protein, 15 aa, Homo sapiens
  CDR3 for beta chain variable domain of TCR clone 348614 (TRBV5-4, TRBJ1-3)
CASSLDMPPGNTIYF

SEQ ID NO: 697229 - protein, 15 aa, Homo sapiens
  CDR3 for alpha chain variable domain of TCR clone 348615 (TRAV19, TRAJ54)
CALSEAFQGAQKLVF

SEQ ID NO: 697230 - protein, 13 aa, Homo sapiens
  CDR3 for beta chain variable domain of TCR clone 348615 (TRBV10-3, TRBJ1-2)
CATNADLNYGYTF

SEQ ID NO: 697231 - protein, 15 aa, Homo sapiens
  CDR3 for alpha chain variable domain of TCR clone 348616 (TRAV8-3, TRAJ45)
CASPYSGGGADGLTF

SEQ ID NO: 697232 - protein, 13 aa, Homo sapiens
  CDR3 for beta chain variable domain of TCR clone 348616 (TRBV10-3, TRBJ2-7)
CVSKLAVNYEQYF

SEQ ID NO: 697233 - protein, 23 aa, Homo sapiens
  CDR3 for alpha chain variable domain of TCR clone 348617 (TRAV8-4, TRAJ38)
CARLNAGNNHIQNPDPAVYELRD

SEQ ID NO: 697234 - protein, 14 aa, Homo sapiens
  CDR3 for beta chain variable domain of TCR clone 348617 (TRBV7-8, TRBJ2-3)
CASSLEAGTDTQYF

SEQ ID NO: 697235 - protein, 11 aa, Homo sapiens
  CDR3 for alpha chain variable domain of TCR clone 348618 (TRAV21, TRAJ34)
CAHYNTDKLIF

SEQ ID NO: 697236 - protein, 19 aa, Homo sapiens
  CDR3 for beta chain variable domain of TCR clone 348618 (TRBV11-3, TRBJ2-2)
CASSTRPGAKTTNTGELFF

SEQ ID NO: 697237 - protein, 11 aa, Homo sapiens
  CDR3 for alpha chain variable domain of TCR clone 348619 (TRAV2, TRAJ13)
CASGGYQKVTF

SEQ ID NO: 697238 - protein, 13 aa, Homo sapiens
  CDR3 for beta chain variable domain of TCR clone 348619 (TRBV28, TRBJ2-7)
CAGAQQGLDEQYF

SEQ ID NO: 697239 - protein, 12 aa, Homo sapiens
  CDR3 for alpha chain variable domain of TCR clone 348620 (TRAV38-2/DV8, TRAJ40)
CAHTSGTYKYIF

SEQ ID NO: 697240 - protein, 11 aa, Homo sapiens
  CDR3 for beta chain variable domain of TCR clone 348620 (TRBV29-1, TRBJ2-5)
CSEDRTGTQYF

SEQ ID NO: 697241 - protein, 15 aa, Homo sapiens
  CDR3 for alpha chain variable domain of TCR clone 348621 (TRAV12-3, TRAJ11)
CAMIEENSGYSTLTF

SEQ ID NO: 697242 - protein, 14 aa, Homo sapiens
  CDR3 for beta chain variable domain of TCR clone 348621 (TRBV18, TRBJ2-5)
CVSSPGVSQETQYF

SEQ ID NO: 697243 - protein, 14 aa, Homo sapiens
  CDR3 for alpha chain variable domain of TCR clone 348622 (TRAV38-1, TRAJ40)
CALRPTSGTYKYIF

SEQ ID NO: 697244 - protein, 12 aa, Homo sapiens
  CDR3 for beta chain variable domain of TCR clone 348622 (TRBV12-5, TRBJ2-5)
CASGQGVETQYF

SEQ ID NO: 697245 - protein, 14 aa, Homo sapiens
  CDR3 for alpha chain variable domain of TCR clone 348623 (TRAV2, TRAJ37)
CSVDFTSNTGKLIF

SEQ ID NO: 697246 - protein, 15 aa, Homo sapiens
  CDR3 for beta chain variable domain of TCR clone 348623 (TRBV20-1, TRBJ1-1)
CSASRGVAGNTEAFF

SEQ ID NO: 697247 - protein, 13 aa, Homo sapiens
  CDR3 for alpha chain variable domain of TCR clone 348624 (TRAV21, TRAJ57)
CAVTQGGSEKLAF

SEQ ID NO: 697248 - protein, 16 aa, Homo sapiens
  CDR3 for beta chain variable domain of TCR clone 348624 (TRBV29-1, TRBJ2-7)
CSVEDAEDGTAHEQYF

SEQ ID NO: 697249 - protein, 13 aa, Homo sapiens
  CDR3 for alpha chain variable domain of TCR clone 348625 (TRAV27, TRAJ41)
CAGEGNSGYALNF

SEQ ID NO: 697250 - protein, 14 aa, Homo sapiens
  CDR3 for beta chain variable domain of TCR clone 348625 (TRBV7-2, TRBJ1-1)
CASSFWTGTTEAFF

SEQ ID NO: 697251 - protein, 17 aa, Homo sapiens
  CDR3 for alpha chain variable domain of TCR clone 348626 (TRAV13-1, TRAJ52)
CAASSGAGGTSYGKLTF

SEQ ID NO: 697252 - protein, 16 aa, Homo sapiens
  CDR3 for beta chain variable domain of TCR clone 348626 (TRBV6-1, TRBJ2-5)
CASSETLDRGAETQYF

SEQ ID NO: 697253 - protein, 17 aa, Homo sapiens
  CDR3 for alpha chain variable domain of TCR clone 348627 (TRAV3, TRAJ42)
CAVRDRDYGGSQGNLIF

SEQ ID NO: 697254 - protein, 14 aa, Homo sapiens
  CDR3 for beta chain variable domain of TCR clone 348627 (TRBV10-3, TRBJ2-1)
CAISSDLAYNEQFF

SEQ ID NO: 697255 - protein, 13 aa, Homo sapiens
  CDR3 for alpha chain variable domain of TCR clone 348628 (TRAV2, TRAJ15)
CAVASQAGTALIF

SEQ ID NO: 697256 - protein, 18 aa, Homo sapiens
  CDR3 for beta chain variable domain of TCR clone 348628 (TRBV5-1, TRBJ1-1)
CASSSGGNSLNTELSLDK

SEQ ID NO: 697257 - protein, 14 aa, Homo sapiens
  CDR3 for alpha chain variable domain of TCR clone 348629 (TRAV17, TRAJ12)
CATDGVDSSYKLIF

SEQ ID NO: 697258 - protein, 14 aa, Homo sapiens
  CDR3 for beta chain variable domain of TCR clone 348629 (TRBV5-1, TRBJ1-1)
CASSLTRRSTEAFF

SEQ ID NO: 697259 - protein, 16 aa, Homo sapiens
  CDR3 for alpha chain variable domain of TCR clone 348630 (TRAV3, TRAJ40)
CAVRDRIASGTYKYIF

SEQ ID NO: 697260 - protein, 16 aa, Homo sapiens
  CDR3 for beta chain variable domain of TCR clone 348630 (TRBV2, TRBJ2-1)
CASRSPAGGMYNEQFF

SEQ ID NO: 697261 - protein, 15 aa, Homo sapiens
  CDR3 for alpha chain variable domain of TCR clone 348631 (TRAV21, TRAJ24)
CAARSSTDSRGKWQF

SEQ ID NO: 697262 - protein, 11 aa, Homo sapiens
  CDR3 for beta chain variable domain of TCR clone 348631 (TRBV11-2, TRBJ2-2)
CASSLPGELFF

SEQ ID NO: 697263 - protein, 14 aa, Homo sapiens
  CDR3 for alpha chain variable domain of TCR clone 348632 (TRAV1-2, TRAJ16)
CAVNRFSDGQKLLF

SEQ ID NO: 697264 - protein, 16 aa, Homo sapiens
  CDR3 for beta chain variable domain of TCR clone 348632 (TRBV12-4, TRBJ2-5)
CASSFFVRGRKETQYF

SEQ ID NO: 697265 - protein, 13 aa, Homo sapiens
  CDR3 for alpha chain variable domain of TCR clone 348633 (TRAV8-3, TRAJ28)
CAEGAVGSYQLTF

SEQ ID NO: 697266 - protein, 15 aa, Homo sapiens
  CDR3 for beta chain variable domain of TCR clone 348633 (TRBV7-9, TRBJ1-5)
CASSQGHQPNQPQHF

SEQ ID NO: 697267 - protein, 13 aa, Homo sapiens
  CDR3 for alpha chain variable domain of TCR clone 348634 (TRAV8-3, TRAJ12)
WVLRMDSSYKLIF

SEQ ID NO: 697268 - protein, 17 aa, Homo sapiens
  CDR3 for beta chain variable domain of TCR clone 348634 (TRBV11-2, TRBJ2-1)
CASSLYPPGVEYNEQFF

SEQ ID NO: 697269 - protein, 14 aa, Homo sapiens
  CDR3 for alpha chain variable domain of TCR clone 348635 (TRAV12-3, TRAJ10)
SHLPLTGGGNKLTF

SEQ ID NO: 697270 - protein, 14 aa, Homo sapiens
  CDR3 for beta chain variable domain of TCR clone 348635 (TRBV4-2, TRBJ1-4)
CASSQGATNEKLFF

SEQ ID NO: 697271 - protein, 14 aa, Homo sapiens
  CDR3 for alpha chain variable domain of TCR clone 348636 (TRAV17, TRAJ16)
CATADFSDGPKLLF

SEQ ID NO: 697272 - protein, 14 aa, Homo sapiens
  CDR3 for beta chain variable domain of TCR clone 348636 (TRBV25-1, TRBJ1-1)
CASTHLGGNTEAFF

SEQ ID NO: 697273 - protein, 14 aa, Homo sapiens
  CDR3 for alpha chain variable domain of TCR clone 348637 (TRAV13-1, TRAJ35)
CAASKGGFGNVLHC

SEQ ID NO: 697274 - protein, 15 aa, Homo sapiens
  CDR3 for beta chain variable domain of TCR clone 348637 (TRBV10-3, TRBJ2-3)
CAISLTSGGTDTQYF

SEQ ID NO: 697275 - protein, 13 aa, Homo sapiens
  CDR3 for alpha chain variable domain of TCR clone 348638 (TRAV2, TRAJ24)
CAVTTDSWGKLQF

SEQ ID NO: 697276 - protein, 14 aa, Homo sapiens
  CDR3 for beta chain variable domain of TCR clone 348638 (TRBV13, TRBJ2-5)
RASSLGRGQETQYS

SEQ ID NO: 697277 - protein, 17 aa, Homo sapiens
  CDR3 for alpha chain variable domain of TCR clone 348639 (TRAV26-1, TRAJ37)
CIVRVITVSSNTGKLIF

SEQ ID NO: 697278 - protein, 12 aa, Homo sapiens
  CDR3 for beta chain variable domain of TCR clone 348639 (TRBV28, TRBJ2-6)
CAIQAGANVLTF

SEQ ID NO: 697279 - protein, 15 aa, Homo sapiens
  CDR3 for alpha chain variable domain of TCR clone 348640 (TRAV12-3, TRAJ5)
CAMSGLGTGRKALTF

SEQ ID NO: 697280 - protein, 16 aa, Homo sapiens
  CDR3 for beta chain variable domain of TCR clone 348640 (TRBV20-1, TRBJ2-3)
CSARLHSAGAIDTQYF

SEQ ID NO: 697281 - protein, 14 aa, Homo sapiens
  CDR3 for alpha chain variable domain of TCR clone 348641 (TRAV8-2, TRAJ4)
CVVSPSGGNNKLIF

SEQ ID NO: 697282 - protein, 15 aa, Homo sapiens
  CDR3 for beta chain variable domain of TCR clone 348641 (TRBV4-1, TRBJ1-4)
CASSDTRGTNEKLFF

SEQ ID NO: 697283 - protein, 13 aa, Homo sapiens
  CDR3 for alpha chain variable domain of TCR clone 348642 (TRAV8-4, TRAJ9)
CAVSGAGGFKTIF

SEQ ID NO: 697284 - protein, 15 aa, Homo sapiens
  CDR3 for beta chain variable domain of TCR clone 348642 (TRBV20-1, TRBJ1-1)
CSASRGVTGNTEAFF

SEQ ID NO: 697285 - protein, 14 aa, Homo sapiens
  CDR3 for alpha chain variable domain of TCR clone 348643 (TRAV8-4, TRAJ9)
CAVRINTGGFKTIF

SEQ ID NO: 697286 - protein, 14 aa, Homo sapiens
  CDR3 for beta chain variable domain of TCR clone 348643 (TRBV4-2, TRBJ1-2)
CASSPGGSNYGYTF

SEQ ID NO: 697287 - protein, 14 aa, Homo sapiens
  CDR3 for alpha chain variable domain of TCR clone 348644 (TRAV12-2, TRAJ13)
CAVKKAGGYQKVTF

SEQ ID NO: 697288 - protein, 16 aa, Homo sapiens
  CDR3 for beta chain variable domain of TCR clone 348644 (TRBV4-1, TRBJ2-3)
CASSQSTSGAEDTQYF

SEQ ID NO: 697289 - protein, 20 aa, Homo sapiens
  CDR3 for alpha chain variable domain of TCR clone 348645 (TRAV1-1, TRAJ39)
CLLLLRCESSAYTAGNMLTF

SEQ ID NO: 697290 - protein, 13 aa, Homo sapiens
  CDR3 for beta chain variable domain of TCR clone 348645 (TRBV12-4, TRBJ1-5)
CASSPDRAQPQHF

SEQ ID NO: 697291 - protein, 16 aa, Homo sapiens
  CDR3 for alpha chain variable domain of TCR clone 348646 (TRAV3, TRAJ37)
CAVRPHGSGNTGKLIF

SEQ ID NO: 697292 - protein, 14 aa, Homo sapiens
  CDR3 for beta chain variable domain of TCR clone 348646 (TRBV2, TRBJ2-1)
CASSYRAYYKEQFF

SEQ ID NO: 697293 - protein, 16 aa, Homo sapiens
  CDR3 for alpha chain variable domain of TCR clone 348647 (TRAV22, TRAJ45)
CAVERGKRGGAHGLTF

SEQ ID NO: 697294 - protein, 16 aa, Homo sapiens
  CDR3 for beta chain variable domain of TCR clone 348647 (TRBV5-1, TRBJ2-5)
CASSLRRTSGQETQYF

SEQ ID NO: 697295 - protein, 14 aa, Homo sapiens
  CDR3 for alpha chain variable domain of TCR clone 348648 (TRAV12-2, TRAJ17)
CAVLFKPAGNKLTF

SEQ ID NO: 697296 - protein, 11 aa, Homo sapiens
  CDR3 for beta chain variable domain of TCR clone 348648 (TRBV29-1, TRBJ2-5)
CSEDRTGTQYF

SEQ ID NO: 697297 - protein, 16 aa, Homo sapiens
  CDR3 for alpha chain variable domain of TCR clone 348649 (TRAV6, TRAJ37)
CSLALHGSGNTGKLIF

SEQ ID NO: 697298 - protein, 18 aa, Homo sapiens
  CDR3 for beta chain variable domain of TCR clone 348649 (TRBV4-3, TRBJ1-2)
CASSQDGQSAPSDYGYTF

SEQ ID NO: 697299 - protein, 16 aa, Homo sapiens
  CDR3 for alpha chain variable domain of TCR clone 348650 (TRAV4, TRAJ22)
CLVGALSSGSARQLTF

SEQ ID NO: 697300 - protein, 16 aa, Homo sapiens
  CDR3 for beta chain variable domain of TCR clone 348650 (TRBV7-9, TRBJ2-3)
CASSPWREVGTDTQYF

SEQ ID NO: 697301 - protein, 13 aa, Homo sapiens
  CDR3 for alpha chain variable domain of TCR clone 348651 (TRAV12-2, TRAJ15)
CAVFNQAGTALIF

SEQ ID NO: 697302 - protein, 15 aa, Homo sapiens
  CDR3 for beta chain variable domain of TCR clone 348651 (TRBV7-8, TRBJ1-5)
CASSRGGGAEQPQHF

SEQ ID NO: 697303 - protein, 16 aa, Homo sapiens
  CDR3 for alpha chain variable domain of TCR clone 348652 (TRAV2, TRAJ29)
ILQVREADAAVYYCVF

SEQ ID NO: 697304 - protein, 14 aa, Homo sapiens
  CDR3 for beta chain variable domain of TCR clone 348652 (TRBV7-9, TRBJ2-4)
CASSLAMGGNIQYF

SEQ ID NO: 697305 - protein, 14 aa, Homo sapiens
  CDR3 for alpha chain variable domain of TCR clone 348653 (TRAV2, TRAJ9)
CAVEDRSGGFKTIF

SEQ ID NO: 697306 - protein, 18 aa, Homo sapiens
  CDR3 for beta chain variable domain of TCR clone 348653 (TRBV4-3, TRBJ2-6)
CASSQDIQGGPGANVLTF

SEQ ID NO: 697307 - protein, 13 aa, Homo sapiens
  CDR3 for alpha chain variable domain of TCR clone 348654 (TRAV8-3, TRAJ43)
CAVGPDNNNDMRL

SEQ ID NO: 697308 - protein, 13 aa, Homo sapiens
  CDR3 for beta chain variable domain of TCR clone 348654 (TRBV29-1, TRBJ2-1)
CSVEGGRVNEQFF

SEQ ID NO: 697309 - protein, 11 aa, Homo sapiens
  CDR3 for alpha chain variable domain of TCR clone 348655 (TRAV12-3, TRAJ43)
CAMSVSNDMRF

SEQ ID NO: 697310 - protein, 13 aa, Homo sapiens
  CDR3 for beta chain variable domain of TCR clone 348655 (TRBV19, TRBJ2-2)
CASKVSAAGELFF

SEQ ID NO: 697311 - protein, 15 aa, Homo sapiens
  CDR3 for alpha chain variable domain of TCR clone 348656 (TRAV8-3, TRAJ45)
CASSYSGGGADGLTF

SEQ ID NO: 697312 - protein, 14 aa, Homo sapiens
  CDR3 for beta chain variable domain of TCR clone 348656 (TRBV11-2, TRBJ2-3)
CASSRLARTETQYF

SEQ ID NO: 697313 - protein, 14 aa, Homo sapiens
  CDR3 for alpha chain variable domain of TCR clone 348657 (TRAV38-1, TRAJ31)
CAFMKHDNNARLMF

SEQ ID NO: 697314 - protein, 15 aa, Homo sapiens
  CDR3 for beta chain variable domain of TCR clone 348657 (TRBV10-2, TRBJ2-6)
CASSEQGTGANVLTF

SEQ ID NO: 697315 - protein, 10 aa, Homo sapiens
  CDR3 for alpha chain variable domain of TCR clone 348658 (TRAV13-1, TRAJ26)
CAPYGRNFVF

SEQ ID NO: 697316 - protein, 12 aa, Homo sapiens
  CDR3 for beta chain variable domain of TCR clone 348658 (TRBV28, TRBJ1-3)
CASVSSGNTIYF

SEQ ID NO: 697317 - protein, 14 aa, Homo sapiens
  CDR3 for alpha chain variable domain of TCR clone 348659 (TRAV9-2, TRAJ39)
CALYIYNAGNMLTF

SEQ ID NO: 697318 - protein, 14 aa, Homo sapiens
  CDR3 for beta chain variable domain of TCR clone 348659 (TRBV12-4, TRBJ1-2)
CASSPLGTVGGYTF

SEQ ID NO: 697319 - protein, 23 aa, Homo sapiens
  CDR3 for alpha chain variable domain of TCR clone 348660 (TRAV12-2, TRAJ36)
SLLIRDSQPSDSATLERANNLFF

SEQ ID NO: 697320 - protein, 17 aa, Homo sapiens
  CDR3 for beta chain variable domain of TCR clone 348660 (TRBV3-1, TRBJ2-3)
CASSQLLDRVHTDTQYF

SEQ ID NO: 697321 - protein, 14 aa, Homo sapiens
  CDR3 for alpha chain variable domain of TCR clone 348661 (TRAV29/DV5, TRAJ36)
CAARRKTGAHNLFF

SEQ ID NO: 697322 - protein, 15 aa, Homo sapiens
  CDR3 for beta chain variable domain of TCR clone 348661 (TRBV5-1, TRBJ2-3)
CASSVTSGSTDTQYF

SEQ ID NO: 697323 - protein, 12 aa, Homo sapiens
  CDR3 for alpha chain variable domain of TCR clone 348662 (TRAV12-3, TRAJ17)
CAMTLPGKKLTF

SEQ ID NO: 697324 - protein, 13 aa, Homo sapiens
  CDR3 for beta chain variable domain of TCR clone 348662 (TRBV7-9, TRBJ1-2)
CASSLKQNYGYTF

SEQ ID NO: 697325 - protein, 14 aa, Homo sapiens
  CDR3 for alpha chain variable domain of TCR clone 348663 (TRAV26-1, TRAJ38)
FIADNAGNNRKLIW

SEQ ID NO: 697326 - protein, 15 aa, Homo sapiens
  CDR3 for beta chain variable domain of TCR clone 348663 (TRBV20-1, TRBJ2-7)
CSARDRVSGMDEQYF

SEQ ID NO: 697327 - protein, 14 aa, Homo sapiens
  CDR3 for alpha chain variable domain of TCR clone 348664 (TRAV34, TRAJ44)
CGADGTGTASKLTF

SEQ ID NO: 697328 - protein, 14 aa, Homo sapiens
  CDR3 for beta chain variable domain of TCR clone 348664 (TRBV28, TRBJ1-5)
CASSLFPGVQPQHF

SEQ ID NO: 697329 - protein, 12 aa, Homo sapiens
  CDR3 for alpha chain variable domain of TCR clone 348665 (TRAV12-3, TRAJ17)
CAMTLAGNKLTF

SEQ ID NO: 697330 - protein, 15 aa, Homo sapiens
  CDR3 for beta chain variable domain of TCR clone 348665 (TRBV20-1, TRBJ2-7)
CSATDRVSGMDEQYF

SEQ ID NO: 697331 - protein, 15 aa, Homo sapiens
  CDR3 for alpha chain variable domain of TCR clone 348666 (TRAV26-1, TRAJ29)
CIVRVEGSGNTPLVF

SEQ ID NO: 697332 - protein, 15 aa, Homo sapiens
  CDR3 for beta chain variable domain of TCR clone 348666 (TRBV7-9, TRBJ1-5)
CASSQGHQPHQPQHF

SEQ ID NO: 697333 - protein, 15 aa, Homo sapiens
  CDR3 for alpha chain variable domain of TCR clone 348667 (TRAV4, TRAJ10)
CLVGDGSGGGNKLTF

SEQ ID NO: 697334 - protein, 15 aa, Homo sapiens
  CDR3 for beta chain variable domain of TCR clone 348667 (TRBV9, TRBJ1-6)
CASSVAGTGDSPLHF

SEQ ID NO: 697335 - protein, 14 aa, Homo sapiens
  CDR3 for alpha chain variable domain of TCR clone 348668 (TRAV38-1, TRAJ29)
CAFITPSGNTPLVF

SEQ ID NO: 697336 - protein, 15 aa, Homo sapiens
  CDR3 for beta chain variable domain of TCR clone 348668 (TRBV28, TRBJ2-5)
CASSSGRTIQETQYF

SEQ ID NO: 697337 - protein, 15 aa, Homo sapiens
  CDR3 for alpha chain variable domain of TCR clone 348669 (TRAV14/DV4, TRAJ26)
CAMREGQNYGQNFVF

SEQ ID NO: 697338 - protein, 15 aa, Homo sapiens
  CDR3 for beta chain variable domain of TCR clone 348669 (TRBV2, TRBJ2-7)
CASTLLGSGATEQYF

SEQ ID NO: 697339 - protein, 13 aa, Homo sapiens
  CDR3 for alpha chain variable domain of TCR clone 348670 (TRAV36/DV7, TRAJ54)
CAVDIQGAQKLVF

SEQ ID NO: 697340 - protein, 14 aa, Homo sapiens
  CDR3 for beta chain variable domain of TCR clone 348670 (TRBV19, TRBJ2-7)
CASNFRHTFTGMYF

SEQ ID NO: 697341 - protein, 17 aa, Homo sapiens
  CDR3 for alpha chain variable domain of TCR clone 348671 (TRAV3, TRAJ42)
CAVRDRDYGGSQGNLIF

SEQ ID NO: 697342 - protein, 13 aa, Homo sapiens
  CDR3 for beta chain variable domain of TCR clone 348671 (TRBV10-3, TRBJ1-2)
CAISERDSYGYAF

SEQ ID NO: 697343 - protein, 13 aa, Homo sapiens
  CDR3 for alpha chain variable domain of TCR clone 348672 (TRAV12-3, TRAJ54)
CALVPQGAQKLVF

SEQ ID NO: 697344 - protein, 15 aa, Homo sapiens
  CDR3 for beta chain variable domain of TCR clone 348672 (TRBV4-1, TRBJ2-2)
CASSKDSRGTGELFF

SEQ ID NO: 697345 - protein, 14 aa, Homo sapiens
  CDR3 for alpha chain variable domain of TCR clone 348673 (TRAV1-2, TRAJ8)
CAVREDTGFQKLVF

SEQ ID NO: 697346 - protein, 13 aa, Homo sapiens
  CDR3 for beta chain variable domain of TCR clone 348673 (TRBV20-1, TRBJ1-1)
CRARGGGNTEAFF

SEQ ID NO: 697347 - protein, 14 aa, Homo sapiens
  CDR3 for alpha chain variable domain of TCR clone 348674 (TRAV17, TRAJ31)
CATVLRNNNARLMF

SEQ ID NO: 697348 - protein, 14 aa, Homo sapiens
  CDR3 for beta chain variable domain of TCR clone 348674 (TRBV12-4, TRBJ2-5)
CASSSWQKQETQYF

SEQ ID NO: 697349 - protein, 14 aa, Homo sapiens
  CDR3 for alpha chain variable domain of TCR clone 348675 (TRAV38-1, TRAJ39)
CAFAYNNAGNMLTF

SEQ ID NO: 697350 - protein, 15 aa, Homo sapiens
  CDR3 for beta chain variable domain of TCR clone 348675 (TRBV19, TRBJ2-6)
CASSIGPSGANVLIF

SEQ ID NO: 697351 - protein, 16 aa, Homo sapiens
  CDR3 for alpha chain variable domain of TCR clone 348676 (TRAV12-3, TRAJ10)
CAMKTGITGGGNKLTF

SEQ ID NO: 697352 - protein, 12 aa, Homo sapiens
  CDR3 for beta chain variable domain of TCR clone 348676 (TRBV20-1, TRBJ2-7)
CSAITPTKEQYF

SEQ ID NO: 697353 - protein, 12 aa, Homo sapiens
  CDR3 for alpha chain variable domain of TCR clone 348677 (TRAV21, TRAJ11)
CAATSGYSTLTF

SEQ ID NO: 697354 - protein, 15 aa, Homo sapiens
  CDR3 for beta chain variable domain of TCR clone 348677 (TRBV19, TRBJ2-2)
CQPISGTGATGELFF

SEQ ID NO: 697355 - protein, 14 aa, Homo sapiens
  CDR3 for alpha chain variable domain of TCR clone 348678 (TRAV12-3, TRAJ10)
SHLPLTGGGNKLTF

SEQ ID NO: 697356 - protein, 14 aa, Homo sapiens
  CDR3 for beta chain variable domain of TCR clone 348678 (TRBV2, TRBJ2-3)
CASSEVQNTDTQYF

SEQ ID NO: 697357 - protein, 16 aa, Homo sapiens
  CDR3 for alpha chain variable domain of TCR clone 348679 (TRAV13-1, TRAJ37)
CAASSLGSSYTGKLIF

SEQ ID NO: 697358 - protein, 12 aa, Homo sapiens
  CDR3 for beta chain variable domain of TCR clone 348679 (TRBV6-1, TRBJ2-5)
CASSEGRETQYF

SEQ ID NO: 697359 - protein, 14 aa, Homo sapiens
  CDR3 for alpha chain variable domain of TCR clone 348680 (TRAV17, TRAJ56)
CATVPAGANSKLTF

SEQ ID NO: 697360 - protein, 17 aa, Homo sapiens
  CDR3 for beta chain variable domain of TCR clone 348680 (TRBV24-1, TRBJ2-5)
CATSDRRLAGNQETQYF

SEQ ID NO: 697361 - protein, 12 aa, Homo sapiens
  CDR3 for alpha chain variable domain of TCR clone 348681 (TRAV3, TRAJ27)
FAVRDKAGKSTF

SEQ ID NO: 697362 - protein, 14 aa, Homo sapiens
  CDR3 for beta chain variable domain of TCR clone 348681 (TRBV5-1, TRBJ1-2)
CASSVDSTNYGYTF

SEQ ID NO: 697363 - protein, 16 aa, Homo sapiens
  CDR3 for alpha chain variable domain of TCR clone 348682 (TRAV21, TRAJ52)
CAVTNAGGTSYGKLTF

SEQ ID NO: 697364 - protein, 13 aa, Homo sapiens
  CDR3 for beta chain variable domain of TCR clone 348682 (TRBV20-1, TRBJ2-3)
CSARLAGSDTQYF

SEQ ID NO: 697365 - protein, 15 aa, Homo sapiens
  CDR3 for alpha chain variable domain of TCR clone 348683 (TRAV3, TRAJ7)
CAVRDKDNGNNRLAF

SEQ ID NO: 697366 - protein, 19 aa, Homo sapiens
  CDR3 for beta chain variable domain of TCR clone 348683 (TRBV5-8, TRBJ2-3)
CASSFGGTSGSHRTDTQYF

SEQ ID NO: 697367 - protein, 13 aa, Homo sapiens
  CDR3 for alpha chain variable domain of TCR clone 348684 (TRAV13-2, TRAJ13)
CAERPGGYQQVTF

SEQ ID NO: 697368 - protein, 13 aa, Homo sapiens
  CDR3 for beta chain variable domain of TCR clone 348684 (TRBV7-9, TRBJ1-2)
CASSLKQNYGYTF

SEQ ID NO: 697369 - protein, 14 aa, Homo sapiens
  CDR3 for alpha chain variable domain of TCR clone 348685 (TRAV26-1, TRAJ38)
CIADNAGNNRKLIW

SEQ ID NO: 697370 - protein, 15 aa, Homo sapiens
  CDR3 for beta chain variable domain of TCR clone 348685 (TRBV5-5, TRBJ1-5)
CASSSTPGSNQPQHF

SEQ ID NO: 697371 - protein, 14 aa, Homo sapiens
  CDR3 for alpha chain variable domain of TCR clone 348686 (TRAV8-4, TRAJ34)
CAVSDPGDTDKLIF

SEQ ID NO: 697372 - protein, 14 aa, Homo sapiens
  CDR3 for beta chain variable domain of TCR clone 348686 (TRBV9, TRBJ1-2)
CASSVSTRSYGYTF

SEQ ID NO: 697373 - protein, 14 aa, Homo sapiens
  CDR3 for alpha chain variable domain of TCR clone 348687 (TRAV12-3, TRAJ12)
CATSEVDSSYKLIF

SEQ ID NO: 697374 - protein, 12 aa, Homo sapiens
  CDR3 for beta chain variable domain of TCR clone 348687 (TRBV18, TRBJ1-4)
CASSPSREKPFF

SEQ ID NO: 697375 - protein, 13 aa, Homo sapiens
  CDR3 for alpha chain variable domain of TCR clone 348688 (TRAV26-1, TRAJ29)
CIVRRSGNTPLVF

SEQ ID NO: 697376 - protein, 16 aa, Homo sapiens
  CDR3 for beta chain variable domain of TCR clone 348688 (TRBV11-2, TRBJ2-7)
CASSLAPTGVNYEQHF

SEQ ID NO: 697377 - protein, 14 aa, Homo sapiens
  CDR3 for alpha chain variable domain of TCR clone 348689 (TRAV12-3, TRAJ10)
SHLPLTGGGNKLTF

SEQ ID NO: 697378 - protein, 18 aa, Homo sapiens
  CDR3 for beta chain variable domain of TCR clone 348689 (TRBV10-3, TRBJ2-7)
CAISESGRPSGGRVEQYF

SEQ ID NO: 697379 - protein, 14 aa, Homo sapiens
  CDR3 for alpha chain variable domain of TCR clone 348690 (TRAV8-3, TRAJ4)
CAVGSSGGYNKLIF

SEQ ID NO: 697380 - protein, 17 aa, Homo sapiens
  CDR3 for beta chain variable domain of TCR clone 348690 (TRBV11-2, TRBJ2-1)
CASSLYPPGVEYNEQFF

SEQ ID NO: 697381 - protein, 14 aa, Homo sapiens
  CDR3 for alpha chain variable domain of TCR clone 348691 (TRAV13-1, TRAJ9)
CAAIALTGGFKTIF

SEQ ID NO: 697382 - protein, 13 aa, Homo sapiens
  CDR3 for beta chain variable domain of TCR clone 348691 (TRBV20-1, TRBJ1-1)
CSAGTVGNAEAFF

SEQ ID NO: 697383 - protein, 19 aa, Homo sapiens
  CDR3 for alpha chain variable domain of TCR clone 348692 (TRAV2, TRAJ20)
ILQVREADAAVYRDCKLSF

SEQ ID NO: 697384 - protein, 17 aa, Homo sapiens
  CDR3 for beta chain variable domain of TCR clone 348692 (TRBV7-6, TRBJ2-1)
CASSLEIAGGSYNEQFF

SEQ ID NO: 697385 - protein, 16 aa, Homo sapiens
  CDR3 for alpha chain variable domain of TCR clone 348693 (TRAV16, TRAJ26)
CSLSGSEFCLWSRNQF

SEQ ID NO: 697386 - protein, 12 aa, Homo sapiens
  CDR3 for beta chain variable domain of TCR clone 348693 (TRBV11-2, TRBJ2-1)
CASSPGNNEQFF

SEQ ID NO: 697387 - protein, 14 aa, Homo sapiens
  CDR3 for alpha chain variable domain of TCR clone 348694 (TRAV17, TRAJ57)
CATDPQGGSEKLVF

SEQ ID NO: 697388 - protein, 13 aa, Homo sapiens
  CDR3 for beta chain variable domain of TCR clone 348694 (TRBV19, TRBJ1-5)
CASSMRGYQPQHF

SEQ ID NO: 697389 - protein, 12 aa, Homo sapiens
  CDR3 for alpha chain variable domain of TCR clone 348695 (TRAV13-1, TRAJ21)
CAAKEGFNKFYF

SEQ ID NO: 697390 - protein, 14 aa, Homo sapiens
  CDR3 for beta chain variable domain of TCR clone 348695 (TRBV5-4, TRBJ1-1)
CASSLDSRRDEAFY

SEQ ID NO: 697391 - protein, 19 aa, Homo sapiens
  CDR3 for alpha chain variable domain of TCR clone 348696 (TRAV2, TRAJ20)
ILQVREADAAVYRDCKLSF

SEQ ID NO: 697392 - protein, 15 aa, Homo sapiens
  CDR3 for beta chain variable domain of TCR clone 348696 (TRBV7-9, TRBJ1-6)
CASSSPGRGNSPLHF

SEQ ID NO: 697393 - protein, 15 aa, Homo sapiens
  CDR3 for alpha chain variable domain of TCR clone 348697 (TRAV3, TRAJ4)
CAVRDRTGGYNKLIF

SEQ ID NO: 697394 - protein, 12 aa, Homo sapiens
  CDR3 for beta chain variable domain of TCR clone 348697 (TRBV14, TRBJ2-5)
CASSQLKETQYF

SEQ ID NO: 697395 - protein, 14 aa, Homo sapiens
  CDR3 for alpha chain variable domain of TCR clone 348698 (TRAV1-2, TRAJ8)
CVVSEDTGFQKLVF

SEQ ID NO: 697396 - protein, 15 aa, Homo sapiens
  CDR3 for beta chain variable domain of TCR clone 348698 (TRBV6-3, TRBJ2-7)
CASSSPGTVFYEQYF

SEQ ID NO: 697397 - protein, 12 aa, Homo sapiens
  CDR3 for alpha chain variable domain of TCR clone 348699 (TRAV27, TRAJ9)
CAGEAGGFKTIF

SEQ ID NO: 697398 - protein, 15 aa, Homo sapiens
  CDR3 for beta chain variable domain of TCR clone 348699 (TRBV19, TRBJ1-1)
CASTSGQIQNTEAFF

SEQ ID NO: 697399 - protein, 14 aa, Homo sapiens
  CDR3 for alpha chain variable domain of TCR clone 348700 (TRAV35, TRAJ50)
CAGHRKTSYDNVIF

SEQ ID NO: 697400 - protein, 15 aa, Homo sapiens
  CDR3 for beta chain variable domain of TCR clone 348700 (TRBV6-3, TRBJ2-7)
CASSSPGTVFYEQYF

SEQ ID NO: 697401 - protein, 14 aa, Homo sapiens
  CDR3 for alpha chain variable domain of TCR clone 348701 (TRAV1-2, TRAJ16)
CAVNRFSDVQKLLF

SEQ ID NO: 697402 - protein, 15 aa, Homo sapiens
  CDR3 for beta chain variable domain of TCR clone 348701 (TRBV7-9, TRBJ1-6)
CASSSPGRGNSPLLF

SEQ ID NO: 697403 - protein, 11 aa, Homo sapiens
  CDR3 for alpha chain variable domain of TCR clone 348702 (TRAV3, TRAJ21)
CALGNFNKFSF

SEQ ID NO: 697404 - protein, 16 aa, Homo sapiens
  CDR3 for beta chain variable domain of TCR clone 348702 (TRBV19, TRBJ2-1)
CASSKAGPSSYNEQFF

SEQ ID NO: 697405 - protein, 16 aa, Homo sapiens
  CDR3 for alpha chain variable domain of TCR clone 348703 (TRAV38-2/DV8, TRAJ47)
CAYRSAIMEYGNKLVF

SEQ ID NO: 697406 - protein, 10 aa, Homo sapiens
  CDR3 for beta chain variable domain of TCR clone 348703 (TRBV19, TRBJ2-7)
VYSQEPKQYF

SEQ ID NO: 697407 - protein, 12 aa, Homo sapiens
  CDR3 for alpha chain variable domain of TCR clone 348704 (TRAV8-6, TRAJ21)
CAVRPNFNKFYF

SEQ ID NO: 697408 - protein, 14 aa, Homo sapiens
  CDR3 for beta chain variable domain of TCR clone 348704 (TRBV7-2, TRBJ2-7)
CASSLYPGRYEQYF

SEQ ID NO: 697409 - protein, 20 aa, Homo sapiens
  CDR3 for alpha chain variable domain of TCR clone 348705 (TRAV12-1, TRAJ42)
SSVIQPPTSVKGGSQGNLIF

SEQ ID NO: 697410 - protein, 14 aa, Homo sapiens
  CDR3 for beta chain variable domain of TCR clone 348705 (TRBV11-2, TRBJ1-2)
CASSLGTANYGYTF

SEQ ID NO: 697411 - protein, 13 aa, Homo sapiens
  CDR3 for alpha chain variable domain of TCR clone 348706 (TRAV1-2, TRAJ9)
CAVLNTGGFKTIF

SEQ ID NO: 697412 - protein, 15 aa, Homo sapiens
  CDR3 for beta chain variable domain of TCR clone 348706 (TRBV11-3, TRBJ2-3)
CASLKDGREGDTQYF

SEQ ID NO: 697413 - protein, 20 aa, Homo sapiens
  CDR3 for alpha chain variable domain of TCR clone 348707 (TRAV12-1, TRAJ42)
SSVIQPPTSVKGGSQGNLIF

SEQ ID NO: 697414 - protein, 15 aa, Homo sapiens
  CDR3 for beta chain variable domain of TCR clone 348707 (TRBV11-2, TRBJ2-2)
CASSSDRVNAGELFF

SEQ ID NO: 697415 - protein, 13 aa, Homo sapiens
  CDR3 for alpha chain variable domain of TCR clone 348708 (TRAV8-6, TRAJ49)
CAVITNTGNQFYF

SEQ ID NO: 697416 - protein, 14 aa, Homo sapiens
  CDR3 for beta chain variable domain of TCR clone 348708 (TRBV5-1, TRBJ2-7)
SASSRGESLYEQYF

SEQ ID NO: 697417 - protein, 16 aa, Homo sapiens
  CDR3 for alpha chain variable domain of TCR clone 348709 (TRAV3, TRAJ5)
CAVRNLMYTGRRALTF

SEQ ID NO: 697418 - protein, 16 aa, Homo sapiens
  CDR3 for beta chain variable domain of TCR clone 348709 (TRBV4-2, TRBJ2-7)
CASSQEGLAISYEQYF

SEQ ID NO: 697419 - protein, 16 aa, Homo sapiens
  CDR3 for alpha chain variable domain of TCR clone 348710 (TRAV12-3, TRAJ53)
CAMSPGSGGSNYKLTF

SEQ ID NO: 697420 - protein, 16 aa, Homo sapiens
  CDR3 for beta chain variable domain of TCR clone 348710 (TRBV29-1, TRBJ2-5)
SAARPNGDPVLRARHA

SEQ ID NO: 697421 - protein, 17 aa, Homo sapiens
  CDR3 for alpha chain variable domain of TCR clone 348711 (TRAV36/DV7, TRAJ52)
CAVGQRAGGTSYGKLTF

SEQ ID NO: 697422 - protein, 15 aa, Homo sapiens
  CDR3 for beta chain variable domain of TCR clone 348711 (TRBV9, TRBJ1-6)
CASSVAGTGDSPLHF

SEQ ID NO: 697423 - protein, 12 aa, Homo sapiens
  CDR3 for alpha chain variable domain of TCR clone 348712 (TRAV27, TRAJ21)
CAGLRQLQQILL

SEQ ID NO: 697424 - protein, 14 aa, Homo sapiens
  CDR3 for beta chain variable domain of TCR clone 348712 (TRBV7-9, TRBJ1-4)
CASSLEGQSEKLFF

SEQ ID NO: 697425 - protein, 10 aa, Homo sapiens
  CDR3 for alpha chain variable domain of TCR clone 348713 (TRAV13-2, TRAJ49)
CADTGNQFYF

SEQ ID NO: 697426 - protein, 13 aa, Homo sapiens
  CDR3 for beta chain variable domain of TCR clone 348713 (TRBV10-3, TRBJ1-2)
RAISERDSYGYTF

SEQ ID NO: 697427 - protein, 18 aa, Homo sapiens
  CDR3 for alpha chain variable domain of TCR clone 348714 (TRAV21, TRAJ52)
CAVRPSPAGGTSYGKLTF

SEQ ID NO: 697428 - protein, 15 aa, Homo sapiens
  CDR3 for beta chain variable domain of TCR clone 348714 (TRBV7-9, TRBJ2-7)
CASSSSGPAVYEQYF

SEQ ID NO: 697429 - protein, 17 aa, Homo sapiens
  CDR3 for alpha chain variable domain of TCR clone 348715 (TRAV3, TRAJ6)
CAVRDGPRAGGSYIPTF

SEQ ID NO: 697430 - protein, 20 aa, Homo sapiens
  CDR3 for beta chain variable domain of TCR clone 348715 (TRBV28, TRBJ2-1)
CASTPIGRSPGLAGGNEQSS

SEQ ID NO: 697431 - protein, 15 aa, Homo sapiens
  CDR3 for alpha chain variable domain of TCR clone 348716 (TRAV26-1, TRAJ29)
CIVRVEGSGNTPIVF

SEQ ID NO: 697432 - protein, 14 aa, Homo sapiens
  CDR3 for beta chain variable domain of TCR clone 348716 (TRBV18, TRBJ2-5)
CASSPGVSRETQYF

SEQ ID NO: 697433 - protein, 12 aa, Homo sapiens
  CDR3 for alpha chain variable domain of TCR clone 348717 (TRAV2, TRAJ33)
CAVPDSNYQLIW

SEQ ID NO: 697434 - protein, 13 aa, Homo sapiens
  CDR3 for beta chain variable domain of TCR clone 348717 (TRBV7-6, TRBJ1-2)
CASSLVADYGYTF

SEQ ID NO: 697435 - protein, 11 aa, Homo sapiens
  CDR3 for alpha chain variable domain of TCR clone 348718 (TRAV1-1, TRAJ23)
CAVRQGGKLIF

SEQ ID NO: 697436 - protein, 15 aa, Homo sapiens
  CDR3 for beta chain variable domain of TCR clone 348718 (TRBV6-1, TRBJ1-5)
CASSVWVADGQPQHF

SEQ ID NO: 697437 - protein, 14 aa, Homo sapiens
  CDR3 for alpha chain variable domain of TCR clone 348719 (TRAV16, TRAJ29)
CALTRNSGNTPLVF

SEQ ID NO: 697438 - protein, 12 aa, Homo sapiens
  CDR3 for beta chain variable domain of TCR clone 348719 (TRBV2, TRBJ2-1)
CAKREDYNEQFF

SEQ ID NO: 697439 - protein, 15 aa, Homo sapiens
  CDR3 for alpha chain variable domain of TCR clone 348720 (TRAV12-2, TRAJ53)
CAVDGGGGSNYKLTF

SEQ ID NO: 697440 - protein, 19 aa, Homo sapiens
  CDR3 for beta chain variable domain of TCR clone 348720 (TRBV25-1, TRBJ2-2)
CAILVYRVDRGRKTGELFF

SEQ ID NO: 697441 - protein, 12 aa, Homo sapiens
  CDR3 for alpha chain variable domain of TCR clone 348721 (TRAV1-2, TRAJ42)
CVAGGSQGNLIF

SEQ ID NO: 697442 - protein, 14 aa, Homo sapiens
  CDR3 for beta chain variable domain of TCR clone 348721 (TRBV6-3, TRBJ2-7)
CASGRQGGLWEQYF

SEQ ID NO: 697443 - protein, 23 aa, Homo sapiens
  CDR3 for alpha chain variable domain of TCR clone 348722 (TRAV8-3, )
CAVVTTRIPDIQNPDPAVYRLRD

SEQ ID NO: 697444 - protein, 14 aa, Homo sapiens
  CDR3 for beta chain variable domain of TCR clone 348722 (TRBV11-2, TRBJ2-7)
CASSPSTTSYEQYF

SEQ ID NO: 697445 - protein, 13 aa, Homo sapiens
  CDR3 for alpha chain variable domain of TCR clone 348723 (TRAV2, TRAJ40)
FAVVTSGTYKYIF

SEQ ID NO: 697446 - protein, 14 aa, Homo sapiens
  CDR3 for beta chain variable domain of TCR clone 348723 (TRBV7-9, TRBJ2-1)
CASSSMVGFGEQFF

SEQ ID NO: 697447 - protein, 13 aa, Homo sapiens
  CDR3 for alpha chain variable domain of TCR clone 348724 (TRAV12-3, TRAJ40)
CAMSGSGTYKYIF

SEQ ID NO: 697448 - protein, 14 aa, Homo sapiens
  CDR3 for beta chain variable domain of TCR clone 348724 (TRBV7-2, TRBJ1-5)
CASSTQGAGQTQHF

SEQ ID NO: 697449 - protein, 16 aa, Homo sapiens
  CDR3 for alpha chain variable domain of TCR clone 348725 (TRAV29/DV5, TRAJ39)
CAASLLFNNAGNMLTF

SEQ ID NO: 697450 - protein, 12 aa, Homo sapiens
  CDR3 for beta chain variable domain of TCR clone 348725 (TRBV12-4, TRBJ1-3)
CASSFSGNTIYF

SEQ ID NO: 697451 - protein, 17 aa, Homo sapiens
  CDR3 for alpha chain variable domain of TCR clone 348726 (TRAV26-1, TRAJ27)
CIVSTPWINTNAGKSTF

SEQ ID NO: 697452 - protein, 13 aa, Homo sapiens
  CDR3 for beta chain variable domain of TCR clone 348726 (TRBV7-9, TRBJ1-2)
CASSLKQNYGYTF

SEQ ID NO: 697453 - protein, 14 aa, Homo sapiens
  CDR3 for alpha chain variable domain of TCR clone 348727 (TRAV1-2, TRAJ6)
CAVSLSGGSYIPTF

SEQ ID NO: 697454 - protein, 15 aa, Homo sapiens
  CDR3 for beta chain variable domain of TCR clone 348727 (TRBV28, TRBJ2-7)
CASNPGGGGFYEQYF

SEQ ID NO: 697455 - protein, 15 aa, Homo sapiens
  CDR3 for alpha chain variable domain of TCR clone 348728 (TRAV29/DV5, TRAJ54)
CAASPIIRGAQKLVF

SEQ ID NO: 697456 - protein, 11 aa, Homo sapiens
  CDR3 for beta chain variable domain of TCR clone 348728 (TRBV4-1, TRBJ2-2)
CASEHTGELFF

SEQ ID NO: 697457 - protein, 13 aa, Homo sapiens
  CDR3 for alpha chain variable domain of TCR clone 348729 (TRAV3, TRAJ40)
CAVRGSGAYKYIF

SEQ ID NO: 697458 - protein, 13 aa, Homo sapiens
  CDR3 for beta chain variable domain of TCR clone 348729 (TRBV12-5, TRBJ1-2)
CASGVRTGNGYTF

SEQ ID NO: 697459 - protein, 15 aa, Homo sapiens
  CDR3 for alpha chain variable domain of TCR clone 348730 (TRAV21, TRAJ24)
CAARSSTASWGKLQF

SEQ ID NO: 697460 - protein, 12 aa, Homo sapiens
  CDR3 for beta chain variable domain of TCR clone 348730 (TRBV11-2, TRBJ2-5)
CSSSTGEETQYF

SEQ ID NO: 697461 - protein, 16 aa, Homo sapiens
  CDR3 for alpha chain variable domain of TCR clone 348731 (TRAV8-6, TRAJ4)
CAVSERISGVYNKLIF

SEQ ID NO: 697462 - protein, 19 aa, Homo sapiens
  CDR3 for beta chain variable domain of TCR clone 348731 (TRBV19, TRBJ1-5)
CASSISPRQTGGGNQPQHF

SEQ ID NO: 697463 - protein, 15 aa, Homo sapiens
  CDR3 for alpha chain variable domain of TCR clone 348732 (TRAV13-1, TRAJ39)
CAASPLNNAGNMLTF

SEQ ID NO: 697464 - protein, 15 aa, Homo sapiens
  CDR3 for beta chain variable domain of TCR clone 348732 (TRBV7-6, TRBJ2-1)
CASSSLAGEANEQFF

SEQ ID NO: 697465 - protein, 14 aa, Homo sapiens
  CDR3 for alpha chain variable domain of TCR clone 348733 (TRAV1-1, TRAJ23)
FAVSIYNQGGKLIF

SEQ ID NO: 697466 - protein, 15 aa, Homo sapiens
  CDR3 for beta chain variable domain of TCR clone 348733 (TRBV5-8, TRBJ2-2)
CASSLDRGATGELFF

SEQ ID NO: 697467 - protein, 14 aa, Homo sapiens
  CDR3 for alpha chain variable domain of TCR clone 348734 (TRAV12-2, TRAJ13)
CAVKKTGGYQKVTL

SEQ ID NO: 697468 - protein, 13 aa, Homo sapiens
  CDR3 for beta chain variable domain of TCR clone 348734 (TRBV4-1, TRBJ2-7)
CASSQGQAYEQYF

SEQ ID NO: 697469 - protein, 16 aa, Homo sapiens
  CDR3 for alpha chain variable domain of TCR clone 348735 (TRAV12-2, TRAJ32)
CAVNLGQGGATNKLIF

SEQ ID NO: 697470 - protein, 15 aa, Homo sapiens
  CDR3 for beta chain variable domain of TCR clone 348735 (TRBV20-1, TRBJ2-7)
CSARGPLAGGRKQYF

SEQ ID NO: 697471 - protein, 18 aa, Homo sapiens
  CDR3 for alpha chain variable domain of TCR clone 348736 (TRAV13-1, TRAJ52)
CAAKNPNAGGTGYGKLTF

SEQ ID NO: 697472 - protein, 12 aa, Homo sapiens
  CDR3 for beta chain variable domain of TCR clone 348736 (TRBV4-3, TRBJ2-1)
CASSLSGYEQFF

SEQ ID NO: 697473 - protein, 13 aa, Homo sapiens
  CDR3 for alpha chain variable domain of TCR clone 348737 (TRAV27, TRAJ18)
CAGRGSTLGRLYF

SEQ ID NO: 697474 - protein, 14 aa, Homo sapiens
  CDR3 for beta chain variable domain of TCR clone 348737 (TRBV27, TRBJ2-5)
CASSSLTGWENQYF

SEQ ID NO: 697475 - protein, 15 aa, Homo sapiens
  CDR3 for alpha chain variable domain of TCR clone 348738 (TRAV26-1, TRAJ40)
CIVRAVPSGTYKSIF

SEQ ID NO: 697476 - protein, 15 aa, Homo sapiens
  CDR3 for beta chain variable domain of TCR clone 348738 (TRBV20-1, TRBJ2-7)
CSARDRVSGMDEQYF

SEQ ID NO: 697477 - protein, 18 aa, Homo sapiens
  CDR3 for alpha chain variable domain of TCR clone 348739 (TRAV3, TRAJ17)
CAVRARRGGRSCRQQANF

SEQ ID NO: 697478 - protein, 13 aa, Homo sapiens
  CDR3 for beta chain variable domain of TCR clone 348739 (TRBV20-1, TRBJ1-6)
CSAPLGVGSPLHF

SEQ ID NO: 697479 - protein, 14 aa, Homo sapiens
  CDR3 for alpha chain variable domain of TCR clone 348740 (TRAV8-6, TRAJ9)
CAVTPATGGFKTIF

SEQ ID NO: 697480 - protein, 12 aa, Homo sapiens
  CDR3 for beta chain variable domain of TCR clone 348740 (TRBV7-8, TRBJ2-7)
CASSLGDREQYF

SEQ ID NO: 697481 - protein, 16 aa, Homo sapiens
  CDR3 for alpha chain variable domain of TCR clone 348741 (TRAV19, TRAJ53)
CALIAESGGGNYKLTF

SEQ ID NO: 697482 - protein, 16 aa, Homo sapiens
  CDR3 for beta chain variable domain of TCR clone 348741 (TRBV20-1, TRBJ2-7)
CSARGSVVADIYEQYF

SEQ ID NO: 697483 - protein, 15 aa, Homo sapiens
  CDR3 for alpha chain variable domain of TCR clone 348742 (TRAV27, TRAJ38)
CAARRTAGNNRKLIW

SEQ ID NO: 697484 - protein, 16 aa, Homo sapiens
  CDR3 for beta chain variable domain of TCR clone 348742 (TRBV7-3, TRBJ2-1)
RASSLLVGELVDEQFF

SEQ ID NO: 697485 - protein, 15 aa, Homo sapiens
  CDR3 for alpha chain variable domain of TCR clone 348743 (TRAV8-4, TRAJ53)
CAVSYGGGSNYKLTF

SEQ ID NO: 697486 - protein, 15 aa, Homo sapiens
  CDR3 for beta chain variable domain of TCR clone 348743 (TRBV19, TRBJ2-5)
CASHGLAGAQETQYF

SEQ ID NO: 697487 - protein, 14 aa, Homo sapiens
  CDR3 for alpha chain variable domain of TCR clone 348744 (TRAV12-2, TRAJ13)
CAVKKTGGYQKVTF

SEQ ID NO: 697488 - protein, 15 aa, Homo sapiens
  CDR3 for beta chain variable domain of TCR clone 348744 (TRBV5-7, TRBJ2-5)
CASSPQAGRRETQYF

SEQ ID NO: 697489 - protein, 11 aa, Homo sapiens
  CDR3 for alpha chain variable domain of TCR clone 348745 (TRAV12-3, TRAJ27)
CAIANAGKSTF

SEQ ID NO: 697490 - protein, 14 aa, Homo sapiens
  CDR3 for beta chain variable domain of TCR clone 348745 (TRBV12-5, TRBJ2-5)
CASGSRTHQETQYF

SEQ ID NO: 697491 - protein, 13 aa, Homo sapiens
  CDR3 for alpha chain variable domain of TCR clone 348746 (TRAV12-1, TRAJ16)
CVVNGPDGQKLLY

SEQ ID NO: 697492 - protein, 13 aa, Homo sapiens
  CDR3 for beta chain variable domain of TCR clone 348746 (TRBV2, TRBJ1-1)
CARNPTGGFHAFF

SEQ ID NO: 697493 - protein, 18 aa, Homo sapiens
  CDR3 for alpha chain variable domain of TCR clone 348747 (TRAV13-1, TRAJ52)
CAAKNPNAGGPSYGKLTF

SEQ ID NO: 697494 - protein, 11 aa, Homo sapiens
  CDR3 for beta chain variable domain of TCR clone 348747 (TRBV29-1, TRBJ2-5)
CSEDRTGTQYF

SEQ ID NO: 697495 - protein, 17 aa, Homo sapiens
  CDR3 for alpha chain variable domain of TCR clone 348748 (TRAV3, TRAJ6)
CAVRDGPRAGGRYIPPF

SEQ ID NO: 697496 - protein, 18 aa, Homo sapiens
  CDR3 for beta chain variable domain of TCR clone 348748 (TRBV7-9, TRBJ2-7)
CASSLTTSGSRTWYEQYF

SEQ ID NO: 697497 - protein, 15 aa, Homo sapiens
  CDR3 for alpha chain variable domain of TCR clone 348749 (TRAV12-3, TRAJ5)
CAMSGLGTGRRALTL

SEQ ID NO: 697498 - protein, 16 aa, Homo sapiens
  CDR3 for beta chain variable domain of TCR clone 348749 (TRBV20-1, TRBJ2-3)
CSARLHSAGAIDTQYF

SEQ ID NO: 697499 - protein, 23 aa, Homo sapiens
  CDR3 for alpha chain variable domain of TCR clone 348750 (TRAV26-1, TRAJ38)
CIADNAGNNHIQNPDHAVCQLRD

SEQ ID NO: 697500 - protein, 12 aa, Homo sapiens
  CDR3 for beta chain variable domain of TCR clone 348750 (TRBV11-2, TRBJ2-2)
CASSLGGGELFF

SEQ ID NO: 697501 - protein, 11 aa, Homo sapiens
  CDR3 for alpha chain variable domain of TCR clone 348751 (TRAV3, TRAJ13)
CAVPSYQKVTF

SEQ ID NO: 697502 - protein, 15 aa, Homo sapiens
  CDR3 for beta chain variable domain of TCR clone 348751 (TRBV7-9, TRBJ2-7)
CASSSSGLAVYEQYF

SEQ ID NO: 697503 - protein, 13 aa, Homo sapiens
  CDR3 for alpha chain variable domain of TCR clone 348752 (TRAV27, TRAJ11)
CAGGGSGYSTPTF

SEQ ID NO: 697504 - protein, 15 aa, Homo sapiens
  CDR3 for beta chain variable domain of TCR clone 348752 (TRBV5-1, TRBJ1-1)
CASSLGQGRFAEAFF

SEQ ID NO: 697505 - protein, 14 aa, Homo sapiens
  CDR3 for alpha chain variable domain of TCR clone 348753 (TRAV12-1, TRAJ17)
CVVNYKAAGNKLTF

SEQ ID NO: 697506 - protein, 17 aa, Homo sapiens
  CDR3 for beta chain variable domain of TCR clone 348753 (TRBV20-1, TRBJ2-1)
CSASSSGRAGSYNEQFV

SEQ ID NO: 697507 - protein, 16 aa, Homo sapiens
  CDR3 for alpha chain variable domain of TCR clone 348754 (TRAV4, TRAJ5)
CLVGPDHGHGQGSIYF

SEQ ID NO: 697508 - protein, 15 aa, Homo sapiens
  CDR3 for beta chain variable domain of TCR clone 348754 (TRBV27, TRBJ2-5)
CASSLIPSGGETQYF

SEQ ID NO: 697509 - protein, 12 aa, Homo sapiens
  CDR3 for alpha chain variable domain of TCR clone 348755 (TRAV12-3, TRAJ17)
CAITLTGNKLTF

SEQ ID NO: 697510 - protein, 11 aa, Homo sapiens
  CDR3 for beta chain variable domain of TCR clone 348755 (TRBV20-1, TRBJ2-7)
CSARTSYEQYF

SEQ ID NO: 697511 - protein, 13 aa, Homo sapiens
  CDR3 for alpha chain variable domain of TCR clone 348756 (TRAV29/DV5, TRAJ31)
CAASRNNNARLMF

SEQ ID NO: 697512 - protein, 16 aa, Homo sapiens
  CDR3 for beta chain variable domain of TCR clone 348756 (TRBV19, TRBJ1-5)
CASSIDRGGPRQPQHF

SEQ ID NO: 697513 - protein, 14 aa, Homo sapiens
  CDR3 for alpha chain variable domain of TCR clone 348757 (TRAV1-2, TRAJ16)
CAVNRFSDGQKLLF

SEQ ID NO: 697514 - protein, 15 aa, Homo sapiens
  CDR3 for beta chain variable domain of TCR clone 348757 (TRBV20-1, TRBJ2-7)
CSARDRVSGMDEQFF

SEQ ID NO: 697515 - protein, 13 aa, Homo sapiens
  CDR3 for alpha chain variable domain of TCR clone 348758 (TRAV27, TRAJ6)
CAGGTRGSYIPTF

SEQ ID NO: 697516 - protein, 14 aa, Homo sapiens
  CDR3 for beta chain variable domain of TCR clone 348758 (TRBV19, TRBJ2-7)
CASSTTRSSYEQYF

SEQ ID NO: 697517 - protein, 11 aa, Homo sapiens
  CDR3 for alpha chain variable domain of TCR clone 348759 (TRAV1-1, TRAJ23)
CAVRQGGTLIF

SEQ ID NO: 697518 - protein, 13 aa, Homo sapiens
  CDR3 for beta chain variable domain of TCR clone 348759 (TRBV12-5, TRBJ2-3)
CASGDRQSDTQYF

SEQ ID NO: 697519 - protein, 13 aa, Homo sapiens
  CDR3 for alpha chain variable domain of TCR clone 348760 (TRAV20, TRAJ29)
CAVQAVGNTPLVF

SEQ ID NO: 697520 - protein, 15 aa, Homo sapiens
  CDR3 for beta chain variable domain of TCR clone 348760 (TRBV10-2, TRBJ2-5)
CASRGSGGPLETQYF

SEQ ID NO: 697521 - protein, 16 aa, Homo sapiens
  CDR3 for alpha chain variable domain of TCR clone 348761 (TRAV38-1, TRAJ32)
CAFMKGGGGATNKVIF

SEQ ID NO: 697522 - protein, 13 aa, Homo sapiens
  CDR3 for beta chain variable domain of TCR clone 348761 (TRBV20-1, TRBJ2-5)
CSAREAFQETQYF

SEQ ID NO: 697523 - protein, 14 aa, Homo sapiens
  CDR3 for alpha chain variable domain of TCR clone 348762 (TRAV1-1, TRAJ23)
CAVSIYNKGGKLIF

SEQ ID NO: 697524 - protein, 20 aa, Homo sapiens
  CDR3 for beta chain variable domain of TCR clone 348762 (TRBV6-4, TRBJ2-7)
CASSDSSVSGQVPTSYEQYF

SEQ ID NO: 697525 - protein, 14 aa, Homo sapiens
  CDR3 for alpha chain variable domain of TCR clone 348763 (TRAV1-2, TRAJ16)
CAVNRFSDGQKLLF

SEQ ID NO: 697526 - protein, 18 aa, Homo sapiens
  CDR3 for beta chain variable domain of TCR clone 348763 (TRBV12-4, TRBJ2-2)
CASRTGLAGALNTGELFF

SEQ ID NO: 697527 - protein, 14 aa, Homo sapiens
  CDR3 for alpha chain variable domain of TCR clone 348764 (TRAV27, TRAJ49)
CAGRPEGTGSQFYF

SEQ ID NO: 697528 - protein, 16 aa, Homo sapiens
  CDR3 for beta chain variable domain of TCR clone 348764 (TRBV12-5, TRBJ2-5)
CASGPRTSGNQETPYF

SEQ ID NO: 697529 - protein, 12 aa, Homo sapiens
  CDR3 for alpha chain variable domain of TCR clone 348765 (TRAV13-1, TRAJ20)
CAARQNDSKLSF

SEQ ID NO: 697530 - protein, 14 aa, Homo sapiens
  CDR3 for beta chain variable domain of TCR clone 348765 (TRBV5-1, TRBJ2-7)
CASSFASGVNEQYF

SEQ ID NO: 697531 - protein, 13 aa, Homo sapiens
  CDR3 for alpha chain variable domain of TCR clone 348766 (TRAV8-6, TRAJ49)
CAVITNTGNQFYF

SEQ ID NO: 697532 - protein, 15 aa, Homo sapiens
  CDR3 for beta chain variable domain of TCR clone 348766 (TRBV20-1, TRBJ2-1)
CSASSAGSSYNEQFF

SEQ ID NO: 697533 - protein, 21 aa, Homo sapiens
  CDR3 for alpha chain variable domain of TCR clone 348767 (TRAV27, TRAJ38)
CAARRNAGNNHIQKPDPAVYQ

SEQ ID NO: 697534 - protein, 13 aa, Homo sapiens
  CDR3 for beta chain variable domain of TCR clone 348767 (TRBV12-5, TRBJ2-3)
CASGDRQSDTQYF

SEQ ID NO: 697535 - protein, 13 aa, Homo sapiens
  CDR3 for alpha chain variable domain of TCR clone 348768 (TRAV30, TRAJ41)
CGTDSNSGYALNF

SEQ ID NO: 697536 - protein, 14 aa, Homo sapiens
  CDR3 for beta chain variable domain of TCR clone 348768 (TRBV18, TRBJ1-1)
CASSPTAGHTEAFF

SEQ ID NO: 697537 - protein, 15 aa, Homo sapiens
  CDR3 for alpha chain variable domain of TCR clone 348769 (TRAV3, TRAJ7)
CAVRDKDNGNNRTAF

SEQ ID NO: 697538 - protein, 19 aa, Homo sapiens
  CDR3 for beta chain variable domain of TCR clone 348769 (TRBV5-8, TRBJ2-3)
CASSFLGTSGSHRTDTQYF

SEQ ID NO: 697539 - protein, 12 aa, Homo sapiens
  CDR3 for alpha chain variable domain of TCR clone 348770 (TRAV13-2, TRAJ23)
CAERHRGGKLIF

SEQ ID NO: 697540 - protein, 13 aa, Homo sapiens
  CDR3 for beta chain variable domain of TCR clone 348770 (TRBV15, TRBJ1-6)
CDTSGGLNSPLHF

SEQ ID NO: 697541 - protein, 15 aa, Homo sapiens
  CDR3 for alpha chain variable domain of TCR clone 348771 (TRAV12-3, TRAJ11)
CAMSEENSGYSTLTF

SEQ ID NO: 697542 - protein, 15 aa, Homo sapiens
  CDR3 for beta chain variable domain of TCR clone 348771 (TRBV4-1, TRBJ2-7)
CASSQQGQGFDEQYF

SEQ ID NO: 697543 - protein, 14 aa, Homo sapiens
  CDR3 for alpha chain variable domain of TCR clone 348772 (TRAV20, TRAJ56)
CAVQFGGANSKLTF

SEQ ID NO: 697544 - protein, 15 aa, Homo sapiens
  CDR3 for beta chain variable domain of TCR clone 348772 (TRBV5-1, TRBJ1-1)
CASSWTGRGNTEAFF

SEQ ID NO: 697545 - protein, 14 aa, Homo sapiens
  CDR3 for alpha chain variable domain of TCR clone 348773 (TRAV26-1, TRAJ43)
TAVYYCRKPYDMRF

SEQ ID NO: 697546 - protein, 13 aa, Homo sapiens
  CDR3 for beta chain variable domain of TCR clone 348773 (TRBV29-1, TRBJ2-1)
CSVEGGRVNEQFF

SEQ ID NO: 697547 - protein, 15 aa, Homo sapiens
  CDR3 for alpha chain variable domain of TCR clone 348774 (TRAV3, TRAJ22)
CAVRDRGGSAKQLTF

SEQ ID NO: 697548 - protein, 16 aa, Homo sapiens
  CDR3 for beta chain variable domain of TCR clone 348774 (TRBV5-4, TRBJ2-3)
CASQQPGAGGSDTQYF

SEQ ID NO: 697549 - protein, 11 aa, Homo sapiens
  CDR3 for alpha chain variable domain of TCR clone 348775 (TRAV13-1, TRAJ20)
CSPHGLYKLSF

SEQ ID NO: 697550 - protein, 14 aa, Homo sapiens
  CDR3 for beta chain variable domain of TCR clone 348775 (TRBV28, TRBJ2-5)
CAGTGAGGVETQYF

SEQ ID NO: 697551 - protein, 12 aa, Homo sapiens
  CDR3 for alpha chain variable domain of TCR clone 348776 (TRAV16, TRAJ12)
CALEDSSYKLIF

SEQ ID NO: 697552 - protein, 16 aa, Homo sapiens
  CDR3 for beta chain variable domain of TCR clone 348776 (TRBV2, TRBJ2-1)
CASSDSPGQPYNEQFF

SEQ ID NO: 697553 - protein, 11 aa, Homo sapiens
  CDR3 for alpha chain variable domain of TCR clone 348777 (TRAV1-1, TRAJ23)
CAVRQGGKLIF

SEQ ID NO: 697554 - protein, 12 aa, Homo sapiens
  CDR3 for beta chain variable domain of TCR clone 348777 (TRBV5-4, TRBJ2-5)
CASSSTRETQYF

SEQ ID NO: 697555 - protein, 12 aa, Homo sapiens
  CDR3 for alpha chain variable domain of TCR clone 348778 (TRAV1-1, TRAJ15)
CAVGQAGTALIF

SEQ ID NO: 697556 - protein, 16 aa, Homo sapiens
  CDR3 for beta chain variable domain of TCR clone 348778 (TRBV20-1, TRBJ1-4)
CSAPGQGLLTNEKLFF

SEQ ID NO: 697557 - protein, 13 aa, Homo sapiens
  CDR3 for alpha chain variable domain of TCR clone 348779 (TRAV21, TRAJ27)
CAARPGNSGKSTF

SEQ ID NO: 697558 - protein, 14 aa, Homo sapiens
  CDR3 for beta chain variable domain of TCR clone 348779 (TRBV11-2, TRBJ2-7)
CASSLGAGAYEQYF

SEQ ID NO: 697559 - protein, 14 aa, Homo sapiens
  CDR3 for alpha chain variable domain of TCR clone 348780 (TRAV38-1, TRAJ45)
CASHSGGGADGLTF

SEQ ID NO: 697560 - protein, 14 aa, Homo sapiens
  CDR3 for beta chain variable domain of TCR clone 348780 (TRBV4-1, TRBJ2-2)
CASSQAVNTGELFF

SEQ ID NO: 697561 - protein, 17 aa, Homo sapiens
  CDR3 for alpha chain variable domain of TCR clone 348781 (TRAV13-1, TRAJ52)
CAASSCAGGTSYGKLTF

SEQ ID NO: 697562 - protein, 15 aa, Homo sapiens
  CDR3 for beta chain variable domain of TCR clone 348781 (TRBV2, TRBJ2-1)
CASSELAGSYNEQFF

SEQ ID NO: 697563 - protein, 16 aa, Homo sapiens
  CDR3 for alpha chain variable domain of TCR clone 348782 (TRAV26-2, TRAJ45)
CTTASPIGGGADGLTF

SEQ ID NO: 697564 - protein, 20 aa, Homo sapiens
  CDR3 for beta chain variable domain of TCR clone 348782 (TRBV28, TRBJ2-1)
CASTPIGRSPGLPGGNEHFF

SEQ ID NO: 697565 - protein, 14 aa, Homo sapiens
  CDR3 for alpha chain variable domain of TCR clone 348783 (TRAV16, TRAJ54)
CALSLIQGAQKLVF

SEQ ID NO: 697566 - protein, 17 aa, Homo sapiens
  CDR3 for beta chain variable domain of TCR clone 348783 (TRBV11-2, TRBJ2-4)
CASSSVGPGGHRNTQYF

SEQ ID NO: 697567 - protein, 16 aa, Homo sapiens
  CDR3 for alpha chain variable domain of TCR clone 348784 (TRAV26-1, TRAJ32)
CIVRTNYGGATNKLIF

SEQ ID NO: 697568 - protein, 14 aa, Homo sapiens
  CDR3 for beta chain variable domain of TCR clone 348784 (TRBV13, TRBJ2-7)
CASSLKGASYEQYF

SEQ ID NO: 697569 - protein, 17 aa, Homo sapiens
  CDR3 for alpha chain variable domain of TCR clone 348785 (TRAV3, TRAJ38)
CAVRDCLNAGNNRKLIW

SEQ ID NO: 697570 - protein, 13 aa, Homo sapiens
  CDR3 for beta chain variable domain of TCR clone 348785 (TRBV23-1, TRBJ1-4)
CASRGKVNEKLFF

SEQ ID NO: 697571 - protein, 14 aa, Homo sapiens
  CDR3 for alpha chain variable domain of TCR clone 348786 (TRAV12-2, TRAJ13)
CAVKKTGGYQKVTF

SEQ ID NO: 697572 - protein, 15 aa, Homo sapiens
  CDR3 for beta chain variable domain of TCR clone 348786 (TRBV5-1, TRBJ2-1)
CASSPGGLAGNEQFF

SEQ ID NO: 697573 - protein, 12 aa, Homo sapiens
  CDR3 for alpha chain variable domain of TCR clone 348787 (TRAV3, TRAJ20)
CAVRDHDYKLSF

SEQ ID NO: 697574 - protein, 15 aa, Homo sapiens
  CDR3 for beta chain variable domain of TCR clone 348787 (TRBV9, TRBJ1-6)
CASRVAGTGDSPLHF

SEQ ID NO: 697575 - protein, 17 aa, Homo sapiens
  CDR3 for alpha chain variable domain of TCR clone 348788 (TRAV3, TRAJ6)
CAVRDGPRAGGSYIPTV

SEQ ID NO: 697576 - protein, 14 aa, Homo sapiens
  CDR3 for beta chain variable domain of TCR clone 348788 (TRBV6-1, TRBJ1-3)
CASVQGGGGNTIYF

SEQ ID NO: 697577 - protein, 17 aa, Homo sapiens
  CDR3 for alpha chain variable domain of TCR clone 348789 (TRAV2, TRAJ36)
CAVEDRGNWGKQPLLWD

SEQ ID NO: 697578 - protein, 14 aa, Homo sapiens
  CDR3 for beta chain variable domain of TCR clone 348789 (TRBV7-9, TRBJ2-3)
CASSLGTVTDTQYF

SEQ ID NO: 697579 - protein, 17 aa, Homo sapiens
  CDR3 for alpha chain variable domain of TCR clone 348790 (TRAV3, TRAJ6)
CAVRDGPRAGGSYIPTF

SEQ ID NO: 697580 - protein, 13 aa, Homo sapiens
  CDR3 for beta chain variable domain of TCR clone 348790 (TRBV10-2, TRBJ2-6)
CASKSAGANVLTF

SEQ ID NO: 697581 - protein, 11 aa, Homo sapiens
  CDR3 for alpha chain variable domain of TCR clone 348791 (TRAV12-1, TRAJ8)
CVVTGFQKLVF

SEQ ID NO: 697582 - protein, 14 aa, Homo sapiens
  CDR3 for beta chain variable domain of TCR clone 348791 (TRBV19, TRBJ2-1)
CASGKSTQYNERFF

SEQ ID NO: 697583 - protein, 14 aa, Homo sapiens
  CDR3 for alpha chain variable domain of TCR clone 348792 (TRAV12-1, TRAJ42)
CVVIYGGSQGNLIF

SEQ ID NO: 697584 - protein, 12 aa, Homo sapiens
  CDR3 for beta chain variable domain of TCR clone 348792 (TRBV11-2, TRBJ2-4)
CASSSASWSEYF

SEQ ID NO: 697585 - protein, 14 aa, Homo sapiens
  CDR3 for alpha chain variable domain of TCR clone 348793 (TRAV20, TRAJ42)
CAVQAGGSQGNLIF

SEQ ID NO: 697586 - protein, 14 aa, Homo sapiens
  CDR3 for beta chain variable domain of TCR clone 348793 (TRBV25-1, TRBJ1-1)
CASTHLGGNTEAFF

SEQ ID NO: 697587 - protein, 16 aa, Homo sapiens
  CDR3 for alpha chain variable domain of TCR clone 348794 (TRAV3, TRAJ37)
CAGRGKGSGNTGKLIF

SEQ ID NO: 697588 - protein, 15 aa, Homo sapiens
  CDR3 for beta chain variable domain of TCR clone 348794 (TRBV7-9, TRBJ2-2)
CASGPLDTFPGELFF

SEQ ID NO: 697589 - protein, 15 aa, Homo sapiens
  CDR3 for alpha chain variable domain of TCR clone 348795 (TRAV8-2, TRAJ40)
CVVLGTTTGTYKYIF

SEQ ID NO: 697590 - protein, 16 aa, Homo sapiens
  CDR3 for beta chain variable domain of TCR clone 348795 (TRBV7-3, TRBJ2-1)
CASSLEGYRSYNEQFF

SEQ ID NO: 697591 - protein, 14 aa, Homo sapiens
  CDR3 for alpha chain variable domain of TCR clone 348796 (TRAV38-1, TRAJ45)
CASHSGGGADGLSF

SEQ ID NO: 697592 - protein, 13 aa, Homo sapiens
  CDR3 for beta chain variable domain of TCR clone 348796 (TRBV10-3, TRBJ1-2)
CAISERDSYGYTF

SEQ ID NO: 697593 - protein, 12 aa, Homo sapiens
  CDR3 for alpha chain variable domain of TCR clone 348797 (TRAV12-3, TRAJ17)
GAMTLTGNKLNF

SEQ ID NO: 697594 - protein, 15 aa, Homo sapiens
  CDR3 for beta chain variable domain of TCR clone 348797 (TRBV20-1, TRBJ2-7)
CSARDRVSGMDEQYF

SEQ ID NO: 697595 - protein, 15 aa, Homo sapiens
  CDR3 for alpha chain variable domain of TCR clone 348798 (TRAV3, TRAJ17)
WAVRDGPAAGNKLTF

SEQ ID NO: 697596 - protein, 12 aa, Homo sapiens
  CDR3 for beta chain variable domain of TCR clone 348798 (TRBV12-4, TRBJ2-1)
CASSPGRNEQFF

SEQ ID NO: 697597 - protein, 16 aa, Homo sapiens
  CDR3 for alpha chain variable domain of TCR clone 348799 (TRAV12-2, )
CAVEDIQNPDPAVYQL

SEQ ID NO: 697598 - protein, 13 aa, Homo sapiens
  CDR3 for beta chain variable domain of TCR clone 348799 (TRBV7-9, TRBJ2-3)
CASSPGSTDTQYF

SEQ ID NO: 697599 - protein, 11 aa, Homo sapiens
  CDR3 for alpha chain variable domain of TCR clone 348800 (TRAV2, TRAJ21)
CAVFNFNKFYF

SEQ ID NO: 697600 - protein, 15 aa, Homo sapiens
  CDR3 for beta chain variable domain of TCR clone 348800 (TRBV7-3, TRBJ2-1)
CASSPTGGGEVEQFF

SEQ ID NO: 697601 - protein, 19 aa, Homo sapiens
  CDR3 for alpha chain variable domain of TCR clone 348801 (TRAV27, TRAJ26)
CAGEGCPDCPCCPISRTLT

SEQ ID NO: 697602 - protein, 15 aa, Homo sapiens
  CDR3 for beta chain variable domain of TCR clone 348801 (TRBV19, TRBJ2-1)
CASSLAGGPSNEQFF

SEQ ID NO: 697603 - protein, 13 aa, Homo sapiens
  CDR3 for alpha chain variable domain of TCR clone 348802 (TRAV12-2, TRAJ24)
CAVSTDSWGKLQF

SEQ ID NO: 697604 - protein, 15 aa, Homo sapiens
  CDR3 for beta chain variable domain of TCR clone 348802 (TRBV7-2, TRBJ2-2)
CASSPTGANTGELFV

SEQ ID NO: 697605 - protein, 14 aa, Homo sapiens
  CDR3 for alpha chain variable domain of TCR clone 348803 (TRAV23/DV6, TRAJ11)
CAASLESGYSTLTF

SEQ ID NO: 697606 - protein, 13 aa, Homo sapiens
  CDR3 for beta chain variable domain of TCR clone 348803 (TRBV4-1, TRBJ2-5)
CASSLTRGETQFF

SEQ ID NO: 697607 - protein, 17 aa, Homo sapiens
  CDR3 for alpha chain variable domain of TCR clone 348804 (TRAV4, TRAJ13)
CLVGVQGSSGGYQTVTF

SEQ ID NO: 697608 - protein, 13 aa, Homo sapiens
  CDR3 for beta chain variable domain of TCR clone 348804 (TRBV10-3, TRBJ2-7)
CASKLAVNYEQYF

SEQ ID NO: 697609 - protein, 15 aa, Homo sapiens
  CDR3 for alpha chain variable domain of TCR clone 348805 (TRAV25, TRAJ52)
CAGTSGSTSYGKLTF

SEQ ID NO: 697610 - protein, 13 aa, Homo sapiens
  CDR3 for beta chain variable domain of TCR clone 348805 (TRBV12-4, TRBJ1-1)
CASSPGTGFEAFF

SEQ ID NO: 697611 - protein, 12 aa, Homo sapiens
  CDR3 for alpha chain variable domain of TCR clone 348806 (TRAV12-1, TRAJ31)
CVSWNNNARLMF

SEQ ID NO: 697612 - protein, 17 aa, Homo sapiens
  CDR3 for beta chain variable domain of TCR clone 348806 (TRBV28, TRBJ2-5)
CASSTPEGDALQETQYF

SEQ ID NO: 697613 - protein, 13 aa, Homo sapiens
  CDR3 for alpha chain variable domain of TCR clone 348807 (TRAV8-3, TRAJ36)
CAVGATGANNLFF

SEQ ID NO: 697614 - protein, 12 aa, Homo sapiens
  CDR3 for beta chain variable domain of TCR clone 348807 (TRBV11-2, TRBJ2-2)
CASSLPTGELFF

SEQ ID NO: 697615 - protein, 13 aa, Homo sapiens
  CDR3 for alpha chain variable domain of TCR clone 348808 (TRAV27, TRAJ53)
CAGQGGSNYKLTF

SEQ ID NO: 697616 - protein, 13 aa, Homo sapiens
  CDR3 for beta chain variable domain of TCR clone 348808 (TRBV29-1, TRBJ1-1)
CSVEPGFGTEAFF

SEQ ID NO: 697617 - protein, 16 aa, Homo sapiens
  CDR3 for alpha chain variable domain of TCR clone 348809 (TRAV30, TRAJ24)
CGTENVDADSWGQFQF

SEQ ID NO: 697618 - protein, 14 aa, Homo sapiens
  CDR3 for beta chain variable domain of TCR clone 348809 (TRBV12-5, TRBJ2-5)
CASGSRTHQETQYF

SEQ ID NO: 697619 - protein, 10 aa, Homo sapiens
  CDR3 for alpha chain variable domain of TCR clone 348810 (TRAV3, TRAJ30)
CAVREIEIIF

SEQ ID NO: 697620 - protein, 17 aa, Homo sapiens
  CDR3 for beta chain variable domain of TCR clone 348810 (TRBV7-8, TRBJ2-6)
CASSAGTGGAGANVLTF

SEQ ID NO: 697621 - protein, 14 aa, Homo sapiens
  CDR3 for alpha chain variable domain of TCR clone 348811 (TRAV8-4, TRAJ9)
CAVTFNTGGFKTIF

SEQ ID NO: 697622 - protein, 15 aa, Homo sapiens
  CDR3 for beta chain variable domain of TCR clone 348811 (TRBV7-9, TRBJ2-2)
CASSPATGAGGELFF

SEQ ID NO: 697623 - protein, 14 aa, Homo sapiens
  CDR3 for alpha chain variable domain of TCR clone 348812 (TRAV2, TRAJ9)
CAVEDRSGGFKTIF

SEQ ID NO: 697624 - protein, 15 aa, Homo sapiens
  CDR3 for beta chain variable domain of TCR clone 348812 (TRBV7-3, TRBJ2-1)
CASSPTGGGEGEQFF

SEQ ID NO: 697625 - protein, 13 aa, Homo sapiens
  CDR3 for alpha chain variable domain of TCR clone 348813 (TRAV12-3, TRAJ9)
CAMRNTGGFKTIF

SEQ ID NO: 697626 - protein, 13 aa, Homo sapiens
  CDR3 for beta chain variable domain of TCR clone 348813 (TRBV20-1, TRBJ1-6)
CSAPLGVGSPLHF

SEQ ID NO: 697627 - protein, 15 aa, Homo sapiens
  CDR3 for alpha chain variable domain of TCR clone 348814 (TRAV8-4, TRAJ3)
CAVTGENLVQQCFQD

SEQ ID NO: 697628 - protein, 16 aa, Homo sapiens
  CDR3 for beta chain variable domain of TCR clone 348814 (TRBV4-2, TRBJ1-1)
CASSQAGFGRNTEAFF

SEQ ID NO: 697629 - protein, 15 aa, Homo sapiens
  CDR3 for alpha chain variable domain of TCR clone 348815 (TRAV17, TRAJ4)
CATVTWSGGYNKLIF

SEQ ID NO: 697630 - protein, 13 aa, Homo sapiens
  CDR3 for beta chain variable domain of TCR clone 348815 (TRBV6-6, TRBJ2-7)
CASSPKHLAEQYF

SEQ ID NO: 697631 - protein, 15 aa, Homo sapiens
  CDR3 for alpha chain variable domain of TCR clone 348816 (TRAV3, TRAJ35)
CAVRDRTGFGNVLHC

SEQ ID NO: 697632 - protein, 16 aa, Homo sapiens
  CDR3 for beta chain variable domain of TCR clone 348816 (TRBV7-3, TRBJ2-1)
CASSLEGYRSYKEQFF

SEQ ID NO: 697633 - protein, 15 aa, Homo sapiens
  CDR3 for alpha chain variable domain of TCR clone 348817 (TRAV4, TRAJ39)
CLVGPNNNAGNMLTF

SEQ ID NO: 697634 - protein, 14 aa, Homo sapiens
  CDR3 for beta chain variable domain of TCR clone 348817 (TRBV19, TRBJ2-1)
CASPTFVLIGEQFF

SEQ ID NO: 697635 - protein, 15 aa, Homo sapiens
  CDR3 for alpha chain variable domain of TCR clone 348818 (TRAV27, TRAJ38)
CAGRFNAGNNRKMIW

SEQ ID NO: 697636 - protein, 13 aa, Homo sapiens
  CDR3 for beta chain variable domain of TCR clone 348818 (TRBV12-5, TRBJ2-3)
CASQNRGTDTQYF

SEQ ID NO: 697637 - protein, 11 aa, Homo sapiens
  CDR3 for alpha chain variable domain of TCR clone 348819 (TRAV4, TRAJ20)
CLVGDKVTTTS

SEQ ID NO: 697638 - protein, 13 aa, Homo sapiens
  CDR3 for beta chain variable domain of TCR clone 348819 (TRBV10-3, TRBJ2-7)
CAFKLAVNYEQYF

SEQ ID NO: 697639 - protein, 13 aa, Homo sapiens
  CDR3 for alpha chain variable domain of TCR clone 348820 (TRAV12-3, TRAJ9)
CAMRNTGGFKTIF

SEQ ID NO: 697640 - protein, 15 aa, Homo sapiens
  CDR3 for beta chain variable domain of TCR clone 348820 (TRBV11-3, TRBJ2-2)
CASSLGGRPTGELFF

SEQ ID NO: 697641 - protein, 15 aa, Homo sapiens
  CDR3 for alpha chain variable domain of TCR clone 348821 (TRAV20, TRAJ43)
CAVQAGKSSNKDMRF

SEQ ID NO: 697642 - protein, 13 aa, Homo sapiens
  CDR3 for beta chain variable domain of TCR clone 348821 (TRBV27, TRBJ1-1)
CASSLSIGAEAFF

SEQ ID NO: 697643 - protein, 15 aa, Homo sapiens
  CDR3 for alpha chain variable domain of TCR clone 348822 (TRAV27, TRAJ53)
CRAINSGGSNYTLTF

SEQ ID NO: 697644 - protein, 14 aa, Homo sapiens
  CDR3 for beta chain variable domain of TCR clone 348822 (TRBV7-3, TRBJ2-1)
CASSLAGGTNEQFF

SEQ ID NO: 697645 - protein, 12 aa, Homo sapiens
  CDR3 for alpha chain variable domain of TCR clone 348823 (TRAV36/DV7, TRAJ40)
CAVTPEAYKYIF

SEQ ID NO: 697646 - protein, 14 aa, Homo sapiens
  CDR3 for beta chain variable domain of TCR clone 348823 (TRBV2, TRBJ2-7)
CASSLTSGGYEQYF

SEQ ID NO: 697647 - protein, 12 aa, Homo sapiens
  CDR3 for alpha chain variable domain of TCR clone 348824 (TRAV3, TRAJ43)
CAVRDPNNDMRF

SEQ ID NO: 697648 - protein, 17 aa, Homo sapiens
  CDR3 for beta chain variable domain of TCR clone 348824 (TRBV7-8, TRBJ2-6)
CASSDGTGGAGANVLTF

SEQ ID NO: 697649 - protein, 14 aa, Homo sapiens
  CDR3 for alpha chain variable domain of TCR clone 348825 (TRAV8-4, TRAJ13)
CAVTLSWGYQKVNF

SEQ ID NO: 697650 - protein, 16 aa, Homo sapiens
  CDR3 for beta chain variable domain of TCR clone 348825 (TRBV5-7, TRBJ1-4)
CASSPSGGLKTEKLFF

SEQ ID NO: 697651 - protein, 11 aa, Homo sapiens
  CDR3 for alpha chain variable domain of TCR clone 348826 (TRAV2, TRAJ13)
CASGGYPKVTF

SEQ ID NO: 697652 - protein, 16 aa, Homo sapiens
  CDR3 for beta chain variable domain of TCR clone 348826 (TRBV2, TRBJ2-1)
CASSVGGSLSYNEQFF

SEQ ID NO: 697653 - protein, 14 aa, Homo sapiens
  CDR3 for alpha chain variable domain of TCR clone 348827 (TRAV8-1, TRAJ22)
CAAPSSGSARQLTF

SEQ ID NO: 697654 - protein, 16 aa, Homo sapiens
  CDR3 for beta chain variable domain of TCR clone 348827 (TRBV7-3, TRBJ2-2)
CASSLKRGTLSVELFF

SEQ ID NO: 697655 - protein, 12 aa, Homo sapiens
  CDR3 for alpha chain variable domain of TCR clone 348828 (TRAV13-1, TRAJ49)
CAASPMGNQFYF

SEQ ID NO: 697656 - protein, 13 aa, Homo sapiens
  CDR3 for beta chain variable domain of TCR clone 348828 (TRBV19, TRBJ2-7)
CASEGTTTYEQYF

SEQ ID NO: 697657 - protein, 14 aa, Homo sapiens
  CDR3 for alpha chain variable domain of TCR clone 348829 (TRAV14/DV4, TRAJ15)
CAMRRDQAGTALSF

SEQ ID NO: 697658 - protein, 16 aa, Homo sapiens
  CDR3 for beta chain variable domain of TCR clone 348829 (TRBV15, TRBJ2-3)
CATSRDLGIVTDTQYF

SEQ ID NO: 697659 - protein, 13 aa, Homo sapiens
  CDR3 for alpha chain variable domain of TCR clone 348830 (TRAV12-2, TRAJ4)
CAGFSGGYNKLIF

SEQ ID NO: 697660 - protein, 12 aa, Homo sapiens
  CDR3 for beta chain variable domain of TCR clone 348830 (TRBV11-2, TRBJ2-2)
CASSLGGGELFF

SEQ ID NO: 697661 - protein, 15 aa, Homo sapiens
  CDR3 for alpha chain variable domain of TCR clone 348831 (TRAV13-1, TRAJ17)
CAASIERAAGNKLTF

SEQ ID NO: 697662 - protein, 15 aa, Homo sapiens
  CDR3 for beta chain variable domain of TCR clone 348831 (TRBV11-3, TRBJ2-3)
CASLKDGREGDTQYF

SEQ ID NO: 697663 - protein, 14 aa, Homo sapiens
  CDR3 for alpha chain variable domain of TCR clone 348832 (TRAV12-1, TRAJ23)
CVVNIPNQGGKLIF

SEQ ID NO: 697664 - protein, 13 aa, Homo sapiens
  CDR3 for beta chain variable domain of TCR clone 348832 (TRBV7-3, TRBJ1-1)
CASSQDWGAEAFF

SEQ ID NO: 697665 - protein, 11 aa, Homo sapiens
  CDR3 for alpha chain variable domain of TCR clone 348833 (TRAV12-3, TRAJ49)
CAANTGNQFYF

SEQ ID NO: 697666 - protein, 15 aa, Homo sapiens
  CDR3 for beta chain variable domain of TCR clone 348833 (TRBV11-2, TRBJ2-1)
CASSLGTSGPNEQFF

SEQ ID NO: 697667 - protein, 17 aa, Homo sapiens
  CDR3 for alpha chain variable domain of TCR clone 348834 (TRAV13-1, TRAJ31)
CAPRDRPMFGAGTPLVV

SEQ ID NO: 697668 - protein, 12 aa, Homo sapiens
  CDR3 for beta chain variable domain of TCR clone 348834 (TRBV7-9, TRBJ2-7)
CASSLEGYEQYF

SEQ ID NO: 697669 - protein, 13 aa, Homo sapiens
  CDR3 for alpha chain variable domain of TCR clone 348835 (TRAV14/DV4, TRAJ44)
CAMETGTASKLTF

SEQ ID NO: 697670 - protein, 15 aa, Homo sapiens
  CDR3 for beta chain variable domain of TCR clone 348835 (TRBV20-1, TRBJ1-6)
CSARAGGTFNTPLHF

SEQ ID NO: 697671 - protein, 10 aa, Homo sapiens
  CDR3 for alpha chain variable domain of TCR clone 348836 (TRAV30, TRAJ48)
CGIGSEKLTF

SEQ ID NO: 697672 - protein, 14 aa, Homo sapiens
  CDR3 for beta chain variable domain of TCR clone 348836 (TRBV7-6, TRBJ2-3)
CASSVAGGTDTQYF

SEQ ID NO: 697673 - protein, 12 aa, Homo sapiens
  CDR3 for alpha chain variable domain of TCR clone 348837 (TRAV12-2, TRAJ10)
WGVTGGGNKLTF

SEQ ID NO: 697674 - protein, 15 aa, Homo sapiens
  CDR3 for beta chain variable domain of TCR clone 348837 (TRBV12-4, TRBJ2-5)
CASSPPTGLQETQYF

SEQ ID NO: 697675 - protein, 11 aa, Homo sapiens
  CDR3 for alpha chain variable domain of TCR clone 348838 (TRAV2, TRAJ13)
CASGGYQKVTF

SEQ ID NO: 697676 - protein, 12 aa, Homo sapiens
  CDR3 for beta chain variable domain of TCR clone 348838 (TRBV20-1, TRBJ2-1)
CSARLGTDEQFF

SEQ ID NO: 697677 - protein, 19 aa, Homo sapiens
  CDR3 for alpha chain variable domain of TCR clone 348839 (TRAV40, )
CLPIPDIQNPDPAVYQLRD

SEQ ID NO: 697678 - protein, 14 aa, Homo sapiens
  CDR3 for beta chain variable domain of TCR clone 348839 (TRBV7-9, TRBJ2-5)
CASSLAFGQETQYF

SEQ ID NO: 697679 - protein, 16 aa, Homo sapiens
  CDR3 for alpha chain variable domain of TCR clone 348840 (TRAV30, TRAJ24)
CGTENVDADSWGKFQF

SEQ ID NO: 697680 - protein, 14 aa, Homo sapiens
  CDR3 for beta chain variable domain of TCR clone 348840 (TRBV12-5, TRBJ2-5)
CASGSRTHQEAQYF

SEQ ID NO: 697681 - protein, 13 aa, Homo sapiens
  CDR3 for alpha chain variable domain of TCR clone 348841 (TRAV27, TRAJ41)
CAGEGNSGYALNF

SEQ ID NO: 697682 - protein, 12 aa, Homo sapiens
  CDR3 for beta chain variable domain of TCR clone 348841 (TRBV14, TRBJ2-5)
CASSQLKETQYF

SEQ ID NO: 697683 - protein, 16 aa, Homo sapiens
  CDR3 for alpha chain variable domain of TCR clone 348842 (TRAV30, TRAJ24)
CGTEIVDADSWGKFQF

SEQ ID NO: 697684 - protein, 11 aa, Homo sapiens
  CDR3 for beta chain variable domain of TCR clone 348842 (TRBV7-2, TRBJ2-3)
CASSSSDTQYF

SEQ ID NO: 697685 - protein, 11 aa, Homo sapiens
  CDR3 for alpha chain variable domain of TCR clone 348843 (TRAV21, TRAJ34)
CAVTNTDKLIL

SEQ ID NO: 697686 - protein, 17 aa, Homo sapiens
  CDR3 for beta chain variable domain of TCR clone 348843 (TRBV20-1, TRBJ2-1)
CSARSPSGGPPTMSSSS

SEQ ID NO: 697687 - protein, 15 aa, Homo sapiens
  CDR3 for alpha chain variable domain of TCR clone 348844 (TRAV17, TRAJ13)
CATDAESGGYQKVTF

SEQ ID NO: 697688 - protein, 17 aa, Homo sapiens
  CDR3 for beta chain variable domain of TCR clone 348844 (TRBV11-2, TRBJ2-1)
CASSLYPPGVEYNEQFF

SEQ ID NO: 697689 - protein, 13 aa, Homo sapiens
  CDR3 for alpha chain variable domain of TCR clone 348845 (TRAV8-3, TRAJ20)
CDVGRPNDYKLSF

SEQ ID NO: 697690 - protein, 14 aa, Homo sapiens
  CDR3 for beta chain variable domain of TCR clone 348845 (TRBV12-5, TRBJ2-5)
CASGSRTHQETQYF

SEQ ID NO: 697691 - protein, 14 aa, Homo sapiens
  CDR3 for alpha chain variable domain of TCR clone 348846 (TRAV2, TRAJ9)
CAVEDRSGGFKTII

SEQ ID NO: 697692 - protein, 12 aa, Homo sapiens
  CDR3 for beta chain variable domain of TCR clone 348846 (TRBV11-2, TRBJ2-1)
CASSPGNNEQFF

SEQ ID NO: 697693 - protein, 18 aa, Homo sapiens
  CDR3 for alpha chain variable domain of TCR clone 348847 (TRAV2, TRAJ32)
CCLLLCLHYGGATNKLIF

SEQ ID NO: 697694 - protein, 16 aa, Homo sapiens
  CDR3 for beta chain variable domain of TCR clone 348847 (TRBV7-9, TRBJ2-7)
CASSYPDREGGYEQYC

SEQ ID NO: 697695 - protein, 14 aa, Homo sapiens
  CDR3 for alpha chain variable domain of TCR clone 348848 (TRAV12-2, TRAJ13)
CAVEKTGGYQKVTF

SEQ ID NO: 697696 - protein, 14 aa, Homo sapiens
  CDR3 for beta chain variable domain of TCR clone 348848 (TRBV6-5, TRBJ2-2)
CASTEGQETGELFF

SEQ ID NO: 697697 - protein, 14 aa, Homo sapiens
  CDR3 for alpha chain variable domain of TCR clone 348849 (TRAV12-3, TRAJ10)
SHLPLTGGGNKLTF

SEQ ID NO: 697698 - protein, 17 aa, Homo sapiens
  CDR3 for beta chain variable domain of TCR clone 348849 (TRBV4-1, TRBJ2-1)
CASSQGRGGGLYNEQFF

SEQ ID NO: 697699 - protein, 14 aa, Homo sapiens
  CDR3 for alpha chain variable domain of TCR clone 348850 (TRAV23/DV6, TRAJ49)
CAASKSFVGNQFYF

SEQ ID NO: 697700 - protein, 15 aa, Homo sapiens
  CDR3 for beta chain variable domain of TCR clone 348850 (TRBV6-3, TRBJ2-7)
CAGSSPGTVFYEQYF

SEQ ID NO: 697701 - protein, 10 aa, Homo sapiens
  CDR3 for alpha chain variable domain of TCR clone 348851 (TRAV12-3, TRAJ49)
CAMNDDQFDF

SEQ ID NO: 697702 - protein, 16 aa, Homo sapiens
  CDR3 for beta chain variable domain of TCR clone 348851 (TRBV27, TRBJ2-2)
CASSFRGLVRTGELFF

SEQ ID NO: 697703 - protein, 12 aa, Homo sapiens
  CDR3 for alpha chain variable domain of TCR clone 348852 (TRAV13-1, TRAJ21)
CAAKEGFNKFYF

SEQ ID NO: 697704 - protein, 18 aa, Homo sapiens
  CDR3 for beta chain variable domain of TCR clone 348852 (TRBV20-1, TRBJ2-6)
GSAETTPTHGSGANVLTF

SEQ ID NO: 697705 - protein, 20 aa, Homo sapiens
  CDR3 for alpha chain variable domain of TCR clone 348853 (TRAV26-1, TRAJ42)
CCVLLHRQTYYGGSQGNLMF

SEQ ID NO: 697706 - protein, 16 aa, Homo sapiens
  CDR3 for beta chain variable domain of TCR clone 348853 (TRBV7-3, TRBJ2-2)
CASSLKRGTLSGELLF

SEQ ID NO: 697707 - protein, 12 aa, Homo sapiens
  CDR3 for alpha chain variable domain of TCR clone 348854 (TRAV8-3, TRAJ26)
CAGDNYGQNFFF

SEQ ID NO: 697708 - protein, 12 aa, Homo sapiens
  CDR3 for beta chain variable domain of TCR clone 348854 (TRBV11-2, TRBJ2-1)
CASSPGSNEQFF

SEQ ID NO: 697709 - protein, 17 aa, Homo sapiens
  CDR3 for alpha chain variable domain of TCR clone 348855 (TRAV3, TRAJ6)
CAVRDGPRAGGSYIPTF

SEQ ID NO: 697710 - protein, 15 aa, Homo sapiens
  CDR3 for beta chain variable domain of TCR clone 348855 (TRBV7-8, TRBJ1-2)
CASSLVRDGGLGYTF

SEQ ID NO: 697711 - protein, 15 aa, Homo sapiens
  CDR3 for alpha chain variable domain of TCR clone 348856 (TRAV8-4, TRAJ53)
CAVSDGGGSNYKLTV

SEQ ID NO: 697712 - protein, 15 aa, Homo sapiens
  CDR3 for beta chain variable domain of TCR clone 348856 (TRBV19, TRBJ2-5)
CASHGLAGAQETQYF

SEQ ID NO: 697713 - protein, 15 aa, Homo sapiens
  CDR3 for alpha chain variable domain of TCR clone 348857 (TRAV8-3, TRAJ45)
CASSYSGGGADGLTF

SEQ ID NO: 697714 - protein, 15 aa, Homo sapiens
  CDR3 for beta chain variable domain of TCR clone 348857 (TRBV5-1, TRBJ2-1)
CASSPPRAPYNEQFF

SEQ ID NO: 697715 - protein, 14 aa, Homo sapiens
  CDR3 for alpha chain variable domain of TCR clone 348858 (TRAV8-3, TRAJ4)
CAVGAAGGFNKLIF

SEQ ID NO: 697716 - protein, 14 aa, Homo sapiens
  CDR3 for beta chain variable domain of TCR clone 348858 (TRBV4-1, TRBJ1-5)
CASSQGPTNQPQHF

SEQ ID NO: 697717 - protein, 15 aa, Homo sapiens
  CDR3 for alpha chain variable domain of TCR clone 348859 (TRAV16, TRAJ10)
CALEGLTGGGNKITF

SEQ ID NO: 697718 - protein, 16 aa, Homo sapiens
  CDR3 for beta chain variable domain of TCR clone 348859 (TRBV12-4, TRBJ1-5)
CASSRPVGGSNQPQHF

SEQ ID NO: 697719 - protein, 13 aa, Homo sapiens
  CDR3 for alpha chain variable domain of TCR clone 348860 (TRAV3, TRAJ27)
LAVRPLGAGKSTF

SEQ ID NO: 697720 - protein, 13 aa, Homo sapiens
  CDR3 for beta chain variable domain of TCR clone 348860 (TRBV7-9, TRBJ2-3)
CASSPGSTDTQYF

SEQ ID NO: 697721 - protein, 15 aa, Homo sapiens
  CDR3 for alpha chain variable domain of TCR clone 348861 (TRAV21, TRAJ24)
CAARSSTDSWGKLQF

SEQ ID NO: 697722 - protein, 13 aa, Homo sapiens
  CDR3 for beta chain variable domain of TCR clone 348861 (TRBV29-1, TRBJ2-1)
CSVEGGRVNEQFF

SEQ ID NO: 697723 - protein, 14 aa, Homo sapiens
  CDR3 for alpha chain variable domain of TCR clone 348862 (TRAV36/DV7, TRAJ54)
WRPVGVQGAQKLVF

SEQ ID NO: 697724 - protein, 15 aa, Homo sapiens
  CDR3 for beta chain variable domain of TCR clone 348862 (TRBV7-2, TRBJ2-1)
CASSSGLAGGNEQFF

SEQ ID NO: 697725 - protein, 18 aa, Homo sapiens
  CDR3 for alpha chain variable domain of TCR clone 348863 (TRAV21, TRAJ52)
CAVRPSPAGGTSYGKLTF

SEQ ID NO: 697726 - protein, 13 aa, Homo sapiens
  CDR3 for beta chain variable domain of TCR clone 348863 (TRBV2, TRBJ1-5)
CATAGPGKQPQHF

SEQ ID NO: 697727 - protein, 13 aa, Homo sapiens
  CDR3 for alpha chain variable domain of TCR clone 348864 (TRAV35, TRAJ42)
CAGFPGSQGNFIF

SEQ ID NO: 697728 - protein, 14 aa, Homo sapiens
  CDR3 for beta chain variable domain of TCR clone 348864 (TRBV29-1, TRBJ2-2)
CSVLAETNTGELFF

SEQ ID NO: 697729 - protein, 16 aa, Homo sapiens
  CDR3 for alpha chain variable domain of TCR clone 348865 (TRAV12-3, TRAJ53)
CAMSPGSGGSNYKLTF

SEQ ID NO: 697730 - protein, 17 aa, Homo sapiens
  CDR3 for beta chain variable domain of TCR clone 348865 (TRBV28, TRBJ2-5)
CASSTLEGDALQETQYF

SEQ ID NO: 697731 - protein, 11 aa, Homo sapiens
  CDR3 for alpha chain variable domain of TCR clone 348866 (TRAV3, TRAJ21)
CAVGNFNKFYF

SEQ ID NO: 697732 - protein, 16 aa, Homo sapiens
  CDR3 for beta chain variable domain of TCR clone 348866 (TRBV7-2, TRBJ2-6)
CASSGRRAAGANVLTF

SEQ ID NO: 697733 - protein, 15 aa, Homo sapiens
  CDR3 for alpha chain variable domain of TCR clone 348867 (TRAV3, TRAJ45)
CAVRTPWVGADGLTF

SEQ ID NO: 697734 - protein, 16 aa, Homo sapiens
  CDR3 for beta chain variable domain of TCR clone 348867 (TRBV6-1, TRBJ2-2)
CASSFGQGANTGELSF

SEQ ID NO: 697735 - protein, 15 aa, Homo sapiens
  CDR3 for alpha chain variable domain of TCR clone 348868 (TRAV3, TRAJ4)
CAQNMFSGGYNKLIF

SEQ ID NO: 697736 - protein, 16 aa, Homo sapiens
  CDR3 for beta chain variable domain of TCR clone 348868 (TRBV6-1, TRBJ2-1)
CASILRQGSSYNEQFF

SEQ ID NO: 697737 - protein, 16 aa, Homo sapiens
  CDR3 for alpha chain variable domain of TCR clone 348869 (TRAV13-2, TRAJ32)
CAENMNYGGATNKLIF

SEQ ID NO: 697738 - protein, 13 aa, Homo sapiens
  CDR3 for beta chain variable domain of TCR clone 348869 (TRBV7-2, TRBJ2-7)
CASSSPSGSEQYF

SEQ ID NO: 697739 - protein, 11 aa, Homo sapiens
  CDR3 for alpha chain variable domain of TCR clone 348870 (TRAV12-1, TRAJ15)
CVVNAGTALIF

SEQ ID NO: 697740 - protein, 16 aa, Homo sapiens
  CDR3 for beta chain variable domain of TCR clone 348870 (TRBV28, TRBJ2-1)
CASSSRVRDSNNEQFF

SEQ ID NO: 697741 - protein, 12 aa, Homo sapiens
  CDR3 for alpha chain variable domain of TCR clone 348871 (TRAV6, TRAJ34)
CALHRGTDKLIF

SEQ ID NO: 697742 - protein, 16 aa, Homo sapiens
  CDR3 for beta chain variable domain of TCR clone 348871 (TRBV3-1, TRBJ2-5)
CASSRDWASGQETQYF

SEQ ID NO: 697743 - protein, 17 aa, Homo sapiens
  CDR3 for alpha chain variable domain of TCR clone 348872 (TRAV12-3, TRAJ6)
CAMSARGGAGGSYIPTF

SEQ ID NO: 697744 - protein, 14 aa, Homo sapiens
  CDR3 for beta chain variable domain of TCR clone 348872 (TRBV6-1, TRBJ1-3)
CASVQGGGGNTIYF

SEQ ID NO: 697745 - protein, 14 aa, Homo sapiens
  CDR3 for alpha chain variable domain of TCR clone 348873 (TRAV12-2, TRAJ17)
CAVLFKAAGNELTF

SEQ ID NO: 697746 - protein, 16 aa, Homo sapiens
  CDR3 for beta chain variable domain of TCR clone 348873 (TRBV20-1, TRBJ1-4)
CSAPRQGLLTNEKLFF

SEQ ID NO: 697747 - protein, 13 aa, Homo sapiens
  CDR3 for alpha chain variable domain of TCR clone 348874 (TRAV13-1, TRAJ6)
CARGSGGSYIPTF

SEQ ID NO: 697748 - protein, 13 aa, Homo sapiens
  CDR3 for beta chain variable domain of TCR clone 348874 (TRBV27, TRBJ1-1)
CASSLSIGAEAFF

SEQ ID NO: 697749 - protein, 15 aa, Homo sapiens
  CDR3 for alpha chain variable domain of TCR clone 348875 (TRAV8-1, TRAJ6)
CAVNTPPGGSYIPTF

SEQ ID NO: 697750 - protein, 14 aa, Homo sapiens
  CDR3 for beta chain variable domain of TCR clone 348875 (TRBV12-4, TRBJ2-1)
CASSLGQWASEQFF

SEQ ID NO: 697751 - protein, 12 aa, Homo sapiens
  CDR3 for alpha chain variable domain of TCR clone 348876 (TRAV27, TRAJ36)
ASTPAGANNLCF

SEQ ID NO: 697752 - protein, 13 aa, Homo sapiens
  CDR3 for beta chain variable domain of TCR clone 348876 (TRBV7-9, TRBJ2-3)
CASSSGSTDTQYF

SEQ ID NO: 697753 - protein, 14 aa, Homo sapiens
  CDR3 for alpha chain variable domain of TCR clone 348877 (TRAV17, TRAJ57)
CAPDASGGSEKLVF

SEQ ID NO: 697754 - protein, 14 aa, Homo sapiens
  CDR3 for beta chain variable domain of TCR clone 348877 (TRBV4-2, TRBJ2-1)
CASGLDRAYNEQFF

SEQ ID NO: 697755 - protein, 14 aa, Homo sapiens
  CDR3 for alpha chain variable domain of TCR clone 348878 (TRAV36/DV7, TRAJ44)
CCGANTGTAIKLTF

SEQ ID NO: 697756 - protein, 16 aa, Homo sapiens
  CDR3 for beta chain variable domain of TCR clone 348878 (TRBV7-9, TRBJ1-2)
CASSLGFSSGEDGYTF

SEQ ID NO: 697757 - protein, 13 aa, Homo sapiens
  CDR3 for alpha chain variable domain of TCR clone 348879 (TRAV8-3, TRAJ30)
CAVGGWRDDKIIF

SEQ ID NO: 697758 - protein, 14 aa, Homo sapiens
  CDR3 for beta chain variable domain of TCR clone 348879 (TRBV12-5, TRBJ2-5)
CASGSRTHQETQYF

SEQ ID NO: 697759 - protein, 13 aa, Homo sapiens
  CDR3 for alpha chain variable domain of TCR clone 348880 (TRAV8-3, TRAJ42)
CARYGGSQGHLIF

SEQ ID NO: 697760 - protein, 14 aa, Homo sapiens
  CDR3 for beta chain variable domain of TCR clone 348880 (TRBV20-1, TRBJ2-1)
CSALDRGTYNEQFF

SEQ ID NO: 697761 - protein, 16 aa, Homo sapiens
  CDR3 for alpha chain variable domain of TCR clone 348881 (TRAV38-2/DV8, TRAJ45)
CAYRGNSGGGADGLNF

SEQ ID NO: 697762 - protein, 17 aa, Homo sapiens
  CDR3 for beta chain variable domain of TCR clone 348881 (TRBV11-3, TRBJ2-5)
CASSLPGVRGGKETQYF

SEQ ID NO: 697763 - protein, 16 aa, Homo sapiens
  CDR3 for alpha chain variable domain of TCR clone 348882 (TRAV30, TRAJ24)
CGTEIVDADSWGKFQF

SEQ ID NO: 697764 - protein, 13 aa, Homo sapiens
  CDR3 for beta chain variable domain of TCR clone 348882 (TRBV19, TRBJ2-7)
CASSIRSSYEQYF

SEQ ID NO: 697765 - protein, 22 aa, Homo sapiens
  CDR3 for alpha chain variable domain of TCR clone 348883 (TRAV26-1, TRAJ52)
CCVLLHRQSRRGCGTSYGKLTF

SEQ ID NO: 697766 - protein, 13 aa, Homo sapiens
  CDR3 for beta chain variable domain of TCR clone 348883 (TRBV7-3, TRBJ1-2)
CASSLKRGYGYTF

SEQ ID NO: 697767 - protein, 14 aa, Homo sapiens
  CDR3 for alpha chain variable domain of TCR clone 348884 (TRAV8-3, TRAJ13)
CAVARSGGYQKVTF

SEQ ID NO: 697768 - protein, 15 aa, Homo sapiens
  CDR3 for beta chain variable domain of TCR clone 348884 (TRBV7-9, TRBJ1-5)
CASSQGHQPNQPQHF

SEQ ID NO: 697769 - protein, 14 aa, Homo sapiens
  CDR3 for alpha chain variable domain of TCR clone 348885 (TRAV26-2, TRAJ27)
CILRDISDAGKSTF

SEQ ID NO: 697770 - protein, 15 aa, Homo sapiens
  CDR3 for beta chain variable domain of TCR clone 348885 (TRBV10-3, TRBJ2-7)
CATREQGLRSYDQYF

SEQ ID NO: 697771 - protein, 14 aa, Homo sapiens
  CDR3 for alpha chain variable domain of TCR clone 348886 (TRAV2, TRAJ9)
CAVEDRSGGSKTIF

SEQ ID NO: 697772 - protein, 18 aa, Homo sapiens
  CDR3 for beta chain variable domain of TCR clone 348886 (TRBV20-1, TRBJ2-5)
CSQTGDSGRLGGKETQYF

SEQ ID NO: 697773 - protein, 11 aa, Homo sapiens
  CDR3 for alpha chain variable domain of TCR clone 348887 (TRAV12-3, TRAJ20)
CAMSYDYKLSF

SEQ ID NO: 697774 - protein, 17 aa, Homo sapiens
  CDR3 for beta chain variable domain of TCR clone 348887 (TRBV24-1, TRBJ2-1)
CATSDVSTSGTYNEQFF

SEQ ID NO: 697775 - protein, 13 aa, Homo sapiens
  CDR3 for alpha chain variable domain of TCR clone 348888 (TRAV3, TRAJ27)
CAVRPLGAGKSTF

SEQ ID NO: 697776 - protein, 14 aa, Homo sapiens
  CDR3 for beta chain variable domain of TCR clone 348888 (TRBV7-9, TRBJ2-1)
CASSIRRGWDEQFF

SEQ ID NO: 697777 - protein, 21 aa, Homo sapiens
  CDR3 for alpha chain variable domain of TCR clone 348889 (TRAV1-2, TRAJ8)
CLLPLCCRDPDENTGFQKLVF

SEQ ID NO: 697778 - protein, 16 aa, Homo sapiens
  CDR3 for beta chain variable domain of TCR clone 348889 (TRBV7-9, TRBJ2-2)
CASSGFGGANTGELFF

SEQ ID NO: 697779 - protein, 13 aa, Homo sapiens
  CDR3 for alpha chain variable domain of TCR clone 348890 (TRAV8-4, TRAJ36)
CAVSVAGANNLFF

SEQ ID NO: 697780 - protein, 15 aa, Homo sapiens
  CDR3 for beta chain variable domain of TCR clone 348890 (TRBV7-9, TRBJ1-6)
CASSSPGRGNSPLHF

SEQ ID NO: 697781 - protein, 17 aa, Homo sapiens
  CDR3 for alpha chain variable domain of TCR clone 348891 (TRAV3, TRAJ6)
CAVRDGPRAGGSYIPTF

SEQ ID NO: 697782 - protein, 18 aa, Homo sapiens
  CDR3 for beta chain variable domain of TCR clone 348891 (TRBV7-9, TRBJ2-7)
CDSSLTTSGSRRWYEQYF

SEQ ID NO: 697783 - protein, 14 aa, Homo sapiens
  CDR3 for alpha chain variable domain of TCR clone 348892 (TRAV4, TRAJ26)
CLVGPHNYGQNFVF

SEQ ID NO: 697784 - protein, 16 aa, Homo sapiens
  CDR3 for beta chain variable domain of TCR clone 348892 (TRBV7-3, TRBJ2-2)
CASSLKRGTLSGELFF

SEQ ID NO: 697785 - protein, 15 aa, Homo sapiens
  CDR3 for alpha chain variable domain of TCR clone 348893 (TRAV12-1, TRAJ52)
CVGNAGGTSYGKLTF

SEQ ID NO: 697786 - protein, 14 aa, Homo sapiens
  CDR3 for beta chain variable domain of TCR clone 348893 (TRBV7-3, TRBJ2-2)
CASSPDPGGRELFF

SEQ ID NO: 697787 - protein, 13 aa, Homo sapiens
  CDR3 for alpha chain variable domain of TCR clone 348894 (TRAV21, TRAJ20)
CAVGLRVDYKLSF

SEQ ID NO: 697788 - protein, 12 aa, Homo sapiens
  CDR3 for beta chain variable domain of TCR clone 348894 (TRBV5-1, TRBJ2-7)
CASSFRGYEQYF

SEQ ID NO: 697789 - protein, 12 aa, Homo sapiens
  CDR3 for alpha chain variable domain of TCR clone 348895 (TRAV26-1, TRAJ17)
CISKSCRQQANF

SEQ ID NO: 697790 - protein, 16 aa, Homo sapiens
  CDR3 for beta chain variable domain of TCR clone 348895 (TRBV28, TRBJ1-4)
CASSSRTGAANEKLFF

SEQ ID NO: 697791 - protein, 12 aa, Homo sapiens
  CDR3 for alpha chain variable domain of TCR clone 348896 (TRAV8-4, TRAJ43)
SAVRVNNNDMRF

SEQ ID NO: 697792 - protein, 12 aa, Homo sapiens
  CDR3 for beta chain variable domain of TCR clone 348896 (TRBV3-1, TRBJ2-5)
CASSQRGETQYF

SEQ ID NO: 697793 - protein, 15 aa, Homo sapiens
  CDR3 for alpha chain variable domain of TCR clone 348897 (TRAV26-1, TRAJ29)
CIVRVEGSGNTPLVF

SEQ ID NO: 697794 - protein, 16 aa, Homo sapiens
  CDR3 for beta chain variable domain of TCR clone 348897 (TRBV7-9, TRBJ2-3)
CASSPGLTKEADTQYF

SEQ ID NO: 697795 - protein, 12 aa, Homo sapiens
  CDR3 for alpha chain variable domain of TCR clone 348898 (TRAV16, TRAJ27)
CALNNQCRQINL

SEQ ID NO: 697796 - protein, 14 aa, Homo sapiens
  CDR3 for beta chain variable domain of TCR clone 348898 (TRBV11-2, TRBJ1-5)
CASSLDRGRQPQHF

SEQ ID NO: 697797 - protein, 13 aa, Homo sapiens
  CDR3 for alpha chain variable domain of TCR clone 348899 (TRAV13-1, TRAJ5)
YAASDTGRRALTF

SEQ ID NO: 697798 - protein, 14 aa, Homo sapiens
  CDR3 for beta chain variable domain of TCR clone 348899 (TRBV4-2, TRBJ2-1)
CASGLDRAYNEQFF

SEQ ID NO: 697799 - protein, 11 aa, Homo sapiens
  CDR3 for alpha chain variable domain of TCR clone 348900 (TRAV21, TRAJ11)
CAVNGYSTLTF

SEQ ID NO: 697800 - protein, 11 aa, Homo sapiens
  CDR3 for beta chain variable domain of TCR clone 348900 (TRBV19, TRBJ1-1)
CASCIGSEAFF

SEQ ID NO: 697801 - protein, 12 aa, Homo sapiens
  CDR3 for alpha chain variable domain of TCR clone 348901 (TRAV16, TRAJ11)
CSYTIRIQTLTF

SEQ ID NO: 697802 - protein, 17 aa, Homo sapiens
  CDR3 for beta chain variable domain of TCR clone 348901 (TRBV5-1, TRBJ1-5)
CASSLAFLTRGNQPQHF

SEQ ID NO: 697803 - protein, 13 aa, Homo sapiens
  CDR3 for alpha chain variable domain of TCR clone 348902 (TRAV22, TRAJ29)
CAVGGSGNTPLVF

SEQ ID NO: 697804 - protein, 17 aa, Homo sapiens
  CDR3 for beta chain variable domain of TCR clone 348902 (TRBV24-1, TRBJ2-1)
CATSDVSTSGTYNEQFF

SEQ ID NO: 697805 - protein, 16 aa, Homo sapiens
  CDR3 for alpha chain variable domain of TCR clone 348903 (TRAV3, TRAJ10)
CAVRDMRAGGGNKLTF

SEQ ID NO: 697806 - protein, 13 aa, Homo sapiens
  CDR3 for beta chain variable domain of TCR clone 348903 (TRBV6-1, TRBJ1-1)
CASSRQRNTEAFF

SEQ ID NO: 697807 - protein, 14 aa, Homo sapiens
  CDR3 for alpha chain variable domain of TCR clone 348904 (TRAV21, TRAJ15)
CAVSLTQAGTALIF

SEQ ID NO: 697808 - protein, 11 aa, Homo sapiens
  CDR3 for beta chain variable domain of TCR clone 348904 (TRBV20-1, TRBJ2-7)
CSARTSYEQYF

SEQ ID NO: 697809 - protein, 11 aa, Homo sapiens
  CDR3 for alpha chain variable domain of TCR clone 348905 (TRAV12-2, TRAJ33)
CAVGSNYQLIW

SEQ ID NO: 697810 - protein, 14 aa, Homo sapiens
  CDR3 for beta chain variable domain of TCR clone 348905 (TRBV5-5, TRBJ2-7)
CASSLGQGTYEQYF

SEQ ID NO: 697811 - protein, 14 aa, Homo sapiens
  CDR3 for alpha chain variable domain of TCR clone 348906 (TRAV2, TRAJ9)
CAVEDRSGGFKTIF

SEQ ID NO: 697812 - protein, 14 aa, Homo sapiens
  CDR3 for beta chain variable domain of TCR clone 348906 (TRBV18, TRBJ2-7)
CASSPRAGAYEQYF

SEQ ID NO: 697813 - protein, 21 aa, Homo sapiens
  CDR3 for alpha chain variable domain of TCR clone 348907 (TRAV3, TRAJ37)
CAERKGVWQHRQTNLWARDNF

SEQ ID NO: 697814 - protein, 13 aa, Homo sapiens
  CDR3 for beta chain variable domain of TCR clone 348907 (TRBV14, TRBJ2-7)
CASSQDRRYEQYF

SEQ ID NO: 697815 - protein, 18 aa, Homo sapiens
  CDR3 for alpha chain variable domain of TCR clone 348908 (TRAV21, TRAJ52)
CAVRPSPAGGTSYGKLTF

SEQ ID NO: 697816 - protein, 15 aa, Homo sapiens
  CDR3 for beta chain variable domain of TCR clone 348908 (TRBV12-5, TRBJ2-2)
CASGRLGGNTGELFF

SEQ ID NO: 697817 - protein, 12 aa, Homo sapiens
  CDR3 for alpha chain variable domain of TCR clone 348909 (TRAV8-4, TRAJ43)
CAVSGNNNDMRF

SEQ ID NO: 697818 - protein, 17 aa, Homo sapiens
  CDR3 for beta chain variable domain of TCR clone 348909 (TRBV19, TRBJ2-5)
CASSIAAWGTGSGTQYF

SEQ ID NO: 697819 - protein, 10 aa, Homo sapiens
  CDR3 for alpha chain variable domain of TCR clone 348910 (TRAV13-1, TRAJ15)
INQAGTAMIF

SEQ ID NO: 697820 - protein, 14 aa, Homo sapiens
  CDR3 for beta chain variable domain of TCR clone 348910 (TRBV7-9, TRBJ2-1)
CASSDNSGYNEQFF

SEQ ID NO: 697821 - protein, 15 aa, Homo sapiens
  CDR3 for alpha chain variable domain of TCR clone 348911 (TRAV27, TRAJ50)
CAGVGRGTAYDKVIF

SEQ ID NO: 697822 - protein, 14 aa, Homo sapiens
  CDR3 for beta chain variable domain of TCR clone 348911 (TRBV7-2, TRBJ1-1)
CASSFYDLNTEAFC

SEQ ID NO: 697823 - protein, 13 aa, Homo sapiens
  CDR3 for alpha chain variable domain of TCR clone 348912 (TRAV12-2, TRAJ42)
CAVKRGSQGNLIF

SEQ ID NO: 697824 - protein, 13 aa, Homo sapiens
  CDR3 for beta chain variable domain of TCR clone 348912 (TRBV2, TRBJ1-1)
CASRWTVNTEAFF

SEQ ID NO: 697825 - protein, 13 aa, Homo sapiens
  CDR3 for alpha chain variable domain of TCR clone 348913 (TRAV12-2, TRAJ4)
CAVFSGGYNQLIF

SEQ ID NO: 697826 - protein, 13 aa, Homo sapiens
  CDR3 for beta chain variable domain of TCR clone 348913 (TRBV19, TRBJ1-5)
CASSIDRDQPQHF

SEQ ID NO: 697827 - protein, 18 aa, Homo sapiens
  CDR3 for alpha chain variable domain of TCR clone 348914 (TRAV21, TRAJ52)
CAVRPSPAGGTSYGKLTF

SEQ ID NO: 697828 - protein, 16 aa, Homo sapiens
  CDR3 for beta chain variable domain of TCR clone 348914 (TRBV7-7, TRBJ2-1)
CASSLDISSSYNEQFF

SEQ ID NO: 697829 - protein, 11 aa, Homo sapiens
  CDR3 for alpha chain variable domain of TCR clone 348915 (TRAV23/DV6, TRAJ56)
CAAPANSTLTF

SEQ ID NO: 697830 - protein, 14 aa, Homo sapiens
  CDR3 for beta chain variable domain of TCR clone 348915 (TRBV27, TRBJ2-1)
CASSFGREANEQFF

SEQ ID NO: 697831 - protein, 15 aa, Homo sapiens
  CDR3 for alpha chain variable domain of TCR clone 348916 (TRAV21, TRAJ53)
CATLNSGGSNYKLTF

SEQ ID NO: 697832 - protein, 15 aa, Homo sapiens
  CDR3 for beta chain variable domain of TCR clone 348916 (TRBV6-3, TRBJ2-7)
CARSSPGTVFYEQYF

SEQ ID NO: 697833 - protein, 14 aa, Homo sapiens
  CDR3 for alpha chain variable domain of TCR clone 348917 (TRAV4, TRAJ17)
CLVGPRAAGNKLTF

SEQ ID NO: 697834 - protein, 14 aa, Homo sapiens
  CDR3 for beta chain variable domain of TCR clone 348917 (TRBV5-1, TRBJ2-3)
CASRRQTSTDTQYF

SEQ ID NO: 697835 - protein, 14 aa, Homo sapiens
  CDR3 for alpha chain variable domain of TCR clone 348918 (TRAV1-2, TRAJ8)
CAVREDTGFQKLVF

SEQ ID NO: 697836 - protein, 15 aa, Homo sapiens
  CDR3 for beta chain variable domain of TCR clone 348918 (TRBV9, TRBJ1-6)
CGSSVAGTGDSPLHF

SEQ ID NO: 697837 - protein, 16 aa, Homo sapiens
  CDR3 for alpha chain variable domain of TCR clone 348919 (TRAV12-3, TRAJ53)
CAMSAGSGGSNYKLKF

SEQ ID NO: 697838 - protein, 13 aa, Homo sapiens
  CDR3 for beta chain variable domain of TCR clone 348919 (TRBV29-1, TRBJ2-3)
CSVGPRGTDTQYF

SEQ ID NO: 697839 - protein, 21 aa, Homo sapiens
  CDR3 for alpha chain variable domain of TCR clone 348920 (TRAV29/DV5, TRAJ52)
CSVLLYSKREAGGTSYGKLTF

SEQ ID NO: 697840 - protein, 15 aa, Homo sapiens
  CDR3 for beta chain variable domain of TCR clone 348920 (TRBV6-1, TRBJ2-1)
CASSELRGQYNEQFF

SEQ ID NO: 697841 - protein, 17 aa, Homo sapiens
  CDR3 for alpha chain variable domain of TCR clone 348921 (TRAV3, TRAJ6)
CAVRDGPRAGGNYIPTF

SEQ ID NO: 697842 - protein, 16 aa, Homo sapiens
  CDR3 for beta chain variable domain of TCR clone 348921 (TRBV2, TRBJ2-5)
CASSETQGVGEETQYF

SEQ ID NO: 697843 - protein, 14 aa, Homo sapiens
  CDR3 for alpha chain variable domain of TCR clone 348922 (TRAV14/DV4, TRAJ57)
CAMREEGGSEKLVF

SEQ ID NO: 697844 - protein, 17 aa, Homo sapiens
  CDR3 for beta chain variable domain of TCR clone 348922 (TRBV10-3, TRBJ1-2)
CAISETRDRGLEYGYAF

SEQ ID NO: 697845 - protein, 14 aa, Homo sapiens
  CDR3 for alpha chain variable domain of TCR clone 348923 (TRAV12-2, TRAJ13)
CAVKKTGGYQKVTF

SEQ ID NO: 697846 - protein, 13 aa, Homo sapiens
  CDR3 for beta chain variable domain of TCR clone 348923 (TRBV5-7, TRBJ2-3)
CASSLGRTDTQYF

SEQ ID NO: 697847 - protein, 13 aa, Homo sapiens
  CDR3 for alpha chain variable domain of TCR clone 348924 (TRAV24, TRAJ42)
CAFSTGSQGNLIF

SEQ ID NO: 697848 - protein, 15 aa, Homo sapiens
  CDR3 for beta chain variable domain of TCR clone 348924 (TRBV20-1, TRBJ2-7)
CSARDRVSGMDEQYF

SEQ ID NO: 697849 - protein, 17 aa, Homo sapiens
  CDR3 for alpha chain variable domain of TCR clone 348925 (TRAV3, TRAJ6)
CAVRDGPRAGGSNIPTF

SEQ ID NO: 697850 - protein, 15 aa, Homo sapiens
  CDR3 for beta chain variable domain of TCR clone 348925 (TRBV20-1, TRBJ1-1)
CSASWDRFLNTGAFF

SEQ ID NO: 697851 - protein, 15 aa, Homo sapiens
  CDR3 for alpha chain variable domain of TCR clone 348926 (TRAV8-3, TRAJ15)
CAVGAPYQAGTALIF

SEQ ID NO: 697852 - protein, 14 aa, Homo sapiens
  CDR3 for beta chain variable domain of TCR clone 348926 (TRBV20-1, TRBJ2-1)
CSPNDEASYNEQFF

SEQ ID NO: 697853 - protein, 14 aa, Homo sapiens
  CDR3 for alpha chain variable domain of TCR clone 348927 (TRAV12-1, TRAJ12)
CVVISMDSSYKLIF

SEQ ID NO: 697854 - protein, 16 aa, Homo sapiens
  CDR3 for beta chain variable domain of TCR clone 348927 (TRBV20-1, TRBJ1-4)
CSAPGQGLLTNEKLFF

SEQ ID NO: 697855 - protein, 15 aa, Homo sapiens
  CDR3 for alpha chain variable domain of TCR clone 348928 (TRAV38-1, TRAJ58)
CAFMKHGTSGSRLTF

SEQ ID NO: 697856 - protein, 14 aa, Homo sapiens
  CDR3 for beta chain variable domain of TCR clone 348928 (TRBV7-9, TRBJ2-1)
CASSLGGSLNEQFF

SEQ ID NO: 697857 - protein, 12 aa, Homo sapiens
  CDR3 for alpha chain variable domain of TCR clone 348929 (TRAV21, TRAJ31)
CAVWSNNARLMF

SEQ ID NO: 697858 - protein, 16 aa, Homo sapiens
  CDR3 for beta chain variable domain of TCR clone 348929 (TRBV27, TRBJ2-5)
CASSYGPGGQKETQYF

SEQ ID NO: 697859 - protein, 14 aa, Homo sapiens
  CDR3 for alpha chain variable domain of TCR clone 348930 (TRAV8-4, TRAJ13)
CAATRSGGYQKVTF

SEQ ID NO: 697860 - protein, 14 aa, Homo sapiens
  CDR3 for beta chain variable domain of TCR clone 348930 (TRBV7-2, TRBJ1-2)
CASSQTGSTYGYTF

SEQ ID NO: 697861 - protein, 15 aa, Homo sapiens
  CDR3 for alpha chain variable domain of TCR clone 348931 (TRAV12-3, TRAJ6)
CALSATTGGSYIPTF

SEQ ID NO: 697862 - protein, 16 aa, Homo sapiens
  CDR3 for beta chain variable domain of TCR clone 348931 (TRBV20-1, TRBJ1-2)
CSASMGQGVANYGSTF

SEQ ID NO: 697863 - protein, 14 aa, Homo sapiens
  CDR3 for alpha chain variable domain of TCR clone 348932 (TRAV21, TRAJ28)
CAVGSGAGSYQLTF

SEQ ID NO: 697864 - protein, 13 aa, Homo sapiens
  CDR3 for beta chain variable domain of TCR clone 348932 (TRBV29-1, TRBJ2-2)
CSATGVNTGELFF

SEQ ID NO: 697865 - protein, 11 aa, Homo sapiens
  CDR3 for alpha chain variable domain of TCR clone 348933 (TRAV2, TRAJ13)
CASGGYQKVTF

SEQ ID NO: 697866 - protein, 19 aa, Homo sapiens
  CDR3 for beta chain variable domain of TCR clone 348933 (TRBV3-1, TRBJ2-1)
CASSQDVTSGRHSYNEQFF

SEQ ID NO: 697867 - protein, 18 aa, Homo sapiens
  CDR3 for alpha chain variable domain of TCR clone 348934 (TRAV12-3, TRAJ52)
CAMSVGGAGGTSYGKLTF

SEQ ID NO: 697868 - protein, 15 aa, Homo sapiens
  CDR3 for beta chain variable domain of TCR clone 348934 (TRBV7-9, TRBJ2-7)
CASSLDLQGPYEQYF

SEQ ID NO: 697869 - protein, 22 aa, Homo sapiens
  CDR3 for alpha chain variable domain of TCR clone 348935 (TRAV8-3, TRAJ32)
CAVEVVLQTSSSLELALCLLSS

SEQ ID NO: 697870 - protein, 12 aa, Homo sapiens
  CDR3 for beta chain variable domain of TCR clone 348935 (TRBV7-8, TRBJ2-7)
SASSLGDREQYF

SEQ ID NO: 697871 - protein, 15 aa, Homo sapiens
  CDR3 for alpha chain variable domain of TCR clone 348936 (TRAV20, TRAJ43)
CAVQAGKSSNNDMRF

SEQ ID NO: 697872 - protein, 17 aa, Homo sapiens
  CDR3 for beta chain variable domain of TCR clone 348936 (TRBV13, TRBJ2-3)
CASSLSRVAGGRNTQYF

SEQ ID NO: 697873 - protein, 16 aa, Homo sapiens
  CDR3 for alpha chain variable domain of TCR clone 348937 (TRAV3, TRAJ37)
CAVRGKGSGNTGKLIF

SEQ ID NO: 697874 - protein, 13 aa, Homo sapiens
  CDR3 for beta chain variable domain of TCR clone 348937 (TRBV7-3, TRBJ1-1)
CAGSQDWGAEAFF

SEQ ID NO: 697875 - protein, 12 aa, Homo sapiens
  CDR3 for alpha chain variable domain of TCR clone 348938 (TRAV13-2, TRAJ58)
CAERRLDSRLTF

SEQ ID NO: 697876 - protein, 15 aa, Homo sapiens
  CDR3 for beta chain variable domain of TCR clone 348938 (TRBV5-1, TRBJ2-5)
CASSSGRDMVETQYL

SEQ ID NO: 697877 - protein, 15 aa, Homo sapiens
  CDR3 for alpha chain variable domain of TCR clone 348939 (TRAV2, TRAJ44)
CAVEAYTGPASKLTF

SEQ ID NO: 697878 - protein, 17 aa, Homo sapiens
  CDR3 for beta chain variable domain of TCR clone 348939 (TRBV12-4, TRBJ2-1)
CASSPGLAGGRINEQFF

SEQ ID NO: 697879 - protein, 17 aa, Homo sapiens
  CDR3 for alpha chain variable domain of TCR clone 348940 (TRAV4, TRAJ18)
CLVGERSVGSTLGRLYF

SEQ ID NO: 697880 - protein, 15 aa, Homo sapiens
  CDR3 for beta chain variable domain of TCR clone 348940 (TRBV4-2, TRBJ2-4)
CASSPLGAAKNIQYF

SEQ ID NO: 697881 - protein, 18 aa, Homo sapiens
  CDR3 for alpha chain variable domain of TCR clone 348941 (TRAV29/DV5, TRAJ52)
CAAGFRGAGGTSYGKLTF

SEQ ID NO: 697882 - protein, 17 aa, Homo sapiens
  CDR3 for beta chain variable domain of TCR clone 348941 (TRBV7-8, TRBJ2-6)
CASSAGTGGAGANVLTF

SEQ ID NO: 697883 - protein, 15 aa, Homo sapiens
  CDR3 for alpha chain variable domain of TCR clone 348942 (TRAV26-1, TRAJ29)
CIVRVEGSGNTPLVF

SEQ ID NO: 697884 - protein, 14 aa, Homo sapiens
  CDR3 for beta chain variable domain of TCR clone 348942 (TRBV7-9, TRBJ2-3)
CASSLEQGTNTQYF

SEQ ID NO: 697885 - protein, 12 aa, Homo sapiens
  CDR3 for alpha chain variable domain of TCR clone 348943 (TRAV21, TRAJ11)
CAATSGYSTLTF

SEQ ID NO: 697886 - protein, 16 aa, Homo sapiens
  CDR3 for beta chain variable domain of TCR clone 348943 (TRBV6-1, TRBJ2-5)
CASSETLDRGAETQYF

SEQ ID NO: 697887 - protein, 15 aa, Homo sapiens
  CDR3 for alpha chain variable domain of TCR clone 348944 (TRAV12-2, TRAJ43)
CAFDIRFGAGTRLTV

SEQ ID NO: 697888 - protein, 18 aa, Homo sapiens
  CDR3 for beta chain variable domain of TCR clone 348944 (TRBV20-1, TRBJ2-3)
CRASGLAGGPGTTDTQYF

SEQ ID NO: 697889 - protein, 14 aa, Homo sapiens
  CDR3 for alpha chain variable domain of TCR clone 348945 (TRAV17, TRAJ39)
CATDPVRAGNMLTF

SEQ ID NO: 697890 - protein, 16 aa, Homo sapiens
  CDR3 for beta chain variable domain of TCR clone 348945 (TRBV6-5, TRBJ2-1)
CASSETLAGHYNEQFF

SEQ ID NO: 697891 - protein, 12 aa, Homo sapiens
  CDR3 for alpha chain variable domain of TCR clone 348946 (TRAV13-2, TRAJ8)
CAPWLGFQKLVF

SEQ ID NO: 697892 - protein, 12 aa, Homo sapiens
  CDR3 for beta chain variable domain of TCR clone 348946 (TRBV5-1, TRBJ1-2)
CASSQDTYGYTF

SEQ ID NO: 697893 - protein, 15 aa, Homo sapiens
  CDR3 for alpha chain variable domain of TCR clone 348947 (TRAV29/DV5, TRAJ24)
CAASGATDSWGIFQF

SEQ ID NO: 697894 - protein, 12 aa, Homo sapiens
  CDR3 for beta chain variable domain of TCR clone 348947 (TRBV11-2, TRBJ2-2)
CASSLPTGELFF

SEQ ID NO: 697895 - protein, 13 aa, Homo sapiens
  CDR3 for alpha chain variable domain of TCR clone 348948 (TRAV8-3, TRAJ43)
CAVVPYNNNDMRF

SEQ ID NO: 697896 - protein, 16 aa, Homo sapiens
  CDR3 for beta chain variable domain of TCR clone 348948 (TRBV7-2, TRBJ2-5)
GASSPFPTGGEETQYF

SEQ ID NO: 697897 - protein, 21 aa, Homo sapiens
  CDR3 for alpha chain variable domain of TCR clone 348949 (TRAV9-2, )
CALIQIGDIQNPDPAVYQLRD

SEQ ID NO: 697898 - protein, 15 aa, Homo sapiens
  CDR3 for beta chain variable domain of TCR clone 348949 (TRBV25-1, TRBJ1-4)
CASSPGDSTNEKLFF

SEQ ID NO: 697899 - protein, 12 aa, Homo sapiens
  CDR3 for alpha chain variable domain of TCR clone 348950 (TRAV13-1, TRAJ27)
CAAHTNAGKSTF

SEQ ID NO: 697900 - protein, 16 aa, Homo sapiens
  CDR3 for beta chain variable domain of TCR clone 348950 (TRBV28, TRBJ1-5)
CASRTGLQGEGQAQHF

SEQ ID NO: 697901 - protein, 11 aa, Homo sapiens
  CDR3 for alpha chain variable domain of TCR clone 348951 (TRAV21, TRAJ41)
CAVRSGYALNS

SEQ ID NO: 697902 - protein, 13 aa, Homo sapiens
  CDR3 for beta chain variable domain of TCR clone 348951 (TRBV7-2, TRBJ2-5)
CASSQTSVETQYF

SEQ ID NO: 697903 - protein, 14 aa, Homo sapiens
  CDR3 for alpha chain variable domain of TCR clone 348952 (TRAV35, TRAJ22)
CAGLRPGSARQLTF

SEQ ID NO: 697904 - protein, 15 aa, Homo sapiens
  CDR3 for beta chain variable domain of TCR clone 348952 (TRBV12-4, TRBJ2-5)
CASSPPTGLQATRYF

SEQ ID NO: 697905 - protein, 11 aa, Homo sapiens
  CDR3 for alpha chain variable domain of TCR clone 348953 (TRAV3, TRAJ20)
CAVRPSVTTTS

SEQ ID NO: 697906 - protein, 13 aa, Homo sapiens
  CDR3 for beta chain variable domain of TCR clone 348953 (TRBV19, TRBJ2-5)
CASSMGGAGTQYF

SEQ ID NO: 697907 - protein, 13 aa, Homo sapiens
  CDR3 for alpha chain variable domain of TCR clone 348954 (TRAV12-3, TRAJ10)
CAVGTGGGNKLTF

SEQ ID NO: 697908 - protein, 15 aa, Homo sapiens
  CDR3 for beta chain variable domain of TCR clone 348954 (TRBV28, TRBJ2-7)
CASSPGGRGFYEQYF

SEQ ID NO: 697909 - protein, 18 aa, Homo sapiens
  CDR3 for alpha chain variable domain of TCR clone 348955 (TRAV21, TRAJ52)
CAVGPSPAGGTRYGKLTF

SEQ ID NO: 697910 - protein, 17 aa, Homo sapiens
  CDR3 for beta chain variable domain of TCR clone 348955 (TRBV13, TRBJ2-3)
CASSLSRVAGGRNTQYF

SEQ ID NO: 697911 - protein, 17 aa, Homo sapiens
  CDR3 for alpha chain variable domain of TCR clone 348956 (TRAV3, TRAJ6)
CAVRDGPRAGGSYIPTF

SEQ ID NO: 697912 - protein, 13 aa, Homo sapiens
  CDR3 for beta chain variable domain of TCR clone 348956 (TRBV20-1, TRBJ2-3)
CSATSGSRDTQYF

SEQ ID NO: 697913 - protein, 13 aa, Homo sapiens
  CDR3 for alpha chain variable domain of TCR clone 348957 (TRAV16, TRAJ52)
CAYPGTSYGKLTF

SEQ ID NO: 697914 - protein, 13 aa, Homo sapiens
  CDR3 for beta chain variable domain of TCR clone 348957 (TRBV2, TRBJ1-2)
CASTLGTGDGYTF

SEQ ID NO: 697915 - protein, 14 aa, Homo sapiens
  CDR3 for alpha chain variable domain of TCR clone 348958 (TRAV35, TRAJ22)
CAGLRPGSARQLTF

SEQ ID NO: 697916 - protein, 15 aa, Homo sapiens
  CDR3 for beta chain variable domain of TCR clone 348958 (TRBV7-9, TRBJ2-2)
CASSPETGAGGELFF

SEQ ID NO: 697917 - protein, 12 aa, Homo sapiens
  CDR3 for alpha chain variable domain of TCR clone 348959 (TRAV12-1, )
CVVNSWISRTLT

SEQ ID NO: 697918 - protein, 11 aa, Homo sapiens
  CDR3 for beta chain variable domain of TCR clone 348959 (TRBV6-3, TRBJ2-3)
CATGQADTQYC

SEQ ID NO: 697919 - protein, 13 aa, Homo sapiens
  CDR3 for alpha chain variable domain of TCR clone 348960 (TRAV2, TRAJ15)
CAVASQAGTALIF

SEQ ID NO: 697920 - protein, 15 aa, Homo sapiens
  CDR3 for beta chain variable domain of TCR clone 348960 (TRBV27, TRBJ2-1)
CASCNGGGSSNEQFF

SEQ ID NO: 697921 - protein, 13 aa, Homo sapiens
  CDR3 for alpha chain variable domain of TCR clone 348961 (TRAV12-2, TRAJ24)
CAVSTDSWGKLQC

SEQ ID NO: 697922 - protein, 14 aa, Homo sapiens
  CDR3 for beta chain variable domain of TCR clone 348961 (TRBV25-1, TRBJ1-1)
CASTHLGGNTEAFF

SEQ ID NO: 697923 - protein, 15 aa, Homo sapiens
  CDR3 for alpha chain variable domain of TCR clone 348962 (TRAV3, TRAJ5)
CAVRDLDTGRRALPF

SEQ ID NO: 697924 - protein, 15 aa, Homo sapiens
  CDR3 for beta chain variable domain of TCR clone 348962 (TRBV20-1, TRBJ2-1)
CSARSPGGPGNEQFF

SEQ ID NO: 697925 - protein, 10 aa, Homo sapiens
  CDR3 for alpha chain variable domain of TCR clone 348963 (TRAV30, TRAJ48)
CGIGNEKLTF

SEQ ID NO: 697926 - protein, 14 aa, Homo sapiens
  CDR3 for beta chain variable domain of TCR clone 348963 (TRBV20-1, TRBJ1-3)
CSASPTGAGNTIYF

SEQ ID NO: 697927 - protein, 16 aa, Homo sapiens
  CDR3 for alpha chain variable domain of TCR clone 348964 (TRAV3, TRAJ37)
CAVRGKGSGNTGKLIF

SEQ ID NO: 697928 - protein, 16 aa, Homo sapiens
  CDR3 for beta chain variable domain of TCR clone 348964 (TRBV4-1, TRBJ2-7)
CASRPSGGGADNEQYF

SEQ ID NO: 697929 - protein, 17 aa, Homo sapiens
  CDR3 for alpha chain variable domain of TCR clone 348965 (TRAV36/DV7, TRAJ52)
CAVAQRAGGTSYGKLTF

SEQ ID NO: 697930 - protein, 16 aa, Homo sapiens
  CDR3 for beta chain variable domain of TCR clone 348965 (TRBV4-2, TRBJ2-1)
CASSQETATPYNEQFF

SEQ ID NO: 697931 - protein, 11 aa, Homo sapiens
  CDR3 for alpha chain variable domain of TCR clone 348966 (TRAV3, TRAJ32)
CAVREGVMVVL

SEQ ID NO: 697932 - protein, 13 aa, Homo sapiens
  CDR3 for beta chain variable domain of TCR clone 348966 (TRBV2, TRBJ1-1)
CASSEGGNTEAFF

SEQ ID NO: 697933 - protein, 14 aa, Homo sapiens
  CDR3 for alpha chain variable domain of TCR clone 348967 (TRAV39, TRAJ44)
CAVLNTGTASKLTF

SEQ ID NO: 697934 - protein, 15 aa, Homo sapiens
  CDR3 for beta chain variable domain of TCR clone 348967 (TRBV11-2, TRBJ2-2)
CASSLDTGNTGELFF

SEQ ID NO: 697935 - protein, 14 aa, Homo sapiens
  CDR3 for alpha chain variable domain of TCR clone 348968 (TRAV1-2, TRAJ29)
CAVRELTSAAPLVF

SEQ ID NO: 697936 - protein, 14 aa, Homo sapiens
  CDR3 for beta chain variable domain of TCR clone 348968 (TRBV3-1, TRBJ2-5)
CASSQGPDQETQYF

SEQ ID NO: 697937 - protein, 14 aa, Homo sapiens
  CDR3 for alpha chain variable domain of TCR clone 348969 (TRAV3, TRAJ17)
CAVRDAAAGNKLPF

SEQ ID NO: 697938 - protein, 15 aa, Homo sapiens
  CDR3 for beta chain variable domain of TCR clone 348969 (TRBV9, TRBJ1-6)
CASSVAGTGDSPLHF

SEQ ID NO: 697939 - protein, 13 aa, Homo sapiens
  CDR3 for alpha chain variable domain of TCR clone 348970 (TRAV35, TRAJ36)
CAGPRIGANNLFF

SEQ ID NO: 697940 - protein, 14 aa, Homo sapiens
  CDR3 for beta chain variable domain of TCR clone 348970 (TRBV25-1, TRBJ1-1)
CASTHLGGNTEAFF

SEQ ID NO: 697941 - protein, 13 aa, Homo sapiens
  CDR3 for alpha chain variable domain of TCR clone 348971 (TRAV17, TRAJ5)
CAPMDTGRRALTF

SEQ ID NO: 697942 - protein, 15 aa, Homo sapiens
  CDR3 for beta chain variable domain of TCR clone 348971 (TRBV3-1, TRBJ2-1)
CASSQDTSGYNEQFF

SEQ ID NO: 697943 - protein, 16 aa, Homo sapiens
  CDR3 for alpha chain variable domain of TCR clone 348972 (TRAV39, TRAJ32)
CAVDMEYGGATNKLIF

SEQ ID NO: 697944 - protein, 13 aa, Homo sapiens
  CDR3 for beta chain variable domain of TCR clone 348972 (TRBV7-9, TRBJ2-5)
CASLSPGQETQYF

SEQ ID NO: 697945 - protein, 14 aa, Homo sapiens
  CDR3 for alpha chain variable domain of TCR clone 348973 (TRAV12-1, TRAJ6)
CGEHCEGGSYIPTF

SEQ ID NO: 697946 - protein, 15 aa, Homo sapiens
  CDR3 for beta chain variable domain of TCR clone 348973 (TRBV18, TRBJ1-1)
CASSDRGTGDTEAFF

SEQ ID NO: 697947 - protein, 16 aa, Homo sapiens
  CDR3 for alpha chain variable domain of TCR clone 348974 (TRAV8-3, TRAJ42)
CAVGEGYGGSQGNLIF

SEQ ID NO: 697948 - protein, 14 aa, Homo sapiens
  CDR3 for beta chain variable domain of TCR clone 348974 (TRBV7-2, TRBJ2-1)
CASSRGGARNEQFF

SEQ ID NO: 697949 - protein, 14 aa, Homo sapiens
  CDR3 for alpha chain variable domain of TCR clone 348975 (TRAV8-3, TRAJ4)
CAVGAAGGYNKLIF

SEQ ID NO: 697950 - protein, 17 aa, Homo sapiens
  CDR3 for beta chain variable domain of TCR clone 348975 (TRBV28, TRBJ2-7)
CASSPGLAGGDSSEQYF

SEQ ID NO: 697951 - protein, 15 aa, Homo sapiens
  CDR3 for alpha chain variable domain of TCR clone 348976 (TRAV21, TRAJ53)
CATLNSGGSNYKLTF

SEQ ID NO: 697952 - protein, 14 aa, Homo sapiens
  CDR3 for beta chain variable domain of TCR clone 348976 (TRBV15, TRBJ2-5)
CATSIGGLGETHYF

SEQ ID NO: 697953 - protein, 15 aa, Homo sapiens
  CDR3 for alpha chain variable domain of TCR clone 348977 (TRAV3, TRAJ39)
CAVRDRYNAGNMLTF

SEQ ID NO: 697954 - protein, 11 aa, Homo sapiens
  CDR3 for beta chain variable domain of TCR clone 348977 (TRBV12-4, TRBJ2-3)
CASTATDTQYS

SEQ ID NO: 697955 - protein, 15 aa, Homo sapiens
  CDR3 for alpha chain variable domain of TCR clone 348978 (TRAV36/DV7, TRAJ54)
CALEKPVQGAQKLVF

SEQ ID NO: 697956 - protein, 14 aa, Homo sapiens
  CDR3 for beta chain variable domain of TCR clone 348978 (TRBV4-3, TRBJ2-2)
CASSQGHVTGELFF

SEQ ID NO: 697957 - protein, 13 aa, Homo sapiens
  CDR3 for alpha chain variable domain of TCR clone 348979 (TRAV1-2, TRAJ13)
CAMGTGGYQKVTF

SEQ ID NO: 697958 - protein, 14 aa, Homo sapiens
  CDR3 for beta chain variable domain of TCR clone 348979 (TRBV7-2, TRBJ2-5)
CASSTGGELKTQYF

SEQ ID NO: 697959 - protein, 15 aa, Homo sapiens
  CDR3 for alpha chain variable domain of TCR clone 348980 (TRAV21, TRAJ24)
CAARSSTDSWGKLPF

SEQ ID NO: 697960 - protein, 19 aa, Homo sapiens
  CDR3 for beta chain variable domain of TCR clone 348980 (TRBV14, TRBJ2-1)
CASSQDQLWEAPEYNEQFF

SEQ ID NO: 697961 - protein, 13 aa, Homo sapiens
  CDR3 for alpha chain variable domain of TCR clone 348981 (TRAV12-3, TRAJ5)
CAMIYTGRRALTF

SEQ ID NO: 697962 - protein, 13 aa, Homo sapiens
  CDR3 for beta chain variable domain of TCR clone 348981 (TRBV4-2, TRBJ1-1)
CASSQAGNTEAFF

SEQ ID NO: 697963 - protein, 12 aa, Homo sapiens
  CDR3 for alpha chain variable domain of TCR clone 348982 (TRAV8-6, TRAJ52)
CAVRQSYGKLTF

SEQ ID NO: 697964 - protein, 15 aa, Homo sapiens
  CDR3 for beta chain variable domain of TCR clone 348982 (TRBV11-2, TRBJ2-1)
CASSLGPDSYNEQFF

SEQ ID NO: 697965 - protein, 12 aa, Homo sapiens
  CDR3 for alpha chain variable domain of TCR clone 348983 (TRAV12-3, TRAJ17)
CAMTLTGNKLTF

SEQ ID NO: 697966 - protein, 13 aa, Homo sapiens
  CDR3 for beta chain variable domain of TCR clone 348983 (TRBV19, TRBJ2-1)
CASNGGVFSEQFF

SEQ ID NO: 697967 - protein, 11 aa, Homo sapiens
  CDR3 for alpha chain variable domain of TCR clone 348984 (TRAV1-2, TRAJ20)
CAVSNDYKLSF

SEQ ID NO: 697968 - protein, 13 aa, Homo sapiens
  CDR3 for beta chain variable domain of TCR clone 348984 (TRBV18, TRBJ1-1)
CASSGGRNTEAFF

SEQ ID NO: 697969 - protein, 14 aa, Homo sapiens
  CDR3 for alpha chain variable domain of TCR clone 348985 (TRAV12-2, TRAJ44)
CAVNPAGTASKLTF

SEQ ID NO: 697970 - protein, 15 aa, Homo sapiens
  CDR3 for beta chain variable domain of TCR clone 348985 (TRBV5-1, TRBJ2-1)
CASSPPRAPYNEQCF

SEQ ID NO: 697971 - protein, 14 aa, Homo sapiens
  CDR3 for alpha chain variable domain of TCR clone 348986 (TRAV26-1, TRAJ34)
CIVRVAYNTDKLIF

SEQ ID NO: 697972 - protein, 13 aa, Homo sapiens
  CDR3 for beta chain variable domain of TCR clone 348986 (TRBV7-9, TRBJ1-2)
CASSLKQNYGYAF

SEQ ID NO: 697973 - protein, 12 aa, Homo sapiens
  CDR3 for alpha chain variable domain of TCR clone 348987 (TRAV12-1, TRAJ40)
CVVPSGTYKYIF

SEQ ID NO: 697974 - protein, 15 aa, Homo sapiens
  CDR3 for beta chain variable domain of TCR clone 348987 (TRBV12-4, TRBJ2-1)
CASSALSGRNSEQFF

SEQ ID NO: 697975 - protein, 13 aa, Homo sapiens
  CDR3 for alpha chain variable domain of TCR clone 348988 (TRAV1-2, TRAJ9)
CAALYTGGFKTIF

SEQ ID NO: 697976 - protein, 14 aa, Homo sapiens
  CDR3 for beta chain variable domain of TCR clone 348988 (TRBV13, TRBJ2-3)
CASSSGSPTDTQYF

SEQ ID NO: 697977 - protein, 13 aa, Homo sapiens
  CDR3 for alpha chain variable domain of TCR clone 348989 (TRAV36/DV7, TRAJ38)
CVANAGNNRKLIW

SEQ ID NO: 697978 - protein, 14 aa, Homo sapiens
  CDR3 for beta chain variable domain of TCR clone 348989 (TRBV19, TRBJ2-1)
CASPTFVLSGELFF

SEQ ID NO: 697979 - protein, 21 aa, Homo sapiens
  CDR3 for alpha chain variable domain of TCR clone 348990 (TRAV13-1, TRAJ6)
CAARREEATYLHLEEEPALLF

SEQ ID NO: 697980 - protein, 16 aa, Homo sapiens
  CDR3 for beta chain variable domain of TCR clone 348990 (TRBV7-9, TRBJ2-2)
CASSLATGVGTGELFF

SEQ ID NO: 697981 - protein, 15 aa, Homo sapiens
  CDR3 for alpha chain variable domain of TCR clone 348991 (TRAV13-1, TRAJ44)
CAASRGGGTASKLTF

SEQ ID NO: 697982 - protein, 18 aa, Homo sapiens
  CDR3 for beta chain variable domain of TCR clone 348991 (TRBV7-9, TRBJ2-7)
CASSLTTSGSRTWYEQYF

SEQ ID NO: 697983 - protein, 15 aa, Homo sapiens
  CDR3 for alpha chain variable domain of TCR clone 348992 (TRAV29/DV5, TRAJ29)
CAASERSSGNTPLVF

SEQ ID NO: 697984 - protein, 13 aa, Homo sapiens
  CDR3 for beta chain variable domain of TCR clone 348992 (TRBV7-2, TRBJ1-4)
CASSLAGLEKLFF

SEQ ID NO: 697985 - protein, 12 aa, Homo sapiens
  CDR3 for alpha chain variable domain of TCR clone 348993 (TRAV23/DV6, TRAJ18)
CAASMNPRGSTL

SEQ ID NO: 697986 - protein, 15 aa, Homo sapiens
  CDR3 for beta chain variable domain of TCR clone 348993 (TRBV27, TRBJ2-7)
CASSPDQGRLYEQYF

SEQ ID NO: 697987 - protein, 15 aa, Homo sapiens
  CDR3 for alpha chain variable domain of TCR clone 348994 (TRAV27, TRAJ38)
CAGRFNAGNNRKLIW

SEQ ID NO: 697988 - protein, 15 aa, Homo sapiens
  CDR3 for beta chain variable domain of TCR clone 348994 (TRBV28, TRBJ2-7)
CASSPGGRGFYEQYF

SEQ ID NO: 697989 - protein, 16 aa, Homo sapiens
  CDR3 for alpha chain variable domain of TCR clone 348995 (TRAV30, TRAJ24)
CGTEIVDADSWRKFQF

SEQ ID NO: 697990 - protein, 12 aa, Homo sapiens
  CDR3 for beta chain variable domain of TCR clone 348995 (TRBV10-3, TRBJ2-7)
CLQTSVNYEQYF

SEQ ID NO: 697991 - protein, 13 aa, Homo sapiens
  CDR3 for alpha chain variable domain of TCR clone 348996 (TRAV27, TRAJ45)
CRSSGGGADGLTF

SEQ ID NO: 697992 - protein, 13 aa, Homo sapiens
  CDR3 for beta chain variable domain of TCR clone 348996 (TRBV19, TRBJ2-7)
CASSPRQSYEQYF

SEQ ID NO: 697993 - protein, 14 aa, Homo sapiens
  CDR3 for alpha chain variable domain of TCR clone 348997 (TRAV1-2, TRAJ8)
CAVREDTGFQKLIF

SEQ ID NO: 697994 - protein, 16 aa, Homo sapiens
  CDR3 for beta chain variable domain of TCR clone 348997 (TRBV12-5, TRBJ2-5)
CASGPRTSGNQETQYF

SEQ ID NO: 697995 - protein, 14 aa, Homo sapiens
  CDR3 for alpha chain variable domain of TCR clone 348998 (TRAV1-1, TRAJ28)
CAAPSGSGSYQLTF

SEQ ID NO: 697996 - protein, 12 aa, Homo sapiens
  CDR3 for beta chain variable domain of TCR clone 348998 (TRBV7-3, TRBJ2-1)
CASSFINNEQFF

SEQ ID NO: 697997 - protein, 15 aa, Homo sapiens
  CDR3 for alpha chain variable domain of TCR clone 348999 (TRAV27, TRAJ24)
CAGGTSADSWGKLQF

SEQ ID NO: 697998 - protein, 16 aa, Homo sapiens
  CDR3 for beta chain variable domain of TCR clone 348999 (TRBV4-3, TRBJ2-2)
CASSHLQGSGTGELFF

SEQ ID NO: 697999 - protein, 12 aa, Homo sapiens
  CDR3 for alpha chain variable domain of TCR clone 349000 (TRAV13-1, TRAJ49)
CAASPMGSQFYF

SEQ ID NO: 698000 - protein, 13 aa, Homo sapiens
  CDR3 for beta chain variable domain of TCR clone 349000 (TRBV20-1, TRBJ2-2)
CSASAPGTGELFF

SEQ ID NO: 698001 - protein, 15 aa, Homo sapiens
  CDR3 for alpha chain variable domain of TCR clone 349001 (TRAV26-1, TRAJ29)
CIVRVQGLGNTPLVF

SEQ ID NO: 698002 - protein, 14 aa, Homo sapiens
  CDR3 for beta chain variable domain of TCR clone 349001 (TRBV18, TRBJ2-5)
CASSPGVYQETQYC

SEQ ID NO: 698003 - protein, 14 aa, Homo sapiens
  CDR3 for alpha chain variable domain of TCR clone 349002 (TRAV26-1, TRAJ38)
CIADNAGNNRKLSW

SEQ ID NO: 698004 - protein, 16 aa, Homo sapiens
  CDR3 for beta chain variable domain of TCR clone 349002 (TRBV19, TRBJ2-1)
CASSKAGPSSYNEQFF

SEQ ID NO: 698005 - protein, 14 aa, Homo sapiens
  CDR3 for alpha chain variable domain of TCR clone 349003 (TRAV17, TRAJ16)
CATADFSDFQKLLF

SEQ ID NO: 698006 - protein, 15 aa, Homo sapiens
  CDR3 for beta chain variable domain of TCR clone 349003 (TRBV18, TRBJ2-1)
CASSPPSASYNEQFF

SEQ ID NO: 698007 - protein, 15 aa, Homo sapiens
  CDR3 for alpha chain variable domain of TCR clone 349004 (TRAV20, TRAJ4)
CAVRMFSGGYNKLIF

SEQ ID NO: 698008 - protein, 14 aa, Homo sapiens
  CDR3 for beta chain variable domain of TCR clone 349004 (TRBV2, TRBJ2-1)
CASRTGSSYNEQFF

SEQ ID NO: 698009 - protein, 16 aa, Homo sapiens
  CDR3 for alpha chain variable domain of TCR clone 349005 (TRAV23/DV6, TRAJ9)
CAASIGGITGGFKTIF

SEQ ID NO: 698010 - protein, 14 aa, Homo sapiens
  CDR3 for beta chain variable domain of TCR clone 349005 (TRBV6-1, TRBJ2-5)
CASSYAGGEETQYF

SEQ ID NO: 698011 - protein, 11 aa, Homo sapiens
  CDR3 for alpha chain variable domain of TCR clone 349006 (TRAV13-2, TRAJ36)
CAETGADNLLF

SEQ ID NO: 698012 - protein, 13 aa, Homo sapiens
  CDR3 for beta chain variable domain of TCR clone 349006 (TRBV7-9, TRBJ2-4)
CATEGLAGNIQYF

SEQ ID NO: 698013 - protein, 11 aa, Homo sapiens
  CDR3 for alpha chain variable domain of TCR clone 349007 (TRAV2, TRAJ13)
CASGGYQKDTF

SEQ ID NO: 698014 - protein, 14 aa, Homo sapiens
  CDR3 for beta chain variable domain of TCR clone 349007 (TRBV2, TRBJ1-5)
CASSENRGGQPQHF

SEQ ID NO: 698015 - protein, 14 aa, Homo sapiens
  CDR3 for alpha chain variable domain of TCR clone 349008 (TRAV8-4, TRAJ23)
CAVSAPGSGGRLIF

SEQ ID NO: 698016 - protein, 17 aa, Homo sapiens
  CDR3 for beta chain variable domain of TCR clone 349008 (TRBV4-3, TRBJ2-3)
CASSQDPLAGAVDTQYF

SEQ ID NO: 698017 - protein, 11 aa, Homo sapiens
  CDR3 for alpha chain variable domain of TCR clone 349009 (TRAV12-2, TRAJ49)
SALQGGNQFYF

SEQ ID NO: 698018 - protein, 13 aa, Homo sapiens
  CDR3 for beta chain variable domain of TCR clone 349009 (TRBV4-1, TRBJ1-1)
CASSQLGTGEAFF

SEQ ID NO: 698019 - protein, 11 aa, Homo sapiens
  CDR3 for alpha chain variable domain of TCR clone 349010 (TRAV12-3, TRAJ43)
CAMSVSNDMRF

SEQ ID NO: 698020 - protein, 14 aa, Homo sapiens
  CDR3 for beta chain variable domain of TCR clone 349010 (TRBV7-2, TRBJ2-7)
CASSPKSSFYEQYF

SEQ ID NO: 698021 - protein, 14 aa, Homo sapiens
  CDR3 for alpha chain variable domain of TCR clone 349011 (TRAV2, TRAJ37)
CAVDFTSKTGKLIF

SEQ ID NO: 698022 - protein, 14 aa, Homo sapiens
  CDR3 for beta chain variable domain of TCR clone 349011 (TRBV18, TRBJ2-5)
CASSPPGHQETQYF

SEQ ID NO: 698023 - protein, 14 aa, Homo sapiens
  CDR3 for alpha chain variable domain of TCR clone 349012 (TRAV23/DV6, TRAJ6)
CAASRSGGSYIPTF

SEQ ID NO: 698024 - protein, 17 aa, Homo sapiens
  CDR3 for beta chain variable domain of TCR clone 349012 (TRBV20-1, TRBJ2-1)
CSASASGLAGSYSEQFF

SEQ ID NO: 698025 - protein, 14 aa, Homo sapiens
  CDR3 for alpha chain variable domain of TCR clone 349013 (TRAV10, TRAJ15)
CVVSASQAGTALIF

SEQ ID NO: 698026 - protein, 14 aa, Homo sapiens
  CDR3 for beta chain variable domain of TCR clone 349013 (TRBV6-5, TRBJ1-1)
CASRPLRGNTEAFF

SEQ ID NO: 698027 - protein, 15 aa, Homo sapiens
  CDR3 for alpha chain variable domain of TCR clone 349014 (TRAV2, TRAJ11)
CAVEDPNSGYSTLTF

SEQ ID NO: 698028 - protein, 13 aa, Homo sapiens
  CDR3 for beta chain variable domain of TCR clone 349014 (TRBV27, TRBJ1-4)
CASSLMGDEKLFF

SEQ ID NO: 698029 - protein, 19 aa, Homo sapiens
  CDR3 for alpha chain variable domain of TCR clone 349015 (TRAV16, )
CALSGDIQNPDPAVYQLRD

SEQ ID NO: 698030 - protein, 12 aa, Homo sapiens
  CDR3 for beta chain variable domain of TCR clone 349015 (TRBV7-8, TRBJ2-1)
CASSLGHNEQFF

SEQ ID NO: 698031 - protein, 17 aa, Homo sapiens
  CDR3 for alpha chain variable domain of TCR clone 349016 (TRAV3, TRAJ6)
CAVRDGPRSGGSYIPTF

SEQ ID NO: 698032 - protein, 16 aa, Homo sapiens
  CDR3 for beta chain variable domain of TCR clone 349016 (TRBV4-1, TRBJ2-7)
CASSLTAGQATYEQYF

SEQ ID NO: 698033 - protein, 14 aa, Homo sapiens
  CDR3 for alpha chain variable domain of TCR clone 349017 (TRAV12-3, TRAJ10)
SHLPLTGGGNKLTF

SEQ ID NO: 698034 - protein, 14 aa, Homo sapiens
  CDR3 for beta chain variable domain of TCR clone 349017 (TRBV7-2, TRBJ2-7)
CASSPKTSCYEQYF

SEQ ID NO: 698035 - protein, 14 aa, Homo sapiens
  CDR3 for alpha chain variable domain of TCR clone 349018 (TRAV12-2, TRAJ44)
CAVNPAGTASKLTF

SEQ ID NO: 698036 - protein, 16 aa, Homo sapiens
  CDR3 for beta chain variable domain of TCR clone 349018 (TRBV6-1, TRBJ1-2)
CASSGAWQGRSHGYTF

SEQ ID NO: 698037 - protein, 11 aa, Homo sapiens
  CDR3 for alpha chain variable domain of TCR clone 349019 (TRAV2, TRAJ33)
CAVDRNYQLIW

SEQ ID NO: 698038 - protein, 14 aa, Homo sapiens
  CDR3 for beta chain variable domain of TCR clone 349019 (TRBV11-3, TRBJ2-3)
CASSRLARTDTQYF

SEQ ID NO: 698039 - protein, 14 aa, Homo sapiens
  CDR3 for alpha chain variable domain of TCR clone 349020 (TRAV38-2/DV8, TRAJ30)
CAYRSADRDDKIIF

SEQ ID NO: 698040 - protein, 18 aa, Homo sapiens
  CDR3 for beta chain variable domain of TCR clone 349020 (TRBV15, TRBJ2-3)
CATSRDGARSWDTDTQYF

SEQ ID NO: 698041 - protein, 13 aa, Homo sapiens
  CDR3 for alpha chain variable domain of TCR clone 349021 (TRAV38-2/DV8, TRAJ34)
CAYRTWNTDKLIF

SEQ ID NO: 698042 - protein, 14 aa, Homo sapiens
  CDR3 for beta chain variable domain of TCR clone 349021 (TRBV7-3, TRBJ2-1)
CASSLAGGTNEQFF

SEQ ID NO: 698043 - protein, 14 aa, Homo sapiens
  CDR3 for alpha chain variable domain of TCR clone 349022 (TRAV16, TRAJ26)
CALGSANYGQNFVF

SEQ ID NO: 698044 - protein, 16 aa, Homo sapiens
  CDR3 for beta chain variable domain of TCR clone 349022 (TRBV20-1, TRBJ1-4)
CSAPGQGLLTNEKLFF

SEQ ID NO: 698045 - protein, 10 aa, Homo sapiens
  CDR3 for alpha chain variable domain of TCR clone 349023 (TRAV30, TRAJ48)
CGIGNEKLTF

SEQ ID NO: 698046 - protein, 17 aa, Homo sapiens
  CDR3 for beta chain variable domain of TCR clone 349023 (TRBV7-8, TRBJ1-2)
CASSLRPLQGHLYGYTF

SEQ ID NO: 698047 - protein, 15 aa, Homo sapiens
  CDR3 for alpha chain variable domain of TCR clone 349024 (TRAV4, TRAJ8)
CLVGEQHTRFQQLVF

SEQ ID NO: 698048 - protein, 15 aa, Homo sapiens
  CDR3 for beta chain variable domain of TCR clone 349024 (TRBV7-9, TRBJ2-5)
CASSNRDYLQETQYF

SEQ ID NO: 698049 - protein, 13 aa, Homo sapiens
  CDR3 for alpha chain variable domain of TCR clone 349025 (TRAV38-1, TRAJ52)
CAFRGTSYGNLTF

SEQ ID NO: 698050 - protein, 15 aa, Homo sapiens
  CDR3 for beta chain variable domain of TCR clone 349025 (TRBV7-8, TRBJ2-5)
CASSDAAGSQETQYF

SEQ ID NO: 698051 - protein, 14 aa, Homo sapiens
  CDR3 for alpha chain variable domain of TCR clone 349026 (TRAV38-1, TRAJ40)
CALRPTSGTYKYIF

SEQ ID NO: 698052 - protein, 13 aa, Homo sapiens
  CDR3 for beta chain variable domain of TCR clone 349026 (TRBV10-3, TRBJ2-7)
CVSKLAVNYEQYF

SEQ ID NO: 698053 - protein, 12 aa, Homo sapiens
  CDR3 for alpha chain variable domain of TCR clone 349027 (TRAV13-2, TRAJ42)
CAEVGSQGNLIF

SEQ ID NO: 698054 - protein, 13 aa, Homo sapiens
  CDR3 for beta chain variable domain of TCR clone 349027 (TRBV27, TRBJ2-1)
CASSLSRSHEQFF

SEQ ID NO: 698055 - protein, 17 aa, Homo sapiens
  CDR3 for alpha chain variable domain of TCR clone 349028 (TRAV3, TRAJ6)
CAVRDGPRAGGSYIPTF

SEQ ID NO: 698056 - protein, 12 aa, Homo sapiens
  CDR3 for beta chain variable domain of TCR clone 349028 (TRBV12-4, TRBJ2-1)
CASSPGRNEQFF

SEQ ID NO: 698057 - protein, 16 aa, Homo sapiens
  CDR3 for alpha chain variable domain of TCR clone 349029 (TRAV21, TRAJ17)
CAVRPGEEAADNKLTF

SEQ ID NO: 698058 - protein, 16 aa, Homo sapiens
  CDR3 for beta chain variable domain of TCR clone 349029 (TRBV2, TRBJ2-7)
CASSEPWTGPSYEQYF

SEQ ID NO: 698059 - protein, 11 aa, Homo sapiens
  CDR3 for alpha chain variable domain of TCR clone 349030 (TRAV27, TRAJ20)
CAGADDYKLSF

SEQ ID NO: 698060 - protein, 13 aa, Homo sapiens
  CDR3 for beta chain variable domain of TCR clone 349030 (TRBV7-3, TRBJ1-1)
CASSQDWGAEAFF

SEQ ID NO: 698061 - protein, 14 aa, Homo sapiens
  CDR3 for alpha chain variable domain of TCR clone 349031 (TRAV16, TRAJ33)
CSLSAMDSNYQLIW

SEQ ID NO: 698062 - protein, 16 aa, Homo sapiens
  CDR3 for beta chain variable domain of TCR clone 349031 (TRBV12-4, TRBJ2-3)
CASSFPSNTNTDTQCF

SEQ ID NO: 698063 - protein, 16 aa, Homo sapiens
  CDR3 for alpha chain variable domain of TCR clone 349032 (TRAV16, TRAJ42)
CALSGYYGGSQGNLIF

SEQ ID NO: 698064 - protein, 18 aa, Homo sapiens
  CDR3 for beta chain variable domain of TCR clone 349032 (TRBV7-2, TRBJ2-3)
CASSLGLAGGRDTDTQYF

SEQ ID NO: 698065 - protein, 14 aa, Homo sapiens
  CDR3 for alpha chain variable domain of TCR clone 349033 (TRAV1-2, TRAJ8)
CAWREDTGFQKLVF

SEQ ID NO: 698066 - protein, 12 aa, Homo sapiens
  CDR3 for beta chain variable domain of TCR clone 349033 (TRBV7-9, TRBJ2-7)
CASSFGSYEQYF

SEQ ID NO: 698067 - protein, 15 aa, Homo sapiens
  CDR3 for alpha chain variable domain of TCR clone 349034 (TRAV20, TRAJ52)
CAVQAGGTSYGKLTF

SEQ ID NO: 698068 - protein, 17 aa, Homo sapiens
  CDR3 for beta chain variable domain of TCR clone 349034 (TRBV7-9, TRBJ2-5)
CASSTKLAAGGQETQYF

SEQ ID NO: 698069 - protein, 11 aa, Homo sapiens
  CDR3 for alpha chain variable domain of TCR clone 349035 (TRAV2, TRAJ13)
CASGGYQKVTL

SEQ ID NO: 698070 - protein, 13 aa, Homo sapiens
  CDR3 for beta chain variable domain of TCR clone 349035 (TRBV20-1, TRBJ2-2)
CSASAAGTGELFF

SEQ ID NO: 698071 - protein, 15 aa, Homo sapiens
  CDR3 for alpha chain variable domain of TCR clone 349036 (TRAV21, TRAJ53)
CATLNSGGSNYKLTF

SEQ ID NO: 698072 - protein, 13 aa, Homo sapiens
  CDR3 for beta chain variable domain of TCR clone 349036 (TRBV10-3, TRBJ2-1)
CAISEFSGREQFF

SEQ ID NO: 698073 - protein, 17 aa, Homo sapiens
  CDR3 for alpha chain variable domain of TCR clone 349037 (TRAV3, TRAJ6)
CAVSRRTYTGGRYIPTF

SEQ ID NO: 698074 - protein, 18 aa, Homo sapiens
  CDR3 for beta chain variable domain of TCR clone 349037 (TRBV7-2, TRBJ2-3)
CASSLETSRGRKADTQYF

SEQ ID NO: 698075 - protein, 13 aa, Homo sapiens
  CDR3 for alpha chain variable domain of TCR clone 349038 (TRAV27, TRAJ45)
CRSSGGGADGLTF

SEQ ID NO: 698076 - protein, 13 aa, Homo sapiens
  CDR3 for beta chain variable domain of TCR clone 349038 (TRBV5-1, TRBJ2-1)
CASSLGSYNEQFF

SEQ ID NO: 698077 - protein, 12 aa, Homo sapiens
  CDR3 for alpha chain variable domain of TCR clone 349039 (TRAV36/DV7, TRAJ50)
CAVEPENLLRQG

SEQ ID NO: 698078 - protein, 12 aa, Homo sapiens
  CDR3 for beta chain variable domain of TCR clone 349039 (TRBV29-1, TRBJ2-3)
CSVTGGADTQYF

SEQ ID NO: 698079 - protein, 15 aa, Homo sapiens
  CDR3 for alpha chain variable domain of TCR clone 349040 (TRAV14/DV4, TRAJ10)
CAMRELPGGGNKLTF

SEQ ID NO: 698080 - protein, 18 aa, Homo sapiens
  CDR3 for beta chain variable domain of TCR clone 349040 (TRBV7-9, TRBJ2-7)
CASSLTTSGSRTWYEQYF

SEQ ID NO: 698081 - protein, 15 aa, Homo sapiens
  CDR3 for alpha chain variable domain of TCR clone 349041 (TRAV8-2, TRAJ16)
WAVSDGFSDGQKLLF

SEQ ID NO: 698082 - protein, 14 aa, Homo sapiens
  CDR3 for beta chain variable domain of TCR clone 349041 (TRBV7-3, TRBJ1-1)
CASSLGTGYTEAFF

SEQ ID NO: 698083 - protein, 11 aa, Homo sapiens
  CDR3 for alpha chain variable domain of TCR clone 349042 (TRAV23/DV6, TRAJ17)
CARGSCRQPNF

SEQ ID NO: 698084 - protein, 14 aa, Homo sapiens
  CDR3 for beta chain variable domain of TCR clone 349042 (TRBV7-2, TRBJ1-2)
CASSQTGSTYGYTF

SEQ ID NO: 698085 - protein, 11 aa, Homo sapiens
  CDR3 for alpha chain variable domain of TCR clone 349043 (TRAV12-1, TRAJ21)
CVVYNFNKFYF

SEQ ID NO: 698086 - protein, 14 aa, Homo sapiens
  CDR3 for beta chain variable domain of TCR clone 349043 (TRBV9, TRBJ2-4)
CASSPSGTSGFQYF

SEQ ID NO: 698087 - protein, 14 aa, Homo sapiens
  CDR3 for alpha chain variable domain of TCR clone 349044 (TRAV17, TRAJ56)
CATVPAGANSKLTF

SEQ ID NO: 698088 - protein, 13 aa, Homo sapiens
  CDR3 for beta chain variable domain of TCR clone 349044 (TRBV11-2, TRBJ2-7)
CASSLGDSYEQYF

SEQ ID NO: 698089 - protein, 12 aa, Homo sapiens
  CDR3 for alpha chain variable domain of TCR clone 349045 (TRAV26-1, TRAJ13)
CIVSRGYQKVTS

SEQ ID NO: 698090 - protein, 16 aa, Homo sapiens
  CDR3 for beta chain variable domain of TCR clone 349045 (TRBV27, TRBJ2-1)
CASSLSKGFGFDEQFF

SEQ ID NO: 698091 - protein, 14 aa, Homo sapiens
  CDR3 for alpha chain variable domain of TCR clone 349046 (TRAV12-2, TRAJ24)
CAVTPADSWGKLQF

SEQ ID NO: 698092 - protein, 16 aa, Homo sapiens
  CDR3 for beta chain variable domain of TCR clone 349046 (TRBV20-1, TRBJ2-1)
CSAPGLAGSYSDEQFF

SEQ ID NO: 698093 - protein, 16 aa, Homo sapiens
  CDR3 for alpha chain variable domain of TCR clone 349047 (TRAV12-1, TRAJ43)
CVVNPHRFGAGTRLTV

SEQ ID NO: 698094 - protein, 16 aa, Homo sapiens
  CDR3 for beta chain variable domain of TCR clone 349047 (TRBV27, TRBJ2-2)
CASSSTGGGDTGELLF

SEQ ID NO: 698095 - protein, 15 aa, Homo sapiens
  CDR3 for alpha chain variable domain of TCR clone 349048 (TRAV16, TRAJ53)
CALLNSGGSNYKLTF

SEQ ID NO: 698096 - protein, 11 aa, Homo sapiens
  CDR3 for beta chain variable domain of TCR clone 349048 (TRBV4-1, TRBJ2-2)
CASEHTGELFF

SEQ ID NO: 698097 - protein, 12 aa, Homo sapiens
  CDR3 for alpha chain variable domain of TCR clone 349049 (TRAV35, TRAJ54)
CADLQGAQKLVF

SEQ ID NO: 698098 - protein, 13 aa, Homo sapiens
  CDR3 for beta chain variable domain of TCR clone 349049 (TRBV7-9, TRBJ1-2)
CASSLKQNYGYTF

SEQ ID NO: 698099 - protein, 13 aa, Homo sapiens
  CDR3 for alpha chain variable domain of TCR clone 349050 (TRAV16, TRAJ22)
SAMLAGSARQLTF

SEQ ID NO: 698100 - protein, 14 aa, Homo sapiens
  CDR3 for beta chain variable domain of TCR clone 349050 (TRBV7-3, TRBJ2-1)
CASSLAGGTNEQFF

SEQ ID NO: 698101 - protein, 13 aa, Homo sapiens
  CDR3 for alpha chain variable domain of TCR clone 349051 (TRAV36/DV7, TRAJ29)
CAVEPSGNTPLIF

SEQ ID NO: 698102 - protein, 11 aa, Homo sapiens
  CDR3 for beta chain variable domain of TCR clone 349051 (TRBV19, TRBJ2-7)
CASGNSYEQYF

SEQ ID NO: 698103 - protein, 16 aa, Homo sapiens
  CDR3 for alpha chain variable domain of TCR clone 349052 (TRAV26-1, TRAJ53)
CIVRVAMGGSNHKLTF

SEQ ID NO: 698104 - protein, 16 aa, Homo sapiens
  CDR3 for beta chain variable domain of TCR clone 349052 (TRBV28, TRBJ2-7)
CASSLFFETGGPEQYF

SEQ ID NO: 698105 - protein, 13 aa, Homo sapiens
  CDR3 for alpha chain variable domain of TCR clone 349053 (TRAV2, TRAJ15)
CDVASQAGTALIF

SEQ ID NO: 698106 - protein, 15 aa, Homo sapiens
  CDR3 for beta chain variable domain of TCR clone 349053 (TRBV27, TRBJ2-1)
CASSNGGGSSNEQFF

SEQ ID NO: 698107 - protein, 13 aa, Homo sapiens
  CDR3 for alpha chain variable domain of TCR clone 349054 (TRAV29/DV5, TRAJ31)
CAASRNNNVRLMF

SEQ ID NO: 698108 - protein, 14 aa, Homo sapiens
  CDR3 for beta chain variable domain of TCR clone 349054 (TRBV7-9, TRBJ2-2)
CASSLVQDTGELFF

SEQ ID NO: 698109 - protein, 12 aa, Homo sapiens
  CDR3 for alpha chain variable domain of TCR clone 349055 (TRAV8-6, TRAJ36)
CAVSDWLGQTTS

SEQ ID NO: 698110 - protein, 15 aa, Homo sapiens
  CDR3 for beta chain variable domain of TCR clone 349055 (TRBV10-3, TRBJ2-2)
CAISVATSNTWELFF

SEQ ID NO: 698111 - protein, 10 aa, Homo sapiens
  CDR3 for alpha chain variable domain of TCR clone 349056 (TRAV17, TRAJ36)
CATVAGNPFF

SEQ ID NO: 698112 - protein, 12 aa, Homo sapiens
  CDR3 for beta chain variable domain of TCR clone 349056 (TRBV11-2, TRBJ2-4)
CASSSARGSEYF

SEQ ID NO: 698113 - protein, 14 aa, Homo sapiens
  CDR3 for alpha chain variable domain of TCR clone 349057 (TRAV4, TRAJ48)
CLVTANFGNEKLTF

SEQ ID NO: 698114 - protein, 15 aa, Homo sapiens
  CDR3 for beta chain variable domain of TCR clone 349057 (TRBV5-1, TRBJ2-1)
CASSPPRAPYNEQFF

SEQ ID NO: 698115 - protein, 12 aa, Homo sapiens
  CDR3 for alpha chain variable domain of TCR clone 349058 (TRAV3, TRAJ27)
CAVRDKAGKSTF

SEQ ID NO: 698116 - protein, 13 aa, Homo sapiens
  CDR3 for beta chain variable domain of TCR clone 349058 (TRBV7-3, TRBJ2-1)
CASSPGSYNEQFF

SEQ ID NO: 698117 - protein, 13 aa, Homo sapiens
  CDR3 for alpha chain variable domain of TCR clone 349059 (TRAV12-2, TRAJ15)
WAVFNQAGTALIF

SEQ ID NO: 698118 - protein, 15 aa, Homo sapiens
  CDR3 for beta chain variable domain of TCR clone 349059 (TRBV7-8, TRBJ1-5)
CASSRGGGADQPQHF

SEQ ID NO: 698119 - protein, 11 aa, Homo sapiens
  CDR3 for alpha chain variable domain of TCR clone 349060 (TRAV13-1, TRAJ15)
CRSQAGTALIF

SEQ ID NO: 698120 - protein, 14 aa, Homo sapiens
  CDR3 for beta chain variable domain of TCR clone 349060 (TRBV25-1, TRBJ1-1)
CASTHLGGNTEAFF

SEQ ID NO: 698121 - protein, 16 aa, Homo sapiens
  CDR3 for alpha chain variable domain of TCR clone 349061 (TRAV3, TRAJ18)
CAVRDGRGSTLGRLYF

SEQ ID NO: 698122 - protein, 12 aa, Homo sapiens
  CDR3 for beta chain variable domain of TCR clone 349061 (TRBV19, TRBJ1-1)
CASSTTGIEAFF

SEQ ID NO: 698123 - protein, 13 aa, Homo sapiens
  CDR3 for alpha chain variable domain of TCR clone 349062 (TRAV17, TRAJ9)
CATFLTGGFKTIF

SEQ ID NO: 698124 - protein, 16 aa, Homo sapiens
  CDR3 for beta chain variable domain of TCR clone 349062 (TRBV5-5, TRBJ1-4)
CASSPSGGLKTEKLFF

SEQ ID NO: 698125 - protein, 17 aa, Homo sapiens
  CDR3 for alpha chain variable domain of TCR clone 349063 (TRAV3, TRAJ38)
CAVRDCLNAGNNRKLIW

SEQ ID NO: 698126 - protein, 15 aa, Homo sapiens
  CDR3 for beta chain variable domain of TCR clone 349063 (TRBV27, TRBJ2-1)
CASSSGGGSSNEKFF

SEQ ID NO: 698127 - protein, 19 aa, Homo sapiens
  CDR3 for alpha chain variable domain of TCR clone 349064 (TRAV2, TRAJ20)
ILQVRKADAAVYRDCKLSF

SEQ ID NO: 698128 - protein, 14 aa, Homo sapiens
  CDR3 for beta chain variable domain of TCR clone 349064 (TRBV7-2, TRBJ2-7)
CASSLPPGQGPQYF

SEQ ID NO: 698129 - protein, 14 aa, Homo sapiens
  CDR3 for alpha chain variable domain of TCR clone 349065 (TRAV26-1, TRAJ38)
CIADNAGNNRKLSW

SEQ ID NO: 698130 - protein, 13 aa, Homo sapiens
  CDR3 for beta chain variable domain of TCR clone 349065 (TRBV20-1, TRBJ1-1)
CSVRGGGNTEAFF

SEQ ID NO: 698131 - protein, 14 aa, Homo sapiens
  CDR3 for alpha chain variable domain of TCR clone 349066 (TRAV3, TRAJ34)
CAVRAPGNTDKLIF

SEQ ID NO: 698132 - protein, 14 aa, Homo sapiens
  CDR3 for beta chain variable domain of TCR clone 349066 (TRBV2, TRBJ2-3)
CASTAQTSTDTQYF

SEQ ID NO: 698133 - protein, 11 aa, Homo sapiens
  CDR3 for alpha chain variable domain of TCR clone 349067 (TRAV17, TRAJ36)
CAPTGANHLFF

SEQ ID NO: 698134 - protein, 12 aa, Homo sapiens
  CDR3 for beta chain variable domain of TCR clone 349067 (TRBV29-1, TRBJ2-3)
RSVTGGADTQYF

SEQ ID NO: 698135 - protein, 12 aa, Homo sapiens
  CDR3 for alpha chain variable domain of TCR clone 349068 (TRAV4, TRAJ26)
FLVGDYGQNFVF

SEQ ID NO: 698136 - protein, 12 aa, Homo sapiens
  CDR3 for beta chain variable domain of TCR clone 349068 (TRBV11-2, TRBJ2-2)
CASSLGGGELFF

SEQ ID NO: 698137 - protein, 14 aa, Homo sapiens
  CDR3 for alpha chain variable domain of TCR clone 349069 (TRAV26-1, TRAJ38)
CIADNAGNNRKLFW

SEQ ID NO: 698138 - protein, 12 aa, Homo sapiens
  CDR3 for beta chain variable domain of TCR clone 349069 (TRBV29-1, TRBJ2-3)
CSVTGGADTQYF

SEQ ID NO: 698139 - protein, 15 aa, Homo sapiens
  CDR3 for alpha chain variable domain of TCR clone 349070 (TRAV3, TRAJ3)
CAVRDLSSSASKIIF

SEQ ID NO: 698140 - protein, 14 aa, Homo sapiens
  CDR3 for beta chain variable domain of TCR clone 349070 (TRBV19, TRBJ2-1)
CASPTFVLSGEQFF

SEQ ID NO: 698141 - protein, 13 aa, Homo sapiens
  CDR3 for alpha chain variable domain of TCR clone 349071 (TRAV2, TRAJ40)
CAVVPSGTYKYIF

SEQ ID NO: 698142 - protein, 14 aa, Homo sapiens
  CDR3 for beta chain variable domain of TCR clone 349071 (TRBV19, TRBJ2-1)
CASPTFVLSGEQLF

SEQ ID NO: 698143 - protein, 15 aa, Homo sapiens
  CDR3 for alpha chain variable domain of TCR clone 349072 (TRAV21, TRAJ24)
CAARSSTDSWGKLQF

SEQ ID NO: 698144 - protein, 16 aa, Homo sapiens
  CDR3 for beta chain variable domain of TCR clone 349072 (TRBV27, TRBJ2-7)
CASSSERRDSAYEQYF

SEQ ID NO: 698145 - protein, 14 aa, Homo sapiens
  CDR3 for alpha chain variable domain of TCR clone 349073 (TRAV17, TRAJ42)
CATDAPGSQGNLIF

SEQ ID NO: 698146 - protein, 15 aa, Homo sapiens
  CDR3 for beta chain variable domain of TCR clone 349073 (TRBV12-4, TRBJ2-5)
CASSLGGQGRETQYF

SEQ ID NO: 698147 - protein, 14 aa, Homo sapiens
  CDR3 for alpha chain variable domain of TCR clone 349074 (TRAV26-1, TRAJ5)
CIVRVRFSRRALTF

SEQ ID NO: 698148 - protein, 17 aa, Homo sapiens
  CDR3 for beta chain variable domain of TCR clone 349074 (TRBV29-1, TRBJ2-3)
CSVEVLAGETSTDTQYF

SEQ ID NO: 698149 - protein, 11 aa, Homo sapiens
  CDR3 for alpha chain variable domain of TCR clone 349075 (TRAV1-2, TRAJ20)
CAVSNDSKLSF

SEQ ID NO: 698150 - protein, 16 aa, Homo sapiens
  CDR3 for beta chain variable domain of TCR clone 349075 (TRBV29-1, TRBJ2-6)
CSVEDITYSGANVLTF

SEQ ID NO: 698151 - protein, 13 aa, Homo sapiens
  CDR3 for alpha chain variable domain of TCR clone 349076 (TRAV30, TRAJ39)
CGTEKNAGNMHTF

SEQ ID NO: 698152 - protein, 12 aa, Homo sapiens
  CDR3 for beta chain variable domain of TCR clone 349076 (TRBV12-4, TRBJ2-5)
CASRSAQETQYF

SEQ ID NO: 698153 - protein, 14 aa, Homo sapiens
  CDR3 for alpha chain variable domain of TCR clone 349077 (TRAV23/DV6, TRAJ13)
CAASETGGYQKVTF

SEQ ID NO: 698154 - protein, 16 aa, Homo sapiens
  CDR3 for beta chain variable domain of TCR clone 349077 (TRBV5-1, TRBJ1-3)
CASSPLAPSSGNTIYF

SEQ ID NO: 698155 - protein, 14 aa, Homo sapiens
  CDR3 for alpha chain variable domain of TCR clone 349078 (TRAV16, TRAJ54)
CALSGVQGAKKLVF

SEQ ID NO: 698156 - protein, 15 aa, Homo sapiens
  CDR3 for beta chain variable domain of TCR clone 349078 (TRBV18, TRBJ2-2)
CASSTSGLHTGELFF

SEQ ID NO: 698157 - protein, 16 aa, Homo sapiens
  CDR3 for alpha chain variable domain of TCR clone 349079 (TRAV30, TRAJ24)
CGTEIVDADRWGKFQF

SEQ ID NO: 698158 - protein, 15 aa, Homo sapiens
  CDR3 for beta chain variable domain of TCR clone 349079 (TRBV15, TRBJ1-5)
CATSRDPVSNQPQHF

SEQ ID NO: 698159 - protein, 16 aa, Homo sapiens
  CDR3 for alpha chain variable domain of TCR clone 349080 (TRAV12-1, TRAJ12)
CVVNTLLMDSSDKLIF

SEQ ID NO: 698160 - protein, 13 aa, Homo sapiens
  CDR3 for beta chain variable domain of TCR clone 349080 (TRBV11-2, TRBJ2-1)
CASSSEAYNEQFF

SEQ ID NO: 698161 - protein, 19 aa, Homo sapiens
  CDR3 for alpha chain variable domain of TCR clone 349081 (TRAV8-3, TRAJ8)
LSTSVLWDPMNTGFQKLVF

SEQ ID NO: 698162 - protein, 13 aa, Homo sapiens
  CDR3 for beta chain variable domain of TCR clone 349081 (TRBV10-2, TRBJ2-3)
CASSESGDHTQYL

SEQ ID NO: 698163 - protein, 14 aa, Homo sapiens
  CDR3 for alpha chain variable domain of TCR clone 349082 (TRAV1-2, TRAJ8)
CAVREDTGFQKLVF

SEQ ID NO: 698164 - protein, 12 aa, Homo sapiens
  CDR3 for beta chain variable domain of TCR clone 349082 (TRBV2, TRBJ2-1)
CAYVPPGNEQFF

SEQ ID NO: 698165 - protein, 13 aa, Homo sapiens
  CDR3 for alpha chain variable domain of TCR clone 349083 (TRAV26-1, TRAJ34)
CIVRPWITDKLIF

SEQ ID NO: 698166 - protein, 14 aa, Homo sapiens
  CDR3 for beta chain variable domain of TCR clone 349083 (TRBV12-4, TRBJ1-4)
CASSRQGANEKLSF

SEQ ID NO: 698167 - protein, 10 aa, Homo sapiens
  CDR3 for alpha chain variable domain of TCR clone 349084 (TRAV21, TRAJ31)
CVVDNARLMF

SEQ ID NO: 698168 - protein, 13 aa, Homo sapiens
  CDR3 for beta chain variable domain of TCR clone 349084 (TRBV4-1, TRBJ1-1)
CASSRKMNTEAFF

SEQ ID NO: 698169 - protein, 12 aa, Homo sapiens
  CDR3 for alpha chain variable domain of TCR clone 349085 (TRAV13-2, TRAJ39)
CAESREGNMLTF

SEQ ID NO: 698170 - protein, 15 aa, Homo sapiens
  CDR3 for beta chain variable domain of TCR clone 349085 (TRBV10-2, TRBJ2-6)
CVSSEQGTGANVLTF

SEQ ID NO: 698171 - protein, 14 aa, Homo sapiens
  CDR3 for alpha chain variable domain of TCR clone 349086 (TRAV1-2, TRAJ8)
CAVREDPGSQKLVF

SEQ ID NO: 698172 - protein, 15 aa, Homo sapiens
  CDR3 for beta chain variable domain of TCR clone 349086 (TRBV7-2, TRBJ1-2)
CASSLVSGGDYGYTF

SEQ ID NO: 698173 - protein, 15 aa, Homo sapiens
  CDR3 for alpha chain variable domain of TCR clone 349087 (TRAV17, TRAJ4)
CATGTWSGGYNKLIF

SEQ ID NO: 698174 - protein, 14 aa, Homo sapiens
  CDR3 for beta chain variable domain of TCR clone 349087 (TRBV5-1, TRBJ2-3)
CASSRGQGGGTQYF

SEQ ID NO: 698175 - protein, 12 aa, Homo sapiens
  CDR3 for alpha chain variable domain of TCR clone 349088 (TRAV1-1, TRAJ30)
CAVRGRDDKIII

SEQ ID NO: 698176 - protein, 14 aa, Homo sapiens
  CDR3 for beta chain variable domain of TCR clone 349088 (TRBV6-1, TRBJ1-3)
CASVQGGGGNTIYF

SEQ ID NO: 698177 - protein, 16 aa, Homo sapiens
  CDR3 for alpha chain variable domain of TCR clone 349089 (TRAV38-1, TRAJ37)
CAFMKYGGGNTGKLIF

SEQ ID NO: 698178 - protein, 14 aa, Homo sapiens
  CDR3 for beta chain variable domain of TCR clone 349089 (TRBV13, TRBJ2-7)
CASSLKGASYEQYF

SEQ ID NO: 698179 - protein, 15 aa, Homo sapiens
  CDR3 for alpha chain variable domain of TCR clone 349090 (TRAV3, TRAJ22)
CAVRDRGGSARQLTF

SEQ ID NO: 698180 - protein, 15 aa, Homo sapiens
  CDR3 for beta chain variable domain of TCR clone 349090 (TRBV7-2, TRBJ1-2)
CASSITWTGNYGYTF

SEQ ID NO: 698181 - protein, 16 aa, Homo sapiens
  CDR3 for alpha chain variable domain of TCR clone 349091 (TRAV12-1, TRAJ42)
CVVTPYYGGSQGNLIF

SEQ ID NO: 698182 - protein, 16 aa, Homo sapiens
  CDR3 for beta chain variable domain of TCR clone 349091 (TRBV24-1, TRBJ2-3)
CATSDPGTGATDTQYF

SEQ ID NO: 698183 - protein, 14 aa, Homo sapiens
  CDR3 for alpha chain variable domain of TCR clone 349092 (TRAV17, TRAJ31)
CATDAEDNNARLMF

SEQ ID NO: 698184 - protein, 12 aa, Homo sapiens
  CDR3 for beta chain variable domain of TCR clone 349092 (TRBV28, TRBJ2-3)
CASSLYRDTQYF

SEQ ID NO: 698185 - protein, 23 aa, Homo sapiens
  CDR3 for alpha chain variable domain of TCR clone 349093 (TRAV12-2, TRAJ43)
SLLIRDSQPSDSATYLCAFDMRF

SEQ ID NO: 698186 - protein, 15 aa, Homo sapiens
  CDR3 for beta chain variable domain of TCR clone 349093 (TRBV9, TRBJ1-6)
CASSVAGTGDSPHHF

SEQ ID NO: 698187 - protein, 13 aa, Homo sapiens
  CDR3 for alpha chain variable domain of TCR clone 349094 (TRAV12-2, TRAJ20)
CAVYPSNDYKLIF

SEQ ID NO: 698188 - protein, 15 aa, Homo sapiens
  CDR3 for beta chain variable domain of TCR clone 349094 (TRBV27, TRBJ2-5)
CASSLYPRGGETQYF

SEQ ID NO: 698189 - protein, 17 aa, Homo sapiens
  CDR3 for alpha chain variable domain of TCR clone 349095 (TRAV13-1, TRAJ31)
CAPRDRLMFGDGTQLVV

SEQ ID NO: 698190 - protein, 13 aa, Homo sapiens
  CDR3 for beta chain variable domain of TCR clone 349095 (TRBV7-7, TRBJ2-3)
CASSLSRADTQYF

SEQ ID NO: 698191 - protein, 13 aa, Homo sapiens
  CDR3 for alpha chain variable domain of TCR clone 349096 (TRAV2, TRAJ15)
CAVASQAGTALIF

SEQ ID NO: 698192 - protein, 13 aa, Homo sapiens
  CDR3 for beta chain variable domain of TCR clone 349096 (TRBV20-1, TRBJ1-1)
CSAPLGGGTEAFV

SEQ ID NO: 698193 - protein, 13 aa, Homo sapiens
  CDR3 for alpha chain variable domain of TCR clone 349097 (TRAV12-3, TRAJ31)
CAMSANNNARRMF

SEQ ID NO: 698194 - protein, 16 aa, Homo sapiens
  CDR3 for beta chain variable domain of TCR clone 349097 (TRBV7-9, TRBJ1-2)
CASSLGFSSGEDGYTF

SEQ ID NO: 698195 - protein, 15 aa, Homo sapiens
  CDR3 for alpha chain variable domain of TCR clone 349098 (TRAV12-3, TRAJ13)
CAMSARSGGYQKVTF

SEQ ID NO: 698196 - protein, 21 aa, Homo sapiens
  CDR3 for beta chain variable domain of TCR clone 349098 (TRBV3-1, TRBJ2-7)
CISVPAAKRGGGRSWHYEQYF

SEQ ID NO: 698197 - protein, 12 aa, Homo sapiens
  CDR3 for alpha chain variable domain of TCR clone 349099 (TRAV12-1, TRAJ40)
CVVYSGTYKYIF

SEQ ID NO: 698198 - protein, 15 aa, Homo sapiens
  CDR3 for beta chain variable domain of TCR clone 349099 (TRBV28, TRBJ2-1)
CASSIIAGGRSEQFF

SEQ ID NO: 698199 - protein, 11 aa, Homo sapiens
  CDR3 for alpha chain variable domain of TCR clone 349100 (TRAV12-1, TRAJ34)
CVVNKGRELIF

SEQ ID NO: 698200 - protein, 13 aa, Homo sapiens
  CDR3 for beta chain variable domain of TCR clone 349100 (TRBV4-2, TRBJ1-1)
CASSQAGNTEAFF

SEQ ID NO: 698201 - protein, 14 aa, Homo sapiens
  CDR3 for alpha chain variable domain of TCR clone 349101 (TRAV8-4, TRAJ11)
CAVSGGVGYSTLTF

SEQ ID NO: 698202 - protein, 14 aa, Homo sapiens
  CDR3 for beta chain variable domain of TCR clone 349101 (TRBV7-2, TRBJ2-7)
CASSPKTSFYEQYF

SEQ ID NO: 698203 - protein, 13 aa, Homo sapiens
  CDR3 for alpha chain variable domain of TCR clone 349102 (TRAV23/DV6, TRAJ26)
CAATYNYGQNFVF

SEQ ID NO: 698204 - protein, 14 aa, Homo sapiens
  CDR3 for beta chain variable domain of TCR clone 349102 (TRBV11-3, TRBJ1-2)
CDSSLGSGTYGYTF

SEQ ID NO: 698205 - protein, 14 aa, Homo sapiens
  CDR3 for alpha chain variable domain of TCR clone 349103 (TRAV12-3, TRAJ29)
CAMSPYSGNTPLVF

SEQ ID NO: 698206 - protein, 15 aa, Homo sapiens
  CDR3 for beta chain variable domain of TCR clone 349103 (TRBV19, TRBJ1-1)
CASTSGQIQNTEAFF

SEQ ID NO: 698207 - protein, 15 aa, Homo sapiens
  CDR3 for alpha chain variable domain of TCR clone 349104 (TRAV35, TRAJ40)
CAGQLGTSGNYKYIF

SEQ ID NO: 698208 - protein, 14 aa, Homo sapiens
  CDR3 for beta chain variable domain of TCR clone 349104 (TRBV7-3, TRBJ2-1)
CASSVAGGTNEQFF

SEQ ID NO: 698209 - protein, 15 aa, Homo sapiens
  CDR3 for alpha chain variable domain of TCR clone 349105 (TRAV17, TRAJ45)
CATAYSGGGADGLTF

SEQ ID NO: 698210 - protein, 14 aa, Homo sapiens
  CDR3 for beta chain variable domain of TCR clone 349105 (TRBV4-2, TRBJ2-1)
CASGLDRAYNEQFF

SEQ ID NO: 698211 - protein, 15 aa, Homo sapiens
  CDR3 for alpha chain variable domain of TCR clone 349106 (TRAV17, TRAJ22)
CATAPISGSARQLTF

SEQ ID NO: 698212 - protein, 13 aa, Homo sapiens
  CDR3 for beta chain variable domain of TCR clone 349106 (TRBV11-2, TRBJ1-6)
CASSLAGTSPLHF

SEQ ID NO: 698213 - protein, 11 aa, Homo sapiens
  CDR3 for alpha chain variable domain of TCR clone 349107 (TRAV8-1, TRAJ43)
RAVTNDMRFGA

SEQ ID NO: 698214 - protein, 15 aa, Homo sapiens
  CDR3 for beta chain variable domain of TCR clone 349107 (TRBV4-1, TRBJ1-4)
CASSDTGGTNEKLFF

SEQ ID NO: 698215 - protein, 10 aa, Homo sapiens
  CDR3 for alpha chain variable domain of TCR clone 349108 (TRAV38-2/DV8, TRAJ40)
CASGTYKYIF

SEQ ID NO: 698216 - protein, 13 aa, Homo sapiens
  CDR3 for beta chain variable domain of TCR clone 349108 (TRBV10-2, TRBJ2-7)
CASGASGGYEQYF

SEQ ID NO: 698217 - protein, 20 aa, Homo sapiens
  CDR3 for alpha chain variable domain of TCR clone 349109 (TRAV12-1, TRAJ13)
CVVNKRGEFWGLPESYLWNC

SEQ ID NO: 698218 - protein, 17 aa, Homo sapiens
  CDR3 for beta chain variable domain of TCR clone 349109 (TRBV28, TRBJ2-5)
CASSTPEGDALQETQYF

SEQ ID NO: 698219 - protein, 13 aa, Homo sapiens
  CDR3 for alpha chain variable domain of TCR clone 349110 (TRAV17, TRAJ9)
CATDYTGGFKTIF

SEQ ID NO: 698220 - protein, 13 aa, Homo sapiens
  CDR3 for beta chain variable domain of TCR clone 349110 (TRBV7-9, TRBJ2-7)
CASSFAGAYEQYF

SEQ ID NO: 698221 - protein, 12 aa, Homo sapiens
  CDR3 for alpha chain variable domain of TCR clone 349111 (TRAV12-2, TRAJ40)
CAVRPGTYKYIF

SEQ ID NO: 698222 - protein, 16 aa, Homo sapiens
  CDR3 for beta chain variable domain of TCR clone 349111 (TRBV12-5, TRBJ2-5)
CASGPRTSGSQETQYF

SEQ ID NO: 698223 - protein, 14 aa, Homo sapiens
  CDR3 for alpha chain variable domain of TCR clone 349112 (TRAV3, TRAJ9)
CAVRLNTGGFKTIF

SEQ ID NO: 698224 - protein, 15 aa, Homo sapiens
  CDR3 for beta chain variable domain of TCR clone 349112 (TRBV20-1, TRBJ2-7)
CSARVPAAYFYEQYF

SEQ ID NO: 698225 - protein, 14 aa, Homo sapiens
  CDR3 for alpha chain variable domain of TCR clone 349113 (TRAV35, TRAJ53)
GRVNSGGSNYKLTF

SEQ ID NO: 698226 - protein, 14 aa, Homo sapiens
  CDR3 for beta chain variable domain of TCR clone 349113 (TRBV7-3, TRBJ2-2)
CASSLLGSAGELFF

SEQ ID NO: 698227 - protein, 19 aa, Homo sapiens
  CDR3 for alpha chain variable domain of TCR clone 349114 (TRAV26-1, TRAJ52)
CIVRAHRNAGGTSYGKLTF

SEQ ID NO: 698228 - protein, 15 aa, Homo sapiens
  CDR3 for beta chain variable domain of TCR clone 349114 (TRBV12-4, TRBJ2-5)
CACSPPTGLQETQNF

SEQ ID NO: 698229 - protein, 16 aa, Homo sapiens
  CDR3 for alpha chain variable domain of TCR clone 349115 (TRAV3, TRAJ37)
CAVRGKGSGNTGKLIF

SEQ ID NO: 698230 - protein, 13 aa, Homo sapiens
  CDR3 for beta chain variable domain of TCR clone 349115 (TRBV19, TRBJ1-5)
CASSEGSNQPQHF

SEQ ID NO: 698231 - protein, 15 aa, Homo sapiens
  CDR3 for alpha chain variable domain of TCR clone 349116 (TRAV17, TRAJ34)
CATDPRMVDTDKTIF

SEQ ID NO: 698232 - protein, 12 aa, Homo sapiens
  CDR3 for beta chain variable domain of TCR clone 349116 (TRBV10-2, TRBJ2-3)
CASSEGPGPRYF

SEQ ID NO: 698233 - protein, 16 aa, Homo sapiens
  CDR3 for alpha chain variable domain of TCR clone 349117 (TRAV12-2, TRAJ28)
CAVITDSGAGSSQLTF

SEQ ID NO: 698234 - protein, 12 aa, Homo sapiens
  CDR3 for beta chain variable domain of TCR clone 349117 (TRBV9, TRBJ2-2)
CASSLVTGELFF

SEQ ID NO: 698235 - protein, 13 aa, Homo sapiens
  CDR3 for alpha chain variable domain of TCR clone 349118 (TRAV2, TRAJ15)
CAVASQAGTALIF

SEQ ID NO: 698236 - protein, 13 aa, Homo sapiens
  CDR3 for beta chain variable domain of TCR clone 349118 (TRBV19, TRBJ1-5)
CASSTRRDQPQHF

SEQ ID NO: 698237 - protein, 11 aa, Homo sapiens
  CDR3 for alpha chain variable domain of TCR clone 349119 (TRAV1-1, TRAJ30)
CAQNRDDKIIF

SEQ ID NO: 698238 - protein, 15 aa, Homo sapiens
  CDR3 for beta chain variable domain of TCR clone 349119 (TRBV20-1, TRBJ1-5)
CSARSGPSMNQPQHF

SEQ ID NO: 698239 - protein, 14 aa, Homo sapiens
  CDR3 for alpha chain variable domain of TCR clone 349120 (TRAV38-1, TRAJ29)
CAFITPSGNTPLVF

SEQ ID NO: 698240 - protein, 15 aa, Homo sapiens
  CDR3 for beta chain variable domain of TCR clone 349120 (TRBV5-1, TRBJ2-1)
CASSPPRASYNEQFF

SEQ ID NO: 698241 - protein, 15 aa, Homo sapiens
  CDR3 for alpha chain variable domain of TCR clone 349121 (TRAV12-1, TRAJ44)
CVVFVNTGTASKLTF

SEQ ID NO: 698242 - protein, 14 aa, Homo sapiens
  CDR3 for beta chain variable domain of TCR clone 349121 (TRBV12-4, TRBJ1-1)
CASSLGAGGTEAFF

SEQ ID NO: 698243 - protein, 18 aa, Homo sapiens
  CDR3 for alpha chain variable domain of TCR clone 349122 (TRAV12-3, TRAJ10)
SPVIQPPTSDGGGNKLTF

SEQ ID NO: 698244 - protein, 14 aa, Homo sapiens
  CDR3 for beta chain variable domain of TCR clone 349122 (TRBV12-5, TRBJ2-5)
CASGSRTHQETQYF

SEQ ID NO: 698245 - protein, 13 aa, Homo sapiens
  CDR3 for alpha chain variable domain of TCR clone 349123 (TRAV8-6, TRAJ49)
CAVITNTGNQFYF

SEQ ID NO: 698246 - protein, 15 aa, Homo sapiens
  CDR3 for beta chain variable domain of TCR clone 349123 (TRBV19, TRBJ1-5)
CASSIVWADNQPQHF

SEQ ID NO: 698247 - protein, 14 aa, Homo sapiens
  CDR3 for alpha chain variable domain of TCR clone 349124 (TRAV35, TRAJ42)
CAGRYGGSQGNLIF

SEQ ID NO: 698248 - protein, 20 aa, Homo sapiens
  CDR3 for beta chain variable domain of TCR clone 349124 (TRBV28, TRBJ2-1)
CASTPIGRSPGLAGGNEQFF

SEQ ID NO: 698249 - protein, 11 aa, Homo sapiens
  CDR3 for alpha chain variable domain of TCR clone 349125 (TRAV1-2, TRAJ31)
CAVNNNARLMF

SEQ ID NO: 698250 - protein, 18 aa, Homo sapiens
  CDR3 for beta chain variable domain of TCR clone 349125 (TRBV25-1, TRBJ1-2)
CASSGLQNGQGLIFVYTF

SEQ ID NO: 698251 - protein, 12 aa, Homo sapiens
  CDR3 for alpha chain variable domain of TCR clone 349126 (TRAV4, TRAJ26)
CLVGDYGQNFVF

SEQ ID NO: 698252 - protein, 17 aa, Homo sapiens
  CDR3 for beta chain variable domain of TCR clone 349126 (TRBV7-9, TRBJ2-6)
CASSFGAGYSGANVLTF

SEQ ID NO: 698253 - protein, 17 aa, Homo sapiens
  CDR3 for alpha chain variable domain of TCR clone 349127 (TRAV3, TRAJ42)
CAVRDRDYGGSQGNLIF

SEQ ID NO: 698254 - protein, 15 aa, Homo sapiens
  CDR3 for beta chain variable domain of TCR clone 349127 (TRBV19, TRBJ2-1)
CASSIVRGEGREQFF

SEQ ID NO: 698255 - protein, 12 aa, Homo sapiens
  CDR3 for alpha chain variable domain of TCR clone 349128 (TRAV12-1, TRAJ34)
FLVAGATDKLIF

SEQ ID NO: 698256 - protein, 12 aa, Homo sapiens
  CDR3 for beta chain variable domain of TCR clone 349128 (TRBV7-9, TRBJ1-1)
CASSLVRGEAFL

SEQ ID NO: 698257 - protein, 14 aa, Homo sapiens
  CDR3 for alpha chain variable domain of TCR clone 349129 (TRAV1-1, TRAJ27)
CAGIYNTNAGKSTF

SEQ ID NO: 698258 - protein, 15 aa, Homo sapiens
  CDR3 for beta chain variable domain of TCR clone 349129 (TRBV7-2, TRBJ2-1)
CASSSGLAGGNEQFF

SEQ ID NO: 698259 - protein, 19 aa, Homo sapiens
  CDR3 for alpha chain variable domain of TCR clone 349130 (TRAV16, )
CALSVDIQNPDPAVYQLRD

SEQ ID NO: 698260 - protein, 16 aa, Homo sapiens
  CDR3 for beta chain variable domain of TCR clone 349130 (TRBV12-5, TRBJ2-5)
CASGPRTSGNQETQYF

SEQ ID NO: 698261 - protein, 14 aa, Homo sapiens
  CDR3 for alpha chain variable domain of TCR clone 349131 (TRAV36/DV7, TRAJ32)
CAVGHVGATNKLIF

SEQ ID NO: 698262 - protein, 16 aa, Homo sapiens
  CDR3 for beta chain variable domain of TCR clone 349131 (TRBV12-4, TRBJ1-5)
CASSRPVGGPNQPQHF

SEQ ID NO: 698263 - protein, 19 aa, Homo sapiens
  CDR3 for alpha chain variable domain of TCR clone 349132 (TRAV38-1, TRAJ53)
CAVMKHGLESGGSNYKLTF

SEQ ID NO: 698264 - protein, 13 aa, Homo sapiens
  CDR3 for beta chain variable domain of TCR clone 349132 (TRBV19, TRBJ2-7)
CASSPRQSYEQYF

SEQ ID NO: 698265 - protein, 18 aa, Homo sapiens
  CDR3 for alpha chain variable domain of TCR clone 349133 (TRAV12-1, TRAJ15)
CVVSPAGQSGRNCSDLSE

SEQ ID NO: 698266 - protein, 13 aa, Homo sapiens
  CDR3 for beta chain variable domain of TCR clone 349133 (TRBV7-2, TRBJ2-4)
CASSREHANIQYF

SEQ ID NO: 698267 - protein, 12 aa, Homo sapiens
  CDR3 for alpha chain variable domain of TCR clone 349134 (TRAV2, TRAJ15)
CCASQAGTALIF

SEQ ID NO: 698268 - protein, 16 aa, Homo sapiens
  CDR3 for beta chain variable domain of TCR clone 349134 (TRBV5-1, TRBJ1-1)
CASSSGGNSLNTEAFF

SEQ ID NO: 698269 - protein, 13 aa, Homo sapiens
  CDR3 for alpha chain variable domain of TCR clone 349135 (TRAV21, TRAJ45)
CAVMGGGADGLTF

SEQ ID NO: 698270 - protein, 16 aa, Homo sapiens
  CDR3 for beta chain variable domain of TCR clone 349135 (TRBV20-1, TRBJ2-1)
CSARDYLAGGRGEQFF

SEQ ID NO: 698271 - protein, 17 aa, Homo sapiens
  CDR3 for alpha chain variable domain of TCR clone 349136 (TRAV26-1, TRAJ53)
CIVRVDDSGGSNYKLTF

SEQ ID NO: 698272 - protein, 15 aa, Homo sapiens
  CDR3 for beta chain variable domain of TCR clone 349136 (TRBV20-1, TRBJ2-7)
SSARVPAAYFYEQYF

SEQ ID NO: 698273 - protein, 14 aa, Homo sapiens
  CDR3 for alpha chain variable domain of TCR clone 349137 (TRAV34, TRAJ44)
CGADGTGTASKLTF

SEQ ID NO: 698274 - protein, 15 aa, Homo sapiens
  CDR3 for beta chain variable domain of TCR clone 349137 (TRBV28, TRBJ2-1)
CASSIIAGGRSEQFF

SEQ ID NO: 698275 - protein, 11 aa, Homo sapiens
  CDR3 for alpha chain variable domain of TCR clone 349138 (TRAV12-1, TRAJ30)
CEVNGQDKIIF

SEQ ID NO: 698276 - protein, 12 aa, Homo sapiens
  CDR3 for beta chain variable domain of TCR clone 349138 (TRBV27, TRBJ2-2)
CASKLFTGELFF

SEQ ID NO: 698277 - protein, 14 aa, Homo sapiens
  CDR3 for alpha chain variable domain of TCR clone 349139 (TRAV4, TRAJ17)
CLVGPQAAGNKLTF

SEQ ID NO: 698278 - protein, 15 aa, Homo sapiens
  CDR3 for beta chain variable domain of TCR clone 349139 (TRBV20-1, TRBJ2-7)
CSARGPLAGGREQYF

SEQ ID NO: 698279 - protein, 15 aa, Homo sapiens
  CDR3 for alpha chain variable domain of TCR clone 349140 (TRAV3, TRAJ47)
CAVRDIGEYGNKLVF

SEQ ID NO: 698280 - protein, 20 aa, Homo sapiens
  CDR3 for beta chain variable domain of TCR clone 349140 (TRBV7-8, TRBJ2-2)
CASSHLFPGPTIHITGELFF

SEQ ID NO: 698281 - protein, 13 aa, Homo sapiens
  CDR3 for alpha chain variable domain of TCR clone 349141 (TRAV8-3, TRAJ36)
CAVGATGANNPFF

SEQ ID NO: 698282 - protein, 16 aa, Homo sapiens
  CDR3 for beta chain variable domain of TCR clone 349141 (TRBV20-1, TRBJ1-4)
CSAPGQGLLTNEKLFF

SEQ ID NO: 698283 - protein, 13 aa, Homo sapiens
  CDR3 for alpha chain variable domain of TCR clone 349142 (TRAV6, TRAJ6)
CAAAPRRKLHTYI

SEQ ID NO: 698284 - protein, 12 aa, Homo sapiens
  CDR3 for beta chain variable domain of TCR clone 349142 (TRBV11-2, TRBJ2-2)
CASSLGGGELFF

SEQ ID NO: 698285 - protein, 12 aa, Homo sapiens
  CDR3 for alpha chain variable domain of TCR clone 349143 (TRAV8-3, TRAJ41)
CAVALSGYALNF

SEQ ID NO: 698286 - protein, 16 aa, Homo sapiens
  CDR3 for beta chain variable domain of TCR clone 349143 (TRBV27, TRBJ2-7)
CASGSERRDSAYEQYF

SEQ ID NO: 698287 - protein, 12 aa, Homo sapiens
  CDR3 for alpha chain variable domain of TCR clone 349144 (TRAV21, TRAJ58)
CAAETSGSRLTF

SEQ ID NO: 698288 - protein, 17 aa, Homo sapiens
  CDR3 for beta chain variable domain of TCR clone 349144 (TRBV11-2, TRBJ2-1)
CASSLYPPGVEYNEQFF

SEQ ID NO: 698289 - protein, 12 aa, Homo sapiens
  CDR3 for alpha chain variable domain of TCR clone 349145 (TRAV35, TRAJ30)
CAGQLADDKIIL

SEQ ID NO: 698290 - protein, 17 aa, Homo sapiens
  CDR3 for beta chain variable domain of TCR clone 349145 (TRBV4-2, TRBJ2-5)
CASSPGRWRNFQETQYF

SEQ ID NO: 698291 - protein, 19 aa, Homo sapiens
  CDR3 for alpha chain variable domain of TCR clone 349146 (TRAV2, TRAJ20)
ILQAREADAAVYRDCKLSF

SEQ ID NO: 698292 - protein, 17 aa, Homo sapiens
  CDR3 for beta chain variable domain of TCR clone 349146 (TRBV11-2, TRBJ2-1)
CASSLYPPGVEYNEQFF

SEQ ID NO: 698293 - protein, 12 aa, Homo sapiens
  CDR3 for alpha chain variable domain of TCR clone 349147 (TRAV26-2, TRAJ21)
CILKGNFNKFYF

SEQ ID NO: 698294 - protein, 15 aa, Homo sapiens
  CDR3 for beta chain variable domain of TCR clone 349147 (TRBV20-1, TRBJ1-5)
CSAFKNGQRNQPQHF

SEQ ID NO: 698295 - protein, 11 aa, Homo sapiens
  CDR3 for alpha chain variable domain of TCR clone 349148 (TRAV13-1, TRAJ39)
CASHAGNMLTF

SEQ ID NO: 698296 - protein, 14 aa, Homo sapiens
  CDR3 for beta chain variable domain of TCR clone 349148 (TRBV11-2, TRBJ1-5)
CDSSLDRGRQPQHF

SEQ ID NO: 698297 - protein, 15 aa, Homo sapiens
  CDR3 for alpha chain variable domain of TCR clone 349149 (TRAV8-3, TRAJ27)
CAVGPSKTNAGKSTF

SEQ ID NO: 698298 - protein, 15 aa, Homo sapiens
  CDR3 for beta chain variable domain of TCR clone 349149 (TRBV7-2, TRBJ2-1)
CASSSGLAGSNEQFF

SEQ ID NO: 698299 - protein, 12 aa, Homo sapiens
  CDR3 for alpha chain variable domain of TCR clone 349150 (TRAV12-3, TRAJ17)
CAMTLTGNKLTF

SEQ ID NO: 698300 - protein, 20 aa, Homo sapiens
  CDR3 for beta chain variable domain of TCR clone 349150 (TRBV7-8, TRBJ2-2)
CASSHLFTGPTIHITGELFF

SEQ ID NO: 698301 - protein, 12 aa, Homo sapiens
  CDR3 for alpha chain variable domain of TCR clone 349151 (TRAV2, TRAJ9)
CAVGAGGFKTIF

SEQ ID NO: 698302 - protein, 14 aa, Homo sapiens
  CDR3 for beta chain variable domain of TCR clone 349151 (TRBV6-1, TRBJ1-3)
CASLQGGGGNTIYF

SEQ ID NO: 698303 - protein, 18 aa, Homo sapiens
  CDR3 for alpha chain variable domain of TCR clone 349152 (TRAV26-2, TRAJ45)
CILRLWGYSGGGADGLTF

SEQ ID NO: 698304 - protein, 17 aa, Homo sapiens
  CDR3 for beta chain variable domain of TCR clone 349152 (TRBV28, TRBJ2-3)
CASSPTPAGGKVDTQYF

SEQ ID NO: 698305 - protein, 14 aa, Homo sapiens
  CDR3 for alpha chain variable domain of TCR clone 349153 (TRAV17, TRAJ22)
FDTSPSGFARQLTF

SEQ ID NO: 698306 - protein, 15 aa, Homo sapiens
  CDR3 for beta chain variable domain of TCR clone 349153 (TRBV4-1, TRBJ2-5)
CASSQWDLYQETQYF

SEQ ID NO: 698307 - protein, 15 aa, Homo sapiens
  CDR3 for alpha chain variable domain of TCR clone 349154 (TRAV1-2, TRAJ28)
CAVQYSGPGSYQLTF

SEQ ID NO: 698308 - protein, 16 aa, Homo sapiens
  CDR3 for beta chain variable domain of TCR clone 349154 (TRBV28, TRBJ2-7)
CTSVPAKRGGVYEQYF

SEQ ID NO: 698309 - protein, 16 aa, Homo sapiens
  CDR3 for alpha chain variable domain of TCR clone 349155 (TRAV12-3, TRAJ50)
CAMRDPMKTSYDKVRF

SEQ ID NO: 698310 - protein, 13 aa, Homo sapiens
  CDR3 for beta chain variable domain of TCR clone 349155 (TRBV4-1, TRBJ2-3)
CASSLDFTDTQYF

SEQ ID NO: 698311 - protein, 16 aa, Homo sapiens
  CDR3 for alpha chain variable domain of TCR clone 349156 (TRAV1-2, TRAJ10)
CAVRGVLTGGGNKLTF

SEQ ID NO: 698312 - protein, 15 aa, Homo sapiens
  CDR3 for beta chain variable domain of TCR clone 349156 (TRBV7-2, TRBJ2-3)
CASSLAGAFIDTQYF

SEQ ID NO: 698313 - protein, 13 aa, Homo sapiens
  CDR3 for alpha chain variable domain of TCR clone 349157 (TRAV2, TRAJ40)
CAVVTSGTYKYIF

SEQ ID NO: 698314 - protein, 14 aa, Homo sapiens
  CDR3 for beta chain variable domain of TCR clone 349157 (TRBV12-5, TRBJ2-5)
CASSSRTHQETQYF

SEQ ID NO: 698315 - protein, 12 aa, Homo sapiens
  CDR3 for alpha chain variable domain of TCR clone 349158 (TRAV13-1, TRAJ27)
YAAHTNAGKSTF

SEQ ID NO: 698316 - protein, 14 aa, Homo sapiens
  CDR3 for beta chain variable domain of TCR clone 349158 (TRBV19, TRBJ2-2)
CASSGQGIAGELFF

SEQ ID NO: 698317 - protein, 15 aa, Homo sapiens
  CDR3 for alpha chain variable domain of TCR clone 349159 (TRAV21, TRAJ53)
CATLNSGGSNYKLTY

SEQ ID NO: 698318 - protein, 15 aa, Homo sapiens
  CDR3 for beta chain variable domain of TCR clone 349159 (TRBV6-1, TRBJ2-4)
CASSEAVWTINMQYF

SEQ ID NO: 698319 - protein, 12 aa, Homo sapiens
  CDR3 for alpha chain variable domain of TCR clone 349160 (TRAV3, TRAJ39)
CTVIEWSNMLTF

SEQ ID NO: 698320 - protein, 14 aa, Homo sapiens
  CDR3 for beta chain variable domain of TCR clone 349160 (TRBV7-8, TRBJ2-3)
CASSFPDGQDTQYF

SEQ ID NO: 698321 - protein, 14 aa, Homo sapiens
  CDR3 for alpha chain variable domain of TCR clone 349161 (TRAV26-1, TRAJ38)
CIAANAGNNRKLIW

SEQ ID NO: 698322 - protein, 14 aa, Homo sapiens
  CDR3 for beta chain variable domain of TCR clone 349161 (TRBV18, TRBJ2-7)
CASSPRGGSYEQYF

SEQ ID NO: 698323 - protein, 11 aa, Homo sapiens
  CDR3 for alpha chain variable domain of TCR clone 349162 (TRAV2, TRAJ13)
CASGGYQKVTF

SEQ ID NO: 698324 - protein, 15 aa, Homo sapiens
  CDR3 for beta chain variable domain of TCR clone 349162 (TRBV13, TRBJ1-2)
CASSLGRQPGYGYTF

SEQ ID NO: 698325 - protein, 14 aa, Homo sapiens
  CDR3 for alpha chain variable domain of TCR clone 349163 (TRAV16, TRAJ37)
CALDISGNTGKLIF

SEQ ID NO: 698326 - protein, 14 aa, Homo sapiens
  CDR3 for beta chain variable domain of TCR clone 349163 (TRBV7-2, TRBJ2-7)
CASRSQGAAYEQYF

SEQ ID NO: 698327 - protein, 14 aa, Homo sapiens
  CDR3 for alpha chain variable domain of TCR clone 349164 (TRAV38-1, TRAJ29)
CAFITPSGNTPLVF

SEQ ID NO: 698328 - protein, 16 aa, Homo sapiens
  CDR3 for beta chain variable domain of TCR clone 349164 (TRBV12-4, TRBJ1-6)
CASNLQGKGSPLHLGT

SEQ ID NO: 698329 - protein, 15 aa, Homo sapiens
  CDR3 for alpha chain variable domain of TCR clone 349165 (TRAV21, TRAJ32)
CAVNSYGGATNKLIF

SEQ ID NO: 698330 - protein, 18 aa, Homo sapiens
  CDR3 for beta chain variable domain of TCR clone 349165 (TRBV7-9, TRBJ2-1)
CASSTGRAEGSSYNEQLF

SEQ ID NO: 698331 - protein, 13 aa, Homo sapiens
  CDR3 for alpha chain variable domain of TCR clone 349166 (TRAV1-2, TRAJ9)
CAALNTGGFKTIF

SEQ ID NO: 698332 - protein, 13 aa, Homo sapiens
  CDR3 for beta chain variable domain of TCR clone 349166 (TRBV2, TRBJ1-1)
CASSEGGNTEAFF

SEQ ID NO: 698333 - protein, 14 aa, Homo sapiens
  CDR3 for alpha chain variable domain of TCR clone 349167 (TRAV26-1, TRAJ38)
CIADNAGNNRKLIW

SEQ ID NO: 698334 - protein, 14 aa, Homo sapiens
  CDR3 for beta chain variable domain of TCR clone 349167 (TRBV15, TRBJ2-5)
CATSGDRGQETQYF

SEQ ID NO: 698335 - protein, 14 aa, Homo sapiens
  CDR3 for alpha chain variable domain of TCR clone 349168 (TRAV17, TRAJ31)
CATVLRNHNARLMF

SEQ ID NO: 698336 - protein, 14 aa, Homo sapiens
  CDR3 for beta chain variable domain of TCR clone 349168 (TRBV12-4, TRBJ2-5)
CASSLWQKQETQYF

SEQ ID NO: 698337 - protein, 15 aa, Homo sapiens
  CDR3 for alpha chain variable domain of TCR clone 349169 (TRAV26-1, TRAJ15)
CIVRAANPAGTALTF

SEQ ID NO: 698338 - protein, 14 aa, Homo sapiens
  CDR3 for beta chain variable domain of TCR clone 349169 (TRBV12-5, TRBJ2-5)
CASGSRTHQETQYF

SEQ ID NO: 698339 - protein, 22 aa, Homo sapiens
  CDR3 for alpha chain variable domain of TCR clone 349170 (TRAV3, TRAJ38)
CAVRDCLNAGNNHIQNPDPAVY

SEQ ID NO: 698340 - protein, 13 aa, Homo sapiens
  CDR3 for beta chain variable domain of TCR clone 349170 (TRBV6-5, TRBJ2-5)
CASSPQGGETQYF

SEQ ID NO: 698341 - protein, 16 aa, Homo sapiens
  CDR3 for alpha chain variable domain of TCR clone 349171 (TRAV3, TRAJ37)
CAVRGKGSGNTGKLIF

SEQ ID NO: 698342 - protein, 16 aa, Homo sapiens
  CDR3 for beta chain variable domain of TCR clone 349171 (TRBV28, TRBJ1-5)
CANSFRGGYSNQPQHF

SEQ ID NO: 698343 - protein, 12 aa, Homo sapiens
  CDR3 for alpha chain variable domain of TCR clone 349172 (TRAV13-2, TRAJ23)
CAERHRGGKLIF

SEQ ID NO: 698344 - protein, 16 aa, Homo sapiens
  CDR3 for beta chain variable domain of TCR clone 349172 (TRBV7-2, TRBJ2-6)
CAILSGVSAGANVLTF

SEQ ID NO: 698345 - protein, 10 aa, Homo sapiens
  CDR3 for alpha chain variable domain of TCR clone 349173 (TRAV23/DV6, TRAJ57)
CAASSTLSQV

SEQ ID NO: 698346 - protein, 14 aa, Homo sapiens
  CDR3 for beta chain variable domain of TCR clone 349173 (TRBV25-1, TRBJ1-1)
CASPHLGGNTEAFF

SEQ ID NO: 698347 - protein, 16 aa, Homo sapiens
  CDR3 for alpha chain variable domain of TCR clone 349174 (TRAV12-2, TRAJ45)
CAVNMYSGGGADGLTF

SEQ ID NO: 698348 - protein, 17 aa, Homo sapiens
  CDR3 for beta chain variable domain of TCR clone 349174 (TRBV6-3, TRBJ2-2)
CASSYRGRDLYTGELFF

SEQ ID NO: 698349 - protein, 13 aa, Homo sapiens
  CDR3 for alpha chain variable domain of TCR clone 349175 (TRAV8-6, TRAJ21)
RAVSPSSLNKFYF

SEQ ID NO: 698350 - protein, 14 aa, Homo sapiens
  CDR3 for beta chain variable domain of TCR clone 349175 (TRBV7-9, TRBJ2-5)
CASSLDTAQETQYL

SEQ ID NO: 698351 - protein, 14 aa, Homo sapiens
  CDR3 for alpha chain variable domain of TCR clone 349176 (TRAV16, TRAJ32)
CALKSGGATNKLIF

SEQ ID NO: 698352 - protein, 17 aa, Homo sapiens
  CDR3 for beta chain variable domain of TCR clone 349176 (TRBV13, TRBJ2-3)
CASSLSRVAGGRNTQYF

SEQ ID NO: 698353 - protein, 14 aa, Homo sapiens
  CDR3 for alpha chain variable domain of TCR clone 349177 (TRAV16, TRAJ28)
CSLSSGAGSYQLTF

SEQ ID NO: 698354 - protein, 16 aa, Homo sapiens
  CDR3 for beta chain variable domain of TCR clone 349177 (TRBV5-1, TRBJ2-1)
CASSLLPSGRPEEQFF

SEQ ID NO: 698355 - protein, 16 aa, Homo sapiens
  CDR3 for alpha chain variable domain of TCR clone 349178 (TRAV21, TRAJ52)
CAVTNAGGNSYGKLTF

SEQ ID NO: 698356 - protein, 13 aa, Homo sapiens
  CDR3 for beta chain variable domain of TCR clone 349178 (TRBV20-1, TRBJ2-3)
CSARLAGTDTQYF

SEQ ID NO: 698357 - protein, 16 aa, Homo sapiens
  CDR3 for alpha chain variable domain of TCR clone 349179 (TRAV3, TRAJ37)
CAVRPHGSGNTAKLIF

SEQ ID NO: 698358 - protein, 15 aa, Homo sapiens
  CDR3 for beta chain variable domain of TCR clone 349179 (TRBV5-5, TRBJ2-7)
CASSLAAPLSYEQYF

SEQ ID NO: 698359 - protein, 12 aa, Homo sapiens
  CDR3 for alpha chain variable domain of TCR clone 349180 (TRAV30, TRAJ20)
CRTESNDYKLSF

SEQ ID NO: 698360 - protein, 15 aa, Homo sapiens
  CDR3 for beta chain variable domain of TCR clone 349180 (TRBV20-1, TRBJ2-7)
CSARDRVSGMDEQYF

SEQ ID NO: 698361 - protein, 15 aa, Homo sapiens
  CDR3 for alpha chain variable domain of TCR clone 349181 (TRAV8-4, TRAJ37)
CAVSRGSGNTGKLIF

SEQ ID NO: 698362 - protein, 13 aa, Homo sapiens
  CDR3 for beta chain variable domain of TCR clone 349181 (TRBV2, TRBJ1-4)
CASSERAGEKLFF

SEQ ID NO: 698363 - protein, 17 aa, Homo sapiens
  CDR3 for alpha chain variable domain of TCR clone 349182 (TRAV13-2, TRAJ42)
CAEGASHYGGSQGNLIF

SEQ ID NO: 698364 - protein, 16 aa, Homo sapiens
  CDR3 for beta chain variable domain of TCR clone 349182 (TRBV10-3, TRBJ2-7)
CAISADFADRPCEQYF

SEQ ID NO: 698365 - protein, 18 aa, Homo sapiens
  CDR3 for alpha chain variable domain of TCR clone 349183 (TRAV21, TRAJ52)
CAVRPSPEGGTSYGKLTF

SEQ ID NO: 698366 - protein, 17 aa, Homo sapiens
  CDR3 for beta chain variable domain of TCR clone 349183 (TRBV13, TRBJ2-3)
CESSLSRVAGGRNTQYF

SEQ ID NO: 698367 - protein, 13 aa, Homo sapiens
  CDR3 for alpha chain variable domain of TCR clone 349184 (TRAV12-2, TRAJ52)
CAVGGTSYGKLTF

SEQ ID NO: 698368 - protein, 14 aa, Homo sapiens
  CDR3 for beta chain variable domain of TCR clone 349184 (TRBV19, TRBJ2-1)
CASPTYVLSGEQFF

SEQ ID NO: 698369 - protein, 13 aa, Homo sapiens
  CDR3 for alpha chain variable domain of TCR clone 349185 (TRAV4, TRAJ31)
CLVYRNNNARLMF

SEQ ID NO: 698370 - protein, 14 aa, Homo sapiens
  CDR3 for beta chain variable domain of TCR clone 349185 (TRBV7-9, TRBJ1-4)
CAITEGEANEKLFF

SEQ ID NO: 698371 - protein, 16 aa, Homo sapiens
  CDR3 for alpha chain variable domain of TCR clone 349186 (TRAV30, TRAJ24)
CGTEIVDAHSWGKFQF

SEQ ID NO: 698372 - protein, 15 aa, Homo sapiens
  CDR3 for beta chain variable domain of TCR clone 349186 (TRBV7-9, TRBJ1-4)
CASSARTGGNEKLFF

SEQ ID NO: 698373 - protein, 13 aa, Homo sapiens
  CDR3 for alpha chain variable domain of TCR clone 349187 (TRAV13-1, TRAJ40)
FAASKGGTYKYIF

SEQ ID NO: 698374 - protein, 13 aa, Homo sapiens
  CDR3 for beta chain variable domain of TCR clone 349187 (TRBV7-6, TRBJ1-2)
CASSLVADYGYTF

SEQ ID NO: 698375 - protein, 12 aa, Homo sapiens
  CDR3 for alpha chain variable domain of TCR clone 349188 (TRAV8-4, TRAJ43)
CAVSVNNNDMRF

SEQ ID NO: 698376 - protein, 16 aa, Homo sapiens
  CDR3 for beta chain variable domain of TCR clone 349188 (TRBV7-9, TRBJ1-2)
CASSLGFSSGEDGYTF

SEQ ID NO: 698377 - protein, 15 aa, Homo sapiens
  CDR3 for alpha chain variable domain of TCR clone 349189 (TRAV10, TRAJ42)
SLLHLWGGSQGNLIF

SEQ ID NO: 698378 - protein, 13 aa, Homo sapiens
  CDR3 for beta chain variable domain of TCR clone 349189 (TRBV14, TRBJ1-1)
CASSQEAGTEAFF

SEQ ID NO: 698379 - protein, 13 aa, Homo sapiens
  CDR3 for alpha chain variable domain of TCR clone 349190 (TRAV20, TRAJ37)
CAGCSSNTGKLIF

SEQ ID NO: 698380 - protein, 15 aa, Homo sapiens
  CDR3 for beta chain variable domain of TCR clone 349190 (TRBV7-2, TRBJ2-1)
CTSSFQADEYNEQFF

SEQ ID NO: 698381 - protein, 15 aa, Homo sapiens
  CDR3 for alpha chain variable domain of TCR clone 349191 (TRAV12-2, TRAJ53)
CAVNGGGGSDYKLTF

SEQ ID NO: 698382 - protein, 13 aa, Homo sapiens
  CDR3 for beta chain variable domain of TCR clone 349191 (TRBV10-3, TRBJ2-7)
CASKLAVNYEQYF

SEQ ID NO: 698383 - protein, 13 aa, Homo sapiens
  CDR3 for alpha chain variable domain of TCR clone 349192 (TRAV8-3, TRAJ43)
CAVGPDNNNDMRF

SEQ ID NO: 698384 - protein, 14 aa, Homo sapiens
  CDR3 for beta chain variable domain of TCR clone 349192 (TRBV19, TRBJ2-2)
CASSGQGIAGELFF

SEQ ID NO: 698385 - protein, 15 aa, Homo sapiens
  CDR3 for alpha chain variable domain of TCR clone 349193 (TRAV17, TRAJ23)
CATDAEDNQGGKLIF

SEQ ID NO: 698386 - protein, 12 aa, Homo sapiens
  CDR3 for beta chain variable domain of TCR clone 349193 (TRBV2, TRBJ2-1)
CAKREAYNEQFF

SEQ ID NO: 698387 - protein, 12 aa, Homo sapiens
  CDR3 for alpha chain variable domain of TCR clone 349194 (TRAV12-3, TRAJ17)
CAMTLTGNKLHF

SEQ ID NO: 698388 - protein, 15 aa, Homo sapiens
  CDR3 for beta chain variable domain of TCR clone 349194 (TRBV20-1, TRBJ2-7)
CSARDRVSGMDEQYF

SEQ ID NO: 698389 - protein, 15 aa, Homo sapiens
  CDR3 for alpha chain variable domain of TCR clone 349195 (TRAV29/DV5, TRAJ44)
CAASAGTGTASKLTF

SEQ ID NO: 698390 - protein, 14 aa, Homo sapiens
  CDR3 for beta chain variable domain of TCR clone 349195 (TRBV6-1, TRBJ1-3)
CASVQGGGGNTIYF

SEQ ID NO: 698391 - protein, 18 aa, Homo sapiens
  CDR3 for alpha chain variable domain of TCR clone 349196 (TRAV21, TRAJ52)
CAVRPSPAGVISYGKLTF

SEQ ID NO: 698392 - protein, 17 aa, Homo sapiens
  CDR3 for beta chain variable domain of TCR clone 349196 (TRBV13, TRBJ2-3)
CASSLSRVAGGRNTQYF

SEQ ID NO: 698393 - protein, 17 aa, Homo sapiens
  CDR3 for alpha chain variable domain of TCR clone 349197 (TRAV29/DV5, TRAJ45)
CAADGPFSGGGADGLTF

SEQ ID NO: 698394 - protein, 14 aa, Homo sapiens
  CDR3 for beta chain variable domain of TCR clone 349197 (TRBV9, TRBJ2-1)
CASSVDPRGKEQFF

SEQ ID NO: 698395 - protein, 18 aa, Homo sapiens
  CDR3 for alpha chain variable domain of TCR clone 349198 (TRAV12-3, TRAJ52)
CAMSGGGAGGTSYGNLTF

SEQ ID NO: 698396 - protein, 15 aa, Homo sapiens
  CDR3 for beta chain variable domain of TCR clone 349198 (TRBV27, TRBJ1-6)
CASSFDRGLGSPLHF

SEQ ID NO: 698397 - protein, 15 aa, Homo sapiens
  CDR3 for alpha chain variable domain of TCR clone 349199 (TRAV26-1, TRAJ29)
CIVRVEGSGNSPLVF

SEQ ID NO: 698398 - protein, 15 aa, Homo sapiens
  CDR3 for beta chain variable domain of TCR clone 349199 (TRBV7-9, TRBJ1-5)
CASSQGHQPNQTQHF

SEQ ID NO: 698399 - protein, 10 aa, Homo sapiens
  CDR3 for alpha chain variable domain of TCR clone 349200 (TRAV23/DV6, TRAJ45)
TGGGADGLTF

SEQ ID NO: 698400 - protein, 17 aa, Homo sapiens
  CDR3 for beta chain variable domain of TCR clone 349200 (TRBV11-3, TRBJ2-3)
CASSLGLTGGGTDTQYF

SEQ ID NO: 698401 - protein, 15 aa, Homo sapiens
  CDR3 for alpha chain variable domain of TCR clone 349201 (TRAV8-1, TRAJ6)
CAVNTPPGGSYIPTF

SEQ ID NO: 698402 - protein, 14 aa, Homo sapiens
  CDR3 for beta chain variable domain of TCR clone 349201 (TRBV12-5, TRBJ2-5)
CASGSRTHQETQYV

SEQ ID NO: 698403 - protein, 17 aa, Homo sapiens
  CDR3 for alpha chain variable domain of TCR clone 349202 (TRAV36/DV7, TRAJ52)
CAVAQRAGGTSYGTLTF

SEQ ID NO: 698404 - protein, 15 aa, Homo sapiens
  CDR3 for beta chain variable domain of TCR clone 349202 (TRBV6-5, TRBJ1-2)
CASSYSQAFNYGYTF

SEQ ID NO: 698405 - protein, 12 aa, Homo sapiens
  CDR3 for alpha chain variable domain of TCR clone 349203 (TRAV13-2, TRAJ23)
CAERHRGGKLIF

SEQ ID NO: 698406 - protein, 15 aa, Homo sapiens
  CDR3 for beta chain variable domain of TCR clone 349203 (TRBV6-3, TRBJ2-7)
CASSSPGTVFYEQYC

SEQ ID NO: 698407 - protein, 13 aa, Homo sapiens
  CDR3 for alpha chain variable domain of TCR clone 349204 (TRAV2, TRAJ21)
CAVEDLNFNKFYF

SEQ ID NO: 698408 - protein, 11 aa, Homo sapiens
  CDR3 for beta chain variable domain of TCR clone 349204 (TRBV12-4, TRBJ2-3)
CASTATDTQYF

SEQ ID NO: 698409 - protein, 15 aa, Homo sapiens
  CDR3 for alpha chain variable domain of TCR clone 349205 (TRAV14/DV4, TRAJ26)
CAMREGQNYGQNFVF

SEQ ID NO: 698410 - protein, 15 aa, Homo sapiens
  CDR3 for beta chain variable domain of TCR clone 349205 (TRBV28, TRBJ2-5)
CASSQTSGSLETQYF

SEQ ID NO: 698411 - protein, 14 aa, Homo sapiens
  CDR3 for alpha chain variable domain of TCR clone 349206 (TRAV30, TRAJ44)
CGTESAGTASKLTF

SEQ ID NO: 698412 - protein, 15 aa, Homo sapiens
  CDR3 for beta chain variable domain of TCR clone 349206 (TRBV19, TRBJ1-2)
CASTPGQVANYGYTF

SEQ ID NO: 698413 - protein, 12 aa, Homo sapiens
  CDR3 for alpha chain variable domain of TCR clone 349207 (TRAV16, TRAJ10)
CSRTGGGNKLTF

SEQ ID NO: 698414 - protein, 15 aa, Homo sapiens
  CDR3 for beta chain variable domain of TCR clone 349207 (TRBV7-9, TRBJ1-4)
CASSRTGGFNEKLFF

SEQ ID NO: 698415 - protein, 12 aa, Homo sapiens
  CDR3 for alpha chain variable domain of TCR clone 349208 (TRAV23/DV6, TRAJ3)
CAARAPQQCFQD

SEQ ID NO: 698416 - protein, 16 aa, Homo sapiens
  CDR3 for beta chain variable domain of TCR clone 349208 (TRBV7-9, TRBJ2-3)
CQQPYCSGDLTDTQYF

SEQ ID NO: 698417 - protein, 14 aa, Homo sapiens
  CDR3 for alpha chain variable domain of TCR clone 349209 (TRAV23/DV6, TRAJ11)
CAASLESGYSTLTF

SEQ ID NO: 698418 - protein, 13 aa, Homo sapiens
  CDR3 for beta chain variable domain of TCR clone 349209 (TRBV4-1, TRBJ2-5)
CASSLTRGETQYC

SEQ ID NO: 698419 - protein, 16 aa, Homo sapiens
  CDR3 for alpha chain variable domain of TCR clone 349210 (TRAV3, TRAJ28)
CAVPPRSGAGSYQLPF

SEQ ID NO: 698420 - protein, 13 aa, Homo sapiens
  CDR3 for beta chain variable domain of TCR clone 349210 (TRBV12-4, TRBJ2-5)
CASRLAVQETQYF

SEQ ID NO: 698421 - protein, 13 aa, Homo sapiens
  CDR3 for alpha chain variable domain of TCR clone 349211 (TRAV21, TRAJ37)
CAVSSGNTGKLIF

SEQ ID NO: 698422 - protein, 17 aa, Homo sapiens
  CDR3 for beta chain variable domain of TCR clone 349211 (TRBV5-1, TRBJ2-5)
CASSLLGLAVNQETQYF

SEQ ID NO: 698423 - protein, 14 aa, Homo sapiens
  CDR3 for alpha chain variable domain of TCR clone 349212 (TRAV9-2, TRAJ39)
WALYIYNAGNMLTF

SEQ ID NO: 698424 - protein, 16 aa, Homo sapiens
  CDR3 for beta chain variable domain of TCR clone 349212 (TRBV7-3, TRBJ2-2)
CASSLKRGTLSGELFF

SEQ ID NO: 698425 - protein, 14 aa, Homo sapiens
  CDR3 for alpha chain variable domain of TCR clone 349213 (TRAV12-1, TRAJ34)
CVVNLDYNTYKLIF

SEQ ID NO: 698426 - protein, 17 aa, Homo sapiens
  CDR3 for beta chain variable domain of TCR clone 349213 (TRBV20-1, TRBJ2-7)
CSAAGTSGGGSSYEQYF

SEQ ID NO: 698427 - protein, 13 aa, Homo sapiens
  CDR3 for alpha chain variable domain of TCR clone 349214 (TRAV16, TRAJ28)
CALTGAGSYQLTF

SEQ ID NO: 698428 - protein, 14 aa, Homo sapiens
  CDR3 for beta chain variable domain of TCR clone 349214 (TRBV12-4, TRBJ1-1)
CASTWTGHDTEAFF

SEQ ID NO: 698429 - protein, 11 aa, Homo sapiens
  CDR3 for alpha chain variable domain of TCR clone 349215 (TRAV35, TRAJ30)
CAGPGDDKIIF

SEQ ID NO: 698430 - protein, 22 aa, Homo sapiens
  CDR3 for beta chain variable domain of TCR clone 349215 (TRBV11-2, TRBJ1-4)
CASSLDITRRGIPRKDNEKLFF

SEQ ID NO: 698431 - protein, 16 aa, Homo sapiens
  CDR3 for alpha chain variable domain of TCR clone 349216 (TRAV4, TRAJ22)
CLVGDLYSGAARQLTF

SEQ ID NO: 698432 - protein, 14 aa, Homo sapiens
  CDR3 for beta chain variable domain of TCR clone 349216 (TRBV28, TRBJ2-3)
CASSWRGRADTQYF

SEQ ID NO: 698433 - protein, 16 aa, Homo sapiens
  CDR3 for alpha chain variable domain of TCR clone 349217 (TRAV1-1, TRAJ29)
CAVRSTRNSGHTPLVF

SEQ ID NO: 698434 - protein, 15 aa, Homo sapiens
  CDR3 for beta chain variable domain of TCR clone 349217 (TRBV29-1, TRBJ2-1)
CSVGRHALFYNEQFF

SEQ ID NO: 698435 - protein, 13 aa, Homo sapiens
  CDR3 for alpha chain variable domain of TCR clone 349218 (TRAV29/DV5, TRAJ49)
CAASTNTGNQFNF

SEQ ID NO: 698436 - protein, 13 aa, Homo sapiens
  CDR3 for beta chain variable domain of TCR clone 349218 (TRBV7-2, TRBJ1-4)
CASSLAGLEKLFF

SEQ ID NO: 698437 - protein, 12 aa, Homo sapiens
  CDR3 for alpha chain variable domain of TCR clone 349219 (TRAV16, TRAJ10)
CSRTGGGNKLTF

SEQ ID NO: 698438 - protein, 18 aa, Homo sapiens
  CDR3 for beta chain variable domain of TCR clone 349219 (TRBV7-6, TRBJ2-1)
CASSPRTSGMSSYNEQFF

SEQ ID NO: 698439 - protein, 16 aa, Homo sapiens
  CDR3 for alpha chain variable domain of TCR clone 349220 (TRAV12-2, TRAJ10)
CAVNRVLTGGGNKLTF

SEQ ID NO: 698440 - protein, 15 aa, Homo sapiens
  CDR3 for beta chain variable domain of TCR clone 349220 (TRBV5-1, TRBJ2-7)
CASSLNGGPAREQYF

SEQ ID NO: 698441 - protein, 12 aa, Homo sapiens
  CDR3 for alpha chain variable domain of TCR clone 349221 (TRAV21, TRAJ27)
CAANTNAGKSTF

SEQ ID NO: 698442 - protein, 16 aa, Homo sapiens
  CDR3 for beta chain variable domain of TCR clone 349221 (TRBV10-3, TRBJ2-1)
CAISGVGDGGGGEQFF

SEQ ID NO: 698443 - protein, 13 aa, Homo sapiens
  CDR3 for alpha chain variable domain of TCR clone 349222 (TRAV12-2, TRAJ39)
CAVNNNAGNMLTF

SEQ ID NO: 698444 - protein, 14 aa, Homo sapiens
  CDR3 for beta chain variable domain of TCR clone 349222 (TRBV7-2, TRBJ2-7)
CASSLYPGRYEQYF

SEQ ID NO: 698445 - protein, 16 aa, Homo sapiens
  CDR3 for alpha chain variable domain of TCR clone 349223 (TRAV21, TRAJ45)
CAVSWGSGGGADGLTF

SEQ ID NO: 698446 - protein, 15 aa, Homo sapiens
  CDR3 for beta chain variable domain of TCR clone 349223 (TRBV19, TRBJ1-2)
CASSVGQVLNYGYTF

SEQ ID NO: 698447 - protein, 16 aa, Homo sapiens
  CDR3 for alpha chain variable domain of TCR clone 349224 (TRAV30, TRAJ24)
CGTEIVDADSWGKFQF

SEQ ID NO: 698448 - protein, 18 aa, Homo sapiens
  CDR3 for beta chain variable domain of TCR clone 349224 (TRBV12-5, TRBJ2-5)
VLVVHDTSRDPVLRARHA

SEQ ID NO: 698449 - protein, 15 aa, Homo sapiens
  CDR3 for alpha chain variable domain of TCR clone 349225 (TRAV4, TRAJ29)
CLVGDMDSGNTPLVF

SEQ ID NO: 698450 - protein, 16 aa, Homo sapiens
  CDR3 for beta chain variable domain of TCR clone 349225 (TRBV4-3, TRBJ2-2)
CASSHLQGSGTGELFF

SEQ ID NO: 698451 - protein, 15 aa, Homo sapiens
  CDR3 for alpha chain variable domain of TCR clone 349226 (TRAV25, TRAJ52)
CAGTSGATSYGKLTF

SEQ ID NO: 698452 - protein, 14 aa, Homo sapiens
  CDR3 for beta chain variable domain of TCR clone 349226 (TRBV20-1, TRBJ2-3)
CSARGGTSTDTQYF

SEQ ID NO: 698453 - protein, 18 aa, Homo sapiens
  CDR3 for alpha chain variable domain of TCR clone 349227 (TRAV26-1, TRAJ52)
CIVRVEGAGGTRHGKLTF

SEQ ID NO: 698454 - protein, 13 aa, Homo sapiens
  CDR3 for beta chain variable domain of TCR clone 349227 (TRBV7-3, TRBJ1-2)
CASSLKRGYGYTF

SEQ ID NO: 698455 - protein, 13 aa, Homo sapiens
  CDR3 for alpha chain variable domain of TCR clone 349228 (TRAV20, TRAJ37)
CAGCSSNTGKLTF

SEQ ID NO: 698456 - protein, 11 aa, Homo sapiens
  CDR3 for beta chain variable domain of TCR clone 349228 (TRBV12-4, TRBJ2-3)
CGSTATDTQYF

SEQ ID NO: 698457 - protein, 10 aa, Homo sapiens
  CDR3 for alpha chain variable domain of TCR clone 349229 (TRAV38-2/DV8, TRAJ21)
CAYRSNNFYF

SEQ ID NO: 698458 - protein, 12 aa, Homo sapiens
  CDR3 for beta chain variable domain of TCR clone 349229 (TRBV11-3, TRBJ2-3)
CASSLWEDTQYF

SEQ ID NO: 698459 - protein, 15 aa, Homo sapiens
  CDR3 for alpha chain variable domain of TCR clone 349230 (TRAV17, TRAJ57)
CATGPSQGGSEKLVF

SEQ ID NO: 698460 - protein, 11 aa, Homo sapiens
  CDR3 for beta chain variable domain of TCR clone 349230 (TRBV27, TRBJ2-7)
CASSLGYEQYF

SEQ ID NO: 698461 - protein, 17 aa, Homo sapiens
  CDR3 for alpha chain variable domain of TCR clone 349231 (TRAV16, TRAJ26)
CALSGSEFCPWSRNQIV

SEQ ID NO: 698462 - protein, 12 aa, Homo sapiens
  CDR3 for beta chain variable domain of TCR clone 349231 (TRBV11-2, TRBJ2-1)
CASSPGNNEQFF

SEQ ID NO: 698463 - protein, 17 aa, Homo sapiens
  CDR3 for alpha chain variable domain of TCR clone 349232 (TRAV13-1, TRAJ52)
CAAGHNAGGTSYGKLTF

SEQ ID NO: 698464 - protein, 13 aa, Homo sapiens
  CDR3 for beta chain variable domain of TCR clone 349232 (TRBV7-2, TRBJ1-1)
CASNLKGAKVAFF

SEQ ID NO: 698465 - protein, 13 aa, Homo sapiens
  CDR3 for alpha chain variable domain of TCR clone 349233 (TRAV25, TRAJ26)
CAGMDNYGQNFVF

SEQ ID NO: 698466 - protein, 14 aa, Homo sapiens
  CDR3 for beta chain variable domain of TCR clone 349233 (TRBV19, TRBJ2-1)
CASPTFVLSGEQFF

SEQ ID NO: 698467 - protein, 13 aa, Homo sapiens
  CDR3 for alpha chain variable domain of TCR clone 349234 (TRAV2, TRAJ15)
CAVASQAGTALIF

SEQ ID NO: 698468 - protein, 12 aa, Homo sapiens
  CDR3 for beta chain variable domain of TCR clone 349234 (TRBV19, TRBJ2-7)
CASTSVGSEQYF

SEQ ID NO: 698469 - protein, 11 aa, Homo sapiens
  CDR3 for alpha chain variable domain of TCR clone 349235 (TRAV21, TRAJ34)
CAVTNTDELIF

SEQ ID NO: 698470 - protein, 17 aa, Homo sapiens
  CDR3 for beta chain variable domain of TCR clone 349235 (TRBV5-1, TRBJ1-6)
CASSFGEVSSYNSPLHF

SEQ ID NO: 698471 - protein, 18 aa, Homo sapiens
  CDR3 for alpha chain variable domain of TCR clone 349236 (TRAV12-2, )
CAVADIQNPDPAVYQLRD

SEQ ID NO: 698472 - protein, 13 aa, Homo sapiens
  CDR3 for beta chain variable domain of TCR clone 349236 (TRBV7-9, TRBJ1-2)
CASSLKQNYGYTF

SEQ ID NO: 698473 - protein, 12 aa, Homo sapiens
  CDR3 for alpha chain variable domain of TCR clone 349237 (TRAV12-3, TRAJ17)
CAMTLTGNKLTF

SEQ ID NO: 698474 - protein, 10 aa, Homo sapiens
  CDR3 for beta chain variable domain of TCR clone 349237 (TRBV20-1, TRBJ2-5)
IGSLGGTQYF

SEQ ID NO: 698475 - protein, 13 aa, Homo sapiens
  CDR3 for alpha chain variable domain of TCR clone 349238 (TRAV2, TRAJ21)
CAPGVTRKLPLDL

SEQ ID NO: 698476 - protein, 16 aa, Homo sapiens
  CDR3 for beta chain variable domain of TCR clone 349238 (TRBV19, TRBJ2-1)
CASSKAGPSSYNEQFF

SEQ ID NO: 698477 - protein, 11 aa, Homo sapiens
  CDR3 for alpha chain variable domain of TCR clone 349239 (TRAV35, TRAJ30)
CAGPGDDKIIF

SEQ ID NO: 698478 - protein, 12 aa, Homo sapiens
  CDR3 for beta chain variable domain of TCR clone 349239 (TRBV7-2, TRBJ2-5)
CASSQYQETQYF

SEQ ID NO: 698479 - protein, 14 aa, Homo sapiens
  CDR3 for alpha chain variable domain of TCR clone 349240 (TRAV38-1, TRAJ28)
CAFTSGAGSYQLTF

SEQ ID NO: 698480 - protein, 14 aa, Homo sapiens
  CDR3 for beta chain variable domain of TCR clone 349240 (TRBV9, TRBJ2-1)
CASSVAGTFDEQFF

SEQ ID NO: 698481 - protein, 15 aa, Homo sapiens
  CDR3 for alpha chain variable domain of TCR clone 349241 (TRAV3, TRAJ42)
CAVRGGTGSQGNLIF

SEQ ID NO: 698482 - protein, 12 aa, Homo sapiens
  CDR3 for beta chain variable domain of TCR clone 349241 (TRBV11-2, TRBJ2-1)
CASSPGNNEQFF

SEQ ID NO: 698483 - protein, 12 aa, Homo sapiens
  CDR3 for alpha chain variable domain of TCR clone 349242 (TRAV13-1, TRAJ43)
CAAGRFNNDMRL

SEQ ID NO: 698484 - protein, 14 aa, Homo sapiens
  CDR3 for beta chain variable domain of TCR clone 349242 (TRBV4-2, TRBJ2-1)
CASGLDRAYNEQFF

SEQ ID NO: 698485 - protein, 11 aa, Homo sapiens
  CDR3 for alpha chain variable domain of TCR clone 349243 (TRAV3, TRAJ21)
CAVGNFNKFYF

SEQ ID NO: 698486 - protein, 14 aa, Homo sapiens
  CDR3 for beta chain variable domain of TCR clone 349243 (TRBV19, TRBJ2-1)
CASGRAGPGNEQFF

SEQ ID NO: 698487 - protein, 14 aa, Homo sapiens
  CDR3 for alpha chain variable domain of TCR clone 349244 (TRAV3, TRAJ9)
CAVRLNTGGFKTIF

SEQ ID NO: 698488 - protein, 15 aa, Homo sapiens
  CDR3 for beta chain variable domain of TCR clone 349244 (TRBV7-2, TRBJ2-1)
CASSLDSGRVNEQFF

SEQ ID NO: 698489 - protein, 11 aa, Homo sapiens
  CDR3 for alpha chain variable domain of TCR clone 349245 (TRAV2, TRAJ13)
CASGGYQKGTF

SEQ ID NO: 698490 - protein, 11 aa, Homo sapiens
  CDR3 for beta chain variable domain of TCR clone 349245 (TRBV5-6, TRBJ2-5)
CASSLERTQYF

SEQ ID NO: 698491 - protein, 11 aa, Homo sapiens
  CDR3 for alpha chain variable domain of TCR clone 349246 (TRAV1-1, TRAJ31)
CAAFPNARLMF

SEQ ID NO: 698492 - protein, 13 aa, Homo sapiens
  CDR3 for beta chain variable domain of TCR clone 349246 (TRBV19, TRBJ1-2)
CASSQGQVYGYTF

SEQ ID NO: 698493 - protein, 13 aa, Homo sapiens
  CDR3 for alpha chain variable domain of TCR clone 349247 (TRAV17, TRAJ39)
CATDADPKQHAHL

SEQ ID NO: 698494 - protein, 15 aa, Homo sapiens
  CDR3 for beta chain variable domain of TCR clone 349247 (TRBV6-5, TRBJ2-3)
CASSTLAGGGDTQYF

SEQ ID NO: 698495 - protein, 13 aa, Homo sapiens
  CDR3 for alpha chain variable domain of TCR clone 349248 (TRAV36/DV7, TRAJ41)
CAVEANSGYALNF

SEQ ID NO: 698496 - protein, 13 aa, Homo sapiens
  CDR3 for beta chain variable domain of TCR clone 349248 (TRBV19, TRBJ1-2)
CASSVPGQDGYTF

SEQ ID NO: 698497 - protein, 12 aa, Homo sapiens
  CDR3 for alpha chain variable domain of TCR clone 349249 (TRAV12-3, TRAJ17)
CAMTLTGNKLTF

SEQ ID NO: 698498 - protein, 15 aa, Homo sapiens
  CDR3 for beta chain variable domain of TCR clone 349249 (TRBV10-2, TRBJ2-6)
CASSEQGTGANVPTF

SEQ ID NO: 698499 - protein, 13 aa, Homo sapiens
  CDR3 for alpha chain variable domain of TCR clone 349250 (TRAV13-1, TRAJ11)
CAASIRGYSTLTF

SEQ ID NO: 698500 - protein, 13 aa, Homo sapiens
  CDR3 for beta chain variable domain of TCR clone 349250 (TRBV10-3, TRBJ2-7)
CASKLAVNYEQYF

SEQ ID NO: 698501 - protein, 16 aa, Homo sapiens
  CDR3 for alpha chain variable domain of TCR clone 349251 (TRAV27, TRAJ37)
CVLLSVGSGNTGKLIF

SEQ ID NO: 698502 - protein, 15 aa, Homo sapiens
  CDR3 for beta chain variable domain of TCR clone 349251 (TRBV7-9, TRBJ2-2)
CASSTETGAGGELFF

SEQ ID NO: 698503 - protein, 14 aa, Homo sapiens
  CDR3 for alpha chain variable domain of TCR clone 349252 (TRAV13-1, TRAJ44)
CAAKATGTASKLTF

SEQ ID NO: 698504 - protein, 16 aa, Homo sapiens
  CDR3 for beta chain variable domain of TCR clone 349252 (TRBV5-4, TRBJ2-3)
CASRQPGAGGADTQYF

SEQ ID NO: 698505 - protein, 15 aa, Homo sapiens
  CDR3 for alpha chain variable domain of TCR clone 349253 (TRAV17, TRAJ57)
CATGPSQGGSEMLVF

SEQ ID NO: 698506 - protein, 14 aa, Homo sapiens
  CDR3 for beta chain variable domain of TCR clone 349253 (TRBV13, TRBJ2-5)
CASSLERVGETQYF

SEQ ID NO: 698507 - protein, 14 aa, Homo sapiens
  CDR3 for alpha chain variable domain of TCR clone 349254 (TRAV21, TRAJ35)
CAVMPIGFGNVLHC

SEQ ID NO: 698508 - protein, 14 aa, Homo sapiens
  CDR3 for beta chain variable domain of TCR clone 349254 (TRBV7-2, TRBJ1-6)
CASSLQGANSPLHF

SEQ ID NO: 698509 - protein, 15 aa, Homo sapiens
  CDR3 for alpha chain variable domain of TCR clone 349255 (TRAV23/DV6, TRAJ45)
CAASSAGGGADGLTF

SEQ ID NO: 698510 - protein, 16 aa, Homo sapiens
  CDR3 for beta chain variable domain of TCR clone 349255 (TRBV12-4, TRBJ2-1)
CASRRTSGTPTMSSSS

SEQ ID NO: 698511 - protein, 12 aa, Homo sapiens
  CDR3 for alpha chain variable domain of TCR clone 349256 (TRAV1-1, TRAJ23)
CAVTNQGGKLIF

SEQ ID NO: 698512 - protein, 16 aa, Homo sapiens
  CDR3 for beta chain variable domain of TCR clone 349256 (TRBV3-1, TRBJ2-3)
CASSQGTGYGTDTQYF

SEQ ID NO: 698513 - protein, 13 aa, Homo sapiens
  CDR3 for alpha chain variable domain of TCR clone 349257 (TRAV12-3, TRAJ13)
CAMSSGGYQKVTF

SEQ ID NO: 698514 - protein, 13 aa, Homo sapiens
  CDR3 for beta chain variable domain of TCR clone 349257 (TRBV20-1, TRBJ1-1)
CSAPPGCHTEAFF

SEQ ID NO: 698515 - protein, 13 aa, Homo sapiens
  CDR3 for alpha chain variable domain of TCR clone 349258 (TRAV2, TRAJ13)
CAVESGGYQKVTF

SEQ ID NO: 698516 - protein, 14 aa, Homo sapiens
  CDR3 for beta chain variable domain of TCR clone 349258 (TRBV25-1, TRBJ1-1)
CASTHLGGNTEAFF

SEQ ID NO: 698517 - protein, 15 aa, Homo sapiens
  CDR3 for alpha chain variable domain of TCR clone 349259 (TRAV21, TRAJ53)
CATLNSGGSNYKLTF

SEQ ID NO: 698518 - protein, 19 aa, Homo sapiens
  CDR3 for beta chain variable domain of TCR clone 349259 (TRBV23-1, TRBJ2-3)
TVSLRQQPRSTGSTDTQYF

SEQ ID NO: 698519 - protein, 12 aa, Homo sapiens
  CDR3 for alpha chain variable domain of TCR clone 349260 (TRAV1-1, TRAJ20)
CAVRDRTTSSAL

SEQ ID NO: 698520 - protein, 18 aa, Homo sapiens
  CDR3 for beta chain variable domain of TCR clone 349260 (TRBV20-1, TRBJ2-6)
CSAETTTTHGSGANVLTF

SEQ ID NO: 698521 - protein, 15 aa, Homo sapiens
  CDR3 for alpha chain variable domain of TCR clone 349261 (TRAV12-1, TRAJ45)
CVVLSGGGGADGLTF

SEQ ID NO: 698522 - protein, 15 aa, Homo sapiens
  CDR3 for beta chain variable domain of TCR clone 349261 (TRBV6-6, TRBJ2-7)
CASSYSYGGSYEQYF

SEQ ID NO: 698523 - protein, 15 aa, Homo sapiens
  CDR3 for alpha chain variable domain of TCR clone 349262 (TRAV26-1, TRAJ42)
FIVRVKGGRQGNLIF

SEQ ID NO: 698524 - protein, 14 aa, Homo sapiens
  CDR3 for beta chain variable domain of TCR clone 349262 (TRBV19, TRBJ2-2)
CATTGHANTGELFF

SEQ ID NO: 698525 - protein, 12 aa, Homo sapiens
  CDR3 for alpha chain variable domain of TCR clone 349263 (TRAV12-1, TRAJ34)
CVVAGATDKLIF

SEQ ID NO: 698526 - protein, 12 aa, Homo sapiens
  CDR3 for beta chain variable domain of TCR clone 349263 (TRBV7-9, TRBJ2-7)
CASSLEGYEQYF

SEQ ID NO: 698527 - protein, 13 aa, Homo sapiens
  CDR3 for alpha chain variable domain of TCR clone 349264 (TRAV27, TRAJ43)
CAGAGNNNNDMRF

SEQ ID NO: 698528 - protein, 14 aa, Homo sapiens
  CDR3 for beta chain variable domain of TCR clone 349264 (TRBV7-2, TRBJ2-7)
CASSSQGAAYEQYF

SEQ ID NO: 698529 - protein, 13 aa, Homo sapiens
  CDR3 for alpha chain variable domain of TCR clone 349265 (TRAV1-2, TRAJ9)
CAALNTGGFKTIF

SEQ ID NO: 698530 - protein, 17 aa, Homo sapiens
  CDR3 for beta chain variable domain of TCR clone 349265 (TRBV19, TRBJ2-6)
CASSSHGGPSGANVLTF

SEQ ID NO: 698531 - protein, 14 aa, Homo sapiens
  CDR3 for alpha chain variable domain of TCR clone 349266 (TRAV17, TRAJ57)
CATEPQGGSEKLVF

SEQ ID NO: 698532 - protein, 14 aa, Homo sapiens
  CDR3 for beta chain variable domain of TCR clone 349266 (TRBV11-2, TRBJ2-3)
CASSLGGGANTQYF

SEQ ID NO: 698533 - protein, 16 aa, Homo sapiens
  CDR3 for alpha chain variable domain of TCR clone 349267 (TRAV3, TRAJ37)
FAVRGKGSGNTGTLIF

SEQ ID NO: 698534 - protein, 13 aa, Homo sapiens
  CDR3 for beta chain variable domain of TCR clone 349267 (TRBV14, TRBJ2-7)
CASSQDRRYEQYF

SEQ ID NO: 698535 - protein, 16 aa, Homo sapiens
  CDR3 for alpha chain variable domain of TCR clone 349268 (TRAV12-2, TRAJ6)
CAAPLAGSGASYIPTF

SEQ ID NO: 698536 - protein, 13 aa, Homo sapiens
  CDR3 for beta chain variable domain of TCR clone 349268 (TRBV6-9, TRBJ2-5)
CASKGDGRRTQYF

SEQ ID NO: 698537 - protein, 14 aa, Homo sapiens
  CDR3 for alpha chain variable domain of TCR clone 349269 (TRAV1-2, TRAJ16)
CAVNRFSDVQKLLF

SEQ ID NO: 698538 - protein, 16 aa, Homo sapiens
  CDR3 for beta chain variable domain of TCR clone 349269 (TRBV9, TRBJ2-1)
CASSVGGGGNYNEQFF

SEQ ID NO: 698539 - protein, 16 aa, Homo sapiens
  CDR3 for alpha chain variable domain of TCR clone 349270 (TRAV3, TRAJ37)
CAVRGKGAGKTGKLIF

SEQ ID NO: 698540 - protein, 13 aa, Homo sapiens
  CDR3 for beta chain variable domain of TCR clone 349270 (TRBV7-2, TRBJ2-2)
CASSSVRAGELVF

SEQ ID NO: 698541 - protein, 14 aa, Homo sapiens
  CDR3 for alpha chain variable domain of TCR clone 349271 (TRAV17, TRAJ54)
CATDANQGAQKLVF

SEQ ID NO: 698542 - protein, 12 aa, Homo sapiens
  CDR3 for beta chain variable domain of TCR clone 349271 (TRBV6-3, TRBJ2-1)
CDSSGSYNEQFF

SEQ ID NO: 698543 - protein, 12 aa, Homo sapiens
  CDR3 for alpha chain variable domain of TCR clone 349272 (TRAV8-6, TRAJ8)
CAVAPGFQKLVF

SEQ ID NO: 698544 - protein, 16 aa, Homo sapiens
  CDR3 for beta chain variable domain of TCR clone 349272 (TRBV7-3, TRBJ2-2)
CASSLKRGTLSGELFF

SEQ ID NO: 698545 - protein, 12 aa, Homo sapiens
  CDR3 for alpha chain variable domain of TCR clone 349273 (TRAV27, TRAJ37)
CADSGNTGKLIF

SEQ ID NO: 698546 - protein, 18 aa, Homo sapiens
  CDR3 for beta chain variable domain of TCR clone 349273 (TRBV7-9, TRBJ1-1)
CASSKPWDTMGMNNEAFF

SEQ ID NO: 698547 - protein, 13 aa, Homo sapiens
  CDR3 for alpha chain variable domain of TCR clone 349274 (TRAV16, TRAJ28)
CAPTGAGGYQLTF

SEQ ID NO: 698548 - protein, 16 aa, Homo sapiens
  CDR3 for beta chain variable domain of TCR clone 349274 (TRBV28, TRBJ1-5)
CASSLTGQGWDQPQHF

SEQ ID NO: 698549 - protein, 14 aa, Homo sapiens
  CDR3 for alpha chain variable domain of TCR clone 349275 (TRAV17, TRAJ6)
CATNPAGGSYIPTF

SEQ ID NO: 698550 - protein, 13 aa, Homo sapiens
  CDR3 for beta chain variable domain of TCR clone 349275 (TRBV4-2, TRBJ1-1)
CASSQAGNTEAFF

SEQ ID NO: 698551 - protein, 13 aa, Homo sapiens
  CDR3 for alpha chain variable domain of TCR clone 349276 (TRAV8-6, TRAJ34)
CAVSDQGTDKLIF

SEQ ID NO: 698552 - protein, 13 aa, Homo sapiens
  CDR3 for beta chain variable domain of TCR clone 349276 (TRBV18, TRBJ1-1)
CASSPETKPEAFF

SEQ ID NO: 698553 - protein, 13 aa, Homo sapiens
  CDR3 for alpha chain variable domain of TCR clone 349277 (TRAV2, TRAJ15)
CAVASQAGTALIF

SEQ ID NO: 698554 - protein, 16 aa, Homo sapiens
  CDR3 for beta chain variable domain of TCR clone 349277 (TRBV20-1, TRBJ1-4)
CSAPGQVLLTNEKLFF

SEQ ID NO: 698555 - protein, 13 aa, Homo sapiens
  CDR3 for alpha chain variable domain of TCR clone 349278 (TRAV26-1, TRAJ33)
CIVRVEGNYQLIW

SEQ ID NO: 698556 - protein, 16 aa, Homo sapiens
  CDR3 for beta chain variable domain of TCR clone 349278 (TRBV15, TRBJ2-7)
CATSRDRGRRRGEQYF

SEQ ID NO: 698557 - protein, 12 aa, Homo sapiens
  CDR3 for alpha chain variable domain of TCR clone 349279 (TRAV21, TRAJ17)
CAVIAAGNKLTF

SEQ ID NO: 698558 - protein, 15 aa, Homo sapiens
  CDR3 for beta chain variable domain of TCR clone 349279 (TRBV11-2, TRBJ2-1)
RASSLTSGGYNEQFF

SEQ ID NO: 698559 - protein, 14 aa, Homo sapiens
  CDR3 for alpha chain variable domain of TCR clone 349280 (TRAV3, TRAJ48)
CAVRLSFVNEKLTF

SEQ ID NO: 698560 - protein, 13 aa, Homo sapiens
  CDR3 for beta chain variable domain of TCR clone 349280 (TRBV10-3, TRBJ2-7)
CASKLAVNYEQYF

SEQ ID NO: 698561 - protein, 16 aa, Homo sapiens
  CDR3 for alpha chain variable domain of TCR clone 349281 (TRAV3, TRAJ10)
CAVRDMRAGGGNKLTF

SEQ ID NO: 698562 - protein, 17 aa, Homo sapiens
  CDR3 for beta chain variable domain of TCR clone 349281 (TRBV28, TRBJ2-5)
CASSTPEGDAVQETQYF

SEQ ID NO: 698563 - protein, 10 aa, Homo sapiens
  CDR3 for alpha chain variable domain of TCR clone 349282 (TRAV12-1, TRAJ43)
CVVHNNDIRF

SEQ ID NO: 698564 - protein, 16 aa, Homo sapiens
  CDR3 for beta chain variable domain of TCR clone 349282 (TRBV20-1, TRBJ2-1)
CSARDHLAGGRGEQFF

SEQ ID NO: 698565 - protein, 15 aa, Homo sapiens
  CDR3 for alpha chain variable domain of TCR clone 349283 (TRAV3, TRAJ47)
CAVRDIGEYGNKLVF

SEQ ID NO: 698566 - protein, 14 aa, Homo sapiens
  CDR3 for beta chain variable domain of TCR clone 349283 (TRBV13, TRBJ2-5)
CASSLERGGETQYF

SEQ ID NO: 698567 - protein, 18 aa, Homo sapiens
  CDR3 for alpha chain variable domain of TCR clone 349284 (TRAV13-1, TRAJ52)
CAAKNPNDGGTSYGKLTF

SEQ ID NO: 698568 - protein, 14 aa, Homo sapiens
  CDR3 for beta chain variable domain of TCR clone 349284 (TRBV7-3, TRBJ2-1)
CASSLAGGTNEQFF

SEQ ID NO: 698569 - protein, 13 aa, Homo sapiens
  CDR3 for alpha chain variable domain of TCR clone 349285 (TRAV17, TRAJ9)
GATDYTGGFKTIF

SEQ ID NO: 698570 - protein, 14 aa, Homo sapiens
  CDR3 for beta chain variable domain of TCR clone 349285 (TRBV19, TRBJ2-5)
CASSMTGQQETQYF

SEQ ID NO: 698571 - protein, 12 aa, Homo sapiens
  CDR3 for alpha chain variable domain of TCR clone 349286 (TRAV8-3, TRAJ41)
CAVALSGYALNF

SEQ ID NO: 698572 - protein, 18 aa, Homo sapiens
  CDR3 for beta chain variable domain of TCR clone 349286 (TRBV20-1, TRBJ2-6)
CSAETTPTHGSGANLLTF

SEQ ID NO: 698573 - protein, 14 aa, Homo sapiens
  CDR3 for alpha chain variable domain of TCR clone 349287 (TRAV12-1, TRAJ45)
CVVNVGGGADGLTF

SEQ ID NO: 698574 - protein, 15 aa, Homo sapiens
  CDR3 for beta chain variable domain of TCR clone 349287 (TRBV7-9, TRBJ1-5)
CASSQGRQPNQPQHF

SEQ ID NO: 698575 - protein, 14 aa, Homo sapiens
  CDR3 for alpha chain variable domain of TCR clone 349288 (TRAV21, TRAJ58)
CAVRRGRSGSRLTF

SEQ ID NO: 698576 - protein, 19 aa, Homo sapiens
  CDR3 for beta chain variable domain of TCR clone 349288 (TRBV19, TRBJ2-5)
CASSIGQVTDFFLGETQYF

SEQ ID NO: 698577 - protein, 19 aa, Homo sapiens
  CDR3 for alpha chain variable domain of TCR clone 349289 (TRAV2, TRAJ20)
ILQVREEDAAVYRDCKLSF

SEQ ID NO: 698578 - protein, 17 aa, Homo sapiens
  CDR3 for beta chain variable domain of TCR clone 349289 (TRBV11-2, TRBJ2-1)
CASSLYPPGVEYNEQFF

SEQ ID NO: 698579 - protein, 14 aa, Homo sapiens
  CDR3 for alpha chain variable domain of TCR clone 349290 (TRAV29/DV5, TRAJ36)
CAARRKTGENNLFF

SEQ ID NO: 698580 - protein, 16 aa, Homo sapiens
  CDR3 for beta chain variable domain of TCR clone 349290 (TRBV7-9, TRBJ2-1)
CASSDVAGGSYNEQFF

SEQ ID NO: 698581 - protein, 14 aa, Homo sapiens
  CDR3 for alpha chain variable domain of TCR clone 349291 (TRAV8-3, TRAJ4)
CAVGASGGYNKLIF

SEQ ID NO: 698582 - protein, 16 aa, Homo sapiens
  CDR3 for beta chain variable domain of TCR clone 349291 (TRBV4-3, TRBJ2-2)
CASSQLQGSGTGELFV

SEQ ID NO: 698583 - protein, 15 aa, Homo sapiens
  CDR3 for alpha chain variable domain of TCR clone 349292 (TRAV35, TRAJ58)
CAGRRQETSGSRLTF

SEQ ID NO: 698584 - protein, 15 aa, Homo sapiens
  CDR3 for beta chain variable domain of TCR clone 349292 (TRBV6-3, TRBJ2-7)
CASSSPGTVFYEQYF

SEQ ID NO: 698585 - protein, 12 aa, Homo sapiens
  CDR3 for alpha chain variable domain of TCR clone 349293 (TRAV13-1, TRAJ53)
AASGGSNYKLTF

SEQ ID NO: 698586 - protein, 15 aa, Homo sapiens
  CDR3 for beta chain variable domain of TCR clone 349293 (TRBV5-1, TRBJ2-1)
CASSPPRAPYNEQFY

SEQ ID NO: 698587 - protein, 14 aa, Homo sapiens
  CDR3 for alpha chain variable domain of TCR clone 349294 (TRAV2, TRAJ9)
CAVEDRSGGFKTIF

SEQ ID NO: 698588 - protein, 15 aa, Homo sapiens
  CDR3 for beta chain variable domain of TCR clone 349294 (TRBV4-1, TRBJ2-3)
CASSRGQGIPDTQYF

SEQ ID NO: 698589 - protein, 14 aa, Homo sapiens
  CDR3 for alpha chain variable domain of TCR clone 349295 (TRAV1-2, TRAJ8)
CAVREDTGLQKLVF

SEQ ID NO: 698590 - protein, 15 aa, Homo sapiens
  CDR3 for beta chain variable domain of TCR clone 349295 (TRBV6-6, TRBJ2-7)
CASSYSYGGSYEQYF

SEQ ID NO: 698591 - protein, 13 aa, Homo sapiens
  CDR3 for alpha chain variable domain of TCR clone 349296 (TRAV29/DV5, TRAJ31)
CAASRNNNARPMF

SEQ ID NO: 698592 - protein, 12 aa, Homo sapiens
  CDR3 for beta chain variable domain of TCR clone 349296 (TRBV14, TRBJ2-7)
CASSLYKDEQYF

SEQ ID NO: 698593 - protein, 15 aa, Homo sapiens
  CDR3 for alpha chain variable domain of TCR clone 349297 (TRAV12-2, TRAJ53)
CAVNGGGGSNYKMPF

SEQ ID NO: 698594 - protein, 17 aa, Homo sapiens
  CDR3 for beta chain variable domain of TCR clone 349297 (TRBV7-3, TRBJ2-3)
CASSLMKRMRGADTQYF

SEQ ID NO: 698595 - protein, 13 aa, Homo sapiens
  CDR3 for alpha chain variable domain of TCR clone 349298 (TRAV13-1, TRAJ49)
CAAPVNSGNQFYF

SEQ ID NO: 698596 - protein, 15 aa, Homo sapiens
  CDR3 for beta chain variable domain of TCR clone 349298 (TRBV7-2, TRBJ1-5)
CASSLDRGQDQPQHF

SEQ ID NO: 698597 - protein, 13 aa, Homo sapiens
  CDR3 for alpha chain variable domain of TCR clone 349299 (TRAV12-1, TRAJ39)
CGDDTNAGNMLTF

SEQ ID NO: 698598 - protein, 16 aa, Homo sapiens
  CDR3 for beta chain variable domain of TCR clone 349299 (TRBV7-2, TRBJ1-2)
CASSSNQDRRGHGYTF

SEQ ID NO: 698599 - protein, 16 aa, Homo sapiens
  CDR3 for alpha chain variable domain of TCR clone 349300 (TRAV23/DV6, TRAJ52)
CAASMNGGTSYRKLQF

SEQ ID NO: 698600 - protein, 12 aa, Homo sapiens
  CDR3 for beta chain variable domain of TCR clone 349300 (TRBV7-9, TRBJ2-7)
CASSLEGYEQYF

SEQ ID NO: 698601 - protein, 12 aa, Homo sapiens
  CDR3 for alpha chain variable domain of TCR clone 349301 (TRAV21, TRAJ13)
PGPSGGYQKVTF

SEQ ID NO: 698602 - protein, 12 aa, Homo sapiens
  CDR3 for beta chain variable domain of TCR clone 349301 (TRBV28, TRBJ2-3)
CASSLYRDTQYF

SEQ ID NO: 698603 - protein, 14 aa, Homo sapiens
  CDR3 for alpha chain variable domain of TCR clone 349302 (TRAV8-2, TRAJ4)
CVVSPSGGYNKLIF

SEQ ID NO: 698604 - protein, 13 aa, Homo sapiens
  CDR3 for beta chain variable domain of TCR clone 349302 (TRBV19, TRBJ2-1)
CASSMYRVNEQFF

SEQ ID NO: 698605 - protein, 14 aa, Homo sapiens
  CDR3 for alpha chain variable domain of TCR clone 349303 (TRAV22, TRAJ58)
CAVEDRTSGSRLTF

SEQ ID NO: 698606 - protein, 15 aa, Homo sapiens
  CDR3 for beta chain variable domain of TCR clone 349303 (TRBV6-3, TRBJ2-3)
RLIHYSVGQADTQYF

SEQ ID NO: 698607 - protein, 12 aa, Homo sapiens
  CDR3 for alpha chain variable domain of TCR clone 349304 (TRAV21, TRAJ23)
CAVMLQGGKLIF

SEQ ID NO: 698608 - protein, 13 aa, Homo sapiens
  CDR3 for beta chain variable domain of TCR clone 349304 (TRBV4-2, TRBJ1-1)
CASSQAGNTEAFF

SEQ ID NO: 698609 - protein, 14 aa, Homo sapiens
  CDR3 for alpha chain variable domain of TCR clone 349305 (TRAV1-2, TRAJ16)
CAVNRFSDGQKLLF

SEQ ID NO: 698610 - protein, 18 aa, Homo sapiens
  CDR3 for beta chain variable domain of TCR clone 349305 (TRBV18, TRBJ2-1)
CASCPNWGQGAPKCEQFS

SEQ ID NO: 698611 - protein, 13 aa, Homo sapiens
  CDR3 for alpha chain variable domain of TCR clone 349306 (TRAV1-2, TRAJ31)
CAVRGYNDARLMF

SEQ ID NO: 698612 - protein, 15 aa, Homo sapiens
  CDR3 for beta chain variable domain of TCR clone 349306 (TRBV5-7, TRBJ2-7)
CASSLGPGRGHEQYF

SEQ ID NO: 698613 - protein, 11 aa, Homo sapiens
  CDR3 for alpha chain variable domain of TCR clone 349307 (TRAV2, TRAJ33)
CAVDSNYQLIW

SEQ ID NO: 698614 - protein, 13 aa, Homo sapiens
  CDR3 for beta chain variable domain of TCR clone 349307 (TRBV11-2, TRBJ2-1)
CASSLDLVNEQFF

SEQ ID NO: 698615 - protein, 14 aa, Homo sapiens
  CDR3 for alpha chain variable domain of TCR clone 349308 (TRAV26-1, TRAJ38)
CIADNSGNKRKLIC

SEQ ID NO: 698616 - protein, 13 aa, Homo sapiens
  CDR3 for beta chain variable domain of TCR clone 349308 (TRBV20-1, TRBJ1-1)
CSARGGGNTEAFF

SEQ ID NO: 698617 - protein, 15 aa, Homo sapiens
  CDR3 for alpha chain variable domain of TCR clone 349309 (TRAV12-2, TRAJ57)
CAVSRGQGGSEKLVF

SEQ ID NO: 698618 - protein, 14 aa, Homo sapiens
  CDR3 for beta chain variable domain of TCR clone 349309 (TRBV20-1, TRBJ2-1)
CSAHPGLPYYEQFF

SEQ ID NO: 698619 - protein, 13 aa, Homo sapiens
  CDR3 for alpha chain variable domain of TCR clone 349310 (TRAV13-1, TRAJ9)
CAARGTGGFKTIS

SEQ ID NO: 698620 - protein, 13 aa, Homo sapiens
  CDR3 for beta chain variable domain of TCR clone 349310 (TRBV7-9, TRBJ1-2)
CASSLKQNYGYTF

SEQ ID NO: 698621 - protein, 12 aa, Homo sapiens
  CDR3 for alpha chain variable domain of TCR clone 349311 (TRAV13-1, TRAJ49)
CAASIRSNQFYF

SEQ ID NO: 698622 - protein, 13 aa, Homo sapiens
  CDR3 for beta chain variable domain of TCR clone 349311 (TRBV7-2, TRBJ2-1)
CASNRDRWNEQFF

SEQ ID NO: 698623 - protein, 14 aa, Homo sapiens
  CDR3 for alpha chain variable domain of TCR clone 349312 (TRAV39, TRAJ54)
CAVVLIQGAQKLVF

SEQ ID NO: 698624 - protein, 14 aa, Homo sapiens
  CDR3 for beta chain variable domain of TCR clone 349312 (TRBV11-2, TRBJ1-5)
CASSLDRGRQPQHF

SEQ ID NO: 698625 - protein, 10 aa, Homo sapiens
  CDR3 for alpha chain variable domain of TCR clone 349313 (TRAV8-4, TRAJ43)
CAVSADDTRF

SEQ ID NO: 698626 - protein, 15 aa, Homo sapiens
  CDR3 for beta chain variable domain of TCR clone 349313 (TRBV5-1, TRBJ2-3)
CASSVTAGSTDTQYF

SEQ ID NO: 698627 - protein, 16 aa, Homo sapiens
  CDR3 for alpha chain variable domain of TCR clone 349314 (TRAV30, TRAJ24)
CGTEIVDADSWGKIRF

SEQ ID NO: 698628 - protein, 14 aa, Homo sapiens
  CDR3 for beta chain variable domain of TCR clone 349314 (TRBV12-5, TRBJ2-5)
CASGSRTHQETQYF

SEQ ID NO: 698629 - protein, 12 aa, Homo sapiens
  CDR3 for alpha chain variable domain of TCR clone 349315 (TRAV12-3, TRAJ17)
CAITLTGNKLTF

SEQ ID NO: 698630 - protein, 15 aa, Homo sapiens
  CDR3 for beta chain variable domain of TCR clone 349315 (TRBV20-1, TRBJ2-7)
CSARDRFSGMDEQYF

SEQ ID NO: 698631 - protein, 14 aa, Homo sapiens
  CDR3 for alpha chain variable domain of TCR clone 349316 (TRAV9-2, TRAJ39)
CALYIYNAGNMLTF

SEQ ID NO: 698632 - protein, 13 aa, Homo sapiens
  CDR3 for beta chain variable domain of TCR clone 349316 (TRBV9, TRBJ2-7)
CASSVAEYYEQYF

SEQ ID NO: 698633 - protein, 14 aa, Homo sapiens
  CDR3 for alpha chain variable domain of TCR clone 349317 (TRAV12-2, TRAJ24)
YAVTPADSWGKLQF

SEQ ID NO: 698634 - protein, 12 aa, Homo sapiens
  CDR3 for beta chain variable domain of TCR clone 349317 (TRBV3-1, TRBJ2-1)
CASSQGSSGQFF

SEQ ID NO: 698635 - protein, 13 aa, Homo sapiens
  CDR3 for alpha chain variable domain of TCR clone 349318 (TRAV12-1, TRAJ26)
SATYLYYGQNFVF

SEQ ID NO: 698636 - protein, 17 aa, Homo sapiens
  CDR3 for beta chain variable domain of TCR clone 349318 (TRBV7-3, TRBJ2-3)
CASSLMKRMRGADTQYF

SEQ ID NO: 698637 - protein, 12 aa, Homo sapiens
  CDR3 for alpha chain variable domain of TCR clone 349319 (TRAV12-3, TRAJ17)
CAMTLTGNKLTL

SEQ ID NO: 698638 - protein, 10 aa, Homo sapiens
  CDR3 for beta chain variable domain of TCR clone 349319 (TRBV20-1, TRBJ2-7)
IGSLGWEQYF

SEQ ID NO: 698639 - protein, 13 aa, Homo sapiens
  CDR3 for alpha chain variable domain of TCR clone 349320 (TRAV3, TRAJ21)
CAVREPDFNKFYF

SEQ ID NO: 698640 - protein, 13 aa, Homo sapiens
  CDR3 for beta chain variable domain of TCR clone 349320 (TRBV27, TRBJ2-1)
CASRTLGVGEQFF

SEQ ID NO: 698641 - protein, 12 aa, Homo sapiens
  CDR3 for alpha chain variable domain of TCR clone 349321 (TRAV13-1, TRAJ3)
CAATGVQQCFQD

SEQ ID NO: 698642 - protein, 16 aa, Homo sapiens
  CDR3 for beta chain variable domain of TCR clone 349321 (TRBV7-3, TRBJ2-2)
CASSLKRGTLSGEMFF

SEQ ID NO: 698643 - protein, 14 aa, Homo sapiens
  CDR3 for alpha chain variable domain of TCR clone 349322 (TRAV26-1, TRAJ38)
CIADNAGNNRKLIW

SEQ ID NO: 698644 - protein, 18 aa, Homo sapiens
  CDR3 for beta chain variable domain of TCR clone 349322 (TRBV7-6, TRBJ2-1)
CASSPRTSGMSSYNEQFF

SEQ ID NO: 698645 - protein, 13 aa, Homo sapiens
  CDR3 for alpha chain variable domain of TCR clone 349323 (TRAV21, TRAJ27)
CAARPDNAGKSTF

SEQ ID NO: 698646 - protein, 14 aa, Homo sapiens
  CDR3 for beta chain variable domain of TCR clone 349323 (TRBV7-9, TRBJ2-5)
CASSLDTAQETQYF

SEQ ID NO: 698647 - protein, 13 aa, Homo sapiens
  CDR3 for alpha chain variable domain of TCR clone 349324 (TRAV3, TRAJ20)
CAVRDTPRYKLSF

SEQ ID NO: 698648 - protein, 16 aa, Homo sapiens
  CDR3 for beta chain variable domain of TCR clone 349324 (TRBV20-1, TRBJ2-7)
CSARAPGLAVSYEQYF

SEQ ID NO: 698649 - protein, 13 aa, Homo sapiens
  CDR3 for alpha chain variable domain of TCR clone 349325 (TRAV23/DV6, TRAJ21)
CAASIGNFNKFYF

SEQ ID NO: 698650 - protein, 14 aa, Homo sapiens
  CDR3 for beta chain variable domain of TCR clone 349325 (TRBV11-2, TRBJ2-7)
CASSSTGEGYEQYF

SEQ ID NO: 698651 - protein, 16 aa, Homo sapiens
  CDR3 for alpha chain variable domain of TCR clone 349326 (TRAV20, TRAJ53)
CAVQGNSGGSSYKLTF

SEQ ID NO: 698652 - protein, 16 aa, Homo sapiens
  CDR3 for beta chain variable domain of TCR clone 349326 (TRBV10-3, TRBJ2-6)
CAISTSGDLGANVLTF

SEQ ID NO: 698653 - protein, 14 aa, Homo sapiens
  CDR3 for alpha chain variable domain of TCR clone 349327 (TRAV1-2, TRAJ13)
CSVLNSGGYQKVTF

SEQ ID NO: 698654 - protein, 14 aa, Homo sapiens
  CDR3 for beta chain variable domain of TCR clone 349327 (TRBV12-4, TRBJ1-1)
CASSLNDMNTEAFF

SEQ ID NO: 698655 - protein, 13 aa, Homo sapiens
  CDR3 for alpha chain variable domain of TCR clone 349328 (TRAV17, TRAJ9)
CATDGTGGFKTIF

SEQ ID NO: 698656 - protein, 14 aa, Homo sapiens
  CDR3 for beta chain variable domain of TCR clone 349328 (TRBV2, TRBJ2-7)
CASSLTSGGYEQYF

SEQ ID NO: 698657 - protein, 13 aa, Homo sapiens
  CDR3 for alpha chain variable domain of TCR clone 349329 (TRAV20, TRAJ48)
CAVHLFGNEKLNF

SEQ ID NO: 698658 - protein, 15 aa, Homo sapiens
  CDR3 for beta chain variable domain of TCR clone 349329 (TRBV6-5, TRBJ2-6)
CASSQWEAGANVLTF

SEQ ID NO: 698659 - protein, 11 aa, Homo sapiens
  CDR3 for alpha chain variable domain of TCR clone 349330 (TRAV2, TRAJ13)
CASGGYQKVTF

SEQ ID NO: 698660 - protein, 12 aa, Homo sapiens
  CDR3 for beta chain variable domain of TCR clone 349330 (TRBV11-2, TRBJ2-2)
CASGLPTGELFF

SEQ ID NO: 698661 - protein, 13 aa, Homo sapiens
  CDR3 for alpha chain variable domain of TCR clone 349331 (TRAV26-1, TRAJ34)
CIVRGHNTDKLIF

SEQ ID NO: 698662 - protein, 15 aa, Homo sapiens
  CDR3 for beta chain variable domain of TCR clone 349331 (TRBV4-1, TRBJ2-7)
CASSQEWRPSYEQYF

SEQ ID NO: 698663 - protein, 17 aa, Homo sapiens
  CDR3 for alpha chain variable domain of TCR clone 349332 (TRAV3, TRAJ6)
CAVRDGPTAVGSYIPTF

SEQ ID NO: 698664 - protein, 14 aa, Homo sapiens
  CDR3 for beta chain variable domain of TCR clone 349332 (TRBV7-2, TRBJ2-7)
CASSPKTSFYEQYF

SEQ ID NO: 698665 - protein, 14 aa, Homo sapiens
  CDR3 for alpha chain variable domain of TCR clone 349333 (TRAV1-2, TRAJ16)
CAVNRFSAGQKLLF

SEQ ID NO: 698666 - protein, 15 aa, Homo sapiens
  CDR3 for beta chain variable domain of TCR clone 349333 (TRBV4-2, TRBJ1-1)
CASSQQGAGDTEAFF

SEQ ID NO: 698667 - protein, 18 aa, Homo sapiens
  CDR3 for alpha chain variable domain of TCR clone 349334 (TRAV29/DV5, TRAJ52)
CAAGFRGAGDTSYGKLTF

SEQ ID NO: 698668 - protein, 16 aa, Homo sapiens
  CDR3 for beta chain variable domain of TCR clone 349334 (TRBV7-3, TRBJ2-2)
CASSLKRGTLSGELFF

SEQ ID NO: 698669 - protein, 14 aa, Homo sapiens
  CDR3 for alpha chain variable domain of TCR clone 349335 (TRAV8-3, TRAJ4)
CAVGASGGYNMLIF

SEQ ID NO: 698670 - protein, 16 aa, Homo sapiens
  CDR3 for beta chain variable domain of TCR clone 349335 (TRBV19, TRBJ2-2)
CASSPSGGLNTGELFF

SEQ ID NO: 698671 - protein, 12 aa, Homo sapiens
  CDR3 for alpha chain variable domain of TCR clone 349336 (TRAV8-3, TRAJ4)
PAFSGGYNKLIL

SEQ ID NO: 698672 - protein, 13 aa, Homo sapiens
  CDR3 for beta chain variable domain of TCR clone 349336 (TRBV20-1, TRBJ1-3)
CSAGAYSGNTIYF

SEQ ID NO: 698673 - protein, 15 aa, Homo sapiens
  CDR3 for alpha chain variable domain of TCR clone 349337 (TRAV17, TRAJ56)
CATDANTGTNSKLTF

SEQ ID NO: 698674 - protein, 14 aa, Homo sapiens
  CDR3 for beta chain variable domain of TCR clone 349337 (TRBV19, TRBJ1-5)
CASSLGTGGQPQHF

SEQ ID NO: 698675 - protein, 12 aa, Homo sapiens
  CDR3 for alpha chain variable domain of TCR clone 349338 (TRAV30, TRAJ39)
CGRGNAGNMLTF

SEQ ID NO: 698676 - protein, 17 aa, Homo sapiens
  CDR3 for beta chain variable domain of TCR clone 349338 (TRBV7-8, TRBJ2-6)
CASSAGTGGAGANVLTF

SEQ ID NO: 698677 - protein, 14 aa, Homo sapiens
  CDR3 for alpha chain variable domain of TCR clone 349339 (TRAV17, TRAJ57)
CSTDPQGGSEKLVF

SEQ ID NO: 698678 - protein, 16 aa, Homo sapiens
  CDR3 for beta chain variable domain of TCR clone 349339 (TRBV27, TRBJ2-2)
CASSFRGLVRTGELFF

SEQ ID NO: 698679 - protein, 13 aa, Homo sapiens
  CDR3 for alpha chain variable domain of TCR clone 349340 (TRAV13-2, TRAJ21)
CAENLYNFNKFYF

SEQ ID NO: 698680 - protein, 12 aa, Homo sapiens
  CDR3 for beta chain variable domain of TCR clone 349340 (TRBV29-1, TRBJ2-3)
CSVTGGADTQYF

SEQ ID NO: 698681 - protein, 18 aa, Homo sapiens
  CDR3 for alpha chain variable domain of TCR clone 349341 (TRAV12-3, TRAJ52)
CAMSVGGAGGTSYGKLTF

SEQ ID NO: 698682 - protein, 14 aa, Homo sapiens
  CDR3 for beta chain variable domain of TCR clone 349341 (TRBV18, TRBJ2-7)
CASSPRGGAYEQYF

SEQ ID NO: 698683 - protein, 12 aa, Homo sapiens
  CDR3 for alpha chain variable domain of TCR clone 349342 (TRAV13-1, TRAJ21)
CAAKEGSNKFYF

SEQ ID NO: 698684 - protein, 14 aa, Homo sapiens
  CDR3 for beta chain variable domain of TCR clone 349342 (TRBV7-3, TRBJ2-2)
CASSSGGYTGELFF

SEQ ID NO: 698685 - protein, 14 aa, Homo sapiens
  CDR3 for alpha chain variable domain of TCR clone 349343 (TRAV13-2, TRAJ26)
CAENLGNYGQNFVF

SEQ ID NO: 698686 - protein, 14 aa, Homo sapiens
  CDR3 for beta chain variable domain of TCR clone 349343 (TRBV19, TRBJ1-3)
CASNRGNSVNTMYF

SEQ ID NO: 698687 - protein, 16 aa, Homo sapiens
  CDR3 for alpha chain variable domain of TCR clone 349344 (TRAV8-3, TRAJ13)
CAVVLMNSGGYQNVTF

SEQ ID NO: 698688 - protein, 15 aa, Homo sapiens
  CDR3 for beta chain variable domain of TCR clone 349344 (TRBV5-4, TRBJ2-5)
CASSLAGGAKETQYF

SEQ ID NO: 698689 - protein, 13 aa, Homo sapiens
  CDR3 for alpha chain variable domain of TCR clone 349345 (TRAV8-4, TRAJ30)
CAVSVNRDDKIIF

SEQ ID NO: 698690 - protein, 13 aa, Homo sapiens
  CDR3 for beta chain variable domain of TCR clone 349345 (TRBV3-1, TRBJ2-2)
CASLARGYGELFF

SEQ ID NO: 698691 - protein, 15 aa, Homo sapiens
  CDR3 for alpha chain variable domain of TCR clone 349346 (TRAV8-3, TRAJ45)
SASSYSGGGADGLTF

SEQ ID NO: 698692 - protein, 16 aa, Homo sapiens
  CDR3 for beta chain variable domain of TCR clone 349346 (TRBV7-9, TRBJ2-2)
CASSGFGGANTGELFF

SEQ ID NO: 698693 - protein, 16 aa, Homo sapiens
  CDR3 for alpha chain variable domain of TCR clone 349347 (TRAV3, TRAJ5)
CAVRNLMDTGRRALTF

SEQ ID NO: 698694 - protein, 13 aa, Homo sapiens
  CDR3 for beta chain variable domain of TCR clone 349347 (TRBV12-4, TRBJ2-2)
CASSITGSGELFF

SEQ ID NO: 698695 - protein, 15 aa, Homo sapiens
  CDR3 for alpha chain variable domain of TCR clone 349348 (TRAV4, TRAJ42)
CLVGGLGGSQGNLIF

SEQ ID NO: 698696 - protein, 16 aa, Homo sapiens
  CDR3 for beta chain variable domain of TCR clone 349348 (TRBV27, TRBJ1-1)
CASSTRTGGVGTEAFF

SEQ ID NO: 698697 - protein, 13 aa, Homo sapiens
  CDR3 for alpha chain variable domain of TCR clone 349349 (TRAV35, TRAJ27)
CAGENTNAGNSTF

SEQ ID NO: 698698 - protein, 16 aa, Homo sapiens
  CDR3 for beta chain variable domain of TCR clone 349349 (TRBV7-3, TRBJ2-1)
CASSPGAGTYYNEQFF

SEQ ID NO: 698699 - protein, 12 aa, Homo sapiens
  CDR3 for alpha chain variable domain of TCR clone 349350 (TRAV8-3, TRAJ26)
CAGDNYGQNFVF

SEQ ID NO: 698700 - protein, 14 aa, Homo sapiens
  CDR3 for beta chain variable domain of TCR clone 349350 (TRBV6-1, TRBJ1-3)
CAGVQGGGGNTIYF

SEQ ID NO: 698701 - protein, 16 aa, Homo sapiens
  CDR3 for alpha chain variable domain of TCR clone 349351 (TRAV30, TRAJ24)
FGTELVDADSWGKFQF

SEQ ID NO: 698702 - protein, 18 aa, Homo sapiens
  CDR3 for beta chain variable domain of TCR clone 349351 (TRBV7-9, TRBJ2-7)
CASSLTTSGSRTWYEQYF

SEQ ID NO: 698703 - protein, 16 aa, Homo sapiens
  CDR3 for alpha chain variable domain of TCR clone 349352 (TRAV38-2/DV8, TRAJ37)
CAYRSDGSSNTGKLIF

SEQ ID NO: 698704 - protein, 17 aa, Homo sapiens
  CDR3 for beta chain variable domain of TCR clone 349352 (TRBV13, TRBJ2-3)
CASSLSRVAGGRNTQYL

SEQ ID NO: 698705 - protein, 13 aa, Homo sapiens
  CDR3 for alpha chain variable domain of TCR clone 349353 (TRAV27, TRAJ45)
CRSPGGGADGLTF

SEQ ID NO: 698706 - protein, 17 aa, Homo sapiens
  CDR3 for beta chain variable domain of TCR clone 349353 (TRBV11-2, TRBJ2-1)
CASSLYTPGVEYNEQFF

SEQ ID NO: 698707 - protein, 13 aa, Homo sapiens
  CDR3 for alpha chain variable domain of TCR clone 349354 (TRAV3, TRAJ27)
CAVRPLGAGKSTF

SEQ ID NO: 698708 - protein, 14 aa, Homo sapiens
  CDR3 for beta chain variable domain of TCR clone 349354 (TRBV20-1, TRBJ2-7)
CSARRSGSSYEQYF

SEQ ID NO: 698709 - protein, 13 aa, Homo sapiens
  CDR3 for alpha chain variable domain of TCR clone 349355 (TRAV8-3, TRAJ44)
CAVVPGTASKLTF

SEQ ID NO: 698710 - protein, 13 aa, Homo sapiens
  CDR3 for beta chain variable domain of TCR clone 349355 (TRBV10-3, TRBJ2-7)
CASKLAVNYEQFF

SEQ ID NO: 698711 - protein, 16 aa, Homo sapiens
  CDR3 for alpha chain variable domain of TCR clone 349356 (TRAV21, TRAJ37)
CAVRTAGSSNTGKLIF

SEQ ID NO: 698712 - protein, 13 aa, Homo sapiens
  CDR3 for beta chain variable domain of TCR clone 349356 (TRBV7-9, TRBJ2-5)
GASLPSGRETQYF

SEQ ID NO: 698713 - protein, 14 aa, Homo sapiens
  CDR3 for alpha chain variable domain of TCR clone 349357 (TRAV26-2, TRAJ38)
CILYNAGNNRNLIW

SEQ ID NO: 698714 - protein, 14 aa, Homo sapiens
  CDR3 for beta chain variable domain of TCR clone 349357 (TRBV19, TRBJ2-1)
CASPTFGLSGEQFF

SEQ ID NO: 698715 - protein, 14 aa, Homo sapiens
  CDR3 for alpha chain variable domain of TCR clone 349358 (TRAV1-2, TRAJ16)
CAVNWFSDGQKLLF

SEQ ID NO: 698716 - protein, 13 aa, Homo sapiens
  CDR3 for beta chain variable domain of TCR clone 349358 (TRBV19, TRBJ2-7)
CASRKAGGSEQYF

SEQ ID NO: 698717 - protein, 14 aa, Homo sapiens
  CDR3 for alpha chain variable domain of TCR clone 349359 (TRAV12-2, TRAJ44)
CAVNKAGTASKLTF

SEQ ID NO: 698718 - protein, 15 aa, Homo sapiens
  CDR3 for beta chain variable domain of TCR clone 349359 (TRBV7-6, TRBJ1-5)
CASSQSSGINQPQHF

SEQ ID NO: 698719 - protein, 13 aa, Homo sapiens
  CDR3 for alpha chain variable domain of TCR clone 349360 (TRAV30, TRAJ29)
CGTEDSGNTPLVF

SEQ ID NO: 698720 - protein, 14 aa, Homo sapiens
  CDR3 for beta chain variable domain of TCR clone 349360 (TRBV20-1, TRBJ2-7)
CSARRSGSSYEQYF

SEQ ID NO: 698721 - protein, 14 aa, Homo sapiens
  CDR3 for alpha chain variable domain of TCR clone 349361 (TRAV12-2, TRAJ6)
CASKWGGGSYIPTF

SEQ ID NO: 698722 - protein, 17 aa, Homo sapiens
  CDR3 for beta chain variable domain of TCR clone 349361 (TRBV7-3, TRBJ2-5)
CASSLGSGRSGSETQYF

SEQ ID NO: 698723 - protein, 12 aa, Homo sapiens
  CDR3 for alpha chain variable domain of TCR clone 349362 (TRAV2, TRAJ31)
CAVEDNNARLMF

SEQ ID NO: 698724 - protein, 13 aa, Homo sapiens
  CDR3 for beta chain variable domain of TCR clone 349362 (TRBV7-2, TRBJ2-7)
CASSSPSGSEQYF

SEQ ID NO: 698725 - protein, 14 aa, Homo sapiens
  CDR3 for alpha chain variable domain of TCR clone 349363 (TRAV17, TRAJ16)
CATADFSDGQQLLF

SEQ ID NO: 698726 - protein, 15 aa, Homo sapiens
  CDR3 for beta chain variable domain of TCR clone 349363 (TRBV6-5, TRBJ2-1)
CASSYDAGAGNEQFF

SEQ ID NO: 698727 - protein, 15 aa, Homo sapiens
  CDR3 for alpha chain variable domain of TCR clone 349364 (TRAV3, TRAJ30)
CAVRDRVARGDKIIF

SEQ ID NO: 698728 - protein, 13 aa, Homo sapiens
  CDR3 for beta chain variable domain of TCR clone 349364 (TRBV29-1, TRBJ2-5)
CSACSSRRETQYL

SEQ ID NO: 698729 - protein, 18 aa, Homo sapiens
  CDR3 for alpha chain variable domain of TCR clone 349365 (TRAV9-2, TRAJ52)
CALSRHNAGGTSYGKLTF

SEQ ID NO: 698730 - protein, 16 aa, Homo sapiens
  CDR3 for beta chain variable domain of TCR clone 349365 (TRBV20-1, TRBJ1-4)
CSAPGQGLLTNEKLFF

SEQ ID NO: 698731 - protein, 15 aa, Homo sapiens
  CDR3 for alpha chain variable domain of TCR clone 349366 (TRAV3, TRAJ22)
CAVRDRGGSARQLTF

SEQ ID NO: 698732 - protein, 15 aa, Homo sapiens
  CDR3 for beta chain variable domain of TCR clone 349366 (TRBV7-3, TRBJ2-2)
CASSETGQGAGELFF

SEQ ID NO: 698733 - protein, 16 aa, Homo sapiens
  CDR3 for alpha chain variable domain of TCR clone 349367 (TRAV12-2, TRAJ40)
CAVIRGGTSGTYNYIF

SEQ ID NO: 698734 - protein, 16 aa, Homo sapiens
  CDR3 for beta chain variable domain of TCR clone 349367 (TRBV7-9, TRBJ2-1)
CASSDVAGGSYNEQFF

SEQ ID NO: 698735 - protein, 14 aa, Homo sapiens
  CDR3 for alpha chain variable domain of TCR clone 349368 (TRAV12-1, TRAJ17)
CVVNYKAAGNKLTF

SEQ ID NO: 698736 - protein, 14 aa, Homo sapiens
  CDR3 for beta chain variable domain of TCR clone 349368 (TRBV7-8, TRBJ2-3)
CASSLDAGTDTQYF

SEQ ID NO: 698737 - protein, 14 aa, Homo sapiens
  CDR3 for alpha chain variable domain of TCR clone 349369 (TRAV17, TRAJ32)
CATDPGGATNKLIL

SEQ ID NO: 698738 - protein, 14 aa, Homo sapiens
  CDR3 for beta chain variable domain of TCR clone 349369 (TRBV2, TRBJ1-5)
CASSENRGGQPQHF

SEQ ID NO: 698739 - protein, 14 aa, Homo sapiens
  CDR3 for alpha chain variable domain of TCR clone 349370 (TRAV14/DV4, TRAJ34)
CAMGEGRPHRQAHL

SEQ ID NO: 698740 - protein, 14 aa, Homo sapiens
  CDR3 for beta chain variable domain of TCR clone 349370 (TRBV19, TRBJ2-1)
CASPTFVLSGEQFF

SEQ ID NO: 698741 - protein, 16 aa, Homo sapiens
  CDR3 for alpha chain variable domain of TCR clone 349371 (TRAV20, TRAJ22)
CAVQASSSGSARQLTS

SEQ ID NO: 698742 - protein, 13 aa, Homo sapiens
  CDR3 for beta chain variable domain of TCR clone 349371 (TRBV7-2, TRBJ2-5)
CASSQTSVETQYY

SEQ ID NO: 698743 - protein, 15 aa, Homo sapiens
  CDR3 for alpha chain variable domain of TCR clone 349372 (TRAV12-1, TRAJ44)
CVVFVNTGTASKLTF

SEQ ID NO: 698744 - protein, 15 aa, Homo sapiens
  CDR3 for beta chain variable domain of TCR clone 349372 (TRBV12-4, TRBJ2-5)
CASSPPTGLQETQYF

SEQ ID NO: 698745 - protein, 14 aa, Homo sapiens
  CDR3 for alpha chain variable domain of TCR clone 349373 (TRAV23/DV6, TRAJ39)
CAASMRGAGNMLNF

SEQ ID NO: 698746 - protein, 14 aa, Homo sapiens
  CDR3 for beta chain variable domain of TCR clone 349373 (TRBV10-3, TRBJ2-3)
CAISVTRSRDTQYF

SEQ ID NO: 698747 - protein, 14 aa, Homo sapiens
  CDR3 for alpha chain variable domain of TCR clone 349374 (TRAV12-2, TRAJ13)
CAVKNTGGYQKVTS

SEQ ID NO: 698748 - protein, 12 aa, Homo sapiens
  CDR3 for beta chain variable domain of TCR clone 349374 (TRBV29-1, TRBJ1-1)
CSESDGNTEAFF

SEQ ID NO: 698749 - protein, 15 aa, Homo sapiens
  CDR3 for alpha chain variable domain of TCR clone 349375 (TRAV12-2, TRAJ32)
CAVNHYGGATNQLIF

SEQ ID NO: 698750 - protein, 14 aa, Homo sapiens
  CDR3 for beta chain variable domain of TCR clone 349375 (TRBV27, TRBJ2-1)
CASSFGREANEQFF

SEQ ID NO: 698751 - protein, 13 aa, Homo sapiens
  CDR3 for alpha chain variable domain of TCR clone 349376 (TRAV2, TRAJ40)
CAVVTSGTYKYIF

SEQ ID NO: 698752 - protein, 14 aa, Homo sapiens
  CDR3 for beta chain variable domain of TCR clone 349376 (TRBV19, TRBJ2-1)
CSSPTSVLSGEQFF

SEQ ID NO: 698753 - protein, 11 aa, Homo sapiens
  CDR3 for alpha chain variable domain of TCR clone 349377 (TRAV1-1, TRAJ23)
CAVRQGGKLIF

SEQ ID NO: 698754 - protein, 20 aa, Homo sapiens
  CDR3 for beta chain variable domain of TCR clone 349377 (TRBV7-8, TRBJ2-2)
CASSHLFAGPIIHITGELFF

SEQ ID NO: 698755 - protein, 16 aa, Homo sapiens
  CDR3 for alpha chain variable domain of TCR clone 349378 (TRAV3, TRAJ37)
CAVRGRGSGKTGKLIF

SEQ ID NO: 698756 - protein, 13 aa, Homo sapiens
  CDR3 for beta chain variable domain of TCR clone 349378 (TRBV14, TRBJ2-7)
CASSQDRRGEQYF

SEQ ID NO: 698757 - protein, 14 aa, Homo sapiens
  CDR3 for alpha chain variable domain of TCR clone 349379 (TRAV1-2, TRAJ8)
CAVREDTGFQKLVF

SEQ ID NO: 698758 - protein, 15 aa, Homo sapiens
  CDR3 for beta chain variable domain of TCR clone 349379 (TRBV15, TRBJ1-1)
CATSLQGVRNTEAFF

SEQ ID NO: 698759 - protein, 12 aa, Homo sapiens
  CDR3 for alpha chain variable domain of TCR clone 349380 (TRAV17, TRAJ20)
CATDSNDYKLSF

SEQ ID NO: 698760 - protein, 14 aa, Homo sapiens
  CDR3 for beta chain variable domain of TCR clone 349380 (TRBV7-3, TRBJ2-3)
CASSSLHTSDTQYL

SEQ ID NO: 698761 - protein, 14 aa, Homo sapiens
  CDR3 for alpha chain variable domain of TCR clone 349381 (TRAV26-1, TRAJ6)
CIVSPVGGSYIPAF

SEQ ID NO: 698762 - protein, 16 aa, Homo sapiens
  CDR3 for beta chain variable domain of TCR clone 349381 (TRBV4-1, TRBJ2-5)
CASSSGLAGVLGTQYF

SEQ ID NO: 698763 - protein, 14 aa, Homo sapiens
  CDR3 for alpha chain variable domain of TCR clone 349382 (TRAV1-2, TRAJ16)
CAVNRFSDGQKLLF

SEQ ID NO: 698764 - protein, 15 aa, Homo sapiens
  CDR3 for beta chain variable domain of TCR clone 349382 (TRBV7-3, TRBJ2-1)
CASSLSSGSFDEQFF

SEQ ID NO: 698765 - protein, 12 aa, Homo sapiens
  CDR3 for alpha chain variable domain of TCR clone 349383 (TRAV13-2, TRAJ23)
CAERHRGGKLIF

SEQ ID NO: 698766 - protein, 13 aa, Homo sapiens
  CDR3 for beta chain variable domain of TCR clone 349383 (TRBV24-1, TRBJ2-2)
CATSDWSTGELFF

SEQ ID NO: 698767 - protein, 11 aa, Homo sapiens
  CDR3 for alpha chain variable domain of TCR clone 349384 (TRAV12-2, TRAJ29)
CAVTLRSPLVF

SEQ ID NO: 698768 - protein, 15 aa, Homo sapiens
  CDR3 for beta chain variable domain of TCR clone 349384 (TRBV6-5, TRBJ1-2)
CASSYSQAFNYGYTF

SEQ ID NO: 698769 - protein, 18 aa, Homo sapiens
  CDR3 for alpha chain variable domain of TCR clone 349385 (TRAV21, TRAJ52)
CAVRPSPAGGTSYGKLTF

SEQ ID NO: 698770 - protein, 13 aa, Homo sapiens
  CDR3 for beta chain variable domain of TCR clone 349385 (TRBV27, TRBJ2-7)
CASSLRHRYEQYF

SEQ ID NO: 698771 - protein, 23 aa, Homo sapiens
  CDR3 for alpha chain variable domain of TCR clone 349386 (TRAV26-2, TRAJ38)
CILYNAGNNHIQNPDPAVYQLRD

SEQ ID NO: 698772 - protein, 16 aa, Homo sapiens
  CDR3 for beta chain variable domain of TCR clone 349386 (TRBV7-3, TRBJ2-2)
CASSLKRGTLSGELFF

SEQ ID NO: 698773 - protein, 13 aa, Homo sapiens
  CDR3 for alpha chain variable domain of TCR clone 349387 (TRAV4, TRAJ20)
CLVGSSNDYKLSF

SEQ ID NO: 698774 - protein, 15 aa, Homo sapiens
  CDR3 for beta chain variable domain of TCR clone 349387 (TRBV24-1, TRBJ2-1)
CATSEPGQGYNEQFF

SEQ ID NO: 698775 - protein, 14 aa, Homo sapiens
  CDR3 for alpha chain variable domain of TCR clone 349388 (TRAV26-1, TRAJ57)
CIRAGQGGSEKLVF

SEQ ID NO: 698776 - protein, 13 aa, Homo sapiens
  CDR3 for beta chain variable domain of TCR clone 349388 (TRBV19, TRBJ2-7)
CASSLTTSYGQYF

SEQ ID NO: 698777 - protein, 11 aa, Homo sapiens
  CDR3 for alpha chain variable domain of TCR clone 349389 (TRAV2, TRAJ33)
CAVDSNYQLIW

SEQ ID NO: 698778 - protein, 13 aa, Homo sapiens
  CDR3 for beta chain variable domain of TCR clone 349389 (TRBV7-9, TRBJ1-2)
CASSLKQNYGYSF

SEQ ID NO: 698779 - protein, 16 aa, Homo sapiens
  CDR3 for alpha chain variable domain of TCR clone 349390 (TRAV20, TRAJ53)
CAVRRGSGGSNYKLTF

SEQ ID NO: 698780 - protein, 12 aa, Homo sapiens
  CDR3 for beta chain variable domain of TCR clone 349390 (TRBV29-1, TRBJ2-3)
CSVVLGADTKYF

SEQ ID NO: 698781 - protein, 16 aa, Homo sapiens
  CDR3 for alpha chain variable domain of TCR clone 349391 (TRAV3, TRAJ37)
CAVRGKGSGNTGKLIF

SEQ ID NO: 698782 - protein, 16 aa, Homo sapiens
  CDR3 for beta chain variable domain of TCR clone 349391 (TRBV11-3, TRBJ2-5)
CASSSVVAGSTETQYF

SEQ ID NO: 698783 - protein, 13 aa, Homo sapiens
  CDR3 for alpha chain variable domain of TCR clone 349392 (TRAV30, TRAJ6)
CGFIVGGSYIPTF

SEQ ID NO: 698784 - protein, 13 aa, Homo sapiens
  CDR3 for beta chain variable domain of TCR clone 349392 (TRBV5-4, TRBJ2-5)
CASSPVSQETQYF

SEQ ID NO: 698785 - protein, 14 aa, Homo sapiens
  CDR3 for alpha chain variable domain of TCR clone 349393 (TRAV17, TRAJ57)
CATDPQGGSEKLVF

SEQ ID NO: 698786 - protein, 15 aa, Homo sapiens
  CDR3 for beta chain variable domain of TCR clone 349393 (TRBV9, TRBJ2-3)
CASSVRGLAVDTQYF

SEQ ID NO: 698787 - protein, 12 aa, Homo sapiens
  CDR3 for alpha chain variable domain of TCR clone 349394 (TRAV3, TRAJ20)
CAVRDHDYKLSL

SEQ ID NO: 698788 - protein, 13 aa, Homo sapiens
  CDR3 for beta chain variable domain of TCR clone 349394 (TRBV9, TRBJ2-7)
CASSVGQGGEQYF

SEQ ID NO: 698789 - protein, 14 aa, Homo sapiens
  CDR3 for alpha chain variable domain of TCR clone 349395 (TRAV38-1, TRAJ45)
CASDSGGGADGLTF

SEQ ID NO: 698790 - protein, 13 aa, Homo sapiens
  CDR3 for beta chain variable domain of TCR clone 349395 (TRBV10-3, TRBJ1-2)
CAISERDSYGYTF

SEQ ID NO: 698791 - protein, 12 aa, Homo sapiens
  CDR3 for alpha chain variable domain of TCR clone 349396 (TRAV25, TRAJ29)
CAGHSGNTHLVF

SEQ ID NO: 698792 - protein, 14 aa, Homo sapiens
  CDR3 for beta chain variable domain of TCR clone 349396 (TRBV6-1, TRBJ2-7)
CASTRTGDYYEQYF

SEQ ID NO: 698793 - protein, 16 aa, Homo sapiens
  CDR3 for alpha chain variable domain of TCR clone 349397 (TRAV12-2, TRAJ45)
CAVKRNPGGGADELTF

SEQ ID NO: 698794 - protein, 12 aa, Homo sapiens
  CDR3 for beta chain variable domain of TCR clone 349397 (TRBV6-1, TRBJ2-5)
CASSEGRETQYF

SEQ ID NO: 698795 - protein, 16 aa, Homo sapiens
  CDR3 for alpha chain variable domain of TCR clone 349398 (TRAV3, TRAJ3)
CAVRDRAKSSAFKIIF

SEQ ID NO: 698796 - protein, 16 aa, Homo sapiens
  CDR3 for beta chain variable domain of TCR clone 349398 (TRBV20-1, TRBJ2-4)
CSATSLAELAKNIQYF

SEQ ID NO: 698797 - protein, 18 aa, Homo sapiens
  CDR3 for alpha chain variable domain of TCR clone 349399 (TRAV26-1, TRAJ52)
CIVRVAGAGGTSYEKLTF

SEQ ID NO: 698798 - protein, 13 aa, Homo sapiens
  CDR3 for beta chain variable domain of TCR clone 349399 (TRBV7-8, TRBJ1-2)
CASSAQSYYGYTF

SEQ ID NO: 698799 - protein, 14 aa, Homo sapiens
  CDR3 for alpha chain variable domain of TCR clone 349400 (TRAV1-2, TRAJ16)
CAVNRFSDGQKLLF

SEQ ID NO: 698800 - protein, 16 aa, Homo sapiens
  CDR3 for beta chain variable domain of TCR clone 349400 (TRBV20-1, TRBJ1-4)
CSARPYRGELNGKLFF

SEQ ID NO: 698801 - protein, 15 aa, Homo sapiens
  CDR3 for alpha chain variable domain of TCR clone 349401 (TRAV38-1, TRAJ37)
CAFMKGPGNTGKLIF

SEQ ID NO: 698802 - protein, 11 aa, Homo sapiens
  CDR3 for beta chain variable domain of TCR clone 349401 (TRBV29-1, TRBJ2-5)
CSEDRTGTQYF

SEQ ID NO: 698803 - protein, 14 aa, Homo sapiens
  CDR3 for alpha chain variable domain of TCR clone 349402 (TRAV26-1, TRAJ34)
CIVRESYNTYKLIF

SEQ ID NO: 698804 - protein, 13 aa, Homo sapiens
  CDR3 for beta chain variable domain of TCR clone 349402 (TRBV19, TRBJ2-1)
CATSRGVYNEQFF

SEQ ID NO: 698805 - protein, 15 aa, Homo sapiens
  CDR3 for alpha chain variable domain of TCR clone 349403 (TRAV17, TRAJ45)
CATAERGGGADGLTF

SEQ ID NO: 698806 - protein, 15 aa, Homo sapiens
  CDR3 for beta chain variable domain of TCR clone 349403 (TRBV12-4, TRBJ2-1)
CASSLLGRTYNEQFF

SEQ ID NO: 698807 - protein, 15 aa, Homo sapiens
  CDR3 for alpha chain variable domain of TCR clone 349404 (TRAV12-3, TRAJ11)
CAMSEENSGYSTLTF

SEQ ID NO: 698808 - protein, 15 aa, Homo sapiens
  CDR3 for beta chain variable domain of TCR clone 349404 (TRBV7-2, TRBJ2-1)
CASSSGLAGGNEQFF

SEQ ID NO: 698809 - protein, 15 aa, Homo sapiens
  CDR3 for alpha chain variable domain of TCR clone 349405 (TRAV13-1, TRAJ6)
CAAIHPSGGRYIPTF

SEQ ID NO: 698810 - protein, 14 aa, Homo sapiens
  CDR3 for beta chain variable domain of TCR clone 349405 (TRBV7-9, TRBJ2-2)
CASGLAINTGELFF

SEQ ID NO: 698811 - protein, 16 aa, Homo sapiens
  CDR3 for alpha chain variable domain of TCR clone 349406 (TRAV35, TRAJ28)
CAGQRYSGAGSYQLTF

SEQ ID NO: 698812 - protein, 13 aa, Homo sapiens
  CDR3 for beta chain variable domain of TCR clone 349406 (TRBV19, TRBJ1-2)
CASSQGQDYGYTF

SEQ ID NO: 698813 - protein, 14 aa, Homo sapiens
  CDR3 for alpha chain variable domain of TCR clone 349407 (TRAV34, TRAJ44)
CGADGTGTASKLTF

SEQ ID NO: 698814 - protein, 15 aa, Homo sapiens
  CDR3 for beta chain variable domain of TCR clone 349407 (TRBV7-2, TRBJ2-1)
CASTHGTGIYNEQFF

SEQ ID NO: 698815 - protein, 13 aa, Homo sapiens
  CDR3 for alpha chain variable domain of TCR clone 349408 (TRAV12-3, TRAJ7)
CAMTPYGNNRPAL

SEQ ID NO: 698816 - protein, 16 aa, Homo sapiens
  CDR3 for beta chain variable domain of TCR clone 349408 (TRBV20-1, TRBJ1-4)
CSARPYGGELNEKLFF

SEQ ID NO: 698817 - protein, 15 aa, Homo sapiens
  CDR3 for alpha chain variable domain of TCR clone 349409 (TRAV35, TRAJ40)
CAGQLGTSGTYKYIF

SEQ ID NO: 698818 - protein, 14 aa, Homo sapiens
  CDR3 for beta chain variable domain of TCR clone 349409 (TRBV5-1, TRBJ1-1)
CASSFTGRNTEAFF

SEQ ID NO: 698819 - protein, 14 aa, Homo sapiens
  CDR3 for alpha chain variable domain of TCR clone 349410 (TRAV13-2, TRAJ9)
CAENLETGGLKTIF

SEQ ID NO: 698820 - protein, 16 aa, Homo sapiens
  CDR3 for beta chain variable domain of TCR clone 349410 (TRBV28, TRBJ2-5)
CASSFSPAGGWETQYF

SEQ ID NO: 698821 - protein, 13 aa, Homo sapiens
  CDR3 for alpha chain variable domain of TCR clone 349411 (TRAV2, TRAJ40)
CAAVTSGTYKYIF

SEQ ID NO: 698822 - protein, 12 aa, Homo sapiens
  CDR3 for beta chain variable domain of TCR clone 349411 (TRBV28, TRBJ2-1)
CASSFRGNEQFF

SEQ ID NO: 698823 - protein, 18 aa, Homo sapiens
  CDR3 for alpha chain variable domain of TCR clone 349412 (TRAV29/DV5, TRAJ52)
CAAGFSGAGGTSYGKLTF

SEQ ID NO: 698824 - protein, 16 aa, Homo sapiens
  CDR3 for beta chain variable domain of TCR clone 349412 (TRBV7-3, TRBJ2-2)
CASSLRRGTLSGELFF

SEQ ID NO: 698825 - protein, 15 aa, Homo sapiens
  CDR3 for alpha chain variable domain of TCR clone 349413 (TRAV26-1, TRAJ40)
CIVRVTTSGTYKYIF

SEQ ID NO: 698826 - protein, 17 aa, Homo sapiens
  CDR3 for beta chain variable domain of TCR clone 349413 (TRBV13, TRBJ2-3)
CASSLSRVAVGRNTQYF

SEQ ID NO: 698827 - protein, 12 aa, Homo sapiens
  CDR3 for alpha chain variable domain of TCR clone 349414 (TRAV12-3, TRAJ17)
CAMTLTGNKLTI

SEQ ID NO: 698828 - protein, 15 aa, Homo sapiens
  CDR3 for beta chain variable domain of TCR clone 349414 (TRBV20-1, TRBJ2-7)
CSARDRVSGMDEQYF

SEQ ID NO: 698829 - protein, 12 aa, Homo sapiens
  CDR3 for alpha chain variable domain of TCR clone 349415 (TRAV8-3, TRAJ20)
CAVGANDYKLSF

SEQ ID NO: 698830 - protein, 12 aa, Homo sapiens
  CDR3 for beta chain variable domain of TCR clone 349415 (TRBV5-1, TRBJ1-2)
CASSQQGFGYTF

SEQ ID NO: 698831 - protein, 14 aa, Homo sapiens
  CDR3 for alpha chain variable domain of TCR clone 349416 (TRAV12-3, TRAJ10)
SHLPLTGGGSKLTF

SEQ ID NO: 698832 - protein, 14 aa, Homo sapiens
  CDR3 for beta chain variable domain of TCR clone 349416 (TRBV19, TRBJ1-1)
CASSMGRNAFEAFF

SEQ ID NO: 698833 - protein, 15 aa, Homo sapiens
  CDR3 for alpha chain variable domain of TCR clone 349417 (TRAV8-2, TRAJ40)
CVVLGTTSGTYKYIF

SEQ ID NO: 698834 - protein, 16 aa, Homo sapiens
  CDR3 for beta chain variable domain of TCR clone 349417 (TRBV7-3, TRBJ2-1)
CASSLEGYRSYNEQFS

SEQ ID NO: 698835 - protein, 11 aa, Homo sapiens
  CDR3 for alpha chain variable domain of TCR clone 349418 (TRAV35, TRAJ30)
CAGERDDKIIF

SEQ ID NO: 698836 - protein, 14 aa, Homo sapiens
  CDR3 for beta chain variable domain of TCR clone 349418 (TRBV15, TRBJ2-5)
YATSGDRGQETQYF

SEQ ID NO: 698837 - protein, 14 aa, Homo sapiens
  CDR3 for alpha chain variable domain of TCR clone 349419 (TRAV1-2, TRAJ13)
CAVKHSGGYQKVTF

SEQ ID NO: 698838 - protein, 12 aa, Homo sapiens
  CDR3 for beta chain variable domain of TCR clone 349419 (TRBV7-3, TRBJ2-5)
CASSSPGGTHYF

SEQ ID NO: 698839 - protein, 14 aa, Homo sapiens
  CDR3 for alpha chain variable domain of TCR clone 349420 (TRAV12-2, TRAJ13)
CAVKKTAGYQKVTF

SEQ ID NO: 698840 - protein, 15 aa, Homo sapiens
  CDR3 for beta chain variable domain of TCR clone 349420 (TRBV27, TRBJ2-1)
CAISNGGGSSNEQFF

SEQ ID NO: 698841 - protein, 14 aa, Homo sapiens
  CDR3 for alpha chain variable domain of TCR clone 349421 (TRAV12-2, TRAJ17)
CAVLFKAAVNKLTF

SEQ ID NO: 698842 - protein, 14 aa, Homo sapiens
  CDR3 for beta chain variable domain of TCR clone 349421 (TRBV29-1, TRBJ2-1)
CSVGAVAGGNEQFF

SEQ ID NO: 698843 - protein, 14 aa, Homo sapiens
  CDR3 for alpha chain variable domain of TCR clone 349422 (TRAV21, TRAJ32)
CAVWDGGATNKLIF

SEQ ID NO: 698844 - protein, 17 aa, Homo sapiens
  CDR3 for beta chain variable domain of TCR clone 349422 (TRBV7-8, TRBJ2-6)
CASSAGTGGAGANVLTF

SEQ ID NO: 698845 - protein, 15 aa, Homo sapiens
  CDR3 for alpha chain variable domain of TCR clone 349423 (TRAV26-1, TRAJ23)
CIVKVAGYQGGKLIF

SEQ ID NO: 698846 - protein, 18 aa, Homo sapiens
  CDR3 for beta chain variable domain of TCR clone 349423 (TRBV28, TRBJ2-1)
CASSSTSGRANSYNEQFF

SEQ ID NO: 698847 - protein, 11 aa, Homo sapiens
  CDR3 for alpha chain variable domain of TCR clone 349424 (TRAV3, TRAJ21)
CAVGNFNKFYF

SEQ ID NO: 698848 - protein, 16 aa, Homo sapiens
  CDR3 for beta chain variable domain of TCR clone 349424 (TRBV19, TRBJ2-1)
CASSKAGPSSDNEQLF

SEQ ID NO: 698849 - protein, 14 aa, Homo sapiens
  CDR3 for alpha chain variable domain of TCR clone 349425 (TRAV1-2, TRAJ8)
CAVREDTGFQKLVF

SEQ ID NO: 698850 - protein, 19 aa, Homo sapiens
  CDR3 for beta chain variable domain of TCR clone 349425 (TRBV25-1, TRBJ2-2)
CAILVYRVDRGRKTGELFF

SEQ ID NO: 698851 - protein, 14 aa, Homo sapiens
  CDR3 for alpha chain variable domain of TCR clone 349426 (TRAV8-1, TRAJ22)
CAAPSAGSARQLTF

SEQ ID NO: 698852 - protein, 14 aa, Homo sapiens
  CDR3 for beta chain variable domain of TCR clone 349426 (TRBV9, TRBJ2-2)
CASSVGQGAGELFF

SEQ ID NO: 698853 - protein, 15 aa, Homo sapiens
  CDR3 for alpha chain variable domain of TCR clone 349427 (TRAV4, TRAJ4)
CLVSPLSGGYNKLIF

SEQ ID NO: 698854 - protein, 16 aa, Homo sapiens
  CDR3 for beta chain variable domain of TCR clone 349427 (TRBV7-8, TRBJ1-4)
CASSLGVGTSNEKLFF

SEQ ID NO: 698855 - protein, 15 aa, Homo sapiens
  CDR3 for alpha chain variable domain of TCR clone 349428 (TRAV2, TRAJ44)
CAVEAYTGTASRLTF

SEQ ID NO: 698856 - protein, 14 aa, Homo sapiens
  CDR3 for beta chain variable domain of TCR clone 349428 (TRBV11-2, TRBJ2-1)
CASSPGSRDNEQFF

SEQ ID NO: 698857 - protein, 14 aa, Homo sapiens
  CDR3 for alpha chain variable domain of TCR clone 349429 (TRAV8-3, TRAJ35)
CAVVPQGFGNVLHC

SEQ ID NO: 698858 - protein, 13 aa, Homo sapiens
  CDR3 for beta chain variable domain of TCR clone 349429 (TRBV9, TRBJ2-1)
CASSPSGGSEQFF

SEQ ID NO: 698859 - protein, 13 aa, Homo sapiens
  CDR3 for alpha chain variable domain of TCR clone 349430 (TRAV21, TRAJ15)
CAVRNQAGAALIF

SEQ ID NO: 698860 - protein, 16 aa, Homo sapiens
  CDR3 for beta chain variable domain of TCR clone 349430 (TRBV20-1, TRBJ2-5)
CSPGGTSGGYMETQYF

SEQ ID NO: 698861 - protein, 16 aa, Homo sapiens
  CDR3 for alpha chain variable domain of TCR clone 349431 (TRAV1-2, TRAJ10)
CAVRGVLTGGGNKPTF

SEQ ID NO: 698862 - protein, 15 aa, Homo sapiens
  CDR3 for beta chain variable domain of TCR clone 349431 (TRBV27, TRBJ2-7)
CASSPIVTGAYEQYF

SEQ ID NO: 698863 - protein, 15 aa, Homo sapiens
  CDR3 for alpha chain variable domain of TCR clone 349432 (TRAV14/DV4, TRAJ10)
CAMRELTGGGNKLTF

SEQ ID NO: 698864 - protein, 18 aa, Homo sapiens
  CDR3 for beta chain variable domain of TCR clone 349432 (TRBV7-9, TRBJ2-7)
CASGLTTSGSRTWYEQYF

SEQ ID NO: 698865 - protein, 14 aa, Homo sapiens
  CDR3 for alpha chain variable domain of TCR clone 349433 (TRAV21, TRAJ58)
CAVRRGRSGSRLTF

SEQ ID NO: 698866 - protein, 16 aa, Homo sapiens
  CDR3 for beta chain variable domain of TCR clone 349433 (TRBV24-1, TRBJ2-1)
CATSGVAGANHNEQFF

SEQ ID NO: 698867 - protein, 12 aa, Homo sapiens
  CDR3 for alpha chain variable domain of TCR clone 349434 (TRAV12-3, TRAJ17)
CAMTPTGNKLPF

SEQ ID NO: 698868 - protein, 17 aa, Homo sapiens
  CDR3 for beta chain variable domain of TCR clone 349434 (TRBV11-2, TRBJ2-1)
CASSLYPPGVEYNEQFF

SEQ ID NO: 698869 - protein, 17 aa, Homo sapiens
  CDR3 for alpha chain variable domain of TCR clone 349435 (TRAV17, TRAJ7)
CATLGRLAFGKGNQVVV

SEQ ID NO: 698870 - protein, 13 aa, Homo sapiens
  CDR3 for beta chain variable domain of TCR clone 349435 (TRBV12-4, TRBJ2-7)
CTSSLERVREQYF

SEQ ID NO: 698871 - protein, 17 aa, Homo sapiens
  CDR3 for alpha chain variable domain of TCR clone 349436 (TRAV8-4, TRAJ10)
CAVSRPTLTGGGNKLTF

SEQ ID NO: 698872 - protein, 16 aa, Homo sapiens
  CDR3 for beta chain variable domain of TCR clone 349436 (TRBV7-3, TRBJ2-3)
ELSLMKRMRGADTQYF

SEQ ID NO: 698873 - protein, 15 aa, Homo sapiens
  CDR3 for alpha chain variable domain of TCR clone 349437 (TRAV27, TRAJ38)
CAARRSAGNNRKLIW

SEQ ID NO: 698874 - protein, 18 aa, Homo sapiens
  CDR3 for beta chain variable domain of TCR clone 349437 (TRBV4-1, TRBJ1-5)
CASSQDPRGQGLNQPQHF

SEQ ID NO: 698875 - protein, 11 aa, Homo sapiens
  CDR3 for alpha chain variable domain of TCR clone 349438 (TRAV12-2, TRAJ33)
CAVTSNYQLIW

SEQ ID NO: 698876 - protein, 15 aa, Homo sapiens
  CDR3 for beta chain variable domain of TCR clone 349438 (TRBV7-7, TRBJ2-5)
CASSQLERAEETQYF

SEQ ID NO: 698877 - protein, 12 aa, Homo sapiens
  CDR3 for alpha chain variable domain of TCR clone 349439 (TRAV35, TRAJ36)
CWASDRANNLSF

SEQ ID NO: 698878 - protein, 15 aa, Homo sapiens
  CDR3 for beta chain variable domain of TCR clone 349439 (TRBV28, TRBJ2-5)
CASSPPWSYQETQYF

SEQ ID NO: 698879 - protein, 14 aa, Homo sapiens
  CDR3 for alpha chain variable domain of TCR clone 349440 (TRAV16, TRAJ17)
CALSGRAAGNKLTF

SEQ ID NO: 698880 - protein, 14 aa, Homo sapiens
  CDR3 for beta chain variable domain of TCR clone 349440 (TRBV2, TRBJ1-5)
CASSENRGGQPQHF

SEQ ID NO: 698881 - protein, 16 aa, Homo sapiens
  CDR3 for alpha chain variable domain of TCR clone 349441 (TRAV23/DV6, TRAJ9)
CAARIGGNTGGFKPIF

SEQ ID NO: 698882 - protein, 14 aa, Homo sapiens
  CDR3 for beta chain variable domain of TCR clone 349441 (TRBV9, TRBJ2-7)
CASSVGVGSYEQYF

SEQ ID NO: 698883 - protein, 13 aa, Homo sapiens
  CDR3 for alpha chain variable domain of TCR clone 349442 (TRAV13-2, TRAJ8)
CAFMNTGFQKLVF

SEQ ID NO: 698884 - protein, 15 aa, Homo sapiens
  CDR3 for beta chain variable domain of TCR clone 349442 (TRBV19, TRBJ2-3)
CAAGDTNAPNDAQYF

SEQ ID NO: 698885 - protein, 15 aa, Homo sapiens
  CDR3 for alpha chain variable domain of TCR clone 349443 (TRAV38-1, TRAJ37)
CAFIFGSGNKGKLIF

SEQ ID NO: 698886 - protein, 17 aa, Homo sapiens
  CDR3 for beta chain variable domain of TCR clone 349443 (TRBV11-2, TRBJ2-1)
CASSLYPPGVEYNEQFF

SEQ ID NO: 698887 - protein, 14 aa, Homo sapiens
  CDR3 for alpha chain variable domain of TCR clone 349444 (TRAV17, TRAJ57)
CATDPQGGPEKLVF

SEQ ID NO: 698888 - protein, 13 aa, Homo sapiens
  CDR3 for beta chain variable domain of TCR clone 349444 (TRBV29-1, TRBJ2-1)
CSVEGGRVNEQFF

SEQ ID NO: 698889 - protein, 14 aa, Homo sapiens
  CDR3 for alpha chain variable domain of TCR clone 349445 (TRAV16, TRAJ17)
CASRIKAAGNKLTF

SEQ ID NO: 698890 - protein, 15 aa, Homo sapiens
  CDR3 for beta chain variable domain of TCR clone 349445 (TRBV27, TRBJ2-1)
CASSNGGGSSNEQFF

SEQ ID NO: 698891 - protein, 14 aa, Homo sapiens
  CDR3 for alpha chain variable domain of TCR clone 349446 (TRAV36/DV7, TRAJ48)
CAQRRDVGNEKLTF

SEQ ID NO: 698892 - protein, 14 aa, Homo sapiens
  CDR3 for beta chain variable domain of TCR clone 349446 (TRBV28, TRBJ2-4)
CASTQVTGVNMQYF

SEQ ID NO: 698893 - protein, 12 aa, Homo sapiens
  CDR3 for alpha chain variable domain of TCR clone 349447 (TRAV12-3, TRAJ41)
CAMSYSGYALNF

SEQ ID NO: 698894 - protein, 20 aa, Homo sapiens
  CDR3 for beta chain variable domain of TCR clone 349447 (TRBV7-3, TRBJ2-1)
GGTQPCISVPAAYSYNEQFF

SEQ ID NO: 698895 - protein, 14 aa, Homo sapiens
  CDR3 for alpha chain variable domain of TCR clone 349448 (TRAV3, TRAJ36)
CAVRDGTGANNLFF

SEQ ID NO: 698896 - protein, 14 aa, Homo sapiens
  CDR3 for beta chain variable domain of TCR clone 349448 (TRBV7-3, TRBJ2-1)
CASSLAGGTNEQFF

SEQ ID NO: 698897 - protein, 14 aa, Homo sapiens
  CDR3 for alpha chain variable domain of TCR clone 349449 (TRAV29/DV5, TRAJ45)
CGASFSGGADGLTF

SEQ ID NO: 698898 - protein, 11 aa, Homo sapiens
  CDR3 for beta chain variable domain of TCR clone 349449 (TRBV11-2, TRBJ2-2)
CASSLPGELFF

SEQ ID NO: 698899 - protein, 14 aa, Homo sapiens
  CDR3 for alpha chain variable domain of TCR clone 349450 (TRAV8-4, TRAJ16)
CAVSPVGRWPEAAL

SEQ ID NO: 698900 - protein, 14 aa, Homo sapiens
  CDR3 for beta chain variable domain of TCR clone 349450 (TRBV23-1, TRBJ2-5)
CTSSFLRSQETQYF

SEQ ID NO: 698901 - protein, 13 aa, Homo sapiens
  CDR3 for alpha chain variable domain of TCR clone 349451 (TRAV12-3, TRAJ33)
CAMSVNSNYQLIW

SEQ ID NO: 698902 - protein, 16 aa, Homo sapiens
  CDR3 for beta chain variable domain of TCR clone 349451 (TRBV12-4, TRBJ1-5)
CASSRPVGGANQPQHF

SEQ ID NO: 698903 - protein, 14 aa, Homo sapiens
  CDR3 for alpha chain variable domain of TCR clone 349452 (TRAV12-1, TRAJ4)
CVGDFSGGYNKLIF

SEQ ID NO: 698904 - protein, 15 aa, Homo sapiens
  CDR3 for beta chain variable domain of TCR clone 349452 (TRBV4-1, TRBJ2-7)
CASSQNTGRLYEQYF

SEQ ID NO: 698905 - protein, 13 aa, Homo sapiens
  CDR3 for alpha chain variable domain of TCR clone 349453 (TRAV13-2, TRAJ48)
CAEMDFGNEKLTF

SEQ ID NO: 698906 - protein, 13 aa, Homo sapiens
  CDR3 for beta chain variable domain of TCR clone 349453 (TRBV9, TRBJ2-7)
CASSASDSYEQYF

SEQ ID NO: 698907 - protein, 13 aa, Homo sapiens
  CDR3 for alpha chain variable domain of TCR clone 349454 (TRAV12-2, TRAJ10)
CAVPTGGGNKLTF

SEQ ID NO: 698908 - protein, 14 aa, Homo sapiens
  CDR3 for beta chain variable domain of TCR clone 349454 (TRBV11-2, TRBJ2-7)
CASSLGAGAYEQYF

SEQ ID NO: 698909 - protein, 14 aa, Homo sapiens
  CDR3 for alpha chain variable domain of TCR clone 349455 (TRAV12-2, TRAJ40)
CAVKIHSGTYKYIF

SEQ ID NO: 698910 - protein, 14 aa, Homo sapiens
  CDR3 for beta chain variable domain of TCR clone 349455 (TRBV7-9, TRBJ1-2)
CASSRQGANYGYTF

SEQ ID NO: 698911 - protein, 13 aa, Homo sapiens
  CDR3 for alpha chain variable domain of TCR clone 349456 (TRAV30, TRAJ24)
CGTLTDSWGKLQF

SEQ ID NO: 698912 - protein, 15 aa, Homo sapiens
  CDR3 for beta chain variable domain of TCR clone 349456 (TRBV25-1, TRBJ1-4)
CASSPGDSTNEKLFF

SEQ ID NO: 698913 - protein, 13 aa, Homo sapiens
  CDR3 for alpha chain variable domain of TCR clone 349457 (TRAV12-2, TRAJ30)
CAVNPNRDDKIIF

SEQ ID NO: 698914 - protein, 14 aa, Homo sapiens
  CDR3 for beta chain variable domain of TCR clone 349457 (TRBV7-2, TRBJ1-2)
CASSSQGAHYGYTF

SEQ ID NO: 698915 - protein, 17 aa, Homo sapiens
  CDR3 for alpha chain variable domain of TCR clone 349458 (TRAV13-1, TRAJ52)
CAAGRNAGGTSYGKLTF

SEQ ID NO: 698916 - protein, 15 aa, Homo sapiens
  CDR3 for beta chain variable domain of TCR clone 349458 (TRBV6-3, TRBJ2-7)
CASSSPGTVFSEQYF

SEQ ID NO: 698917 - protein, 13 aa, Homo sapiens
  CDR3 for alpha chain variable domain of TCR clone 349459 (TRAV2, TRAJ20)
CALEDPSEYKLSF

SEQ ID NO: 698918 - protein, 16 aa, Homo sapiens
  CDR3 for beta chain variable domain of TCR clone 349459 (TRBV25-1, TRBJ2-7)
CASSELTGGGIYEQYF

SEQ ID NO: 698919 - protein, 14 aa, Homo sapiens
  CDR3 for alpha chain variable domain of TCR clone 349460 (TRAV1-2, TRAJ8)
CAAREDTGFQKLVF

SEQ ID NO: 698920 - protein, 13 aa, Homo sapiens
  CDR3 for beta chain variable domain of TCR clone 349460 (TRBV19, TRBJ1-2)
CASSVPGQDDYTF

SEQ ID NO: 698921 - protein, 14 aa, Homo sapiens
  CDR3 for alpha chain variable domain of TCR clone 349461 (TRAV1-2, TRAJ16)
CAVNRFSAGQKLLF

SEQ ID NO: 698922 - protein, 15 aa, Homo sapiens
  CDR3 for beta chain variable domain of TCR clone 349461 (TRBV6-3, TRBJ2-7)
CASSSPGTVFYEQYF

SEQ ID NO: 698923 - protein, 15 aa, Homo sapiens
  CDR3 for alpha chain variable domain of TCR clone 349462 (TRAV12-3, TRAJ53)
CNEPGSGGSNYKLTF

SEQ ID NO: 698924 - protein, 14 aa, Homo sapiens
  CDR3 for beta chain variable domain of TCR clone 349462 (TRBV7-6, TRBJ2-3)
CASSLGTVTDTQYF

SEQ ID NO: 698925 - protein, 16 aa, Homo sapiens
  CDR3 for alpha chain variable domain of TCR clone 349463 (TRAV30, TRAJ24)
CGTEIVDADSWGKFSL

SEQ ID NO: 698926 - protein, 14 aa, Homo sapiens
  CDR3 for beta chain variable domain of TCR clone 349463 (TRBV12-5, TRBJ2-5)
CASGSRTHQETQYV

SEQ ID NO: 698927 - protein, 13 aa, Homo sapiens
  CDR3 for alpha chain variable domain of TCR clone 349464 (TRAV8-6, TRAJ49)
CAVITNTGNQFYF

SEQ ID NO: 698928 - protein, 11 aa, Homo sapiens
  CDR3 for beta chain variable domain of TCR clone 349464 (TRBV12-4, TRBJ2-2)
CASSSAGELFF

SEQ ID NO: 698929 - protein, 11 aa, Homo sapiens
  CDR3 for alpha chain variable domain of TCR clone 349465 (TRAV12-3, TRAJ6)
CAMSGSYIPTF

SEQ ID NO: 698930 - protein, 15 aa, Homo sapiens
  CDR3 for beta chain variable domain of TCR clone 349465 (TRBV20-1, TRBJ2-7)
CSARDRVSGMDEQYF

SEQ ID NO: 698931 - protein, 15 aa, Homo sapiens
  CDR3 for alpha chain variable domain of TCR clone 349466 (TRAV3, TRAJ32)
CAVSSYGGATNKLIF

SEQ ID NO: 698932 - protein, 15 aa, Homo sapiens
  CDR3 for beta chain variable domain of TCR clone 349466 (TRBV11-1, TRBJ2-3)
CASLKDGREGDTQYF

SEQ ID NO: 698933 - protein, 15 aa, Homo sapiens
  CDR3 for alpha chain variable domain of TCR clone 349467 (TRAV38-1, TRAJ45)
CAFMKGGGGADGRTF

SEQ ID NO: 698934 - protein, 13 aa, Homo sapiens
  CDR3 for beta chain variable domain of TCR clone 349467 (TRBV7-9, TRBJ1-2)
CASSLKQNYGYTF

SEQ ID NO: 698935 - protein, 16 aa, Homo sapiens
  CDR3 for alpha chain variable domain of TCR clone 349468 (TRAV30, TRAJ24)
CGTAIVDADSWGKFQF

SEQ ID NO: 698936 - protein, 14 aa, Homo sapiens
  CDR3 for beta chain variable domain of TCR clone 349468 (TRBV12-5, TRBJ2-5)
CASGARTHQEAQYF

SEQ ID NO: 698937 - protein, 12 aa, Homo sapiens
  CDR3 for alpha chain variable domain of TCR clone 349469 (TRAV1-1, TRAJ39)
CAVPVVGNMLTF

SEQ ID NO: 698938 - protein, 18 aa, Homo sapiens
  CDR3 for beta chain variable domain of TCR clone 349469 (TRBV7-9, TRBJ2-7)
RASSLTTSGSRTWYEQYF

SEQ ID NO: 698939 - protein, 23 aa, Homo sapiens
  CDR3 for alpha chain variable domain of TCR clone 349470 (TRAV26-1, TRAJ38)
CIADNAGNNHIQHPDPAVYQLRY

SEQ ID NO: 698940 - protein, 12 aa, Homo sapiens
  CDR3 for beta chain variable domain of TCR clone 349470 (TRBV11-2, TRBJ2-2)
CASSPGCGELFF

SEQ ID NO: 698941 - protein, 11 aa, Homo sapiens
  CDR3 for alpha chain variable domain of TCR clone 349471 (TRAV13-2, TRAJ20)
CAENVSYKLSF

SEQ ID NO: 698942 - protein, 13 aa, Homo sapiens
  CDR3 for beta chain variable domain of TCR clone 349471 (TRBV20-1, TRBJ2-5)
CSARYTGEETQYF

SEQ ID NO: 698943 - protein, 11 aa, Homo sapiens
  CDR3 for alpha chain variable domain of TCR clone 349472 (TRAV4, TRAJ31)
CLVGDNARLMF

SEQ ID NO: 698944 - protein, 15 aa, Homo sapiens
  CDR3 for beta chain variable domain of TCR clone 349472 (TRBV10-2, TRBJ2-6)
CASSEQGTGANVLTV

SEQ ID NO: 698945 - protein, 14 aa, Homo sapiens
  CDR3 for alpha chain variable domain of TCR clone 349473 (TRAV4, TRAJ6)
CLVGEAGGSYIPTF

SEQ ID NO: 698946 - protein, 17 aa, Homo sapiens
  CDR3 for beta chain variable domain of TCR clone 349473 (TRBV20-1, TRBJ2-1)
CSAPPRLAGTRYNEQFF

SEQ ID NO: 698947 - protein, 13 aa, Homo sapiens
  CDR3 for alpha chain variable domain of TCR clone 349474 (TRAV8-6, TRAJ8)
CSVSNTGFQKLVF

SEQ ID NO: 698948 - protein, 15 aa, Homo sapiens
  CDR3 for beta chain variable domain of TCR clone 349474 (TRBV28, TRBJ2-5)
CASSSGRTIQETQYF

SEQ ID NO: 698949 - protein, 12 aa, Homo sapiens
  CDR3 for alpha chain variable domain of TCR clone 349475 (TRAV1-2, TRAJ17)
CAVRAAGNTLTF

SEQ ID NO: 698950 - protein, 16 aa, Homo sapiens
  CDR3 for beta chain variable domain of TCR clone 349475 (TRBV20-1, TRBJ2-1)
CSAPGLAGSYSDEQFF

SEQ ID NO: 698951 - protein, 13 aa, Homo sapiens
  CDR3 for alpha chain variable domain of TCR clone 349476 (TRAV3, TRAJ27)
CAVRPLGAGKSTF

SEQ ID NO: 698952 - protein, 12 aa, Homo sapiens
  CDR3 for beta chain variable domain of TCR clone 349476 (TRBV7-9, TRBJ2-3)
CASSPGSRYAVF

SEQ ID NO: 698953 - protein, 16 aa, Homo sapiens
  CDR3 for alpha chain variable domain of TCR clone 349477 (TRAV14/DV4, TRAJ53)
CAMREGGGGSNYKLTF

SEQ ID NO: 698954 - protein, 16 aa, Homo sapiens
  CDR3 for beta chain variable domain of TCR clone 349477 (TRBV5-4, TRBJ2-3)
CASQQPGAGGADTQYF

SEQ ID NO: 698955 - protein, 13 aa, Homo sapiens
  CDR3 for alpha chain variable domain of TCR clone 349478 (TRAV1-2, TRAJ9)
CAVLNTGGFKTIF

SEQ ID NO: 698956 - protein, 15 aa, Homo sapiens
  CDR3 for beta chain variable domain of TCR clone 349478 (TRBV7-3, TRBJ2-1)
CASSPTGGVEVEQFF

SEQ ID NO: 698957 - protein, 12 aa, Homo sapiens
  CDR3 for alpha chain variable domain of TCR clone 349479 (TRAV12-3, TRAJ17)
CAMTLTGNKVTF

SEQ ID NO: 698958 - protein, 14 aa, Homo sapiens
  CDR3 for beta chain variable domain of TCR clone 349479 (TRBV7-2, TRBJ1-2)
CASSQTGSTYGYTF

SEQ ID NO: 698959 - protein, 15 aa, Homo sapiens
  CDR3 for alpha chain variable domain of TCR clone 349480 (TRAV12-3, TRAJ42)
CAMIGHGGSQGNLIF

SEQ ID NO: 698960 - protein, 14 aa, Homo sapiens
  CDR3 for beta chain variable domain of TCR clone 349480 (TRBV7-2, TRBJ2-7)
CASSPKTSFYEQYF

SEQ ID NO: 698961 - protein, 17 aa, Homo sapiens
  CDR3 for alpha chain variable domain of TCR clone 349481 (TRAV3, TRAJ6)
CAVRDGPRAGGSYIPTF

SEQ ID NO: 698962 - protein, 15 aa, Homo sapiens
  CDR3 for beta chain variable domain of TCR clone 349481 (TRBV7-3, TRBJ2-7)
CASSLTPTGYDEQYF

SEQ ID NO: 698963 - protein, 13 aa, Homo sapiens
  CDR3 for alpha chain variable domain of TCR clone 349482 (TRAV8-2, TRAJ15)
CVVRNQAGTALIF

SEQ ID NO: 698964 - protein, 12 aa, Homo sapiens
  CDR3 for beta chain variable domain of TCR clone 349482 (TRBV7-8, TRBJ2-7)
CASSLGDREQYF

SEQ ID NO: 698965 - protein, 12 aa, Homo sapiens
  CDR3 for alpha chain variable domain of TCR clone 349483 (TRAV12-1, TRAJ32)
CVAKGATNKLIF

SEQ ID NO: 698966 - protein, 13 aa, Homo sapiens
  CDR3 for beta chain variable domain of TCR clone 349483 (TRBV7-9, TRBJ2-3)
CASSPGSTDTQYF

SEQ ID NO: 698967 - protein, 13 aa, Homo sapiens
  CDR3 for alpha chain variable domain of TCR clone 349484 (TRAV12-2, TRAJ34)
CAVRGYNTDKLIF

SEQ ID NO: 698968 - protein, 15 aa, Homo sapiens
  CDR3 for beta chain variable domain of TCR clone 349484 (TRBV28, TRBJ2-1)
CASRTGGGVIARQFF

SEQ ID NO: 698969 - protein, 13 aa, Homo sapiens
  CDR3 for alpha chain variable domain of TCR clone 349485 (TRAV21, TRAJ27)
CAARPGNAGKPPF

SEQ ID NO: 698970 - protein, 13 aa, Homo sapiens
  CDR3 for beta chain variable domain of TCR clone 349485 (TRBV18, TRBJ2-7)
CASQSGGGYEQYF

SEQ ID NO: 698971 - protein, 17 aa, Homo sapiens
  CDR3 for alpha chain variable domain of TCR clone 349486 (TRAV26-1, TRAJ37)
CIVRVITVSSNTGKLIF

SEQ ID NO: 698972 - protein, 18 aa, Homo sapiens
  CDR3 for beta chain variable domain of TCR clone 349486 (TRBV7-9, TRBJ2-7)
CASSLTTSGSRTWYEQYF

SEQ ID NO: 698973 - protein, 12 aa, Homo sapiens
  CDR3 for alpha chain variable domain of TCR clone 349487 (TRAV2, TRAJ9)
CAVGAGGFKTIF

SEQ ID NO: 698974 - protein, 13 aa, Homo sapiens
  CDR3 for beta chain variable domain of TCR clone 349487 (TRBV7-9, TRBJ2-1)
CASSWESCNGQFF

SEQ ID NO: 698975 - protein, 15 aa, Homo sapiens
  CDR3 for alpha chain variable domain of TCR clone 349488 (TRAV21, TRAJ24)
CAARSSTDSWGKLQF

SEQ ID NO: 698976 - protein, 12 aa, Homo sapiens
  CDR3 for beta chain variable domain of TCR clone 349488 (TRBV13, TRBJ2-2)
CASSWAPGELFF

SEQ ID NO: 698977 - protein, 12 aa, Homo sapiens
  CDR3 for alpha chain variable domain of TCR clone 349489 (TRAV38-1, TRAJ32)
CAPLGATNKLIF

SEQ ID NO: 698978 - protein, 14 aa, Homo sapiens
  CDR3 for beta chain variable domain of TCR clone 349489 (TRBV29-1, TRBJ2-5)
CSVEPSGSGETQYF

SEQ ID NO: 698979 - protein, 13 aa, Homo sapiens
  CDR3 for alpha chain variable domain of TCR clone 349490 (TRAV1-2, TRAJ9)
CAALHTGGFKTIF

SEQ ID NO: 698980 - protein, 15 aa, Homo sapiens
  CDR3 for beta chain variable domain of TCR clone 349490 (TRBV19, TRBJ1-1)
CASTSGQIQNTEAFF

SEQ ID NO: 698981 - protein, 17 aa, Homo sapiens
  CDR3 for alpha chain variable domain of TCR clone 349491 (TRAV3, TRAJ6)
CAVRDGPMAGGSDIPTF

SEQ ID NO: 698982 - protein, 16 aa, Homo sapiens
  CDR3 for beta chain variable domain of TCR clone 349491 (TRBV7-8, TRBJ2-3)
CASSTEGQRETDTQYF

SEQ ID NO: 698983 - protein, 17 aa, Homo sapiens
  CDR3 for alpha chain variable domain of TCR clone 349492 (TRAV3, TRAJ6)
CAVRDGPRAGGSYIPTF

SEQ ID NO: 698984 - protein, 15 aa, Homo sapiens
  CDR3 for beta chain variable domain of TCR clone 349492 (TRBV20-1, TRBJ1-2)
CSARDSRGRNYGYTF

SEQ ID NO: 698985 - protein, 13 aa, Homo sapiens
  CDR3 for alpha chain variable domain of TCR clone 349493 (TRAV20, TRAJ21)
CAVEGYNFNKFYF

SEQ ID NO: 698986 - protein, 14 aa, Homo sapiens
  CDR3 for beta chain variable domain of TCR clone 349493 (TRBV3-1, TRBJ2-5)
CASSQGPDQETQYL

SEQ ID NO: 698987 - protein, 12 aa, Homo sapiens
  CDR3 for alpha chain variable domain of TCR clone 349494 (TRAV17, )
CATDPHGAPMQL

SEQ ID NO: 698988 - protein, 13 aa, Homo sapiens
  CDR3 for beta chain variable domain of TCR clone 349494 (TRBV12-4, TRBJ2-7)
CASSPTETYEQYF

SEQ ID NO: 698989 - protein, 14 aa, Homo sapiens
  CDR3 for alpha chain variable domain of TCR clone 349495 (TRAV16, TRAJ42)
CALLAGGSQGNLIF

SEQ ID NO: 698990 - protein, 13 aa, Homo sapiens
  CDR3 for beta chain variable domain of TCR clone 349495 (TRBV4-2, TRBJ1-1)
CASSQAGNTEAFF

SEQ ID NO: 698991 - protein, 15 aa, Homo sapiens
  CDR3 for alpha chain variable domain of TCR clone 349496 (TRAV21, TRAJ53)
CATLNSGGRHYKLTF

SEQ ID NO: 698992 - protein, 14 aa, Homo sapiens
  CDR3 for beta chain variable domain of TCR clone 349496 (TRBV20-1, TRBJ2-1)
CSAQIGGSANEQFF

SEQ ID NO: 698993 - protein, 11 aa, Homo sapiens
  CDR3 for alpha chain variable domain of TCR clone 349497 (TRAV12-2, )
CAVASLATTIS

SEQ ID NO: 698994 - protein, 16 aa, Homo sapiens
  CDR3 for beta chain variable domain of TCR clone 349497 (TRBV5-1, TRBJ2-2)
CASSSRTGGRNGELFF

SEQ ID NO: 698995 - protein, 15 aa, Homo sapiens
  CDR3 for alpha chain variable domain of TCR clone 349498 (TRAV17, TRAJ34)
CATDPRMVDTDKLIF

SEQ ID NO: 698996 - protein, 14 aa, Homo sapiens
  CDR3 for beta chain variable domain of TCR clone 349498 (TRBV19, TRBJ2-1)
CASPTFVLSGEQFF

SEQ ID NO: 698997 - protein, 14 aa, Homo sapiens
  CDR3 for alpha chain variable domain of TCR clone 349499 (TRAV2, TRAJ37)
CAVAFTSNTGKLIF

SEQ ID NO: 698998 - protein, 14 aa, Homo sapiens
  CDR3 for beta chain variable domain of TCR clone 349499 (TRBV11-2, TRBJ2-1)
CASSLEVANNEQFF

SEQ ID NO: 698999 - protein, 15 aa, Homo sapiens
  CDR3 for alpha chain variable domain of TCR clone 349500 (TRAV16, TRAJ17)
CAISCQEAAGNKLTF

SEQ ID NO: 699000 - protein, 15 aa, Homo sapiens
  CDR3 for beta chain variable domain of TCR clone 349500 (TRBV12-4, TRBJ1-5)
CASTQGTGPLQPQHF

SEQ ID NO: 699001 - protein, 16 aa, Homo sapiens
  CDR3 for alpha chain variable domain of TCR clone 349501 (TRAV8-3, TRAJ13)
CAVGAYPSGGYQKVTF

SEQ ID NO: 699002 - protein, 16 aa, Homo sapiens
  CDR3 for beta chain variable domain of TCR clone 349501 (TRBV5-1, TRBJ1-1)
CASSSGGNSLNTEAFF

SEQ ID NO: 699003 - protein, 12 aa, Homo sapiens
  CDR3 for alpha chain variable domain of TCR clone 349502 (TRAV3, TRAJ39)
CAVIEWSNMLTF

SEQ ID NO: 699004 - protein, 14 aa, Homo sapiens
  CDR3 for beta chain variable domain of TCR clone 349502 (TRBV7-8, TRBJ2-3)
CASSFPDGHDTQYF

SEQ ID NO: 699005 - protein, 13 aa, Homo sapiens
  CDR3 for alpha chain variable domain of TCR clone 349503 (TRAV21, TRAJ27)
CAARPGNAGKSTF

SEQ ID NO: 699006 - protein, 12 aa, Homo sapiens
  CDR3 for beta chain variable domain of TCR clone 349503 (TRBV19, TRBJ1-4)
CASSNSLEKLFF

SEQ ID NO: 699007 - protein, 15 aa, Homo sapiens
  CDR3 for alpha chain variable domain of TCR clone 349504 (TRAV29/DV5, TRAJ42)
CAAKTDGGSQGNLIF

SEQ ID NO: 699008 - protein, 14 aa, Homo sapiens
  CDR3 for beta chain variable domain of TCR clone 349504 (TRBV19, TRBJ2-7)
CASTVLGRPYEQYF

SEQ ID NO: 699009 - protein, 13 aa, Homo sapiens
  CDR3 for alpha chain variable domain of TCR clone 349505 (TRAV12-1, TRAJ11)
CVVTRGGYSTLTF

SEQ ID NO: 699010 - protein, 15 aa, Homo sapiens
  CDR3 for beta chain variable domain of TCR clone 349505 (TRBV5-7, TRBJ1-5)
CASSYGKLWDQPQHF

SEQ ID NO: 699011 - protein, 10 aa, Homo sapiens
  CDR3 for alpha chain variable domain of TCR clone 349506 (TRAV12-2, TRAJ41)
CAVTGYALNF

SEQ ID NO: 699012 - protein, 15 aa, Homo sapiens
  CDR3 for beta chain variable domain of TCR clone 349506 (TRBV4-2, TRBJ2-1)
CASSQDVGLAGGQFF

SEQ ID NO: 699013 - protein, 17 aa, Homo sapiens
  CDR3 for alpha chain variable domain of TCR clone 349507 (TRAV3, TRAJ6)
CAVRDGPRAGGSYIPTF

SEQ ID NO: 699014 - protein, 13 aa, Homo sapiens
  CDR3 for beta chain variable domain of TCR clone 349507 (TRBV4-1, TRBJ2-2)
CTSSQENTGELFF

SEQ ID NO: 699015 - protein, 12 aa, Homo sapiens
  CDR3 for alpha chain variable domain of TCR clone 349508 (TRAV1-2, TRAJ33)
CAALDSNYQLIW

SEQ ID NO: 699016 - protein, 15 aa, Homo sapiens
  CDR3 for beta chain variable domain of TCR clone 349508 (TRBV2, TRBJ2-1)
CASSELAGSYNEQFF

SEQ ID NO: 699017 - protein, 18 aa, Homo sapiens
  CDR3 for alpha chain variable domain of TCR clone 349509 (TRAV21, TRAJ52)
CAVRPSPAGGTSYGELTF

SEQ ID NO: 699018 - protein, 13 aa, Homo sapiens
  CDR3 for beta chain variable domain of TCR clone 349509 (TRBV20-1, TRBJ2-5)
CSAREAFQETQYF

SEQ ID NO: 699019 - protein, 10 aa, Homo sapiens
  CDR3 for alpha chain variable domain of TCR clone 349510 (TRAV23/DV6, TRAJ57)
CSASSTLSQG

SEQ ID NO: 699020 - protein, 15 aa, Homo sapiens
  CDR3 for beta chain variable domain of TCR clone 349510 (TRBV27, TRBJ1-4)
CASSAQQDLNEKLFF

SEQ ID NO: 699021 - protein, 18 aa, Homo sapiens
  CDR3 for alpha chain variable domain of TCR clone 349511 (TRAV21, TRAJ52)
CAVRPSPAGGTSYGKLTF

SEQ ID NO: 699022 - protein, 17 aa, Homo sapiens
  CDR3 for beta chain variable domain of TCR clone 349511 (TRBV13, TRBJ2-3)
CASSLSRVAGWKNTQYF

SEQ ID NO: 699023 - protein, 17 aa, Homo sapiens
  CDR3 for alpha chain variable domain of TCR clone 349512 (TRAV13-1, TRAJ52)
CAASSGAGGTSYGKLTF

SEQ ID NO: 699024 - protein, 15 aa, Homo sapiens
  CDR3 for beta chain variable domain of TCR clone 349512 (TRBV2, TRBJ2-1)
CASSELAGSYNQQFF

SEQ ID NO: 699025 - protein, 16 aa, Homo sapiens
  CDR3 for alpha chain variable domain of TCR clone 349513 (TRAV26-1, TRAJ53)
CIVRVAMGGSNYKLTF

SEQ ID NO: 699026 - protein, 14 aa, Homo sapiens
  CDR3 for beta chain variable domain of TCR clone 349513 (TRBV2, TRBJ2-5)
CASKKATGLETQYF

SEQ ID NO: 699027 - protein, 17 aa, Homo sapiens
  CDR3 for alpha chain variable domain of TCR clone 349514 (TRAV17, TRAJ52)
CATERPSGGTSYGKLTF

SEQ ID NO: 699028 - protein, 16 aa, Homo sapiens
  CDR3 for beta chain variable domain of TCR clone 349514 (TRBV28, TRBJ2-1)
CASRRSGRVVGNEQFF

SEQ ID NO: 699029 - protein, 15 aa, Homo sapiens
  CDR3 for alpha chain variable domain of TCR clone 349515 (TRAV21, TRAJ53)
CATLNSGGSNYKMTF

SEQ ID NO: 699030 - protein, 14 aa, Homo sapiens
  CDR3 for beta chain variable domain of TCR clone 349515 (TRBV12-5, TRBJ2-5)
CASGSRTHQETQYF

SEQ ID NO: 699031 - protein, 16 aa, Homo sapiens
  CDR3 for alpha chain variable domain of TCR clone 349516 (TRAV4, TRAJ9)
CLVGAPTRPGGFKTLF

SEQ ID NO: 699032 - protein, 16 aa, Homo sapiens
  CDR3 for beta chain variable domain of TCR clone 349516 (TRBV28, TRBJ1-4)
CASSPPYRGRSEKLFF

SEQ ID NO: 699033 - protein, 19 aa, Homo sapiens
  CDR3 for alpha chain variable domain of TCR clone 349517 (TRAV2, TRAJ20)
ILQVREADAAVYRDCKLSF

SEQ ID NO: 699034 - protein, 10 aa, Homo sapiens
  CDR3 for beta chain variable domain of TCR clone 349517 (TRBV11-2, TRBJ2-1)
PGVEYNEQFF

SEQ ID NO: 699035 - protein, 13 aa, Homo sapiens
  CDR3 for alpha chain variable domain of TCR clone 349518 (TRAV8-6, TRAJ9)
CAVRDTGGFKTIF

SEQ ID NO: 699036 - protein, 14 aa, Homo sapiens
  CDR3 for beta chain variable domain of TCR clone 349518 (TRBV2, TRBJ2-1)
CASSEALIYNEQYF

SEQ ID NO: 699037 - protein, 15 aa, Homo sapiens
  CDR3 for alpha chain variable domain of TCR clone 349519 (TRAV26-1, TRAJ23)
CIVRVAGYQVGKLIF

SEQ ID NO: 699038 - protein, 13 aa, Homo sapiens
  CDR3 for beta chain variable domain of TCR clone 349519 (TRBV7-9, TRBJ2-3)
CASSPGSTDTQYF

SEQ ID NO: 699039 - protein, 15 aa, Homo sapiens
  CDR3 for alpha chain variable domain of TCR clone 349520 (TRAV12-2, TRAJ53)
CAVNRGGGSNYKLTF

SEQ ID NO: 699040 - protein, 15 aa, Homo sapiens
  CDR3 for beta chain variable domain of TCR clone 349520 (TRBV28, TRBJ2-1)
CASSGLAEVDNEQFF

SEQ ID NO: 699041 - protein, 10 aa, Homo sapiens
  CDR3 for alpha chain variable domain of TCR clone 349521 (TRAV26-2, TRAJ49)
CILLGNQFYF

SEQ ID NO: 699042 - protein, 13 aa, Homo sapiens
  CDR3 for beta chain variable domain of TCR clone 349521 (TRBV20-1, TRBJ2-7)
CSADSGATYEQYF

SEQ ID NO: 699043 - protein, 17 aa, Homo sapiens
  CDR3 for alpha chain variable domain of TCR clone 349522 (TRAV26-1, TRAJ21)
CTAKGKFYFGSGTKLNV

SEQ ID NO: 699044 - protein, 15 aa, Homo sapiens
  CDR3 for beta chain variable domain of TCR clone 349522 (TRBV7-2, TRBJ2-1)
CASSSGLAGGNEQFF

SEQ ID NO: 699045 - protein, 12 aa, Homo sapiens
  CDR3 for alpha chain variable domain of TCR clone 349523 (TRAV13-1, TRAJ21)
CAAKEGFKKFYF

SEQ ID NO: 699046 - protein, 13 aa, Homo sapiens
  CDR3 for beta chain variable domain of TCR clone 349523 (TRBV19, TRBJ1-2)
CASSVPGQDGYTF

SEQ ID NO: 699047 - protein, 13 aa, Homo sapiens
  CDR3 for alpha chain variable domain of TCR clone 349524 (TRAV26-1, TRAJ33)
CIVRVEGHYQLIW

SEQ ID NO: 699048 - protein, 16 aa, Homo sapiens
  CDR3 for beta chain variable domain of TCR clone 349524 (TRBV15, TRBJ2-7)
CATSRDRGRRRGEQYF

SEQ ID NO: 699049 - protein, 18 aa, Homo sapiens
  CDR3 for alpha chain variable domain of TCR clone 349525 (TRAV21, TRAJ52)
CAVRPSPAGGTSYGKLTF

SEQ ID NO: 699050 - protein, 13 aa, Homo sapiens
  CDR3 for beta chain variable domain of TCR clone 349525 (TRBV7-9, TRBJ1-2)
CASSSDSIYGYTF

SEQ ID NO: 699051 - protein, 12 aa, Homo sapiens
  CDR3 for alpha chain variable domain of TCR clone 349526 (TRAV8-6, TRAJ33)
CAVTDSNYQIIW

SEQ ID NO: 699052 - protein, 15 aa, Homo sapiens
  CDR3 for beta chain variable domain of TCR clone 349526 (TRBV4-3, TRBJ1-2)
CASSRGQGRNYGYTF

SEQ ID NO: 699053 - protein, 14 aa, Homo sapiens
  CDR3 for alpha chain variable domain of TCR clone 349527 (TRAV2, TRAJ9)
CAVEDRSGGFKTIF

SEQ ID NO: 699054 - protein, 17 aa, Homo sapiens
  CDR3 for beta chain variable domain of TCR clone 349527 (TRBV20-1, TRBJ2-7)
GSATRAGGVAGVEEQYF

SEQ ID NO: 699055 - protein, 14 aa, Homo sapiens
  CDR3 for alpha chain variable domain of TCR clone 349528 (TRAV1-2, TRAJ16)
CSVNRFSDGPKLLF

SEQ ID NO: 699056 - protein, 16 aa, Homo sapiens
  CDR3 for beta chain variable domain of TCR clone 349528 (TRBV27, TRBJ2-2)
CASSFRGLLRTGELFF

SEQ ID NO: 699057 - protein, 14 aa, Homo sapiens
  CDR3 for alpha chain variable domain of TCR clone 349529 (TRAV12-3, TRAJ6)
CAMSATGGSYIPTF

SEQ ID NO: 699058 - protein, 14 aa, Homo sapiens
  CDR3 for beta chain variable domain of TCR clone 349529 (TRBV18, TRBJ2-7)
CASSPRGGAYVQYF

SEQ ID NO: 699059 - protein, 14 aa, Homo sapiens
  CDR3 for alpha chain variable domain of TCR clone 349530 (TRAV17, TRAJ39)
CATDPVRAGNMLTF

SEQ ID NO: 699060 - protein, 14 aa, Homo sapiens
  CDR3 for beta chain variable domain of TCR clone 349530 (TRBV4-2, TRBJ2-3)
CASRETRAPGMQYF

SEQ ID NO: 699061 - protein, 14 aa, Homo sapiens
  CDR3 for alpha chain variable domain of TCR clone 349531 (TRAV1-2, TRAJ16)
CAVNRFSDGQKLLF

SEQ ID NO: 699062 - protein, 13 aa, Homo sapiens
  CDR3 for beta chain variable domain of TCR clone 349531 (TRBV4-1, TRBJ2-1)
CASSQAGGYEQFF

SEQ ID NO: 699063 - protein, 16 aa, Homo sapiens
  CDR3 for alpha chain variable domain of TCR clone 349532 (TRAV26-1, TRAJ50)
CIVRVEAGTSYDKVIF

SEQ ID NO: 699064 - protein, 16 aa, Homo sapiens
  CDR3 for beta chain variable domain of TCR clone 349532 (TRBV12-4, TRBJ1-2)
CASSLGQYRPNYGYTF

SEQ ID NO: 699065 - protein, 12 aa, Homo sapiens
  CDR3 for alpha chain variable domain of TCR clone 349533 (TRAV21, TRAJ43)
CAVSWNNNDMPF

SEQ ID NO: 699066 - protein, 15 aa, Homo sapiens
  CDR3 for beta chain variable domain of TCR clone 349533 (TRBV20-1, TRBJ2-1)
CSASPPSGGYNEQFF

SEQ ID NO: 699067 - protein, 15 aa, Homo sapiens
  CDR3 for alpha chain variable domain of TCR clone 349534 (TRAV21, TRAJ53)
CATLNSGGGNYKLTF

SEQ ID NO: 699068 - protein, 13 aa, Homo sapiens
  CDR3 for beta chain variable domain of TCR clone 349534 (TRBV11-2, TRBJ2-5)
CASSSTGEETQYF

SEQ ID NO: 699069 - protein, 15 aa, Homo sapiens
  CDR3 for alpha chain variable domain of TCR clone 349535 (TRAV27, TRAJ38)
CSARRNAGNNRKLIW

SEQ ID NO: 699070 - protein, 13 aa, Homo sapiens
  CDR3 for beta chain variable domain of TCR clone 349535 (TRBV20-1, TRBJ1-1)
CSARAGGNTEAFF

SEQ ID NO: 699071 - protein, 12 aa, Homo sapiens
  CDR3 for alpha chain variable domain of TCR clone 349536 (TRAV2, TRAJ33)
CAVEDSNYQLIW

SEQ ID NO: 699072 - protein, 14 aa, Homo sapiens
  CDR3 for beta chain variable domain of TCR clone 349536 (TRBV19, TRBJ1-4)
CASSINRGGGKLFF

SEQ ID NO: 699073 - protein, 15 aa, Homo sapiens
  CDR3 for alpha chain variable domain of TCR clone 349537 (TRAV8-3, TRAJ11)
CAVGLLNSGYSTLTL

SEQ ID NO: 699074 - protein, 16 aa, Homo sapiens
  CDR3 for beta chain variable domain of TCR clone 349537 (TRBV7-9, TRBJ1-2)
CASSSGFSSGEDGYTF

SEQ ID NO: 699075 - protein, 14 aa, Homo sapiens
  CDR3 for alpha chain variable domain of TCR clone 349538 (TRAV8-4, TRAJ13)
CAVTLSGGYQKVTF

SEQ ID NO: 699076 - protein, 17 aa, Homo sapiens
  CDR3 for beta chain variable domain of TCR clone 349538 (TRBV15, TRBJ1-5)
CATSRAPPGTRNQPQHF

SEQ ID NO: 699077 - protein, 10 aa, Homo sapiens
  CDR3 for alpha chain variable domain of TCR clone 349539 (TRAV25, TRAJ20)
CAVNDYKLSF

SEQ ID NO: 699078 - protein, 18 aa, Homo sapiens
  CDR3 for beta chain variable domain of TCR clone 349539 (TRBV20-1, TRBJ2-6)
CSAETTTTHGSGANVLTF

SEQ ID NO: 699079 - protein, 15 aa, Homo sapiens
  CDR3 for alpha chain variable domain of TCR clone 349540 (TRAV1-2, TRAJ17)
CAVRGYGAACNKITF

SEQ ID NO: 699080 - protein, 23 aa, Homo sapiens
  CDR3 for beta chain variable domain of TCR clone 349540 (TRBV11-2, TRBJ2-5)
CASSSPGGEGAASRDPVLRARHA

SEQ ID NO: 699081 - protein, 10 aa, Homo sapiens
  CDR3 for alpha chain variable domain of TCR clone 349541 (TRAV5, TRAJ34)
CAEDTDKLIF

SEQ ID NO: 699082 - protein, 14 aa, Homo sapiens
  CDR3 for beta chain variable domain of TCR clone 349541 (TRBV12-4, TRBJ2-7)
CASSSGLATSEQYF

SEQ ID NO: 699083 - protein, 14 aa, Homo sapiens
  CDR3 for alpha chain variable domain of TCR clone 349542 (TRAV26-1, TRAJ21)
CIVRVGHNFNKFYF

SEQ ID NO: 699084 - protein, 13 aa, Homo sapiens
  CDR3 for beta chain variable domain of TCR clone 349542 (TRBV4-1, TRBJ2-7)
CASSQGQAYEQYF

SEQ ID NO: 699085 - protein, 16 aa, Homo sapiens
  CDR3 for alpha chain variable domain of TCR clone 349543 (TRAV12-1, TRAJ4)
CVVNMGPLGGYNKLIV

SEQ ID NO: 699086 - protein, 15 aa, Homo sapiens
  CDR3 for beta chain variable domain of TCR clone 349543 (TRBV6-1, TRBJ2-3)
CASSQDGLGTDTQYF

SEQ ID NO: 699087 - protein, 16 aa, Homo sapiens
  CDR3 for alpha chain variable domain of TCR clone 349544 (TRAV30, TRAJ24)
CGTEIVDADSWGKFQF

SEQ ID NO: 699088 - protein, 17 aa, Homo sapiens
  CDR3 for beta chain variable domain of TCR clone 349544 (TRBV4-1, TRBJ1-4)
CASSQEGPRGVEEKLFF

SEQ ID NO: 699089 - protein, 12 aa, Homo sapiens
  CDR3 for alpha chain variable domain of TCR clone 349545 (TRAV12-3, TRAJ42)
CAPGGSQGNLIL

SEQ ID NO: 699090 - protein, 14 aa, Homo sapiens
  CDR3 for beta chain variable domain of TCR clone 349545 (TRBV7-2, TRBJ1-6)
CASSLQGANSPLHF

SEQ ID NO: 699091 - protein, 16 aa, Homo sapiens
  CDR3 for alpha chain variable domain of TCR clone 349546 (TRAV1-2, TRAJ10)
CAVRGVLTGGGNKLTF

SEQ ID NO: 699092 - protein, 15 aa, Homo sapiens
  CDR3 for beta chain variable domain of TCR clone 349546 (TRBV7-3, TRBJ2-2)
CASSETGQGTGELFF

SEQ ID NO: 699093 - protein, 17 aa, Homo sapiens
  CDR3 for alpha chain variable domain of TCR clone 349547 (TRAV19, TRAJ28)
CALSEASSGAGSYQLTF

SEQ ID NO: 699094 - protein, 13 aa, Homo sapiens
  CDR3 for beta chain variable domain of TCR clone 349547 (TRBV4-1, TRBJ2-7)
CASSQGQAYEQYF

SEQ ID NO: 699095 - protein, 14 aa, Homo sapiens
  CDR3 for alpha chain variable domain of TCR clone 349548 (TRAV12-2, TRAJ13)
CVVKKTGGYQKVTF

SEQ ID NO: 699096 - protein, 14 aa, Homo sapiens
  CDR3 for beta chain variable domain of TCR clone 349548 (TRBV19, TRBJ2-1)
CASPTFVLSGEQFF

SEQ ID NO: 699097 - protein, 13 aa, Homo sapiens
  CDR3 for alpha chain variable domain of TCR clone 349549 (TRAV8-2, TRAJ47)
CVVSEREGNKLVF

SEQ ID NO: 699098 - protein, 14 aa, Homo sapiens
  CDR3 for beta chain variable domain of TCR clone 349549 (TRBV4-2, TRBJ2-1)
CASGLDRAYNEQFF

SEQ ID NO: 699099 - protein, 15 aa, Homo sapiens
  CDR3 for alpha chain variable domain of TCR clone 349550 (TRAV8-3, TRAJ45)
WASSYSGGGADGLTF

SEQ ID NO: 699100 - protein, 13 aa, Homo sapiens
  CDR3 for beta chain variable domain of TCR clone 349550 (TRBV10-3, TRBJ2-7)
CASKLEVNYEQYF

SEQ ID NO: 699101 - protein, 16 aa, Homo sapiens
  CDR3 for alpha chain variable domain of TCR clone 349551 (TRAV8-3, TRAJ44)
CAVGTLMTGTASKLTF

SEQ ID NO: 699102 - protein, 11 aa, Homo sapiens
  CDR3 for beta chain variable domain of TCR clone 349551 (TRBV11-2, TRBJ2-2)
CASSLPGELFF

SEQ ID NO: 699103 - protein, 13 aa, Homo sapiens
  CDR3 for alpha chain variable domain of TCR clone 349552 (TRAV3, TRAJ21)
CAVREPDSNKLYF

SEQ ID NO: 699104 - protein, 14 aa, Homo sapiens
  CDR3 for beta chain variable domain of TCR clone 349552 (TRBV4-2, TRBJ2-1)
CASGLDRAYNEQFF

SEQ ID NO: 699105 - protein, 12 aa, Homo sapiens
  CDR3 for alpha chain variable domain of TCR clone 349553 (TRAV29/DV5, TRAJ54)
CATSLGAQKLVF

SEQ ID NO: 699106 - protein, 15 aa, Homo sapiens
  CDR3 for beta chain variable domain of TCR clone 349553 (TRBV3-1, TRBJ1-2)
CASSRRNPGFYGYTF

SEQ ID NO: 699107 - protein, 15 aa, Homo sapiens
  CDR3 for alpha chain variable domain of TCR clone 349554 (TRAV21, TRAJ24)
CAARSSIDSWGELQV

SEQ ID NO: 699108 - protein, 13 aa, Homo sapiens
  CDR3 for beta chain variable domain of TCR clone 349554 (TRBV11-2, TRBJ2-5)
CASSSTGEETQYF

SEQ ID NO: 699109 - protein, 14 aa, Homo sapiens
  CDR3 for alpha chain variable domain of TCR clone 349555 (TRAV12-2, TRAJ17)
CAVLFKAARNKLTF

SEQ ID NO: 699110 - protein, 12 aa, Homo sapiens
  CDR3 for beta chain variable domain of TCR clone 349555 (TRBV11-2, TRBJ2-2)
CASSLGGGELFF

SEQ ID NO: 699111 - protein, 14 aa, Homo sapiens
  CDR3 for alpha chain variable domain of TCR clone 349556 (TRAV12-2, TRAJ40)
CAVKIPSATYNYIF

SEQ ID NO: 699112 - protein, 14 aa, Homo sapiens
  CDR3 for beta chain variable domain of TCR clone 349556 (TRBV20-1, TRBJ1-1)
CSAQTRIGGTEAFF

SEQ ID NO: 699113 - protein, 13 aa, Homo sapiens
  CDR3 for alpha chain variable domain of TCR clone 349557 (TRAV23/DV6, TRAJ12)
CAPRVDSSYKLIF

SEQ ID NO: 699114 - protein, 12 aa, Homo sapiens
  CDR3 for beta chain variable domain of TCR clone 349557 (TRBV7-8, TRBJ2-7)
CASSLGDRELYF

SEQ ID NO: 699115 - protein, 10 aa, Homo sapiens
  CDR3 for alpha chain variable domain of TCR clone 349558 (TRAV2, TRAJ34)
CAVVNDKLIF

SEQ ID NO: 699116 - protein, 16 aa, Homo sapiens
  CDR3 for beta chain variable domain of TCR clone 349558 (TRBV24-1, TRBJ2-3)
CATSDPGTGATDTQYF

SEQ ID NO: 699117 - protein, 12 aa, Homo sapiens
  CDR3 for alpha chain variable domain of TCR clone 349559 (TRAV17, TRAJ49)
CATVTTGNQFYF

SEQ ID NO: 699118 - protein, 11 aa, Homo sapiens
  CDR3 for beta chain variable domain of TCR clone 349559 (TRBV29-1, TRBJ2-5)
CSEDRTGTQYF

SEQ ID NO: 699119 - protein, 16 aa, Homo sapiens
  CDR3 for alpha chain variable domain of TCR clone 349560 (TRAV1-2, TRAJ10)
CAVRGVLTGGGNKLTF

SEQ ID NO: 699120 - protein, 15 aa, Homo sapiens
  CDR3 for beta chain variable domain of TCR clone 349560 (TRBV7-9, TRBJ1-6)
CASGSPGRGNSPLHF

SEQ ID NO: 699121 - protein, 17 aa, Homo sapiens
  CDR3 for alpha chain variable domain of TCR clone 349561 (TRAV13-1, TRAJ52)
CAAGRNAGGTSYGKLTF

SEQ ID NO: 699122 - protein, 11 aa, Homo sapiens
  CDR3 for beta chain variable domain of TCR clone 349561 (TRBV12-4, TRBJ2-3)
CASTVTDTQYF

SEQ ID NO: 699123 - protein, 13 aa, Homo sapiens
  CDR3 for alpha chain variable domain of TCR clone 349562 (TRAV12-3, TRAJ21)
CAPGPHNFNKFYF

SEQ ID NO: 699124 - protein, 16 aa, Homo sapiens
  CDR3 for beta chain variable domain of TCR clone 349562 (TRBV24-1, TRBJ2-3)
CATSDPGTGATDTQYF

SEQ ID NO: 699125 - protein, 19 aa, Homo sapiens
  CDR3 for alpha chain variable domain of TCR clone 349563 (TRAV2, TRAJ20)
ILQVREADAAVYQDCKLSF

SEQ ID NO: 699126 - protein, 13 aa, Homo sapiens
  CDR3 for beta chain variable domain of TCR clone 349563 (TRBV15, TRBJ1-6)
CATSEGLNSPLHF

SEQ ID NO: 699127 - protein, 12 aa, Homo sapiens
  CDR3 for alpha chain variable domain of TCR clone 349564 (TRAV16, TRAJ10)
CSRTGGGNKLTF

SEQ ID NO: 699128 - protein, 16 aa, Homo sapiens
  CDR3 for beta chain variable domain of TCR clone 349564 (TRBV6-1, TRBJ2-5)
CASSETLDRGAETQYF

SEQ ID NO: 699129 - protein, 13 aa, Homo sapiens
  CDR3 for alpha chain variable domain of TCR clone 349565 (TRAV20, TRAJ45)
RAVKKRRCRRTHL

SEQ ID NO: 699130 - protein, 14 aa, Homo sapiens
  CDR3 for beta chain variable domain of TCR clone 349565 (TRBV15, TRBJ2-5)
CATSIGGLGETQYF

SEQ ID NO: 699131 - protein, 17 aa, Homo sapiens
  CDR3 for alpha chain variable domain of TCR clone 349566 (TRAV3, TRAJ42)
CAVRDRDYGGSQGNLIF

SEQ ID NO: 699132 - protein, 19 aa, Homo sapiens
  CDR3 for beta chain variable domain of TCR clone 349566 (TRBV18, TRBJ1-3)
CASSPLSRTGMSSGNTIYF

SEQ ID NO: 699133 - protein, 13 aa, Homo sapiens
  CDR3 for alpha chain variable domain of TCR clone 349567 (TRAV27, TRAJ41)
CAGEGNSGYARNF

SEQ ID NO: 699134 - protein, 11 aa, Homo sapiens
  CDR3 for beta chain variable domain of TCR clone 349567 (TRBV19, TRBJ1-1)
CASSIGSEAFF

SEQ ID NO: 699135 - protein, 23 aa, Homo sapiens
  CDR3 for alpha chain variable domain of TCR clone 349568 (TRAV13-1, )
CAASTRRAQIPAIQNPDPAVYQL

SEQ ID NO: 699136 - protein, 13 aa, Homo sapiens
  CDR3 for beta chain variable domain of TCR clone 349568 (TRBV12-5, TRBJ2-3)
CASGDRQSDTQYF

SEQ ID NO: 699137 - protein, 16 aa, Homo sapiens
  CDR3 for alpha chain variable domain of TCR clone 349569 (TRAV4, TRAJ22)
CLVGDLYSCSARQLTF

SEQ ID NO: 699138 - protein, 16 aa, Homo sapiens
  CDR3 for beta chain variable domain of TCR clone 349569 (TRBV7-9, TRBJ2-3)
CASSPRREVGTDTQYF

SEQ ID NO: 699139 - protein, 21 aa, Homo sapiens
  CDR3 for alpha chain variable domain of TCR clone 349570 (TRAV26-1, )
CIADSAGNNHIQNPDPAVYQL

SEQ ID NO: 699140 - protein, 13 aa, Homo sapiens
  CDR3 for beta chain variable domain of TCR clone 349570 (TRBV20-1, TRBJ2-1)
CSARSSPRDEQFF

SEQ ID NO: 699141 - protein, 12 aa, Homo sapiens
  CDR3 for alpha chain variable domain of TCR clone 349571 (TRAV21, TRAJ33)
CAKMDSNYQLIW

SEQ ID NO: 699142 - protein, 11 aa, Homo sapiens
  CDR3 for beta chain variable domain of TCR clone 349571 (TRBV19, TRBJ2-1)
CASSMGLEQFF

SEQ ID NO: 699143 - protein, 14 aa, Homo sapiens
  CDR3 for alpha chain variable domain of TCR clone 349572 (TRAV13-1, TRAJ44)
CAAKATGTASKLTF

SEQ ID NO: 699144 - protein, 15 aa, Homo sapiens
  CDR3 for beta chain variable domain of TCR clone 349572 (TRBV7-8, TRBJ2-3)
CASSPRTGSTDTQYF

SEQ ID NO: 699145 - protein, 13 aa, Homo sapiens
  CDR3 for alpha chain variable domain of TCR clone 349573 (TRAV2, TRAJ40)
CAVVPSGTYKYIF

SEQ ID NO: 699146 - protein, 14 aa, Homo sapiens
  CDR3 for beta chain variable domain of TCR clone 349573 (TRBV19, TRBJ2-1)
CASTTFVLSGEQFF

SEQ ID NO: 699147 - protein, 15 aa, Homo sapiens
  CDR3 for alpha chain variable domain of TCR clone 349574 (TRAV8-2, TRAJ42)
WVVSAYMGSQGNLIF

SEQ ID NO: 699148 - protein, 11 aa, Homo sapiens
  CDR3 for beta chain variable domain of TCR clone 349574 (TRBV5-1, TRBJ2-1)
CASSIGQEQFF

SEQ ID NO: 699149 - protein, 15 aa, Homo sapiens
  CDR3 for alpha chain variable domain of TCR clone 349575 (TRAV16, TRAJ17)
CALSQIKAAGNKLTF

SEQ ID NO: 699150 - protein, 15 aa, Homo sapiens
  CDR3 for beta chain variable domain of TCR clone 349575 (TRBV5-1, TRBJ2-1)
CASSPPRAPYNEQFF

SEQ ID NO: 699151 - protein, 19 aa, Homo sapiens
  CDR3 for alpha chain variable domain of TCR clone 349576 (TRAV26-1, TRAJ42)
CVLLRRQTYYGGRQGNLIF

SEQ ID NO: 699152 - protein, 16 aa, Homo sapiens
  CDR3 for beta chain variable domain of TCR clone 349576 (TRBV7-3, TRBJ2-2)
CASSLKRGTLSGELFF

SEQ ID NO: 699153 - protein, 15 aa, Homo sapiens
  CDR3 for alpha chain variable domain of TCR clone 349577 (TRAV38-1, TRAJ37)
CAFIHGSGNTGILIF

SEQ ID NO: 699154 - protein, 12 aa, Homo sapiens
  CDR3 for beta chain variable domain of TCR clone 349577 (TRBV7-9, TRBJ2-7)
CASSFGSYEQYF

SEQ ID NO: 699155 - protein, 13 aa, Homo sapiens
  CDR3 for alpha chain variable domain of TCR clone 349578 (TRAV12-3, TRAJ7)
CAMTPNGNNRLAF

SEQ ID NO: 699156 - protein, 16 aa, Homo sapiens
  CDR3 for beta chain variable domain of TCR clone 349578 (TRBV20-1, TRBJ1-4)
CSARPYGGELNEKLFF

SEQ ID NO: 699157 - protein, 11 aa, Homo sapiens
  CDR3 for alpha chain variable domain of TCR clone 349579 (TRAV29/DV5, TRAJ47)
CAATYGKKMVF

SEQ ID NO: 699158 - protein, 17 aa, Homo sapiens
  CDR3 for beta chain variable domain of TCR clone 349579 (TRBV7-9, TRBJ2-1)
CASSLVASYPSYNEQFF

SEQ ID NO: 699159 - protein, 13 aa, Homo sapiens
  CDR3 for alpha chain variable domain of TCR clone 349580 (TRAV27, TRAJ45)
CRGGGGGADGLTF

SEQ ID NO: 699160 - protein, 13 aa, Homo sapiens
  CDR3 for beta chain variable domain of TCR clone 349580 (TRBV20-1, TRBJ1-1)
CSAPEGGNTEAFL

SEQ ID NO: 699161 - protein, 13 aa, Homo sapiens
  CDR3 for alpha chain variable domain of TCR clone 349581 (TRAV8-3, TRAJ36)
CAVGANGANNLFF

SEQ ID NO: 699162 - protein, 15 aa, Homo sapiens
  CDR3 for beta chain variable domain of TCR clone 349581 (TRBV7-2, TRBJ1-2)
CASSLRAGWNYGYTF

SEQ ID NO: 699163 - protein, 13 aa, Homo sapiens
  CDR3 for alpha chain variable domain of TCR clone 349582 (TRAV21, TRAJ20)
CAVGLRVDYKLSF

SEQ ID NO: 699164 - protein, 15 aa, Homo sapiens
  CDR3 for beta chain variable domain of TCR clone 349582 (TRBV13, TRBJ1-2)
CASSLGRQPGYGYTF

SEQ ID NO: 699165 - protein, 13 aa, Homo sapiens
  CDR3 for alpha chain variable domain of TCR clone 349583 (TRAV12-1, TRAJ33)
CGDAPDSNYLLIW

SEQ ID NO: 699166 - protein, 12 aa, Homo sapiens
  CDR3 for beta chain variable domain of TCR clone 349583 (TRBV11-2, TRBJ2-2)
CASSLGGGELFF

SEQ ID NO: 699167 - protein, 12 aa, Homo sapiens
  CDR3 for alpha chain variable domain of TCR clone 349584 (TRAV21, TRAJ29)
CAVTSGNTPLVF

SEQ ID NO: 699168 - protein, 15 aa, Homo sapiens
  CDR3 for beta chain variable domain of TCR clone 349584 (TRBV5-1, TRBJ2-1)
CASSPPRAPYNEQFF

SEQ ID NO: 699169 - protein, 12 aa, Homo sapiens
  CDR3 for alpha chain variable domain of TCR clone 349585 (TRAV12-3, TRAJ17)
CAMTLTGNKLTF

SEQ ID NO: 699170 - protein, 15 aa, Homo sapiens
  CDR3 for beta chain variable domain of TCR clone 349585 (TRBV7-2, TRBJ2-1)
CASSLASGRVNEQFL

SEQ ID NO: 699171 - protein, 17 aa, Homo sapiens
  CDR3 for alpha chain variable domain of TCR clone 349586 (TRAV17, TRAJ7)
CATLGRLAFGKENQVVV

SEQ ID NO: 699172 - protein, 13 aa, Homo sapiens
  CDR3 for beta chain variable domain of TCR clone 349586 (TRBV12-4, TRBJ2-7)
CASSLERVREQYF

SEQ ID NO: 699173 - protein, 16 aa, Homo sapiens
  CDR3 for alpha chain variable domain of TCR clone 349587 (TRAV26-1, TRAJ36)
YIVRAIGRSGANNLFF

SEQ ID NO: 699174 - protein, 14 aa, Homo sapiens
  CDR3 for beta chain variable domain of TCR clone 349587 (TRBV25-1, TRBJ2-1)
CASSKTGGYNEQFF

SEQ ID NO: 699175 - protein, 13 aa, Homo sapiens
  CDR3 for alpha chain variable domain of TCR clone 349588 (TRAV8-6, TRAJ40)
CAVSVTGTYKYIF

SEQ ID NO: 699176 - protein, 15 aa, Homo sapiens
  CDR3 for beta chain variable domain of TCR clone 349588 (TRBV4-1, TRBJ2-3)
CASSRGQGIPDMQYF

SEQ ID NO: 699177 - protein, 15 aa, Homo sapiens
  CDR3 for alpha chain variable domain of TCR clone 349589 (TRAV8-3, TRAJ45)
CSSSYSGGGADGLTF

SEQ ID NO: 699178 - protein, 15 aa, Homo sapiens
  CDR3 for beta chain variable domain of TCR clone 349589 (TRBV20-1, TRBJ2-7)
CSARDRVSGMDGQYF

SEQ ID NO: 699179 - protein, 17 aa, Homo sapiens
  CDR3 for alpha chain variable domain of TCR clone 349590 (TRAV8-6, TRAJ22)
CAVSLYPSSGSARQLTF

SEQ ID NO: 699180 - protein, 14 aa, Homo sapiens
  CDR3 for beta chain variable domain of TCR clone 349590 (TRBV7-9, TRBJ2-5)
CASSLDTAQETQYF

SEQ ID NO: 699181 - protein, 16 aa, Homo sapiens
  CDR3 for alpha chain variable domain of TCR clone 349591 (TRAV17, TRAJ17)
CATALQEEAAGNKLTF

SEQ ID NO: 699182 - protein, 12 aa, Homo sapiens
  CDR3 for beta chain variable domain of TCR clone 349591 (TRBV4-2, TRBJ2-5)
CASGGAQETKYF

SEQ ID NO: 699183 - protein, 13 aa, Homo sapiens
  CDR3 for alpha chain variable domain of TCR clone 349592 (TRAV12-1, TRAJ29)
CVVVSSGNTPLVF

SEQ ID NO: 699184 - protein, 13 aa, Homo sapiens
  CDR3 for beta chain variable domain of TCR clone 349592 (TRBV7-9, TRBJ1-2)
CASSLKQNYGYTF

SEQ ID NO: 699185 - protein, 13 aa, Homo sapiens
  CDR3 for alpha chain variable domain of TCR clone 349593 (TRAV29/DV5, TRAJ54)
CAAHLQGAQKLVF

SEQ ID NO: 699186 - protein, 12 aa, Homo sapiens
  CDR3 for beta chain variable domain of TCR clone 349593 (TRBV5-7, TRBJ1-1)
CASSLGRGKAFC

SEQ ID NO: 699187 - protein, 14 aa, Homo sapiens
  CDR3 for alpha chain variable domain of TCR clone 349594 (TRAV12-3, TRAJ10)
SHLPLTGGGNKLTF

SEQ ID NO: 699188 - protein, 12 aa, Homo sapiens
  CDR3 for beta chain variable domain of TCR clone 349594 (TRBV29-1, TRBJ1-1)
CSVATPGVEAFV

SEQ ID NO: 699189 - protein, 13 aa, Homo sapiens
  CDR3 for alpha chain variable domain of TCR clone 349595 (TRAV21, TRAJ57)
CAVTQGGPEKLVV

SEQ ID NO: 699190 - protein, 16 aa, Homo sapiens
  CDR3 for beta chain variable domain of TCR clone 349595 (TRBV29-1, TRBJ2-7)
CSVEDAEDGTAYEQYF

SEQ ID NO: 699191 - protein, 18 aa, Homo sapiens
  CDR3 for alpha chain variable domain of TCR clone 349596 (TRAV26-1, TRAJ52)
CIVRGRNAGGTSYGKLTF

SEQ ID NO: 699192 - protein, 15 aa, Homo sapiens
  CDR3 for beta chain variable domain of TCR clone 349596 (TRBV20-1, TRBJ2-7)
CSARDRVSGMDEQYF

SEQ ID NO: 699193 - protein, 17 aa, Homo sapiens
  CDR3 for alpha chain variable domain of TCR clone 349597 (TRAV8-6, TRAJ58)
CAVSSWVGETSGSRLTF

SEQ ID NO: 699194 - protein, 15 aa, Homo sapiens
  CDR3 for beta chain variable domain of TCR clone 349597 (TRBV6-5, TRBJ1-2)
CASSYSQAFNYGYTF

SEQ ID NO: 699195 - protein, 17 aa, Homo sapiens
  CDR3 for alpha chain variable domain of TCR clone 349598 (TRAV3, TRAJ6)
CAVRDGPRAGGSYIPTF

SEQ ID NO: 699196 - protein, 16 aa, Homo sapiens
  CDR3 for beta chain variable domain of TCR clone 349598 (TRBV5-1, TRBJ1-3)
CASSPWAPSSGNTMYF

SEQ ID NO: 699197 - protein, 15 aa, Homo sapiens
  CDR3 for alpha chain variable domain of TCR clone 349599 (TRAV23/DV6, TRAJ18)
CAARHRGSTLGRLYF

SEQ ID NO: 699198 - protein, 15 aa, Homo sapiens
  CDR3 for beta chain variable domain of TCR clone 349599 (TRBV9, TRBJ1-6)
CASSVAGTGDSPLHF

SEQ ID NO: 699199 - protein, 21 aa, Homo sapiens
  CDR3 for alpha chain variable domain of TCR clone 349600 (TRAV12-1, TRAJ32)
SPVIKPPTSMNYGGATNKLIF

SEQ ID NO: 699200 - protein, 15 aa, Homo sapiens
  CDR3 for beta chain variable domain of TCR clone 349600 (TRBV7-9, TRBJ2-2)
CASGPLDTFPGELFF

SEQ ID NO: 699201 - protein, 14 aa, Homo sapiens
  CDR3 for alpha chain variable domain of TCR clone 349601 (TRAV13-1, TRAJ48)
CAASRSFGNEKLTF

SEQ ID NO: 699202 - protein, 15 aa, Homo sapiens
  CDR3 for beta chain variable domain of TCR clone 349601 (TRBV3-1, TRBJ2-7)
CASSQVRQGAYEQYF

SEQ ID NO: 699203 - protein, 13 aa, Homo sapiens
  CDR3 for alpha chain variable domain of TCR clone 349602 (TRAV3, TRAJ36)
CAVRDTGANNLFI

SEQ ID NO: 699204 - protein, 15 aa, Homo sapiens
  CDR3 for beta chain variable domain of TCR clone 349602 (TRBV24-1, TRBJ2-1)
CATSGSGGFYNEQFF

SEQ ID NO: 699205 - protein, 14 aa, Homo sapiens
  CDR3 for alpha chain variable domain of TCR clone 349603 (TRAV1-2, TRAJ8)
CAVREDTGFQKLVF

SEQ ID NO: 699206 - protein, 15 aa, Homo sapiens
  CDR3 for beta chain variable domain of TCR clone 349603 (TRBV7-3, TRBJ2-2)
YASSETGQGTGELFF

SEQ ID NO: 699207 - protein, 12 aa, Homo sapiens
  CDR3 for alpha chain variable domain of TCR clone 349604 (TRAV12-3, TRAJ42)
CAPGGSQGNLIF

SEQ ID NO: 699208 - protein, 13 aa, Homo sapiens
  CDR3 for beta chain variable domain of TCR clone 349604 (TRBV7-9, TRBJ1-2)
CASSLKQNYGYTF

SEQ ID NO: 699209 - protein, 14 aa, Homo sapiens
  CDR3 for alpha chain variable domain of TCR clone 349605 (TRAV12-3, TRAJ29)
CAMSPYSGNTPLVF

SEQ ID NO: 699210 - protein, 19 aa, Homo sapiens
  CDR3 for beta chain variable domain of TCR clone 349605 (TRBV25-1, TRBJ2-2)
CAILVYRVDRGRKTGELFF

SEQ ID NO: 699211 - protein, 14 aa, Homo sapiens
  CDR3 for alpha chain variable domain of TCR clone 349606 (TRAV12-3, TRAJ44)
CAMTPQGTASKLTF

SEQ ID NO: 699212 - protein, 13 aa, Homo sapiens
  CDR3 for beta chain variable domain of TCR clone 349606 (TRBV13, TRBJ2-1)
CASILGGRGEQFF

SEQ ID NO: 699213 - protein, 14 aa, Homo sapiens
  CDR3 for alpha chain variable domain of TCR clone 349607 (TRAV13-1, TRAJ44)
CAAKATGTASKLTF

SEQ ID NO: 699214 - protein, 13 aa, Homo sapiens
  CDR3 for beta chain variable domain of TCR clone 349607 (TRBV6-5, TRBJ2-2)
CASSLPGVGELFF

SEQ ID NO: 699215 - protein, 16 aa, Homo sapiens
  CDR3 for alpha chain variable domain of TCR clone 349608 (TRAV21, TRAJ52)
CAVTNAGGTNYGKLTF

SEQ ID NO: 699216 - protein, 16 aa, Homo sapiens
  CDR3 for beta chain variable domain of TCR clone 349608 (TRBV2, TRBJ2-1)
CASSVGGSLSYNEQFF

SEQ ID NO: 699217 - protein, 16 aa, Homo sapiens
  CDR3 for alpha chain variable domain of TCR clone 349609 (TRAV4, TRAJ22)
CLVGDLYSGSARQLTF

SEQ ID NO: 699218 - protein, 14 aa, Homo sapiens
  CDR3 for beta chain variable domain of TCR clone 349609 (TRBV28, TRBJ2-3)
CASSWRGRADTQYS

SEQ ID NO: 699219 - protein, 13 aa, Homo sapiens
  CDR3 for alpha chain variable domain of TCR clone 349610 (TRAV27, TRAJ56)
CAGKPGANSKLTF

SEQ ID NO: 699220 - protein, 16 aa, Homo sapiens
  CDR3 for beta chain variable domain of TCR clone 349610 (TRBV4-1, TRBJ1-2)
CASSQDAGQVLYGYTF

SEQ ID NO: 699221 - protein, 15 aa, Homo sapiens
  CDR3 for alpha chain variable domain of TCR clone 349611 (TRAV8-3, TRAJ6)
CAVCPLGGGSYIPTF

SEQ ID NO: 699222 - protein, 14 aa, Homo sapiens
  CDR3 for beta chain variable domain of TCR clone 349611 (TRBV19, TRBJ2-2)
CASSTGQGAGELFF

SEQ ID NO: 699223 - protein, 12 aa, Homo sapiens
  CDR3 for alpha chain variable domain of TCR clone 349612 (TRAV21, TRAJ3)
CCFYSSASKIIF

SEQ ID NO: 699224 - protein, 15 aa, Homo sapiens
  CDR3 for beta chain variable domain of TCR clone 349612 (TRBV12-4, TRBJ2-1)
CASSLLATGNNEQFF

SEQ ID NO: 699225 - protein, 13 aa, Homo sapiens
  CDR3 for alpha chain variable domain of TCR clone 349613 (TRAV35, TRAJ57)
CAGSQGGSEKLVF

SEQ ID NO: 699226 - protein, 11 aa, Homo sapiens
  CDR3 for beta chain variable domain of TCR clone 349613 (TRBV29-1, TRBJ2-5)
CSEDRTGTQYF

SEQ ID NO: 699227 - protein, 13 aa, Homo sapiens
  CDR3 for alpha chain variable domain of TCR clone 349614 (TRAV8-3, TRAJ48)
CWGCNFGNEKLTF

SEQ ID NO: 699228 - protein, 12 aa, Homo sapiens
  CDR3 for beta chain variable domain of TCR clone 349614 (TRBV7-2, TRBJ2-5)
CASSQYQETQYF

SEQ ID NO: 699229 - protein, 15 aa, Homo sapiens
  CDR3 for alpha chain variable domain of TCR clone 349615 (TRAV12-3, TRAJ6)
CAMSATTGGSYIPTF

SEQ ID NO: 699230 - protein, 13 aa, Homo sapiens
  CDR3 for beta chain variable domain of TCR clone 349615 (TRBV6-3, TRBJ2-7)
CASSFRGGYEQYF

SEQ ID NO: 699231 - protein, 15 aa, Homo sapiens
  CDR3 for alpha chain variable domain of TCR clone 349616 (TRAV26-1, TRAJ39)
CIVRDGSNAGNMLTF

SEQ ID NO: 699232 - protein, 11 aa, Homo sapiens
  CDR3 for beta chain variable domain of TCR clone 349616 (TRBV29-1, TRBJ2-5)
CSEDRTWTQYF

SEQ ID NO: 699233 - protein, 15 aa, Homo sapiens
  CDR3 for alpha chain variable domain of TCR clone 349617 (TRAV2, TRAJ9)
CAVADRGTGGFKTIF

SEQ ID NO: 699234 - protein, 13 aa, Homo sapiens
  CDR3 for beta chain variable domain of TCR clone 349617 (TRBV20-1, TRBJ1-1)
CSARGGGNTEAFF

SEQ ID NO: 699235 - protein, 15 aa, Homo sapiens
  CDR3 for alpha chain variable domain of TCR clone 349618 (TRAV27, TRAJ38)
CAARRNAGNNRMLIW

SEQ ID NO: 699236 - protein, 13 aa, Homo sapiens
  CDR3 for beta chain variable domain of TCR clone 349618 (TRBV20-1, TRBJ1-1)
CSARAGGNTEAFF

SEQ ID NO: 699237 - protein, 14 aa, Homo sapiens
  CDR3 for alpha chain variable domain of TCR clone 349619 (TRAV1-2, TRAJ16)
CAVNRFSDGQKLLF

SEQ ID NO: 699238 - protein, 17 aa, Homo sapiens
  CDR3 for beta chain variable domain of TCR clone 349619 (TRBV20-1, TRBJ1-6)
CSARGGYTFSYNSPLHF

SEQ ID NO: 699239 - protein, 11 aa, Homo sapiens
  CDR3 for alpha chain variable domain of TCR clone 349620 (TRAV2, TRAJ13)
CASGGYQKVTF

SEQ ID NO: 699240 - protein, 14 aa, Homo sapiens
  CDR3 for beta chain variable domain of TCR clone 349620 (TRBV28, TRBJ2-7)
CASSGLAEPAEQYF

SEQ ID NO: 699241 - protein, 14 aa, Homo sapiens
  CDR3 for alpha chain variable domain of TCR clone 349621 (TRAV12-3, TRAJ10)
SHLPLTGGRNKLTF

SEQ ID NO: 699242 - protein, 14 aa, Homo sapiens
  CDR3 for beta chain variable domain of TCR clone 349621 (TRBV7-2, TRBJ2-2)
CASRGQGAAGELFF

SEQ ID NO: 699243 - protein, 14 aa, Homo sapiens
  CDR3 for alpha chain variable domain of TCR clone 349622 (TRAV2, TRAJ32)
CAVANYGGATNKLI

SEQ ID NO: 699244 - protein, 15 aa, Homo sapiens
  CDR3 for beta chain variable domain of TCR clone 349622 (TRBV7-7, TRBJ2-5)
CASSQLERAEETQYF

SEQ ID NO: 699245 - protein, 13 aa, Homo sapiens
  CDR3 for alpha chain variable domain of TCR clone 349623 (TRAV17, TRAJ20)
FATDAVGDYKLSC

SEQ ID NO: 699246 - protein, 15 aa, Homo sapiens
  CDR3 for beta chain variable domain of TCR clone 349623 (TRBV9, TRBJ1-3)
CASSARAGGGNTIYF

SEQ ID NO: 699247 - protein, 16 aa, Homo sapiens
  CDR3 for alpha chain variable domain of TCR clone 349624 (TRAV3, TRAJ28)
CAVLPRSGAGSYQLTF

SEQ ID NO: 699248 - protein, 13 aa, Homo sapiens
  CDR3 for beta chain variable domain of TCR clone 349624 (TRBV12-4, TRBJ2-5)
CASRLAVQDTQYL

SEQ ID NO: 699249 - protein, 17 aa, Homo sapiens
  CDR3 for alpha chain variable domain of TCR clone 349625 (TRAV38-2/DV8, TRAJ28)
CAFLTLYSGAGSYQLTF

SEQ ID NO: 699250 - protein, 19 aa, Homo sapiens
  CDR3 for beta chain variable domain of TCR clone 349625 (TRBV7-2, TRBJ2-5)
CASSLAGGGGDPVLRARHA

SEQ ID NO: 699251 - protein, 17 aa, Homo sapiens
  CDR3 for alpha chain variable domain of TCR clone 349626 (TRAV4, TRAJ13)
CLVGVQGASGGFQKVTF

SEQ ID NO: 699252 - protein, 18 aa, Homo sapiens
  CDR3 for beta chain variable domain of TCR clone 349626 (TRBV15, TRBJ2-3)
CATSRDGARSWDTDTQYF

SEQ ID NO: 699253 - protein, 17 aa, Homo sapiens
  CDR3 for alpha chain variable domain of TCR clone 349627 (TRAV3, TRAJ6)
CAVRDGPRAGGSYIHTF

SEQ ID NO: 699254 - protein, 16 aa, Homo sapiens
  CDR3 for beta chain variable domain of TCR clone 349627 (TRBV7-8, TRBJ2-3)
CASSTEGQRETDTQYF

SEQ ID NO: 699255 - protein, 12 aa, Homo sapiens
  CDR3 for alpha chain variable domain of TCR clone 349628 (TRAV38-2/DV8, TRAJ48)
CALLSVNEKLTF

SEQ ID NO: 699256 - protein, 15 aa, Homo sapiens
  CDR3 for beta chain variable domain of TCR clone 349628 (TRBV6-1, TRBJ2-1)
CASSELRGQYNEQFF

SEQ ID NO: 699257 - protein, 12 aa, Homo sapiens
  CDR3 for alpha chain variable domain of TCR clone 349629 (TRAV12-1, TRAJ40)
CVVYSGTYKYIF

SEQ ID NO: 699258 - protein, 18 aa, Homo sapiens
  CDR3 for beta chain variable domain of TCR clone 349629 (TRBV11-2, TRBJ2-3)
CATSFGGASRGAPNTQYF

SEQ ID NO: 699259 - protein, 15 aa, Homo sapiens
  CDR3 for alpha chain variable domain of TCR clone 349630 (TRAV3, TRAJ29)
CAVRAPLSGNTPLVF

SEQ ID NO: 699260 - protein, 17 aa, Homo sapiens
  CDR3 for beta chain variable domain of TCR clone 349630 (TRBV7-3, TRBJ2-3)
CASSLMKRMRGADTQYF

SEQ ID NO: 699261 - protein, 11 aa, Homo sapiens
  CDR3 for alpha chain variable domain of TCR clone 349631 (TRAV1-2, TRAJ40)
CAVPGTYKYIF

SEQ ID NO: 699262 - protein, 15 aa, Homo sapiens
  CDR3 for beta chain variable domain of TCR clone 349631 (TRBV20-1, TRBJ2-7)
CSAESGTSGAYEQYF

SEQ ID NO: 699263 - protein, 16 aa, Homo sapiens
  CDR3 for alpha chain variable domain of TCR clone 349632 (TRAV30, TRAJ24)
CGTEIVDADSWGKFQF

SEQ ID NO: 699264 - protein, 15 aa, Homo sapiens
  CDR3 for beta chain variable domain of TCR clone 349632 (TRBV19, TRBJ2-7)
CASSIGRTFSYEQYF

SEQ ID NO: 699265 - protein, 11 aa, Homo sapiens
  CDR3 for alpha chain variable domain of TCR clone 349633 (TRAV2, TRAJ13)
CASGGYQKVTF

SEQ ID NO: 699266 - protein, 17 aa, Homo sapiens
  CDR3 for beta chain variable domain of TCR clone 349633 (TRBV4-2, TRBJ2-1)
CASSQVSGLAMNNEQFF

SEQ ID NO: 699267 - protein, 13 aa, Homo sapiens
  CDR3 for alpha chain variable domain of TCR clone 349634 (TRAV13-1, TRAJ39)
CAASIVMQATCPP

SEQ ID NO: 699268 - protein, 11 aa, Homo sapiens
  CDR3 for beta chain variable domain of TCR clone 349634 (TRBV12-4, TRBJ2-3)
CASTATDTQYF

SEQ ID NO: 699269 - protein, 14 aa, Homo sapiens
  CDR3 for alpha chain variable domain of TCR clone 349635 (TRAV3, TRAJ9)
CAVRGNTGGFKTIF

SEQ ID NO: 699270 - protein, 14 aa, Homo sapiens
  CDR3 for beta chain variable domain of TCR clone 349635 (TRBV7-3, TRBJ2-1)
CASSLAGGTNEQFF

SEQ ID NO: 699271 - protein, 10 aa, Homo sapiens
  CDR3 for alpha chain variable domain of TCR clone 349636 (TRAV23/DV6, TRAJ57)
CAASSTLSQG

SEQ ID NO: 699272 - protein, 15 aa, Homo sapiens
  CDR3 for beta chain variable domain of TCR clone 349636 (TRBV7-9, TRBJ2-7)
CASSSGSPQPYEQYF

SEQ ID NO: 699273 - protein, 14 aa, Homo sapiens
  CDR3 for alpha chain variable domain of TCR clone 349637 (TRAV12-2, TRAJ13)
CAVKKTGVYQKVTF

SEQ ID NO: 699274 - protein, 14 aa, Homo sapiens
  CDR3 for beta chain variable domain of TCR clone 349637 (TRBV19, TRBJ2-1)
CASPTFVLSSEQFF

SEQ ID NO: 699275 - protein, 14 aa, Homo sapiens
  CDR3 for alpha chain variable domain of TCR clone 349638 (TRAV17, TRAJ40)
CATALTSGTYKYIF

SEQ ID NO: 699276 - protein, 18 aa, Homo sapiens
  CDR3 for beta chain variable domain of TCR clone 349638 (TRBV7-9, TRBJ2-1)
CASSLAVSGTSGRNEQFF

SEQ ID NO: 699277 - protein, 12 aa, Homo sapiens
  CDR3 for alpha chain variable domain of TCR clone 349639 (TRAV20, TRAJ33)
SAVRGSNYQLIW

SEQ ID NO: 699278 - protein, 13 aa, Homo sapiens
  CDR3 for beta chain variable domain of TCR clone 349639 (TRBV4-3, TRBJ1-1)
CASSPTGNTEAFF

SEQ ID NO: 699279 - protein, 12 aa, Homo sapiens
  CDR3 for alpha chain variable domain of TCR clone 349640 (TRAV1-1, TRAJ8)
CVGGTGFQKLVF

SEQ ID NO: 699280 - protein, 15 aa, Homo sapiens
  CDR3 for beta chain variable domain of TCR clone 349640 (TRBV7-9, TRBJ1-4)
CASSRTGGFNENLFF

SEQ ID NO: 699281 - protein, 13 aa, Homo sapiens
  CDR3 for alpha chain variable domain of TCR clone 349641 (TRAV12-1, TRAJ6)
CVVFPGGSYIPTF

SEQ ID NO: 699282 - protein, 12 aa, Homo sapiens
  CDR3 for beta chain variable domain of TCR clone 349641 (TRBV12-4, TRBJ2-7)
CASSLGGYEQYF

SEQ ID NO: 699283 - protein, 14 aa, Homo sapiens
  CDR3 for alpha chain variable domain of TCR clone 349642 (TRAV1-2, TRAJ8)
CAGREDTGFQKLVF

SEQ ID NO: 699284 - protein, 16 aa, Homo sapiens
  CDR3 for beta chain variable domain of TCR clone 349642 (TRBV4-1, TRBJ2-5)
CASSSGLAGVLGTQYF

SEQ ID NO: 699285 - protein, 14 aa, Homo sapiens
  CDR3 for alpha chain variable domain of TCR clone 349643 (TRAV13-1, TRAJ3)
CAASKSSSASKIIF

SEQ ID NO: 699286 - protein, 17 aa, Homo sapiens
  CDR3 for beta chain variable domain of TCR clone 349643 (TRBV12-4, TRBJ1-5)
CASSLRGDRGPNQPQHF

SEQ ID NO: 699287 - protein, 12 aa, Homo sapiens
  CDR3 for alpha chain variable domain of TCR clone 349644 (TRAV12-3, TRAJ17)
CAMTLTGNKLTF

SEQ ID NO: 699288 - protein, 16 aa, Homo sapiens
  CDR3 for beta chain variable domain of TCR clone 349644 (TRBV5-1, TRBJ2-5)
CASSFQGLADQETQYF

SEQ ID NO: 699289 - protein, 12 aa, Homo sapiens
  CDR3 for alpha chain variable domain of TCR clone 349645 (TRAV8-3, TRAJ43)
FAVGAGNNDMRF

SEQ ID NO: 699290 - protein, 14 aa, Homo sapiens
  CDR3 for beta chain variable domain of TCR clone 349645 (TRBV4-2, TRBJ1-5)
CASSRDRGNQPQHF

SEQ ID NO: 699291 - protein, 14 aa, Homo sapiens
  CDR3 for alpha chain variable domain of TCR clone 349646 (TRAV13-1, TRAJ35)
CAASKGGFGNVLHC

SEQ ID NO: 699292 - protein, 15 aa, Homo sapiens
  CDR3 for beta chain variable domain of TCR clone 349646 (TRBV3-1, TRBJ1-1)
CASSRLNPPNTEAFF

SEQ ID NO: 699293 - protein, 17 aa, Homo sapiens
  CDR3 for alpha chain variable domain of TCR clone 349647 (TRAV3, TRAJ6)
CAVRDGPRAGGSYIPTF

SEQ ID NO: 699294 - protein, 14 aa, Homo sapiens
  CDR3 for beta chain variable domain of TCR clone 349647 (TRBV18, TRBJ1-5)
CASSPGNSNQPQHF

SEQ ID NO: 699295 - protein, 16 aa, Homo sapiens
  CDR3 for alpha chain variable domain of TCR clone 349648 (TRAV20, TRAJ53)
CAVQGNSGGSNDKLTF

SEQ ID NO: 699296 - protein, 14 aa, Homo sapiens
  CDR3 for beta chain variable domain of TCR clone 349648 (TRBV6-5, TRBJ2-7)
CASSPHRGLREQYF

SEQ ID NO: 699297 - protein, 12 aa, Homo sapiens
  CDR3 for alpha chain variable domain of TCR clone 349649 (TRAV1-2, TRAJ29)
CAVPSGNTPLVF

SEQ ID NO: 699298 - protein, 14 aa, Homo sapiens
  CDR3 for beta chain variable domain of TCR clone 349649 (TRBV18, TRBJ2-5)
CASSHGVSQETQYF

SEQ ID NO: 699299 - protein, 12 aa, Homo sapiens
  CDR3 for alpha chain variable domain of TCR clone 349650 (TRAV2, TRAJ33)
CAVPVSNYQLIW

SEQ ID NO: 699300 - protein, 17 aa, Homo sapiens
  CDR3 for beta chain variable domain of TCR clone 349650 (TRBV6-5, TRBJ2-3)
CASSYGTSLYKSDTQYF

SEQ ID NO: 699301 - protein, 12 aa, Homo sapiens
  CDR3 for alpha chain variable domain of TCR clone 349651 (TRAV13-2, TRAJ8)
CAPWLGFQKLVF

SEQ ID NO: 699302 - protein, 15 aa, Homo sapiens
  CDR3 for beta chain variable domain of TCR clone 349651 (TRBV7-2, TRBJ2-1)
CASSLVGSSYNEQFF

SEQ ID NO: 699303 - protein, 12 aa, Homo sapiens
  CDR3 for alpha chain variable domain of TCR clone 349652 (TRAV41, TRAJ58)
CAVKTSGSRLTF

SEQ ID NO: 699304 - protein, 13 aa, Homo sapiens
  CDR3 for beta chain variable domain of TCR clone 349652 (TRBV11-3, TRBJ2-3)
CASSHDTKDTQYF

SEQ ID NO: 699305 - protein, 14 aa, Homo sapiens
  CDR3 for alpha chain variable domain of TCR clone 349653 (TRAV8-3, TRAJ39)
CAVGANNAGNMLTF

SEQ ID NO: 699306 - protein, 14 aa, Homo sapiens
  CDR3 for beta chain variable domain of TCR clone 349653 (TRBV6-1, TRBJ1-6)
CASSGTAYNSTLHF

SEQ ID NO: 699307 - protein, 12 aa, Homo sapiens
  CDR3 for alpha chain variable domain of TCR clone 349654 (TRAV12-2, TRAJ31)
CAVNTPDARLMF

SEQ ID NO: 699308 - protein, 16 aa, Homo sapiens
  CDR3 for beta chain variable domain of TCR clone 349654 (TRBV19, TRBJ2-3)
CASSPRRAQIRSILAQ

SEQ ID NO: 699309 - protein, 10 aa, Homo sapiens
  CDR3 for alpha chain variable domain of TCR clone 349655 (TRAV23/DV6, TRAJ3)
CAATIFALGG

SEQ ID NO: 699310 - protein, 15 aa, Homo sapiens
  CDR3 for beta chain variable domain of TCR clone 349655 (TRBV19, TRBJ1-6)
CASSTQGAVGSPLHF

SEQ ID NO: 699311 - protein, 10 aa, Homo sapiens
  CDR3 for alpha chain variable domain of TCR clone 349656 (TRAV13-1, TRAJ4)
PSSGYNKLIF

SEQ ID NO: 699312 - protein, 14 aa, Homo sapiens
  CDR3 for beta chain variable domain of TCR clone 349656 (TRBV19, TRBJ2-1)
CASPTFVLSGEQFF

SEQ ID NO: 699313 - protein, 10 aa, Homo sapiens
  CDR3 for alpha chain variable domain of TCR clone 349657 (TRAV21, TRAJ31)
CAVDNARLMF

SEQ ID NO: 699314 - protein, 13 aa, Homo sapiens
  CDR3 for beta chain variable domain of TCR clone 349657 (TRBV4-1, TRBJ1-1)
WASSRKMNTEAFF

SEQ ID NO: 699315 - protein, 14 aa, Homo sapiens
  CDR3 for alpha chain variable domain of TCR clone 349658 (TRAV12-3, TRAJ13)
CAMRNSGGYQKVTF

SEQ ID NO: 699316 - protein, 14 aa, Homo sapiens
  CDR3 for beta chain variable domain of TCR clone 349658 (TRBV4-1, TRBJ2-2)
CASSQAVNTGELFF

SEQ ID NO: 699317 - protein, 13 aa, Homo sapiens
  CDR3 for alpha chain variable domain of TCR clone 349659 (TRAV13-2, TRAJ8)
CAFMNTGFQKLVF

SEQ ID NO: 699318 - protein, 15 aa, Homo sapiens
  CDR3 for beta chain variable domain of TCR clone 349659 (TRBV19, TRBJ2-3)
CAAGDTSAPNDTQYF

SEQ ID NO: 699319 - protein, 15 aa, Homo sapiens
  CDR3 for alpha chain variable domain of TCR clone 349660 (TRAV13-1, TRAJ44)
CAASRNTCTASKLTF

SEQ ID NO: 699320 - protein, 14 aa, Homo sapiens
  CDR3 for beta chain variable domain of TCR clone 349660 (TRBV11-2, TRBJ1-2)
CASSLYRGNYGYTF

SEQ ID NO: 699321 - protein, 14 aa, Homo sapiens
  CDR3 for alpha chain variable domain of TCR clone 349661 (TRAV1-2, TRAJ8)
CAVREDTGFQKLGF

SEQ ID NO: 699322 - protein, 14 aa, Homo sapiens
  CDR3 for beta chain variable domain of TCR clone 349661 (TRBV29-1, TRBJ1-4)
CSVTGTGGNEKLFF

SEQ ID NO: 699323 - protein, 17 aa, Homo sapiens
  CDR3 for alpha chain variable domain of TCR clone 349662 (TRAV3, TRAJ6)
CAVRDGPRAGGSYIPIF

SEQ ID NO: 699324 - protein, 14 aa, Homo sapiens
  CDR3 for beta chain variable domain of TCR clone 349662 (TRBV7-2, TRBJ2-7)
CAISPKTSFYEQYF

SEQ ID NO: 699325 - protein, 10 aa, Homo sapiens
  CDR3 for alpha chain variable domain of TCR clone 349663 (TRAV1-2, TRAJ23)
CAGQGGKLIF

SEQ ID NO: 699326 - protein, 14 aa, Homo sapiens
  CDR3 for beta chain variable domain of TCR clone 349663 (TRBV7-2, TRBJ2-5)
CASSLFGREETQYF

SEQ ID NO: 699327 - protein, 14 aa, Homo sapiens
  CDR3 for alpha chain variable domain of TCR clone 349664 (TRAV38-1, TRAJ45)
WASHSGGGADGLTS

SEQ ID NO: 699328 - protein, 13 aa, Homo sapiens
  CDR3 for beta chain variable domain of TCR clone 349664 (TRBV10-3, TRBJ1-2)
CAISERDSYGYTF

SEQ ID NO: 699329 - protein, 11 aa, Homo sapiens
  CDR3 for alpha chain variable domain of TCR clone 349665 (TRAV2, TRAJ13)
CASGGYQKVTF

SEQ ID NO: 699330 - protein, 15 aa, Homo sapiens
  CDR3 for beta chain variable domain of TCR clone 349665 (TRBV29-1, TRBJ2-1)
CSGRDRKSSYNEQFF

SEQ ID NO: 699331 - protein, 16 aa, Homo sapiens
  CDR3 for alpha chain variable domain of TCR clone 349666 (TRAV8-6, TRAJ23)
CAVSDRLGNQGGKLIF

SEQ ID NO: 699332 - protein, 20 aa, Homo sapiens
  CDR3 for beta chain variable domain of TCR clone 349666 (TRBV7-8, TRBJ2-2)
CASSHLFPGPTIHITGELFF

SEQ ID NO: 699333 - protein, 15 aa, Homo sapiens
  CDR3 for alpha chain variable domain of TCR clone 349667 (TRAV8-3, TRAJ21)
CAVGALPTRGYKFYF

SEQ ID NO: 699334 - protein, 18 aa, Homo sapiens
  CDR3 for beta chain variable domain of TCR clone 349667 (TRBV25-1, TRBJ1-2)
CASSGLQNGQGLIFGYTF

SEQ ID NO: 699335 - protein, 13 aa, Homo sapiens
  CDR3 for alpha chain variable domain of TCR clone 349668 (TRAV17, TRAJ31)
CATDENNNARLMF

SEQ ID NO: 699336 - protein, 14 aa, Homo sapiens
  CDR3 for beta chain variable domain of TCR clone 349668 (TRBV11-2, TRBJ2-1)
CASSPSRQGGEQFF

SEQ ID NO: 699337 - protein, 12 aa, Homo sapiens
  CDR3 for alpha chain variable domain of TCR clone 349669 (TRAV8-3, TRAJ4)
CALSGGYNKLIF

SEQ ID NO: 699338 - protein, 16 aa, Homo sapiens
  CDR3 for beta chain variable domain of TCR clone 349669 (TRBV24-1, TRBJ2-3)
CATSDPGTGATDTQYF

SEQ ID NO: 699339 - protein, 18 aa, Homo sapiens
  CDR3 for alpha chain variable domain of TCR clone 349670 (TRAV21, TRAJ52)
CAVRPSPAGGTSYGKLTF

SEQ ID NO: 699340 - protein, 14 aa, Homo sapiens
  CDR3 for beta chain variable domain of TCR clone 349670 (TRBV13, TRBJ2-5)
CASSLGPRGETQYF

SEQ ID NO: 699341 - protein, 14 aa, Homo sapiens
  CDR3 for alpha chain variable domain of TCR clone 349671 (TRAV12-3, TRAJ42)
CAMNYGGSQGNLIL

SEQ ID NO: 699342 - protein, 15 aa, Homo sapiens
  CDR3 for beta chain variable domain of TCR clone 349671 (TRBV5-6, TRBJ1-5)
CASSYGKLWDQPQHF

SEQ ID NO: 699343 - protein, 19 aa, Homo sapiens
  CDR3 for alpha chain variable domain of TCR clone 349672 (TRAV1-2, TRAJ26)
CLLPLCCERPDNYGQNFIF

SEQ ID NO: 699344 - protein, 15 aa, Homo sapiens
  CDR3 for beta chain variable domain of TCR clone 349672 (TRBV9, TRBJ1-6)
CASSVAGTGDSPLHF

SEQ ID NO: 699345 - protein, 16 aa, Homo sapiens
  CDR3 for alpha chain variable domain of TCR clone 349673 (TRAV3, TRAJ10)
CAVRDRRAGGGNKLTL

SEQ ID NO: 699346 - protein, 15 aa, Homo sapiens
  CDR3 for beta chain variable domain of TCR clone 349673 (TRBV9, TRBJ1-6)
CASSVAGTGDSPLHF

SEQ ID NO: 699347 - protein, 16 aa, Homo sapiens
  CDR3 for alpha chain variable domain of TCR clone 349674 (TRAV36/DV7, TRAJ30)
CAVETYGLDRDDKIIF

SEQ ID NO: 699348 - protein, 13 aa, Homo sapiens
  CDR3 for beta chain variable domain of TCR clone 349674 (TRBV7-9, TRBJ1-2)
CASSLKQNYGYTF

SEQ ID NO: 699349 - protein, 14 aa, Homo sapiens
  CDR3 for alpha chain variable domain of TCR clone 349675 (TRAV35, TRAJ33)
CAGSSQYSNYQLIW

SEQ ID NO: 699350 - protein, 15 aa, Homo sapiens
  CDR3 for beta chain variable domain of TCR clone 349675 (TRBV20-1, TRBJ2-7)
CSAESATSGAYEQYF

SEQ ID NO: 699351 - protein, 13 aa, Homo sapiens
  CDR3 for alpha chain variable domain of TCR clone 349676 (TRAV35, TRAJ22)
CAGLSGSARHLTF

SEQ ID NO: 699352 - protein, 16 aa, Homo sapiens
  CDR3 for beta chain variable domain of TCR clone 349676 (TRBV7-9, TRBJ2-1)
CASSLVLTGQGNEQFF

SEQ ID NO: 699353 - protein, 13 aa, Homo sapiens
  CDR3 for alpha chain variable domain of TCR clone 349677 (TRAV21, TRAJ24)
GLMTTDSWGKLQF

SEQ ID NO: 699354 - protein, 12 aa, Homo sapiens
  CDR3 for beta chain variable domain of TCR clone 349677 (TRBV11-2, TRBJ2-7)
CASSPPADGQYF

SEQ ID NO: 699355 - protein, 14 aa, Homo sapiens
  CDR3 for alpha chain variable domain of TCR clone 349678 (TRAV4, TRAJ6)
CLVGEAGGSDIPTF

SEQ ID NO: 699356 - protein, 16 aa, Homo sapiens
  CDR3 for beta chain variable domain of TCR clone 349678 (TRBV7-6, TRBJ2-1)
CASSLNEGPSYNEQFF

SEQ ID NO: 699357 - protein, 14 aa, Homo sapiens
  CDR3 for alpha chain variable domain of TCR clone 349679 (TRAV21, TRAJ45)
CAVSSGGGADGLTF

SEQ ID NO: 699358 - protein, 15 aa, Homo sapiens
  CDR3 for beta chain variable domain of TCR clone 349679 (TRBV7-2, TRBJ2-7)
CASSLKGALTYEQYF

SEQ ID NO: 699359 - protein, 16 aa, Homo sapiens
  CDR3 for alpha chain variable domain of TCR clone 349680 (TRAV14/DV4, TRAJ12)
CATREVLMDSSYKLIF

SEQ ID NO: 699360 - protein, 14 aa, Homo sapiens
  CDR3 for beta chain variable domain of TCR clone 349680 (TRBV7-2, TRBJ2-5)
CASSFTQGQETQYF

SEQ ID NO: 699361 - protein, 12 aa, Homo sapiens
  CDR3 for alpha chain variable domain of TCR clone 349681 (TRAV21, TRAJ13)
PGPSGGYQKVSF

SEQ ID NO: 699362 - protein, 15 aa, Homo sapiens
  CDR3 for beta chain variable domain of TCR clone 349681 (TRBV7-9, TRBJ1-6)
CASSSPGRGNSPLHF

SEQ ID NO: 699363 - protein, 13 aa, Homo sapiens
  CDR3 for alpha chain variable domain of TCR clone 349682 (TRAV29/DV5, TRAJ31)
CAASRNNNARLMF

SEQ ID NO: 699364 - protein, 14 aa, Homo sapiens
  CDR3 for beta chain variable domain of TCR clone 349682 (TRBV7-9, TRBJ2-2)
CASSLGQDTGELFF

SEQ ID NO: 699365 - protein, 15 aa, Homo sapiens
  CDR3 for alpha chain variable domain of TCR clone 349683 (TRAV8-4, TRAJ40)
CAVSADTSGTYKYIF

SEQ ID NO: 699366 - protein, 11 aa, Homo sapiens
  CDR3 for beta chain variable domain of TCR clone 349683 (TRBV19, TRBJ1-2)
CASSISSGYTF

SEQ ID NO: 699367 - protein, 18 aa, Homo sapiens
  CDR3 for alpha chain variable domain of TCR clone 349684 (TRAV12-1, TRAJ26)
SSVIQPPTSVPYGQNFVF

SEQ ID NO: 699368 - protein, 14 aa, Homo sapiens
  CDR3 for beta chain variable domain of TCR clone 349684 (TRBV5-4, TRBJ2-1)
CASSLDQGLDEQFF

SEQ ID NO: 699369 - protein, 16 aa, Homo sapiens
  CDR3 for alpha chain variable domain of TCR clone 349685 (TRAV17, TRAJ22)
CATGPISSGSARQLTF

SEQ ID NO: 699370 - protein, 13 aa, Homo sapiens
  CDR3 for beta chain variable domain of TCR clone 349685 (TRBV11-2, TRBJ2-1)
CANRLGLAGGRFF

SEQ ID NO: 699371 - protein, 15 aa, Homo sapiens
  CDR3 for alpha chain variable domain of TCR clone 349686 (TRAV13-2, TRAJ45)
YAEHHSGGGADGLTF

SEQ ID NO: 699372 - protein, 15 aa, Homo sapiens
  CDR3 for beta chain variable domain of TCR clone 349686 (TRBV7-2, TRBJ2-7)
CASSLARGSAYEQYF

SEQ ID NO: 699373 - protein, 13 aa, Homo sapiens
  CDR3 for alpha chain variable domain of TCR clone 349687 (TRAV39, TRAJ58)
CAGEETSGSRLTF

SEQ ID NO: 699374 - protein, 13 aa, Homo sapiens
  CDR3 for beta chain variable domain of TCR clone 349687 (TRBV15, TRBJ2-7)
CATSTTGHYEQNF

SEQ ID NO: 699375 - protein, 16 aa, Homo sapiens
  CDR3 for alpha chain variable domain of TCR clone 349688 (TRAV26-1, TRAJ23)
CIVRVHPYNQGGKLIF

SEQ ID NO: 699376 - protein, 15 aa, Homo sapiens
  CDR3 for beta chain variable domain of TCR clone 349688 (TRBV5-7, TRBJ2-7)
CASSPYFEGCYEQYF

SEQ ID NO: 699377 - protein, 14 aa, Homo sapiens
  CDR3 for alpha chain variable domain of TCR clone 349689 (TRAV35, TRAJ22)
CAVLSPGSARQLTF

SEQ ID NO: 699378 - protein, 15 aa, Homo sapiens
  CDR3 for beta chain variable domain of TCR clone 349689 (TRBV12-4, TRBJ2-5)
CASSPPTGLQETQYF

SEQ ID NO: 699379 - protein, 13 aa, Homo sapiens
  CDR3 for alpha chain variable domain of TCR clone 349690 (TRAV20, TRAJ31)
CAVQAWNNARLMF

SEQ ID NO: 699380 - protein, 13 aa, Homo sapiens
  CDR3 for beta chain variable domain of TCR clone 349690 (TRBV12-4, TRBJ1-2)
CASSLRQGKVYAF

SEQ ID NO: 699381 - protein, 14 aa, Homo sapiens
  CDR3 for alpha chain variable domain of TCR clone 349691 (TRAV38-2/DV8, TRAJ54)
AAMYQIQGAQKLVF

SEQ ID NO: 699382 - protein, 17 aa, Homo sapiens
  CDR3 for beta chain variable domain of TCR clone 349691 (TRBV6-1, TRBJ2-3)
CASSEALRLISTDTHYF

SEQ ID NO: 699383 - protein, 14 aa, Homo sapiens
  CDR3 for alpha chain variable domain of TCR clone 349692 (TRAV1-2, TRAJ16)
CAVNRFSDGQELLF

SEQ ID NO: 699384 - protein, 14 aa, Homo sapiens
  CDR3 for beta chain variable domain of TCR clone 349692 (TRBV19, TRBJ2-7)
CASSIFAGTYEQYF

SEQ ID NO: 699385 - protein, 11 aa, Homo sapiens
  CDR3 for alpha chain variable domain of TCR clone 349693 (TRAV4, TRAJ31)
CLMGLNARPMF

SEQ ID NO: 699386 - protein, 16 aa, Homo sapiens
  CDR3 for beta chain variable domain of TCR clone 349693 (TRBV15, TRBJ2-6)
CATSVNGGFLANVLTF

SEQ ID NO: 699387 - protein, 15 aa, Homo sapiens
  CDR3 for alpha chain variable domain of TCR clone 349694 (TRAV3, TRAJ5)
CAVRDLDPGRRSLTF

SEQ ID NO: 699388 - protein, 13 aa, Homo sapiens
  CDR3 for beta chain variable domain of TCR clone 349694 (TRBV12-4, TRBJ2-7)
CASSPTETYEQYF

SEQ ID NO: 699389 - protein, 13 aa, Homo sapiens
  CDR3 for alpha chain variable domain of TCR clone 349695 (TRAV16, TRAJ11)
CAFTQSGYSTLTF

SEQ ID NO: 699390 - protein, 14 aa, Homo sapiens
  CDR3 for beta chain variable domain of TCR clone 349695 (TRBV19, TRBJ2-7)
CASSTTRSSYEQYF

SEQ ID NO: 699391 - protein, 14 aa, Homo sapiens
  CDR3 for alpha chain variable domain of TCR clone 349696 (TRAV13-1, TRAJ35)
CAASKGGFGNVLHC

SEQ ID NO: 699392 - protein, 11 aa, Homo sapiens
  CDR3 for beta chain variable domain of TCR clone 349696 (TRBV10-3, TRBJ2-3)
CAISEADTQYF

SEQ ID NO: 699393 - protein, 16 aa, Homo sapiens
  CDR3 for alpha chain variable domain of TCR clone 349697 (TRAV12-2, TRAJ6)
CAAPLAGSGGSYLPTF

SEQ ID NO: 699394 - protein, 13 aa, Homo sapiens
  CDR3 for beta chain variable domain of TCR clone 349697 (TRBV6-9, TRBJ2-5)
CASKGDGRRTQYF

SEQ ID NO: 699395 - protein, 18 aa, Homo sapiens
  CDR3 for alpha chain variable domain of TCR clone 349698 (TRAV12-3, TRAJ52)
CAMSVGGAGGTSYGKLTF

SEQ ID NO: 699396 - protein, 15 aa, Homo sapiens
  CDR3 for beta chain variable domain of TCR clone 349698 (TRBV18, TRBJ2-2)
CASSPPVGFTGELFF

SEQ ID NO: 699397 - protein, 15 aa, Homo sapiens
  CDR3 for alpha chain variable domain of TCR clone 349699 (TRAV8-4, TRAJ11)
CAVSRALSGYSTLTF

SEQ ID NO: 699398 - protein, 12 aa, Homo sapiens
  CDR3 for beta chain variable domain of TCR clone 349699 (TRBV11-2, TRBJ2-2)
CASSLPTGELFF

SEQ ID NO: 699399 - protein, 13 aa, Homo sapiens
  CDR3 for alpha chain variable domain of TCR clone 349700 (TRAV30, TRAJ24)
CGRVTDSWGKLQF

SEQ ID NO: 699400 - protein, 15 aa, Homo sapiens
  CDR3 for beta chain variable domain of TCR clone 349700 (TRBV4-1, TRBJ2-1)
CASSQDPGNYNEQFF

SEQ ID NO: 699401 - protein, 14 aa, Homo sapiens
  CDR3 for alpha chain variable domain of TCR clone 349701 (TRAV23/DV6, TRAJ22)
CAASVPGSARQLTF

SEQ ID NO: 699402 - protein, 15 aa, Homo sapiens
  CDR3 for beta chain variable domain of TCR clone 349701 (TRBV7-2, TRBJ2-1)
CASSSGLAGGNEQFF

SEQ ID NO: 699403 - protein, 14 aa, Homo sapiens
  CDR3 for alpha chain variable domain of TCR clone 349702 (TRAV12-3, TRAJ10)
SHLPLTGGGNKLSF

SEQ ID NO: 699404 - protein, 16 aa, Homo sapiens
  CDR3 for beta chain variable domain of TCR clone 349702 (TRBV19, TRBJ2-1)
CASSKAGPSSYNEQFF

SEQ ID NO: 699405 - protein, 11 aa, Homo sapiens
  CDR3 for alpha chain variable domain of TCR clone 349703 (TRAV13-2, TRAJ20)
CADSNDYKLSF

SEQ ID NO: 699406 - protein, 14 aa, Homo sapiens
  CDR3 for beta chain variable domain of TCR clone 349703 (TRBV11-3, TRBJ1-5)
CASSLDRGRQPQHF

SEQ ID NO: 699407 - protein, 10 aa, Homo sapiens
  CDR3 for alpha chain variable domain of TCR clone 349704 (TRAV8-1, TRAJ43)
CAVNADDMRF

SEQ ID NO: 699408 - protein, 15 aa, Homo sapiens
  CDR3 for beta chain variable domain of TCR clone 349704 (TRBV11-3, TRBJ2-7)
CASSPGPASSYEQYF

SEQ ID NO: 699409 - protein, 14 aa, Homo sapiens
  CDR3 for alpha chain variable domain of TCR clone 349705 (TRAV26-1, TRAJ38)
CIADNAGNNRKLIW

SEQ ID NO: 699410 - protein, 14 aa, Homo sapiens
  CDR3 for beta chain variable domain of TCR clone 349705 (TRBV4-3, TRBJ2-7)
CASSQDVAGGEQYF

SEQ ID NO: 699411 - protein, 12 aa, Homo sapiens
  CDR3 for alpha chain variable domain of TCR clone 349706 (TRAV4, TRAJ26)
CLVGDYGQNFVF

SEQ ID NO: 699412 - protein, 12 aa, Homo sapiens
  CDR3 for beta chain variable domain of TCR clone 349706 (TRBV12-4, TRBJ2-7)
CASSLGGYEQYF

SEQ ID NO: 699413 - protein, 22 aa, Homo sapiens
  CDR3 for alpha chain variable domain of TCR clone 349707 (TRAV8-2, TRAJ45)
HLTKPSAHMSDAAEYSADGLTF

SEQ ID NO: 699414 - protein, 13 aa, Homo sapiens
  CDR3 for beta chain variable domain of TCR clone 349707 (TRBV7-3, TRBJ2-1)
CASSPVAYNKQFF

SEQ ID NO: 699415 - protein, 13 aa, Homo sapiens
  CDR3 for alpha chain variable domain of TCR clone 349708 (TRAV13-1, TRAJ21)
CAASVYNFNKFYF

SEQ ID NO: 699416 - protein, 20 aa, Homo sapiens
  CDR3 for beta chain variable domain of TCR clone 349708 (TRBV7-8, TRBJ2-2)
CASSHLFPGPTIHITGELFF

SEQ ID NO: 699417 - protein, 15 aa, Homo sapiens
  CDR3 for alpha chain variable domain of TCR clone 349709 (TRAV20, TRAJ52)
CAVQAGGTSYGKLTF

SEQ ID NO: 699418 - protein, 13 aa, Homo sapiens
  CDR3 for beta chain variable domain of TCR clone 349709 (TRBV6-1, TRBJ2-1)
CASTGTGLNEQFF

SEQ ID NO: 699419 - protein, 11 aa, Homo sapiens
  CDR3 for alpha chain variable domain of TCR clone 349710 (TRAV2, TRAJ13)
CASGGYQKVTF

SEQ ID NO: 699420 - protein, 16 aa, Homo sapiens
  CDR3 for beta chain variable domain of TCR clone 349710 (TRBV4-2, TRBJ1-2)
CASSQEIGGASYGYTF

SEQ ID NO: 699421 - protein, 14 aa, Homo sapiens
  CDR3 for alpha chain variable domain of TCR clone 349711 (TRAV13-1, TRAJ39)
CAASKNNAGNMLTF

SEQ ID NO: 699422 - protein, 15 aa, Homo sapiens
  CDR3 for beta chain variable domain of TCR clone 349711 (TRBV7-9, TRBJ1-6)
CASSSPGRGKSPLHF

SEQ ID NO: 699423 - protein, 16 aa, Homo sapiens
  CDR3 for alpha chain variable domain of TCR clone 349712 (TRAV26-1, TRAJ53)
CIVRVVMGGGNYKLTF

SEQ ID NO: 699424 - protein, 12 aa, Homo sapiens
  CDR3 for beta chain variable domain of TCR clone 349712 (TRBV7-9, TRBJ1-5)
CASSPQGQPQHF

SEQ ID NO: 699425 - protein, 14 aa, Homo sapiens
  CDR3 for alpha chain variable domain of TCR clone 349713 (TRAV20, TRAJ4)
CAVRLGGGYNKLIF

SEQ ID NO: 699426 - protein, 21 aa, Homo sapiens
  CDR3 for beta chain variable domain of TCR clone 349713 (TRBV15, TRBJ2-1)
AWGTQPCTCVPPAVVDTARFF

SEQ ID NO: 699427 - protein, 16 aa, Homo sapiens
  CDR3 for alpha chain variable domain of TCR clone 349714 (TRAV1-2, TRAJ16)
CAPPGFQMARICSLQG

SEQ ID NO: 699428 - protein, 14 aa, Homo sapiens
  CDR3 for beta chain variable domain of TCR clone 349714 (TRBV7-2, TRBJ2-7)
CASSPKTSFYEQYF

SEQ ID NO: 699429 - protein, 14 aa, Homo sapiens
  CDR3 for alpha chain variable domain of TCR clone 349715 (TRAV12-1, TRAJ27)
CVEHIRTNAGKSTF

SEQ ID NO: 699430 - protein, 15 aa, Homo sapiens
  CDR3 for beta chain variable domain of TCR clone 349715 (TRBV19, TRBJ1-1)
CASTSGQIQNTEAFF

SEQ ID NO: 699431 - protein, 15 aa, Homo sapiens
  CDR3 for alpha chain variable domain of TCR clone 349716 (TRAV2, TRAJ36)
CAVEDRGNWGKQPLF

SEQ ID NO: 699432 - protein, 14 aa, Homo sapiens
  CDR3 for beta chain variable domain of TCR clone 349716 (TRBV7-9, TRBJ2-5)
CASSLDTAQETQYF

SEQ ID NO: 699433 - protein, 14 aa, Homo sapiens
  CDR3 for alpha chain variable domain of TCR clone 349717 (TRAV13-1, TRAJ17)
CSKYRKGCRNKLTF

SEQ ID NO: 699434 - protein, 12 aa, Homo sapiens
  CDR3 for beta chain variable domain of TCR clone 349717 (TRBV5-7, TRBJ1-1)
CASSLGRGKAFF

SEQ ID NO: 699435 - protein, 16 aa, Homo sapiens
  CDR3 for alpha chain variable domain of TCR clone 349718 (TRAV23/DV6, TRAJ3)
CAARAPQQCFPDNLWI

SEQ ID NO: 699436 - protein, 17 aa, Homo sapiens
  CDR3 for beta chain variable domain of TCR clone 349718 (TRBV7-9, TRBJ2-3)
CASSPTVAGDLTDTQYF

SEQ ID NO: 699437 - protein, 14 aa, Homo sapiens
  CDR3 for alpha chain variable domain of TCR clone 349719 (TRAV13-1, TRAJ35)
CAASKGGFGNVLHC

SEQ ID NO: 699438 - protein, 13 aa, Homo sapiens
  CDR3 for beta chain variable domain of TCR clone 349719 (TRBV7-3, TRBJ1-1)
CASSQDWGVEAFF

SEQ ID NO: 699439 - protein, 16 aa, Homo sapiens
  CDR3 for alpha chain variable domain of TCR clone 349720 (TRAV13-1, TRAJ52)
CAAIMRGGTSYGKLTF

SEQ ID NO: 699440 - protein, 16 aa, Homo sapiens
  CDR3 for beta chain variable domain of TCR clone 349720 (TRBV7-8, TRBJ2-4)
CASSAERTLAKNMQYF

SEQ ID NO: 699441 - protein, 14 aa, Homo sapiens
  CDR3 for alpha chain variable domain of TCR clone 349721 (TRAV3, TRAJ7)
CAVREEEREQQTRF

SEQ ID NO: 699442 - protein, 14 aa, Homo sapiens
  CDR3 for beta chain variable domain of TCR clone 349721 (TRBV7-7, TRBJ2-2)
CASSTRGSGGELFF

SEQ ID NO: 699443 - protein, 14 aa, Homo sapiens
  CDR3 for alpha chain variable domain of TCR clone 349722 (TRAV21, TRAJ35)
CAVLPIGFGNVLHC

SEQ ID NO: 699444 - protein, 13 aa, Homo sapiens
  CDR3 for beta chain variable domain of TCR clone 349722 (TRBV23-1, TRBJ1-4)
CASRGKFNEKLFF

SEQ ID NO: 699445 - protein, 16 aa, Homo sapiens
  CDR3 for alpha chain variable domain of TCR clone 349723 (TRAV30, TRAJ24)
CGTEIVDADSWGKFQF

SEQ ID NO: 699446 - protein, 17 aa, Homo sapiens
  CDR3 for beta chain variable domain of TCR clone 349723 (TRBV4-1, TRBJ2-5)
CASSQDPSGGPQETQYF

SEQ ID NO: 699447 - protein, 11 aa, Homo sapiens
  CDR3 for alpha chain variable domain of TCR clone 349724 (TRAV2, TRAJ33)
CAVDSNYQLIW

SEQ ID NO: 699448 - protein, 15 aa, Homo sapiens
  CDR3 for beta chain variable domain of TCR clone 349724 (TRBV5-5, TRBJ1-2)
CASSPYGSSAEGYTF

SEQ ID NO: 699449 - protein, 18 aa, Homo sapiens
  CDR3 for alpha chain variable domain of TCR clone 349725 (TRAV13-1, TRAJ52)
CAAKNPNAGGTSYGKLTF

SEQ ID NO: 699450 - protein, 18 aa, Homo sapiens
  CDR3 for beta chain variable domain of TCR clone 349725 (TRBV4-1, TRBJ2-3)
CASSHQLAGGRSTDTQYF

SEQ ID NO: 699451 - protein, 14 aa, Homo sapiens
  CDR3 for alpha chain variable domain of TCR clone 349726 (TRAV17, TRAJ39)
CATDPERAGNMLTF

SEQ ID NO: 699452 - protein, 15 aa, Homo sapiens
  CDR3 for beta chain variable domain of TCR clone 349726 (TRBV13, TRBJ1-5)
CASSFGQGGVQPQHF

SEQ ID NO: 699453 - protein, 16 aa, Homo sapiens
  CDR3 for alpha chain variable domain of TCR clone 349727 (TRAV3, TRAJ37)
CAARGKGSGNTGKLIF

SEQ ID NO: 699454 - protein, 13 aa, Homo sapiens
  CDR3 for beta chain variable domain of TCR clone 349727 (TRBV7-3, TRBJ1-1)
CASSQDWGAEAFF

SEQ ID NO: 699455 - protein, 12 aa, Homo sapiens
  CDR3 for alpha chain variable domain of TCR clone 349728 (TRAV12-1, TRAJ40)
CVEYSGTYKYIF

SEQ ID NO: 699456 - protein, 17 aa, Homo sapiens
  CDR3 for beta chain variable domain of TCR clone 349728 (TRBV11-3, TRBJ1-5)
CASSPLTGLRGNQPQHF

SEQ ID NO: 699457 - protein, 16 aa, Homo sapiens
  CDR3 for alpha chain variable domain of TCR clone 349729 (TRAV3, TRAJ37)
CAVRGKGSGNTGKLIF

SEQ ID NO: 699458 - protein, 15 aa, Homo sapiens
  CDR3 for beta chain variable domain of TCR clone 349729 (TRBV10-1, TRBJ2-1)
CASSTGTELYNEQFF

SEQ ID NO: 699459 - protein, 18 aa, Homo sapiens
  CDR3 for alpha chain variable domain of TCR clone 349730 (TRAV21, TRAJ52)
CAVRPSLAGGTSYGKLTF

SEQ ID NO: 699460 - protein, 15 aa, Homo sapiens
  CDR3 for beta chain variable domain of TCR clone 349730 (TRBV7-9, TRBJ2-7)
CASSSSGLAVYEQYF

SEQ ID NO: 699461 - protein, 17 aa, Homo sapiens
  CDR3 for alpha chain variable domain of TCR clone 349731 (TRAV3, TRAJ42)
CAVRDRDYGGSQGNLLF

SEQ ID NO: 699462 - protein, 15 aa, Homo sapiens
  CDR3 for beta chain variable domain of TCR clone 349731 (TRBV6-6, TRBJ2-7)
CASSYSYGGSYEQHF

SEQ ID NO: 699463 - protein, 15 aa, Homo sapiens
  CDR3 for alpha chain variable domain of TCR clone 349732 (TRAV3, TRAJ3)
CAVRDRRSSASKIIF

SEQ ID NO: 699464 - protein, 13 aa, Homo sapiens
  CDR3 for beta chain variable domain of TCR clone 349732 (TRBV9, TRBJ2-5)
CASSPAGLGTQYV

SEQ ID NO: 699465 - protein, 11 aa, Homo sapiens
  CDR3 for alpha chain variable domain of TCR clone 349733 (TRAV3, TRAJ21)
CAVGNFNKFYF

SEQ ID NO: 699466 - protein, 14 aa, Homo sapiens
  CDR3 for beta chain variable domain of TCR clone 349733 (TRBV7-9, TRBJ2-5)
CASSPAQDQETQYF

SEQ ID NO: 699467 - protein, 14 aa, Homo sapiens
  CDR3 for alpha chain variable domain of TCR clone 349734 (TRAV23/DV6, TRAJ23)
CAASRRGQGGKLIF

SEQ ID NO: 699468 - protein, 17 aa, Homo sapiens
  CDR3 for beta chain variable domain of TCR clone 349734 (TRBV7-2, TRBJ2-2)
CASSPRGAGEGTGELFF

SEQ ID NO: 699469 - protein, 14 aa, Homo sapiens
  CDR3 for alpha chain variable domain of TCR clone 349735 (TRAV3, TRAJ21)
CAVESQANFNKFYF

SEQ ID NO: 699470 - protein, 18 aa, Homo sapiens
  CDR3 for beta chain variable domain of TCR clone 349735 (TRBV7-9, TRBJ2-7)
CASSLAVSGTSGRNEQFF

SEQ ID NO: 699471 - protein, 11 aa, Homo sapiens
  CDR3 for alpha chain variable domain of TCR clone 349736 (TRAV12-3, TRAJ43)
CAMSVSNDMRF

SEQ ID NO: 699472 - protein, 14 aa, Homo sapiens
  CDR3 for beta chain variable domain of TCR clone 349736 (TRBV12-5, TRBJ2-5)
CASGSRTQQETQYF

SEQ ID NO: 699473 - protein, 14 aa, Homo sapiens
  CDR3 for alpha chain variable domain of TCR clone 349737 (TRAV1-2, TRAJ8)
CAVREDTGLQKLVF

SEQ ID NO: 699474 - protein, 14 aa, Homo sapiens
  CDR3 for beta chain variable domain of TCR clone 349737 (TRBV28, TRBJ2-1)
CASSFDSVSDEQFF
